United States Patent Application Publication US 2025/0333767 A1 - sequence listing, part 2

SEQ ID NO: 10925 - DNA, 89 bp, synthetic construct
  misc_feature 1..89: note = engineered ribonucleic acid scaffold (ERS) sequence
  source 1..89: mol_type = other DNA
actggcgcttctaactgattactctgagcgccatcaccaggcactatgtgctattgggtaaagctccctcttcggagggagcatcagag

SEQ ID NO: 10926 - DNA, 89 bp, synthetic construct
  misc_feature 1..89: note = engineered ribonucleic acid scaffold (ERS) sequence
  source 1..89: mol_type = other DNA
actggcgcttctacctgattactctgagcgccatcaccaggcactatgtgctattgggtaaagctccctcttcggagggagcatcagag

SEQ ID NO: 10927 - DNA, 89 bp, synthetic construct
  misc_feature 1..89: note = engineered ribonucleic acid scaffold (ERS) sequence
  source 1..89: mol_type = other DNA
actggcgcttctagctgattactctgagcgccatcaccaggcactatgtgctattgggtaaagctccctcttcggagggagcatcagag

SEQ ID NO: 10928 - DNA, 91 bp, synthetic construct
  misc_feature 1..91: note = engineered ribonucleic acid scaffold (ERS) sequence
  source 1..91: mol_type = other DNA
actggcgcttctattactgattactctgagcgccatcaccaggcactatgtgctattgggtaaagctccctcttcggagggagcatcagag

SEQ ID NO: 10929 - DNA, 89 bp, synthetic construct
  misc_feature 1..89: note = engineered ribonucleic acid scaffold (ERS) sequence
  source 1..89: mol_type = other DNA
actggcgcttctatatgattactctgagcgccatcaccaggcactatgtgctattgggtaaagctccctcttcggagggagcatcagag

SEQ ID NO: 10930 - DNA, 89 bp, synthetic construct
  misc_feature 1..89: note = engineered ribonucleic acid scaffold (ERS) sequence
  source 1..89: mol_type = other DNA
actggcgcttctatgtgattactctgagcgccatcaccaggcactatgtgctattgggtaaagctccctcttcggagggagcatcagag

SEQ ID NO: 10931 - DNA, 89 bp, synthetic construct
  misc_feature 1..89: note = engineered ribonucleic acid scaffold (ERS) sequence
  source 1..89: mol_type = other DNA
actggcgcttctatttgattactctgagcgccatcaccaggcactatgtgctattgggtaaagctccctcttcggagggagcatcagag

SEQ ID NO: 10932 - DNA, 90 bp, synthetic construct
  misc_feature 1..90: note = engineered ribonucleic acid scaffold (ERS) sequence
  source 1..90: mol_type = other DNA
actggcgcttctatcttgattactctgagcgccatcaccaggcactatgtgctattgggtaaagctccctcttcggagggagcatcagag

SEQ ID NO: 10933 - DNA, 89 bp, synthetic construct
  misc_feature 1..89: note = engineered ribonucleic acid scaffold (ERS) sequence
  source 1..89: mol_type = other DNA
actggcgcttctatcagattactctgagcgccatcaccaggcactatgtgctattgggtaaagctccctcttcggagggagcatcagag

SEQ ID NO: 10934 - DNA, 89 bp, synthetic construct
  misc_feature 1..89: note = engineered ribonucleic acid scaffold (ERS) sequence
  source 1..89: mol_type = other DNA
actggcgcttctatcggattactctgagcgccatcaccaggcactatgtgctattgggtaaagctccctcttcggagggagcatcagag

SEQ ID NO: 10935 - DNA, 90 bp, synthetic construct
  misc_feature 1..90: note = engineered ribonucleic acid scaffold (ERS) sequence
  source 1..90: mol_type = other DNA
actggcgcttctatctgaattactctgagcgccatcaccaggcactatgtgctattgggtaaagctccctcttcggagggagcatcagag

SEQ ID NO: 10936 - DNA, 90 bp, synthetic construct
  misc_feature 1..90: note = engineered ribonucleic acid scaffold (ERS) sequence
  source 1..90: mol_type = other DNA
actggcgcttctatctgtattactctgagcgccatcaccaggcactatgtgctattgggtaaagctccctcttcggagggagcatcagag

SEQ ID NO: 10937 - DNA, 89 bp, synthetic construct
  misc_feature 1..89: note = engineered ribonucleic acid scaffold (ERS) sequence
  source 1..89: mol_type = other DNA
actggcgcttctatctggttactctgagcgccatcaccaggcactatgtgctattgggtaaagctccctcttcggagggagcatcagag

SEQ ID NO: 10938 - DNA, 89 bp, synthetic construct
  misc_feature 1..89: note = engineered ribonucleic acid scaffold (ERS) sequence
  source 1..89: mol_type = other DNA
actggcgcttctatctgtttactctgagcgccatcaccaggcactatgtgctattgggtaaagctccctcttcggagggagcatcagag

SEQ ID NO: 10939 - DNA, 90 bp, synthetic construct
  misc_feature 1..90: note = engineered ribonucleic acid scaffold (ERS) sequence
  source 1..90: mol_type = other DNA
actggcgcttctatctgatttactctgagcgccatcaccaggcactatgtgctattgggtaaagctccctcttcggagggagcatcagag

SEQ ID NO: 10940 - DNA, 89 bp, synthetic construct
  misc_feature 1..89: note = engineered ribonucleic acid scaffold (ERS) sequence
  source 1..89: mol_type = other DNA
actggcgcttctatctgattgctctgagcgccatcaccaggcactatgtgctattgggtaaagctccctcttcggagggagcatcagag

SEQ ID NO: 10941 - DNA, 90 bp, synthetic construct
  misc_feature 1..90: note = engineered ribonucleic acid scaffold (ERS) sequence
  source 1..90: mol_type = other DNA
actggcgcttctatatctgattactctgagcgccatcaccagccactatgtggtatgggtaaagctccctcttcggagggagcatcagag

SEQ ID NO: 10942 - DNA, 89 bp, synthetic construct
  misc_feature 1..89: note = engineered ribonucleic acid scaffold (ERS) sequence
  source 1..89: mol_type = other DNA
actggcgcttctaatctgattactctgagcgccatcaccagccactatgtggtatgggtaaagctccctcttcggagggagcatcagag

SEQ ID NO: 10943 - DNA, 87 bp, synthetic construct
  misc_feature 1..87: note = engineered ribonucleic acid scaffold (ERS) sequence
  source 1..87: mol_type = other DNA
actggcgcttctactgattactctgagcgccatcaccagccactatgtggtatgggtaaagctccctcttcggagggagcatcagag

SEQ ID NO: 10944 - DNA, 88 bp, synthetic construct
  misc_feature 1..88: note = engineered ribonucleic acid scaffold (ERS) sequence
  source 1..88: mol_type = other DNA
actggcgcttctaactgattactctgagcgccatcaccagccactatgtggtatgggtaaagctccctcttcggagggagcatcagag

SEQ ID NO: 10945 - DNA, 88 bp, synthetic construct
  misc_feature 1..88: note = engineered ribonucleic acid scaffold (ERS) sequence
  source 1..88: mol_type = other DNA
actggcgcttctacctgattactctgagcgccatcaccagccactatgtggtatgggtaaagctccctcttcggagggagcatcagag

SEQ ID NO: 10946 - DNA, 88 bp, synthetic construct
  misc_feature 1..88: note = engineered ribonucleic acid scaffold (ERS) sequence
  source 1..88: mol_type = other DNA
actggcgcttctagctgattactctgagcgccatcaccagccactatgtggtatgggtaaagctccctcttcggagggagcatcagag

SEQ ID NO: 10947 - DNA, 90 bp, synthetic construct
  misc_feature 1..90: note = engineered ribonucleic acid scaffold (ERS) sequence
  source 1..90: mol_type = other DNA
actggcgcttctattactgattactctgagcgccatcaccagccactatgtggtatgggtaaagctccctcttcggagggagcatcagag

SEQ ID NO: 10948 - DNA, 88 bp, synthetic construct
  misc_feature 1..88: note = engineered ribonucleic acid scaffold (ERS) sequence
  source 1..88: mol_type = other DNA
actggcgcttctatatgattactctgagcgccatcaccagccactatgtggtatgggtaaagctccctcttcggagggagcatcagag

SEQ ID NO: 10949 - DNA, 88 bp, synthetic construct
  misc_feature 1..88: note = engineered ribonucleic acid scaffold (ERS) sequence
  source 1..88: mol_type = other DNA
actggcgcttctatgtgattactctgagcgccatcaccagccactatgtggtatgggtaaagctccctcttcggagggagcatcagag

SEQ ID NO: 10950 - DNA, 88 bp, synthetic construct
  misc_feature 1..88: note = engineered ribonucleic acid scaffold (ERS) sequence
  source 1..88: mol_type = other DNA
actggcgcttctatttgattactctgagcgccatcaccagccactatgtggtatgggtaaagctccctcttcggagggagcatcagag

SEQ ID NO: 10951 - DNA, 89 bp, synthetic construct
  misc_feature 1..89: note = engineered ribonucleic acid scaffold (ERS) sequence
  source 1..89: mol_type = other DNA
actggcgcttctatcttgattactctgagcgccatcaccagccactatgtggtatgggtaaagctccctcttcggagggagcatcagag

SEQ ID NO: 10952 - DNA, 88 bp, synthetic construct
  misc_feature 1..88: note = engineered ribonucleic acid scaffold (ERS) sequence
  source 1..88: mol_type = other DNA
actggcgcttctatcagattactctgagcgccatcaccagccactatgtggtatgggtaaagctccctcttcggagggagcatcagag

SEQ ID NO: 10953 - DNA, 88 bp, synthetic construct
  misc_feature 1..88: note = engineered ribonucleic acid scaffold (ERS) sequence
  source 1..88: mol_type = other DNA
actggcgcttctatcggattactctgagcgccatcaccagccactatgtggtatgggtaaagctccctcttcggagggagcatcagag

SEQ ID NO: 10954 - DNA, 89 bp, synthetic construct
  misc_feature 1..89: note = engineered ribonucleic acid scaffold (ERS) sequence
  source 1..89: mol_type = other DNA
actggcgcttctatctgaattactctgagcgccatcaccagccactatgtggtatgggtaaagctccctcttcggagggagcatcagag

SEQ ID NO: 10955 - DNA, 89 bp, synthetic construct
  misc_feature 1..89: note = engineered ribonucleic acid scaffold (ERS) sequence
  source 1..89: mol_type = other DNA
actggcgcttctatctgtattactctgagcgccatcaccagccactatgtggtatgggtaaagctccctcttcggagggagcatcagag

SEQ ID NO: 10956 - DNA, 88 bp, synthetic construct
  misc_feature 1..88: note = engineered ribonucleic acid scaffold (ERS) sequence
  source 1..88: mol_type = other DNA
actggcgcttctatctggttactctgagcgccatcaccagccactatgtggtatgggtaaagctccctcttcggagggagcatcagag

SEQ ID NO: 10957 - DNA, 88 bp, synthetic construct
  misc_feature 1..88: note = engineered ribonucleic acid scaffold (ERS) sequence
  source 1..88: mol_type = other DNA
actggcgcttctatctgtttactctgagcgccatcaccagccactatgtggtatgggtaaagctccctcttcggagggagcatcagag

SEQ ID NO: 10958 - DNA, 89 bp, synthetic construct
  misc_feature 1..89: note = engineered ribonucleic acid scaffold (ERS) sequence
  source 1..89: mol_type = other DNA
actggcgcttctatctgatttactctgagcgccatcaccagccactatgtggtatgggtaaagctccctcttcggagggagcatcagag

SEQ ID NO: 10959 - DNA, 88 bp, synthetic construct
  misc_feature 1..88: note = engineered ribonucleic acid scaffold (ERS) sequence
  source 1..88: mol_type = other DNA
actggcgcttctatctgattgctctgagcgccatcaccagccactatgtggtatgggtaaagctccctcttcggagggagcatcagag

SEQ ID NO: 10960 - DNA, 90 bp, synthetic construct
  misc_feature 1..90: note = engineered ribonucleic acid scaffold (ERS) sequence
  source 1..90: mol_type = other DNA
actggcgcttctatatctgattactctgagcgccatcaccagctactatgtagtatgggtaaagctccctcttcggagggagcatcagag

SEQ ID NO: 10961 - DNA, 89 bp, synthetic construct
  misc_feature 1..89: note = engineered ribonucleic acid scaffold (ERS) sequence
  source 1..89: mol_type = other DNA
actggcgcttctaatctgattactctgagcgccatcaccagctactatgtagtatgggtaaagctccctcttcggagggagcatcagag

SEQ ID NO: 10962 - DNA, 87 bp, synthetic construct
  misc_feature 1..87: note = engineered ribonucleic acid scaffold (ERS) sequence
  source 1..87: mol_type = other DNA
actggcgcttctactgattactctgagcgccatcaccagctactatgtagtatgggtaaagctccctcttcggagggagcatcagag

SEQ ID NO: 10963 - DNA, 88 bp, synthetic construct
  misc_feature 1..88: note = engineered ribonucleic acid scaffold (ERS) sequence
  source 1..88: mol_type = other DNA
actggcgcttctaactgattactctgagcgccatcaccagctactatgtagtatgggtaaagctccctcttcggagggagcatcagag

SEQ ID NO: 10964 - DNA, 88 bp, synthetic construct
  misc_feature 1..88: note = engineered ribonucleic acid scaffold (ERS) sequence
  source 1..88: mol_type = other DNA
actggcgcttctacctgattactctgagcgccatcaccagctactatgtagtatgggtaaagctccctcttcggagggagcatcagag

SEQ ID NO: 10965 - DNA, 88 bp, synthetic construct
  misc_feature 1..88: note = engineered ribonucleic acid scaffold (ERS) sequence
  source 1..88: mol_type = other DNA
actggcgcttctagctgattactctgagcgccatcaccagctactatgtagtatgggtaaagctccctcttcggagggagcatcagag

SEQ ID NO: 10966 - DNA, 90 bp, synthetic construct
  misc_feature 1..90: note = engineered ribonucleic acid scaffold (ERS) sequence
  source 1..90: mol_type = other DNA
actggcgcttctattactgattactctgagcgccatcaccagctactatgtagtatgggtaaagctccctcttcggagggagcatcagag

SEQ ID NO: 10967 - DNA, 88 bp, synthetic construct
  misc_feature 1..88: note = engineered ribonucleic acid scaffold (ERS) sequence
  source 1..88: mol_type = other DNA
actggcgcttctatatgattactctgagcgccatcaccagctactatgtagtatgggtaaagctccctcttcggagggagcatcagag

SEQ ID NO: 10968 - DNA, 88 bp, synthetic construct
  misc_feature 1..88: note = engineered ribonucleic acid scaffold (ERS) sequence
  source 1..88: mol_type = other DNA
actggcgcttctatgtgattactctgagcgccatcaccagctactatgtagtatgggtaaagctccctcttcggagggagcatcagag

SEQ ID NO: 10969 - DNA, 88 bp, synthetic construct
  misc_feature 1..88: note = engineered ribonucleic acid scaffold (ERS) sequence
  source 1..88: mol_type = other DNA
actggcgcttctatttgattactctgagcgccatcaccagctactatgtagtatgggtaaagctccctcttcggagggagcatcagag

SEQ ID NO: 10970 - DNA, 89 bp, synthetic construct
  misc_feature 1..89: note = engineered ribonucleic acid scaffold (ERS) sequence
  source 1..89: mol_type = other DNA
actggcgcttctatcttgattactctgagcgccatcaccagctactatgtagtatgggtaaagctccctcttcggagggagcatcagag

SEQ ID NO: 10971 - DNA, 88 bp, synthetic construct
  misc_feature 1..88: note = engineered ribonucleic acid scaffold (ERS) sequence
  source 1..88: mol_type = other DNA
actggcgcttctatcagattactctgagcgccatcaccagctactatgtagtatgggtaaagctccctcttcggagggagcatcagag

SEQ ID NO: 10972 - DNA, 88 bp, synthetic construct
  misc_feature 1..88: note = engineered ribonucleic acid scaffold (ERS) sequence
  source 1..88: mol_type = other DNA
actggcgcttctatcggattactctgagcgccatcaccagctactatgtagtatgggtaaagctccctcttcggagggagcatcagag

SEQ ID NO: 10973 - DNA, 89 bp, synthetic construct
  misc_feature 1..89: note = engineered ribonucleic acid scaffold (ERS) sequence
  source 1..89: mol_type = other DNA
actggcgcttctatctgaattactctgagcgccatcaccagctactatgtagtatgggtaaagctccctcttcggagggagcatcagag

SEQ ID NO: 10974 - DNA, 89 bp, synthetic construct
  misc_feature 1..89: note = engineered ribonucleic acid scaffold (ERS) sequence
  source 1..89: mol_type = other DNA
actggcgcttctatctgtattactctgagcgccatcaccagctactatgtagtatgggtaaagctccctcttcggagggagcatcagag

SEQ ID NO: 10975 - DNA, 88 bp, synthetic construct
  misc_feature 1..88: note = engineered ribonucleic acid scaffold (ERS) sequence
  source 1..88: mol_type = other DNA
actggcgcttctatctggttactctgagcgccatcaccagctactatgtagtatgggtaaagctccctcttcggagggagcatcagag

SEQ ID NO: 10976 - DNA, 88 bp, synthetic construct
  misc_feature 1..88: note = engineered ribonucleic acid scaffold (ERS) sequence
  source 1..88: mol_type = other DNA
actggcgcttctatctgtttactctgagcgccatcaccagctactatgtagtatgggtaaagctccctcttcggagggagcatcagag

SEQ ID NO: 10977 - DNA, 89 bp, synthetic construct
  misc_feature 1..89: note = engineered ribonucleic acid scaffold (ERS) sequence
  source 1..89: mol_type = other DNA
actggcgcttctatctgatttactctgagcgccatcaccagctactatgtagtatgggtaaagctccctcttcggagggagcatcagag

SEQ ID NO: 10978 - DNA, 88 bp, synthetic construct
  misc_feature 1..88: note = engineered ribonucleic acid scaffold (ERS) sequence
  source 1..88: mol_type = other DNA
actggcgcttctatctgattgctctgagcgccatcaccagctactatgtagtatgggtaaagctccctcttcggagggagcatcagag

SEQ ID NO: 10979 - DNA, 90 bp, synthetic construct
  misc_feature 1..90: note = engineered ribonucleic acid scaffold (ERS) sequence
  source 1..90: mol_type = other DNA
actggcgcttctatatctgattactctgagcgccatcaccagcgattatgtcgtatgggtaaagctccctcttcggagggagcatcagag

SEQ ID NO: 10980 - DNA, 89 bp, synthetic construct
  misc_feature 1..89: note = engineered ribonucleic acid scaffold (ERS) sequence
  source 1..89: mol_type = other DNA
actggcgcttctaatctgattactctgagcgccatcaccagcgattatgtcgtatgggtaaagctccctcttcggagggagcatcagag

SEQ ID NO: 10981 - DNA, 87 bp, synthetic construct
  misc_feature 1..87: note = engineered ribonucleic acid scaffold (ERS) sequence
  source 1..87: mol_type = other DNA
actggcgcttctactgattactctgagcgccatcaccagcgattatgtcgtatgggtaaagctccctcttcggagggagcatcagag

SEQ ID NO: 10982 - DNA, 88 bp, synthetic construct
  misc_feature 1..88: note = engineered ribonucleic acid scaffold (ERS) sequence
  source 1..88: mol_type = other DNA
actggcgcttctaactgattactctgagcgccatcaccagcgattatgtcgtatgggtaaagctccctcttcggagggagcatcagag

SEQ ID NO: 10983 - DNA, 88 bp, synthetic construct
  misc_feature 1..88: note = engineered ribonucleic acid scaffold (ERS) sequence
  source 1..88: mol_type = other DNA
actggcgcttctacctgattactctgagcgccatcaccagcgattatgtcgtatgggtaaagctccctcttcggagggagcatcagag

SEQ ID NO: 10984 - DNA, 88 bp, synthetic construct
  misc_feature 1..88: note = engineered ribonucleic acid scaffold (ERS) sequence
  source 1..88: mol_type = other DNA
actggcgcttctagctgattactctgagcgccatcaccagcgattatgtcgtatgggtaaagctccctcttcggagggagcatcagag

SEQ ID NO: 10985 - DNA, 90 bp, synthetic construct
  misc_feature 1..90: note = engineered ribonucleic acid scaffold (ERS) sequence
  source 1..90: mol_type = other DNA
actggcgcttctattactgattactctgagcgccatcaccagcgattatgtcgtatgggtaaagctccctcttcggagggagcatcagag

SEQ ID NO: 10986 - DNA, 88 bp, synthetic construct
  misc_feature 1..88: note = engineered ribonucleic acid scaffold (ERS) sequence
  source 1..88: mol_type = other DNA
actggcgcttctatatgattactctgagcgccatcaccagcgattatgtcgtatgggtaaagctccctcttcggagggagcatcagag

SEQ ID NO: 10987 - DNA, 88 bp, synthetic construct
  misc_feature 1..88: note = engineered ribonucleic acid scaffold (ERS) sequence
  source 1..88: mol_type = other DNA
actggcgcttctatgtgattactctgagcgccatcaccagcgattatgtcgtatgggtaaagctccctcttcggagggagcatcagag

SEQ ID NO: 10988 - DNA, 88 bp, synthetic construct
  misc_feature 1..88: note = engineered ribonucleic acid scaffold (ERS) sequence
  source 1..88: mol_type = other DNA
actggcgcttctatttgattactctgagcgccatcaccagcgattatgtcgtatgggtaaagctccctcttcggagggagcatcagag

SEQ ID NO: 10989 - DNA, 89 bp, synthetic construct
  misc_feature 1..89: note = engineered ribonucleic acid scaffold (ERS) sequence
  source 1..89: mol_type = other DNA
actggcgcttctatcttgattactctgagcgccatcaccagcgattatgtcgtatgggtaaagctccctcttcggagggagcatcagag

SEQ ID NO: 10990 - DNA, 88 bp, synthetic construct
  misc_feature 1..88: note = engineered ribonucleic acid scaffold (ERS) sequence
  source 1..88: mol_type = other DNA
actggcgcttctatcagattactctgagcgccatcaccagcgattatgtcgtatgggtaaagctccctcttcggagggagcatcagag

SEQ ID NO: 10991 - DNA, 88 bp, synthetic construct
  misc_feature 1..88: note = engineered ribonucleic acid scaffold (ERS) sequence
  source 1..88: mol_type = other DNA
actggcgcttctatcggattactctgagcgccatcaccagcgattatgtcgtatgggtaaagctccctcttcggagggagcatcagag

SEQ ID NO: 10992 - DNA, 89 bp, synthetic construct
  misc_feature 1..89: note = engineered ribonucleic acid scaffold (ERS) sequence
  source 1..89: mol_type = other DNA
actggcgcttctatctgaattactctgagcgccatcaccagcgattatgtcgtatgggtaaagctccctcttcggagggagcatcagag

SEQ ID NO: 10993 - DNA, 89 bp, synthetic construct
  misc_feature 1..89: note = engineered ribonucleic acid scaffold (ERS) sequence
  source 1..89: mol_type = other DNA
actggcgcttctatctgtattactctgagcgccatcaccagcgattatgtcgtatgggtaaagctccctcttcggagggagcatcagag

SEQ ID NO: 10994 - DNA, 88 bp, synthetic construct
  misc_feature 1..88: note = engineered ribonucleic acid scaffold (ERS) sequence
  source 1..88: mol_type = other DNA
actggcgcttctatctggttactctgagcgccatcaccagcgattatgtcgtatgggtaaagctccctcttcggagggagcatcagag

SEQ ID NO: 10995 - DNA, 88 bp, synthetic construct
  misc_feature 1..88: note = engineered ribonucleic acid scaffold (ERS) sequence
  source 1..88: mol_type = other DNA
actggcgcttctatctgtttactctgagcgccatcaccagcgattatgtcgtatgggtaaagctccctcttcggagggagcatcagag

SEQ ID NO: 10996 - DNA, 89 bp, synthetic construct
  misc_feature 1..89: note = engineered ribonucleic acid scaffold (ERS) sequence
  source 1..89: mol_type = other DNA
actggcgcttctatctgatttactctgagcgccatcaccagcgattatgtcgtatgggtaaagctccctcttcggagggagcatcagag

SEQ ID NO: 10997 - DNA, 88 bp, synthetic construct
  misc_feature 1..88: note = engineered ribonucleic acid scaffold (ERS) sequence
  source 1..88: mol_type = other DNA
actggcgcttctatctgattgctctgagcgccatcaccagcgattatgtcgtatgggtaaagctccctcttcggagggagcatcagag

SEQ ID NO: 10998 - DNA, 90 bp, synthetic construct
  misc_feature 1..90: note = engineered ribonucleic acid scaffold (ERS) sequence
  source 1..90: mol_type = other DNA
actggcgcttctatatctgattactctgagcgccatcaccagcgacgatgtcgtatgggtaaagctccctcttcggagggagcatcagag

SEQ ID NO: 10999 - DNA, 89 bp, synthetic construct
  misc_feature 1..89: note = engineered ribonucleic acid scaffold (ERS) sequence
  source 1..89: mol_type = other DNA
actggcgcttctaatctgattactctgagcgccatcaccagcgacgatgtcgtatgggtaaagctccctcttcggagggagcatcagag

SEQ ID NO: 11000 - DNA, 87 bp, synthetic construct
  misc_feature 1..87: note = engineered ribonucleic acid scaffold (ERS) sequence
  source 1..87: mol_type = other DNA
actggcgcttctactgattactctgagcgccatcaccagcgacgatgtcgtatgggtaaagctccctcttcggagggagcatcagag

SEQ ID NO: 11001 - DNA, 88 bp, synthetic construct
  misc_feature 1..88: note = engineered ribonucleic acid scaffold (ERS) sequence
  source 1..88: mol_type = other DNA
actggcgcttctaactgattactctgagcgccatcaccagcgacgatgtcgtatgggtaaagctccctcttcggagggagcatcagag

SEQ ID NO: 11002 - DNA, 88 bp, synthetic construct
  misc_feature 1..88: note = engineered ribonucleic acid scaffold (ERS) sequence
  source 1..88: mol_type = other DNA
actggcgcttctacctgattactctgagcgccatcaccagcgacgatgtcgtatgggtaaagctccctcttcggagggagcatcagag

SEQ ID NO: 11003 - DNA, 88 bp, synthetic construct
  misc_feature 1..88: note = engineered ribonucleic acid scaffold (ERS) sequence
  source 1..88: mol_type = other DNA
actggcgcttctagctgattactctgagcgccatcaccagcgacgatgtcgtatgggtaaagctccctcttcggagggagcatcagag

SEQ ID NO: 11004 - DNA, 90 bp, synthetic construct
  misc_feature 1..90: note = engineered ribonucleic acid scaffold (ERS) sequence
  source 1..90: mol_type = other DNA
actggcgcttctattactgattactctgagcgccatcaccagcgacgatgtcgtatgggtaaagctccctcttcggagggagcatcagag

SEQ ID NO: 11005 - DNA, 88 bp, synthetic construct
  misc_feature 1..88: note = engineered ribonucleic acid scaffold (ERS) sequence
  source 1..88: mol_type = other DNA
actggcgcttctatatgattactctgagcgccatcaccagcgacgatgtcgtatgggtaaagctccctcttcggagggagcatcagag

SEQ ID NO: 11006 - DNA, 88 bp, synthetic construct
  misc_feature 1..88: note = engineered ribonucleic acid scaffold (ERS) sequence
  source 1..88: mol_type = other DNA
actggcgcttctatgtgattactctgagcgccatcaccagcgacgatgtcgtatgggtaaagctccctcttcggagggagcatcagag

SEQ ID NO: 11007 - DNA, 88 bp, synthetic construct
  misc_feature 1..88: note = engineered ribonucleic acid scaffold (ERS) sequence
  source 1..88: mol_type = other DNA
actggcgcttctatttgattactctgagcgccatcaccagcgacgatgtcgtatgggtaaagctccctcttcggagggagcatcagag

SEQ ID NO: 11008 - DNA, 89 bp, synthetic construct
  misc_feature 1..89: note = engineered ribonucleic acid scaffold (ERS) sequence
  source 1..89: mol_type = other DNA
actggcgcttctatcttgattactctgagcgccatcaccagcgacgatgtcgtatgggtaaagctccctcttcggagggagcatcagag

SEQ ID NO: 11009 - DNA, 88 bp, synthetic construct
  misc_feature 1..88: note = engineered ribonucleic acid scaffold (ERS) sequence
  source 1..88: mol_type = other DNA
actggcgcttctatcagattactctgagcgccatcaccagcgacgatgtcgtatgggtaaagctccctcttcggagggagcatcagag

SEQ ID NO: 11010 - DNA, 88 bp, synthetic construct
  misc_feature 1..88: note = engineered ribonucleic acid scaffold (ERS) sequence
  source 1..88: mol_type = other DNA
actggcgcttctatcggattactctgagcgccatcaccagcgacgatgtcgtatgggtaaagctccctcttcggagggagcatcagag

SEQ ID NO: 11011 - DNA, 89 bp, synthetic construct
  misc_feature 1..89: note = engineered ribonucleic acid scaffold (ERS) sequence
  source 1..89: mol_type = other DNA
actggcgcttctatctgaattactctgagcgccatcaccagcgacgatgtcgtatgggtaaagctccctcttcggagggagcatcagag

SEQ ID NO: 11012 - DNA, 89 bp, synthetic construct
  misc_feature 1..89: note = engineered ribonucleic acid scaffold (ERS) sequence
  source 1..89: mol_type = other DNA
actggcgcttctatctgtattactctgagcgccatcaccagcgacgatgtcgtatgggtaaagctccctcttcggagggagcatcagag

SEQ ID NO: 11013 - DNA, 88 bp, synthetic construct
  misc_feature 1..88: note = engineered ribonucleic acid scaffold (ERS) sequence
  source 1..88: mol_type = other DNA
actggcgcttctatctggttactctgagcgccatcaccagcgacgatgtcgtatgggtaaagctccctcttcggagggagcatcagag

SEQ ID NO: 11014 - DNA, 88 bp, synthetic construct
  misc_feature 1..88: note = engineered ribonucleic acid scaffold (ERS) sequence
  source 1..88: mol_type = other DNA
actggcgcttctatctgtttactctgagcgccatcaccagcgacgatgtcgtatgggtaaagctccctcttcggagggagcatcagag

SEQ ID NO: 11015 - DNA, 89 bp, synthetic construct
  misc_feature 1..89: note = engineered ribonucleic acid scaffold (ERS) sequence
  source 1..89: mol_type = other DNA
actggcgcttctatctgatttactctgagcgccatcaccagcgacgatgtcgtatgggtaaagctccctcttcggagggagcatcagag

SEQ ID NO: 11016 - DNA, 88 bp, synthetic construct
  misc_feature 1..88: note = engineered ribonucleic acid scaffold (ERS) sequence
  source 1..88: mol_type = other DNA
actggcgcttctatctgattgctctgagcgccatcaccagcgacgatgtcgtatgggtaaagctccctcttcggagggagcatcagag

SEQ ID NO: 11017 - DNA, 90 bp, synthetic construct
  misc_feature 1..90: note = engineered ribonucleic acid scaffold (ERS) sequence
  source 1..90: mol_type = other DNA
actggcgcttctatatctgattactctgagcgccatcaccagcgactctgtcgtatgggtaaagctccctcttcggagggagcatcagag

SEQ ID NO: 11018 - DNA, 89 bp, synthetic construct
  misc_feature 1..89: note = engineered ribonucleic acid scaffold (ERS) sequence
  source 1..89: mol_type = other DNA
actggcgcttctaatctgattactctgagcgccatcaccagcgactctgtcgtatgggtaaagctccctcttcggagggagcatcagag

SEQ ID NO: 11019 - DNA, 87 bp, synthetic construct
  misc_feature 1..87: note = engineered ribonucleic acid scaffold (ERS) sequence
  source 1..87: mol_type = other DNA
actggcgcttctactgattactctgagcgccatcaccagcgactctgtcgtatgggtaaagctccctcttcggagggagcatcagag

SEQ ID NO: 11020 - DNA, 88 bp, synthetic construct
  misc_feature 1..88: note = engineered ribonucleic acid scaffold (ERS) sequence
  source 1..88: mol_type = other DNA
actggcgcttctaactgattactctgagcgccatcaccagcgactctgtcgtatgggtaaagctccctcttcggagggagcatcagag

SEQ ID NO: 11021 - DNA, 88 bp, synthetic construct
  misc_feature 1..88: note = engineered ribonucleic acid scaffold (ERS) sequence
  source 1..88: mol_type = other DNA
actggcgcttctacctgattactctgagcgccatcaccagcgactctgtcgtatgggtaaagctccctcttcggagggagcatcagag

SEQ ID NO: 11022 - DNA, 88 bp, synthetic construct
  misc_feature 1..88: note = engineered ribonucleic acid scaffold (ERS) sequence
  source 1..88: mol_type = other DNA
actggcgcttctagctgattactctgagcgccatcaccagcgactctgtcgtatgggtaaagctccctcttcggagggagcatcagag

SEQ ID NO: 11023 - DNA, 90 bp, synthetic construct
  misc_feature 1..90: note = engineered ribonucleic acid scaffold (ERS) sequence
  source 1..90: mol_type = other DNA
actggcgcttctattactgattactctgagcgccatcaccagcgactctgtcgtatgggtaaagctccctcttcggagggagcatcagag

SEQ ID NO: 11024 - DNA, 88 bp, synthetic construct
  misc_feature 1..88: note = engineered ribonucleic acid scaffold (ERS) sequence
  source 1..88: mol_type = other DNA
actggcgcttctatatgattactctgagcgccatcaccagcgactctgtcgtatgggtaaagctccctcttcggagggagcatcagag

SEQ ID NO: 11025 - DNA, 88 bp, synthetic construct
  misc_feature 1..88: note = engineered ribonucleic acid scaffold (ERS) sequence
  source 1..88: mol_type = other DNA
actggcgcttctatgtgattactctgagcgccatcaccagcgactctgtcgtatgggtaaagctccctcttcggagggagcatcagag

SEQ ID NO: 11026 - DNA, 88 bp, synthetic construct
  misc_feature 1..88: note = engineered ribonucleic acid scaffold (ERS) sequence
  source 1..88: mol_type = other DNA
actggcgcttctatttgattactctgagcgccatcaccagcgactctgtcgtatgggtaaagctccctcttcggagggagcatcagag

SEQ ID NO: 11027 - DNA, 89 bp, synthetic construct
  misc_feature 1..89: note = engineered ribonucleic acid scaffold (ERS) sequence
  source 1..89: mol_type = other DNA
actggcgcttctatcttgattactctgagcgccatcaccagcgactctgtcgtatgggtaaagctccctcttcggagggagcatcagag

SEQ ID NO: 11028 - DNA, 88 bp, synthetic construct
  misc_feature 1..88: note = engineered ribonucleic acid scaffold (ERS) sequence
  source 1..88: mol_type = other DNA
actggcgcttctatcagattactctgagcgccatcaccagcgactctgtcgtatgggtaaagctccctcttcggagggagcatcagag

SEQ ID NO: 11029 - DNA, 88 bp, synthetic construct
  misc_feature 1..88: note = engineered ribonucleic acid scaffold (ERS) sequence
  source 1..88: mol_type = other DNA
actggcgcttctatcggattactctgagcgccatcaccagcgactctgtcgtatgggtaaagctccctcttcggagggagcatcagag

SEQ ID NO: 11030 - DNA, 89 bp, synthetic construct
  misc_feature 1..89: note = engineered ribonucleic acid scaffold (ERS) sequence
  source 1..89: mol_type = other DNA
actggcgcttctatctgaattactctgagcgccatcaccagcgactctgtcgtatgggtaaagctccctcttcggagggagcatcagag

SEQ ID NO: 11031 - DNA, 89 bp, synthetic construct
  misc_feature 1..89: note = engineered ribonucleic acid scaffold (ERS) sequence
  source 1..89: mol_type = other DNA
actggcgcttctatctgtattactctgagcgccatcaccagcgactctgtcgtatgggtaaagctccctcttcggagggagcatcagag

SEQ ID NO: 11032 - DNA, 88 bp, synthetic construct
  misc_feature 1..88: note = engineered ribonucleic acid scaffold (ERS) sequence
  source 1..88: mol_type = other DNA
actggcgcttctatctggttactctgagcgccatcaccagcgactctgtcgtatgggtaaagctccctcttcggagggagcatcagag

SEQ ID NO: 11033 - DNA, 88 bp, synthetic construct
  misc_feature 1..88: note = engineered ribonucleic acid scaffold (ERS) sequence
  source 1..88: mol_type = other DNA
actggcgcttctatctgtttactctgagcgccatcaccagcgactctgtcgtatgggtaaagctccctcttcggagggagcatcagag

SEQ ID NO: 11034 - DNA, 89 bp, synthetic construct
  misc_feature 1..89: note = engineered ribonucleic acid scaffold (ERS) sequence
  source 1..89: mol_type = other DNA
actggcgcttctatctgatttactctgagcgccatcaccagcgactctgtcgtatgggtaaagctccctcttcggagggagcatcagag

SEQ ID NO: 11035 - DNA, 88 bp, synthetic construct
  misc_feature 1..88: note = engineered ribonucleic acid scaffold (ERS) sequence
  source 1..88: mol_type = other DNA
actggcgcttctatctgattgctctgagcgccatcaccagcgactctgtcgtatgggtaaagctccctcttcggagggagcatcagag

SEQ ID NO: 11036 - DNA, 90 bp, synthetic construct
  misc_feature 1..90: note = engineered ribonucleic acid scaffold (ERS) sequence
  source 1..90: mol_type = other DNA
actggcgcttctatatctgattactctgagcgccatcaccagcgactatgtcgtgtgggtaaagctccctcttcggagggagcatcagag

SEQ ID NO: 11037 - DNA, 89 bp, synthetic construct
  misc_feature 1..89: note = engineered ribonucleic acid scaffold (ERS) sequence
  source 1..89: mol_type = other DNA
actggcgcttctaatctgattactctgagcgccatcaccagcgactatgtcgtgtgggtaaagctccctcttcggagggagcatcagag

SEQ ID NO: 11038 - DNA, 87 bp, synthetic construct
  misc_feature 1..87: note = engineered ribonucleic acid scaffold (ERS) sequence
  source 1..87: mol_type = other DNA
actggcgcttctactgattactctgagcgccatcaccagcgactatgtcgtgtgggtaaagctccctcttcggagggagcatcagag

SEQ ID NO: 11039 - DNA, 88 bp, synthetic construct
  misc_feature 1..88: note = engineered ribonucleic acid scaffold (ERS) sequence
  source 1..88: mol_type = other DNA
actggcgcttctaactgattactctgagcgccatcaccagcgactatgtcgtgtgggtaaagctccctcttcggagggagcatcagag

SEQ ID NO: 11040 - DNA, 88 bp, synthetic construct
  misc_feature 1..88: note = engineered ribonucleic acid scaffold (ERS) sequence
  source 1..88: mol_type = other DNA
actggcgcttctacctgattactctgagcgccatcaccagcgactatgtcgtgtgggtaaagctccctcttcggagggagcatcagag

SEQ ID NO: 11041 - DNA, 88 bp, synthetic construct
  misc_feature 1..88: note = engineered ribonucleic acid scaffold (ERS) sequence
  source 1..88: mol_type = other DNA
actggcgcttctagctgattactctgagcgccatcaccagcgactatgtcgtgtgggtaaagctccctcttcggagggagcatcagag

SEQ ID NO: 11042 - DNA, 90 bp, synthetic construct
  misc_feature 1..90: note = engineered ribonucleic acid scaffold (ERS) sequence
  source 1..90: mol_type = other DNA
actggcgcttctattactgattactctgagcgccatcaccagcgactatgtcgtgtgggtaaagctccctcttcggagggagcatcagag

SEQ ID NO: 11043 - DNA, 88 bp, synthetic construct
  misc_feature 1..88: note = engineered ribonucleic acid scaffold (ERS) sequence
  source 1..88: mol_type = other DNA
actggcgcttctatatgattactctgagcgccatcaccagcgactatgtcgtgtgggtaaagctccctcttcggagggagcatcagag

SEQ ID NO: 11044 - DNA, 88 bp, synthetic construct
  misc_feature 1..88: note = engineered ribonucleic acid scaffold (ERS) sequence
  source 1..88: mol_type = other DNA
actggcgcttctatgtgattactctgagcgccatcaccagcgactatgtcgtgtgggtaaagctccctcttcggagggagcatcagag

SEQ ID NO: 11045 - DNA, 88 bp, synthetic construct
  misc_feature 1..88: note = engineered ribonucleic acid scaffold (ERS) sequence
  source 1..88: mol_type = other DNA
actggcgcttctatttgattactctgagcgccatcaccagcgactatgtcgtgtgggtaaagctccctcttcggagggagcatcagag

SEQ ID NO: 11046 - DNA, 89 bp, synthetic construct
  misc_feature 1..89: note = engineered ribonucleic acid scaffold (ERS) sequence
  source 1..89: mol_type = other DNA
actggcgcttctatcttgattactctgagcgccatcaccagcgactatgtcgtgtgggtaaagctccctcttcggagggagcatcagag

SEQ ID NO: 11047 - DNA, 88 bp, synthetic construct
  misc_feature 1..88: note = engineered ribonucleic acid scaffold (ERS) sequence
  source 1..88: mol_type = other DNA
actggcgcttctatcagattactctgagcgccatcaccagcgactatgtcgtgtgggtaaagctccctcttcggagggagcatcagag

SEQ ID NO: 11048 - DNA, 88 bp, synthetic construct
  misc_feature 1..88: note = engineered ribonucleic acid scaffold (ERS) sequence
  source 1..88: mol_type = other DNA
actggcgcttctatcggattactctgagcgccatcaccagcgactatgtcgtgtgggtaaagctccctcttcggagggagcatcagag

SEQ ID NO: 11049 - DNA, 89 bp, synthetic construct
  misc_feature 1..89: note = engineered ribonucleic acid scaffold (ERS) sequence
  source 1..89: mol_type = other DNA
actggcgcttctatctgaattactctgagcgccatcaccagcgactatgtcgtgtgggtaaagctccctcttcggagggagcatcagag

SEQ ID NO: 11050 - DNA, 89 bp, synthetic construct
  misc_feature 1..89: note = engineered ribonucleic acid scaffold (ERS) sequence
  source 1..89: mol_type = other DNA
actggcgcttctatctgtattactctgagcgccatcaccagcgactatgtcgtgtgggtaaagctccctcttcggagggagcatcagag

SEQ ID NO: 11051 - DNA, 88 bp, synthetic construct
  misc_feature 1..88: note = engineered ribonucleic acid scaffold (ERS) sequence
  source 1..88: mol_type = other DNA
actggcgcttctatctggttactctgagcgccatcaccagcgactatgtcgtgtgggtaaagctccctcttcggagggagcatcagag

SEQ ID NO: 11052 - DNA, 88 bp, synthetic construct
  misc_feature 1..88: note = engineered ribonucleic acid scaffold (ERS) sequence
  source 1..88: mol_type = other DNA
actggcgcttctatctgtttactctgagcgccatcaccagcgactatgtcgtgtgggtaaagctccctcttcggagggagcatcagag

SEQ ID NO: 11053 - DNA, 89 bp, synthetic construct
  misc_feature 1..89: note = engineered ribonucleic acid scaffold (ERS) sequence
  source 1..89: mol_type = other DNA
actggcgcttctatctgatttactctgagcgccatcaccagcgactatgtcgtgtgggtaaagctccctcttcggagggagcatcagag

SEQ ID NO: 11054 - DNA, 88 bp, synthetic construct
  misc_feature 1..88: note = engineered ribonucleic acid scaffold (ERS) sequence
  source 1..88: mol_type = other DNA
actggcgcttctatctgattgctctgagcgccatcaccagcgactatgtcgtgtgggtaaagctccctcttcggagggagcatcagag

SEQ ID NO: 11055 - DNA, 91 bp, synthetic construct
  misc_feature 1..91: note = engineered ribonucleic acid scaffold (ERS) sequence
  source 1..91: mol_type = other DNA
actggcgcttctatatctgattactctgagcgccatcaccagcgactatgtcgtattgggtaaagctccctcttcggagggagcatcagag

SEQ ID NO: 11056 - DNA, 90 bp, synthetic construct
  misc_feature 1..90: note = engineered ribonucleic acid scaffold (ERS) sequence
  source 1..90: mol_type = other DNA
actggcgcttctaatctgattactctgagcgccatcaccagcgactatgtcgtattgggtaaagctccctcttcggagggagcatcagag

SEQ ID NO: 11057 - DNA, 88 bp, synthetic construct
  misc_feature 1..88: note = engineered ribonucleic acid scaffold (ERS) sequence
  source 1..88: mol_type = other DNA
actggcgcttctactgattactctgagcgccatcaccagcgactatgtcgtattgggtaaagctccctcttcggagggagcatcagag

SEQ ID NO: 11058 - DNA, 89 bp, synthetic construct
  misc_feature 1..89: note = engineered ribonucleic acid scaffold (ERS) sequence
  source 1..89: mol_type = other DNA
actggcgcttctaactgattactctgagcgccatcaccagcgactatgtcgtattgggtaaagctccctcttcggagggagcatcagag

SEQ ID NO: 11059 - DNA, 89 bp, synthetic construct
  misc_feature 1..89: note = engineered ribonucleic acid scaffold (ERS) sequence
  source 1..89: mol_type = other DNA
actggcgcttctacctgattactctgagcgccatcaccagcgactatgtcgtattgggtaaagctccctcttcggagggagcatcagag

SEQ ID NO: 11060 - DNA, 89 bp, synthetic construct
  misc_feature 1..89: note = engineered ribonucleic acid scaffold (ERS) sequence
  source 1..89: mol_type = other DNA
actggcgcttctagctgattactctgagcgccatcaccagcgactatgtcgtattgggtaaagctccctcttcggagggagcatcagag

SEQ ID NO: 11061 - DNA, 91 bp, synthetic construct
  misc_feature 1..91: note = engineered ribonucleic acid scaffold (ERS) sequence
  source 1..91: mol_type = other DNA
actggcgcttctattactgattactctgagcgccatcaccagcgactatgtcgtattgggtaaagctccctcttcggagggagcatcagag

SEQ ID NO: 11062 - DNA, 89 bp, synthetic construct
  misc_feature 1..89: note = engineered ribonucleic acid scaffold (ERS) sequence
  source 1..89: mol_type = other DNA
actggcgcttctatatgattactctgagcgccatcaccagcgactatgtcgtattgggtaaagctccctcttcggagggagcatcagag

SEQ ID NO: 11063 - DNA, 89 bp, synthetic construct
  misc_feature 1..89: note = engineered ribonucleic acid scaffold (ERS) sequence
  source 1..89: mol_type = other DNA
actggcgcttctatgtgattactctgagcgccatcaccagcgactatgtcgtattgggtaaagctccctcttcggagggagcatcagag

SEQ ID NO: 11064 - DNA, 89 bp, synthetic construct
  misc_feature 1..89: note = engineered ribonucleic acid scaffold (ERS) sequence
  source 1..89: mol_type = other DNA
actggcgcttctatttgattactctgagcgccatcaccagcgactatgtcgtattgggtaaagctccctcttcggagggagcatcagag

SEQ ID NO: 11065 - DNA, 90 bp, synthetic construct
  misc_feature 1..90: note = engineered ribonucleic acid scaffold (ERS) sequence
  source 1..90: mol_type = other DNA
actggcgcttctatcttgattactctgagcgccatcaccagcgactatgtcgtattgggtaaagctccctcttcggagggagcatcagag

SEQ ID NO: 11066 - DNA, 89 bp, synthetic construct
  misc_feature 1..89: note = engineered ribonucleic acid scaffold (ERS) sequence
  source 1..89: mol_type = other DNA
actggcgcttctatcagattactctgagcgccatcaccagcgactatgtcgtattgggtaaagctccctcttcggagggagcatcagag

SEQ ID NO: 11067 - DNA, 89 bp, synthetic construct
  misc_feature 1..89: note = engineered ribonucleic acid scaffold (ERS) sequence
  source 1..89: mol_type = other DNA
actggcgcttctatcggattactctgagcgccatcaccagcgactatgtcgtattgggtaaagctccctcttcggagggagcatcagag

SEQ ID NO: 11068 - DNA, 90 bp, synthetic construct
  misc_feature 1..90: note = engineered ribonucleic acid scaffold (ERS) sequence
  source 1..90: mol_type = other DNA
actggcgcttctatctgaattactctgagcgccatcaccagcgactatgtcgtattgggtaaagctccctcttcggagggagcatcagag

SEQ ID NO: 11069 - DNA, 90 bp, synthetic construct
  misc_feature 1..90: note = engineered ribonucleic acid scaffold (ERS) sequence
  source 1..90: mol_type = other DNA
actggcgcttctatctgtattactctgagcgccatcaccagcgactatgtcgtattgggtaaagctccctcttcggagggagcatcagag

SEQ ID NO: 11070 - DNA, 89 bp, synthetic construct
  misc_feature 1..89: note = engineered ribonucleic acid scaffold (ERS) sequence
  source 1..89: mol_type = other DNA
actggcgcttctatctggttactctgagcgccatcaccagcgactatgtcgtattgggtaaagctccctcttcggagggagcatcagag

SEQ ID NO: 11071 - DNA, 89 bp, synthetic construct
  misc_feature 1..89: note = engineered ribonucleic acid scaffold (ERS) sequence
  source 1..89: mol_type = other DNA
actggcgcttctatctgtttactctgagcgccatcaccagcgactatgtcgtattgggtaaagctccctcttcggagggagcatcagag

SEQ ID NO: 11072 - DNA, 90 bp, synthetic construct
  misc_feature 1..90: note = engineered ribonucleic acid scaffold (ERS) sequence
  source 1..90: mol_type = other DNA
actggcgcttctatctgatttactctgagcgccatcaccagcgactatgtcgtattgggtaaagctccctcttcggagggagcatcagag

SEQ ID NO: 11073 - DNA, 89 bp, synthetic construct
  misc_feature 1..89: note = engineered ribonucleic acid scaffold (ERS) sequence
  source 1..89: mol_type = other DNA
actggcgcttctatctgattgctctgagcgccatcaccagcgactatgtcgtattgggtaaagctccctcttcggagggagcatcagag

SEQ ID NO: 11074 - DNA, 91 bp, synthetic construct
  misc_feature 1..91: note = engineered ribonucleic acid scaffold (ERS) sequence
  source 1..91: mol_type = other DNA
actggcgcttctatatctgattactctgagcgccatcaccagcgactatgtcgtatggagtaaagctccctcttcggagggagcatcagag

SEQ ID NO: 11075 - DNA, 90 bp, synthetic construct
  misc_feature 1..90: note = engineered ribonucleic acid scaffold (ERS) sequence
  source 1..90: mol_type = other DNA
actggcgcttctaatctgattactctgagcgccatcaccagcgactatgtcgtatggagtaaagctccctcttcggagggagcatcagag

SEQ ID NO: 11076 - DNA, 88 bp, synthetic construct
  misc_feature 1..88: note = engineered ribonucleic acid scaffold (ERS) sequence
  source 1..88: mol_type = other DNA
actggcgcttctactgattactctgagcgccatcaccagcgactatgtcgtatggagtaaagctccctcttcggagggagcatcagag

SEQ ID NO: 11077 - DNA, 89 bp, synthetic construct
  misc_feature 1..89: note = engineered ribonucleic acid scaffold (ERS) sequence
  source 1..89: mol_type = other DNA
actggcgcttctaactgattactctgagcgccatcaccagcgactatgtcgtatggagtaaagctccctcttcggagggagcatcagag

SEQ ID NO: 11078 - DNA, 89 bp, synthetic construct
  misc_feature 1..89: note = engineered ribonucleic acid scaffold (ERS) sequence
  source 1..89: mol_type = other DNA
actggcgcttctacctgattactctgagcgccatcaccagcgactatgtcgtatggagtaaagctccctcttcggagggagcatcagag

SEQ ID NO: 11079 - DNA, 89 bp, synthetic construct
  misc_feature 1..89: note = engineered ribonucleic acid scaffold (ERS) sequence
  source 1..89: mol_type = other DNA
actggcgcttctagctgattactctgagcgccatcaccagcgactatgtcgtatggagtaaagctccctcttcggagggagcatcagag

SEQ ID NO: 11080 - DNA, 91 bp, synthetic construct
  misc_feature 1..91: note = engineered ribonucleic acid scaffold (ERS) sequence
  source 1..91: mol_type = other DNA
actggcgcttctattactgattactctgagcgccatcaccagcgactatgtcgtatggagtaaagctccctcttcggagggagcatcagag

SEQ ID NO: 11081 - DNA, 89 bp, synthetic construct
  misc_feature 1..89: note = engineered ribonucleic acid scaffold (ERS) sequence
  source 1..89: mol_type = other DNA
actggcgcttctatatgattactctgagcgccatcaccagcgactatgtcgtatggagtaaagctccctcttcggagggagcatcagag

SEQ ID NO: 11082 - DNA, 89 bp, synthetic construct
  misc_feature 1..89: note = engineered ribonucleic acid scaffold (ERS) sequence
  source 1..89: mol_type = other DNA
actggcgcttctatgtgattactctgagcgccatcaccagcgactatgtcgtatggagtaaagctccctcttcggagggagcatcagag

SEQ ID NO: 11083 - DNA, 89 bp, synthetic construct
  misc_feature 1..89: note = engineered ribonucleic acid scaffold (ERS) sequence
  source 1..89: mol_type = other DNA
actggcgcttctatttgattactctgagcgccatcaccagcgactatgtcgtatggagtaaagctccctcttcggagggagcatcagag

SEQ ID NO: 11084 - DNA, 90 bp, synthetic construct
  misc_feature 1..90: note = engineered ribonucleic acid scaffold (ERS) sequence
  source 1..90: mol_type = other DNA
actggcgcttctatcttgattactctgagcgccatcaccagcgactatgtcgtatggagtaaagctccctcttcggagggagcatcagag

SEQ ID NO: 11085 - DNA, 89 bp, synthetic construct
  misc_feature 1..89: note = engineered ribonucleic acid scaffold (ERS) sequence
  source 1..89: mol_type = other DNA
actggcgcttctatcagattactctgagcgccatcaccagcgactatgtcgtatggagtaaagctccctcttcggagggagcatcagag

SEQ ID NO: 11086 - DNA, 89 bp, synthetic construct
  misc_feature 1..89: note = engineered ribonucleic acid scaffold (ERS) sequence
  source 1..89: mol_type = other DNA
actggcgcttctatcggattactctgagcgccatcaccagcgactatgtcgtatggagtaaagctccctcttcggagggagcatcagag

SEQ ID NO: 11087 - DNA, 90 bp, synthetic construct
  misc_feature 1..90: note = engineered ribonucleic acid scaffold (ERS) sequence
  source 1..90: mol_type = other DNA
actggcgcttctatctgaattactctgagcgccatcaccagcgactatgtcgtatggagtaaagctccctcttcggagggagcatcagag

SEQ ID NO: 11088 - DNA, 90 bp, synthetic construct
  misc_feature 1..90: note = engineered ribonucleic acid scaffold (ERS) sequence
  source 1..90: mol_type = other DNA
actggcgcttctatctgtattactctgagcgccatcaccagcgactatgtcgtatggagtaaagctccctcttcggagggagcatcagag

SEQ ID NO: 11089 - DNA, 89 bp, synthetic construct
  misc_feature 1..89: note = engineered ribonucleic acid scaffold (ERS) sequence
  source 1..89: mol_type = other DNA
actggcgcttctatctggttactctgagcgccatcaccagcgactatgtcgtatggagtaaagctccctcttcggagggagcatcagag

SEQ ID NO: 11090 - DNA, 89 bp, synthetic construct
  misc_feature 1..89: note = engineered ribonucleic acid scaffold (ERS) sequence
  source 1..89: mol_type = other DNA
actggcgcttctatctgtttactctgagcgccatcaccagcgactatgtcgtatggagtaaagctccctcttcggagggagcatcagag

SEQ ID NO: 11091 - DNA, 90 bp, synthetic construct
  misc_feature 1..90: note = engineered ribonucleic acid scaffold (ERS) sequence
  source 1..90: mol_type = other DNA
actggcgcttctatctgatttactctgagcgccatcaccagcgactatgtcgtatggagtaaagctccctcttcggagggagcatcagag

SEQ ID NO: 11092 - DNA, 89 bp, synthetic construct
  misc_feature 1..89: note = engineered ribonucleic acid scaffold (ERS) sequence
  source 1..89: mol_type = other DNA
actggcgcttctatctgattgctctgagcgccatcaccagcgactatgtcgtatggagtaaagctccctcttcggagggagcatcagag

SEQ ID NO: 11093 - DNA, 91 bp, synthetic construct
  misc_feature 1..91: note = engineered ribonucleic acid scaffold (ERS) sequence
  source 1..91: mol_type = other DNA
actggcgcttctatatctgattactctgagcgccatcaccagcgactatgtcgtatggcgtaaagctccctcttcggagggagcatcagag

SEQ ID NO: 11094 - DNA, 90 bp, synthetic construct
  misc_feature 1..90: note = engineered ribonucleic acid scaffold (ERS) sequence
  source 1..90: mol_type = other DNA
actggcgcttctaatctgattactctgagcgccatcaccagcgactatgtcgtatggcgtaaagctccctcttcggagggagcatcagag

SEQ ID NO: 11095 - DNA, 88 bp, synthetic construct
  misc_feature 1..88: note = engineered ribonucleic acid scaffold (ERS) sequence
  source 1..88: mol_type = other DNA
actggcgcttctactgattactctgagcgccatcaccagcgactatgtcgtatggcgtaaagctccctcttcggagggagcatcagag

SEQ ID NO: 11096 - DNA, 89 bp, synthetic construct
  misc_feature 1..89: note = engineered ribonucleic acid scaffold (ERS) sequence
  source 1..89: mol_type = other DNA
actggcgcttctaactgattactctgagcgccatcaccagcgactatgtcgtatggcgtaaagctccctcttcggagggagcatcagag

SEQ ID NO: 11097 - DNA, 89 bp, synthetic construct
  misc_feature 1..89: note = engineered ribonucleic acid scaffold (ERS) sequence
  source 1..89: mol_type = other DNA
actggcgcttctacctgattactctgagcgccatcaccagcgactatgtcgtatggcgtaaagctccctcttcggagggagcatcagag

SEQ ID NO: 11098 - DNA, 89 bp, synthetic construct
  misc_feature 1..89: note = engineered ribonucleic acid scaffold (ERS) sequence
  source 1..89: mol_type = other DNA
actggcgcttctagctgattactctgagcgccatcaccagcgactatgtcgtatggcgtaaagctccctcttcggagggagcatcagag

SEQ ID NO: 11099 - DNA, 91 bp, synthetic construct
  misc_feature 1..91: note = engineered ribonucleic acid scaffold (ERS) sequence
  source 1..91: mol_type = other DNA
actggcgcttctattactgattactctgagcgccatcaccagcgactatgtcgtatggcgtaaagctccctcttcggagggagcatcagag

SEQ ID NO: 11100 - DNA, 89 bp, synthetic construct
  misc_feature 1..89: note = engineered ribonucleic acid scaffold (ERS) sequence
  source 1..89: mol_type = other DNA
actggcgcttctatatgattactctgagcgccatcaccagcgactatgtcgtatggcgtaaagctccctcttcggagggagcatcagag

SEQ ID NO: 11101 - DNA, 89 bp, synthetic construct
  misc_feature 1..89: note = engineered ribonucleic acid scaffold (ERS) sequence
  source 1..89: mol_type = other DNA
actggcgcttctatgtgattactctgagcgccatcaccagcgactatgtcgtatggcgtaaagctccctcttcggagggagcatcagag

SEQ ID NO: 11102 - DNA, 89 bp, synthetic construct
  misc_feature 1..89: note = engineered ribonucleic acid scaffold (ERS) sequence
  source 1..89: mol_type = other DNA
actggcgcttctatttgattactctgagcgccatcaccagcgactatgtcgtatggcgtaaagctccctcttcggagggagcatcagag

SEQ ID NO: 11103 - DNA, 90 bp, synthetic construct
  misc_feature 1..90: note = engineered ribonucleic acid scaffold (ERS) sequence
  source 1..90: mol_type = other DNA
actggcgcttctatcttgattactctgagcgccatcaccagcgactatgtcgtatggcgtaaagctccctcttcggagggagcatcagag

SEQ ID NO: 11104 - DNA, 89 bp, synthetic construct
  misc_feature 1..89: note = engineered ribonucleic acid scaffold (ERS) sequence
  source 1..89: mol_type = other DNA
actggcgcttctatcagattactctgagcgccatcaccagcgactatgtcgtatggcgtaaagctccctcttcggagggagcatcagag

SEQ ID NO: 11105 - DNA, 89 bp, synthetic construct
  misc_feature 1..89: note = engineered ribonucleic acid scaffold (ERS) sequence
  source 1..89: mol_type = other DNA
actggcgcttctatcggattactctgagcgccatcaccagcgactatgtcgtatggcgtaaagctccctcttcggagggagcatcagag

SEQ ID NO: 11106 - DNA, 90 bp, synthetic construct
  misc_feature 1..90: note = engineered ribonucleic acid scaffold (ERS) sequence
  source 1..90: mol_type = other DNA
actggcgcttctatctgaattactctgagcgccatcaccagcgactatgtcgtatggcgtaaagctccctcttcggagggagcatcagag

SEQ ID NO: 11107 - DNA, 90 bp, synthetic construct
  misc_feature 1..90: note = engineered ribonucleic acid scaffold (ERS) sequence
  source 1..90: mol_type = other DNA
actggcgcttctatctgtattactctgagcgccatcaccagcgactatgtcgtatggcgtaaagctccctcttcggagggagcatcagag

SEQ ID NO: 11108 - DNA, 89 bp, synthetic construct
  misc_feature 1..89: note = engineered ribonucleic acid scaffold (ERS) sequence
  source 1..89: mol_type = other DNA
actggcgcttctatctggttactctgagcgccatcaccagcgactatgtcgtatggcgtaaagctccctcttcggagggagcatcagag

SEQ ID NO: 11109 - DNA, 89 bp, synthetic construct
  misc_feature 1..89: note = engineered ribonucleic acid scaffold (ERS) sequence
  source 1..89: mol_type = other DNA
actggcgcttctatctgtttactctgagcgccatcaccagcgactatgtcgtatggcgtaaagctccctcttcggagggagcatcagag

SEQ ID NO: 11110 - DNA, 90 bp, synthetic construct
  misc_feature 1..90: note = engineered ribonucleic acid scaffold (ERS) sequence
  source 1..90: mol_type = other DNA
actggcgcttctatctgatttactctgagcgccatcaccagcgactatgtcgtatggcgtaaagctccctcttcggagggagcatcagag

SEQ ID NO: 11111 - DNA, 89 bp, synthetic construct
  misc_feature 1..89: note = engineered ribonucleic acid scaffold (ERS) sequence
  source 1..89: mol_type = other DNA
actggcgcttctatctgattgctctgagcgccatcaccagcgactatgtcgtatggcgtaaagctccctcttcggagggagcatcagag

SEQ ID NO: 11112 - DNA, 91 bp, synthetic construct
  misc_feature 1..91: note = engineered ribonucleic acid scaffold (ERS) sequence
  source 1..91: mol_type = other DNA
actggcgcttctatatctgattactctgagcgccatcaccagcgactatgtcgtatggtgtaaagctccctcttcggagggagcatcagag

SEQ ID NO: 11113 - DNA, 90 bp, synthetic construct
  misc_feature 1..90: note = engineered ribonucleic acid scaffold (ERS) sequence
  source 1..90: mol_type = other DNA
actggcgcttctaatctgattactctgagcgccatcaccagcgactatgtcgtatggtgtaaagctccctcttcggagggagcatcagag

SEQ ID NO: 11114 - DNA, 88 bp, synthetic construct
  misc_feature 1..88: note = engineered ribonucleic acid scaffold (ERS) sequence
  source 1..88: mol_type = other DNA
actggcgcttctactgattactctgagcgccatcaccagcgactatgtcgtatggtgtaaagctccctcttcggagggagcatcagag

SEQ ID NO: 11115 - DNA, 89 bp, synthetic construct
  misc_feature 1..89: note = engineered ribonucleic acid scaffold (ERS) sequence
  source 1..89: mol_type = other DNA
actggcgcttctaactgattactctgagcgccatcaccagcgactatgtcgtatggtgtaaagctccctcttcggagggagcatcagag

SEQ ID NO: 11116 - DNA, 89 bp, synthetic construct
  misc_feature 1..89: note = engineered ribonucleic acid scaffold (ERS) sequence
  source 1..89: mol_type = other DNA
actggcgcttctacctgattactctgagcgccatcaccagcgactatgtcgtatggtgtaaagctccctcttcggagggagcatcagag

SEQ ID NO: 11117 - DNA, 89 bp, synthetic construct
  misc_feature 1..89: note = engineered ribonucleic acid scaffold (ERS) sequence
  source 1..89: mol_type = other DNA
actggcgcttctagctgattactctgagcgccatcaccagcgactatgtcgtatggtgtaaagctccctcttcggagggagcatcagag

SEQ ID NO: 11118 - DNA, 91 bp, synthetic construct
  misc_feature 1..91: note = engineered ribonucleic acid scaffold (ERS) sequence
  source 1..91: mol_type = other DNA
actggcgcttctattactgattactctgagcgccatcaccagcgactatgtcgtatggtgtaaagctccctcttcggagggagcatcagag

SEQ ID NO: 11119 - DNA, 89 bp, synthetic construct
  misc_feature 1..89: note = engineered ribonucleic acid scaffold (ERS) sequence
  source 1..89: mol_type = other DNA
actggcgcttctatatgattactctgagcgccatcaccagcgactatgtcgtatggtgtaaagctccctcttcggagggagcatcagag

SEQ ID NO: 11120 - DNA, 89 bp, synthetic construct
  misc_feature 1..89: note = engineered ribonucleic acid scaffold (ERS) sequence
  source 1..89: mol_type = other DNA
actggcgcttctatgtgattactctgagcgccatcaccagcgactatgtcgtatggtgtaaagctccctcttcggagggagcatcagag

SEQ ID NO: 11121 - DNA, 89 bp, synthetic construct
  misc_feature 1..89: note = engineered ribonucleic acid scaffold (ERS) sequence
  source 1..89: mol_type = other DNA
actggcgcttctatttgattactctgagcgccatcaccagcgactatgtcgtatggtgtaaagctccctcttcggagggagcatcagag

SEQ ID NO: 11122 - DNA, 90 bp, synthetic construct
  misc_feature 1..90: note = engineered ribonucleic acid scaffold (ERS) sequence
  source 1..90: mol_type = other DNA
actggcgcttctatcttgattactctgagcgccatcaccagcgactatgtcgtatggtgtaaagctccctcttcggagggagcatcagag

SEQ ID NO: 11123 - DNA, 89 bp, synthetic construct
  misc_feature 1..89: note = engineered ribonucleic acid scaffold (ERS) sequence
  source 1..89: mol_type = other DNA
actggcgcttctatcagattactctgagcgccatcaccagcgactatgtcgtatggtgtaaagctccctcttcggagggagcatcagag

SEQ ID NO: 11124 - DNA, 89 bp, synthetic construct
  misc_feature 1..89: note = engineered ribonucleic acid scaffold (ERS) sequence
  source 1..89: mol_type = other DNA
actggcgcttctatcggattactctgagcgccatcaccagcgactatgtcgtatggtgtaaagctccctcttcggagggagcatcagag

SEQ ID NO: 11125 - DNA, 90 bp, synthetic construct
  misc_feature 1..90: note = engineered ribonucleic acid scaffold (ERS) sequence
  source 1..90: mol_type = other DNA
actggcgcttctatctgaattactctgagcgccatcaccagcgactatgtcgtatggtgtaaagctccctcttcggagggagcatcagag

SEQ ID NO: 11126 - DNA, 90 bp, synthetic construct
  misc_feature 1..90: note = engineered ribonucleic acid scaffold (ERS) sequence
  source 1..90: mol_type = other DNA
actggcgcttctatctgtattactctgagcgccatcaccagcgactatgtcgtatggtgtaaagctccctcttcggagggagcatcagag

SEQ ID NO: 11127 - DNA, 89 bp, synthetic construct
  misc_feature 1..89: note = engineered ribonucleic acid scaffold (ERS) sequence
  source 1..89: mol_type = other DNA
actggcgcttctatctggttactctgagcgccatcaccagcgactatgtcgtatggtgtaaagctccctcttcggagggagcatcagag

SEQ ID NO: 11128 - DNA, 89 bp, synthetic construct
  misc_feature 1..89: note = engineered ribonucleic acid scaffold (ERS) sequence
  source 1..89: mol_type = other DNA
actggcgcttctatctgtttactctgagcgccatcaccagcgactatgtcgtatggtgtaaagctccctcttcggagggagcatcagag

SEQ ID NO: 11129 - DNA, 90 bp, synthetic construct
  misc_feature 1..90: note = engineered ribonucleic acid scaffold (ERS) sequence
  source 1..90: mol_type = other DNA
actggcgcttctatctgatttactctgagcgccatcaccagcgactatgtcgtatggtgtaaagctccctcttcggagggagcatcagag

SEQ ID NO: 11130 - DNA, 89 bp, synthetic construct
  misc_feature 1..89: note = engineered ribonucleic acid scaffold (ERS) sequence
  source 1..89: mol_type = other DNA
actggcgcttctatctgattgctctgagcgccatcaccagcgactatgtcgtatggtgtaaagctccctcttcggagggagcatcagag

SEQ ID NO: 11131 - DNA, 91 bp, synthetic construct
  misc_feature 1..91: note = engineered ribonucleic acid scaffold (ERS) sequence
  source 1..91: mol_type = other DNA
actggcgcttctatatctgattactctgagcgccatcaccagcgactatgtcgtatgggctaaagctccctcttcggagggagcatcagag

SEQ ID NO: 11132 - DNA, 90 bp, synthetic construct
  misc_feature 1..90: note = engineered ribonucleic acid scaffold (ERS) sequence
  source 1..90: mol_type = other DNA
actggcgcttctaatctgattactctgagcgccatcaccagcgactatgtcgtatgggctaaagctccctcttcggagggagcatcagag

SEQ ID NO: 11133 - DNA, 88 bp, synthetic construct
  misc_feature 1..88: note = engineered ribonucleic acid scaffold (ERS) sequence
  source 1..88: mol_type = other DNA
actggcgcttctactgattactctgagcgccatcaccagcgactatgtcgtatgggctaaagctccctcttcggagggagcatcagag

SEQ ID NO: 11134 - DNA, 89 bp, synthetic construct
  misc_feature 1..89: note = engineered ribonucleic acid scaffold (ERS) sequence
  source 1..89: mol_type = other DNA
actggcgcttctaactgattactctgagcgccatcaccagcgactatgtcgtatgggctaaagctccctcttcggagggagcatcagag

SEQ ID NO: 11135 - DNA, 89 bp, synthetic construct
  misc_feature 1..89: note = engineered ribonucleic acid scaffold (ERS) sequence
  source 1..89: mol_type = other DNA
actggcgcttctacctgattactctgagcgccatcaccagcgactatgtcgtatgggctaaagctccctcttcggagggagcatcagag

SEQ ID NO: 11136 - DNA, 89 bp, synthetic construct
  misc_feature 1..89: note = engineered ribonucleic acid scaffold (ERS) sequence
  source 1..89: mol_type = other DNA
actggcgcttctagctgattactctgagcgccatcaccagcgactatgtcgtatgggctaaagctccctcttcggagggagcatcagag

SEQ ID NO: 11137 - DNA, 91 bp, synthetic construct
  misc_feature 1..91: note = engineered ribonucleic acid scaffold (ERS) sequence
  source 1..91: mol_type = other DNA
actggcgcttctattactgattactctgagcgccatcaccagcgactatgtcgtatgggctaaagctccctcttcggagggagcatcagag

SEQ ID NO: 11138 - DNA, 89 bp, synthetic construct
  misc_feature 1..89: note = engineered ribonucleic acid scaffold (ERS) sequence
  source 1..89: mol_type = other DNA
actggcgcttctatatgattactctgagcgccatcaccagcgactatgtcgtatgggctaaagctccctcttcggagggagcatcagag

SEQ ID NO: 11139 - DNA, 89 bp, synthetic construct
  misc_feature 1..89: note = engineered ribonucleic acid scaffold (ERS) sequence
  source 1..89: mol_type = other DNA
actggcgcttctatgtgattactctgagcgccatcaccagcgactatgtcgtatgggctaaagctccctcttcggagggagcatcagag

SEQ ID NO: 11140 - DNA, 89 bp, synthetic construct
  misc_feature 1..89: note = engineered ribonucleic acid scaffold (ERS) sequence
  source 1..89: mol_type = other DNA
actggcgcttctatttgattactctgagcgccatcaccagcgactatgtcgtatgggctaaagctccctcttcggagggagcatcagag

SEQ ID NO: 11141 - DNA, 90 bp, synthetic construct
  misc_feature 1..90: note = engineered ribonucleic acid scaffold (ERS) sequence
  source 1..90: mol_type = other DNA
actggcgcttctatcttgattactctgagcgccatcaccagcgactatgtcgtatgggctaaagctccctcttcggagggagcatcagag

SEQ ID NO: 11142 - DNA, 89 bp, synthetic construct
  misc_feature 1..89: note = engineered ribonucleic acid scaffold (ERS) sequence
  source 1..89: mol_type = other DNA
actggcgcttctatcagattactctgagcgccatcaccagcgactatgtcgtatgggctaaagctccctcttcggagggagcatcagag

SEQ ID NO: 11143 - DNA, 89 bp, synthetic construct
  misc_feature 1..89: note = engineered ribonucleic acid scaffold (ERS) sequence
  source 1..89: mol_type = other DNA
actggcgcttctatcggattactctgagcgccatcaccagcgactatgtcgtatgggctaaagctccctcttcggagggagcatcagag

SEQ ID NO: 11144 - DNA, 90 bp, synthetic construct
  misc_feature 1..90: note = engineered ribonucleic acid scaffold (ERS) sequence
  source 1..90: mol_type = other DNA
actggcgcttctatctgaattactctgagcgccatcaccagcgactatgtcgtatgggctaaagctccctcttcggagggagcatcagag

SEQ ID NO: 11145 - DNA, 90 bp, synthetic construct
  misc_feature 1..90: note = engineered ribonucleic acid scaffold (ERS) sequence
  source 1..90: mol_type = other DNA
actggcgcttctatctgtattactctgagcgccatcaccagcgactatgtcgtatgggctaaagctccctcttcggagggagcatcagag

SEQ ID NO: 11146 - DNA, 89 bp, synthetic construct
  misc_feature 1..89: note = engineered ribonucleic acid scaffold (ERS) sequence
  source 1..89: mol_type = other DNA
actggcgcttctatctggttactctgagcgccatcaccagcgactatgtcgtatgggctaaagctccctcttcggagggagcatcagag

SEQ ID NO: 11147 - DNA, 89 bp, synthetic construct
  misc_feature 1..89: note = engineered ribonucleic acid scaffold (ERS) sequence
  source 1..89: mol_type = other DNA
actggcgcttctatctgtttactctgagcgccatcaccagcgactatgtcgtatgggctaaagctccctcttcggagggagcatcagag

SEQ ID NO: 11148 - DNA, 90 bp, synthetic construct
  misc_feature 1..90: note = engineered ribonucleic acid scaffold (ERS) sequence
  source 1..90: mol_type = other DNA
actggcgcttctatctgatttactctgagcgccatcaccagcgactatgtcgtatgggctaaagctccctcttcggagggagcatcagag

SEQ ID NO: 11149 - DNA, 89 bp, synthetic construct
  misc_feature 1..89: note = engineered ribonucleic acid scaffold (ERS) sequence
  source 1..89: mol_type = other DNA
actggcgcttctatctgattgctctgagcgccatcaccagcgactatgtcgtatgggctaaagctccctcttcggagggagcatcagag

SEQ ID NO: 11150 - DNA, 88 bp, synthetic construct
  misc_feature 1..88: note = engineered ribonucleic acid scaffold (ERS) sequence
  source 1..88: mol_type = other DNA
actggcgcttctatatctgattactctgagcgccatcaccagcgactatgtcgtatgggtagctccctcttcggagggagcatcagag

SEQ ID NO: 11151 - DNA, 87 bp, synthetic construct
  misc_feature 1..87: note = engineered ribonucleic acid scaffold (ERS) sequence
  source 1..87: mol_type = other DNA
actggcgcttctaatctgattactctgagcgccatcaccagcgactatgtcgtatgggtagctccctcttcggagggagcatcagag

SEQ ID NO: 11152 - DNA, 85 bp, synthetic construct
  misc_feature 1..85: note = engineered ribonucleic acid scaffold (ERS) sequence
  source 1..85: mol_type = other DNA
actggcgcttctactgattactctgagcgccatcaccagcgactatgtcgtatgggtagctccctcttcggagggagcatcagag

SEQ ID NO: 11153 - DNA, 86 bp, synthetic construct
  misc_feature 1..86: note = engineered ribonucleic acid scaffold (ERS) sequence
  source 1..86: mol_type = other DNA
actggcgcttctaactgattactctgagcgccatcaccagcgactatgtcgtatgggtagctccctcttcggagggagcatcagag

SEQ ID NO: 11154 - DNA, 86 bp, synthetic construct
  misc_feature 1..86: note = engineered ribonucleic acid scaffold (ERS) sequence
  source 1..86: mol_type = other DNA
actggcgcttctacctgattactctgagcgccatcaccagcgactatgtcgtatgggtagctccctcttcggagggagcatcagag

SEQ ID NO: 11155 - DNA, 86 bp, synthetic construct
  misc_feature 1..86: note = engineered ribonucleic acid scaffold (ERS) sequence
  source 1..86: mol_type = other DNA
actggcgcttctagctgattactctgagcgccatcaccagcgactatgtcgtatgggtagctccctcttcggagggagcatcagag

SEQ ID NO: 11156 - DNA, 88 bp, synthetic construct
  misc_feature 1..88: note = engineered ribonucleic acid scaffold (ERS) sequence
  source 1..88: mol_type = other DNA
actggcgcttctattactgattactctgagcgccatcaccagcgactatgtcgtatgggtagctccctcttcggagggagcatcagag

SEQ ID NO: 11157 - DNA, 86 bp, synthetic construct
  misc_feature 1..86: note = engineered ribonucleic acid scaffold (ERS) sequence
  source 1..86: mol_type = other DNA
actggcgcttctatatgattactctgagcgccatcaccagcgactatgtcgtatgggtagctccctcttcggagggagcatcagag

SEQ ID NO: 11158 - DNA, 86 bp, synthetic construct
  misc_feature 1..86: note = engineered ribonucleic acid scaffold (ERS) sequence
  source 1..86: mol_type = other DNA
actggcgcttctatgtgattactctgagcgccatcaccagcgactatgtcgtatgggtagctccctcttcggagggagcatcagag

SEQ ID NO: 11159 - DNA, 86 bp, synthetic construct
  misc_feature 1..86: note = engineered ribonucleic acid scaffold (ERS) sequence
  source 1..86: mol_type = other DNA
actggcgcttctatttgattactctgagcgccatcaccagcgactatgtcgtatgggtagctccctcttcggagggagcatcagag

SEQ ID NO: 11160 - DNA, 87 bp, synthetic construct
  misc_feature 1..87: note = engineered ribonucleic acid scaffold (ERS) sequence
  source 1..87: mol_type = other DNA
actggcgcttctatcttgattactctgagcgccatcaccagcgactatgtcgtatgggtagctccctcttcggagggagcatcagag

SEQ ID NO: 11161 - DNA, 86 bp, synthetic construct
  misc_feature 1..86: note = engineered ribonucleic acid scaffold (ERS) sequence
  source 1..86: mol_type = other DNA
actggcgcttctatcagattactctgagcgccatcaccagcgactatgtcgtatgggtagctccctcttcggagggagcatcagag

SEQ ID NO: 11162 - DNA, 86 bp, synthetic construct
  misc_feature 1..86: note = engineered ribonucleic acid scaffold (ERS) sequence
  source 1..86: mol_type = other DNA
actggcgcttctatcggattactctgagcgccatcaccagcgactatgtcgtatgggtagctccctcttcggagggagcatcagag

SEQ ID NO: 11163 - DNA, 87 bp, synthetic construct
  misc_feature 1..87: note = engineered ribonucleic acid scaffold (ERS) sequence
  source 1..87: mol_type = other DNA
actggcgcttctatctgaattactctgagcgccatcaccagcgactatgtcgtatgggtagctccctcttcggagggagcatcagag

SEQ ID NO: 11164 - DNA, 87 bp, synthetic construct
  misc_feature 1..87: note = engineered ribonucleic acid scaffold (ERS) sequence
  source 1..87: mol_type = other DNA
actggcgcttctatctgtattactctgagcgccatcaccagcgactatgtcgtatgggtagctccctcttcggagggagcatcagag

SEQ ID NO: 11165 - DNA, 86 bp, synthetic construct
  misc_feature 1..86: note = engineered ribonucleic acid scaffold (ERS) sequence
  source 1..86: mol_type = other DNA
actggcgcttctatctggttactctgagcgccatcaccagcgactatgtcgtatgggtagctccctcttcggagggagcatcagag

SEQ ID NO: 11166 - DNA, 86 bp, synthetic construct
  misc_feature 1..86: note = engineered ribonucleic acid scaffold (ERS) sequence
  source 1..86: mol_type = other DNA
actggcgcttctatctgtttactctgagcgccatcaccagcgactatgtcgtatgggtagctccctcttcggagggagcatcagag

SEQ ID NO: 11167 - DNA, 87 bp, synthetic construct
  misc_feature 1..87: note = engineered ribonucleic acid scaffold (ERS) sequence
  source 1..87: mol_type = other DNA
actggcgcttctatctgatttactctgagcgccatcaccagcgactatgtcgtatgggtagctccctcttcggagggagcatcagag

SEQ ID NO: 11168 - DNA, 86 bp, synthetic construct
  misc_feature 1..86: note = engineered ribonucleic acid scaffold (ERS) sequence
  source 1..86: mol_type = other DNA
actggcgcttctatctgattgctctgagcgccatcaccagcgactatgtcgtatgggtagctccctcttcggagggagcatcagag

SEQ ID NO: 11169 - DNA, 90 bp, synthetic construct
  misc_feature 1..90: note = engineered ribonucleic acid scaffold (ERS) sequence
  source 1..90: mol_type = other DNA
actggcgcttctatatctgattactctgagcgccatcaccagcgactatgtcgtatgggtgaagctccctcttcggagggagcatcagag

SEQ ID NO: 11170 - DNA, 89 bp, synthetic construct
  misc_feature 1..89: note = engineered ribonucleic acid scaffold (ERS) sequence
  source 1..89: mol_type = other DNA
actggcgcttctaatctgattactctgagcgccatcaccagcgactatgtcgtatgggtgaagctccctcttcggagggagcatcagag

SEQ ID NO: 11171 - DNA, 87 bp, synthetic construct
  misc_feature 1..87: note = engineered ribonucleic acid scaffold (ERS) sequence
  source 1..87: mol_type = other DNA
actggcgcttctactgattactctgagcgccatcaccagcgactatgtcgtatgggtgaagctccctcttcggagggagcatcagag

SEQ ID NO: 11172 - DNA, 88 bp, synthetic construct
  misc_feature 1..88: note = engineered ribonucleic acid scaffold (ERS) sequence
  source 1..88: mol_type = other DNA
actggcgcttctaactgattactctgagcgccatcaccagcgactatgtcgtatgggtgaagctccctcttcggagggagcatcagag

SEQ ID NO: 11173 - DNA, 88 bp, synthetic construct
  misc_feature 1..88: note = engineered ribonucleic acid scaffold (ERS) sequence
  source 1..88: mol_type = other DNA
actggcgcttctacctgattactctgagcgccatcaccagcgactatgtcgtatgggtgaagctccctcttcggagggagcatcagag

SEQ ID NO: 11174 - DNA, 88 bp, synthetic construct
  misc_feature 1..88: note = engineered ribonucleic acid scaffold (ERS) sequence
  source 1..88: mol_type = other DNA
actggcgcttctagctgattactctgagcgccatcaccagcgactatgtcgtatgggtgaagctccctcttcggagggagcatcagag

SEQ ID NO: 11175 - DNA, 90 bp, synthetic construct
  misc_feature 1..90: note = engineered ribonucleic acid scaffold (ERS) sequence
  source 1..90: mol_type = other DNA
actggcgcttctattactgattactctgagcgccatcaccagcgactatgtcgtatgggtgaagctccctcttcggagggagcatcagag

SEQ ID NO: 11176 - DNA, 88 bp, synthetic construct
  misc_feature 1..88: note = engineered ribonucleic acid scaffold (ERS) sequence
  source 1..88: mol_type = other DNA
actggcgcttctatatgattactctgagcgccatcaccagcgactatgtcgtatgggtgaagctccctcttcggagggagcatcagag

SEQ ID NO: 11177 - DNA, 88 bp, synthetic construct
  misc_feature 1..88: note = engineered ribonucleic acid scaffold (ERS) sequence
  source 1..88: mol_type = other DNA
actggcgcttctatgtgattactctgagcgccatcaccagcgactatgtcgtatgggtgaagctccctcttcggagggagcatcagag

SEQ ID NO: 11178 - DNA, 88 bp, synthetic construct
  misc_feature 1..88: note = engineered ribonucleic acid scaffold (ERS) sequence
  source 1..88: mol_type = other DNA
actggcgcttctatttgattactctgagcgccatcaccagcgactatgtcgtatgggtgaagctccctcttcggagggagcatcagag

SEQ ID NO: 11179 - DNA, 89 bp, synthetic construct
  misc_feature 1..89: note = engineered ribonucleic acid scaffold (ERS) sequence
  source 1..89: mol_type = other DNA
actggcgcttctatcttgattactctgagcgccatcaccagcgactatgtcgtatgggtgaagctccctcttcggagggagcatcagag

SEQ ID NO: 11180 - DNA, 88 bp, synthetic construct
  misc_feature 1..88: note = engineered ribonucleic acid scaffold (ERS) sequence
  source 1..88: mol_type = other DNA
actggcgcttctatcagattactctgagcgccatcaccagcgactatgtcgtatgggtgaagctccctcttcggagggagcatcagag

SEQ ID NO: 11181 - DNA, 88 bp, synthetic construct
  misc_feature 1..88: note = engineered ribonucleic acid scaffold (ERS) sequence
  source 1..88: mol_type = other DNA
actggcgcttctatcggattactctgagcgccatcaccagcgactatgtcgtatgggtgaagctccctcttcggagggagcatcagag

SEQ ID NO: 11182 - DNA, 89 bp, synthetic construct
  misc_feature 1..89: note = engineered ribonucleic acid scaffold (ERS) sequence
  source 1..89: mol_type = other DNA
actggcgcttctatctgaattactctgagcgccatcaccagcgactatgtcgtatgggtgaagctccctcttcggagggagcatcagag

SEQ ID NO: 11183 - DNA, 89 bp, synthetic construct
  misc_feature 1..89: note = engineered ribonucleic acid scaffold (ERS) sequence
  source 1..89: mol_type = other DNA
actggcgcttctatctgtattactctgagcgccatcaccagcgactatgtcgtatgggtgaagctccctcttcggagggagcatcagag

SEQ ID NO: 11184 - DNA, 88 bp, synthetic construct
  misc_feature 1..88: note = engineered ribonucleic acid scaffold (ERS) sequence
  source 1..88: mol_type = other DNA
actggcgcttctatctggttactctgagcgccatcaccagcgactatgtcgtatgggtgaagctccctcttcggagggagcatcagag

SEQ ID NO: 11185 - DNA, 88 bp, synthetic construct
  misc_feature 1..88: note = engineered ribonucleic acid scaffold (ERS) sequence
  source 1..88: mol_type = other DNA
actggcgcttctatctgtttactctgagcgccatcaccagcgactatgtcgtatgggtgaagctccctcttcggagggagcatcagag

SEQ ID NO: 11186 - DNA, 89 bp, synthetic construct
  misc_feature 1..89: note = engineered ribonucleic acid scaffold (ERS) sequence
  source 1..89: mol_type = other DNA
actggcgcttctatctgatttactctgagcgccatcaccagcgactatgtcgtatgggtgaagctccctcttcggagggagcatcagag

SEQ ID NO: 11187 - DNA, 88 bp, synthetic construct
  misc_feature 1..88: note = engineered ribonucleic acid scaffold (ERS) sequence
  source 1..88: mol_type = other DNA
actggcgcttctatctgattgctctgagcgccatcaccagcgactatgtcgtatgggtgaagctccctcttcggagggagcatcagag

SEQ ID NO: 11188 - DNA, 90 bp, synthetic construct
  misc_feature 1..90: note = engineered ribonucleic acid scaffold (ERS) sequence
  source 1..90: mol_type = other DNA
actggcgcttctatatctgattactctgagcgccatcaccagcgactatgtcgtatgggtagagctccctcttcggagggagcatcagag

SEQ ID NO: 11189 - DNA, 89 bp, synthetic construct
  misc_feature 1..89: note = engineered ribonucleic acid scaffold (ERS) sequence
  source 1..89: mol_type = other DNA
actggcgcttctaatctgattactctgagcgccatcaccagcgactatgtcgtatgggtagagctccctcttcggagggagcatcagag

SEQ ID NO: 11190 - DNA, 87 bp, synthetic construct
  misc_feature 1..87: note = engineered ribonucleic acid scaffold (ERS) sequence
  source 1..87: mol_type = other DNA
actggcgcttctactgattactctgagcgccatcaccagcgactatgtcgtatgggtagagctccctcttcggagggagcatcagag

SEQ ID NO: 11191 - DNA, 88 bp, synthetic construct
  misc_feature 1..88: note = engineered ribonucleic acid scaffold (ERS) sequence
  source 1..88: mol_type = other DNA
actggcgcttctaactgattactctgagcgccatcaccagcgactatgtcgtatgggtagagctccctcttcggagggagcatcagag

SEQ ID NO: 11192 - DNA, 88 bp, synthetic construct
  misc_feature 1..88: note = engineered ribonucleic acid scaffold (ERS) sequence
  source 1..88: mol_type = other DNA
actggcgcttctacctgattactctgagcgccatcaccagcgactatgtcgtatgggtagagctccctcttcggagggagcatcagag

SEQ ID NO: 11193 - DNA, 88 bp, synthetic construct
  misc_feature 1..88: note = engineered ribonucleic acid scaffold (ERS) sequence
  source 1..88: mol_type = other DNA
actggcgcttctagctgattactctgagcgccatcaccagcgactatgtcgtatgggtagagctccctcttcggagggagcatcagag

SEQ ID NO: 11194 - DNA, 90 bp, synthetic construct
  misc_feature 1..90: note = engineered ribonucleic acid scaffold (ERS) sequence
  source 1..90: mol_type = other DNA
actggcgcttctattactgattactctgagcgccatcaccagcgactatgtcgtatgggtagagctccctcttcggagggagcatcagag

SEQ ID NO: 11195 - DNA, 88 bp, synthetic construct
  misc_feature 1..88: note = engineered ribonucleic acid scaffold (ERS) sequence
  source 1..88: mol_type = other DNA
actggcgcttctatatgattactctgagcgccatcaccagcgactatgtcgtatgggtagagctccctcttcggagggagcatcagag

SEQ ID NO: 11196 - DNA, 88 bp, synthetic construct
  misc_feature 1..88: note = engineered ribonucleic acid scaffold (ERS) sequence
  source 1..88: mol_type = other DNA
actggcgcttctatgtgattactctgagcgccatcaccagcgactatgtcgtatgggtagagctccctcttcggagggagcatcagag

SEQ ID NO: 11197 - DNA, 88 bp, synthetic construct
  misc_feature 1..88: note = engineered ribonucleic acid scaffold (ERS) sequence
  source 1..88: mol_type = other DNA
actggcgcttctatttgattactctgagcgccatcaccagcgactatgtcgtatgggtagagctccctcttcggagggagcatcagag

SEQ ID NO: 11198 - DNA, 89 bp, synthetic construct
  misc_feature 1..89: note = engineered ribonucleic acid scaffold (ERS) sequence
  source 1..89: mol_type = other DNA
actggcgcttctatcttgattactctgagcgccatcaccagcgactatgtcgtatgggtagagctccctcttcggagggagcatcagag

SEQ ID NO: 11199 - DNA, 88 bp, synthetic construct
  misc_feature 1..88: note = engineered ribonucleic acid scaffold (ERS) sequence
  source 1..88: mol_type = other DNA
actggcgcttctatcagattactctgagcgccatcaccagcgactatgtcgtatgggtagagctccctcttcggagggagcatcagag

SEQ ID NO: 11200 - DNA, 88 bp, synthetic construct
  misc_feature 1..88: note = engineered ribonucleic acid scaffold (ERS) sequence
  source 1..88: mol_type = other DNA
actggcgcttctatcggattactctgagcgccatcaccagcgactatgtcgtatgggtagagctccctcttcggagggagcatcagag

SEQ ID NO: 11201 - DNA, 89 bp, synthetic construct
  misc_feature 1..89: note = engineered ribonucleic acid scaffold (ERS) sequence
  source 1..89: mol_type = other DNA
actggcgcttctatctgaattactctgagcgccatcaccagcgactatgtcgtatgggtagagctccctcttcggagggagcatcagag

SEQ ID NO: 11202 - DNA, 89 bp, synthetic construct
  misc_feature 1..89: note = engineered ribonucleic acid scaffold (ERS) sequence
  source 1..89: mol_type = other DNA
actggcgcttctatctgtattactctgagcgccatcaccagcgactatgtcgtatgggtagagctccctcttcggagggagcatcagag

SEQ ID NO: 11203 - DNA, 88 bp, synthetic construct
  misc_feature 1..88: note = engineered ribonucleic acid scaffold (ERS) sequence
  source 1..88: mol_type = other DNA
actggcgcttctatctggttactctgagcgccatcaccagcgactatgtcgtatgggtagagctccctcttcggagggagcatcagag

SEQ ID NO: 11204 - DNA, 88 bp, synthetic construct
  misc_feature 1..88: note = engineered ribonucleic acid scaffold (ERS) sequence
  source 1..88: mol_type = other DNA
actggcgcttctatctgtttactctgagcgccatcaccagcgactatgtcgtatgggtagagctccctcttcggagggagcatcagag

SEQ ID NO: 11205 - DNA, 89 bp, synthetic construct
  misc_feature 1..89: note = engineered ribonucleic acid scaffold (ERS) sequence
  source 1..89: mol_type = other DNA
actggcgcttctatctgatttactctgagcgccatcaccagcgactatgtcgtatgggtagagctccctcttcggagggagcatcagag

SEQ ID NO: 11206 - DNA, 88 bp, synthetic construct
  misc_feature 1..88: note = engineered ribonucleic acid scaffold (ERS) sequence
  source 1..88: mol_type = other DNA
actggcgcttctatctgattgctctgagcgccatcaccagcgactatgtcgtatgggtagagctccctcttcggagggagcatcagag

SEQ ID NO: 11207 - DNA, 91 bp, synthetic construct
  misc_feature 1..91: note = engineered ribonucleic acid scaffold (ERS) sequence
  source 1..91: mol_type = other DNA
actggcgcttctatatctgattactctcagcgccatcaccagcgactatgtcgtagtgggtaaagctccctcttcggagggagcatcagac

SEQ ID NO: 11208 - DNA, 90 bp, synthetic construct
  misc_feature 1..90: note = engineered ribonucleic acid scaffold (ERS) sequence
  source 1..90: mol_type = other DNA
actggcgcttctaatctgattactctcagcgccatcaccagcgactatgtcgtagtgggtaaagctccctcttcggagggagcatcagac

SEQ ID NO: 11209 - DNA, 88 bp, synthetic construct
  misc_feature 1..88: note = engineered ribonucleic acid scaffold (ERS) sequence
  source 1..88: mol_type = other DNA
actggcgcttctactgattactctcagcgccatcaccagcgactatgtcgtagtgggtaaagctccctcttcggagggagcatcagac

SEQ ID NO: 11210 - DNA, 89 bp, synthetic construct
  misc_feature 1..89: note = engineered ribonucleic acid scaffold (ERS) sequence
  source 1..89: mol_type = other DNA
actggcgcttctaactgattactctcagcgccatcaccagcgactatgtcgtagtgggtaaagctccctcttcggagggagcatcagac

SEQ ID NO: 11211 - DNA, 89 bp, synthetic construct
  misc_feature 1..89: note = engineered ribonucleic acid scaffold (ERS) sequence
  source 1..89: mol_type = other DNA
actggcgcttctacctgattactctcagcgccatcaccagcgactatgtcgtagtgggtaaagctccctcttcggagggagcatcagac

SEQ ID NO: 11212 - DNA, 89 bp, synthetic construct
  misc_feature 1..89: note = engineered ribonucleic acid scaffold (ERS) sequence
  source 1..89: mol_type = other DNA
actggcgcttctagctgattactctcagcgccatcaccagcgactatgtcgtagtgggtaaagctccctcttcggagggagcatcagac

SEQ ID NO: 11213 - DNA, 91 bp, synthetic construct
  misc_feature 1..91: note = engineered ribonucleic acid scaffold (ERS) sequence
  source 1..91: mol_type = other DNA
actggcgcttctattactgattactctcagcgccatcaccagcgactatgtcgtagtgggtaaagctccctcttcggagggagcatcagac

SEQ ID NO: 11214 - DNA, 89 bp, synthetic construct
  misc_feature 1..89: note = engineered ribonucleic acid scaffold (ERS) sequence
  source 1..89: mol_type = other DNA
actggcgcttctatatgattactctcagcgccatcaccagcgactatgtcgtagtgggtaaagctccctcttcggagggagcatcagac

SEQ ID NO: 11215 - DNA, 89 bp, synthetic construct
  misc_feature 1..89: note = engineered ribonucleic acid scaffold (ERS) sequence
  source 1..89: mol_type = other DNA
actggcgcttctatgtgattactctcagcgccatcaccagcgactatgtcgtagtgggtaaagctccctcttcggagggagcatcagac

SEQ ID NO: 11216 - DNA, 89 bp, synthetic construct
  misc_feature 1..89: note = engineered ribonucleic acid scaffold (ERS) sequence
  source 1..89: mol_type = other DNA
actggcgcttctatttgattactctcagcgccatcaccagcgactatgtcgtagtgggtaaagctccctcttcggagggagcatcagac

SEQ ID NO: 11217 - DNA, 90 bp, synthetic construct
  misc_feature 1..90: note = engineered ribonucleic acid scaffold (ERS) sequence
  source 1..90: mol_type = other DNA
actggcgcttctatcttgattactctcagcgccatcaccagcgactatgtcgtagtgggtaaagctccctcttcggagggagcatcagac

SEQ ID NO: 11218 - DNA, 89 bp, synthetic construct
  misc_feature 1..89: note = engineered ribonucleic acid scaffold (ERS) sequence
  source 1..89: mol_type = other DNA
actggcgcttctatcagattactctcagcgccatcaccagcgactatgtcgtagtgggtaaagctccctcttcggagggagcatcagac

SEQ ID NO: 11219 - DNA, 89 bp, synthetic construct
  misc_feature 1..89: note = engineered ribonucleic acid scaffold (ERS) sequence
  source 1..89: mol_type = other DNA
actggcgcttctatcggattactctcagcgccatcaccagcgactatgtcgtagtgggtaaagctccctcttcggagggagcatcagac

SEQ ID NO: 11220 - DNA, 90 bp, synthetic construct
  misc_feature 1..90: note = engineered ribonucleic acid scaffold (ERS) sequence
  source 1..90: mol_type = other DNA
actggcgcttctatctgaattactctcagcgccatcaccagcgactatgtcgtagtgggtaaagctccctcttcggagggagcatcagac

SEQ ID NO: 11221 - DNA, 90 bp, synthetic construct
  misc_feature 1..90: note = engineered ribonucleic acid scaffold (ERS) sequence
  source 1..90: mol_type = other DNA
actggcgcttctatctgtattactctcagcgccatcaccagcgactatgtcgtagtgggtaaagctccctcttcggagggagcatcagac

SEQ ID NO: 11222 - DNA, 89 bp, synthetic construct
  misc_feature 1..89: note = engineered ribonucleic acid scaffold (ERS) sequence
  source 1..89: mol_type = other DNA
actggcgcttctatctggttactctcagcgccatcaccagcgactatgtcgtagtgggtaaagctccctcttcggagggagcatcagac

SEQ ID NO: 11223 - DNA, 89 bp, synthetic construct
  misc_feature 1..89: note = engineered ribonucleic acid scaffold (ERS) sequence
  source 1..89: mol_type = other DNA
actggcgcttctatctgtttactctcagcgccatcaccagcgactatgtcgtagtgggtaaagctccctcttcggagggagcatcagac

SEQ ID NO: 11224 - DNA, 90 bp, synthetic construct
  misc_feature 1..90: note = engineered ribonucleic acid scaffold (ERS) sequence
  source 1..90: mol_type = other DNA
actggcgcttctatctgatttactctcagcgccatcaccagcgactatgtcgtagtgggtaaagctccctcttcggagggagcatcagac

SEQ ID NO: 11225 - DNA, 89 bp, synthetic construct
  misc_feature 1..89: note = engineered ribonucleic acid scaffold (ERS) sequence
  source 1..89: mol_type = other DNA
actggcgcttctatctgattgctctcagcgccatcaccagcgactatgtcgtagtgggtaaagctccctcttcggagggagcatcagac

SEQ ID NO: 11226 - DNA, 91 bp, synthetic construct
  misc_feature 1..91: note = engineered ribonucleic acid scaffold (ERS) sequence
  source 1..91: mol_type = other DNA
actggcgcttctatatctgattactttgagcgccatcaccagcgactatgtcgtagtgggtaaagctccctcttcggagggagcatcagag

SEQ ID NO: 11227 - DNA, 90 bp, synthetic construct
  misc_feature 1..90: note = engineered ribonucleic acid scaffold (ERS) sequence
  source 1..90: mol_type = other DNA
actggcgcttctaatctgattactttgagcgccatcaccagcgactatgtcgtagtgggtaaagctccctcttcggagggagcatcagag

SEQ ID NO: 11228 - DNA, 88 bp, synthetic construct
  misc_feature 1..88: note = engineered ribonucleic acid scaffold (ERS) sequence
  source 1..88: mol_type = other DNA
actggcgcttctactgattactttgagcgccatcaccagcgactatgtcgtagtgggtaaagctccctcttcggagggagcatcagag

SEQ ID NO: 11229 - DNA, 89 bp, synthetic construct
  misc_feature 1..89: note = engineered ribonucleic acid scaffold (ERS) sequence
  source 1..89: mol_type = other DNA
actggcgcttctaactgattactttgagcgccatcaccagcgactatgtcgtagtgggtaaagctccctcttcggagggagcatcagag

SEQ ID NO: 11230 - DNA, 89 bp, synthetic construct
  misc_feature 1..89: note = engineered ribonucleic acid scaffold (ERS) sequence
  source 1..89: mol_type = other DNA
actggcgcttctacctgattactttgagcgccatcaccagcgactatgtcgtagtgggtaaagctccctcttcggagggagcatcagag

SEQ ID NO: 11231 - DNA, 89 bp, synthetic construct
  misc_feature 1..89: note = engineered ribonucleic acid scaffold (ERS) sequence
  source 1..89: mol_type = other DNA
actggcgcttctagctgattactttgagcgccatcaccagcgactatgtcgtagtgggtaaagctccctcttcggagggagcatcagag

SEQ ID NO: 11232 - DNA, 91 bp, synthetic construct
  misc_feature 1..91: note = engineered ribonucleic acid scaffold (ERS) sequence
  source 1..91: mol_type = other DNA
actggcgcttctattactgattactttgagcgccatcaccagcgactatgtcgtagtgggtaaagctccctcttcggagggagcatcagag

SEQ ID NO: 11233 - DNA, 89 bp, synthetic construct
  misc_feature 1..89: note = engineered ribonucleic acid scaffold (ERS) sequence
  source 1..89: mol_type = other DNA
actggcgcttctatatgattactttgagcgccatcaccagcgactatgtcgtagtgggtaaagctccctcttcggagggagcatcagag

SEQ ID NO: 11234 - DNA, 89 bp, synthetic construct
  misc_feature 1..89: note = engineered ribonucleic acid scaffold (ERS) sequence
  source 1..89: mol_type = other DNA
actggcgcttctatgtgattactttgagcgccatcaccagcgactatgtcgtagtgggtaaagctccctcttcggagggagcatcagag

SEQ ID NO: 11235 - DNA, 89 bp, synthetic construct
  misc_feature 1..89: note = engineered ribonucleic acid scaffold (ERS) sequence
  source 1..89: mol_type = other DNA
actggcgcttctatttgattactttgagcgccatcaccagcgactatgtcgtagtgggtaaagctccctcttcggagggagcatcagag

SEQ ID NO: 11236 - DNA, 90 bp, synthetic construct
  misc_feature 1..90: note = engineered ribonucleic acid scaffold (ERS) sequence
  source 1..90: mol_type = other DNA
actggcgcttctatcttgattactttgagcgccatcaccagcgactatgtcgtagtgggtaaagctccctcttcggagggagcatcagag

SEQ ID NO: 11237 - DNA, 89 bp, synthetic construct
  misc_feature 1..89: note = engineered ribonucleic acid scaffold (ERS) sequence
  source 1..89: mol_type = other DNA
actggcgcttctatcagattactttgagcgccatcaccagcgactatgtcgtagtgggtaaagctccctcttcggagggagcatcagag

SEQ ID NO: 11238 - DNA, 89 bp, synthetic construct
  misc_feature 1..89: note = engineered ribonucleic acid scaffold (ERS) sequence
  source 1..89: mol_type = other DNA
actggcgcttctatcggattactttgagcgccatcaccagcgactatgtcgtagtgggtaaagctccctcttcggagggagcatcagag

SEQ ID NO: 11239 - DNA, 90 bp, synthetic construct
  misc_feature 1..90: note = engineered ribonucleic acid scaffold (ERS) sequence
  source 1..90: mol_type = other DNA
actggcgcttctatctgaattactttgagcgccatcaccagcgactatgtcgtagtgggtaaagctccctcttcggagggagcatcagag

SEQ ID NO: 11240 - DNA, 90 bp, synthetic construct
  misc_feature 1..90: note = engineered ribonucleic acid scaffold (ERS) sequence
  source 1..90: mol_type = other DNA
actggcgcttctatctgtattactttgagcgccatcaccagcgactatgtcgtagtgggtaaagctccctcttcggagggagcatcagag

SEQ ID NO: 11241 - DNA, 89 bp, synthetic construct
  misc_feature 1..89: note = engineered ribonucleic acid scaffold (ERS) sequence
  source 1..89: mol_type = other DNA
actggcgcttctatctggttactttgagcgccatcaccagcgactatgtcgtagtgggtaaagctccctcttcggagggagcatcagag

SEQ ID NO: 11242 - DNA, 89 bp, synthetic construct
  misc_feature 1..89: note = engineered ribonucleic acid scaffold (ERS) sequence
  source 1..89: mol_type = other DNA
actggcgcttctatctgtttactttgagcgccatcaccagcgactatgtcgtagtgggtaaagctccctcttcggagggagcatcagag

SEQ ID NO: 11243 - DNA, 90 bp, synthetic construct
  misc_feature 1..90: note = engineered ribonucleic acid scaffold (ERS) sequence
  source 1..90: mol_type = other DNA
actggcgcttctatctgatttactttgagcgccatcaccagcgactatgtcgtagtgggtaaagctccctcttcggagggagcatcagag

SEQ ID NO: 11244 - DNA, 89 bp, synthetic construct
  misc_feature 1..89: note = engineered ribonucleic acid scaffold (ERS) sequence
  source 1..89: mol_type = other DNA
actggcgcttctatctgattgctttgagcgccatcaccagcgactatgtcgtagtgggtaaagctccctcttcggagggagcatcagag

SEQ ID NO: 11245 - DNA, 91 bp, synthetic construct
  misc_feature 1..91: note = engineered ribonucleic acid scaffold (ERS) sequence
  source 1..91: mol_type = other DNA
actggcgcttctatatctgattactttgagcgccatcaccagcgactatgtcgtagtgggtaaagctccctcttcggagggagcatcaaag

SEQ ID NO: 11246 - DNA, 90 bp, synthetic construct
  misc_feature 1..90: note = engineered ribonucleic acid scaffold (ERS) sequence
  source 1..90: mol_type = other DNA
actggcgcttctaatctgattactttgagcgccatcaccagcgactatgtcgtagtgggtaaagctccctcttcggagggagcatcaaag

SEQ ID NO: 11247 - DNA, 88 bp, synthetic construct
  misc_feature 1..88: note = engineered ribonucleic acid scaffold (ERS) sequence
  source 1..88: mol_type = other DNA
actggcgcttctactgattactttgagcgccatcaccagcgactatgtcgtagtgggtaaagctccctcttcggagggagcatcaaag

SEQ ID NO: 11248 - DNA, 89 bp, synthetic construct
  misc_feature 1..89: note = engineered ribonucleic acid scaffold (ERS) sequence
  source 1..89: mol_type = other DNA
actggcgcttctaactgattactttgagcgccatcaccagcgactatgtcgtagtgggtaaagctccctcttcggagggagcatcaaag

SEQ ID NO: 11249 - DNA, 89 bp, synthetic construct
  misc_feature 1..89: note = engineered ribonucleic acid scaffold (ERS) sequence
  source 1..89: mol_type = other DNA
actggcgcttctacctgattactttgagcgccatcaccagcgactatgtcgtagtgggtaaagctccctcttcggagggagcatcaaag

SEQ ID NO: 11250 - DNA, 89 bp, synthetic construct
  misc_feature 1..89: note = engineered ribonucleic acid scaffold (ERS) sequence
  source 1..89: mol_type = other DNA
actggcgcttctagctgattactttgagcgccatcaccagcgactatgtcgtagtgggtaaagctccctcttcggagggagcatcaaag

SEQ ID NO: 11251 - DNA, 91 bp, synthetic construct
  misc_feature 1..91: note = engineered ribonucleic acid scaffold (ERS) sequence
  source 1..91: mol_type = other DNA
actggcgcttctattactgattactttgagcgccatcaccagcgactatgtcgtagtgggtaaagctccctcttcggagggagcatcaaag

SEQ ID NO: 11252 - DNA, 89 bp, synthetic construct
  misc_feature 1..89: note = engineered ribonucleic acid scaffold (ERS) sequence
  source 1..89: mol_type = other DNA
actggcgcttctatatgattactttgagcgccatcaccagcgactatgtcgtagtgggtaaagctccctcttcggagggagcatcaaag

SEQ ID NO: 11253 - DNA, 89 bp, synthetic construct
  misc_feature 1..89: note = engineered ribonucleic acid scaffold (ERS) sequence
  source 1..89: mol_type = other DNA
actggcgcttctatgtgattactttgagcgccatcaccagcgactatgtcgtagtgggtaaagctccctcttcggagggagcatcaaag

SEQ ID NO: 11254 - DNA, 89 bp, synthetic construct
  misc_feature 1..89: note = engineered ribonucleic acid scaffold (ERS) sequence
  source 1..89: mol_type = other DNA
actggcgcttctatttgattactttgagcgccatcaccagcgactatgtcgtagtgggtaaagctccctcttcggagggagcatcaaag

SEQ ID NO: 11255 - DNA, 90 bp, synthetic construct
  misc_feature 1..90: note = engineered ribonucleic acid scaffold (ERS) sequence
  source 1..90: mol_type = other DNA
actggcgcttctatcttgattactttgagcgccatcaccagcgactatgtcgtagtgggtaaagctccctcttcggagggagcatcaaag

SEQ ID NO: 11256 - DNA, 89 bp, synthetic construct
  misc_feature 1..89: note = engineered ribonucleic acid scaffold (ERS) sequence
  source 1..89: mol_type = other DNA
actggcgcttctatcagattactttgagcgccatcaccagcgactatgtcgtagtgggtaaagctccctcttcggagggagcatcaaag

SEQ ID NO: 11257 - DNA, 89 bp, synthetic construct
  misc_feature 1..89: note = engineered ribonucleic acid scaffold (ERS) sequence
  source 1..89: mol_type = other DNA
actggcgcttctatcggattactttgagcgccatcaccagcgactatgtcgtagtgggtaaagctccctcttcggagggagcatcaaag

SEQ ID NO: 11258 - DNA, 90 bp, synthetic construct
  misc_feature 1..90: note = engineered ribonucleic acid scaffold (ERS) sequence
  source 1..90: mol_type = other DNA
actggcgcttctatctgaattactttgagcgccatcaccagcgactatgtcgtagtgggtaaagctccctcttcggagggagcatcaaag

SEQ ID NO: 11259 - DNA, 90 bp, synthetic construct
  misc_feature 1..90: note = engineered ribonucleic acid scaffold (ERS) sequence
  source 1..90: mol_type = other DNA
actggcgcttctatctgtattactttgagcgccatcaccagcgactatgtcgtagtgggtaaagctccctcttcggagggagcatcaaag

SEQ ID NO: 11260 - DNA, 89 bp, synthetic construct
  misc_feature 1..89: note = engineered ribonucleic acid scaffold (ERS) sequence
  source 1..89: mol_type = other DNA
actggcgcttctatctggttactttgagcgccatcaccagcgactatgtcgtagtgggtaaagctccctcttcggagggagcatcaaag

SEQ ID NO: 11261 - DNA, 89 bp, synthetic construct
  misc_feature 1..89: note = engineered ribonucleic acid scaffold (ERS) sequence
  source 1..89: mol_type = other DNA
actggcgcttctatctgtttactttgagcgccatcaccagcgactatgtcgtagtgggtaaagctccctcttcggagggagcatcaaag

SEQ ID NO: 11262 - DNA, 90 bp, synthetic construct
  misc_feature 1..90: note = engineered ribonucleic acid scaffold (ERS) sequence
  source 1..90: mol_type = other DNA
actggcgcttctatctgatttactttgagcgccatcaccagcgactatgtcgtagtgggtaaagctccctcttcggagggagcatcaaag

SEQ ID NO: 11263 - DNA, 89 bp, synthetic construct
  misc_feature 1..89: note = engineered ribonucleic acid scaffold (ERS) sequence
  source 1..89: mol_type = other DNA
actggcgcttctatctgattgctttgagcgccatcaccagcgactatgtcgtagtgggtaaagctccctcttcggagggagcatcaaag

SEQ ID NO: 11264 - DNA, 91 bp, synthetic construct
  misc_feature 1..91: note = engineered ribonucleic acid scaffold (ERS) sequence
  source 1..91: mol_type = other DNA
actggcgcttctatatctgattagtctcagcgccatcaccagcgactatgtcgtagtgggtaaagctccctcttcggagggagcatgagac

SEQ ID NO: 11265 - DNA, 90 bp, synthetic construct
  misc_feature 1..90: note = engineered ribonucleic acid scaffold (ERS) sequence
  source 1..90: mol_type = other DNA
actggcgcttctaatctgattagtctcagcgccatcaccagcgactatgtcgtagtgggtaaagctccctcttcggagggagcatgagac

SEQ ID NO: 11266 - DNA, 88 bp, synthetic construct
  misc_feature 1..88: note = engineered ribonucleic acid scaffold (ERS) sequence
  source 1..88: mol_type = other DNA
actggcgcttctactgattagtctcagcgccatcaccagcgactatgtcgtagtgggtaaagctccctcttcggagggagcatgagac

SEQ ID NO: 11267 - DNA, 89 bp, synthetic construct
  misc_feature 1..89: note = engineered ribonucleic acid scaffold (ERS) sequence
  source 1..89: mol_type = other DNA
actggcgcttctaactgattagtctcagcgccatcaccagcgactatgtcgtagtgggtaaagctccctcttcggagggagcatgagac

SEQ ID NO: 11268 - DNA, 89 bp, synthetic construct
  misc_feature 1..89: note = engineered ribonucleic acid scaffold (ERS) sequence
  source 1..89: mol_type = other DNA
actggcgcttctacctgattagtctcagcgccatcaccagcgactatgtcgtagtgggtaaagctccctcttcggagggagcatgagac

SEQ ID NO: 11269 - DNA, 89 bp, synthetic construct
  misc_feature 1..89: note = engineered ribonucleic acid scaffold (ERS) sequence
  source 1..89: mol_type = other DNA
actggcgcttctagctgattagtctcagcgccatcaccagcgactatgtcgtagtgggtaaagctccctcttcggagggagcatgagac

SEQ ID NO: 11270 - DNA, 91 bp, synthetic construct
  misc_feature 1..91: note = engineered ribonucleic acid scaffold (ERS) sequence
  source 1..91: mol_type = other DNA
actggcgcttctattactgattagtctcagcgccatcaccagcgactatgtcgtagtgggtaaagctccctcttcggagggagcatgagac

SEQ ID NO: 11271 - DNA, 89 bp, synthetic construct
  misc_feature 1..89: note = engineered ribonucleic acid scaffold (ERS) sequence
  source 1..89: mol_type = other DNA
actggcgcttctatatgattagtctcagcgccatcaccagcgactatgtcgtagtgggtaaagctccctcttcggagggagcatgagac

SEQ ID NO: 11272 - DNA, 89 bp, synthetic construct
  misc_feature 1..89: note = engineered ribonucleic acid scaffold (ERS) sequence
  source 1..89: mol_type = other DNA
actggcgcttctatgtgattagtctcagcgccatcaccagcgactatgtcgtagtgggtaaagctccctcttcggagggagcatgagac

SEQ ID NO: 11273 - DNA, 89 bp, synthetic construct
  misc_feature 1..89: note = engineered ribonucleic acid scaffold (ERS) sequence
  source 1..89: mol_type = other DNA
actggcgcttctatttgattagtctcagcgccatcaccagcgactatgtcgtagtgggtaaagctccctcttcggagggagcatgagac

SEQ ID NO: 11274 - DNA, 90 bp, synthetic construct
  misc_feature 1..90: note = engineered ribonucleic acid scaffold (ERS) sequence
  source 1..90: mol_type = other DNA
actggcgcttctatcttgattagtctcagcgccatcaccagcgactatgtcgtagtgggtaaagctccctcttcggagggagcatgagac

SEQ ID NO: 11275 - DNA, 89 bp, synthetic construct
  misc_feature 1..89: note = engineered ribonucleic acid scaffold (ERS) sequence
  source 1..89: mol_type = other DNA
actggcgcttctatcagattagtctcagcgccatcaccagcgactatgtcgtagtgggtaaagctccctcttcggagggagcatgagac

SEQ ID NO: 11276 - DNA, 89 bp, synthetic construct
  misc_feature 1..89: note = engineered ribonucleic acid scaffold (ERS) sequence
  source 1..89: mol_type = other DNA
actggcgcttctatcggattagtctcagcgccatcaccagcgactatgtcgtagtgggtaaagctccctcttcggagggagcatgagac

SEQ ID NO: 11277 - DNA, 90 bp, synthetic construct
  misc_feature 1..90: note = engineered ribonucleic acid scaffold (ERS) sequence
  source 1..90: mol_type = other DNA
actggcgcttctatctgaattagtctcagcgccatcaccagcgactatgtcgtagtgggtaaagctccctcttcggagggagcatgagac

SEQ ID NO: 11278 - DNA, 90 bp, synthetic construct
  misc_feature 1..90: note = engineered ribonucleic acid scaffold (ERS) sequence
  source 1..90: mol_type = other DNA
actggcgcttctatctgtattagtctcagcgccatcaccagcgactatgtcgtagtgggtaaagctccctcttcggagggagcatgagac

SEQ ID NO: 11279 - DNA, 89 bp, synthetic construct
  misc_feature 1..89: note = engineered ribonucleic acid scaffold (ERS) sequence
  source 1..89: mol_type = other DNA
actggcgcttctatctggttagtctcagcgccatcaccagcgactatgtcgtagtgggtaaagctccctcttcggagggagcatgagac

SEQ ID NO: 11280 - DNA, 89 bp, synthetic construct
  misc_feature 1..89: note = engineered ribonucleic acid scaffold (ERS) sequence
  source 1..89: mol_type = other DNA
actggcgcttctatctgtttagtctcagcgccatcaccagcgactatgtcgtagtgggtaaagctccctcttcggagggagcatgagac

SEQ ID NO: 11281 - DNA, 90 bp, synthetic construct
  misc_feature 1..90: note = engineered ribonucleic acid scaffold (ERS) sequence
  source 1..90: mol_type = other DNA
actggcgcttctatctgatttagtctcagcgccatcaccagcgactatgtcgtagtgggtaaagctccctcttcggagggagcatgagac

SEQ ID NO: 11282 - DNA, 89 bp, synthetic construct
  misc_feature 1..89: note = engineered ribonucleic acid scaffold (ERS) sequence
  source 1..89: mol_type = other DNA
actggcgcttctatctgattggtctcagcgccatcaccagcgactatgtcgtagtgggtaaagctccctcttcggagggagcatgagac

SEQ ID NO: 11283 - DNA, 91 bp, synthetic construct
  misc_feature 1..91: note = engineered ribonucleic acid scaffold (ERS) sequence
  source 1..91: mol_type = other DNA
actggcgcttctatatctgattagtctgagcgccatcaccagcgactatgtcgtagtgggtaaagctccctcttcggagggagcatcagac

SEQ ID NO: 11284 - DNA, 90 bp, synthetic construct
  misc_feature 1..90: note = engineered ribonucleic acid scaffold (ERS) sequence
  source 1..90: mol_type = other DNA
actggcgcttctaatctgattagtctgagcgccatcaccagcgactatgtcgtagtgggtaaagctccctcttcggagggagcatcagac

SEQ ID NO: 11285 - DNA, 88 bp, synthetic construct
  misc_feature 1..88: note = engineered ribonucleic acid scaffold (ERS) sequence
  source 1..88: mol_type = other DNA
actggcgcttctactgattagtctgagcgccatcaccagcgactatgtcgtagtgggtaaagctccctcttcggagggagcatcagac

SEQ ID NO: 11286 - DNA, 89 bp, synthetic construct
  misc_feature 1..89: note = engineered ribonucleic acid scaffold (ERS) sequence
  source 1..89: mol_type = other DNA
actggcgcttctaactgattagtctgagcgccatcaccagcgactatgtcgtagtgggtaaagctccctcttcggagggagcatcagac

SEQ ID NO: 11287 - DNA, 89 bp, synthetic construct
  misc_feature 1..89: note = engineered ribonucleic acid scaffold (ERS) sequence
  source 1..89: mol_type = other DNA
actggcgcttctacctgattagtctgagcgccatcaccagcgactatgtcgtagtgggtaaagctccctcttcggagggagcatcagac

SEQ ID NO: 11288 - DNA, 89 bp, synthetic construct
  misc_feature 1..89: note = engineered ribonucleic acid scaffold (ERS) sequence
  source 1..89: mol_type = other DNA
actggcgcttctagctgattagtctgagcgccatcaccagcgactatgtcgtagtgggtaaagctccctcttcggagggagcatcagac

SEQ ID NO: 11289 - DNA, 91 bp, synthetic construct
  misc_feature 1..91: note = engineered ribonucleic acid scaffold (ERS) sequence
  source 1..91: mol_type = other DNA
actggcgcttctattactgattagtctgagcgccatcaccagcgactatgtcgtagtgggtaaagctccctcttcggagggagcatcagac

SEQ ID NO: 11290 - DNA, 89 bp, synthetic construct
  misc_feature 1..89: note = engineered ribonucleic acid scaffold (ERS) sequence
  source 1..89: mol_type = other DNA
actggcgcttctatatgattagtctgagcgccatcaccagcgactatgtcgtagtgggtaaagctccctcttcggagggagcatcagac

SEQ ID NO: 11291 - DNA, 89 bp, synthetic construct
  misc_feature 1..89: note = engineered ribonucleic acid scaffold (ERS) sequence
  source 1..89: mol_type = other DNA
actggcgcttctatgtgattagtctgagcgccatcaccagcgactatgtcgtagtgggtaaagctccctcttcggagggagcatcagac

SEQ ID NO: 11292 - DNA, 89 bp, synthetic construct
  misc_feature 1..89: note = engineered ribonucleic acid scaffold (ERS) sequence
  source 1..89: mol_type = other DNA
actggcgcttctatttgattagtctgagcgccatcaccagcgactatgtcgtagtgggtaaagctccctcttcggagggagcatcagac

SEQ ID NO: 11293 - DNA, 90 bp, synthetic construct
  misc_feature 1..90: note = engineered ribonucleic acid scaffold (ERS) sequence
  source 1..90: mol_type = other DNA
actggcgcttctatcttgattagtctgagcgccatcaccagcgactatgtcgtagtgggtaaagctccctcttcggagggagcatcagac

SEQ ID NO: 11294 - DNA, 89 bp, synthetic construct
  misc_feature 1..89: note = engineered ribonucleic acid scaffold (ERS) sequence
  source 1..89: mol_type = other DNA
actggcgcttctatcagattagtctgagcgccatcaccagcgactatgtcgtagtgggtaaagctccctcttcggagggagcatcagac

SEQ ID NO: 11295 - DNA, 89 bp, synthetic construct
  misc_feature 1..89: note = engineered ribonucleic acid scaffold (ERS) sequence
  source 1..89: mol_type = other DNA
actggcgcttctatcggattagtctgagcgccatcaccagcgactatgtcgtagtgggtaaagctccctcttcggagggagcatcagac

SEQ ID NO: 11296 - DNA, 90 bp, synthetic construct
  misc_feature 1..90: note = engineered ribonucleic acid scaffold (ERS) sequence
  source 1..90: mol_type = other DNA
actggcgcttctatctgaattagtctgagcgccatcaccagcgactatgtcgtagtgggtaaagctccctcttcggagggagcatcagac

SEQ ID NO: 11297 - DNA, 90 bp, synthetic construct
  misc_feature 1..90: note = engineered ribonucleic acid scaffold (ERS) sequence
  source 1..90: mol_type = other DNA
actggcgcttctatctgtattagtctgagcgccatcaccagcgactatgtcgtagtgggtaaagctccctcttcggagggagcatcagac

SEQ ID NO: 11298 - DNA, 89 bp, synthetic construct
  misc_feature 1..89: note = engineered ribonucleic acid scaffold (ERS) sequence
  source 1..89: mol_type = other DNA
actggcgcttctatctggttagtctgagcgccatcaccagcgactatgtcgtagtgggtaaagctccctcttcggagggagcatcagac

SEQ ID NO: 11299 - DNA, 89 bp, synthetic construct
  misc_feature 1..89: note = engineered ribonucleic acid scaffold (ERS) sequence
  source 1..89: mol_type = other DNA
actggcgcttctatctgtttagtctgagcgccatcaccagcgactatgtcgtagtgggtaaagctccctcttcggagggagcatcagac

SEQ ID NO: 11300 - DNA, 90 bp, synthetic construct
  misc_feature 1..90: note = engineered ribonucleic acid scaffold (ERS) sequence
  source 1..90: mol_type = other DNA
actggcgcttctatctgatttagtctgagcgccatcaccagcgactatgtcgtagtgggtaaagctccctcttcggagggagcatcagac

SEQ ID NO: 11301 - DNA, 89 bp, synthetic construct
  misc_feature 1..89: note = engineered ribonucleic acid scaffold (ERS) sequence
  source 1..89: mol_type = other DNA
actggcgcttctatctgattggtctgagcgccatcaccagcgactatgtcgtagtgggtaaagctccctcttcggagggagcatcagac

SEQ ID NO: 11302 - DNA, 91 bp, synthetic construct
  misc_feature 1..91: note = engineered ribonucleic acid scaffold (ERS) sequence
  source 1..91: mol_type = other DNA
actggcgcttctatatctgattactctcagcgccatcaccagcgactatgtcgtagtgggtaaagctccctcttcggagggagcatgagag

SEQ ID NO: 11303 - DNA, 90 bp, synthetic construct
  misc_feature 1..90: note = engineered ribonucleic acid scaffold (ERS) sequence
  source 1..90: mol_type = other DNA
actggcgcttctaatctgattactctcagcgccatcaccagcgactatgtcgtagtgggtaaagctccctcttcggagggagcatgagag

SEQ ID NO: 11304 - DNA, 88 bp, synthetic construct
  misc_feature 1..88: note = engineered ribonucleic acid scaffold (ERS) sequence
  source 1..88: mol_type = other DNA
actggcgcttctactgattactctcagcgccatcaccagcgactatgtcgtagtgggtaaagctccctcttcggagggagcatgagag

SEQ ID NO: 11305 - DNA, 89 bp, synthetic construct
  misc_feature 1..89: note = engineered ribonucleic acid scaffold (ERS) sequence
  source 1..89: mol_type = other DNA
actggcgcttctaactgattactctcagcgccatcaccagcgactatgtcgtagtgggtaaagctccctcttcggagggagcatgagag

SEQ ID NO: 11306 - DNA, 89 bp, synthetic construct
  misc_feature 1..89: note = engineered ribonucleic acid scaffold (ERS) sequence
  source 1..89: mol_type = other DNA
actggcgcttctacctgattactctcagcgccatcaccagcgactatgtcgtagtgggtaaagctccctcttcggagggagcatgagag

SEQ ID NO: 11307 - DNA, 89 bp, synthetic construct
  misc_feature 1..89: note = engineered ribonucleic acid scaffold (ERS) sequence
  source 1..89: mol_type = other DNA
actggcgcttctagctgattactctcagcgccatcaccagcgactatgtcgtagtgggtaaagctccctcttcggagggagcatgagag

SEQ ID NO: 11308 - DNA, 91 bp, synthetic construct
  misc_feature 1..91: note = engineered ribonucleic acid scaffold (ERS) sequence
  source 1..91: mol_type = other DNA
actggcgcttctattactgattactctcagcgccatcaccagcgactatgtcgtagtgggtaaagctccctcttcggagggagcatgagag

SEQ ID NO: 11309 - DNA, 89 bp, synthetic construct
  misc_feature 1..89: note = engineered ribonucleic acid scaffold (ERS) sequence
  source 1..89: mol_type = other DNA
actggcgcttctatatgattactctcagcgccatcaccagcgactatgtcgtagtgggtaaagctccctcttcggagggagcatgagag

SEQ ID NO: 11310 - DNA, 89 bp, synthetic construct
  misc_feature 1..89: note = engineered ribonucleic acid scaffold (ERS) sequence
  source 1..89: mol_type = other DNA
actggcgcttctatgtgattactctcagcgccatcaccagcgactatgtcgtagtgggtaaagctccctcttcggagggagcatgagag

SEQ ID NO: 11311 - DNA, 89 bp, synthetic construct
  misc_feature 1..89: note = engineered ribonucleic acid scaffold (ERS) sequence
  source 1..89: mol_type = other DNA
actggcgcttctatttgattactctcagcgccatcaccagcgactatgtcgtagtgggtaaagctccctcttcggagggagcatgagag

SEQ ID NO: 11312 - DNA, 90 bp, synthetic construct
  misc_feature 1..90: note = engineered ribonucleic acid scaffold (ERS) sequence
  source 1..90: mol_type = other DNA
actggcgcttctatcttgattactctcagcgccatcaccagcgactatgtcgtagtgggtaaagctccctcttcggagggagcatgagag

SEQ ID NO: 11313 - DNA, 89 bp, synthetic construct
  misc_feature 1..89: note = engineered ribonucleic acid scaffold (ERS) sequence
  source 1..89: mol_type = other DNA
actggcgcttctatcagattactctcagcgccatcaccagcgactatgtcgtagtgggtaaagctccctcttcggagggagcatgagag

SEQ ID NO: 11314 - DNA, 89 bp, synthetic construct
  misc_feature 1..89: note = engineered ribonucleic acid scaffold (ERS) sequence
  source 1..89: mol_type = other DNA
actggcgcttctatcggattactctcagcgccatcaccagcgactatgtcgtagtgggtaaagctccctcttcggagggagcatgagag

SEQ ID NO: 11315 - DNA, 90 bp, synthetic construct
  misc_feature 1..90: note = engineered ribonucleic acid scaffold (ERS) sequence
  source 1..90: mol_type = other DNA
actggcgcttctatctgaattactctcagcgccatcaccagcgactatgtcgtagtgggtaaagctccctcttcggagggagcatgagag

SEQ ID NO: 11316 - DNA, 90 bp, synthetic construct
  misc_feature 1..90: note = engineered ribonucleic acid scaffold (ERS) sequence
  source 1..90: mol_type = other DNA
actggcgcttctatctgtattactctcagcgccatcaccagcgactatgtcgtagtgggtaaagctccctcttcggagggagcatgagag

SEQ ID NO: 11317 - DNA, 89 bp, synthetic construct
  misc_feature 1..89: note = engineered ribonucleic acid scaffold (ERS) sequence
  source 1..89: mol_type = other DNA
actggcgcttctatctggttactctcagcgccatcaccagcgactatgtcgtagtgggtaaagctccctcttcggagggagcatgagag

SEQ ID NO: 11318 - DNA, 89 bp, synthetic construct
  misc_feature 1..89: note = engineered ribonucleic acid scaffold (ERS) sequence
  source 1..89: mol_type = other DNA
actggcgcttctatctgtttactctcagcgccatcaccagcgactatgtcgtagtgggtaaagctccctcttcggagggagcatgagag

SEQ ID NO: 11319 - DNA, 90 bp, synthetic construct
  misc_feature 1..90: note = engineered ribonucleic acid scaffold (ERS) sequence
  source 1..90: mol_type = other DNA
actggcgcttctatctgatttactctcagcgccatcaccagcgactatgtcgtagtgggtaaagctccctcttcggagggagcatgagag

SEQ ID NO: 11320 - DNA, 89 bp, synthetic construct
  misc_feature 1..89: note = engineered ribonucleic acid scaffold (ERS) sequence
  source 1..89: mol_type = other DNA
actggcgcttctatctgattgctctcagcgccatcaccagcgactatgtcgtagtgggtaaagctccctcttcggagggagcatgagag

SEQ ID NO: 11321 - DNA, 92 bp, synthetic construct
  misc_feature 1..92: note = engineered ribonucleic acid scaffold (ERS) sequence
  source 1..92: mol_type = other DNA
actggcgctccctatatctgattaccccgagcgccatcaccagcgactatgtcgtagtgggtaaagctccctcttcggagggagcatcgggg

SEQ ID NO: 11322 - DNA, 90 bp, synthetic construct
  misc_feature 1..90: note = engineered ribonucleic acid scaffold (ERS) sequence
  source 1..90: mol_type = other DNA
actggcgctcccaatctgattaccccgagcgccatcaccagcgactatgtcgtagtgggtaaagctccctcttcggagggagcatcgggg

SEQ ID NO: 11323 - DNA, 88 bp, synthetic construct
  misc_feature 1..88: note = engineered ribonucleic acid scaffold (ERS) sequence
  source 1..88: mol_type = other DNA
actggcgctcccactgattaccccgagcgccatcaccagcgactatgtcgtagtgggtaaagctccctcttcggagggagcatcgggg

SEQ ID NO: 11324 - DNA, 89 bp, synthetic construct
  misc_feature 1..89: note = engineered ribonucleic acid scaffold (ERS) sequence
  source 1..89: mol_type = other DNA
actggcgctcccaactgattaccccgagcgccatcaccagcgactatgtcgtagtgggtaaagctccctcttcggagggagcatcgggg

SEQ ID NO: 11325 - DNA, 89 bp, synthetic construct
  misc_feature 1..89: note = engineered ribonucleic acid scaffold (ERS) sequence
  source 1..89: mol_type = other DNA
actggcgctcccacctgattaccccgagcgccatcaccagcgactatgtcgtagtgggtaaagctccctcttcggagggagcatcgggg

SEQ ID NO: 11326 - DNA, 89 bp, synthetic construct
  misc_feature 1..89: note = engineered ribonucleic acid scaffold (ERS) sequence
  source 1..89: mol_type = other DNA
actggcgctcccagctgattaccccgagcgccatcaccagcgactatgtcgtagtgggtaaagctccctcttcggagggagcatcgggg

SEQ ID NO: 11327 - DNA, 91 bp, synthetic construct
  misc_feature 1..91: note = engineered ribonucleic acid scaffold (ERS) sequence
  source 1..91: mol_type = other DNA
actggcgctcccattactgattaccccgagcgccatcaccagcgactatgtcgtagtgggtaaagctccctcttcggagggagcatcgggg

SEQ ID NO: 11328 - DNA, 89 bp, synthetic construct
  misc_feature 1..89: note = engineered ribonucleic acid scaffold (ERS) sequence
  source 1..89: mol_type = other DNA
actggcgctcccatatgattaccccgagcgccatcaccagcgactatgtcgtagtgggtaaagctccctcttcggagggagcatcgggg

SEQ ID NO: 11329 - DNA, 89 bp, synthetic construct
  misc_feature 1..89: note = engineered ribonucleic acid scaffold (ERS) sequence
  source 1..89: mol_type = other DNA
actggcgctcccatgtgattaccccgagcgccatcaccagcgactatgtcgtagtgggtaaagctccctcttcggagggagcatcgggg

SEQ ID NO: 11330 - DNA, 89 bp, synthetic construct
  misc_feature 1..89: note = engineered ribonucleic acid scaffold (ERS) sequence
  source 1..89: mol_type = other DNA
actggcgctcccatttgattaccccgagcgccatcaccagcgactatgtcgtagtgggtaaagctccctcttcggagggagcatcgggg

SEQ ID NO: 11331 - DNA, 90 bp, synthetic construct
  misc_feature 1..90: note = engineered ribonucleic acid scaffold (ERS) sequence
  source 1..90: mol_type = other DNA
actggcgctcccatcttgattaccccgagcgccatcaccagcgactatgtcgtagtgggtaaagctccctcttcggagggagcatcgggg

SEQ ID NO: 11332 - DNA, 89 bp, synthetic construct
  misc_feature 1..89: note = engineered ribonucleic acid scaffold (ERS) sequence
  source 1..89: mol_type = other DNA
actggcgctcccatcagattaccccgagcgccatcaccagcgactatgtcgtagtgggtaaagctccctcttcggagggagcatcgggg

SEQ ID NO: 11333 - DNA, 89 bp, synthetic construct
  misc_feature 1..89: note = engineered ribonucleic acid scaffold (ERS) sequence
  source 1..89: mol_type = other DNA
actggcgctcccatcggattaccccgagcgccatcaccagcgactatgtcgtagtgggtaaagctccctcttcggagggagcatcgggg

SEQ ID NO: 11334 - DNA, 90 bp, synthetic construct
  misc_feature 1..90: note = engineered ribonucleic acid scaffold (ERS) sequence
  source 1..90: mol_type = other DNA
actggcgctcccatctgaattaccccgagcgccatcaccagcgactatgtcgtagtgggtaaagctccctcttcggagggagcatcgggg

SEQ ID NO: 11335 - DNA, 90 bp, synthetic construct
  misc_feature 1..90: note = engineered ribonucleic acid scaffold (ERS) sequence
  source 1..90: mol_type = other DNA
actggcgctcccatctgtattaccccgagcgccatcaccagcgactatgtcgtagtgggtaaagctccctcttcggagggagcatcgggg

SEQ ID NO: 11336 - DNA, 89 bp, synthetic construct
  misc_feature 1..89: note = engineered ribonucleic acid scaffold (ERS) sequence
  source 1..89: mol_type = other DNA
actggcgctcccatctggttaccccgagcgccatcaccagcgactatgtcgtagtgggtaaagctccctcttcggagggagcatcgggg

SEQ ID NO: 11337 - DNA, 89 bp, synthetic construct
  misc_feature 1..89: note = engineered ribonucleic acid scaffold (ERS) sequence
  source 1..89: mol_type = other DNA
actggcgctcccatctgtttaccccgagcgccatcaccagcgactatgtcgtagtgggtaaagctccctcttcggagggagcatcgggg

SEQ ID NO: 11338 - DNA, 90 bp, synthetic construct
  misc_feature 1..90: note = engineered ribonucleic acid scaffold (ERS) sequence
  source 1..90: mol_type = other DNA
actggcgctcccatctgatttaccccgagcgccatcaccagcgactatgtcgtagtgggtaaagctccctcttcggagggagcatcgggg

SEQ ID NO: 11339 - DNA, 89 bp, synthetic construct
  misc_feature 1..89: note = engineered ribonucleic acid scaffold (ERS) sequence
  source 1..89: mol_type = other DNA
actggcgctcccatctgattgccccgagcgccatcaccagcgactatgtcgtagtgggtaaagctccctcttcggagggagcatcgggg

SEQ ID NO: 11340 - DNA, 92 bp, synthetic construct
  misc_feature 1..92: note = engineered ribonucleic acid scaffold (ERS) sequence
  source 1..92: mol_type = other DNA
actggcgctccttatatctgattactccgagcgccatcaccagcgactatgtcgtagtgggtaaagctccctcttcggagggagcatcggag

SEQ ID NO: 11341 - DNA, 90 bp, synthetic construct
  misc_feature 1..90: note = engineered ribonucleic acid scaffold (ERS) sequence
  source 1..90: mol_type = other DNA
actggcgctcctaatctgattactccgagcgccatcaccagcgactatgtcgtagtgggtaaagctccctcttcggagggagcatcggag

SEQ ID NO: 11342 - DNA, 88 bp, synthetic construct
  misc_feature 1..88: note = engineered ribonucleic acid scaffold (ERS) sequence
  source 1..88: mol_type = other DNA
actggcgctcctactgattactccgagcgccatcaccagcgactatgtcgtagtgggtaaagctccctcttcggagggagcatcggag

SEQ ID NO: 11343 - DNA, 89 bp, synthetic construct
  misc_feature 1..89: note = engineered ribonucleic acid scaffold (ERS) sequence
  source 1..89: mol_type = other DNA
actggcgctcctaactgattactccgagcgccatcaccagcgactatgtcgtagtgggtaaagctccctcttcggagggagcatcggag

SEQ ID NO: 11344 - DNA, 89 bp, synthetic construct
  misc_feature 1..89: note = engineered ribonucleic acid scaffold (ERS) sequence
  source 1..89: mol_type = other DNA
actggcgctcctacctgattactccgagcgccatcaccagcgactatgtcgtagtgggtaaagctccctcttcggagggagcatcggag

SEQ ID NO: 11345 - DNA, 89 bp, synthetic construct
  misc_feature 1..89: note = engineered ribonucleic acid scaffold (ERS) sequence
  source 1..89: mol_type = other DNA
actggcgctcctagctgattactccgagcgccatcaccagcgactatgtcgtagtgggtaaagctccctcttcggagggagcatcggag

SEQ ID NO: 11346 - DNA, 91 bp, synthetic construct
  misc_feature 1..91: note = engineered ribonucleic acid scaffold (ERS) sequence
  source 1..91: mol_type = other DNA
actggcgctcctattactgattactccgagcgccatcaccagcgactatgtcgtagtgggtaaagctccctcttcggagggagcatcggag

SEQ ID NO: 11347 - DNA, 89 bp, synthetic construct
  misc_feature 1..89: note = engineered ribonucleic acid scaffold (ERS) sequence
  source 1..89: mol_type = other DNA
actggcgctcctatatgattactccgagcgccatcaccagcgactatgtcgtagtgggtaaagctccctcttcggagggagcatcggag

SEQ ID NO: 11348 - DNA, 89 bp, synthetic construct
  misc_feature 1..89: note = engineered ribonucleic acid scaffold (ERS) sequence
  source 1..89: mol_type = other DNA
actggcgctcctatgtgattactccgagcgccatcaccagcgactatgtcgtagtgggtaaagctccctcttcggagggagcatcggag

SEQ ID NO: 11349 - DNA, 89 bp, synthetic construct
  misc_feature 1..89: note = engineered ribonucleic acid scaffold (ERS) sequence
  source 1..89: mol_type = other DNA
actggcgctcctatttgattactccgagcgccatcaccagcgactatgtcgtagtgggtaaagctccctcttcggagggagcatcggag

SEQ ID NO: 11350 - DNA, 90 bp, synthetic construct
  misc_feature 1..90: note = engineered ribonucleic acid scaffold (ERS) sequence
  source 1..90: mol_type = other DNA
actggcgctcctatcttgattactccgagcgccatcaccagcgactatgtcgtagtgggtaaagctccctcttcggagggagcatcggag

SEQ ID NO: 11351 - DNA, 89 bp, synthetic construct
  misc_feature 1..89: note = engineered ribonucleic acid scaffold (ERS) sequence
  source 1..89: mol_type = other DNA
actggcgctcctatcagattactccgagcgccatcaccagcgactatgtcgtagtgggtaaagctccctcttcggagggagcatcggag

SEQ ID NO: 11352 - DNA, 89 bp, synthetic construct
  misc_feature 1..89: note = engineered ribonucleic acid scaffold (ERS) sequence
  source 1..89: mol_type = other DNA
actggcgctcctatcggattactccgagcgccatcaccagcgactatgtcgtagtgggtaaagctccctcttcggagggagcatcggag

SEQ ID NO: 11353 - DNA, 90 bp, synthetic construct
  misc_feature 1..90: note = engineered ribonucleic acid scaffold (ERS) sequence
  source 1..90: mol_type = other DNA
actggcgctcctatctgaattactccgagcgccatcaccagcgactatgtcgtagtgggtaaagctccctcttcggagggagcatcggag

SEQ ID NO: 11354 - DNA, 90 bp, synthetic construct
  misc_feature 1..90: note = engineered ribonucleic acid scaffold (ERS) sequence
  source 1..90: mol_type = other DNA
actggcgctcctatctgtattactccgagcgccatcaccagcgactatgtcgtagtgggtaaagctccctcttcggagggagcatcggag

SEQ ID NO: 11355 - DNA, 89 bp, synthetic construct
  misc_feature 1..89: note = engineered ribonucleic acid scaffold (ERS) sequence
  source 1..89: mol_type = other DNA
actggcgctcctatctggttactccgagcgccatcaccagcgactatgtcgtagtgggtaaagctccctcttcggagggagcatcggag

SEQ ID NO: 11356 - DNA, 89 bp, synthetic construct
  misc_feature 1..89: note = engineered ribonucleic acid scaffold (ERS) sequence
  source 1..89: mol_type = other DNA
actggcgctcctatctgtttactccgagcgccatcaccagcgactatgtcgtagtgggtaaagctccctcttcggagggagcatcggag

SEQ ID NO: 11357 - DNA, 90 bp, synthetic construct
  misc_feature 1..90: note = engineered ribonucleic acid scaffold (ERS) sequence
  source 1..90: mol_type = other DNA
actggcgctcctatctgatttactccgagcgccatcaccagcgactatgtcgtagtgggtaaagctccctcttcggagggagcatcggag

SEQ ID NO: 11358 - DNA, 89 bp, synthetic construct
  misc_feature 1..89: note = engineered ribonucleic acid scaffold (ERS) sequence
  source 1..89: mol_type = other DNA
actggcgctcctatctgattgctccgagcgccatcaccagcgactatgtcgtagtgggtaaagctccctcttcggagggagcatcggag

SEQ ID NO: 11359 - DNA, 92 bp, synthetic construct
  misc_feature 1..92: note = engineered ribonucleic acid scaffold (ERS) sequence
  source 1..92: mol_type = other DNA
actggcgctgggtatatctgattaccccgagcgccatcaccagcgactatgtcgtagtgggtaaagctccctcttcggagggagcatcgggg

SEQ ID NO: 11360 - DNA, 90 bp, synthetic construct
  misc_feature 1..90: note = engineered ribonucleic acid scaffold (ERS) sequence
  source 1..90: mol_type = other DNA
actggcgctgggaatctgattaccccgagcgccatcaccagcgactatgtcgtagtgggtaaagctccctcttcggagggagcatcgggg

SEQ ID NO: 11361 - DNA, 88 bp, synthetic construct
  misc_feature 1..88: note = engineered ribonucleic acid scaffold (ERS) sequence
  source 1..88: mol_type = other DNA
actggcgctgggactgattaccccgagcgccatcaccagcgactatgtcgtagtgggtaaagctccctcttcggagggagcatcgggg

SEQ ID NO: 11362 - DNA, 89 bp, synthetic construct
  misc_feature 1..89: note = engineered ribonucleic acid scaffold (ERS) sequence
  source 1..89: mol_type = other DNA
actggcgctgggaactgattaccccgagcgccatcaccagcgactatgtcgtagtgggtaaagctccctcttcggagggagcatcgggg

SEQ ID NO: 11363 - DNA, 89 bp, synthetic construct
  misc_feature 1..89: note = engineered ribonucleic acid scaffold (ERS) sequence
  source 1..89: mol_type = other DNA
actggcgctgggacctgattaccccgagcgccatcaccagcgactatgtcgtagtgggtaaagctccctcttcggagggagcatcgggg

SEQ ID NO: 11364 - DNA, 89 bp, synthetic construct
  misc_feature 1..89: note = engineered ribonucleic acid scaffold (ERS) sequence
  source 1..89: mol_type = other DNA
actggcgctgggagctgattaccccgagcgccatcaccagcgactatgtcgtagtgggtaaagctccctcttcggagggagcatcgggg

SEQ ID NO: 11365 - DNA, 91 bp, synthetic construct
  misc_feature 1..91: note = engineered ribonucleic acid scaffold (ERS) sequence
  source 1..91: mol_type = other DNA
actggcgctgggattactgattaccccgagcgccatcaccagcgactatgtcgtagtgggtaaagctccctcttcggagggagcatcgggg

SEQ ID NO: 11366 - DNA, 89 bp, synthetic construct
  misc_feature 1..89: note = engineered ribonucleic acid scaffold (ERS) sequence
  source 1..89: mol_type = other DNA
actggcgctgggatatgattaccccgagcgccatcaccagcgactatgtcgtagtgggtaaagctccctcttcggagggagcatcgggg

SEQ ID NO: 11367 - DNA, 89 bp, synthetic construct
  misc_feature 1..89: note = engineered ribonucleic acid scaffold (ERS) sequence
  source 1..89: mol_type = other DNA
actggcgctgggatgtgattaccccgagcgccatcaccagcgactatgtcgtagtgggtaaagctccctcttcggagggagcatcgggg

SEQ ID NO: 11368 - DNA, 89 bp, synthetic construct
  misc_feature 1..89: note = engineered ribonucleic acid scaffold (ERS) sequence
  source 1..89: mol_type = other DNA
actggcgctgggatttgattaccccgagcgccatcaccagcgactatgtcgtagtgggtaaagctccctcttcggagggagcatcgggg

SEQ ID NO: 11369 - DNA, 90 bp, synthetic construct
  misc_feature 1..90: note = engineered ribonucleic acid scaffold (ERS) sequence
  source 1..90: mol_type = other DNA
actggcgctgggatcttgattaccccgagcgccatcaccagcgactatgtcgtagtgggtaaagctccctcttcggagggagcatcgggg

SEQ ID NO: 11370 - DNA, 89 bp, synthetic construct
  misc_feature 1..89: note = engineered ribonucleic acid scaffold (ERS) sequence
  source 1..89: mol_type = other DNA
actggcgctgggatcagattaccccgagcgccatcaccagcgactatgtcgtagtgggtaaagctccctcttcggagggagcatcgggg

SEQ ID NO: 11371 - DNA, 89 bp, synthetic construct
  misc_feature 1..89: note = engineered ribonucleic acid scaffold (ERS) sequence
  source 1..89: mol_type = other DNA
actggcgctgggatcggattaccccgagcgccatcaccagcgactatgtcgtagtgggtaaagctccctcttcggagggagcatcgggg

SEQ ID NO: 11372 - DNA, 90 bp, synthetic construct
  misc_feature 1..90: note = engineered ribonucleic acid scaffold (ERS) sequence
  source 1..90: mol_type = other DNA
actggcgctgggatctgaattaccccgagcgccatcaccagcgactatgtcgtagtgggtaaagctccctcttcggagggagcatcgggg

SEQ ID NO: 11373 - DNA, 90 bp, synthetic construct
  misc_feature 1..90: note = engineered ribonucleic acid scaffold (ERS) sequence
  source 1..90: mol_type = other DNA
actggcgctgggatctgtattaccccgagcgccatcaccagcgactatgtcgtagtgggtaaagctccctcttcggagggagcatcgggg

SEQ ID NO: 11374 - DNA, 89 bp, synthetic construct
  misc_feature 1..89: note = engineered ribonucleic acid scaffold (ERS) sequence
  source 1..89: mol_type = other DNA
actggcgctgggatctggttaccccgagcgccatcaccagcgactatgtcgtagtgggtaaagctccctcttcggagggagcatcgggg

SEQ ID NO: 11375 - DNA, 89 bp, synthetic construct
  misc_feature 1..89: note = engineered ribonucleic acid scaffold (ERS) sequence
  source 1..89: mol_type = other DNA
actggcgctgggatctgtttaccccgagcgccatcaccagcgactatgtcgtagtgggtaaagctccctcttcggagggagcatcgggg

SEQ ID NO: 11376 - DNA, 90 bp, synthetic construct
  misc_feature 1..90: note = engineered ribonucleic acid scaffold (ERS) sequence
  source 1..90: mol_type = other DNA
actggcgctgggatctgatttaccccgagcgccatcaccagcgactatgtcgtagtgggtaaagctccctcttcggagggagcatcgggg

SEQ ID NO: 11377 - DNA, 89 bp, synthetic construct
  misc_feature 1..89: note = engineered ribonucleic acid scaffold (ERS) sequence
  source 1..89: mol_type = other DNA
actggcgctgggatctgattgccccgagcgccatcaccagcgactatgtcgtagtgggtaaagctccctcttcggagggagcatcgggg

SEQ ID NO: 11378 - DNA, 92 bp, synthetic construct
  misc_feature 1..92: note = engineered ribonucleic acid scaffold (ERS) sequence
  source 1..92: mol_type = other DNA
actggcgctggttatatctgattactccgagcgccatcaccagcgactatgtcgtagtgggtaaagctccctcttcggagggagcatcggag

SEQ ID NO: 11379 - DNA, 90 bp, synthetic construct
  misc_feature 1..90: note = engineered ribonucleic acid scaffold (ERS) sequence
  source 1..90: mol_type = other DNA
actggcgctggtaatctgattactccgagcgccatcaccagcgactatgtcgtagtgggtaaagctccctcttcggagggagcatcggag

SEQ ID NO: 11380 - DNA, 88 bp, synthetic construct
  misc_feature 1..88: note = engineered ribonucleic acid scaffold (ERS) sequence
  source 1..88: mol_type = other DNA
actggcgctggtactgattactccgagcgccatcaccagcgactatgtcgtagtgggtaaagctccctcttcggagggagcatcggag

SEQ ID NO: 11381 - DNA, 89 bp, synthetic construct
  misc_feature 1..89: note = engineered ribonucleic acid scaffold (ERS) sequence
  source 1..89: mol_type = other DNA
actggcgctggtaactgattactccgagcgccatcaccagcgactatgtcgtagtgggtaaagctccctcttcggagggagcatcggag

SEQ ID NO: 11382 - DNA, 89 bp, synthetic construct
  misc_feature 1..89: note = engineered ribonucleic acid scaffold (ERS) sequence
  source 1..89: mol_type = other DNA
actggcgctggtacctgattactccgagcgccatcaccagcgactatgtcgtagtgggtaaagctccctcttcggagggagcatcggag

SEQ ID NO: 11383 - DNA, 89 bp, synthetic construct
  misc_feature 1..89: note = engineered ribonucleic acid scaffold (ERS) sequence
  source 1..89: mol_type = other DNA
actggcgctggtagctgattactccgagcgccatcaccagcgactatgtcgtagtgggtaaagctccctcttcggagggagcatcggag

SEQ ID NO: 11384 - DNA, 91 bp, synthetic construct
  misc_feature 1..91: note = engineered ribonucleic acid scaffold (ERS) sequence
  source 1..91: mol_type = other DNA
actggcgctggtattactgattactccgagcgccatcaccagcgactatgtcgtagtgggtaaagctccctcttcggagggagcatcggag

SEQ ID NO: 11385 - DNA, 89 bp, synthetic construct
  misc_feature 1..89: note = engineered ribonucleic acid scaffold (ERS) sequence
  source 1..89: mol_type = other DNA
actggcgctggtatatgattactccgagcgccatcaccagcgactatgtcgtagtgggtaaagctccctcttcggagggagcatcggag

SEQ ID NO: 11386 - DNA, 89 bp, synthetic construct
  misc_feature 1..89: note = engineered ribonucleic acid scaffold (ERS) sequence
  source 1..89: mol_type = other DNA
actggcgctggtatgtgattactccgagcgccatcaccagcgactatgtcgtagtgggtaaagctccctcttcggagggagcatcggag

SEQ ID NO: 11387 - DNA, 89 bp, synthetic construct
  misc_feature 1..89: note = engineered ribonucleic acid scaffold (ERS) sequence
  source 1..89: mol_type = other DNA
actggcgctggtatttgattactccgagcgccatcaccagcgactatgtcgtagtgggtaaagctccctcttcggagggagcatcggag

SEQ ID NO: 11388 - DNA, 90 bp, synthetic construct
  misc_feature 1..90: note = engineered ribonucleic acid scaffold (ERS) sequence
  source 1..90: mol_type = other DNA
actggcgctggtatcttgattactccgagcgccatcaccagcgactatgtcgtagtgggtaaagctccctcttcggagggagcatcggag

SEQ ID NO: 11389 - DNA, 89 bp, synthetic construct
  misc_feature 1..89: note = engineered ribonucleic acid scaffold (ERS) sequence
  source 1..89: mol_type = other DNA
actggcgctggtatcagattactccgagcgccatcaccagcgactatgtcgtagtgggtaaagctccctcttcggagggagcatcggag

SEQ ID NO: 11390 - DNA, 89 bp, synthetic construct
  misc_feature 1..89: note = engineered ribonucleic acid scaffold (ERS) sequence
  source 1..89: mol_type = other DNA
actggcgctggtatcggattactccgagcgccatcaccagcgactatgtcgtagtgggtaaagctccctcttcggagggagcatcggag

SEQ ID NO: 11391 - DNA, 90 bp, synthetic construct
  misc_feature 1..90: note = engineered ribonucleic acid scaffold (ERS) sequence
  source 1..90: mol_type = other DNA
actggcgctggtatctgaattactccgagcgccatcaccagcgactatgtcgtagtgggtaaagctccctcttcggagggagcatcggag

SEQ ID NO: 11392 - DNA, 90 bp, synthetic construct
  misc_feature 1..90: note = engineered ribonucleic acid scaffold (ERS) sequence
  source 1..90: mol_type = other DNA
actggcgctggtatctgtattactccgagcgccatcaccagcgactatgtcgtagtgggtaaagctccctcttcggagggagcatcggag

SEQ ID NO: 11393 - DNA, 89 bp, synthetic construct
  misc_feature 1..89: note = engineered ribonucleic acid scaffold (ERS) sequence
  source 1..89: mol_type = other DNA
actggcgctggtatctggttactccgagcgccatcaccagcgactatgtcgtagtgggtaaagctccctcttcggagggagcatcggag

SEQ ID NO: 11394 - DNA, 89 bp, synthetic construct
  misc_feature 1..89: note = engineered ribonucleic acid scaffold (ERS) sequence
  source 1..89: mol_type = other DNA
actggcgctggtatctgtttactccgagcgccatcaccagcgactatgtcgtagtgggtaaagctccctcttcggagggagcatcggag

SEQ ID NO: 11395 - DNA, 90 bp, synthetic construct
  misc_feature 1..90: note = engineered ribonucleic acid scaffold (ERS) sequence
  source 1..90: mol_type = other DNA
actggcgctggtatctgatttactccgagcgccatcaccagcgactatgtcgtagtgggtaaagctccctcttcggagggagcatcggag

SEQ ID NO: 11396 - DNA, 89 bp, synthetic construct
  misc_feature 1..89: note = engineered ribonucleic acid scaffold (ERS) sequence
  source 1..89: mol_type = other DNA
actggcgctggtatctgattgctccgagcgccatcaccagcgactatgtcgtagtgggtaaagctccctcttcggagggagcatcggag

SEQ ID NO: 11397 - DNA, 92 bp, synthetic construct
  misc_feature 1..92: note = engineered ribonucleic acid scaffold (ERS) sequence
  source 1..92: mol_type = other DNA
actggcgcttcctatatctgattaccctgagcgccatcaccagcgactatgtcgtagtgggtaaagctccctcttcggagggagcatcaggg

SEQ ID NO: 11398 - DNA, 90 bp, synthetic construct
  misc_feature 1..90: note = engineered ribonucleic acid scaffold (ERS) sequence
  source 1..90: mol_type = other DNA
actggcgcttccaatctgattaccctgagcgccatcaccagcgactatgtcgtagtgggtaaagctccctcttcggagggagcatcaggg

SEQ ID NO: 11399 - DNA, 88 bp, synthetic construct
  misc_feature 1..88: note = engineered ribonucleic acid scaffold (ERS) sequence
  source 1..88: mol_type = other DNA
actggcgcttccactgattaccctgagcgccatcaccagcgactatgtcgtagtgggtaaagctccctcttcggagggagcatcaggg

SEQ ID NO: 11400 - DNA, 89 bp, synthetic construct
  misc_feature 1..89: note = engineered ribonucleic acid scaffold (ERS) sequence
  source 1..89: mol_type = other DNA
actggcgcttccaactgattaccctgagcgccatcaccagcgactatgtcgtagtgggtaaagctccctcttcggagggagcatcaggg

SEQ ID NO: 11401 - DNA, 89 bp, synthetic construct
  misc_feature 1..89: note = engineered ribonucleic acid scaffold (ERS) sequence
  source 1..89: mol_type = other DNA
actggcgcttccacctgattaccctgagcgccatcaccagcgactatgtcgtagtgggtaaagctccctcttcggagggagcatcaggg

SEQ ID NO: 11402 - DNA, 89 bp, synthetic construct
  misc_feature 1..89: note = engineered ribonucleic acid scaffold (ERS) sequence
  source 1..89: mol_type = other DNA
actggcgcttccagctgattaccctgagcgccatcaccagcgactatgtcgtagtgggtaaagctccctcttcggagggagcatcaggg

SEQ ID NO: 11403 - DNA, 91 bp, synthetic construct
  misc_feature 1..91: note = engineered ribonucleic acid scaffold (ERS) sequence
  source 1..91: mol_type = other DNA
actggcgcttccattactgattaccctgagcgccatcaccagcgactatgtcgtagtgggtaaagctccctcttcggagggagcatcaggg

SEQ ID NO: 11404 - DNA, 89 bp, synthetic construct
  misc_feature 1..89: note = engineered ribonucleic acid scaffold (ERS) sequence
  source 1..89: mol_type = other DNA
actggcgcttccatatgattaccctgagcgccatcaccagcgactatgtcgtagtgggtaaagctccctcttcggagggagcatcaggg

SEQ ID NO: 11405 - DNA, 89 bp, synthetic construct
  misc_feature 1..89: note = engineered ribonucleic acid scaffold (ERS) sequence
  source 1..89: mol_type = other DNA
actggcgcttccatgtgattaccctgagcgccatcaccagcgactatgtcgtagtgggtaaagctccctcttcggagggagcatcaggg

SEQ ID NO: 11406 - DNA, 89 bp, synthetic construct
  misc_feature 1..89: note = engineered ribonucleic acid scaffold (ERS) sequence
  source 1..89: mol_type = other DNA
actggcgcttccatttgattaccctgagcgccatcaccagcgactatgtcgtagtgggtaaagctccctcttcggagggagcatcaggg

SEQ ID NO: 11407 - DNA, 90 bp, synthetic construct
  misc_feature 1..90: note = engineered ribonucleic acid scaffold (ERS) sequence
  source 1..90: mol_type = other DNA
actggcgcttccatcttgattaccctgagcgccatcaccagcgactatgtcgtagtgggtaaagctccctcttcggagggagcatcaggg

SEQ ID NO: 11408 - DNA, 89 bp, synthetic construct
  misc_feature 1..89: note = engineered ribonucleic acid scaffold (ERS) sequence
  source 1..89: mol_type = other DNA
actggcgcttccatcagattaccctgagcgccatcaccagcgactatgtcgtagtgggtaaagctccctcttcggagggagcatcaggg

SEQ ID NO: 11409 - DNA, 89 bp, synthetic construct
  misc_feature 1..89: note = engineered ribonucleic acid scaffold (ERS) sequence
  source 1..89: mol_type = other DNA
actggcgcttccatcggattaccctgagcgccatcaccagcgactatgtcgtagtgggtaaagctccctcttcggagggagcatcaggg

SEQ ID NO: 11410 - DNA, 90 bp, synthetic construct
  misc_feature 1..90: note = engineered ribonucleic acid scaffold (ERS) sequence
  source 1..90: mol_type = other DNA
actggcgcttccatctgaattaccctgagcgccatcaccagcgactatgtcgtagtgggtaaagctccctcttcggagggagcatcaggg

SEQ ID NO: 11411 - DNA, 90 bp, synthetic construct
  misc_feature 1..90: note = engineered ribonucleic acid scaffold (ERS) sequence
  source 1..90: mol_type = other DNA
actggcgcttccatctgtattaccctgagcgccatcaccagcgactatgtcgtagtgggtaaagctccctcttcggagggagcatcaggg

SEQ ID NO: 11412 - DNA, 89 bp, synthetic construct
  misc_feature 1..89: note = engineered ribonucleic acid scaffold (ERS) sequence
  source 1..89: mol_type = other DNA
actggcgcttccatctggttaccctgagcgccatcaccagcgactatgtcgtagtgggtaaagctccctcttcggagggagcatcaggg

SEQ ID NO: 11413 - DNA, 89 bp, synthetic construct
  misc_feature 1..89: note = engineered ribonucleic acid scaffold (ERS) sequence
  source 1..89: mol_type = other DNA
actggcgcttccatctgtttaccctgagcgccatcaccagcgactatgtcgtagtgggtaaagctccctcttcggagggagcatcaggg

SEQ ID NO: 11414 - DNA, 90 bp, synthetic construct
  misc_feature 1..90: note = engineered ribonucleic acid scaffold (ERS) sequence
  source 1..90: mol_type = other DNA
actggcgcttccatctgatttaccctgagcgccatcaccagcgactatgtcgtagtgggtaaagctccctcttcggagggagcatcaggg

SEQ ID NO: 11415 - DNA, 89 bp, synthetic construct
  misc_feature 1..89: note = engineered ribonucleic acid scaffold (ERS) sequence
  source 1..89: mol_type = other DNA
actggcgcttccatctgattgccctgagcgccatcaccagcgactatgtcgtagtgggtaaagctccctcttcggagggagcatcaggg

SEQ ID NO: 11416 - DNA, 92 bp, synthetic construct
  misc_feature 1..92: note = engineered ribonucleic acid scaffold (ERS) sequence
  source 1..92: mol_type = other DNA
actggcgcttggtatatctgattaccctgagcgccatcaccagcgactatgtcgtagtgggtaaagctccctcttcggagggagcatcaggg

SEQ ID NO: 11417 - DNA, 90 bp, synthetic construct
  misc_feature 1..90: note = engineered ribonucleic acid scaffold (ERS) sequence
  source 1..90: mol_type = other DNA
actggcgcttggaatctgattaccctgagcgccatcaccagcgactatgtcgtagtgggtaaagctccctcttcggagggagcatcaggg

SEQ ID NO: 11418 - DNA, 88 bp, synthetic construct
  misc_feature 1..88: note = engineered ribonucleic acid scaffold (ERS) sequence
  source 1..88: mol_type = other DNA
actggcgcttggactgattaccctgagcgccatcaccagcgactatgtcgtagtgggtaaagctccctcttcggagggagcatcaggg

SEQ ID NO: 11419 - DNA, 89 bp, synthetic construct
  misc_feature 1..89: note = engineered ribonucleic acid scaffold (ERS) sequence
  source 1..89: mol_type = other DNA
actggcgcttggaactgattaccctgagcgccatcaccagcgactatgtcgtagtgggtaaagctccctcttcggagggagcatcaggg

SEQ ID NO: 11420 - DNA, 89 bp, synthetic construct
  misc_feature 1..89: note = engineered ribonucleic acid scaffold (ERS) sequence
  source 1..89: mol_type = other DNA
actggcgcttggacctgattaccctgagcgccatcaccagcgactatgtcgtagtgggtaaagctccctcttcggagggagcatcaggg

SEQ ID NO: 11421 - DNA, 89 bp, synthetic construct
  misc_feature 1..89: note = engineered ribonucleic acid scaffold (ERS) sequence
  source 1..89: mol_type = other DNA
actggcgcttggagctgattaccctgagcgccatcaccagcgactatgtcgtagtgggtaaagctccctcttcggagggagcatcaggg

SEQ ID NO: 11422 - DNA, 91 bp, synthetic construct
  misc_feature 1..91: note = engineered ribonucleic acid scaffold (ERS) sequence
  source 1..91: mol_type = other DNA
actggcgcttggattactgattaccctgagcgccatcaccagcgactatgtcgtagtgggtaaagctccctcttcggagggagcatcaggg

SEQ ID NO: 11423 - DNA, 89 bp, synthetic construct
  misc_feature 1..89: note = engineered ribonucleic acid scaffold (ERS) sequence
  source 1..89: mol_type = other DNA
actggcgcttggatatgattaccctgagcgccatcaccagcgactatgtcgtagtgggtaaagctccctcttcggagggagcatcaggg

SEQ ID NO: 11424 - DNA, 89 bp, synthetic construct
  misc_feature 1..89: note = engineered ribonucleic acid scaffold (ERS) sequence
  source 1..89: mol_type = other DNA
actggcgcttggatgtgattaccctgagcgccatcaccagcgactatgtcgtagtgggtaaagctccctcttcggagggagcatcaggg

SEQ ID NO: 11425 - DNA, 89 bp, synthetic construct
  misc_feature 1..89: note = engineered ribonucleic acid scaffold (ERS) sequence
  source 1..89: mol_type = other DNA
actggcgcttggatttgattaccctgagcgccatcaccagcgactatgtcgtagtgggtaaagctccctcttcggagggagcatcaggg

SEQ ID NO: 11426 - DNA, 90 bp, synthetic construct
  misc_feature 1..90: note = engineered ribonucleic acid scaffold (ERS) sequence
  source 1..90: mol_type = other DNA
actggcgcttggatcttgattaccctgagcgccatcaccagcgactatgtcgtagtgggtaaagctccctcttcggagggagcatcaggg

SEQ ID NO: 11427 - DNA, 89 bp, synthetic construct
  misc_feature 1..89: note = engineered ribonucleic acid scaffold (ERS) sequence
  source 1..89: mol_type = other DNA
actggcgcttggatcagattaccctgagcgccatcaccagcgactatgtcgtagtgggtaaagctccctcttcggagggagcatcaggg

SEQ ID NO: 11428 - DNA, 89 bp, synthetic construct
  misc_feature 1..89: note = engineered ribonucleic acid scaffold (ERS) sequence
  source 1..89: mol_type = other DNA
actggcgcttggatcggattaccctgagcgccatcaccagcgactatgtcgtagtgggtaaagctccctcttcggagggagcatcaggg

SEQ ID NO: 11429 - DNA, 90 bp, synthetic construct
  misc_feature 1..90: note = engineered ribonucleic acid scaffold (ERS) sequence
  source 1..90: mol_type = other DNA
actggcgcttggatctgaattaccctgagcgccatcaccagcgactatgtcgtagtgggtaaagctccctcttcggagggagcatcaggg

SEQ ID NO: 11430 - DNA, 90 bp, synthetic construct
  misc_feature 1..90: note = engineered ribonucleic acid scaffold (ERS) sequence
  source 1..90: mol_type = other DNA
actggcgcttggatctgtattaccctgagcgccatcaccagcgactatgtcgtagtgggtaaagctccctcttcggagggagcatcaggg

SEQ ID NO: 11431 - DNA, 89 bp, synthetic construct
  misc_feature 1..89: note = engineered ribonucleic acid scaffold (ERS) sequence
  source 1..89: mol_type = other DNA
actggcgcttggatctggttaccctgagcgccatcaccagcgactatgtcgtagtgggtaaagctccctcttcggagggagcatcaggg

SEQ ID NO: 11432 - DNA, 89 bp, synthetic construct
  misc_feature 1..89: note = engineered ribonucleic acid scaffold (ERS) sequence
  source 1..89: mol_type = other DNA
actggcgcttggatctgtttaccctgagcgccatcaccagcgactatgtcgtagtgggtaaagctccctcttcggagggagcatcaggg

SEQ ID NO: 11433 - DNA, 90 bp, synthetic construct
  misc_feature 1..90: note = engineered ribonucleic acid scaffold (ERS) sequence
  source 1..90: mol_type = other DNA
actggcgcttggatctgatttaccctgagcgccatcaccagcgactatgtcgtagtgggtaaagctccctcttcggagggagcatcaggg

SEQ ID NO: 11434 - DNA, 89 bp, synthetic construct
  misc_feature 1..89: note = engineered ribonucleic acid scaffold (ERS) sequence
  source 1..89: mol_type = other DNA
actggcgcttggatctgattgccctgagcgccatcaccagcgactatgtcgtagtgggtaaagctccctcttcggagggagcatcaggg

SEQ ID NO: 11435 - DNA, 92 bp, synthetic construct
  misc_feature 1..92: note = engineered ribonucleic acid scaffold (ERS) sequence
  source 1..92: mol_type = other DNA
actggcgcttgttatatctgattactctgagcgccatcaccagcgactatgtcgtagtgggtaaagctccctcttcggagggagcatcagag

SEQ ID NO: 11436 - DNA, 90 bp, synthetic construct
  misc_feature 1..90: note = engineered ribonucleic acid scaffold (ERS) sequence
  source 1..90: mol_type = other DNA
actggcgcttgtaatctgattactctgagcgccatcaccagcgactatgtcgtagtgggtaaagctccctcttcggagggagcatcagag

SEQ ID NO: 11437 - DNA, 88 bp, synthetic construct
  misc_feature 1..88: note = engineered ribonucleic acid scaffold (ERS) sequence
  source 1..88: mol_type = other DNA
actggcgcttgtactgattactctgagcgccatcaccagcgactatgtcgtagtgggtaaagctccctcttcggagggagcatcagag

SEQ ID NO: 11438 - DNA, 89 bp, synthetic construct
  misc_feature 1..89: note = engineered ribonucleic acid scaffold (ERS) sequence
  source 1..89: mol_type = other DNA
actggcgcttgtaactgattactctgagcgccatcaccagcgactatgtcgtagtgggtaaagctccctcttcggagggagcatcagag

SEQ ID NO: 11439 - DNA, 89 bp, synthetic construct
  misc_feature 1..89: note = engineered ribonucleic acid scaffold (ERS) sequence
  source 1..89: mol_type = other DNA
actggcgcttgtacctgattactctgagcgccatcaccagcgactatgtcgtagtgggtaaagctccctcttcggagggagcatcagag

SEQ ID NO: 11440 - DNA, 89 bp, synthetic construct
  misc_feature 1..89: note = engineered ribonucleic acid scaffold (ERS) sequence
  source 1..89: mol_type = other DNA
actggcgcttgtagctgattactctgagcgccatcaccagcgactatgtcgtagtgggtaaagctccctcttcggagggagcatcagag

SEQ ID NO: 11441 - DNA, 91 bp, synthetic construct
  misc_feature 1..91: note = engineered ribonucleic acid scaffold (ERS) sequence
  source 1..91: mol_type = other DNA
actggcgcttgtattactgattactctgagcgccatcaccagcgactatgtcgtagtgggtaaagctccctcttcggagggagcatcagag

SEQ ID NO: 11442 - DNA, 89 bp, synthetic construct
  misc_feature 1..89: note = engineered ribonucleic acid scaffold (ERS) sequence
  source 1..89: mol_type = other DNA
actggcgcttgtatatgattactctgagcgccatcaccagcgactatgtcgtagtgggtaaagctccctcttcggagggagcatcagag

SEQ ID NO: 11443 - DNA, 89 bp, synthetic construct
  misc_feature 1..89: note = engineered ribonucleic acid scaffold (ERS) sequence
  source 1..89: mol_type = other DNA
actggcgcttgtatgtgattactctgagcgccatcaccagcgactatgtcgtagtgggtaaagctccctcttcggagggagcatcagag

SEQ ID NO: 11444 - DNA, 89 bp, synthetic construct
  misc_feature 1..89: note = engineered ribonucleic acid scaffold (ERS) sequence
  source 1..89: mol_type = other DNA
actggcgcttgtatttgattactctgagcgccatcaccagcgactatgtcgtagtgggtaaagctccctcttcggagggagcatcagag

SEQ ID NO: 11445 - DNA, 90 bp, synthetic construct
  misc_feature 1..90: note = engineered ribonucleic acid scaffold (ERS) sequence
  source 1..90: mol_type = other DNA
actggcgcttgtatcttgattactctgagcgccatcaccagcgactatgtcgtagtgggtaaagctccctcttcggagggagcatcagag

SEQ ID NO: 11446 - DNA, 89 bp, synthetic construct
  misc_feature 1..89: note = engineered ribonucleic acid scaffold (ERS) sequence
  source 1..89: mol_type = other DNA
actggcgcttgtatcagattactctgagcgccatcaccagcgactatgtcgtagtgggtaaagctccctcttcggagggagcatcagag

SEQ ID NO: 11447 - DNA, 89 bp, synthetic construct
  misc_feature 1..89: note = engineered ribonucleic acid scaffold (ERS) sequence
  source 1..89: mol_type = other DNA
actggcgcttgtatcggattactctgagcgccatcaccagcgactatgtcgtagtgggtaaagctccctcttcggagggagcatcagag

SEQ ID NO: 11448 - DNA, 90 bp, synthetic construct
  misc_feature 1..90: note = engineered ribonucleic acid scaffold (ERS) sequence
  source 1..90: mol_type = other DNA
actggcgcttgtatctgaattactctgagcgccatcaccagcgactatgtcgtagtgggtaaagctccctcttcggagggagcatcagag

SEQ ID NO: 11449 - DNA, 90 bp, synthetic construct
  misc_feature 1..90: note = engineered ribonucleic acid scaffold (ERS) sequence
  source 1..90: mol_type = other DNA
actggcgcttgtatctgtattactctgagcgccatcaccagcgactatgtcgtagtgggtaaagctccctcttcggagggagcatcagag

SEQ ID NO: 11450 - DNA, 89 bp, synthetic construct
  misc_feature 1..89: note = engineered ribonucleic acid scaffold (ERS) sequence
  source 1..89: mol_type = other DNA
actggcgcttgtatctggttactctgagcgccatcaccagcgactatgtcgtagtgggtaaagctccctcttcggagggagcatcagag

SEQ ID NO: 11451 - DNA, 89 bp, synthetic construct
  misc_feature 1..89: note = engineered ribonucleic acid scaffold (ERS) sequence
  source 1..89: mol_type = other DNA
actggcgcttgtatctgtttactctgagcgccatcaccagcgactatgtcgtagtgggtaaagctccctcttcggagggagcatcagag

SEQ ID NO: 11452 - DNA, 90 bp, synthetic construct
  misc_feature 1..90: note = engineered ribonucleic acid scaffold (ERS) sequence
  source 1..90: mol_type = other DNA
actggcgcttgtatctgatttactctgagcgccatcaccagcgactatgtcgtagtgggtaaagctccctcttcggagggagcatcagag

SEQ ID NO: 11453 - DNA, 89 bp, synthetic construct
  misc_feature 1..89: note = engineered ribonucleic acid scaffold (ERS) sequence
  source 1..89: mol_type = other DNA
actggcgcttgtatctgattgctctgagcgccatcaccagcgactatgtcgtagtgggtaaagctccctcttcggagggagcatcagag

SEQ ID NO: 11454 - DNA, 92 bp, synthetic construct
  misc_feature 1..92: note = engineered ribonucleic acid scaffold (ERS) sequence
  source 1..92: mol_type = other DNA
actggcgctttttatatctgattactctgagcgccatcaccagcgactatgtcgtagtgggtaaagctccctcttcggagggagcatcagag

SEQ ID NO: 11455 - DNA, 90 bp, synthetic construct
  misc_feature 1..90: note = engineered ribonucleic acid scaffold (ERS) sequence
  source 1..90: mol_type = other DNA
actggcgcttttaatctgattactctgagcgccatcaccagcgactatgtcgtagtgggtaaagctccctcttcggagggagcatcagag

SEQ ID NO: 11456 - DNA, 88 bp, synthetic construct
  misc_feature 1..88: note = engineered ribonucleic acid scaffold (ERS) sequence
  source 1..88: mol_type = other DNA
actggcgcttttactgattactctgagcgccatcaccagcgactatgtcgtagtgggtaaagctccctcttcggagggagcatcagag

SEQ ID NO: 11457 - DNA, 89 bp, synthetic construct
  misc_feature 1..89: note = engineered ribonucleic acid scaffold (ERS) sequence
  source 1..89: mol_type = other DNA
actggcgcttttaactgattactctgagcgccatcaccagcgactatgtcgtagtgggtaaagctccctcttcggagggagcatcagag

SEQ ID NO: 11458 - DNA, 89 bp, synthetic construct
  misc_feature 1..89: note = engineered ribonucleic acid scaffold (ERS) sequence
  source 1..89: mol_type = other DNA
actggcgcttttacctgattactctgagcgccatcaccagcgactatgtcgtagtgggtaaagctccctcttcggagggagcatcagag

SEQ ID NO: 11459 - DNA, 89 bp, synthetic construct
  misc_feature 1..89: note = engineered ribonucleic acid scaffold (ERS) sequence
  source 1..89: mol_type = other DNA
actggcgcttttagctgattactctgagcgccatcaccagcgactatgtcgtagtgggtaaagctccctcttcggagggagcatcagag

SEQ ID NO: 11460 - DNA, 91 bp, synthetic construct
  misc_feature 1..91: note = engineered ribonucleic acid scaffold (ERS) sequence
  source 1..91: mol_type = other DNA
actggcgcttttattactgattactctgagcgccatcaccagcgactatgtcgtagtgggtaaagctccctcttcggagggagcatcagag

SEQ ID NO: 11461 - DNA, 89 bp, synthetic construct
  misc_feature 1..89: note = engineered ribonucleic acid scaffold (ERS) sequence
  source 1..89: mol_type = other DNA
actggcgcttttatatgattactctgagcgccatcaccagcgactatgtcgtagtgggtaaagctccctcttcggagggagcatcagag

SEQ ID NO: 11462 - DNA, 89 bp, synthetic construct
  misc_feature 1..89: note = engineered ribonucleic acid scaffold (ERS) sequence
  source 1..89: mol_type = other DNA
actggcgcttttatgtgattactctgagcgccatcaccagcgactatgtcgtagtgggtaaagctccctcttcggagggagcatcagag

SEQ ID NO: 11463 - DNA, 89 bp, synthetic construct
  misc_feature 1..89: note = engineered ribonucleic acid scaffold (ERS) sequence
  source 1..89: mol_type = other DNA
actggcgcttttatttgattactctgagcgccatcaccagcgactatgtcgtagtgggtaaagctccctcttcggagggagcatcagag

SEQ ID NO: 11464 - DNA, 90 bp, synthetic construct
  misc_feature 1..90: note = engineered ribonucleic acid scaffold (ERS) sequence
  source 1..90: mol_type = other DNA
actggcgcttttatcttgattactctgagcgccatcaccagcgactatgtcgtagtgggtaaagctccctcttcggagggagcatcagag

SEQ ID NO: 11465 - DNA, 89 bp, synthetic construct
  misc_feature 1..89: note = engineered ribonucleic acid scaffold (ERS) sequence
  source 1..89: mol_type = other DNA
actggcgcttttatcagattactctgagcgccatcaccagcgactatgtcgtagtgggtaaagctccctcttcggagggagcatcagag

SEQ ID NO: 11466 - DNA, 89 bp, synthetic construct
  misc_feature 1..89: note = engineered ribonucleic acid scaffold (ERS) sequence
  source 1..89: mol_type = other DNA
actggcgcttttatcggattactctgagcgccatcaccagcgactatgtcgtagtgggtaaagctccctcttcggagggagcatcagag

SEQ ID NO: 11467 - DNA, 90 bp, synthetic construct
  misc_feature 1..90: note = engineered ribonucleic acid scaffold (ERS) sequence
  source 1..90: mol_type = other DNA
actggcgcttttatctgaattactctgagcgccatcaccagcgactatgtcgtagtgggtaaagctccctcttcggagggagcatcagag

SEQ ID NO: 11468 - DNA, 90 bp, synthetic construct
  misc_feature 1..90: note = engineered ribonucleic acid scaffold (ERS) sequence
  source 1..90: mol_type = other DNA
actggcgcttttatctgtattactctgagcgccatcaccagcgactatgtcgtagtgggtaaagctccctcttcggagggagcatcagag

SEQ ID NO: 11469 - DNA, 89 bp, synthetic construct
  misc_feature 1..89: note = engineered ribonucleic acid scaffold (ERS) sequence
  source 1..89: mol_type = other DNA
actggcgcttttatctggttactctgagcgccatcaccagcgactatgtcgtagtgggtaaagctccctcttcggagggagcatcagag

SEQ ID NO: 11470 - DNA, 89 bp, synthetic construct
  misc_feature 1..89: note = engineered ribonucleic acid scaffold (ERS) sequence
  source 1..89: mol_type = other DNA
actggcgcttttatctgtttactctgagcgccatcaccagcgactatgtcgtagtgggtaaagctccctcttcggagggagcatcagag

SEQ ID NO: 11471 - DNA, 90 bp, synthetic construct
  misc_feature 1..90: note = engineered ribonucleic acid scaffold (ERS) sequence
  source 1..90: mol_type = other DNA
actggcgcttttatctgatttactctgagcgccatcaccagcgactatgtcgtagtgggtaaagctccctcttcggagggagcatcagag

SEQ ID NO: 11472 - DNA, 89 bp, synthetic construct
  misc_feature 1..89: note = engineered ribonucleic acid scaffold (ERS) sequence
  source 1..89: mol_type = other DNA
actggcgcttttatctgattgctctgagcgccatcaccagcgactatgtcgtagtgggtaaagctccctcttcggagggagcatcagag

SEQ ID NO: 11473 - DNA, 92 bp, synthetic construct
  misc_feature 1..92: note = engineered ribonucleic acid scaffold (ERS) sequence
  source 1..92: mol_type = other DNA
actggcgctttttatatctgattactttgagcgccatcaccagcgactatgtcgtagtgggtaaagctccctcttcggagggagcatcagag

SEQ ID NO: 11474 - DNA, 90 bp, synthetic construct
  misc_feature 1..90: note = engineered ribonucleic acid scaffold (ERS) sequence
  source 1..90: mol_type = other DNA
actggcgcttttaatctgattactttgagcgccatcaccagcgactatgtcgtagtgggtaaagctccctcttcggagggagcatcagag

SEQ ID NO: 11475 - DNA, 88 bp, synthetic construct
  misc_feature 1..88: note = engineered ribonucleic acid scaffold (ERS) sequence
  source 1..88: mol_type = other DNA
actggcgcttttactgattactttgagcgccatcaccagcgactatgtcgtagtgggtaaagctccctcttcggagggagcatcagag

SEQ ID NO: 11476 - DNA, 89 bp, synthetic construct
  misc_feature 1..89: note = engineered ribonucleic acid scaffold (ERS) sequence
  source 1..89: mol_type = other DNA
actggcgcttttaactgattactttgagcgccatcaccagcgactatgtcgtagtgggtaaagctccctcttcggagggagcatcagag

SEQ ID NO: 11477 - DNA, 89 bp, synthetic construct
  misc_feature 1..89: note = engineered ribonucleic acid scaffold (ERS) sequence
  source 1..89: mol_type = other DNA
actggcgcttttacctgattactttgagcgccatcaccagcgactatgtcgtagtgggtaaagctccctcttcggagggagcatcagag

SEQ ID NO: 11478 - DNA, 89 bp, synthetic construct
  misc_feature 1..89: note = engineered ribonucleic acid scaffold (ERS) sequence
  source 1..89: mol_type = other DNA
actggcgcttttagctgattactttgagcgccatcaccagcgactatgtcgtagtgggtaaagctccctcttcggagggagcatcagag

SEQ ID NO: 11479 - DNA, 91 bp, synthetic construct
  misc_feature 1..91: note = engineered ribonucleic acid scaffold (ERS) sequence
  source 1..91: mol_type = other DNA
actggcgcttttattactgattactttgagcgccatcaccagcgactatgtcgtagtgggtaaagctccctcttcggagggagcatcagag

SEQ ID NO: 11480 - DNA, 89 bp, synthetic construct
  misc_feature 1..89: note = engineered ribonucleic acid scaffold (ERS) sequence
  source 1..89: mol_type = other DNA
actggcgcttttatatgattactttgagcgccatcaccagcgactatgtcgtagtgggtaaagctccctcttcggagggagcatcagag

SEQ ID NO: 11481 - DNA, 89 bp, synthetic construct
  misc_feature 1..89: note = engineered ribonucleic acid scaffold (ERS) sequence
  source 1..89: mol_type = other DNA
actggcgcttttatgtgattactttgagcgccatcaccagcgactatgtcgtagtgggtaaagctccctcttcggagggagcatcagag

SEQ ID NO: 11482 - DNA, 89 bp, synthetic construct
  misc_feature 1..89: note = engineered ribonucleic acid scaffold (ERS) sequence
  source 1..89: mol_type = other DNA
actggcgcttttatttgattactttgagcgccatcaccagcgactatgtcgtagtgggtaaagctccctcttcggagggagcatcagag

SEQ ID NO: 11483 - DNA, 90 bp, synthetic construct
  misc_feature 1..90: note = engineered ribonucleic acid scaffold (ERS) sequence
  source 1..90: mol_type = other DNA
actggcgcttttatcttgattactttgagcgccatcaccagcgactatgtcgtagtgggtaaagctccctcttcggagggagcatcagag

SEQ ID NO: 11484 - DNA, 89 bp, synthetic construct
  misc_feature 1..89: note = engineered ribonucleic acid scaffold (ERS) sequence
  source 1..89: mol_type = other DNA
actggcgcttttatcagattactttgagcgccatcaccagcgactatgtcgtagtgggtaaagctccctcttcggagggagcatcagag

SEQ ID NO: 11485 - DNA, 89 bp, synthetic construct
  misc_feature 1..89: note = engineered ribonucleic acid scaffold (ERS) sequence
  source 1..89: mol_type = other DNA
actggcgcttttatcggattactttgagcgccatcaccagcgactatgtcgtagtgggtaaagctccctcttcggagggagcatcagag

SEQ ID NO: 11486 - DNA, 90 bp, synthetic construct
  misc_feature 1..90: note = engineered ribonucleic acid scaffold (ERS) sequence
  source 1..90: mol_type = other DNA
actggcgcttttatctgaattactttgagcgccatcaccagcgactatgtcgtagtgggtaaagctccctcttcggagggagcatcagag

SEQ ID NO: 11487 - DNA, 90 bp, synthetic construct
  misc_feature 1..90: note = engineered ribonucleic acid scaffold (ERS) sequence
  source 1..90: mol_type = other DNA
actggcgcttttatctgtattactttgagcgccatcaccagcgactatgtcgtagtgggtaaagctccctcttcggagggagcatcagag

SEQ ID NO: 11488 - DNA, 89 bp, synthetic construct
  misc_feature 1..89: note = engineered ribonucleic acid scaffold (ERS) sequence
  source 1..89: mol_type = other DNA
actggcgcttttatctggttactttgagcgccatcaccagcgactatgtcgtagtgggtaaagctccctcttcggagggagcatcagag

SEQ ID NO: 11489 - DNA, 89 bp, synthetic construct
  misc_feature 1..89: note = engineered ribonucleic acid scaffold (ERS) sequence
  source 1..89: mol_type = other DNA
actggcgcttttatctgtttactttgagcgccatcaccagcgactatgtcgtagtgggtaaagctccctcttcggagggagcatcagag

SEQ ID NO: 11490 - DNA, 90 bp, synthetic construct
  misc_feature 1..90: note = engineered ribonucleic acid scaffold (ERS) sequence
  source 1..90: mol_type = other DNA
actggcgcttttatctgatttactttgagcgccatcaccagcgactatgtcgtagtgggtaaagctccctcttcggagggagcatcagag

SEQ ID NO: 11491 - DNA, 89 bp, synthetic construct
  misc_feature 1..89: note = engineered ribonucleic acid scaffold (ERS) sequence
  source 1..89: mol_type = other DNA
actggcgcttttatctgattgctttgagcgccatcaccagcgactatgtcgtagtgggtaaagctccctcttcggagggagcatcagag

SEQ ID NO: 11492 - DNA, 92 bp, synthetic construct
  misc_feature 1..92: note = engineered ribonucleic acid scaffold (ERS) sequence
  source 1..92: mol_type = other DNA
actggcgctttttatatctgattactctgagcgccatcaccagcgactatgtcgtagtgggtaaagctccctcttcggagggagcatcaaag

SEQ ID NO: 11493 - DNA, 90 bp, synthetic construct
  misc_feature 1..90: note = engineered ribonucleic acid scaffold (ERS) sequence
  source 1..90: mol_type = other DNA
actggcgcttttaatctgattactctgagcgccatcaccagcgactatgtcgtagtgggtaaagctccctcttcggagggagcatcaaag

SEQ ID NO: 11494 - DNA, 88 bp, synthetic construct
  misc_feature 1..88: note = engineered ribonucleic acid scaffold (ERS) sequence
  source 1..88: mol_type = other DNA
actggcgcttttactgattactctgagcgccatcaccagcgactatgtcgtagtgggtaaagctccctcttcggagggagcatcaaag

SEQ ID NO: 11495 - DNA, 89 bp, synthetic construct
  misc_feature 1..89: note = engineered ribonucleic acid scaffold (ERS) sequence
  source 1..89: mol_type = other DNA
actggcgcttttaactgattactctgagcgccatcaccagcgactatgtcgtagtgggtaaagctccctcttcggagggagcatcaaag

SEQ ID NO: 11496 - DNA, 89 bp, synthetic construct
  misc_feature 1..89: note = engineered ribonucleic acid scaffold (ERS) sequence
  source 1..89: mol_type = other DNA
actggcgcttttacctgattactctgagcgccatcaccagcgactatgtcgtagtgggtaaagctccctcttcggagggagcatcaaag

SEQ ID NO: 11497 - DNA, 89 bp, synthetic construct
  misc_feature 1..89: note = engineered ribonucleic acid scaffold (ERS) sequence
  source 1..89: mol_type = other DNA
actggcgcttttagctgattactctgagcgccatcaccagcgactatgtcgtagtgggtaaagctccctcttcggagggagcatcaaag

SEQ ID NO: 11498 - DNA, 91 bp, synthetic construct
  misc_feature 1..91: note = engineered ribonucleic acid scaffold (ERS) sequence
  source 1..91: mol_type = other DNA
actggcgcttttattactgattactctgagcgccatcaccagcgactatgtcgtagtgggtaaagctccctcttcggagggagcatcaaag

SEQ ID NO: 11499 - DNA, 89 bp, synthetic construct
  misc_feature 1..89: note = engineered ribonucleic acid scaffold (ERS) sequence
  source 1..89: mol_type = other DNA
actggcgcttttatatgattactctgagcgccatcaccagcgactatgtcgtagtgggtaaagctccctcttcggagggagcatcaaag

SEQ ID NO: 11500 - DNA, 89 bp, synthetic construct
  misc_feature 1..89: note = engineered ribonucleic acid scaffold (ERS) sequence
  source 1..89: mol_type = other DNA
actggcgcttttatgtgattactctgagcgccatcaccagcgactatgtcgtagtgggtaaagctccctcttcggagggagcatcaaag

SEQ ID NO: 11501 - DNA, 89 bp, synthetic construct
  misc_feature 1..89: note = engineered ribonucleic acid scaffold (ERS) sequence
  source 1..89: mol_type = other DNA
actggcgcttttatttgattactctgagcgccatcaccagcgactatgtcgtagtgggtaaagctccctcttcggagggagcatcaaag

SEQ ID NO: 11502 - DNA, 90 bp, synthetic construct
  misc_feature 1..90: note = engineered ribonucleic acid scaffold (ERS) sequence
  source 1..90: mol_type = other DNA
actggcgcttttatcttgattactctgagcgccatcaccagcgactatgtcgtagtgggtaaagctccctcttcggagggagcatcaaag

SEQ ID NO: 11503 - DNA, 89 bp, synthetic construct
  misc_feature 1..89: note = engineered ribonucleic acid scaffold (ERS) sequence
  source 1..89: mol_type = other DNA
actggcgcttttatcagattactctgagcgccatcaccagcgactatgtcgtagtgggtaaagctccctcttcggagggagcatcaaag

SEQ ID NO: 11504 - DNA, 89 bp, synthetic construct
  misc_feature 1..89: note = engineered ribonucleic acid scaffold (ERS) sequence
  source 1..89: mol_type = other DNA
actggcgcttttatcggattactctgagcgccatcaccagcgactatgtcgtagtgggtaaagctccctcttcggagggagcatcaaag

SEQ ID NO: 11505 - DNA, 90 bp, synthetic construct
  misc_feature 1..90: note = engineered ribonucleic acid scaffold (ERS) sequence
  source 1..90: mol_type = other DNA
actggcgcttttatctgaattactctgagcgccatcaccagcgactatgtcgtagtgggtaaagctccctcttcggagggagcatcaaag

SEQ ID NO: 11506 - DNA, 90 bp, synthetic construct
  misc_feature 1..90: note = engineered ribonucleic acid scaffold (ERS) sequence
  source 1..90: mol_type = other DNA
actggcgcttttatctgtattactctgagcgccatcaccagcgactatgtcgtagtgggtaaagctccctcttcggagggagcatcaaag

SEQ ID NO: 11507 - DNA, 89 bp, synthetic construct
  misc_feature 1..89: note = engineered ribonucleic acid scaffold (ERS) sequence
  source 1..89: mol_type = other DNA
actggcgcttttatctggttactctgagcgccatcaccagcgactatgtcgtagtgggtaaagctccctcttcggagggagcatcaaag

SEQ ID NO: 11508 - DNA, 89 bp, synthetic construct
  misc_feature 1..89: note = engineered ribonucleic acid scaffold (ERS) sequence
  source 1..89: mol_type = other DNA
actggcgcttttatctgtttactctgagcgccatcaccagcgactatgtcgtagtgggtaaagctccctcttcggagggagcatcaaag

SEQ ID NO: 11509 - DNA, 90 bp, synthetic construct
  misc_feature 1..90: note = engineered ribonucleic acid scaffold (ERS) sequence
  source 1..90: mol_type = other DNA
actggcgcttttatctgatttactctgagcgccatcaccagcgactatgtcgtagtgggtaaagctccctcttcggagggagcatcaaag

SEQ ID NO: 11510 - DNA, 89 bp, synthetic construct
  misc_feature 1..89: note = engineered ribonucleic acid scaffold (ERS) sequence
  source 1..89: mol_type = other DNA
actggcgcttttatctgattgctctgagcgccatcaccagcgactatgtcgtagtgggtaaagctccctcttcggagggagcatcaaag

SEQ ID NO: 11511 - DNA, 91 bp, synthetic construct
  misc_feature 1..91: note = engineered ribonucleic acid scaffold (ERS) sequence
  source 1..91: mol_type = other DNA
actggcgcttctatatctgattactctgagcgccatcaccagcgactatgtcgtagtgggtaaagctccctcttcggagggagcctcagag

SEQ ID NO: 11512 - DNA, 90 bp, synthetic construct
  misc_feature 1..90: note = engineered ribonucleic acid scaffold (ERS) sequence
  source 1..90: mol_type = other DNA
actggcgcttctaatctgattactctgagcgccatcaccagcgactatgtcgtagtgggtaaagctccctcttcggagggagcctcagag

SEQ ID NO: 11513 - DNA, 88 bp, synthetic construct
  misc_feature 1..88: note = engineered ribonucleic acid scaffold (ERS) sequence
  source 1..88: mol_type = other DNA
actggcgcttctactgattactctgagcgccatcaccagcgactatgtcgtagtgggtaaagctccctcttcggagggagcctcagag

SEQ ID NO: 11514 - DNA, 89 bp, synthetic construct
  misc_feature 1..89: note = engineered ribonucleic acid scaffold (ERS) sequence
  source 1..89: mol_type = other DNA
actggcgcttctaactgattactctgagcgccatcaccagcgactatgtcgtagtgggtaaagctccctcttcggagggagcctcagag

SEQ ID NO: 11515 - DNA, 89 bp, synthetic construct
  misc_feature 1..89: note = engineered ribonucleic acid scaffold (ERS) sequence
  source 1..89: mol_type = other DNA
actggcgcttctacctgattactctgagcgccatcaccagcgactatgtcgtagtgggtaaagctccctcttcggagggagcctcagag

SEQ ID NO: 11516 - DNA, 89 bp, synthetic construct
  misc_feature 1..89: note = engineered ribonucleic acid scaffold (ERS) sequence
  source 1..89: mol_type = other DNA
actggcgcttctagctgattactctgagcgccatcaccagcgactatgtcgtagtgggtaaagctccctcttcggagggagcctcagag

SEQ ID NO: 11517 - DNA, 91 bp, synthetic construct
  misc_feature 1..91: note = engineered ribonucleic acid scaffold (ERS) sequence
  source 1..91: mol_type = other DNA
actggcgcttctattactgattactctgagcgccatcaccagcgactatgtcgtagtgggtaaagctccctcttcggagggagcctcagag

SEQ ID NO: 11518 - DNA, 89 bp, synthetic construct
  misc_feature 1..89: note = engineered ribonucleic acid scaffold (ERS) sequence
  source 1..89: mol_type = other DNA
actggcgcttctatatgattactctgagcgccatcaccagcgactatgtcgtagtgggtaaagctccctcttcggagggagcctcagag

SEQ ID NO: 11519 - DNA, 89 bp, synthetic construct
  misc_feature 1..89: note = engineered ribonucleic acid scaffold (ERS) sequence
  source 1..89: mol_type = other DNA
actggcgcttctatgtgattactctgagcgccatcaccagcgactatgtcgtagtgggtaaagctccctcttcggagggagcctcagag

SEQ ID NO: 11520 - DNA, 89 bp, synthetic construct
  misc_feature 1..89: note = engineered ribonucleic acid scaffold (ERS) sequence
  source 1..89: mol_type = other DNA
actggcgcttctatttgattactctgagcgccatcaccagcgactatgtcgtagtgggtaaagctccctcttcggagggagcctcagag

SEQ ID NO: 11521 - DNA, 90 bp, synthetic construct
  misc_feature 1..90: note = engineered ribonucleic acid scaffold (ERS) sequence
  source 1..90: mol_type = other DNA
actggcgcttctatcttgattactctgagcgccatcaccagcgactatgtcgtagtgggtaaagctccctcttcggagggagcctcagag

SEQ ID NO: 11522 - DNA, 89 bp, synthetic construct
  misc_feature 1..89: note = engineered ribonucleic acid scaffold (ERS) sequence
  source 1..89: mol_type = other DNA
actggcgcttctatcagattactctgagcgccatcaccagcgactatgtcgtagtgggtaaagctccctcttcggagggagcctcagag

SEQ ID NO: 11523 - DNA, 89 bp, synthetic construct
  misc_feature 1..89: note = engineered ribonucleic acid scaffold (ERS) sequence
  source 1..89: mol_type = other DNA
actggcgcttctatcggattactctgagcgccatcaccagcgactatgtcgtagtgggtaaagctccctcttcggagggagcctcagag

SEQ ID NO: 11524 - DNA, 90 bp, synthetic construct
  misc_feature 1..90: note = engineered ribonucleic acid scaffold (ERS) sequence
  source 1..90: mol_type = other DNA
actggcgcttctatctgaattactctgagcgccatcaccagcgactatgtcgtagtgggtaaagctccctcttcggagggagcctcagag

SEQ ID NO: 11525 - DNA, 90 bp, synthetic construct
  misc_feature 1..90: note = engineered ribonucleic acid scaffold (ERS) sequence
  source 1..90: mol_type = other DNA
actggcgcttctatctgtattactctgagcgccatcaccagcgactatgtcgtagtgggtaaagctccctcttcggagggagcctcagag

SEQ ID NO: 11526 - DNA, 89 bp, synthetic construct
  misc_feature 1..89: note = engineered ribonucleic acid scaffold (ERS) sequence
  source 1..89: mol_type = other DNA
actggcgcttctatctggttactctgagcgccatcaccagcgactatgtcgtagtgggtaaagctccctcttcggagggagcctcagag

SEQ ID NO: 11527 - DNA, 89 bp, synthetic construct
  misc_feature 1..89: note = engineered ribonucleic acid scaffold (ERS) sequence
  source 1..89: mol_type = other DNA
actggcgcttctatctgtttactctgagcgccatcaccagcgactatgtcgtagtgggtaaagctccctcttcggagggagcctcagag

SEQ ID NO: 11528 - DNA, 90 bp, synthetic construct
  misc_feature 1..90: note = engineered ribonucleic acid scaffold (ERS) sequence
  source 1..90: mol_type = other DNA
actggcgcttctatctgatttactctgagcgccatcaccagcgactatgtcgtagtgggtaaagctccctcttcggagggagcctcagag

SEQ ID NO: 11529 - DNA, 89 bp, synthetic construct
  misc_feature 1..89: note = engineered ribonucleic acid scaffold (ERS) sequence
  source 1..89: mol_type = other DNA
actggcgcttctatctgattgctctgagcgccatcaccagcgactatgtcgtagtgggtaaagctccctcttcggagggagcctcagag

SEQ ID NO: 11530 - DNA, 91 bp, synthetic construct
  misc_feature 1..91: note = engineered ribonucleic acid scaffold (ERS) sequence
  source 1..91: mol_type = other DNA
actggcgcttctatatctgattactctgagcgccatcaccagcgactatgtcgtagtgggtaaagctccctcttcggagggagcgtcagag

SEQ ID NO: 11531 - DNA, 90 bp, synthetic construct
  misc_feature 1..90: note = engineered ribonucleic acid scaffold (ERS) sequence
  source 1..90: mol_type = other DNA
actggcgcttctaatctgattactctgagcgccatcaccagcgactatgtcgtagtgggtaaagctccctcttcggagggagcgtcagag

SEQ ID NO: 11532 - DNA, 88 bp, synthetic construct
  misc_feature 1..88: note = engineered ribonucleic acid scaffold (ERS) sequence
  source 1..88: mol_type = other DNA
actggcgcttctactgattactctgagcgccatcaccagcgactatgtcgtagtgggtaaagctccctcttcggagggagcgtcagag

SEQ ID NO: 11533 - DNA, 89 bp, synthetic construct
  misc_feature 1..89: note = engineered ribonucleic acid scaffold (ERS) sequence
  source 1..89: mol_type = other DNA
actggcgcttctaactgattactctgagcgccatcaccagcgactatgtcgtagtgggtaaagctccctcttcggagggagcgtcagag

SEQ ID NO: 11534 - DNA, 89 bp, synthetic construct
  misc_feature 1..89: note = engineered ribonucleic acid scaffold (ERS) sequence
  source 1..89: mol_type = other DNA
actggcgcttctacctgattactctgagcgccatcaccagcgactatgtcgtagtgggtaaagctccctcttcggagggagcgtcagag

SEQ ID NO: 11535 - DNA, 89 bp, synthetic construct
  misc_feature 1..89: note = engineered ribonucleic acid scaffold (ERS) sequence
  source 1..89: mol_type = other DNA
actggcgcttctagctgattactctgagcgccatcaccagcgactatgtcgtagtgggtaaagctccctcttcggagggagcgtcagag

SEQ ID NO: 11536 - DNA, 91 bp, synthetic construct
  misc_feature 1..91: note = engineered ribonucleic acid scaffold (ERS) sequence
  source 1..91: mol_type = other DNA
actggcgcttctattactgattactctgagcgccatcaccagcgactatgtcgtagtgggtaaagctccctcttcggagggagcgtcagag

SEQ ID NO: 11537 - DNA, 89 bp, synthetic construct
  misc_feature 1..89: note = engineered ribonucleic acid scaffold (ERS) sequence
  source 1..89: mol_type = other DNA
actggcgcttctatatgattactctgagcgccatcaccagcgactatgtcgtagtgggtaaagctccctcttcggagggagcgtcagag

SEQ ID NO: 11538 - DNA, 89 bp, synthetic construct
  misc_feature 1..89: note = engineered ribonucleic acid scaffold (ERS) sequence
  source 1..89: mol_type = other DNA
actggcgcttctatgtgattactctgagcgccatcaccagcgactatgtcgtagtgggtaaagctccctcttcggagggagcgtcagag

SEQ ID NO: 11539 - DNA, 89 bp, synthetic construct
  misc_feature 1..89: note = engineered ribonucleic acid scaffold (ERS) sequence
  source 1..89: mol_type = other DNA
actggcgcttctatttgattactctgagcgccatcaccagcgactatgtcgtagtgggtaaagctccctcttcggagggagcgtcagag

SEQ ID NO: 11540 - DNA, 90 bp, synthetic construct
  misc_feature 1..90: note = engineered ribonucleic acid scaffold (ERS) sequence
  source 1..90: mol_type = other DNA
actggcgcttctatcttgattactctgagcgccatcaccagcgactatgtcgtagtgggtaaagctccctcttcggagggagcgtcagag

SEQ ID NO: 11541 - DNA, 89 bp, synthetic construct
  misc_feature 1..89: note = engineered ribonucleic acid scaffold (ERS) sequence
  source 1..89: mol_type = other DNA
actggcgcttctatcagattactctgagcgccatcaccagcgactatgtcgtagtgggtaaagctccctcttcggagggagcgtcagag

SEQ ID NO: 11542 - DNA, 89 bp, synthetic construct
  misc_feature 1..89: note = engineered ribonucleic acid scaffold (ERS) sequence
  source 1..89: mol_type = other DNA
actggcgcttctatcggattactctgagcgccatcaccagcgactatgtcgtagtgggtaaagctccctcttcggagggagcgtcagag

SEQ ID NO: 11543 - DNA, 90 bp, synthetic construct
  misc_feature 1..90: note = engineered ribonucleic acid scaffold (ERS) sequence
  source 1..90: mol_type = other DNA
actggcgcttctatctgaattactctgagcgccatcaccagcgactatgtcgtagtgggtaaagctccctcttcggagggagcgtcagag

SEQ ID NO: 11544 - DNA, 90 bp, synthetic construct
  misc_feature 1..90: note = engineered ribonucleic acid scaffold (ERS) sequence
  source 1..90: mol_type = other DNA
actggcgcttctatctgtattactctgagcgccatcaccagcgactatgtcgtagtgggtaaagctccctcttcggagggagcgtcagag

SEQ ID NO: 11545 - DNA, 89 bp, synthetic construct
  misc_feature 1..89: note = engineered ribonucleic acid scaffold (ERS) sequence
  source 1..89: mol_type = other DNA
actggcgcttctatctggttactctgagcgccatcaccagcgactatgtcgtagtgggtaaagctccctcttcggagggagcgtcagag

SEQ ID NO: 11546 - DNA, 89 bp, synthetic construct
  misc_feature 1..89: note = engineered ribonucleic acid scaffold (ERS) sequence
  source 1..89: mol_type = other DNA
actggcgcttctatctgtttactctgagcgccatcaccagcgactatgtcgtagtgggtaaagctccctcttcggagggagcgtcagag

SEQ ID NO: 11547 - DNA, 90 bp, synthetic construct
  misc_feature 1..90: note = engineered ribonucleic acid scaffold (ERS) sequence
  source 1..90: mol_type = other DNA
actggcgcttctatctgatttactctgagcgccatcaccagcgactatgtcgtagtgggtaaagctccctcttcggagggagcgtcagag

SEQ ID NO: 11548 - DNA, 89 bp, synthetic construct
  misc_feature 1..89: note = engineered ribonucleic acid scaffold (ERS) sequence
  source 1..89: mol_type = other DNA
actggcgcttctatctgattgctctgagcgccatcaccagcgactatgtcgtagtgggtaaagctccctcttcggagggagcgtcagag

SEQ ID NO: 11549 - DNA, 91 bp, synthetic construct
  misc_feature 1..91: note = engineered ribonucleic acid scaffold (ERS) sequence
  source 1..91: mol_type = other DNA
actggcgcttctatatctgattactctgagcgccatcaccagcgactatgtcgtagtgggtaaagctccctcttcggagggagcatcaaag

SEQ ID NO: 11550 - DNA, 90 bp, synthetic construct
  misc_feature 1..90: note = engineered ribonucleic acid scaffold (ERS) sequence
  source 1..90: mol_type = other DNA
actggcgcttctaatctgattactctgagcgccatcaccagcgactatgtcgtagtgggtaaagctccctcttcggagggagcatcaaag

SEQ ID NO: 11551 - DNA, 88 bp, synthetic construct
  misc_feature 1..88: note = engineered ribonucleic acid scaffold (ERS) sequence
  source 1..88: mol_type = other DNA
actggcgcttctactgattactctgagcgccatcaccagcgactatgtcgtagtgggtaaagctccctcttcggagggagcatcaaag

SEQ ID NO: 11552 - DNA, 89 bp, synthetic construct
  misc_feature 1..89: note = engineered ribonucleic acid scaffold (ERS) sequence
  source 1..89: mol_type = other DNA
actggcgcttctaactgattactctgagcgccatcaccagcgactatgtcgtagtgggtaaagctccctcttcggagggagcatcaaag

SEQ ID NO: 11553 - DNA, 89 bp, synthetic construct
  misc_feature 1..89: note = engineered ribonucleic acid scaffold (ERS) sequence
  source 1..89: mol_type = other DNA
actggcgcttctacctgattactctgagcgccatcaccagcgactatgtcgtagtgggtaaagctccctcttcggagggagcatcaaag

SEQ ID NO: 11554 - DNA, 89 bp, synthetic construct
  misc_feature 1..89: note = engineered ribonucleic acid scaffold (ERS) sequence
  source 1..89: mol_type = other DNA
actggcgcttctagctgattactctgagcgccatcaccagcgactatgtcgtagtgggtaaagctccctcttcggagggagcatcaaag

SEQ ID NO: 11555 - DNA, 91 bp, synthetic construct
  misc_feature 1..91: note = engineered ribonucleic acid scaffold (ERS) sequence
  source 1..91: mol_type = other DNA
actggcgcttctattactgattactctgagcgccatcaccagcgactatgtcgtagtgggtaaagctccctcttcggagggagcatcaaag

SEQ ID NO: 11556 - DNA, 89 bp, synthetic construct
  misc_feature 1..89: note = engineered ribonucleic acid scaffold (ERS) sequence
  source 1..89: mol_type = other DNA
actggcgcttctatatgattactctgagcgccatcaccagcgactatgtcgtagtgggtaaagctccctcttcggagggagcatcaaag

SEQ ID NO: 11557 - DNA, 89 bp, synthetic construct
  misc_feature 1..89: note = engineered ribonucleic acid scaffold (ERS) sequence
  source 1..89: mol_type = other DNA
actggcgcttctatgtgattactctgagcgccatcaccagcgactatgtcgtagtgggtaaagctccctcttcggagggagcatcaaag

SEQ ID NO: 11558 - DNA, 89 bp, synthetic construct
  misc_feature 1..89: note = engineered ribonucleic acid scaffold (ERS) sequence
  source 1..89: mol_type = other DNA
actggcgcttctatttgattactctgagcgccatcaccagcgactatgtcgtagtgggtaaagctccctcttcggagggagcatcaaag

SEQ ID NO: 11559 - DNA, 90 bp, synthetic construct
  misc_feature 1..90: note = engineered ribonucleic acid scaffold (ERS) sequence
  source 1..90: mol_type = other DNA
actggcgcttctatcttgattactctgagcgccatcaccagcgactatgtcgtagtgggtaaagctccctcttcggagggagcatcaaag

SEQ ID NO: 11560 - DNA, 89 bp, synthetic construct
  misc_feature 1..89: note = engineered ribonucleic acid scaffold (ERS) sequence
  source 1..89: mol_type = other DNA
actggcgcttctatcagattactctgagcgccatcaccagcgactatgtcgtagtgggtaaagctccctcttcggagggagcatcaaag

SEQ ID NO: 11561 - DNA, 89 bp, synthetic construct
  misc_feature 1..89: note = engineered ribonucleic acid scaffold (ERS) sequence
  source 1..89: mol_type = other DNA
actggcgcttctatcggattactctgagcgccatcaccagcgactatgtcgtagtgggtaaagctccctcttcggagggagcatcaaag

SEQ ID NO: 11562 - DNA, 90 bp, synthetic construct
  misc_feature 1..90: note = engineered ribonucleic acid scaffold (ERS) sequence
  source 1..90: mol_type = other DNA
actggcgcttctatctgaattactctgagcgccatcaccagcgactatgtcgtagtgggtaaagctccctcttcggagggagcatcaaag

SEQ ID NO: 11563 - DNA, 90 bp, synthetic construct
  misc_feature 1..90: note = engineered ribonucleic acid scaffold (ERS) sequence
  source 1..90: mol_type = other DNA
actggcgcttctatctgtattactctgagcgccatcaccagcgactatgtcgtagtgggtaaagctccctcttcggagggagcatcaaag

SEQ ID NO: 11564 - DNA, 89 bp, synthetic construct
  misc_feature 1..89: note = engineered ribonucleic acid scaffold (ERS) sequence
  source 1..89: mol_type = other DNA
actggcgcttctatctggttactctgagcgccatcaccagcgactatgtcgtagtgggtaaagctccctcttcggagggagcatcaaag

SEQ ID NO: 11565 - DNA, 89 bp, synthetic construct
  misc_feature 1..89: note = engineered ribonucleic acid scaffold (ERS) sequence
  source 1..89: mol_type = other DNA
actggcgcttctatctgtttactctgagcgccatcaccagcgactatgtcgtagtgggtaaagctccctcttcggagggagcatcaaag

SEQ ID NO: 11566 - DNA, 90 bp, synthetic construct
  misc_feature 1..90: note = engineered ribonucleic acid scaffold (ERS) sequence
  source 1..90: mol_type = other DNA
actggcgcttctatctgatttactctgagcgccatcaccagcgactatgtcgtagtgggtaaagctccctcttcggagggagcatcaaag

SEQ ID NO: 11567 - DNA, 89 bp, synthetic construct
  misc_feature 1..89: note = engineered ribonucleic acid scaffold (ERS) sequence
  source 1..89: mol_type = other DNA
actggcgcttctatctgattgctctgagcgccatcaccagcgactatgtcgtagtgggtaaagctccctcttcggagggagcatcaaag

SEQ ID NO: 11568 - RNA, 88 nt, synthetic construct
  misc_feature 1..88: note = engineered ribonucleic acid scaffold (ERS) sequence
  source 1..88: mol_type = other RNA
aactggcgcttctatctgattactctgagcgccatcaccagcgactatgtcgtagtgggtaaactccctcttcggagggagatcagag

SEQ ID NO: 11569 - RNA, 90 nt, synthetic construct
  misc_feature 1..90: note = engineered ribonucleic acid scaffold (ERS) sequence
  source 1..90: mol_type = other RNA
aactggcgcttctatctgattactctgagcgccatcaccagcgactatgtcgtagtgggtaaagcgccctcttcggagggagcatcagag

SEQ ID NO: 11570 - RNA, 100 nt, synthetic construct
  misc_feature 1..100: note = engineered ribonucleic acid scaffold (ERS) sequence
  source 1..100: mol_type = other RNA
aactggcgcttctatctgattactctgagcgccatcaccagcgactatgtcgtagtgggtaaagcgccttacggacttcggtccgtaaggagcatcagag

SEQ ID NO: 11571 - RNA, 100 nt, synthetic construct
  misc_feature 1..100: note = engineered ribonucleic acid scaffold (ERS) sequence
  source 1..100: mol_type = other RNA
aactggcgcttctatctgattactctgagcgccatcaccagcgactatgtcgtagtgggtaaagcgcttacggaattcgtgtccgtaagaagcatcagag

SEQ ID NO: 11572 - RNA, 101 nt, synthetic construct
  misc_feature 1..101: note = engineered ribonucleic acid scaffold (ERS) sequence
  source 1..101: mol_type = other RNA
aactggcgcttctatctgattactctgagcgccatcaccagcgactatgtcgtagtgggtaaagcgcttacggacttcgcggtccgtaagaagcatcagag

SEQ ID NO: 11573 - RNA, 99 nt, synthetic construct
  misc_feature 1..99: note = engineered ribonucleic acid scaffold (ERS) sequence
  source 1..99: mol_type = other RNA
aactggcgcttctatctgattactctgagcgccatcaccagcgactatgtcgtagtgggtaaagcgcttacggacttcggtccgtaagaagcatcagag

SEQ ID NO: 11574 - RNA, 99 nt, synthetic construct
  misc_feature 1..99: note = engineered ribonucleic acid scaffold (ERS) sequence
  source 1..99: mol_type = other RNA
aactggcgcttctatctgattactctgagcgccatcaccagcgactatgtcgtagtgggtaaagcgcttacggacttcggtccgtaagtcgcatcagag

SEQ ID NO: 11575 - RNA, 99 nt, synthetic construct
  misc_feature 1..99: note = engineered ribonucleic acid scaffold (ERS) sequence
  source 1..99: mol_type = other RNA
aactggcgcttctatctgattactctgagcgccatcaccagcgactatgtcgtagtgggtaaagcgcttacggagttcgatccgtaagaagcatcagag

SEQ ID NO: 11576 - RNA, 99 nt, synthetic construct
  misc_feature 1..99: note = engineered ribonucleic acid scaffold (ERS) sequence
  source 1..99: mol_type = other RNA
aactggcgcttctatctgattactctgagcgccatcaccagcgactatgtcgtagtgggtaaagcgctttcggacttcggtccggaagaagcatcagag

SEQ ID NO: 11577 - RNA, 103 nt, synthetic construct
  misc_feature 1..103: note = engineered ribonucleic acid scaffold (ERS) sequence
  source 1..103: mol_type = other RNA
aactggcgcttctatctgattactctgagcgccatcaccagcgactatgtcgtagtgggtaaagcggcagatctgagcctccgagctctctgccgcatcagag

SEQ ID NO: 11578 - RNA, 99 nt, synthetic construct
  misc_feature 1..99: note = engineered ribonucleic acid scaffold (ERS) sequence
  source 1..99: mol_type = other RNA
aactggcgcttctatctgattactctgagcgccatcaccagcgactatgtcgtagtgggtaaagcggttacggacttcggtccgtaagacgcatcagag

SEQ ID NO: 11579 - RNA, 76 nt, synthetic construct
  misc_feature 1..76: note = engineered ribonucleic acid scaffold (ERS) sequence
  source 1..76: mol_type = other RNA
aactggcgcttctatctgattactctgagcgccatcaccagcgactatgtcgtagtgggtaaagctagcatcagag

SEQ ID NO: 11580 - RNA, 90 nt, synthetic construct
  misc_feature 1..90: note = engineered ribonucleic acid scaffold (ERS) sequence
  source 1..90: mol_type = other RNA
aactggcgcttctatctgattactctgagcgccatcaccagcgactatgtcgtagtgggtaaagctccctattcggatggagcatcagag

SEQ ID NO: 11581 - RNA, 96 nt, synthetic construct
  misc_feature 1..96: note = engineered ribonucleic acid scaffold (ERS) sequence
  source 1..96: mol_type = other RNA
aactggcgcttctatctgattactctgagcgccatcaccagcgactatgtcgtagtgggtaaagctccctcacagggatgtgagggagcatcagag

SEQ ID NO: 11582 - RNA, 95 nt, synthetic construct
  misc_feature 1..95: note = engineered ribonucleic acid scaffold (ERS) sequence
  source 1..95: mol_type = other RNA
aactggcgcttctatctgattactctgagcgccatcaccagcgactatgtcgtagtgggtaaagctccctcagctgcagtgagggagcatcagag

SEQ ID NO: 11583 - RNA, 90 nt, synthetic construct
  misc_feature 1..90: note = engineered ribonucleic acid scaffold (ERS) sequence
  source 1..90: mol_type = other RNA
aactggcgcttctatctgattactctgagcgccatcaccagcgactatgtcgtagtgggtaaagctccctcataggagggagcatcagag

SEQ ID NO: 11584 - RNA, 91 nt, synthetic construct
  misc_feature 1..91: note = engineered ribonucleic acid scaffold (ERS) sequence
  source 1..91: mol_type = other RNA
aactggcgcttctatctgattactctgagcgccatcaccagcgactatgtcgtagtgggtaaagctccctcttcaggagggagcatcagag

SEQ ID NO: 11585 - RNA, 90 nt, synthetic construct
  misc_feature 1..90: note = engineered ribonucleic acid scaffold (ERS) sequence
  source 1..90: mol_type = other RNA
aactggcgcttctatctgattactctgagcgccatcaccagcgactatgtcgtagtgggtaaagctccctcttcggagagtgcatcagag

SEQ ID NO: 11586 - RNA, 90 nt, synthetic construct
  misc_feature 1..90: note = engineered ribonucleic acid scaffold (ERS) sequence
  source 1..90: mol_type = other RNA
aactggcgcttctatctgattactctgagcgccatcaccagcgactatgtcgtagtgggtaaagctccctcttcggaggaggcatcagag

SEQ ID NO: 11587 - RNA, 92 nt, synthetic construct
  misc_feature 1..92: note = engineered ribonucleic acid scaffold (ERS) sequence
  source 1..92: mol_type = other RNA
aactggcgcttctatctgattactctgagcgccatcaccagcgactatgtcgtagtgggtaaagctccctcttcggagggaacgcatcagag

SEQ ID NO: 11588 - RNA, 90 nt, synthetic construct; identical to SEQ ID NO: 739
  misc_feature 1..90: note = engineered ribonucleic acid scaffold (ERS) sequence
  source 1..90: mol_type = other RNA

SEQ ID NO: 11589 - RNA, 90 nt, synthetic construct
  misc_feature 1..90: note = engineered ribonucleic acid scaffold (ERS) sequence
  source 1..90: mol_type = other RNA
aactggcgcttctatctgattactctgagcgccatcaccagcgactatgtcgtagtgggtaaagctccctggaaacagggagcatcagag

SEQ ID NO: 11590 - RNA, 86 nt, synthetic construct
  misc_feature 1..86: note = engineered ribonucleic acid scaffold (ERS) sequence
  source 1..86: mol_type = other RNA
aactggcgcttctatctgattactctgagcgccatcaccagcgactatgtcgtagtgggtaaagctcccttcggggagcatcagag

SEQ ID NO: 11591 - RNA, 86 nt, synthetic construct
  misc_feature 1..86: note = engineered ribonucleic acid scaffold (ERS) sequence
  source 1..86: mol_type = other RNA
aactggcgcttctatctgattactctgagcgccatcaccagcgactatgtcgtagtgggtaaagctccgttcgcggagcatcagag

SEQ ID NO: 11592 - RNA, 88 nt, synthetic construct
  misc_feature 1..88: note = engineered ribonucleic acid scaffold (ERS) sequence
  source 1..88: mol_type = other RNA
aactggcgcttctatctgattactctgagcgccatcaccagcgactatgtcgtagtgggtaaagctcctcttcggaggagcatcagag

SEQ ID NO: 11593 - RNA, 86 nt, synthetic construct
  misc_feature 1..86: note = engineered ribonucleic acid scaffold (ERS) sequence
  source 1..86: mol_type = other RNA
aactggcgcttctatctgattactctgagcgccatcaccagcgactatgtcgtagtgggtaaagctctcttcggagagcatcagag

SEQ ID NO: 11594 - RNA, 78 nt, synthetic construct
  misc_feature 1..78: note = engineered ribonucleic acid scaffold (ERS) sequence
  source 1..78: mol_type = other RNA
aactggcgcttctatctgattactctgagcgccatcaccagcgactatgtcgtagtgggtaaagctgcagcatcagag

SEQ ID NO: 11595 - RNA, 84 nt, synthetic construct
  misc_feature 1..84: note = engineered ribonucleic acid scaffold (ERS) sequence
  source 1..84: mol_type = other RNA
aactggcgcttctatctgattactctgagcgccatcaccagcgactatgtcgtagtgggtaaagctgcttcggcagcatcagag

SEQ ID NO: 11596 - RNA, 90 nt, synthetic construct
  misc_feature 1..90: note = engineered ribonucleic acid scaffold (ERS) sequence
  source 1..90: mol_type = other RNA
aactggcgcttctatctgattactctgagcgccatcaccagcgactatgtcgtagtgggtaaaggtccctcttcggagggaacatcagag

SEQ ID NO: 11597 - RNA, 94 nt, synthetic construct
  misc_feature 1..94: note = engineered ribonucleic acid scaffold (ERS) sequence
  source 1..94: mol_type = other RNA
aactggcgcttctatctgattactctgagcgccatcaccagcgactatgtcgtagtgggtaaaggtgacggtcttcggaccgtcaccatcagag

SEQ ID NO: 11598 - RNA, 92 nt, synthetic construct
  misc_feature 1..92: note = engineered ribonucleic acid scaffold (ERS) sequence
  source 1..92: mol_type = other RNA
aactggcgcttctatctgattactctgagcgccatcaccagcgactatgtcgtagtgggtaaagtctccctcttcggagggaggcatcagag

SEQ ID NO: 11599 - RNA, 94 nt, synthetic construct
  misc_feature 1..94: note = engineered ribonucleic acid scaffold (ERS) sequence
  source 1..94: mol_type = other RNA
aactggcgcttctatctgattactctgagcgccatcaccagcgactatgtcgtagtgggtaaagtgcgcccgcttcggcgggcgcacatcagag

SEQ ID NO: 11600 - RNA, 94 nt, synthetic construct
  misc_feature 1..94: note = engineered ribonucleic acid scaffold (ERS) sequence
  source 1..94: mol_type = other RNA
aactggcgcttctatctgattactctgagcgccatcaccagcgactatgtcgtagtgggtaaataatgaaaacttcggttttcattaatcagag

SEQ ID NO: 11601 - RNA, 94 nt, synthetic construct
  misc_feature 1..94: note = engineered ribonucleic acid scaffold (ERS) sequence
  source 1..94: mol_type = other RNA
aactggcgcttctatctgattactctgagcgccatcaccagcgactatgtcgtagtgggtaaatcgtaagaacttcggttcttacgaatcagag

SEQ ID NO: 11602 - RNA, 94 nt, synthetic construct
  misc_feature 1..94: note = engineered ribonucleic acid scaffold (ERS) sequence
  source 1..94: mol_type = other RNA
aactggcgcttctatctgattactctgagcgccatcaccagcgactatgtcgtagtgggtaaatggaagatgcttcggcatcttccaatcagag

SEQ ID NO: 11603 - RNA, 98 nt, synthetic construct
  misc_feature 1..98: note = engineered ribonucleic acid scaffold (ERS) sequence
  source 1..98: mol_type = other RNA
aactggcgcttctatctgattactctgagcgccatcaccagcgactatgtcgtagtgggtaaagcccttacggacttcggtccgtaagggcatcagag

SEQ ID NO: 11604 - RNA, 100 nt, synthetic construct
  misc_feature 1..100: note = engineered ribonucleic acid scaffold (ERS) sequence
  source 1..100: mol_type = other RNA
aactggcgcttctatctgattactctgagcgccatcaccagcgactatgtcgtagtgggtaaagcctcttacggacttcggtccgtaagaggcatcagag

SEQ ID NO: 11605 - RNA, 100 nt, synthetic construct
  misc_feature 1..100: note = engineered ribonucleic acid scaffold (ERS) sequence
  source 1..100: mol_type = other RNA
aactggcgcttctatctgattactctgagcgccatcaccagcgactatgtcgtagtgggtaaagccgcttagggacttcggtccctaagaggcatcagag

SEQ ID NO: 11606 - RNA, 85 nt, synthetic construct
  misc_feature 1..85: note = engineered ribonucleic acid scaffold (ERS) sequence
  source 1..85: mol_type = other RNA
gggcgcttctatctgattactctgagcgccctcaccagcgactatgtcgtagtgggtaaactccctcttcggagggagatcagag

SEQ ID NO: 11607 - RNA, 87 nt, synthetic construct
  misc_feature 1..87: note = engineered ribonucleic acid scaffold (ERS) sequence
  source 1..87: mol_type = other RNA
gggcgcttctatctgattactctgagcgccctcaccagcgactatgtcgtagtgggtaaagcgccctcttcggagggagcatcagag

SEQ ID NO: 11608 - RNA, 97 nt, synthetic construct
  misc_feature 1..97: note = engineered ribonucleic acid scaffold (ERS) sequence
  source 1..97: mol_type = other RNA
gggcgcttctatctgattactctgagcgccctcaccagcgactatgtcgtagtgggtaaagcgccttacggacttcggtccgtaaggagcatcagag

SEQ ID NO: 11609 - RNA, 97 nt, synthetic construct
  misc_feature 1..97: note = engineered ribonucleic acid scaffold (ERS) sequence
  source 1..97: mol_type = other RNA
gggcgcttctatctgattactctgagcgccctcaccagcgactatgtcgtagtgggtaaagcgcttacggaattcgtgtccgtaagaagcatcagag

SEQ ID NO: 11610 - RNA, 98 nt, synthetic construct
  misc_feature 1..98: note = engineered ribonucleic acid scaffold (ERS) sequence
  source 1..98: mol_type = other RNA
gggcgcttctatctgattactctgagcgccctcaccagcgactatgtcgtagtgggtaaagcgcttacggacttcgcggtccgtaagaagcatcagag

SEQ ID NO: 11611 - RNA, 96 nt, synthetic construct
  misc_feature 1..96: note = engineered ribonucleic acid scaffold (ERS) sequence
  source 1..96: mol_type = other RNA
gggcgcttctatctgattactctgagcgccctcaccagcgactatgtcgtagtgggtaaagcgcttacggacttcggtccgtaagaagcatcagag

SEQ ID NO: 11612 - RNA, 96 nt, synthetic construct
  misc_feature 1..96: note = engineered ribonucleic acid scaffold (ERS) sequence
  source 1..96: mol_type = other RNA
gggcgcttctatctgattactctgagcgccctcaccagcgactatgtcgtagtgggtaaagcgcttacggacttcggtccgtaagtcgcatcagag

SEQ ID NO: 11613 - RNA, 96 nt, synthetic construct
  misc_feature 1..96: note = engineered ribonucleic acid scaffold (ERS) sequence
  source 1..96: mol_type = other RNA
gggcgcttctatctgattactctgagcgccctcaccagcgactatgtcgtagtgggtaaagcgcttacggagttcgatccgtaagaagcatcagag

SEQ ID NO: 11614 - RNA, 96 nt, synthetic construct
  misc_feature 1..96: note = engineered ribonucleic acid scaffold (ERS) sequence
  source 1..96: mol_type = other RNA
gggcgcttctatctgattactctgagcgccctcaccagcgactatgtcgtagtgggtaaagcgctttcggacttcggtccggaagaagcatcagag

SEQ ID NO: 11615 - RNA, 100 nt, synthetic construct
  misc_feature 1..100: note = engineered ribonucleic acid scaffold (ERS) sequence
  source 1..100: mol_type = other RNA
gggcgcttctatctgattactctgagcgccctcaccagcgactatgtcgtagtgggtaaagcggcagatctgagcctccgagctctctgccgcatcagag

SEQ ID NO: 11616 - RNA, 96 nt, synthetic construct
  misc_feature 1..96: note = engineered ribonucleic acid scaffold (ERS) sequence
  source 1..96: mol_type = other RNA
gggcgcttctatctgattactctgagcgccctcaccagcgactatgtcgtagtgggtaaagcggttacggacttcggtccgtaagacgcatcagag

SEQ ID NO: 11617 - RNA, 73 nt, synthetic construct
  misc_feature 1..73: note = engineered ribonucleic acid scaffold (ERS) sequence
  source 1..73: mol_type = other RNA
gggcgcttctatctgattactctgagcgccctcaccagcgactatgtcgtagtgggtaaagctagcatcagag

SEQ ID NO: 11618 - RNA, 87 nt, synthetic construct
  misc_feature 1..87: note = engineered ribonucleic acid scaffold (ERS) sequence
  source 1..87: mol_type = other RNA
gggcgcttctatctgattactctgagcgccctcaccagcgactatgtcgtagtgggtaaagctccctattcggatggagcatcagag

SEQ ID NO: 11619 - RNA, 93 nt, synthetic construct
  misc_feature 1..93: note = engineered ribonucleic acid scaffold (ERS) sequence
  source 1..93: mol_type = other RNA
gggcgcttctatctgattactctgagcgccctcaccagcgactatgtcgtagtgggtaaagctccctcacagggatgtgagggagcatcagag

SEQ ID NO: 11620 - RNA, 92 nt, synthetic construct
  misc_feature 1..92: note = engineered ribonucleic acid scaffold (ERS) sequence
  source 1..92: mol_type = other RNA
gggcgcttctatctgattactctgagcgccctcaccagcgactatgtcgtagtgggtaaagctccctcagctgcagtgagggagcatcagag

SEQ ID NO: 11621 - RNA, 87 nt, synthetic construct
  misc_feature 1..87: note = engineered ribonucleic acid scaffold (ERS) sequence
  source 1..87: mol_type = other RNA
gggcgcttctatctgattactctgagcgccctcaccagcgactatgtcgtagtgggtaaagctccctcataggagggagcatcagag

SEQ ID NO: 11622 - RNA, 88 nt, synthetic construct
  misc_feature 1..88: note = engineered ribonucleic acid scaffold (ERS) sequence
  source 1..88: mol_type = other RNA
gggcgcttctatctgattactctgagcgccctcaccagcgactatgtcgtagtgggtaaagctccctcttcaggagggagcatcagag

SEQ ID NO: 11623 - RNA, 87 nt, synthetic construct
  misc_feature 1..87: note = engineered ribonucleic acid scaffold (ERS) sequence
  source 1..87: mol_type = other RNA
gggcgcttctatctgattactctgagcgccctcaccagcgactatgtcgtagtgggtaaagctccctcttcggagagtgcatcagag

SEQ ID NO: 11624 - RNA, 87 nt, synthetic construct
  misc_feature 1..87: note = engineered ribonucleic acid scaffold (ERS) sequence
  source 1..87: mol_type = other RNA
gggcgcttctatctgattactctgagcgccctcaccagcgactatgtcgtagtgggtaaagctccctcttcggaggaggcatcagag

SEQ ID NO: 11625 - RNA, 89 nt, synthetic construct
  misc_feature 1..89: note = engineered ribonucleic acid scaffold (ERS) sequence
  source 1..89: mol_type = other RNA
gggcgcttctatctgattactctgagcgccctcaccagcgactatgtcgtagtgggtaaagctccctcttcggagggaacgcatcagag

SEQ ID NO: 11626 - RNA, 87 nt, synthetic construct; identical to SEQ ID NO: 753
  misc_feature 1..87: note = engineered ribonucleic acid scaffold (ERS) sequence
  source 1..87: mol_type = other RNA

SEQ ID NO: 11627 - RNA, 87 nt, synthetic construct
  misc_feature 1..87: note = engineered ribonucleic acid scaffold (ERS) sequence
  source 1..87: mol_type = other RNA
gggcgcttctatctgattactctgagcgccctcaccagcgactatgtcgtagtgggtaaagctccctggaaacagggagcatcagag

SEQ ID NO: 11628 - RNA, 83 nt, synthetic construct
  misc_feature 1..83: note = engineered ribonucleic acid scaffold (ERS) sequence
  source 1..83: mol_type = other RNA
gggcgcttctatctgattactctgagcgccctcaccagcgactatgtcgtagtgggtaaagctcccttcggggagcatcagag

SEQ ID NO: 11629 - RNA, 83 nt, synthetic construct
  misc_feature 1..83: note = engineered ribonucleic acid scaffold (ERS) sequence
  source 1..83: mol_type = other RNA
gggcgcttctatctgattactctgagcgccctcaccagcgactatgtcgtagtgggtaaagctccgttcgcggagcatcagag

SEQ ID NO: 11630 - RNA, 85 nt, synthetic construct
  misc_feature 1..85: note = engineered ribonucleic acid scaffold (ERS) sequence
  source 1..85: mol_type = other RNA
gggcgcttctatctgattactctgagcgccctcaccagcgactatgtcgtagtgggtaaagctcctcttcggaggagcatcagag

SEQ ID NO: 11631 - RNA, 83 nt, synthetic construct
  misc_feature 1..83: note = engineered ribonucleic acid scaffold (ERS) sequence
  source 1..83: mol_type = other RNA
gggcgcttctatctgattactctgagcgccctcaccagcgactatgtcgtagtgggtaaagctctcttcggagagcatcagag

SEQ ID NO: 11632 - RNA, 75 nt, synthetic construct
  misc_feature 1..75: note = engineered ribonucleic acid scaffold (ERS) sequence
  source 1..75: mol_type = other RNA
gggcgcttctatctgattactctgagcgccctcaccagcgactatgtcgtagtgggtaaagctgcagcatcagag

SEQ ID NO: 11633 - RNA, 81 nt, synthetic construct
  misc_feature 1..81: note = engineered ribonucleic acid scaffold (ERS) sequence
  source 1..81: mol_type = other RNA
gggcgcttctatctgattactctgagcgccctcaccagcgactatgtcgtagtgggtaaagctgcttcggcagcatcagag

SEQ ID NO: 11634 - RNA, 87 nt, synthetic construct
  misc_feature 1..87: note = engineered ribonucleic acid scaffold (ERS) sequence
  source 1..87: mol_type = other RNA
gggcgcttctatctgattactctgagcgccctcaccagcgactatgtcgtagtgggtaaaggtccctcttcggagggaacatcagag

SEQ ID NO: 11635 - RNA, 91 nt, synthetic construct
  misc_feature 1..91: note = engineered ribonucleic acid scaffold (ERS) sequence
  source 1..91: mol_type = other RNA
gggcgcttctatctgattactctgagcgccctcaccagcgactatgtcgtagtgggtaaaggtgacggtcttcggaccgtcaccatcagag

SEQ ID NO: 11636 - RNA, 89 nt, synthetic construct
  misc_feature 1..89: note = engineered ribonucleic acid scaffold (ERS) sequence
  source 1..89: mol_type = other RNA
gggcgcttctatctgattactctgagcgccctcaccagcgactatgtcgtagtgggtaaagtctccctcttcggagggaggcatcagag

SEQ ID NO: 11637 - RNA, 91 nt, synthetic construct
  misc_feature 1..91: note = engineered ribonucleic acid scaffold (ERS) sequence
  source 1..91: mol_type = other RNA
gggcgcttctatctgattactctgagcgccctcaccagcgactatgtcgtagtgggtaaagtgcgcccgcttcggcgggcgcacatcagag

SEQ ID NO: 11638 - RNA, 91 nt, synthetic construct
  misc_feature 1..91: note = engineered ribonucleic acid scaffold (ERS) sequence
  source 1..91: mol_type = other RNA
gggcgcttctatctgattactctgagcgccctcaccagcgactatgtcgtagtgggtaaataatgaaaacttcggttttcattaatcagag

SEQ ID NO: 11639 - RNA, 91 nt, synthetic construct
  misc_feature 1..91: note = engineered ribonucleic acid scaffold (ERS) sequence
  source 1..91: mol_type = other RNA
gggcgcttctatctgattactctgagcgccctcaccagcgactatgtcgtagtgggtaaatcgtaagaacttcggttcttacgaatcagag

SEQ ID NO: 11640 - RNA, 91 nt, synthetic construct
  misc_feature 1..91: note = engineered ribonucleic acid scaffold (ERS) sequence
  source 1..91: mol_type = other RNA
gggcgcttctatctgattactctgagcgccctcaccagcgactatgtcgtagtgggtaaatggaagatgcttcggcatcttccaatcagag

SEQ ID NO: 11641 - RNA, 95 nt, synthetic construct
  misc_feature 1..95: note = engineered ribonucleic acid scaffold (ERS) sequence
  source 1..95: mol_type = other RNA
gggcgcttctatctgattactctgagcgccctcaccagcgactatgtcgtagtgggtaaagcccttacggacttcggtccgtaagggcatcagag

SEQ ID NO: 11642 - RNA, 97 nt, synthetic construct
  misc_feature 1..97: note = engineered ribonucleic acid scaffold (ERS) sequence
  source 1..97: mol_type = other RNA
gggcgcttctatctgattactctgagcgccctcaccagcgactatgtcgtagtgggtaaagcctcttacggacttcggtccgtaagaggcatcagag

SEQ ID NO: 11643 - RNA, 97 nt, synthetic construct
  misc_feature 1..97: note = engineered ribonucleic acid scaffold (ERS) sequence
  source 1..97: mol_type = other RNA
gggcgcttctatctgattactctgagcgccctcaccagcgactatgtcgtagtgggtaaagccgcttagggacttcggtccctaagaggcatcagag

SEQ ID NO: 11644 - RNA, 87 nt, synthetic construct
  misc_feature 1..87: note = engineered ribonucleic acid scaffold (ERS) sequence
  source 1..87: mol_type = other RNA
gctggcgcttctatctgattactctgagcgccatcaccagcgactatgtcgtagtgggtaaactccctcttcggagggagatcagag

SEQ ID NO: 11645 - RNA, 89 nt, synthetic construct
  misc_feature 1..89: note = engineered ribonucleic acid scaffold (ERS) sequence
  source 1..89: mol_type = other RNA
gctggcgcttctatctgattactctgagcgccatcaccagcgactatgtcgtagtgggtaaagcgccctcttcggagggagcatcagag

SEQ ID NO: 11646 - RNA, 99 nt, synthetic construct
  misc_feature 1..99: note = engineered ribonucleic acid scaffold (ERS) sequence
  source 1..99: mol_type = other RNA
gctggcgcttctatctgattactctgagcgccatcaccagcgactatgtcgtagtgggtaaagcgccttacggacttcggtccgtaaggagcatcagag

SEQ ID NO: 11647 - RNA, 99 nt, synthetic construct
  misc_feature 1..99: note = engineered ribonucleic acid scaffold (ERS) sequence
  source 1..99: mol_type = other RNA
gctggcgcttctatctgattactctgagcgccatcaccagcgactatgtcgtagtgggtaaagcgcttacggaattcgtgtccgtaagaagcatcagag

SEQ ID NO: 11648 - RNA, 100 nt, synthetic construct
  misc_feature 1..100: note = engineered ribonucleic acid scaffold (ERS) sequence
  source 1..100: mol_type = other RNA
gctggcgcttctatctgattactctgagcgccatcaccagcgactatgtcgtagtgggtaaagcgcttacggacttcgcggtccgtaagaagcatcagag

SEQ ID NO: 11649 - RNA, 98 nt, synthetic construct
  misc_feature 1..98: note = engineered ribonucleic acid scaffold (ERS) sequence
  source 1..98: mol_type = other RNA
gctggcgcttctatctgattactctgagcgccatcaccagcgactatgtcgtagtgggtaaagcgcttacggacttcggtccgtaagaagcatcagag

SEQ ID NO: 11650 - RNA, 98 nt, synthetic construct
  misc_feature 1..98: note = engineered ribonucleic acid scaffold (ERS) sequence
  source 1..98: mol_type = other RNA
gctggcgcttctatctgattactctgagcgccatcaccagcgactatgtcgtagtgggtaaagcgcttacggacttcggtccgtaagtcgcatcagag

SEQ ID NO: 11651 - RNA, 98 nt, synthetic construct
  misc_feature 1..98: note = engineered ribonucleic acid scaffold (ERS) sequence
  source 1..98: mol_type = other RNA
gctggcgcttctatctgattactctgagcgccatcaccagcgactatgtcgtagtgggtaaagcgcttacggagttcgatccgtaagaagcatcagag

SEQ ID NO: 11652 - RNA, 98 nt, synthetic construct
  misc_feature 1..98: note = engineered ribonucleic acid scaffold (ERS) sequence
  source 1..98: mol_type = other RNA
gctggcgcttctatctgattactctgagcgccatcaccagcgactatgtcgtagtgggtaaagcgctttcggacttcggtccggaagaagcatcagag

SEQ ID NO: 11653 - RNA, 102 nt, synthetic construct
  misc_feature 1..102: note = engineered ribonucleic acid scaffold (ERS) sequence
  source 1..102: mol_type = other RNA
gctggcgcttctatctgattactctgagcgccatcaccagcgactatgtcgtagtgggtaaagcggcagatctgagcctccgagctctctgccgcatcagag

SEQ ID NO: 11654 - RNA, 98 nt, synthetic construct
  misc_feature 1..98: note = engineered ribonucleic acid scaffold (ERS) sequence
  source 1..98: mol_type = other RNA
gctggcgcttctatctgattactctgagcgccatcaccagcgactatgtcgtagtgggtaaagcggttacggacttcggtccgtaagacgcatcagag

SEQ ID NO: 11655 - RNA, 75 nt, synthetic construct
  misc_feature 1..75: note = engineered ribonucleic acid scaffold (ERS) sequence
  source 1..75: mol_type = other RNA
gctggcgcttctatctgattactctgagcgccatcaccagcgactatgtcgtagtgggtaaagctagcatcagag

SEQ ID NO: 11656 - RNA, 89 nt, synthetic construct
  misc_feature 1..89: note = engineered ribonucleic acid scaffold (ERS) sequence
  source 1..89: mol_type = other RNA
gctggcgcttctatctgattactctgagcgccatcaccagcgactatgtcgtagtgggtaaagctccctattcggatggagcatcagag

SEQ ID NO: 11657 - RNA, 95 nt, synthetic construct
  misc_feature 1..95: note = engineered ribonucleic acid scaffold (ERS) sequence
  source 1..95: mol_type = other RNA
gctggcgcttctatctgattactctgagcgccatcaccagcgactatgtcgtagtgggtaaagctccctcacagggatgtgagggagcatcagag

SEQ ID NO: 11658 - RNA, 94 nt, synthetic construct
  misc_feature 1..94: note = engineered ribonucleic acid scaffold (ERS) sequence
  source 1..94: mol_type = other RNA
gctggcgcttctatctgattactctgagcgccatcaccagcgactatgtcgtagtgggtaaagctccctcagctgcagtgagggagcatcagag

SEQ ID NO: 11659 - RNA, 89 nt, synthetic construct
  misc_feature 1..89: note = engineered ribonucleic acid scaffold (ERS) sequence
  source 1..89: mol_type = other RNA
gctggcgcttctatctgattactctgagcgccatcaccagcgactatgtcgtagtgggtaaagctccctcataggagggagcatcagag

SEQ ID NO: 11660 - RNA, 90 nt, synthetic construct
  misc_feature 1..90: note = engineered ribonucleic acid scaffold (ERS) sequence
  source 1..90: mol_type = other RNA
gctggcgcttctatctgattactctgagcgccatcaccagcgactatgtcgtagtgggtaaagctccctcttcaggagggagcatcagag

SEQ ID NO: 11661 - RNA, 89 nt, synthetic construct
  misc_feature 1..89: note = engineered ribonucleic acid scaffold (ERS) sequence
  source 1..89: mol_type = other RNA
gctggcgcttctatctgattactctgagcgccatcaccagcgactatgtcgtagtgggtaaagctccctcttcggagagtgcatcagag

SEQ ID NO: 11662 - RNA, 89 nt, synthetic construct
  misc_feature 1..89: note = engineered ribonucleic acid scaffold (ERS) sequence
  source 1..89: mol_type = other RNA
gctggcgcttctatctgattactctgagcgccatcaccagcgactatgtcgtagtgggtaaagctccctcttcggaggaggcatcagag

SEQ ID NO: 11663 - RNA, 91 nt, synthetic construct
  misc_feature 1..91: note = engineered ribonucleic acid scaffold (ERS) sequence
  source 1..91: mol_type = other RNA
gctggcgcttctatctgattactctgagcgccatcaccagcgactatgtcgtagtgggtaaagctccctcttcggagggaacgcatcagag

SEQ ID NO: 11664 - RNA, 89 nt, synthetic construct; identical to SEQ ID NO: 740
  misc_feature 1..89: note = engineered ribonucleic acid scaffold (ERS) sequence
  source 1..89: mol_type = other RNA

SEQ ID NO: 11665 - RNA, 89 nt, synthetic construct
  misc_feature 1..89: note = engineered ribonucleic acid scaffold (ERS) sequence
  source 1..89: mol_type = other RNA
gctggcgcttctatctgattactctgagcgccatcaccagcgactatgtcgtagtgggtaaagctccctggaaacagggagcatcagag

SEQ ID NO: 11666 - RNA, 85 nt, synthetic construct
  misc_feature 1..85: note = engineered ribonucleic acid scaffold (ERS) sequence
  source 1..85: mol_type = other RNA
gctggcgcttctatctgattactctgagcgccatcaccagcgactatgtcgtagtgggtaaagctcccttcggggagcatcagag

SEQ ID NO: 11667 - RNA, 85 nt, synthetic construct
  misc_feature 1..85: note = engineered ribonucleic acid scaffold (ERS) sequence
  source 1..85: mol_type = other RNA
gctggcgcttctatctgattactctgagcgccatcaccagcgactatgtcgtagtgggtaaagctccgttcgcggagcatcagag

SEQ ID NO: 11668 - RNA, 87 nt, synthetic construct
  misc_feature 1..87: note = engineered ribonucleic acid scaffold (ERS) sequence
  source 1..87: mol_type = other RNA
gctggcgcttctatctgattactctgagcgccatcaccagcgactatgtcgtagtgggtaaagctcctcttcggaggagcatcagag

SEQ ID NO: 11669 - RNA, 85 nt, synthetic construct
  misc_feature 1..85: note = engineered ribonucleic acid scaffold (ERS) sequence
  source 1..85: mol_type = other RNA
gctggcgcttctatctgattactctgagcgccatcaccagcgactatgtcgtagtgggtaaagctctcttcggagagcatcagag

SEQ ID NO: 11670 - RNA, 77 nt, synthetic construct
  misc_feature 1..77: note = engineered ribonucleic acid scaffold (ERS) sequence
  source 1..77: mol_type = other RNA
gctggcgcttctatctgattactctgagcgccatcaccagcgactatgtcgtagtgggtaaagctgcagcatcagag

SEQ ID NO: 11671 - RNA, 83 nt, synthetic construct
  misc_feature 1..83: note = engineered ribonucleic acid scaffold (ERS) sequence
  source 1..83: mol_type = other RNA
gctggcgcttctatctgattactctgagcgccatcaccagcgactatgtcgtagtgggtaaagctgcttcggcagcatcagag

SEQ ID NO: 11672 - RNA, 89 nt, synthetic construct
  misc_feature 1..89: note = engineered ribonucleic acid scaffold (ERS) sequence
  source 1..89: mol_type = other RNA
gctggcgcttctatctgattactctgagcgccatcaccagcgactatgtcgtagtgggtaaaggtccctcttcggagggaacatcagag

SEQ ID NO: 11673 - RNA, 93 nt, synthetic construct
  misc_feature 1..93: note = engineered ribonucleic acid scaffold (ERS) sequence
  source 1..93: mol_type = other RNA
gctggcgcttctatctgattactctgagcgccatcaccagcgactatgtcgtagtgggtaaaggtgacggtcttcggaccgtcaccatcagag

SEQ ID NO: 11674 - RNA, 91 nt, synthetic construct
  misc_feature 1..91: note = engineered ribonucleic acid scaffold (ERS) sequence
  source 1..91: mol_type = other RNA
gctggcgcttctatctgattactctgagcgccatcaccagcgactatgtcgtagtgggtaaagtctccctcttcggagggaggcatcagag

SEQ ID NO: 11675 - RNA, 93 nt, synthetic construct
  misc_feature 1..93: note = engineered ribonucleic acid scaffold (ERS) sequence
  source 1..93: mol_type = other RNA
gctggcgcttctatctgattactctgagcgccatcaccagcgactatgtcgtagtgggtaaagtgcgcccgcttcggcgggcgcacatcagag

SEQ ID NO: 11676 - RNA, 93 nt, synthetic construct
  misc_feature 1..93: note = engineered ribonucleic acid scaffold (ERS) sequence
  source 1..93: mol_type = other RNA
gctggcgcttctatctgattactctgagcgccatcaccagcgactatgtcgtagtgggtaaataatgaaaacttcggttttcattaatcagag

SEQ ID NO: 11677 - RNA, 93 nt, synthetic construct
  misc_feature 1..93: note = engineered ribonucleic acid scaffold (ERS) sequence
  source 1..93: mol_type = other RNA
gctggcgcttctatctgattactctgagcgccatcaccagcgactatgtcgtagtgggtaaatcgtaagaacttcggttcttacgaatcagag

SEQ ID NO: 11678 - RNA, 93 nt, synthetic construct
  misc_feature 1..93: note = engineered ribonucleic acid scaffold (ERS) sequence
  source 1..93: mol_type = other RNA
gctggcgcttctatctgattactctgagcgccatcaccagcgactatgtcgtagtgggtaaatggaagatgcttcggcatcttccaatcagag

SEQ ID NO: 11679 - RNA, 97 nt, synthetic construct
  misc_feature 1..97: note = engineered ribonucleic acid scaffold (ERS) sequence
  source 1..97: mol_type = other RNA
gctggcgcttctatctgattactctgagcgccatcaccagcgactatgtcgtagtgggtaaagcccttacggacttcggtccgtaagggcatcagag

SEQ ID NO: 11680 - RNA, 99 nt, synthetic construct
  misc_feature 1..99: note = engineered ribonucleic acid scaffold (ERS) sequence
  source 1..99: mol_type = other RNA
gctggcgcttctatctgattactctgagcgccatcaccagcgactatgtcgtagtgggtaaagcctcttacggacttcggtccgtaagaggcatcagag

SEQ ID NO: 11681 - RNA, 99 nt, synthetic construct
  misc_feature 1..99: note = engineered ribonucleic acid scaffold (ERS) sequence
  source 1..99: mol_type = other RNA
gctggcgcttctatctgattactctgagcgccatcaccagcgactatgtcgtagtgggtaaagccgcttagggacttcggtccctaagaggcatcagag

SEQ ID NO: 11682 - RNA, 87 nt, synthetic construct
  misc_feature 1..87: note = engineered ribonucleic acid scaffold (ERS) sequence
  source 1..87: mol_type = other RNA
tatggcgcttctatctgattactctgagcgccatcaccagcgactatgtcgtagtgggtaaactccctcttcggagggagatcagag

SEQ ID NO: 11683 - RNA, 89 nt, synthetic construct
  misc_feature 1..89: note = engineered ribonucleic acid scaffold (ERS) sequence
  source 1..89: mol_type = other RNA
tatggcgcttctatctgattactctgagcgccatcaccagcgactatgtcgtagtgggtaaagcgccctcttcggagggagcatcagag

SEQ ID NO: 11684 - RNA, 99 nt, synthetic construct
  misc_feature 1..99: note = engineered ribonucleic acid scaffold (ERS) sequence
  source 1..99: mol_type = other RNA
tatggcgcttctatctgattactctgagcgccatcaccagcgactatgtcgtagtgggtaaagcgccttacggacttcggtccgtaaggagcatcagag

SEQ ID NO: 11685 - RNA, 99 nt, synthetic construct
  misc_feature 1..99: note = engineered ribonucleic acid scaffold (ERS) sequence
  source 1..99: mol_type = other RNA
tatggcgcttctatctgattactctgagcgccatcaccagcgactatgtcgtagtgggtaaagcgcttacggaattcgtgtccgtaagaagcatcagag

SEQ ID NO: 11686 - RNA, 100 nt, synthetic construct
  misc_feature 1..100: note = engineered ribonucleic acid scaffold (ERS) sequence
  source 1..100: mol_type = other RNA
tatggcgcttctatctgattactctgagcgccatcaccagcgactatgtcgtagtgggtaaagcgcttacggacttcgcggtccgtaagaagcatcagag

SEQ ID NO: 11687 - RNA, 98 nt, synthetic construct
  misc_feature 1..98: note = engineered ribonucleic acid scaffold (ERS) sequence
  source 1..98: mol_type = other RNA
tatggcgcttctatctgattactctgagcgccatcaccagcgactatgtcgtagtgggtaaagcgcttacggacttcggtccgtaagaagcatcagag

SEQ ID NO: 11688 - RNA, 98 nt, synthetic construct
  misc_feature 1..98: note = engineered ribonucleic acid scaffold (ERS) sequence
  source 1..98: mol_type = other RNA
tatggcgcttctatctgattactctgagcgccatcaccagcgactatgtcgtagtgggtaaagcgcttacggacttcggtccgtaagtcgcatcagag

SEQ ID NO: 11689 - RNA, 98 nt, synthetic construct
  misc_feature 1..98: note = engineered ribonucleic acid scaffold (ERS) sequence
  source 1..98: mol_type = other RNA
tatggcgcttctatctgattactctgagcgccatcaccagcgactatgtcgtagtgggtaaagcgcttacggagttcgatccgtaagaagcatcagag

SEQ ID NO: 11690 - RNA, 98 nt, synthetic construct
  misc_feature 1..98: note = engineered ribonucleic acid scaffold (ERS) sequence
  source 1..98: mol_type = other RNA
tatggcgcttctatctgattactctgagcgccatcaccagcgactatgtcgtagtgggtaaagcgctttcggacttcggtccggaagaagcatcagag

SEQ ID NO: 11691 - RNA, 102 nt, synthetic construct
  misc_feature 1..102: note = engineered ribonucleic acid scaffold (ERS) sequence
  source 1..102: mol_type = other RNA
tatggcgcttctatctgattactctgagcgccatcaccagcgactatgtcgtagtgggtaaagcggcagatctgagcctccgagctctctgccgcatcagag

SEQ ID NO: 11692 - RNA, 98 nt, synthetic construct
  misc_feature 1..98: note = engineered ribonucleic acid scaffold (ERS) sequence
  source 1..98: mol_type = other RNA
tatggcgcttctatctgattactctgagcgccatcaccagcgactatgtcgtagtgggtaaagcggttacggacttcggtccgtaagacgcatcagag

SEQ ID NO: 11693 - RNA, 75 nt, synthetic construct
  misc_feature 1..75: note = engineered ribonucleic acid scaffold (ERS) sequence
  source 1..75: mol_type = other RNA
tatggcgcttctatctgattactctgagcgccatcaccagcgactatgtcgtagtgggtaaagctagcatcagag

SEQ ID NO: 11694 - RNA, 89 nt, synthetic construct
  misc_feature 1..89: note = engineered ribonucleic acid scaffold (ERS) sequence
  source 1..89: mol_type = other RNA
tatggcgcttctatctgattactctgagcgccatcaccagcgactatgtcgtagtgggtaaagctccctattcggatggagcatcagag

SEQ ID NO: 11695 - RNA, 95 nt, synthetic construct
  misc_feature 1..95: note = engineered ribonucleic acid scaffold (ERS) sequence
  source 1..95: mol_type = other RNA
tatggcgcttctatctgattactctgagcgccatcaccagcgactatgtcgtagtgggtaaagctccctcacagggatgtgagggagcatcagag

SEQ ID NO: 11696 - RNA, 94 nt, synthetic construct
  misc_feature 1..94: note = engineered ribonucleic acid scaffold (ERS) sequence
  source 1..94: mol_type = other RNA
tatggcgcttctatctgattactctgagcgccatcaccagcgactatgtcgtagtgggtaaagctccctcagctgcagtgagggagcatcagag

SEQ ID NO: 11697 - RNA, 89 nt, synthetic construct
  misc_feature 1..89: note = engineered ribonucleic acid scaffold (ERS) sequence
  source 1..89: mol_type = other RNA
tatggcgcttctatctgattactctgagcgccatcaccagcgactatgtcgtagtgggtaaagctccctcataggagggagcatcagag

SEQ ID NO: 11698 - RNA, 90 nt, synthetic construct
  misc_feature 1..90: note = engineered ribonucleic acid scaffold (ERS) sequence
  source 1..90: mol_type = other RNA
tatggcgcttctatctgattactctgagcgccatcaccagcgactatgtcgtagtgggtaaagctccctcttcaggagggagcatcagag

SEQ ID NO: 11699 - RNA, 89 nt, synthetic construct
  misc_feature 1..89: note = engineered ribonucleic acid scaffold (ERS) sequence
  source 1..89: mol_type = other RNA
tatggcgcttctatctgattactctgagcgccatcaccagcgactatgtcgtagtgggtaaagctccctcttcggagagtgcatcagag

SEQ ID NO: 11700 - RNA, 89 nt, synthetic construct
  misc_feature 1..89: note = engineered ribonucleic acid scaffold (ERS) sequence
  source 1..89: mol_type = other RNA
tatggcgcttctatctgattactctgagcgccatcaccagcgactatgtcgtagtgggtaaagctccctcttcggaggaggcatcagag

SEQ ID NO: 11701 - RNA, 91 nt, synthetic construct
  misc_feature 1..91: note = engineered ribonucleic acid scaffold (ERS) sequence
  source 1..91: mol_type = other RNA
tatggcgcttctatctgattactctgagcgccatcaccagcgactatgtcgtagtgggtaaagctccctcttcggagggaacgcatcagag

SEQ ID NO: 11702 - RNA, 89 nt, synthetic construct; identical to SEQ ID NO: 745
  misc_feature 1..89: note = engineered ribonucleic acid scaffold (ERS) sequence
  source 1..89: mol_type = other RNA

SEQ ID NO: 11703 - RNA, 89 nt, synthetic construct
  misc_feature 1..89: note = engineered ribonucleic acid scaffold (ERS) sequence
  source 1..89: mol_type = other RNA
tatggcgcttctatctgattactctgagcgccatcaccagcgactatgtcgtagtgggtaaagctccctggaaacagggagcatcagag

SEQ ID NO: 11704 - RNA, 85 nt, synthetic construct
  misc_feature 1..85: note = engineered ribonucleic acid scaffold (ERS) sequence
  source 1..85: mol_type = other RNA
tatggcgcttctatctgattactctgagcgccatcaccagcgactatgtcgtagtgggtaaagctcccttcggggagcatcagag

SEQ ID NO: 11705 - RNA, 85 nt, synthetic construct
  misc_feature 1..85: note = engineered ribonucleic acid scaffold (ERS) sequence
  source 1..85: mol_type = other RNA
tatggcgcttctatctgattactctgagcgccatcaccagcgactatgtcgtagtgggtaaagctccgttcgcggagcatcagag

SEQ ID NO: 11706 - RNA, 87 nt, synthetic construct
  misc_feature 1..87: note = engineered ribonucleic acid scaffold (ERS) sequence
  source 1..87: mol_type = other RNA
tatggcgcttctatctgattactctgagcgccatcaccagcgactatgtcgtagtgggtaaagctcctcttcggaggagcatcagag

SEQ ID NO: 11707 - RNA, 85 nt, synthetic construct
  misc_feature 1..85: note = engineered ribonucleic acid scaffold (ERS) sequence
  source 1..85: mol_type = other RNA
tatggcgcttctatctgattactctgagcgccatcaccagcgactatgtcgtagtgggtaaagctctcttcggagagcatcagag

SEQ ID NO: 11708 - RNA, 77 nt, synthetic construct
  misc_feature 1..77: note = engineered ribonucleic acid scaffold (ERS) sequence
  source 1..77: mol_type = other RNA
tatggcgcttctatctgattactctgagcgccatcaccagcgactatgtcgtagtgggtaaagctgcagcatcagag

SEQ ID NO: 11709 - RNA, 83 nt, synthetic construct
  misc_feature 1..83: note = engineered ribonucleic acid scaffold (ERS) sequence
  source 1..83: mol_type = other RNA
tatggcgcttctatctgattactctgagcgccatcaccagcgactatgtcgtagtgggtaaagctgcttcggcagcatcagag

SEQ ID NO: 11710 - RNA, 89 nt, synthetic construct
  misc_feature 1..89: note = engineered ribonucleic acid scaffold (ERS) sequence
  source 1..89: mol_type = other RNA
tatggcgcttctatctgattactctgagcgccatcaccagcgactatgtcgtagtgggtaaaggtccctcttcggagggaacatcagag

SEQ ID NO: 11711 - RNA, 93 nt, synthetic construct
  misc_feature 1..93: note = engineered ribonucleic acid scaffold (ERS) sequence
  source 1..93: mol_type = other RNA
tatggcgcttctatctgattactctgagcgccatcaccagcgactatgtcgtagtgggtaaaggtgacggtcttcggaccgtcaccatcagag

SEQ ID NO: 11712 - RNA, 91 nt, synthetic construct
  misc_feature 1..91: note = engineered ribonucleic acid scaffold (ERS) sequence
  source 1..91: mol_type = other RNA
tatggcgcttctatctgattactctgagcgccatcaccagcgactatgtcgtagtgggtaaagtctccctcttcggagggaggcatcagag

SEQ ID NO: 11713 - RNA, 93 nt, synthetic construct
  misc_feature 1..93: note = engineered ribonucleic acid scaffold (ERS) sequence
  source 1..93: mol_type = other RNA
tatggcgcttctatctgattactctgagcgccatcaccagcgactatgtcgtagtgggtaaagtgcgcccgcttcggcgggcgcacatcagag

SEQ ID NO: 11714 - RNA, 93 nt, synthetic construct
  misc_feature 1..93: note = engineered ribonucleic acid scaffold (ERS) sequence
  source 1..93: mol_type = other RNA
tatggcgcttctatctgattactctgagcgccatcaccagcgactatgtcgtagtgggtaaataatgaaaacttcggttttcattaatcagag

SEQ ID NO: 11715 - RNA, 93 nt, synthetic construct
  misc_feature 1..93: note = engineered ribonucleic acid scaffold (ERS) sequence
  source 1..93: mol_type = other RNA
tatggcgcttctatctgattactctgagcgccatcaccagcgactatgtcgtagtgggtaaatcgtaagaacttcggttcttacgaatcagag

SEQ ID NO: 11716 - RNA, 93 nt, synthetic construct
  misc_feature 1..93: note = engineered ribonucleic acid scaffold (ERS) sequence
  source 1..93: mol_type = other RNA
tatggcgcttctatctgattactctgagcgccatcaccagcgactatgtcgtagtgggtaaatggaagatgcttcggcatcttccaatcagag

SEQ ID NO: 11717 - RNA, 97 nt, synthetic construct
  misc_feature 1..97: note = engineered ribonucleic acid scaffold (ERS) sequence
  source 1..97: mol_type = other RNA
tatggcgcttctatctgattactctgagcgccatcaccagcgactatgtcgtagtgggtaaagcccttacggacttcggtccgtaagggcatcagag

SEQ ID NO: 11718 - RNA, 99 nt, synthetic construct
  misc_feature 1..99: note = engineered ribonucleic acid scaffold (ERS) sequence
  source 1..99: mol_type = other RNA
tatggcgcttctatctgattactctgagcgccatcaccagcgactatgtcgtagtgggtaaagcctcttacggacttcggtccgtaagaggcatcagag

SEQ ID NO: 11719 - RNA, 99 nt, synthetic construct
  misc_feature 1..99: note = engineered ribonucleic acid scaffold (ERS) sequence
  source 1..99: mol_type = other RNA
tatggcgcttctatctgattactctgagcgccatcaccagcgactatgtcgtagtgggtaaagccgcttagggacttcggtccctaagaggcatcagag

SEQ ID NO: 11720 - RNA, 87 nt, synthetic construct
  misc_feature 1..87: note = engineered ribonucleic acid scaffold (ERS) sequence
  source 1..87: mol_type = other RNA
tctggcgcttctatctgattactctgagcgccatcaccagcgactatgtcgtagtgggtaaactccctcttcggagggagatcagag

SEQ ID NO: 11721 - RNA, 89 nt, synthetic construct
  misc_feature 1..89: note = engineered ribonucleic acid scaffold (ERS) sequence
  source 1..89: mol_type = other RNA
tctggcgcttctatctgattactctgagcgccatcaccagcgactatgtcgtagtgggtaaagcgccctcttcggagggagcatcagag

SEQ ID NO: 11722 - RNA, 99 nt, synthetic construct
  misc_feature 1..99: note = engineered ribonucleic acid scaffold (ERS) sequence
  source 1..99: mol_type = other RNA
tctggcgcttctatctgattactctgagcgccatcaccagcgactatgtcgtagtgggtaaagcgccttacggacttcggtccgtaaggagcatcagag

SEQ ID NO: 11723 - RNA, 99 nt, synthetic construct
  misc_feature 1..99: note = engineered ribonucleic acid scaffold (ERS) sequence
  source 1..99: mol_type = other RNA
tctggcgcttctatctgattactctgagcgccatcaccagcgactatgtcgtagtgggtaaagcgcttacggaattcgtgtccgtaagaagcatcagag

SEQ ID NO: 11724 - RNA, 100 nt, synthetic construct
  misc_feature 1..100: note = engineered ribonucleic acid scaffold (ERS) sequence
  source 1..100: mol_type = other RNA
tctggcgcttctatctgattactctgagcgccatcaccagcgactatgtcgtagtgggtaaagcgcttacggacttcgcggtccgtaagaagcatcagag

SEQ ID NO: 11725 - RNA, 98 nt, synthetic construct
  misc_feature 1..98: note = engineered ribonucleic acid scaffold (ERS) sequence
  source 1..98: mol_type = other RNA
tctggcgcttctatctgattactctgagcgccatcaccagcgactatgtcgtagtgggtaaagcgcttacggacttcggtccgtaagaagcatcagag

SEQ ID NO: 11726 - RNA, 98 nt, synthetic construct
  misc_feature 1..98: note = engineered ribonucleic acid scaffold (ERS) sequence
  source 1..98: mol_type = other RNA
tctggcgcttctatctgattactctgagcgccatcaccagcgactatgtcgtagtgggtaaagcgcttacggacttcggtccgtaagtcgcatcagag

SEQ ID NO: 11727 - RNA, 98 nt, synthetic construct
  misc_feature 1..98: note = engineered ribonucleic acid scaffold (ERS) sequence
  source 1..98: mol_type = other RNA
tctggcgcttctatctgattactctgagcgccatcaccagcgactatgtcgtagtgggtaaagcgcttacggagttcgatccgtaagaagcatcagag

SEQ ID NO: 11728 - RNA, 98 nt, synthetic construct
  misc_feature 1..98: note = engineered ribonucleic acid scaffold (ERS) sequence
  source 1..98: mol_type = other RNA
tctggcgcttctatctgattactctgagcgccatcaccagcgactatgtcgtagtgggtaaagcgctttcggacttcggtccggaagaagcatcagag

SEQ ID NO: 11729 - RNA, 102 nt, synthetic construct
  misc_feature 1..102: note = engineered ribonucleic acid scaffold (ERS) sequence
  source 1..102: mol_type = other RNA
tctggcgcttctatctgattactctgagcgccatcaccagcgactatgtcgtagtgggtaaagcggcagatctgagcctccgagctctctgccgcatcagag

SEQ ID NO: 11730 - RNA, 98 nt, synthetic construct
  misc_feature 1..98: note = engineered ribonucleic acid scaffold (ERS) sequence
  source 1..98: mol_type = other RNA
tctggcgcttctatctgattactctgagcgccatcaccagcgactatgtcgtagtgggtaaagcggttacggacttcggtccgtaagacgcatcagag

SEQ ID NO: 11731 - RNA, 75 nt, synthetic construct
  misc_feature 1..75: note = engineered ribonucleic acid scaffold (ERS) sequence
  source 1..75: mol_type = other RNA
tctggcgcttctatctgattactctgagcgccatcaccagcgactatgtcgtagtgggtaaagctagcatcagag

SEQ ID NO: 11732 - RNA, 89 nt, synthetic construct
  misc_feature 1..89: note = engineered ribonucleic acid scaffold (ERS) sequence
  source 1..89: mol_type = other RNA
tctggcgcttctatctgattactctgagcgccatcaccagcgactatgtcgtagtgggtaaagctccctattcggatggagcatcagag

SEQ ID NO: 11733 - RNA, 95 nt, synthetic construct
  misc_feature 1..95: note = engineered ribonucleic acid scaffold (ERS) sequence
  source 1..95: mol_type = other RNA
tctggcgcttctatctgattactctgagcgccatcaccagcgactatgtcgtagtgggtaaagctccctcacagggatgtgagggagcatcagag

SEQ ID NO: 11734 - RNA, 94 nt, synthetic construct
  misc_feature 1..94: note = engineered ribonucleic acid scaffold (ERS) sequence
  source 1..94: mol_type = other RNA
tctggcgcttctatctgattactctgagcgccatcaccagcgactatgtcgtagtgggtaaagctccctcagctgcagtgagggagcatcagag

SEQ ID NO: 11735 - RNA, 89 nt, synthetic construct
  misc_feature 1..89: note = engineered ribonucleic acid scaffold (ERS) sequence
  source 1..89: mol_type = other RNA
tctggcgcttctatctgattactctgagcgccatcaccagcgactatgtcgtagtgggtaaagctccctcataggagggagcatcagag

SEQ ID NO: 11736 - RNA, 90 nt, synthetic construct
  misc_feature 1..90: note = engineered ribonucleic acid scaffold (ERS) sequence
  source 1..90: mol_type = other RNA
tctggcgcttctatctgattactctgagcgccatcaccagcgactatgtcgtagtgggtaaagctccctcttcaggagggagcatcagag

SEQ ID NO: 11737 - RNA, 89 nt, synthetic construct
  misc_feature 1..89: note = engineered ribonucleic acid scaffold (ERS) sequence
  source 1..89: mol_type = other RNA
tctggcgcttctatctgattactctgagcgccatcaccagcgactatgtcgtagtgggtaaagctccctcttcggagagtgcatcagag

SEQ ID NO: 11738 - RNA, 89 nt, synthetic construct
  misc_feature 1..89: note = engineered ribonucleic acid scaffold (ERS) sequence
  source 1..89: mol_type = other RNA
tctggcgcttctatctgattactctgagcgccatcaccagcgactatgtcgtagtgggtaaagctccctcttcggaggaggcatcagag

SEQ ID NO: 11739 - RNA, 91 nt, synthetic construct
  misc_feature 1..91: note = engineered ribonucleic acid scaffold (ERS) sequence
  source 1..91: mol_type = other RNA
tctggcgcttctatctgattactctgagcgccatcaccagcgactatgtcgtagtgggtaaagctccctcttcggagggaacgcatcagag

SEQ ID NO: 11740 - RNA, 89 nt, synthetic construct; identical to SEQ ID NO: 748
  misc_feature 1..89: note = engineered ribonucleic acid scaffold (ERS) sequence
  source 1..89: mol_type = other RNA

SEQ ID NO: 11741 - RNA, 89 nt, synthetic construct
  misc_feature 1..89: note = engineered ribonucleic acid scaffold (ERS) sequence
  source 1..89: mol_type = other RNA
tctggcgcttctatctgattactctgagcgccatcaccagcgactatgtcgtagtgggtaaagctccctggaaacagggagcatcagag

SEQ ID NO: 11742 - RNA, 85 nt, synthetic construct
  misc_feature 1..85: note = engineered ribonucleic acid scaffold (ERS) sequence
  source 1..85: mol_type = other RNA
tctggcgcttctatctgattactctgagcgccatcaccagcgactatgtcgtagtgggtaaagctcccttcggggagcatcagag

SEQ ID NO: 11743 - RNA, 85 nt, synthetic construct
  misc_feature 1..85: note = engineered ribonucleic acid scaffold (ERS) sequence
  source 1..85: mol_type = other RNA
tctggcgcttctatctgattactctgagcgccatcaccagcgactatgtcgtagtgggtaaagctccgttcgcggagcatcagag

SEQ ID NO: 11744 - RNA, 87 nt, synthetic construct
  misc_feature 1..87: note = engineered ribonucleic acid scaffold (ERS) sequence
  source 1..87: mol_type = other RNA
tctggcgcttctatctgattactctgagcgccatcaccagcgactatgtcgtagtgggtaaagctcctcttcggaggagcatcagag

SEQ ID NO: 11745 - RNA, 85 nt, synthetic construct
  misc_feature 1..85: note = engineered ribonucleic acid scaffold (ERS) sequence
  source 1..85: mol_type = other RNA
tctggcgcttctatctgattactctgagcgccatcaccagcgactatgtcgtagtgggtaaagctctcttcggagagcatcagag

SEQ ID NO: 11746 - RNA, 77 nt, synthetic construct
  misc_feature 1..77: note = engineered ribonucleic acid scaffold (ERS) sequence
  source 1..77: mol_type = other RNA
tctggcgcttctatctgattactctgagcgccatcaccagcgactatgtcgtagtgggtaaagctgcagcatcagag

SEQ ID NO: 11747 - RNA, 83 nt, synthetic construct
  misc_feature 1..83: note = engineered ribonucleic acid scaffold (ERS) sequence
  source 1..83: mol_type = other RNA
tctggcgcttctatctgattactctgagcgccatcaccagcgactatgtcgtagtgggtaaagctgcttcggcagcatcagag

SEQ ID NO: 11748 - RNA, 89 nt, synthetic construct
  misc_feature 1..89: note = engineered ribonucleic acid scaffold (ERS) sequence
  source 1..89: mol_type = other RNA
tctggcgcttctatctgattactctgagcgccatcaccagcgactatgtcgtagtgggtaaaggtccctcttcggagggaacatcagag

SEQ ID NO: 11749 - RNA, 93 nt, synthetic construct
  misc_feature 1..93: note = engineered ribonucleic acid scaffold (ERS) sequence
  source 1..93: mol_type = other RNA
tctggcgcttctatctgattactctgagcgccatcaccagcgactatgtcgtagtgggtaaaggtgacggtcttcggaccgtcaccatcagag

SEQ ID NO: 11750 - RNA, 91 nt, synthetic construct
  misc_feature 1..91: note = engineered ribonucleic acid scaffold (ERS) sequence
  source 1..91: mol_type = other RNA
tctggcgcttctatctgattactctgagcgccatcaccagcgactatgtcgtagtgggtaaagtctccctcttcggagggaggcatcagag

SEQ ID NO: 11751 - RNA, 93 nt, synthetic construct
  misc_feature 1..93: note = engineered ribonucleic acid scaffold (ERS) sequence
  source 1..93: mol_type = other RNA
tctggcgcttctatctgattactctgagcgccatcaccagcgactatgtcgtagtgggtaaagtgcgcccgcttcggcgggcgcacatcagag

SEQ ID NO: 11752 - RNA, 93 nt, synthetic construct
  misc_feature 1..93: note = engineered ribonucleic acid scaffold (ERS) sequence
  source 1..93: mol_type = other RNA
tctggcgcttctatctgattactctgagcgccatcaccagcgactatgtcgtagtgggtaaataatgaaaacttcggttttcattaatcagag

SEQ ID NO: 11753 - RNA, 93 nt, synthetic construct
  misc_feature 1..93: note = engineered ribonucleic acid scaffold (ERS) sequence
  source 1..93: mol_type = other RNA
tctggcgcttctatctgattactctgagcgccatcaccagcgactatgtcgtagtgggtaaatcgtaagaacttcggttcttacgaatcagag

SEQ ID NO: 11754 - RNA, 93 nt, synthetic construct
  misc_feature 1..93: note = engineered ribonucleic acid scaffold (ERS) sequence
  source 1..93: mol_type = other RNA
tctggcgcttctatctgattactctgagcgccatcaccagcgactatgtcgtagtgggtaaatggaagatgcttcggcatcttccaatcagag

SEQ ID NO: 11755 - RNA, 97 nt, synthetic construct
  misc_feature 1..97: note = engineered ribonucleic acid scaffold (ERS) sequence
  source 1..97: mol_type = other RNA
tctggcgcttctatctgattactctgagcgccatcaccagcgactatgtcgtagtgggtaaagcccttacggacttcggtccgtaagggcatcagag

SEQ ID NO: 11756 - RNA, 99 nt, synthetic construct
  misc_feature 1..99: note = engineered ribonucleic acid scaffold (ERS) sequence
  source 1..99: mol_type = other RNA
tctggcgcttctatctgattactctgagcgccatcaccagcgactatgtcgtagtgggtaaagcctcttacggacttcggtccgtaagaggcatcagag

SEQ ID NO: 11757 - RNA, 99 nt, synthetic construct
  misc_feature 1..99: note = engineered ribonucleic acid scaffold (ERS) sequence
  source 1..99: mol_type = other RNA
tctggcgcttctatctgattactctgagcgccatcaccagcgactatgtcgtagtgggtaaagccgcttagggacttcggtccctaagaggcatcagag

SEQ ID NO: 11758 - RNA, 88 nt, synthetic construct
  misc_feature 1..88: note = engineered ribonucleic acid scaffold (ERS) sequence
  source 1..88: mol_type = other RNA
atctggcgcttctatctgattactctgagcgccatcaccagcgactatgtcgtagtgggtaaactccctcttcggagggagatcagag

SEQ ID NO: 11759 - RNA, 90 nt, synthetic construct
  misc_feature 1..90: note = engineered ribonucleic acid scaffold (ERS) sequence
  source 1..90: mol_type = other RNA
atctggcgcttctatctgattactctgagcgccatcaccagcgactatgtcgtagtgggtaaagcgccctcttcggagggagcatcagag

SEQ ID NO: 11760 - RNA, 100 nt, synthetic construct
  misc_feature 1..100: note = engineered ribonucleic acid scaffold (ERS) sequence
  source 1..100: mol_type = other RNA
atctggcgcttctatctgattactctgagcgccatcaccagcgactatgtcgtagtgggtaaagcgccttacggacttcggtccgtaaggagcatcagag

SEQ ID NO: 11761 - RNA, 100 nt, synthetic construct
  misc_feature 1..100: note = engineered ribonucleic acid scaffold (ERS) sequence
  source 1..100: mol_type = other RNA
atctggcgcttctatctgattactctgagcgccatcaccagcgactatgtcgtagtgggtaaagcgcttacggaattcgtgtccgtaagaagcatcagag

SEQ ID NO: 11762 - RNA, 101 nt, synthetic construct
  misc_feature 1..101: note = engineered ribonucleic acid scaffold (ERS) sequence
  source 1..101: mol_type = other RNA
atctggcgcttctatctgattactctgagcgccatcaccagcgactatgtcgtagtgggtaaagcgcttacggacttcgcggtccgtaagaagcatcagag

SEQ ID NO: 11763 - RNA, 99 nt, synthetic construct
  misc_feature 1..99: note = engineered ribonucleic acid scaffold (ERS) sequence
  source 1..99: mol_type = other RNA
atctggcgcttctatctgattactctgagcgccatcaccagcgactatgtcgtagtgggtaaagcgcttacggacttcggtccgtaagaagcatcagag

SEQ ID NO: 11764 - RNA, 99 nt, synthetic construct
  misc_feature 1..99: note = engineered ribonucleic acid scaffold (ERS) sequence
  source 1..99: mol_type = other RNA
atctggcgcttctatctgattactctgagcgccatcaccagcgactatgtcgtagtgggtaaagcgcttacggacttcggtccgtaagtcgcatcagag

SEQ ID NO: 11765 - RNA, 99 nt, synthetic construct
  misc_feature 1..99: note = engineered ribonucleic acid scaffold (ERS) sequence
  source 1..99: mol_type = other RNA
atctggcgcttctatctgattactctgagcgccatcaccagcgactatgtcgtagtgggtaaagcgcttacggagttcgatccgtaagaagcatcagag

SEQ ID NO: 11766 - RNA, 99 nt, synthetic construct
  misc_feature 1..99: note = engineered ribonucleic acid scaffold (ERS) sequence
  source 1..99: mol_type = other RNA
atctggcgcttctatctgattactctgagcgccatcaccagcgactatgtcgtagtgggtaaagcgctttcggacttcggtccggaagaagcatcagag

SEQ ID NO: 11767 - RNA, 103 nt, synthetic construct
  misc_feature 1..103: note = engineered ribonucleic acid scaffold (ERS) sequence
  source 1..103: mol_type = other RNA
atctggcgcttctatctgattactctgagcgccatcaccagcgactatgtcgtagtgggtaaagcggcagatctgagcctccgagctctctgccgcatcagag

SEQ ID NO: 11768 - RNA, 99 nt, synthetic construct
  misc_feature 1..99: note = engineered ribonucleic acid scaffold (ERS) sequence
  source 1..99: mol_type = other RNA
atctggcgcttctatctgattactctgagcgccatcaccagcgactatgtcgtagtgggtaaagcggttacggacttcggtccgtaagacgcatcagag

SEQ ID NO: 11769 - RNA, 76 nt, synthetic construct
  misc_feature 1..76: note = engineered ribonucleic acid scaffold (ERS) sequence
  source 1..76: mol_type = other RNA
atctggcgcttctatctgattactctgagcgccatcaccagcgactatgtcgtagtgggtaaagctagcatcagag

SEQ ID NO: 11770 - RNA, 90 nt, synthetic construct
  misc_feature 1..90: note = engineered ribonucleic acid scaffold (ERS) sequence
  source 1..90: mol_type = other RNA
atctggcgcttctatctgattactctgagcgccatcaccagcgactatgtcgtagtgggtaaagctccctattcggatggagcatcagag

SEQ ID NO: 11771 - RNA, 96 nt, synthetic construct
  misc_feature 1..96: note = engineered ribonucleic acid scaffold (ERS) sequence
  source 1..96: mol_type = other RNA
atctggcgcttctatctgattactctgagcgccatcaccagcgactatgtcgtagtgggtaaagctccctcacagggatgtgagggagcatcagag

SEQ ID NO: 11772 - RNA, 95 nt, synthetic construct
  misc_feature 1..95: note = engineered ribonucleic acid scaffold (ERS) sequence
  source 1..95: mol_type = other RNA
atctggcgcttctatctgattactctgagcgccatcaccagcgactatgtcgtagtgggtaaagctccctcagctgcagtgagggagcatcagag

SEQ ID NO: 11773 - RNA, 90 nt, synthetic construct
  misc_feature 1..90: note = engineered ribonucleic acid scaffold (ERS) sequence
  source 1..90: mol_type = other RNA
atctggcgcttctatctgattactctgagcgccatcaccagcgactatgtcgtagtgggtaaagctccctcataggagggagcatcagag

SEQ ID NO: 11774 - RNA, 91 nt, synthetic construct
  misc_feature 1..91: note = engineered ribonucleic acid scaffold (ERS) sequence
  source 1..91: mol_type = other RNA
atctggcgcttctatctgattactctgagcgccatcaccagcgactatgtcgtagtgggtaaagctccctcttcaggagggagcatcagag

SEQ ID NO: 11775 - RNA, 90 nt, synthetic construct
  misc_feature 1..90: note = engineered ribonucleic acid scaffold (ERS) sequence
  source 1..90: mol_type = other RNA
atctggcgcttctatctgattactctgagcgccatcaccagcgactatgtcgtagtgggtaaagctccctcttcggagagtgcatcagag

SEQ ID NO: 11776 - RNA, 90 nt, synthetic construct
  misc_feature 1..90: note = engineered ribonucleic acid scaffold (ERS) sequence
  source 1..90: mol_type = other RNA
atctggcgcttctatctgattactctgagcgccatcaccagcgactatgtcgtagtgggtaaagctccctcttcggaggaggcatcagag

SEQ ID NO: 11777 - RNA, 92 nt, synthetic construct
  misc_feature 1..92: note = engineered ribonucleic acid scaffold (ERS) sequence
  source 1..92: mol_type = other RNA
atctggcgcttctatctgattactctgagcgccatcaccagcgactatgtcgtagtgggtaaagctccctcttcggagggaacgcatcagag

SEQ ID NO: 11778 - RNA, 90 nt, synthetic construct; identical to SEQ ID NO: 742
  misc_feature 1..90: note = engineered ribonucleic acid scaffold (ERS) sequence
  source 1..90: mol_type = other RNA

SEQ ID NO: 11779 - RNA, 90 nt, synthetic construct
  misc_feature 1..90: note = engineered ribonucleic acid scaffold (ERS) sequence
  source 1..90: mol_type = other RNA
atctggcgcttctatctgattactctgagcgccatcaccagcgactatgtcgtagtgggtaaagctccctggaaacagggagcatcagag

SEQ ID NO: 11780 - RNA, 86 nt, synthetic construct
  misc_feature 1..86: note = engineered ribonucleic acid scaffold (ERS) sequence
  source 1..86: mol_type = other RNA
atctggcgcttctatctgattactctgagcgccatcaccagcgactatgtcgtagtgggtaaagctcccttcggggagcatcagag

SEQ ID NO: 11781 - RNA, 86 nt, synthetic construct
  misc_feature 1..86: note = engineered ribonucleic acid scaffold (ERS) sequence
  source 1..86: mol_type = other RNA
atctggcgcttctatctgattactctgagcgccatcaccagcgactatgtcgtagtgggtaaagctccgttcgcggagcatcagag

SEQ ID NO: 11782 - RNA, 88 nt, synthetic construct
  misc_feature 1..88: note = engineered ribonucleic acid scaffold (ERS) sequence
  source 1..88: mol_type = other RNA
atctggcgcttctatctgattactctgagcgccatcaccagcgactatgtcgtagtgggtaaagctcctcttcggaggagcatcagag

SEQ ID NO: 11783 - RNA, 86 nt, synthetic construct
  misc_feature 1..86: note = engineered ribonucleic acid scaffold (ERS) sequence
  source 1..86: mol_type = other RNA
atctggcgcttctatctgattactctgagcgccatcaccagcgactatgtcgtagtgggtaaagctctcttcggagagcatcagag

SEQ ID NO: 11784 - RNA, 78 nt, synthetic construct
  misc_feature 1..78: note = engineered ribonucleic acid scaffold (ERS) sequence
  source 1..78: mol_type = other RNA
atctggcgcttctatctgattactctgagcgccatcaccagcgactatgtcgtagtgggtaaagctgcagcatcagag

SEQ ID NO: 11785 - RNA, 84 nt, synthetic construct
  misc_feature 1..84: note = engineered ribonucleic acid scaffold (ERS) sequence
  source 1..84: mol_type = other RNA
atctggcgcttctatctgattactctgagcgccatcaccagcgactatgtcgtagtgggtaaagctgcttcggcagcatcagag

SEQ ID NO: 11786 - RNA, 90 nt, synthetic construct
  misc_feature 1..90: note = engineered ribonucleic acid scaffold (ERS) sequence
  source 1..90: mol_type = other RNA
atctggcgcttctatctgattactctgagcgccatcaccagcgactatgtcgtagtgggtaaaggtccctcttcggagggaacatcagag

SEQ ID NO: 11787 - RNA, 94 nt, synthetic construct
  misc_feature 1..94: note = engineered ribonucleic acid scaffold (ERS) sequence
  source 1..94: mol_type = other RNA
atctggcgcttctatctgattactctgagcgccatcaccagcgactatgtcgtagtgggtaaaggtgacggtcttcggaccgtcaccatcagag

SEQ ID NO: 11788 - RNA, 92 nt, synthetic construct
  misc_feature 1..92: note = engineered ribonucleic acid scaffold (ERS) sequence
  source 1..92: mol_type = other RNA
atctggcgcttctatctgattactctgagcgccatcaccagcgactatgtcgtagtgggtaaagtctccctcttcggagggaggcatcagag

SEQ ID NO: 11789 - RNA, 94 nt, synthetic construct
  misc_feature 1..94: note = engineered ribonucleic acid scaffold (ERS) sequence
  source 1..94: mol_type = other RNA
atctggcgcttctatctgattactctgagcgccatcaccagcgactatgtcgtagtgggtaaagtgcgcccgcttcggcgggcgcacatcagag

SEQ ID NO: 11790 - RNA, 94 nt, synthetic construct
  misc_feature 1..94: note = engineered ribonucleic acid scaffold (ERS) sequence
  source 1..94: mol_type = other RNA
atctggcgcttctatctgattactctgagcgccatcaccagcgactatgtcgtagtgggtaaataatgaaaacttcggttttcattaatcagag

SEQ ID NO: 11791 - RNA, 94 nt, synthetic construct
  misc_feature 1..94: note = engineered ribonucleic acid scaffold (ERS) sequence
  source 1..94: mol_type = other RNA
atctggcgcttctatctgattactctgagcgccatcaccagcgactatgtcgtagtgggtaaatcgtaagaacttcggttcttacgaatcagag

SEQ ID NO: 11792 - RNA, 94 nt, synthetic construct
  misc_feature 1..94: note = engineered ribonucleic acid scaffold (ERS) sequence
  source 1..94: mol_type = other RNA
atctggcgcttctatctgattactctgagcgccatcaccagcgactatgtcgtagtgggtaaatggaagatgcttcggcatcttccaatcagag

SEQ ID NO: 11793 - RNA, 98 nt, synthetic construct
  misc_feature 1..98: note = engineered ribonucleic acid scaffold (ERS) sequence
  source 1..98: mol_type = other RNA
atctggcgcttctatctgattactctgagcgccatcaccagcgactatgtcgtagtgggtaaagcccttacggacttcggtccgtaagggcatcagag

SEQ ID NO: 11794 - RNA, 100 nt, synthetic construct
  misc_feature 1..100: note = engineered ribonucleic acid scaffold (ERS) sequence
  source 1..100: mol_type = other RNA
atctggcgcttctatctgattactctgagcgccatcaccagcgactatgtcgtagtgggtaaagcctcttacggacttcggtccgtaagaggcatcagag

SEQ ID NO: 11795 - RNA, 100 nt, synthetic construct
  misc_feature 1..100: note = engineered ribonucleic acid scaffold (ERS) sequence
  source 1..100: mol_type = other RNA
atctggcgcttctatctgattactctgagcgccatcaccagcgactatgtcgtagtgggtaaagccgcttagggacttcggtccctaagaggcatcagag

SEQ ID NO: 11796 - RNA, 85 nt, synthetic construct
  misc_feature 1..85: note = engineered ribonucleic acid scaffold (ERS) sequence
  source 1..85: mol_type = other RNA
aggcgcttctatctgattactctgagcgccatcaccagcgactatgtcgtagtgggtaaactccctcttcggagggagatcagag

SEQ ID NO: 11797 - RNA, 87 nt, synthetic construct
  misc_feature 1..87: note = engineered ribonucleic acid scaffold (ERS) sequence
  source 1..87: mol_type = other RNA
aggcgcttctatctgattactctgagcgccatcaccagcgactatgtcgtagtgggtaaagcgccctcttcggagggagcatcagag

SEQ ID NO: 11798 - RNA, 97 nt, synthetic construct
  misc_feature 1..97: note = engineered ribonucleic acid scaffold (ERS) sequence
  source 1..97: mol_type = other RNA
aggcgcttctatctgattactctgagcgccatcaccagcgactatgtcgtagtgggtaaagcgccttacggacttcggtccgtaaggagcatcagag

SEQ ID NO: 11799 - RNA, 97 nt, synthetic construct
  misc_feature 1..97: note = engineered ribonucleic acid scaffold (ERS) sequence
  source 1..97: mol_type = other RNA
aggcgcttctatctgattactctgagcgccatcaccagcgactatgtcgtagtgggtaaagcgcttacggaattcgtgtccgtaagaagcatcagag

SEQ ID NO: 11800 - RNA, 98 nt, synthetic construct
  misc_feature 1..98: note = engineered ribonucleic acid scaffold (ERS) sequence
  source 1..98: mol_type = other RNA
aggcgcttctatctgattactctgagcgccatcaccagcgactatgtcgtagtgggtaaagcgcttacggacttcgcggtccgtaagaagcatcagag

SEQ ID NO: 11801 - RNA, 96 nt, synthetic construct
  misc_feature 1..96: note = engineered ribonucleic acid scaffold (ERS) sequence
  source 1..96: mol_type = other RNA
aggcgcttctatctgattactctgagcgccatcaccagcgactatgtcgtagtgggtaaagcgcttacggacttcggtccgtaagaagcatcagag

SEQ ID NO: 11802 - RNA, 96 nt, synthetic construct
  misc_feature 1..96: note = engineered ribonucleic acid scaffold (ERS) sequence
  source 1..96: mol_type = other RNA
aggcgcttctatctgattactctgagcgccatcaccagcgactatgtcgtagtgggtaaagcgcttacggacttcggtccgtaagtcgcatcagag

SEQ ID NO: 11803 - RNA, 96 nt, synthetic construct
  misc_feature 1..96: note = engineered ribonucleic acid scaffold (ERS) sequence
  source 1..96: mol_type = other RNA
aggcgcttctatctgattactctgagcgccatcaccagcgactatgtcgtagtgggtaaagcgcttacggagttcgatccgtaagaagcatcagag

SEQ ID NO: 11804 - RNA, 96 nt, synthetic construct
  misc_feature 1..96: note = engineered ribonucleic acid scaffold (ERS) sequence
  source 1..96: mol_type = other RNA
aggcgcttctatctgattactctgagcgccatcaccagcgactatgtcgtagtgggtaaagcgctttcggacttcggtccggaagaagcatcagag

SEQ ID NO: 11805 - RNA, 100 nt, synthetic construct
  misc_feature 1..100: note = engineered ribonucleic acid scaffold (ERS) sequence
  source 1..100: mol_type = other RNA
aggcgcttctatctgattactctgagcgccatcaccagcgactatgtcgtagtgggtaaagcggcagatctgagcctccgagctctctgccgcatcagag

SEQ ID NO: 11806 - RNA, 96 nt, synthetic construct
  misc_feature 1..96: note = engineered ribonucleic acid scaffold (ERS) sequence
  source 1..96: mol_type = other RNA
aggcgcttctatctgattactctgagcgccatcaccagcgactatgtcgtagtgggtaaagcggttacggacttcggtccgtaagacgcatcagag

SEQ ID NO: 11807 - RNA, 73 nt, synthetic construct
  misc_feature 1..73: note = engineered ribonucleic acid scaffold (ERS) sequence
  source 1..73: mol_type = other RNA
aggcgcttctatctgattactctgagcgccatcaccagcgactatgtcgtagtgggtaaagctagcatcagag

SEQ ID NO: 11808 - RNA, 87 nt, synthetic construct
  misc_feature 1..87: note = engineered ribonucleic acid scaffold (ERS) sequence
  source 1..87: mol_type = other RNA
aggcgcttctatctgattactctgagcgccatcaccagcgactatgtcgtagtgggtaaagctccctattcggatggagcatcagag

SEQ ID NO: 11809 - RNA, 93 nt, synthetic construct
  misc_feature 1..93: note = engineered ribonucleic acid scaffold (ERS) sequence
  source 1..93: mol_type = other RNA
aggcgcttctatctgattactctgagcgccatcaccagcgactatgtcgtagtgggtaaagctccctcacagggatgtgagggagcatcagag

SEQ ID NO: 11810 - RNA, 92 nt, synthetic construct
  misc_feature 1..92: note = engineered ribonucleic acid scaffold (ERS) sequence
  source 1..92: mol_type = other RNA
aggcgcttctatctgattactctgagcgccatcaccagcgactatgtcgtagtgggtaaagctccctcagctgcagtgagggagcatcagag

SEQ ID NO: 11811 - RNA, 87 nt, synthetic construct
  misc_feature 1..87: note = engineered ribonucleic acid scaffold (ERS) sequence
  source 1..87: mol_type = other RNA
aggcgcttctatctgattactctgagcgccatcaccagcgactatgtcgtagtgggtaaagctccctcataggagggagcatcagag

SEQ ID NO: 11812 - RNA, 88 nt, synthetic construct
  misc_feature 1..88: note = engineered ribonucleic acid scaffold (ERS) sequence
  source 1..88: mol_type = other RNA
aggcgcttctatctgattactctgagcgccatcaccagcgactatgtcgtagtgggtaaagctccctcttcaggagggagcatcagag

SEQ ID NO: 11813 - RNA, 87 nt, synthetic construct
  misc_feature 1..87: note = engineered ribonucleic acid scaffold (ERS) sequence
  source 1..87: mol_type = other RNA
aggcgcttctatctgattactctgagcgccatcaccagcgactatgtcgtagtgggtaaagctccctcttcggagagtgcatcagag

SEQ ID NO: 11814 - RNA, 87 nt, synthetic construct
  misc_feature 1..87: note = engineered ribonucleic acid scaffold (ERS) sequence
  source 1..87: mol_type = other RNA
aggcgcttctatctgattactctgagcgccatcaccagcgactatgtcgtagtgggtaaagctccctcttcggaggaggcatcagag

SEQ ID NO: 11815 - RNA, 89 nt, synthetic construct
  misc_feature 1..89: note = engineered ribonucleic acid scaffold (ERS) sequence
  source 1..89: mol_type = other RNA
aggcgcttctatctgattactctgagcgccatcaccagcgactatgtcgtagtgggtaaagctccctcttcggagggaacgcatcagag

SEQ ID NO: 11816 - RNA, 87 nt, synthetic construct; identical to SEQ ID NO: 746
  misc_feature 1..87: note = engineered ribonucleic acid scaffold (ERS) sequence
  source 1..87: mol_type = other RNA

SEQ ID NO: 11817 - RNA, 87 nt, synthetic construct
  misc_feature 1..87: note = engineered ribonucleic acid scaffold (ERS) sequence
  source 1..87: mol_type = other RNA
aggcgcttctatctgattactctgagcgccatcaccagcgactatgtcgtagtgggtaaagctccctggaaacagggagcatcagag

SEQ ID NO: 11818 - RNA, 83 nt, synthetic construct
  misc_feature 1..83: note = engineered ribonucleic acid scaffold (ERS) sequence
  source 1..83: mol_type = other RNA
aggcgcttctatctgattactctgagcgccatcaccagcgactatgtcgtagtgggtaaagctcccttcggggagcatcagag

SEQ ID NO: 11819 - RNA, 83 nt, synthetic construct
  misc_feature 1..83: note = engineered ribonucleic acid scaffold (ERS) sequence
  source 1..83: mol_type = other RNA
aggcgcttctatctgattactctgagcgccatcaccagcgactatgtcgtagtgggtaaagctccgttcgcggagcatcagag

SEQ ID NO: 11820 - RNA, 85 nt, synthetic construct
  misc_feature 1..85: note = engineered ribonucleic acid scaffold (ERS) sequence
  source 1..85: mol_type = other RNA
aggcgcttctatctgattactctgagcgccatcaccagcgactatgtcgtagtgggtaaagctcctcttcggaggagcatcagag

SEQ ID NO: 11821 - RNA, 83 nt, synthetic construct
  misc_feature 1..83: note = engineered ribonucleic acid scaffold (ERS) sequence
  source 1..83: mol_type = other RNA
aggcgcttctatctgattactctgagcgccatcaccagcgactatgtcgtagtgggtaaagctctcttcggagagcatcagag

SEQ ID NO: 11822 - RNA, 75 nt, synthetic construct
  misc_feature 1..75: note = engineered ribonucleic acid scaffold (ERS) sequence
  source 1..75: mol_type = other RNA
aggcgcttctatctgattactctgagcgccatcaccagcgactatgtcgtagtgggtaaagctgcagcatcagag

SEQ ID NO: 11823 - RNA, 81 nt, synthetic construct
  misc_feature 1..81: note = engineered ribonucleic acid scaffold (ERS) sequence
  source 1..81: mol_type = other RNA
aggcgcttctatctgattactctgagcgccatcaccagcgactatgtcgtagtgggtaaagctgcttcggcagcatcagag

SEQ ID NO: 11824 - RNA, 87 nt, synthetic construct
  misc_feature 1..87: note = engineered ribonucleic acid scaffold (ERS) sequence
  source 1..87: mol_type = other RNA
aggcgcttctatctgattactctgagcgccatcaccagcgactatgtcgtagtgggtaaaggtccctcttcggagggaacatcagag

SEQ ID NO: 11825 - RNA, 91 nt, synthetic construct
  misc_feature 1..91: note = engineered ribonucleic acid scaffold (ERS) sequence
  source 1..91: mol_type = other RNA
aggcgcttctatctgattactctgagcgccatcaccagcgactatgtcgtagtgggtaaaggtgacggtcttcggaccgtcaccatcagag

SEQ ID NO: 11826 - RNA, 89 nt, synthetic construct
  misc_feature 1..89: note = engineered ribonucleic acid scaffold (ERS) sequence
  source 1..89: mol_type = other RNA
aggcgcttctatctgattactctgagcgccatcaccagcgactatgtcgtagtgggtaaagtctccctcttcggagggaggcatcagag

SEQ ID NO: 11827 - RNA, 91 nt, synthetic construct
  misc_feature 1..91: note = engineered ribonucleic acid scaffold (ERS) sequence
  source 1..91: mol_type = other RNA
aggcgcttctatctgattactctgagcgccatcaccagcgactatgtcgtagtgggtaaagtgcgcccgcttcggcgggcgcacatcagag

SEQ ID NO: 11828 - RNA, 91 nt, synthetic construct
  misc_feature 1..91: note = engineered ribonucleic acid scaffold (ERS) sequence
  source 1..91: mol_type = other RNA
aggcgcttctatctgattactctgagcgccatcaccagcgactatgtcgtagtgggtaaataatgaaaacttcggttttcattaatcagag

SEQ ID NO: 11829 - RNA, 91 nt, synthetic construct
  misc_feature 1..91: note = engineered ribonucleic acid scaffold (ERS) sequence
  source 1..91: mol_type = other RNA
aggcgcttctatctgattactctgagcgccatcaccagcgactatgtcgtagtgggtaaatcgtaagaacttcggttcttacgaatcagag

SEQ ID NO: 11830 - RNA, 91 nt, synthetic construct
  misc_feature 1..91: note = engineered ribonucleic acid scaffold (ERS) sequence
  source 1..91: mol_type = other RNA
aggcgcttctatctgattactctgagcgccatcaccagcgactatgtcgtagtgggtaaatggaagatgcttcggcatcttccaatcagag

SEQ ID NO: 11831 - RNA, 95 nt, synthetic construct
  misc_feature 1..95: note = engineered ribonucleic acid scaffold (ERS) sequence
  source 1..95: mol_type = other RNA
aggcgcttctatctgattactctgagcgccatcaccagcgactatgtcgtagtgggtaaagcccttacggacttcggtccgtaagggcatcagag

SEQ ID NO: 11832 - RNA, 97 nt, synthetic construct
  misc_feature 1..97: note = engineered ribonucleic acid scaffold (ERS) sequence
  source 1..97: mol_type = other RNA
aggcgcttctatctgattactctgagcgccatcaccagcgactatgtcgtagtgggtaaagcctcttacggacttcggtccgtaagaggcatcagag

SEQ ID NO: 11833 - RNA, 97 nt, synthetic construct
  misc_feature 1..97: note = engineered ribonucleic acid scaffold (ERS) sequence
  source 1..97: mol_type = other RNA
aggcgcttctatctgattactctgagcgccatcaccagcgactatgtcgtagtgggtaaagccgcttagggacttcggtccctaagaggcatcagag

SEQ ID NO: 11834 - RNA, 86 nt, synthetic construct
  misc_feature 1..86: note = engineered ribonucleic acid scaffold (ERS) sequence
  source 1..86: mol_type = other RNA
atggtgcttctatctgattactctgagcgccatcaccagcgactatgtcgtagtgggtaaactccctcttcggagggagatcagag

SEQ ID NO: 11835 - RNA, 88 nt, synthetic construct
  misc_feature 1..88: note = engineered ribonucleic acid scaffold (ERS) sequence
  source 1..88: mol_type = other RNA
atggtgcttctatctgattactctgagcgccatcaccagcgactatgtcgtagtgggtaaagcgccctcttcggagggagcatcagag

SEQ ID NO: 11836 - RNA, 98 nt, synthetic construct
  misc_feature 1..98: note = engineered ribonucleic acid scaffold (ERS) sequence
  source 1..98: mol_type = other RNA
atggtgcttctatctgattactctgagcgccatcaccagcgactatgtcgtagtgggtaaagcgccttacggacttcggtccgtaaggagcatcagag

SEQ ID NO: 11837 - RNA, 98 nt, synthetic construct
  misc_feature 1..98: note = engineered ribonucleic acid scaffold (ERS) sequence
  source 1..98: mol_type = other RNA
atggtgcttctatctgattactctgagcgccatcaccagcgactatgtcgtagtgggtaaagcgcttacggaattcgtgtccgtaagaagcatcagag

SEQ ID NO: 11838 - RNA, 99 nt, synthetic construct
  misc_feature 1..99: note = engineered ribonucleic acid scaffold (ERS) sequence
  source 1..99: mol_type = other RNA
atggtgcttctatctgattactctgagcgccatcaccagcgactatgtcgtagtgggtaaagcgcttacggacttcgcggtccgtaagaagcatcagag

SEQ ID NO: 11839 - RNA, 97 nt, synthetic construct
  misc_feature 1..97: note = engineered ribonucleic acid scaffold (ERS) sequence
  source 1..97: mol_type = other RNA
atggtgcttctatctgattactctgagcgccatcaccagcgactatgtcgtagtgggtaaagcgcttacggacttcggtccgtaagaagcatcagag

SEQ ID NO: 11840 - RNA, 97 nt, synthetic construct
  misc_feature 1..97: note = engineered ribonucleic acid scaffold (ERS) sequence
  source 1..97: mol_type = other RNA
atggtgcttctatctgattactctgagcgccatcaccagcgactatgtcgtagtgggtaaagcgcttacggacttcggtccgtaagtcgcatcagag

SEQ ID NO: 11841 - RNA, 97 nt, synthetic construct
  misc_feature 1..97: note = engineered ribonucleic acid scaffold (ERS) sequence
  source 1..97: mol_type = other RNA
atggtgcttctatctgattactctgagcgccatcaccagcgactatgtcgtagtgggtaaagcgcttacggagttcgatccgtaagaagcatcagag

SEQ ID NO: 11842 - RNA, 97 nt, synthetic construct
  misc_feature 1..97: note = engineered ribonucleic acid scaffold (ERS) sequence
  source 1..97: mol_type = other RNA
atggtgcttctatctgattactctgagcgccatcaccagcgactatgtcgtagtgggtaaagcgctttcggacttcggtccggaagaagcatcagag

SEQ ID NO: 11843 - RNA, 101 nt, synthetic construct
  misc_feature 1..101: note = engineered ribonucleic acid scaffold (ERS) sequence
  source 1..101: mol_type = other RNA
atggtgcttctatctgattactctgagcgccatcaccagcgactatgtcgtagtgggtaaagcggcagatctgagcctccgagctctctgccgcatcagag

SEQ ID NO: 11844 - RNA, 97 nt, synthetic construct
  misc_feature 1..97: note = engineered ribonucleic acid scaffold (ERS) sequence
  source 1..97: mol_type = other RNA
atggtgcttctatctgattactctgagcgccatcaccagcgactatgtcgtagtgggtaaagcggttacggacttcggtccgtaagacgcatcagag

SEQ ID NO: 11845 - RNA, 74 nt, synthetic construct
  misc_feature 1..74: note = engineered ribonucleic acid scaffold (ERS) sequence
  source 1..74: mol_type = other RNA
atggtgcttctatctgattactctgagcgccatcaccagcgactatgtcgtagtgggtaaagctagcatcagag

SEQ ID NO: 11846 - RNA, 88 nt, synthetic construct
  misc_feature 1..88: note = engineered ribonucleic acid scaffold (ERS) sequence
  source 1..88: mol_type = other RNA
atggtgcttctatctgattactctgagcgccatcaccagcgactatgtcgtagtgggtaaagctccctattcggatggagcatcagag

SEQ ID NO: 11847 - RNA, 94 nt, synthetic construct
  misc_feature 1..94: note = engineered ribonucleic acid scaffold (ERS) sequence
  source 1..94: mol_type = other RNA
atggtgcttctatctgattactctgagcgccatcaccagcgactatgtcgtagtgggtaaagctccctcacagggatgtgagggagcatcagag

SEQ ID NO: 11848 - RNA, 93 nt, synthetic construct
  misc_feature 1..93: note = engineered ribonucleic acid scaffold (ERS) sequence
  source 1..93: mol_type = other RNA
atggtgcttctatctgattactctgagcgccatcaccagcgactatgtcgtagtgggtaaagctccctcagctgcagtgagggagcatcagag

SEQ ID NO: 11849 - RNA, 88 nt, synthetic construct
  misc_feature 1..88: note = engineered ribonucleic acid scaffold (ERS) sequence
  source 1..88: mol_type = other RNA
atggtgcttctatctgattactctgagcgccatcaccagcgactatgtcgtagtgggtaaagctccctcataggagggagcatcagag

SEQ ID NO: 11850 - RNA, 89 nt, synthetic construct
  misc_feature 1..89: note = engineered ribonucleic acid scaffold (ERS) sequence
  source 1..89: mol_type = other RNA
atggtgcttctatctgattactctgagcgccatcaccagcgactatgtcgtagtgggtaaagctccctcttcaggagggagcatcagag

SEQ ID NO: 11851 - RNA, 88 nt, synthetic construct
  misc_feature 1..88: note = engineered ribonucleic acid scaffold (ERS) sequence
  source 1..88: mol_type = other RNA
atggtgcttctatctgattactctgagcgccatcaccagcgactatgtcgtagtgggtaaagctccctcttcggagagtgcatcagag

SEQ ID NO: 11852 - RNA, 88 nt, synthetic construct
  misc_feature 1..88: note = engineered ribonucleic acid scaffold (ERS) sequence
  source 1..88: mol_type = other RNA
atggtgcttctatctgattactctgagcgccatcaccagcgactatgtcgtagtgggtaaagctccctcttcggaggaggcatcagag

SEQ ID NO: 11853 - RNA, 90 nt, synthetic construct
  misc_feature 1..90: note = engineered ribonucleic acid scaffold (ERS) sequence
  source 1..90: mol_type = other RNA
atggtgcttctatctgattactctgagcgccatcaccagcgactatgtcgtagtgggtaaagctccctcttcggagggaacgcatcagag

SEQ ID NO: 11854 - RNA, 88 nt, synthetic construct; identical to SEQ ID NO: 747
  misc_feature 1..88: note = engineered ribonucleic acid scaffold (ERS) sequence
  source 1..88: mol_type = other RNA

SEQ ID NO: 11855 - RNA, 88 nt, synthetic construct
  misc_feature 1..88: note = engineered ribonucleic acid scaffold (ERS) sequence
  source 1..88: mol_type = other RNA
atggtgcttctatctgattactctgagcgccatcaccagcgactatgtcgtagtgggtaaagctccctggaaacagggagcatcagag

SEQ ID NO: 11856 - RNA, 84 nt, synthetic construct
  misc_feature 1..84: note = engineered ribonucleic acid scaffold (ERS) sequence
  source 1..84: mol_type = other RNA
atggtgcttctatctgattactctgagcgccatcaccagcgactatgtcgtagtgggtaaagctcccttcggggagcatcagag

SEQ ID NO: 11857 - RNA, 84 nt, synthetic construct
  misc_feature 1..84: note = engineered ribonucleic acid scaffold (ERS) sequence
  source 1..84: mol_type = other RNA
atggtgcttctatctgattactctgagcgccatcaccagcgactatgtcgtagtgggtaaagctccgttcgcggagcatcagag

SEQ ID NO: 11858 - RNA, 86 nt, synthetic construct
  misc_feature 1..86: note = engineered ribonucleic acid scaffold (ERS) sequence
  source 1..86: mol_type = other RNA
atggtgcttctatctgattactctgagcgccatcaccagcgactatgtcgtagtgggtaaagctcctcttcggaggagcatcagag

SEQ ID NO: 11859 - RNA, 84 nt, synthetic construct
  misc_feature 1..84: note = engineered ribonucleic acid scaffold (ERS) sequence
  source 1..84: mol_type = other RNA
atggtgcttctatctgattactctgagcgccatcaccagcgactatgtcgtagtgggtaaagctctcttcggagagcatcagag

SEQ ID NO: 11860 - RNA, 76 nt, synthetic construct
  misc_feature 1..76: note = engineered ribonucleic acid scaffold (ERS) sequence
  source 1..76: mol_type = other RNA
atggtgcttctatctgattactctgagcgccatcaccagcgactatgtcgtagtgggtaaagctgcagcatcagag

SEQ ID NO: 11861 - RNA, 82 nt, synthetic construct
  misc_feature 1..82: note = engineered ribonucleic acid scaffold (ERS) sequence
  source 1..82: mol_type = other RNA
atggtgcttctatctgattactctgagcgccatcaccagcgactatgtcgtagtgggtaaagctgcttcggcagcatcagag

SEQ ID NO: 11862 - RNA, 88 nt, synthetic construct
  misc_feature 1..88: note = engineered ribonucleic acid scaffold (ERS) sequence
  source 1..88: mol_type = other RNA
atggtgcttctatctgattactctgagcgccatcaccagcgactatgtcgtagtgggtaaaggtccctcttcggagggaacatcagag

SEQ ID NO: 11863 - RNA, 92 nt, synthetic construct
  misc_feature 1..92: note = engineered ribonucleic acid scaffold (ERS) sequence
  source 1..92: mol_type = other RNA
atggtgcttctatctgattactctgagcgccatcaccagcgactatgtcgtagtgggtaaaggtgacggtcttcggaccgtcaccatcagag

SEQ ID NO: 11864 - RNA, 90 nt, synthetic construct
  misc_feature 1..90: note = engineered ribonucleic acid scaffold (ERS) sequence
  source 1..90: mol_type = other RNA
atggtgcttctatctgattactctgagcgccatcaccagcgactatgtcgtagtgggtaaagtctccctcttcggagggaggcatcagag

SEQ ID NO: 11865 - RNA, 92 nt, synthetic construct
  misc_feature 1..92: note = engineered ribonucleic acid scaffold (ERS) sequence
  source 1..92: mol_type = other RNA
atggtgcttctatctgattactctgagcgccatcaccagcgactatgtcgtagtgggtaaagtgcgcccgcttcggcgggcgcacatcagag

SEQ ID NO: 11866 - RNA, 92 nt, synthetic construct
  misc_feature 1..92: note = engineered ribonucleic acid scaffold (ERS) sequence
  source 1..92: mol_type = other RNA
atggtgcttctatctgattactctgagcgccatcaccagcgactatgtcgtagtgggtaaataatgaaaacttcggttttcattaatcagag

SEQ ID NO: 11867 - RNA, 92 nt, synthetic construct
  misc_feature 1..92: note = engineered ribonucleic acid scaffold (ERS) sequence
  source 1..92: mol_type = other RNA
atggtgcttctatctgattactctgagcgccatcaccagcgactatgtcgtagtgggtaaatcgtaagaacttcggttcttacgaatcagag

SEQ ID NO: 11868 - RNA, 92 nt, synthetic construct
  misc_feature 1..92: note = engineered ribonucleic acid scaffold (ERS) sequence
  source 1..92: mol_type = other RNA
atggtgcttctatctgattactctgagcgccatcaccagcgactatgtcgtagtgggtaaatggaagatgcttcggcatcttccaatcagag

SEQ ID NO: 11869 - RNA, 96 nt, synthetic construct
  misc_feature 1..96: note = engineered ribonucleic acid scaffold (ERS) sequence
  source 1..96: mol_type = other RNA
atggtgcttctatctgattactctgagcgccatcaccagcgactatgtcgtagtgggtaaagcccttacggacttcggtccgtaagggcatcagag

SEQ ID NO: 11870 - RNA, 98 nt, synthetic construct
  misc_feature 1..98: note = engineered ribonucleic acid scaffold (ERS) sequence
  source 1..98: mol_type = other RNA
atggtgcttctatctgattactctgagcgccatcaccagcgactatgtcgtagtgggtaaagcctcttacggacttcggtccgtaagaggcatcagag

SEQ ID NO: 11871 - RNA, 98 nt, synthetic construct
  misc_feature 1..98: note = engineered ribonucleic acid scaffold (ERS) sequence
  source 1..98: mol_type = other RNA
atggtgcttctatctgattactctgagcgccatcaccagcgactatgtcgtagtgggtaaagccgcttagggacttcggtccctaagaggcatcagag

SEQ ID NO: 11872 - RNA, 86 nt, synthetic construct
  misc_feature 1..86: note = engineered ribonucleic acid scaffold (ERS) sequence
  source 1..86: mol_type = other RNA
atggcgcttctatctgattactctgagcgccatcaccagcgactatgtcgtagtgggtaaactccctcttcggagggagatcagag

SEQ ID NO: 11873 - RNA, 88 nt, synthetic construct
  misc_feature 1..88: note = engineered ribonucleic acid scaffold (ERS) sequence
  source 1..88: mol_type = other RNA
atggcgcttctatctgattactctgagcgccatcaccagcgactatgtcgtagtgggtaaagcgccctcttcggagggagcatcagag

SEQ ID NO: 11874 - RNA, 98 nt, synthetic construct
  misc_feature 1..98: note = engineered ribonucleic acid scaffold (ERS) sequence
  source 1..98: mol_type = other RNA
atggcgcttctatctgattactctgagcgccatcaccagcgactatgtcgtagtgggtaaagcgccttacggacttcggtccgtaaggagcatcagag

SEQ ID NO: 11875 - RNA, 98 nt, synthetic construct
  misc_feature 1..98: note = engineered ribonucleic acid scaffold (ERS) sequence
  source 1..98: mol_type = other RNA
atggcgcttctatctgattactctgagcgccatcaccagcgactatgtcgtagtgggtaaagcgcttacggaattcgtgtccgtaagaagcatcagag

SEQ ID NO: 11876 - RNA, 99 nt, synthetic construct
  misc_feature 1..99: note = engineered ribonucleic acid scaffold (ERS) sequence
  source 1..99: mol_type = other RNA
atggcgcttctatctgattactctgagcgccatcaccagcgactatgtcgtagtgggtaaagcgcttacggacttcgcggtccgtaagaagcatcagag

SEQ ID NO: 11877 - RNA, 97 nt, synthetic construct
  misc_feature 1..97: note = engineered ribonucleic acid scaffold (ERS) sequence
  source 1..97: mol_type = other RNA
atggcgcttctatctgattactctgagcgccatcaccagcgactatgtcgtagtgggtaaagcgcttacggacttcggtccgtaagaagcatcagag

SEQ ID NO: 11878 - RNA, 97 nt, synthetic construct
  misc_feature 1..97: note = engineered ribonucleic acid scaffold (ERS) sequence
  source 1..97: mol_type = other RNA
atggcgcttctatctgattactctgagcgccatcaccagcgactatgtcgtagtgggtaaagcgcttacggacttcggtccgtaagtcgcatcagag

SEQ ID NO: 11879 - RNA, 97 nt, synthetic construct
  misc_feature 1..97: note = engineered ribonucleic acid scaffold (ERS) sequence
  source 1..97: mol_type = other RNA
atggcgcttctatctgattactctgagcgccatcaccagcgactatgtcgtagtgggtaaagcgcttacggagttcgatccgtaagaagcatcagag

SEQ ID NO: 11880 - RNA, 97 nt, synthetic construct
  misc_feature 1..97: note = engineered ribonucleic acid scaffold (ERS) sequence
  source 1..97: mol_type = other RNA
atggcgcttctatctgattactctgagcgccatcaccagcgactatgtcgtagtgggtaaagcgctttcggacttcggtccggaagaagcatcagag

SEQ ID NO: 11881 - RNA, 101 nt, synthetic construct
  misc_feature 1..101: note = engineered ribonucleic acid scaffold (ERS) sequence
  source 1..101: mol_type = other RNA
atggcgcttctatctgattactctgagcgccatcaccagcgactatgtcgtagtgggtaaagcggcagatctgagcctccgagctctctgccgcatcagag

SEQ ID NO: 11882 - RNA, 97 nt, synthetic construct
  misc_feature 1..97: note = engineered ribonucleic acid scaffold (ERS) sequence
  source 1..97: mol_type = other RNA
atggcgcttctatctgattactctgagcgccatcaccagcgactatgtcgtagtgggtaaagcggttacggacttcggtccgtaagacgcatcagag

SEQ ID NO: 11883 - RNA, 74 nt, synthetic construct
  misc_feature 1..74: note = engineered ribonucleic acid scaffold (ERS) sequence
  source 1..74: mol_type = other RNA
atggcgcttctatctgattactctgagcgccatcaccagcgactatgtcgtagtgggtaaagctagcatcagag

SEQ ID NO: 11884 - RNA, 88 nt, synthetic construct
  misc_feature 1..88: note = engineered ribonucleic acid scaffold (ERS) sequence
  source 1..88: mol_type = other RNA
atggcgcttctatctgattactctgagcgccatcaccagcgactatgtcgtagtgggtaaagctccctattcggatggagcatcagag

SEQ ID NO: 11885 - RNA, 94 nt, synthetic construct
  misc_feature 1..94: note = engineered ribonucleic acid scaffold (ERS) sequence
  source 1..94: mol_type = other RNA
atggcgcttctatctgattactctgagcgccatcaccagcgactatgtcgtagtgggtaaagctccctcacagggatgtgagggagcatcagag

SEQ ID NO: 11886 - RNA, 93 nt, synthetic construct
  misc_feature 1..93: note = engineered ribonucleic acid scaffold (ERS) sequence
  source 1..93: mol_type = other RNA
atggcgcttctatctgattactctgagcgccatcaccagcgactatgtcgtagtgggtaaagctccctcagctgcagtgagggagcatcagag

SEQ ID NO: 11887 - RNA, 88 nt, synthetic construct
  misc_feature 1..88: note = engineered ribonucleic acid scaffold (ERS) sequence
  source 1..88: mol_type = other RNA
atggcgcttctatctgattactctgagcgccatcaccagcgactatgtcgtagtgggtaaagctccctcataggagggagcatcagag

SEQ ID NO: 11888 - RNA, 89 nt, synthetic construct
  misc_feature 1..89: note = engineered ribonucleic acid scaffold (ERS) sequence
  source 1..89: mol_type = other RNA
atggcgcttctatctgattactctgagcgccatcaccagcgactatgtcgtagtgggtaaagctccctcttcaggagggagcatcagag

SEQ ID NO: 11889 - RNA, 88 nt, synthetic construct
  misc_feature 1..88: note = engineered ribonucleic acid scaffold (ERS) sequence
  source 1..88: mol_type = other RNA
atggcgcttctatctgattactctgagcgccatcaccagcgactatgtcgtagtgggtaaagctccctcttcggagagtgcatcagag

SEQ ID NO: 11890 - RNA, 88 nt, synthetic construct
  misc_feature 1..88: note = engineered ribonucleic acid scaffold (ERS) sequence
  source 1..88: mol_type = other RNA
atggcgcttctatctgattactctgagcgccatcaccagcgactatgtcgtagtgggtaaagctccctcttcggaggaggcatcagag

SEQ ID NO: 11891 - RNA, 90 nt, synthetic construct
  misc_feature 1..90: note = engineered ribonucleic acid scaffold (ERS) sequence
  source 1..90: mol_type = other RNA
atggcgcttctatctgattactctgagcgccatcaccagcgactatgtcgtagtgggtaaagctccctcttcggagggaacgcatcagag

SEQ ID NO: 11892 - RNA, 88 nt, synthetic construct; identical to SEQ ID NO: 741
  misc_feature 1..88: note = engineered ribonucleic acid scaffold (ERS) sequence
  source 1..88: mol_type = other RNA

SEQ ID NO: 11893 - RNA, 88 nt, synthetic construct
  misc_feature 1..88: note = engineered ribonucleic acid scaffold (ERS) sequence
  source 1..88: mol_type = other RNA
atggcgcttctatctgattactctgagcgccatcaccagcgactatgtcgtagtgggtaaagctccctggaaacagggagcatcagag

SEQ ID NO: 11894 - RNA, 84 nt, synthetic construct
  misc_feature 1..84: note = engineered ribonucleic acid scaffold (ERS) sequence
  source 1..84: mol_type = other RNA
atggcgcttctatctgattactctgagcgccatcaccagcgactatgtcgtagtgggtaaagctcccttcggggagcatcagag

SEQ ID NO: 11895 - RNA, 84 nt, synthetic construct
  misc_feature 1..84: note = engineered ribonucleic acid scaffold (ERS) sequence
  source 1..84: mol_type = other RNA
atggcgcttctatctgattactctgagcgccatcaccagcgactatgtcgtagtgggtaaagctccgttcgcggagcatcagag

SEQ ID NO: 11896 - RNA, 86 nt, synthetic construct
  misc_feature 1..86: note = engineered ribonucleic acid scaffold (ERS) sequence
  source 1..86: mol_type = other RNA
atggcgcttctatctgattactctgagcgccatcaccagcgactatgtcgtagtgggtaaagctcctcttcggaggagcatcagag

SEQ ID NO: 11897 - RNA, 84 nt, synthetic construct
  misc_feature 1..84: note = engineered ribonucleic acid scaffold (ERS) sequence
  source 1..84: mol_type = other RNA
atggcgcttctatctgattactctgagcgccatcaccagcgactatgtcgtagtgggtaaagctctcttcggagagcatcagag

SEQ ID NO: 11898 - RNA, 76 nt, synthetic construct
  misc_feature 1..76: note = engineered ribonucleic acid scaffold (ERS) sequence
  source 1..76: mol_type = other RNA
atggcgcttctatctgattactctgagcgccatcaccagcgactatgtcgtagtgggtaaagctgcagcatcagag

SEQ ID NO: 11899 - RNA, 82 nt, synthetic construct
  misc_feature 1..82: note = engineered ribonucleic acid scaffold (ERS) sequence
  source 1..82: mol_type = other RNA
atggcgcttctatctgattactctgagcgccatcaccagcgactatgtcgtagtgggtaaagctgcttcggcagcatcagag

SEQ ID NO: 11900 - RNA, 88 nt, synthetic construct
  misc_feature 1..88: note = engineered ribonucleic acid scaffold (ERS) sequence
  source 1..88: mol_type = other RNA
atggcgcttctatctgattactctgagcgccatcaccagcgactatgtcgtagtgggtaaaggtccctcttcggagggaacatcagag

SEQ ID NO: 11901 - RNA, 92 nt, synthetic construct
  misc_feature 1..92: note = engineered ribonucleic acid scaffold (ERS) sequence
  source 1..92: mol_type = other RNA
atggcgcttctatctgattactctgagcgccatcaccagcgactatgtcgtagtgggtaaaggtgacggtcttcggaccgtcaccatcagag

SEQ ID NO: 11902 - RNA, 90 nt, synthetic construct
  misc_feature 1..90: note = engineered ribonucleic acid scaffold (ERS) sequence
  source 1..90: mol_type = other RNA
atggcgcttctatctgattactctgagcgccatcaccagcgactatgtcgtagtgggtaaagtctccctcttcggagggaggcatcagag

SEQ ID NO: 11903 - RNA, 92 nt, synthetic construct
  misc_feature 1..92: note = engineered ribonucleic acid scaffold (ERS) sequence
  source 1..92: mol_type = other RNA
atggcgcttctatctgattactctgagcgccatcaccagcgactatgtcgtagtgggtaaagtgcgcccgcttcggcgggcgcacatcagag

SEQ ID NO: 11904 - RNA, 92 nt, synthetic construct
  misc_feature 1..92: note = engineered ribonucleic acid scaffold (ERS) sequence
  source 1..92: mol_type = other RNA
atggcgcttctatctgattactctgagcgccatcaccagcgactatgtcgtagtgggtaaataatgaaaacttcggttttcattaatcagag

SEQ ID NO: 11905 - RNA, 92 nt, synthetic construct
  misc_feature 1..92: note = engineered ribonucleic acid scaffold (ERS) sequence
  source 1..92: mol_type = other RNA
atggcgcttctatctgattactctgagcgccatcaccagcgactatgtcgtagtgggtaaatcgtaagaacttcggttcttacgaatcagag

SEQ ID NO: 11906 - RNA, 92 nt, synthetic construct
  misc_feature 1..92: note = engineered ribonucleic acid scaffold (ERS) sequence
  source 1..92: mol_type = other RNA
atggcgcttctatctgattactctgagcgccatcaccagcgactatgtcgtagtgggtaaatggaagatgcttcggcatcttccaatcagag

SEQ ID NO: 11907 - RNA, 96 nt, synthetic construct
  misc_feature 1..96: note = engineered ribonucleic acid scaffold (ERS) sequence
  source 1..96: mol_type = other RNA
atggcgcttctatctgattactctgagcgccatcaccagcgactatgtcgtagtgggtaaagcccttacggacttcggtccgtaagggcatcagag

SEQ ID NO: 11908 - RNA, 98 nt, synthetic construct
  misc_feature 1..98: note = engineered ribonucleic acid scaffold (ERS) sequence
  source 1..98: mol_type = other RNA
atggcgcttctatctgattactctgagcgccatcaccagcgactatgtcgtagtgggtaaagcctcttacggacttcggtccgtaagaggcatcagag

SEQ ID NO: 11909 - RNA, 98 nt, synthetic construct
  misc_feature 1..98: note = engineered ribonucleic acid scaffold (ERS) sequence
  source 1..98: mol_type = other RNA
atggcgcttctatctgattactctgagcgccatcaccagcgactatgtcgtagtgggtaaagccgcttagggacttcggtccctaagaggcatcagag

SEQ ID NO: 11910 - RNA, 87 nt, synthetic construct
  misc_feature 1..87: note = engineered ribonucleic acid scaffold (ERS) sequence
  source 1..87: mol_type = other RNA
aatggcgcttctatctgattactctgagcgccatcaccagcgactatgtcgtagtgggtaaactccctcttcggagggagatcagag

SEQ ID NO: 11911 - RNA, 89 nt, synthetic construct
  misc_feature 1..89: note = engineered ribonucleic acid scaffold (ERS) sequence
  source 1..89: mol_type = other RNA
aatggcgcttctatctgattactctgagcgccatcaccagcgactatgtcgtagtgggtaaagcgccctcttcggagggagcatcagag

SEQ ID NO: 11912 - RNA, 99 nt, synthetic construct
  misc_feature 1..99: note = engineered ribonucleic acid scaffold (ERS) sequence
  source 1..99: mol_type = other RNA
aatggcgcttctatctgattactctgagcgccatcaccagcgactatgtcgtagtgggtaaagcgccttacggacttcggtccgtaaggagcatcagag

SEQ ID NO: 11913 - RNA, 99 nt, synthetic construct
  misc_feature 1..99: note = engineered ribonucleic acid scaffold (ERS) sequence
  source 1..99: mol_type = other RNA
aatggcgcttctatctgattactctgagcgccatcaccagcgactatgtcgtagtgggtaaagcgcttacggaattcgtgtccgtaagaagcatcagag

SEQ ID NO: 11914 - RNA, 100 nt, synthetic construct
  misc_feature 1..100: note = engineered ribonucleic acid scaffold (ERS) sequence
  source 1..100: mol_type = other RNA
aatggcgcttctatctgattactctgagcgccatcaccagcgactatgtcgtagtgggtaaagcgcttacggacttcgcggtccgtaagaagcatcagag

SEQ ID NO: 11915 - RNA, 98 nt, synthetic construct
  misc_feature 1..98: note = engineered ribonucleic acid scaffold (ERS) sequence
  source 1..98: mol_type = other RNA
aatggcgcttctatctgattactctgagcgccatcaccagcgactatgtcgtagtgggtaaagcgcttacggacttcggtccgtaagaagcatcagag

SEQ ID NO: 11916 - RNA, 98 nt, synthetic construct
  misc_feature 1..98: note = engineered ribonucleic acid scaffold (ERS) sequence
  source 1..98: mol_type = other RNA
aatggcgcttctatctgattactctgagcgccatcaccagcgactatgtcgtagtgggtaaagcgcttacggacttcggtccgtaagtcgcatcagag

SEQ ID NO: 11917 - RNA, 98 nt, synthetic construct
  misc_feature 1..98: note = engineered ribonucleic acid scaffold (ERS) sequence
  source 1..98: mol_type = other RNA
aatggcgcttctatctgattactctgagcgccatcaccagcgactatgtcgtagtgggtaaagcgcttacggagttcgatccgtaagaagcatcagag

SEQ ID NO: 11918 - RNA, 98 nt, synthetic construct
  misc_feature 1..98: note = engineered ribonucleic acid scaffold (ERS) sequence
  source 1..98: mol_type = other RNA
aatggcgcttctatctgattactctgagcgccatcaccagcgactatgtcgtagtgggtaaagcgctttcggacttcggtccggaagaagcatcagag

SEQ ID NO: 11919 - RNA, 102 nt, synthetic construct
  misc_feature 1..102: note = engineered ribonucleic acid scaffold (ERS) sequence
  source 1..102: mol_type = other RNA
aatggcgcttctatctgattactctgagcgccatcaccagcgactatgtcgtagtgggtaaagcggcagatctgagcctccgagctctctgccgcatcagag

SEQ ID NO: 11920 - RNA, 98 nt, synthetic construct
  misc_feature 1..98: note = engineered ribonucleic acid scaffold (ERS) sequence
  source 1..98: mol_type = other RNA
aatggcgcttctatctgattactctgagcgccatcaccagcgactatgtcgtagtgggtaaagcggttacggacttcggtccgtaagacgcatcagag

SEQ ID NO: 11921 - RNA, 75 nt, synthetic construct
  misc_feature 1..75: note = engineered ribonucleic acid scaffold (ERS) sequence
  source 1..75: mol_type = other RNA
aatggcgcttctatctgattactctgagcgccatcaccagcgactatgtcgtagtgggtaaagctagcatcagag

SEQ ID NO: 11922 - RNA, 89 nt, synthetic construct
  misc_feature 1..89: note = engineered ribonucleic acid scaffold (ERS) sequence
  source 1..89: mol_type = other RNA
aatggcgcttctatctgattactctgagcgccatcaccagcgactatgtcgtagtgggtaaagctccctattcggatggagcatcagag

SEQ ID NO: 11923 - RNA, 95 nt, synthetic construct
  misc_feature 1..95: note = engineered ribonucleic acid scaffold (ERS) sequence
  source 1..95: mol_type = other RNA
aatggcgcttctatctgattactctgagcgccatcaccagcgactatgtcgtagtgggtaaagctccctcacagggatgtgagggagcatcagag

SEQ ID NO: 11924 - RNA, 94 nt, synthetic construct
  misc_feature 1..94: note = engineered ribonucleic acid scaffold (ERS) sequence
  source 1..94: mol_type = other RNA
aatggcgcttctatctgattactctgagcgccatcaccagcgactatgtcgtagtgggtaaagctccctcagctgcagtgagggagcatcagag

SEQ ID NO: 11925 - RNA, 89 nt, synthetic construct
  misc_feature 1..89: note = engineered ribonucleic acid scaffold (ERS) sequence
  source 1..89: mol_type = other RNA
aatggcgcttctatctgattactctgagcgccatcaccagcgactatgtcgtagtgggtaaagctccctcataggagggagcatcagag

SEQ ID NO: 11926 - RNA, 90 nt, synthetic construct
  misc_feature 1..90: note = engineered ribonucleic acid scaffold (ERS) sequence
  source 1..90: mol_type = other RNA
aatggcgcttctatctgattactctgagcgccatcaccagcgactatgtcgtagtgggtaaagctccctcttcaggagggagcatcagag

SEQ ID NO: 11927 - RNA, 89 nt, synthetic construct
  misc_feature 1..89: note = engineered ribonucleic acid scaffold (ERS) sequence
  source 1..89: mol_type = other RNA
aatggcgcttctatctgattactctgagcgccatcaccagcgactatgtcgtagtgggtaaagctccctcttcggagagtgcatcagag

SEQ ID NO: 11928 - RNA, 89 nt, synthetic construct
  misc_feature 1..89: note = engineered ribonucleic acid scaffold (ERS) sequence
  source 1..89: mol_type = other RNA
aatggcgcttctatctgattactctgagcgccatcaccagcgactatgtcgtagtgggtaaagctccctcttcggaggaggcatcagag

SEQ ID NO: 11929 - RNA, 91 nt, synthetic construct
  misc_feature 1..91: note = engineered ribonucleic acid scaffold (ERS) sequence
  source 1..91: mol_type = other RNA
aatggcgcttctatctgattactctgagcgccatcaccagcgactatgtcgtagtgggtaaagctccctcttcggagggaacgcatcagag

SEQ ID NO: 11930 - RNA, 89 nt, synthetic construct; identical to SEQ ID NO: 749
  misc_feature 1..89: note = engineered ribonucleic acid scaffold (ERS) sequence
  source 1..89: mol_type = other RNA

SEQ ID NO: 11931 - RNA, 89 nt, synthetic construct
  misc_feature 1..89: note = engineered ribonucleic acid scaffold (ERS) sequence
  source 1..89: mol_type = other RNA
aatggcgcttctatctgattactctgagcgccatcaccagcgactatgtcgtagtgggtaaagctccctggaaacagggagcatcagag

SEQ ID NO: 11932 - RNA, 85 nt, synthetic construct
  misc_feature 1..85: note = engineered ribonucleic acid scaffold (ERS) sequence
  source 1..85: mol_type = other RNA
aatggcgcttctatctgattactctgagcgccatcaccagcgactatgtcgtagtgggtaaagctcccttcggggagcatcagag

SEQ ID NO: 11933 - RNA, 85 nt, synthetic construct
  misc_feature 1..85: note = engineered ribonucleic acid scaffold (ERS) sequence
  source 1..85: mol_type = other RNA
aatggcgcttctatctgattactctgagcgccatcaccagcgactatgtcgtagtgggtaaagctccgttcgcggagcatcagag

SEQ ID NO: 11934 - RNA, 87 nt, synthetic construct
  misc_feature 1..87: note = engineered ribonucleic acid scaffold (ERS) sequence
  source 1..87: mol_type = other RNA
aatggcgcttctatctgattactctgagcgccatcaccagcgactatgtcgtagtgggtaaagctcctcttcggaggagcatcagag

SEQ ID NO: 11935 - RNA, 85 nt, synthetic construct
  misc_feature 1..85: note = engineered ribonucleic acid scaffold (ERS) sequence
  source 1..85: mol_type = other RNA
aatggcgcttctatctgattactctgagcgccatcaccagcgactatgtcgtagtgggtaaagctctcttcggagagcatcagag

SEQ ID NO: 11936 - RNA, 77 nt, synthetic construct
  misc_feature 1..77: note = engineered ribonucleic acid scaffold (ERS) sequence
  source 1..77: mol_type = other RNA
aatggcgcttctatctgattactctgagcgccatcaccagcgactatgtcgtagtgggtaaagctgcagcatcagag

SEQ ID NO: 11937 - RNA, 83 nt, synthetic construct
  misc_feature 1..83: note = engineered ribonucleic acid scaffold (ERS) sequence
  source 1..83: mol_type = other RNA
aatggcgcttctatctgattactctgagcgccatcaccagcgactatgtcgtagtgggtaaagctgcttcggcagcatcagag

SEQ ID NO: 11938 - RNA, 89 nt, synthetic construct
  misc_feature 1..89: note = engineered ribonucleic acid scaffold (ERS) sequence
  source 1..89: mol_type = other RNA
aatggcgcttctatctgattactctgagcgccatcaccagcgactatgtcgtagtgggtaaaggtccctcttcggagggaacatcagag

SEQ ID NO: 11939 - RNA, 93 nt, synthetic construct
  misc_feature 1..93: note = engineered ribonucleic acid scaffold (ERS) sequence
  source 1..93: mol_type = other RNA
aatggcgcttctatctgattactctgagcgccatcaccagcgactatgtcgtagtgggtaaaggtgacggtcttcggaccgtcaccatcagag

SEQ ID NO: 11940 - RNA, 91 nt, synthetic construct
  misc_feature 1..91: note = engineered ribonucleic acid scaffold (ERS) sequence
  source 1..91: mol_type = other RNA
aatggcgcttctatctgattactctgagcgccatcaccagcgactatgtcgtagtgggtaaagtctccctcttcggagggaggcatcagag

SEQ ID NO: 11941 - RNA, 93 nt, synthetic construct
  misc_feature 1..93: note = engineered ribonucleic acid scaffold (ERS) sequence
  source 1..93: mol_type = other RNA
aatggcgcttctatctgattactctgagcgccatcaccagcgactatgtcgtagtgggtaaagtgcgcccgcttcggcgggcgcacatcagag

SEQ ID NO: 11942 - RNA, 93 nt, synthetic construct
  misc_feature 1..93: note = engineered ribonucleic acid scaffold (ERS) sequence
  source 1..93: mol_type = other RNA
aatggcgcttctatctgattactctgagcgccatcaccagcgactatgtcgtagtgggtaaataatgaaaacttcggttttcattaatcagag

SEQ ID NO: 11943 - RNA, 93 nt, synthetic construct
  misc_feature 1..93: note = engineered ribonucleic acid scaffold (ERS) sequence
  source 1..93: mol_type = other RNA
aatggcgcttctatctgattactctgagcgccatcaccagcgactatgtcgtagtgggtaaatcgtaagaacttcggttcttacgaatcagag

SEQ ID NO: 11944 - RNA, 93 nt, synthetic construct
  misc_feature 1..93: note = engineered ribonucleic acid scaffold (ERS) sequence
  source 1..93: mol_type = other RNA
aatggcgcttctatctgattactctgagcgccatcaccagcgactatgtcgtagtgggtaaatggaagatgcttcggcatcttccaatcagag

SEQ ID NO: 11945 - RNA, 97 nt, synthetic construct
  misc_feature 1..97: note = engineered ribonucleic acid scaffold (ERS) sequence
  source 1..97: mol_type = other RNA
aatggcgcttctatctgattactctgagcgccatcaccagcgactatgtcgtagtgggtaaagcccttacggacttcggtccgtaagggcatcagag

SEQ ID NO: 11946 - RNA, 99 nt, synthetic construct
  misc_feature 1..99: note = engineered ribonucleic acid scaffold (ERS) sequence
  source 1..99: mol_type = other RNA
aatggcgcttctatctgattactctgagcgccatcaccagcgactatgtcgtagtgggtaaagcctcttacggacttcggtccgtaagaggcatcagag

SEQ ID NO: 11947 - RNA, 99 nt, synthetic construct
  misc_feature 1..99: note = engineered ribonucleic acid scaffold (ERS) sequence
  source 1..99: mol_type = other RNA
aatggcgcttctatctgattactctgagcgccatcaccagcgactatgtcgtagtgggtaaagccgcttagggacttcggtccctaagaggcatcagag

SEQ ID NO: 11948 - RNA, 87 nt, synthetic construct
  misc_feature 1..87: note = engineered ribonucleic acid scaffold (ERS) sequence
  source 1..87: mol_type = other RNA
agtggcgcttctatctgattactctgagcgccatcaccagcgactatgtcgtagtgggtaaactccctcttcggagggagatcagag

SEQ ID NO: 11949 - RNA, 89 nt, synthetic construct
  misc_feature 1..89: note = engineered ribonucleic acid scaffold (ERS) sequence
  source 1..89: mol_type = other RNA
agtggcgcttctatctgattactctgagcgccatcaccagcgactatgtcgtagtgggtaaagcgccctcttcggagggagcatcagag

SEQ ID NO: 11950 - RNA, 99 nt, synthetic construct
  misc_feature 1..99: note = engineered ribonucleic acid scaffold (ERS) sequence
  source 1..99: mol_type = other RNA
agtggcgcttctatctgattactctgagcgccatcaccagcgactatgtcgtagtgggtaaagcgccttacggacttcggtccgtaaggagcatcagag

SEQ ID NO: 11951 - RNA, 99 nt, synthetic construct
  misc_feature 1..99: note = engineered ribonucleic acid scaffold (ERS) sequence
  source 1..99: mol_type = other RNA
agtggcgcttctatctgattactctgagcgccatcaccagcgactatgtcgtagtgggtaaagcgcttacggaattcgtgtccgtaagaagcatcagag

SEQ ID NO: 11952 - RNA, 100 nt, synthetic construct
  misc_feature 1..100: note = engineered ribonucleic acid scaffold (ERS) sequence
  source 1..100: mol_type = other RNA
agtggcgcttctatctgattactctgagcgccatcaccagcgactatgtcgtagtgggtaaagcgcttacggacttcgcggtccgtaagaagcatcagag

SEQ ID NO: 11953 - RNA, 98 nt, synthetic construct
  misc_feature 1..98: note = engineered ribonucleic acid scaffold (ERS) sequence
  source 1..98: mol_type = other RNA
agtggcgcttctatctgattactctgagcgccatcaccagcgactatgtcgtagtgggtaaagcgcttacggacttcggtccgtaagaagcatcagag

SEQ ID NO: 11954 - RNA, 98 nt, synthetic construct
  misc_feature 1..98: note = engineered ribonucleic acid scaffold (ERS) sequence
  source 1..98: mol_type = other RNA
agtggcgcttctatctgattactctgagcgccatcaccagcgactatgtcgtagtgggtaaagcgcttacggacttcggtccgtaagtcgcatcagag

SEQ ID NO: 11955 - RNA, 98 nt, synthetic construct
  misc_feature 1..98: note = engineered ribonucleic acid scaffold (ERS) sequence
  source 1..98: mol_type = other RNA
agtggcgcttctatctgattactctgagcgccatcaccagcgactatgtcgtagtgggtaaagcgcttacggagttcgatccgtaagaagcatcagag

SEQ ID NO: 11956 - RNA, 98 nt, synthetic construct
  misc_feature 1..98: note = engineered ribonucleic acid scaffold (ERS) sequence
  source 1..98: mol_type = other RNA
agtggcgcttctatctgattactctgagcgccatcaccagcgactatgtcgtagtgggtaaagcgctttcggacttcggtccggaagaagcatcagag

SEQ ID NO: 11957 - RNA, 102 nt, synthetic construct
  misc_feature 1..102: note = engineered ribonucleic acid scaffold (ERS) sequence
  source 1..102: mol_type = other RNA
agtggcgcttctatctgattactctgagcgccatcaccagcgactatgtcgtagtgggtaaagcggcagatctgagcctccgagctctctgccgcatcagag

SEQ ID NO: 11958 - RNA, 98 nt, synthetic construct
  misc_feature 1..98: note = engineered ribonucleic acid scaffold (ERS) sequence
  source 1..98: mol_type = other RNA
agtggcgcttctatctgattactctgagcgccatcaccagcgactatgtcgtagtgggtaaagcggttacggacttcggtccgtaagacgcatcagag

SEQ ID NO: 11959 - RNA, 75 nt, synthetic construct
  misc_feature 1..75: note = engineered ribonucleic acid scaffold (ERS) sequence
  source 1..75: mol_type = other RNA
agtggcgcttctatctgattactctgagcgccatcaccagcgactatgtcgtagtgggtaaagctagcatcagag

SEQ ID NO: 11960 - RNA, 89 nt, synthetic construct
  misc_feature 1..89: note = engineered ribonucleic acid scaffold (ERS) sequence
  source 1..89: mol_type = other RNA
agtggcgcttctatctgattactctgagcgccatcaccagcgactatgtcgtagtgggtaaagctccctattcggatggagcatcagag

SEQ ID NO: 11961 - RNA, 95 nt, synthetic construct
  misc_feature 1..95: note = engineered ribonucleic acid scaffold (ERS) sequence
  source 1..95: mol_type = other RNA
agtggcgcttctatctgattactctgagcgccatcaccagcgactatgtcgtagtgggtaaagctccctcacagggatgtgagggagcatcagag

SEQ ID NO: 11962 - RNA, 94 nt, synthetic construct
  misc_feature 1..94: note = engineered ribonucleic acid scaffold (ERS) sequence
  source 1..94: mol_type = other RNA
agtggcgcttctatctgattactctgagcgccatcaccagcgactatgtcgtagtgggtaaagctccctcagctgcagtgagggagcatcagag

SEQ ID NO: 11963 - RNA, 89 nt, synthetic construct
  misc_feature 1..89: note = engineered ribonucleic acid scaffold (ERS) sequence
  source 1..89: mol_type = other RNA
agtggcgcttctatctgattactctgagcgccatcaccagcgactatgtcgtagtgggtaaagctccctcataggagggagcatcagag

SEQ ID NO: 11964 - RNA, 90 nt, synthetic construct
  misc_feature 1..90: note = engineered ribonucleic acid scaffold (ERS) sequence
  source 1..90: mol_type = other RNA
agtggcgcttctatctgattactctgagcgccatcaccagcgactatgtcgtagtgggtaaagctccctcttcaggagggagcatcagag

SEQ ID NO: 11965 - RNA, 89 nt, synthetic construct
  misc_feature 1..89: note = engineered ribonucleic acid scaffold (ERS) sequence
  source 1..89: mol_type = other RNA
agtggcgcttctatctgattactctgagcgccatcaccagcgactatgtcgtagtgggtaaagctccctcttcggagagtgcatcagag

SEQ ID NO: 11966 - RNA, 89 nt, synthetic construct
  misc_feature 1..89: note = engineered ribonucleic acid scaffold (ERS) sequence
  source 1..89: mol_type = other RNA
agtggcgcttctatctgattactctgagcgccatcaccagcgactatgtcgtagtgggtaaagctccctcttcggaggaggcatcagag

SEQ ID NO: 11967 - RNA, 91 nt, synthetic construct
  misc_feature 1..91: note = engineered ribonucleic acid scaffold (ERS) sequence
  source 1..91: mol_type = other RNA
agtggcgcttctatctgattactctgagcgccatcaccagcgactatgtcgtagtgggtaaagctccctcttcggagggaacgcatcagag

SEQ ID NO: 11968 - RNA, 89 nt, synthetic construct; identical to SEQ ID NO: 750
  misc_feature 1..89: note = engineered ribonucleic acid scaffold (ERS) sequence
  source 1..89: mol_type = other RNA

SEQ ID NO: 11969 - RNA, 89 nt, synthetic construct
  misc_feature 1..89: note = engineered ribonucleic acid scaffold (ERS) sequence
  source 1..89: mol_type = other RNA
agtggcgcttctatctgattactctgagcgccatcaccagcgactatgtcgtagtgggtaaagctccctggaaacagggagcatcagag

SEQ ID NO: 11970 - RNA, 85 nt, synthetic construct
  misc_feature 1..85: note = engineered ribonucleic acid scaffold (ERS) sequence
  source 1..85: mol_type = other RNA
agtggcgcttctatctgattactctgagcgccatcaccagcgactatgtcgtagtgggtaaagctcccttcggggagcatcagag

SEQ ID NO: 11971 - RNA, 85 nt, synthetic construct
  misc_feature 1..85: note = engineered ribonucleic acid scaffold (ERS) sequence
  source 1..85: mol_type = other RNA
agtggcgcttctatctgattactctgagcgccatcaccagcgactatgtcgtagtgggtaaagctccgttcgcggagcatcagag

SEQ ID NO: 11972 - RNA, 87 nt, synthetic construct
  misc_feature 1..87: note = engineered ribonucleic acid scaffold (ERS) sequence
  source 1..87: mol_type = other RNA
agtggcgcttctatctgattactctgagcgccatcaccagcgactatgtcgtagtgggtaaagctcctcttcggaggagcatcagag

SEQ ID NO: 11973 - RNA, 85 nt, synthetic construct
  misc_feature 1..85: note = engineered ribonucleic acid scaffold (ERS) sequence
  source 1..85: mol_type = other RNA
agtggcgcttctatctgattactctgagcgccatcaccagcgactatgtcgtagtgggtaaagctctcttcggagagcatcagag

SEQ ID NO: 11974 - RNA, 77 nt, synthetic construct
  misc_feature 1..77: note = engineered ribonucleic acid scaffold (ERS) sequence
  source 1..77: mol_type = other RNA
agtggcgcttctatctgattactctgagcgccatcaccagcgactatgtcgtagtgggtaaagctgcagcatcagag

SEQ ID NO: 11975 - RNA, 83 nt, synthetic construct
  misc_feature 1..83: note = engineered ribonucleic acid scaffold (ERS) sequence
  source 1..83: mol_type = other RNA
agtggcgcttctatctgattactctgagcgccatcaccagcgactatgtcgtagtgggtaaagctgcttcggcagcatcagag

SEQ ID NO: 11976 - RNA, 89 nt, synthetic construct
  misc_feature 1..89: note = engineered ribonucleic acid scaffold (ERS) sequence
  source 1..89: mol_type = other RNA
agtggcgcttctatctgattactctgagcgccatcaccagcgactatgtcgtagtgggtaaaggtccctcttcggagggaacatcagag

SEQ ID NO: 11977 - RNA, 93 nt, synthetic construct
  misc_feature 1..93: note = engineered ribonucleic acid scaffold (ERS) sequence
  source 1..93: mol_type = other RNA
agtggcgcttctatctgattactctgagcgccatcaccagcgactatgtcgtagtgggtaaaggtgacggtcttcggaccgtcaccatcagag

SEQ ID NO: 11978 - RNA, 91 nt, synthetic construct
  misc_feature 1..91: note = engineered ribonucleic acid scaffold (ERS) sequence
  source 1..91: mol_type = other RNA
agtggcgcttctatctgattactctgagcgccatcaccagcgactatgtcgtagtgggtaaagtctccctcttcggagggaggcatcagag

SEQ ID NO: 11979 - RNA, 93 nt, synthetic construct
  misc_feature 1..93: note = engineered ribonucleic acid scaffold (ERS) sequence
  source 1..93: mol_type = other RNA
agtggcgcttctatctgattactctgagcgccatcaccagcgactatgtcgtagtgggtaaagtgcgcccgcttcggcgggcgcacatcagag

SEQ ID NO: 11980 - RNA, 93 nt, synthetic construct
  misc_feature 1..93: note = engineered ribonucleic acid scaffold (ERS) sequence
  source 1..93: mol_type = other RNA
agtggcgcttctatctgattactctgagcgccatcaccagcgactatgtcgtagtgggtaaataatgaaaacttcggttttcattaatcagag

SEQ ID NO: 11981 - RNA, 93 nt, synthetic construct
  misc_feature 1..93: note = engineered ribonucleic acid scaffold (ERS) sequence
  source 1..93: mol_type = other RNA
agtggcgcttctatctgattactctgagcgccatcaccagcgactatgtcgtagtgggtaaatcgtaagaacttcggttcttacgaatcagag

SEQ ID NO: 11982 - RNA, 93 nt, synthetic construct
  misc_feature 1..93: note = engineered ribonucleic acid scaffold (ERS) sequence
  source 1..93: mol_type = other RNA
agtggcgcttctatctgattactctgagcgccatcaccagcgactatgtcgtagtgggtaaatggaagatgcttcggcatcttccaatcagag

SEQ ID NO: 11983 - RNA, 97 nt, synthetic construct
  misc_feature 1..97: note = engineered ribonucleic acid scaffold (ERS) sequence
  source 1..97: mol_type = other RNA
agtggcgcttctatctgattactctgagcgccatcaccagcgactatgtcgtagtgggtaaagcccttacggacttcggtccgtaagggcatcagag

SEQ ID NO: 11984 - RNA, 99 nt, synthetic construct
  misc_feature 1..99: note = engineered ribonucleic acid scaffold (ERS) sequence
  source 1..99: mol_type = other RNA
agtggcgcttctatctgattactctgagcgccatcaccagcgactatgtcgtagtgggtaaagcctcttacggacttcggtccgtaagaggcatcagag

SEQ ID NO: 11985 - RNA, 99 nt, synthetic construct
  misc_feature 1..99: note = engineered ribonucleic acid scaffold (ERS) sequence
  source 1..99: mol_type = other RNA
agtggcgcttctatctgattactctgagcgccatcaccagcgactatgtcgtagtgggtaaagccgcttagggacttcggtccctaagaggcatcagag

SEQ ID NO: 11986 - RNA, 86 nt, synthetic construct
  misc_feature 1..86: note = engineered ribonucleic acid scaffold (ERS) sequence
  source 1..86: mol_type = other RNA
acggcgcttctatctgattactctgagcgccatcaccagcgactatgtcgtagtgggtaaactccctcttcggagggagatcagag

SEQ ID NO: 11987 - RNA, 88 nt, synthetic construct
  misc_feature 1..88: note = engineered ribonucleic acid scaffold (ERS) sequence
  source 1..88: mol_type = other RNA
acggcgcttctatctgattactctgagcgccatcaccagcgactatgtcgtagtgggtaaagcgccctcttcggagggagcatcagag

SEQ ID NO: 11988 - RNA, 98 nt, synthetic construct
  misc_feature 1..98: note = engineered ribonucleic acid scaffold (ERS) sequence
  source 1..98: mol_type = other RNA
acggcgcttctatctgattactctgagcgccatcaccagcgactatgtcgtagtgggtaaagcgccttacggacttcggtccgtaaggagcatcagag

SEQ ID NO: 11989 - RNA, 98 nt, synthetic construct
  misc_feature 1..98: note = engineered ribonucleic acid scaffold (ERS) sequence
  source 1..98: mol_type = other RNA
acggcgcttctatctgattactctgagcgccatcaccagcgactatgtcgtagtgggtaaagcgcttacggaattcgtgtccgtaagaagcatcagag

SEQ ID NO: 11990 - RNA, 99 nt, synthetic construct
  misc_feature 1..99: note = engineered ribonucleic acid scaffold (ERS) sequence
  source 1..99: mol_type = other RNA
acggcgcttctatctgattactctgagcgccatcaccagcgactatgtcgtagtgggtaaagcgcttacggacttcgcggtccgtaagaagcatcagag

SEQ ID NO: 11991 - RNA, 97 nt, synthetic construct
  misc_feature 1..97: note = engineered ribonucleic acid scaffold (ERS) sequence
  source 1..97: mol_type = other RNA
acggcgcttctatctgattactctgagcgccatcaccagcgactatgtcgtagtgggtaaagcgcttacggacttcggtccgtaagaagcatcagag

SEQ ID NO: 11992 - RNA, 97 nt, synthetic construct
  misc_feature 1..97: note = engineered ribonucleic acid scaffold (ERS) sequence
  source 1..97: mol_type = other RNA
acggcgcttctatctgattactctgagcgccatcaccagcgactatgtcgtagtgggtaaagcgcttacggacttcggtccgtaagtcgcatcagag

SEQ ID NO: 11993 - RNA, 97 nt, synthetic construct
  misc_feature 1..97: note = engineered ribonucleic acid scaffold (ERS) sequence
  source 1..97: mol_type = other RNA
acggcgcttctatctgattactctgagcgccatcaccagcgactatgtcgtagtgggtaaagcgcttacggagttcgatccgtaagaagcatcagag

SEQ ID NO: 11994 - RNA, 97 nt, synthetic construct
  misc_feature 1..97: note = engineered ribonucleic acid scaffold (ERS) sequence
  source 1..97: mol_type = other RNA
acggcgcttctatctgattactctgagcgccatcaccagcgactatgtcgtagtgggtaaagcgctttcggacttcggtccggaagaagcatcagag

SEQ ID NO: 11995 - RNA, 101 nt, synthetic construct
  misc_feature 1..101: note = engineered ribonucleic acid scaffold (ERS) sequence
  source 1..101: mol_type = other RNA
acggcgcttctatctgattactctgagcgccatcaccagcgactatgtcgtagtgggtaaagcggcagatctgagcctccgagctctctgccgcatcagag

SEQ ID NO: 11996 - RNA, 97 nt, synthetic construct
  misc_feature 1..97: note = engineered ribonucleic acid scaffold (ERS) sequence
  source 1..97: mol_type = other RNA
acggcgcttctatctgattactctgagcgccatcaccagcgactatgtcgtagtgggtaaagcggttacggacttcggtccgtaagacgcatcagag

SEQ ID NO: 11997 - RNA, 74 nt, synthetic construct
  misc_feature 1..74: note = engineered ribonucleic acid scaffold (ERS) sequence
  source 1..74: mol_type = other RNA
acggcgcttctatctgattactctgagcgccatcaccagcgactatgtcgtagtgggtaaagctagcatcagag

SEQ ID NO: 11998 - RNA, 88 nt, synthetic construct
  misc_feature 1..88: note = engineered ribonucleic acid scaffold (ERS) sequence
  source 1..88: mol_type = other RNA
acggcgcttctatctgattactctgagcgccatcaccagcgactatgtcgtagtgggtaaagctccctattcggatggagcatcagag

SEQ ID NO: 11999 - RNA, 94 nt, synthetic construct
  misc_feature 1..94: note = engineered ribonucleic acid scaffold (ERS) sequence
  source 1..94: mol_type = other RNA
acggcgcttctatctgattactctgagcgccatcaccagcgactatgtcgtagtgggtaaagctccctcacagggatgtgagggagcatcagag

SEQ ID NO: 12000 - RNA, 93 nt, synthetic construct
  misc_feature 1..93: note = engineered ribonucleic acid scaffold (ERS) sequence
  source 1..93: mol_type = other RNA
acggcgcttctatctgattactctgagcgccatcaccagcgactatgtcgtagtgggtaaagctccctcagctgcagtgagggagcatcagag

SEQ ID NO: 12001 - RNA, 88 nt, synthetic construct
  misc_feature 1..88: note = engineered ribonucleic acid scaffold (ERS) sequence
  source 1..88: mol_type = other RNA
acggcgcttctatctgattactctgagcgccatcaccagcgactatgtcgtagtgggtaaagctccctcataggagggagcatcagag

SEQ ID NO: 12002 - RNA, 89 nt, synthetic construct
  misc_feature 1..89: note = engineered ribonucleic acid scaffold (ERS) sequence
  source 1..89: mol_type = other RNA
acggcgcttctatctgattactctgagcgccatcaccagcgactatgtcgtagtgggtaaagctccctcttcaggagggagcatcagag

SEQ ID NO: 12003 - RNA, 88 nt, synthetic construct
  misc_feature 1..88: note = engineered ribonucleic acid scaffold (ERS) sequence
  source 1..88: mol_type = other RNA
acggcgcttctatctgattactctgagcgccatcaccagcgactatgtcgtagtgggtaaagctccctcttcggagagtgcatcagag

SEQ ID NO: 12004 - RNA, 88 nt, synthetic construct
  misc_feature 1..88: note = engineered ribonucleic acid scaffold (ERS) sequence
  source 1..88: mol_type = other RNA
acggcgcttctatctgattactctgagcgccatcaccagcgactatgtcgtagtgggtaaagctccctcttcggaggaggcatcagag

SEQ ID NO: 12005 - RNA, 90 nt, synthetic construct
  misc_feature 1..90: note = engineered ribonucleic acid scaffold (ERS) sequence
  source 1..90: mol_type = other RNA
acggcgcttctatctgattactctgagcgccatcaccagcgactatgtcgtagtgggtaaagctccctcttcggagggaacgcatcagag

SEQ ID NO: 12006 - RNA, 88 nt, synthetic construct; identical to SEQ ID NO: 743
  misc_feature 1..88: note = engineered ribonucleic acid scaffold (ERS) sequence
  source 1..88: mol_type = other RNA

SEQ ID NO: 12007 - RNA, 88 nt, synthetic construct
  misc_feature 1..88: note = engineered ribonucleic acid scaffold (ERS) sequence
  source 1..88: mol_type = other RNA
acggcgcttctatctgattactctgagcgccatcaccagcgactatgtcgtagtgggtaaagctccctggaaacagggagcatcagag

SEQ ID NO: 12008 - RNA, 84 nt, synthetic construct
  misc_feature 1..84: note = engineered ribonucleic acid scaffold (ERS) sequence
  source 1..84: mol_type = other RNA
acggcgcttctatctgattactctgagcgccatcaccagcgactatgtcgtagtgggtaaagctcccttcggggagcatcagag

SEQ ID NO: 12009 - RNA, 84 nt, synthetic construct
  misc_feature 1..84: note = engineered ribonucleic acid scaffold (ERS) sequence
  source 1..84: mol_type = other RNA
acggcgcttctatctgattactctgagcgccatcaccagcgactatgtcgtagtgggtaaagctccgttcgcggagcatcagag

SEQ ID NO: 12010 - RNA, 86 nt, synthetic construct
  misc_feature 1..86: note = engineered ribonucleic acid scaffold (ERS) sequence
  source 1..86: mol_type = other RNA
acggcgcttctatctgattactctgagcgccatcaccagcgactatgtcgtagtgggtaaagctcctcttcggaggagcatcagag

SEQ ID NO: 12011 - RNA, 84 nt, synthetic construct
  misc_feature 1..84: note = engineered ribonucleic acid scaffold (ERS) sequence
  source 1..84: mol_type = other RNA
acggcgcttctatctgattactctgagcgccatcaccagcgactatgtcgtagtgggtaaagctctcttcggagagcatcagag

SEQ ID NO: 12012 - RNA, 76 nt, synthetic construct
  misc_feature 1..76: note = engineered ribonucleic acid scaffold (ERS) sequence
  source 1..76: mol_type = other RNA
acggcgcttctatctgattactctgagcgccatcaccagcgactatgtcgtagtgggtaaagctgcagcatcagag

SEQ ID NO: 12013 - RNA, 82 nt, synthetic construct
  misc_feature 1..82: note = engineered ribonucleic acid scaffold (ERS) sequence
  source 1..82: mol_type = other RNA
acggcgcttctatctgattactctgagcgccatcaccagcgactatgtcgtagtgggtaaagctgcttcggcagcatcagag

SEQ ID NO: 12014 - RNA, 88 nt, synthetic construct
  misc_feature 1..88: note = engineered ribonucleic acid scaffold (ERS) sequence
  source 1..88: mol_type = other RNA
acggcgcttctatctgattactctgagcgccatcaccagcgactatgtcgtagtgggtaaaggtccctcttcggagggaacatcagag

SEQ ID NO: 12015 - RNA, 92 nt, synthetic construct
  misc_feature 1..92: note = engineered ribonucleic acid scaffold (ERS) sequence
  source 1..92: mol_type = other RNA
acggcgcttctatctgattactctgagcgccatcaccagcgactatgtcgtagtgggtaaaggtgacggtcttcggaccgtcaccatcagag

SEQ ID NO: 12016 - RNA, 90 nt, synthetic construct
  misc_feature 1..90: note = engineered ribonucleic acid scaffold (ERS) sequence
  source 1..90: mol_type = other RNA
acggcgcttctatctgattactctgagcgccatcaccagcgactatgtcgtagtgggtaaagtctccctcttcggagggaggcatcagag

SEQ ID NO: 12017 - RNA, 92 nt, synthetic construct
  misc_feature 1..92: note = engineered ribonucleic acid scaffold (ERS) sequence
  source 1..92: mol_type = other RNA
acggcgcttctatctgattactctgagcgccatcaccagcgactatgtcgtagtgggtaaagtgcgcccgcttcggcgggcgcacatcagag

SEQ ID NO: 12018 - RNA, 92 nt, synthetic construct
  misc_feature 1..92: note = engineered ribonucleic acid scaffold (ERS) sequence
  source 1..92: mol_type = other RNA
acggcgcttctatctgattactctgagcgccatcaccagcgactatgtcgtagtgggtaaataatgaaaacttcggttttcattaatcagag

SEQ ID NO: 12019 - RNA, 92 nt, synthetic construct
  misc_feature 1..92: note = engineered ribonucleic acid scaffold (ERS) sequence
  source 1..92: mol_type = other RNA
acggcgcttctatctgattactctgagcgccatcaccagcgactatgtcgtagtgggtaaatcgtaagaacttcggttcttacgaatcagag

SEQ ID NO: 12020 - RNA, 92 nt, synthetic construct
  misc_feature 1..92: note = engineered ribonucleic acid scaffold (ERS) sequence
  source 1..92: mol_type = other RNA
acggcgcttctatctgattactctgagcgccatcaccagcgactatgtcgtagtgggtaaatggaagatgcttcggcatcttccaatcagag

SEQ ID NO: 12021 - RNA, 96 nt, synthetic construct
  misc_feature 1..96: note = engineered ribonucleic acid scaffold (ERS) sequence
  source 1..96: mol_type = other RNA
acggcgcttctatctgattactctgagcgccatcaccagcgactatgtcgtagtgggtaaagcccttacggacttcggtccgtaagggcatcagag

SEQ ID NO: 12022 - RNA, 98 nt, synthetic construct
  misc_feature 1..98: note = engineered ribonucleic acid scaffold (ERS) sequence
  source 1..98: mol_type = other RNA
acggcgcttctatctgattactctgagcgccatcaccagcgactatgtcgtagtgggtaaagcctcttacggacttcggtccgtaagaggcatcagag

SEQ ID NO: 12023 - RNA, 98 nt, synthetic construct
  misc_feature 1..98: note = engineered ribonucleic acid scaffold (ERS) sequence
  source 1..98: mol_type = other RNA
acggcgcttctatctgattactctgagcgccatcaccagcgactatgtcgtagtgggtaaagccgcttagggacttcggtccctaagaggcatcagag

SEQ ID NO: 12024 - RNA, 87 nt, synthetic construct
  misc_feature 1..87: note = engineered ribonucleic acid scaffold (ERS) sequence
  source 1..87: mol_type = other RNA
acaggcgcttctatctgattactctgagcgccatcaccagcgactatgtcgtagtgggtaaactccctcttcggagggagatcagag

SEQ ID NO: 12025 - RNA, 89 nt, synthetic construct
  misc_feature 1..89: note = engineered ribonucleic acid scaffold (ERS) sequence
  source 1..89: mol_type = other RNA
acaggcgcttctatctgattactctgagcgccatcaccagcgactatgtcgtagtgggtaaagcgccctcttcggagggagcatcagag

SEQ ID NO: 12026 - RNA, 99 nt, synthetic construct
  misc_feature 1..99: note = engineered ribonucleic acid scaffold (ERS) sequence
  source 1..99: mol_type = other RNA
acaggcgcttctatctgattactctgagcgccatcaccagcgactatgtcgtagtgggtaaagcgccttacggacttcggtccgtaaggagcatcagag

SEQ ID NO: 12027 - RNA, 99 nt, synthetic construct
  misc_feature 1..99: note = engineered ribonucleic acid scaffold (ERS) sequence
  source 1..99: mol_type = other RNA
acaggcgcttctatctgattactctgagcgccatcaccagcgactatgtcgtagtgggtaaagcgcttacggaattcgtgtccgtaagaagcatcagag

SEQ ID NO: 12028 - RNA, 100 nt, synthetic construct
  misc_feature 1..100: note = engineered ribonucleic acid scaffold (ERS) sequence
  source 1..100: mol_type = other RNA
acaggcgcttctatctgattactctgagcgccatcaccagcgactatgtcgtagtgggtaaagcgcttacggacttcgcggtccgtaagaagcatcagag

SEQ ID NO: 12029 - RNA, 98 nt, synthetic construct
  misc_feature 1..98: note = engineered ribonucleic acid scaffold (ERS) sequence
  source 1..98: mol_type = other RNA
acaggcgcttctatctgattactctgagcgccatcaccagcgactatgtcgtagtgggtaaagcgcttacggacttcggtccgtaagaagcatcagag

SEQ ID NO: 12030 - RNA, 98 nt, synthetic construct
  misc_feature 1..98: note = engineered ribonucleic acid scaffold (ERS) sequence
  source 1..98: mol_type = other RNA
acaggcgcttctatctgattactctgagcgccatcaccagcgactatgtcgtagtgggtaaagcgcttacggacttcggtccgtaagtcgcatcagag

SEQ ID NO: 12031 - RNA, 98 nt, synthetic construct
  misc_feature 1..98: note = engineered ribonucleic acid scaffold (ERS) sequence
  source 1..98: mol_type = other RNA
acaggcgcttctatctgattactctgagcgccatcaccagcgactatgtcgtagtgggtaaagcgcttacggagttcgatccgtaagaagcatcagag

SEQ ID NO: 12032 - RNA, 98 nt, synthetic construct
  misc_feature 1..98: note = engineered ribonucleic acid scaffold (ERS) sequence
  source 1..98: mol_type = other RNA
acaggcgcttctatctgattactctgagcgccatcaccagcgactatgtcgtagtgggtaaagcgctttcggacttcggtccggaagaagcatcagag

SEQ ID NO: 12033 - RNA, 102 nt, synthetic construct
  misc_feature 1..102: note = engineered ribonucleic acid scaffold (ERS) sequence
  source 1..102: mol_type = other RNA
acaggcgcttctatctgattactctgagcgccatcaccagcgactatgtcgtagtgggtaaagcggcagatctgagcctccgagctctctgccgcatcagag

SEQ ID NO: 12034 - RNA, 98 nt, synthetic construct
  misc_feature 1..98: note = engineered ribonucleic acid scaffold (ERS) sequence
  source 1..98: mol_type = other RNA
acaggcgcttctatctgattactctgagcgccatcaccagcgactatgtcgtagtgggtaaagcggttacggacttcggtccgtaagacgcatcagag

SEQ ID NO: 12035 - RNA, 75 nt, synthetic construct
  misc_feature 1..75: note = engineered ribonucleic acid scaffold (ERS) sequence
  source 1..75: mol_type = other RNA
acaggcgcttctatctgattactctgagcgccatcaccagcgactatgtcgtagtgggtaaagctagcatcagag

SEQ ID NO: 12036 - RNA, 89 nt, synthetic construct
  misc_feature 1..89: note = engineered ribonucleic acid scaffold (ERS) sequence
  source 1..89: mol_type = other RNA
acaggcgcttctatctgattactctgagcgccatcaccagcgactatgtcgtagtgggtaaagctccctattcggatggagcatcagag

SEQ ID NO: 12037 - RNA, 95 nt, synthetic construct
  misc_feature 1..95: note = engineered ribonucleic acid scaffold (ERS) sequence
  source 1..95: mol_type = other RNA
acaggcgcttctatctgattactctgagcgccatcaccagcgactatgtcgtagtgggtaaagctccctcacagggatgtgagggagcatcagag

SEQ ID NO: 12038 - RNA, 94 nt, synthetic construct
  misc_feature 1..94: note = engineered ribonucleic acid scaffold (ERS) sequence
  source 1..94: mol_type = other RNA
acaggcgcttctatctgattactctgagcgccatcaccagcgactatgtcgtagtgggtaaagctccctcagctgcagtgagggagcatcagag

SEQ ID NO: 12039 - RNA, 89 nt, synthetic construct
  misc_feature 1..89: note = engineered ribonucleic acid scaffold (ERS) sequence
  source 1..89: mol_type = other RNA
acaggcgcttctatctgattactctgagcgccatcaccagcgactatgtcgtagtgggtaaagctccctcataggagggagcatcagag

SEQ ID NO: 12040 - RNA, 90 nt, synthetic construct
  misc_feature 1..90: note = engineered ribonucleic acid scaffold (ERS) sequence
  source 1..90: mol_type = other RNA
acaggcgcttctatctgattactctgagcgccatcaccagcgactatgtcgtagtgggtaaagctccctcttcaggagggagcatcagag

SEQ ID NO: 12041 - RNA, 89 nt, synthetic construct
  misc_feature 1..89: note = engineered ribonucleic acid scaffold (ERS) sequence
  source 1..89: mol_type = other RNA
acaggcgcttctatctgattactctgagcgccatcaccagcgactatgtcgtagtgggtaaagctccctcttcggagagtgcatcagag

SEQ ID NO: 12042 - RNA, 89 nt, synthetic construct
  misc_feature 1..89: note = engineered ribonucleic acid scaffold (ERS) sequence
  source 1..89: mol_type = other RNA
acaggcgcttctatctgattactctgagcgccatcaccagcgactatgtcgtagtgggtaaagctccctcttcggaggaggcatcagag

SEQ ID NO: 12043 - RNA, 91 nt, synthetic construct
  misc_feature 1..91: note = engineered ribonucleic acid scaffold (ERS) sequence
  source 1..91: mol_type = other RNA
acaggcgcttctatctgattactctgagcgccatcaccagcgactatgtcgtagtgggtaaagctccctcttcggagggaacgcatcagag

SEQ ID NO: 12044 - RNA, 89 nt, synthetic construct; identical to SEQ ID NO: 751
  misc_feature 1..89: note = engineered ribonucleic acid scaffold (ERS) sequence
  source 1..89: mol_type = other RNA

SEQ ID NO: 12045 - RNA, 89 nt, synthetic construct
  misc_feature 1..89: note = engineered ribonucleic acid scaffold (ERS) sequence
  source 1..89: mol_type = other RNA
acaggcgcttctatctgattactctgagcgccatcaccagcgactatgtcgtagtgggtaaagctccctggaaacagggagcatcagag

SEQ ID NO: 12046 - RNA, 85 nt, synthetic construct
  misc_feature 1..85: note = engineered ribonucleic acid scaffold (ERS) sequence
  source 1..85: mol_type = other RNA
acaggcgcttctatctgattactctgagcgccatcaccagcgactatgtcgtagtgggtaaagctcccttcggggagcatcagag

SEQ ID NO: 12047 - RNA, 85 nt, synthetic construct
  misc_feature 1..85: note = engineered ribonucleic acid scaffold (ERS) sequence
  source 1..85: mol_type = other RNA
acaggcgcttctatctgattactctgagcgccatcaccagcgactatgtcgtagtgggtaaagctccgttcgcggagcatcagag

SEQ ID NO: 12048 - RNA, 87 nt, synthetic construct
  misc_feature 1..87: note = engineered ribonucleic acid scaffold (ERS) sequence
  source 1..87: mol_type = other RNA
acaggcgcttctatctgattactctgagcgccatcaccagcgactatgtcgtagtgggtaaagctcctcttcggaggagcatcagag

SEQ ID NO: 12049 - RNA, 85 nt, synthetic construct
  misc_feature 1..85: note = engineered ribonucleic acid scaffold (ERS) sequence
  source 1..85: mol_type = other RNA
acaggcgcttctatctgattactctgagcgccatcaccagcgactatgtcgtagtgggtaaagctctcttcggagagcatcagag

SEQ ID NO: 12050 - RNA, 77 nt, synthetic construct
  misc_feature 1..77: note = engineered ribonucleic acid scaffold (ERS) sequence
  source 1..77: mol_type = other RNA
acaggcgcttctatctgattactctgagcgccatcaccagcgactatgtcgtagtgggtaaagctgcagcatcagag

SEQ ID NO: 12051 - RNA, 83 nt, synthetic construct
  misc_feature 1..83: note = engineered ribonucleic acid scaffold (ERS) sequence
  source 1..83: mol_type = other RNA
acaggcgcttctatctgattactctgagcgccatcaccagcgactatgtcgtagtgggtaaagctgcttcggcagcatcagag

SEQ ID NO: 12052 - RNA, 89 nt, synthetic construct
  misc_feature 1..89: note = engineered ribonucleic acid scaffold (ERS) sequence
  source 1..89: mol_type = other RNA
acaggcgcttctatctgattactctgagcgccatcaccagcgactatgtcgtagtgggtaaaggtccctcttcggagggaacatcagag

SEQ ID NO: 12053 - RNA, 93 nt, synthetic construct
  misc_feature 1..93: note = engineered ribonucleic acid scaffold (ERS) sequence
  source 1..93: mol_type = other RNA
acaggcgcttctatctgattactctgagcgccatcaccagcgactatgtcgtagtgggtaaaggtgacggtcttcggaccgtcaccatcagag

SEQ ID NO: 12054 - RNA, 91 nt, synthetic construct
  misc_feature 1..91: note = engineered ribonucleic acid scaffold (ERS) sequence
  source 1..91: mol_type = other RNA
acaggcgcttctatctgattactctgagcgccatcaccagcgactatgtcgtagtgggtaaagtctccctcttcggagggaggcatcagag

SEQ ID NO: 12055 - RNA, 93 nt, synthetic construct
  misc_feature 1..93: note = engineered ribonucleic acid scaffold (ERS) sequence
  source 1..93: mol_type = other RNA
acaggcgcttctatctgattactctgagcgccatcaccagcgactatgtcgtagtgggtaaagtgcgcccgcttcggcgggcgcacatcagag

SEQ ID NO: 12056 - RNA, 93 nt, synthetic construct
  misc_feature 1..93: note = engineered ribonucleic acid scaffold (ERS) sequence
  source 1..93: mol_type = other RNA
acaggcgcttctatctgattactctgagcgccatcaccagcgactatgtcgtagtgggtaaataatgaaaacttcggttttcattaatcagag

SEQ ID NO: 12057 - RNA, 93 nt, synthetic construct
  misc_feature 1..93: note = engineered ribonucleic acid scaffold (ERS) sequence
  source 1..93: mol_type = other RNA
acaggcgcttctatctgattactctgagcgccatcaccagcgactatgtcgtagtgggtaaatcgtaagaacttcggttcttacgaatcagag

SEQ ID NO: 12058 - RNA, 93 nt, synthetic construct
  misc_feature 1..93: note = engineered ribonucleic acid scaffold (ERS) sequence
  source 1..93: mol_type = other RNA
acaggcgcttctatctgattactctgagcgccatcaccagcgactatgtcgtagtgggtaaatggaagatgcttcggcatcttccaatcagag

SEQ ID NO: 12059 - RNA, 97 nt, synthetic construct
  misc_feature 1..97: note = engineered ribonucleic acid scaffold (ERS) sequence
  source 1..97: mol_type = other RNA
acaggcgcttctatctgattactctgagcgccatcaccagcgactatgtcgtagtgggtaaagcccttacggacttcggtccgtaagggcatcagag

SEQ ID NO: 12060 - RNA, 99 nt, synthetic construct
  misc_feature 1..99: note = engineered ribonucleic acid scaffold (ERS) sequence
  source 1..99: mol_type = other RNA
acaggcgcttctatctgattactctgagcgccatcaccagcgactatgtcgtagtgggtaaagcctcttacggacttcggtccgtaagaggcatcagag

SEQ ID NO: 12061 - RNA, 99 nt, synthetic construct
  misc_feature 1..99: note = engineered ribonucleic acid scaffold (ERS) sequence
  source 1..99: mol_type = other RNA
acaggcgcttctatctgattactctgagcgccatcaccagcgactatgtcgtagtgggtaaagccgcttagggacttcggtccctaagaggcatcagag

SEQ ID NO: 12062 - RNA, 87 nt, synthetic construct
  misc_feature 1..87: note = engineered ribonucleic acid scaffold (ERS) sequence
  source 1..87: mol_type = other RNA
acgggcgcttctatctgattactctgagcgccatcaccagcgactatgtcgtagtgggtaaactccctcttcggagggagatcagag

SEQ ID NO: 12063 - RNA, 89 nt, synthetic construct
  misc_feature 1..89: note = engineered ribonucleic acid scaffold (ERS) sequence
  source 1..89: mol_type = other RNA
acgggcgcttctatctgattactctgagcgccatcaccagcgactatgtcgtagtgggtaaagcgccctcttcggagggagcatcagag

SEQ ID NO: 12064 - RNA, 99 nt, synthetic construct
  misc_feature 1..99: note = engineered ribonucleic acid scaffold (ERS) sequence
  source 1..99: mol_type = other RNA
acgggcgcttctatctgattactctgagcgccatcaccagcgactatgtcgtagtgggtaaagcgccttacggacttcggtccgtaaggagcatcagag

SEQ ID NO: 12065 - RNA, 99 nt, synthetic construct
  misc_feature 1..99: note = engineered ribonucleic acid scaffold (ERS) sequence
  source 1..99: mol_type = other RNA
acgggcgcttctatctgattactctgagcgccatcaccagcgactatgtcgtagtgggtaaagcgcttacggaattcgtgtccgtaagaagcatcagag

SEQ ID NO: 12066 - RNA, 100 nt, synthetic construct
  misc_feature 1..100: note = engineered ribonucleic acid scaffold (ERS) sequence
  source 1..100: mol_type = other RNA
acgggcgcttctatctgattactctgagcgccatcaccagcgactatgtcgtagtgggtaaagcgcttacggacttcgcggtccgtaagaagcatcagag

SEQ ID NO: 12067 - RNA, 98 nt, synthetic construct
  misc_feature 1..98: note = engineered ribonucleic acid scaffold (ERS) sequence
  source 1..98: mol_type = other RNA
acgggcgcttctatctgattactctgagcgccatcaccagcgactatgtcgtagtgggtaaagcgcttacggacttcggtccgtaagaagcatcagag

SEQ ID NO: 12068 - RNA, 98 nt, synthetic construct
  misc_feature 1..98: note = engineered ribonucleic acid scaffold (ERS) sequence
  source 1..98: mol_type = other RNA
acgggcgcttctatctgattactctgagcgccatcaccagcgactatgtcgtagtgggtaaagcgcttacggacttcggtccgtaagtcgcatcagag

SEQ ID NO: 12069 - RNA, 98 nt, synthetic construct
  misc_feature 1..98: note = engineered ribonucleic acid scaffold (ERS) sequence
  source 1..98: mol_type = other RNA
acgggcgcttctatctgattactctgagcgccatcaccagcgactatgtcgtagtgggtaaagcgcttacggagttcgatccgtaagaagcatcagag

SEQ ID NO: 12070 - RNA, 98 nt, synthetic construct
  misc_feature 1..98: note = engineered ribonucleic acid scaffold (ERS) sequence
  source 1..98: mol_type = other RNA
acgggcgcttctatctgattactctgagcgccatcaccagcgactatgtcgtagtgggtaaagcgctttcggacttcggtccggaagaagcatcagag

SEQ ID NO: 12071 - RNA, 102 nt, synthetic construct
  misc_feature 1..102: note = engineered ribonucleic acid scaffold (ERS) sequence
  source 1..102: mol_type = other RNA
acgggcgcttctatctgattactctgagcgccatcaccagcgactatgtcgtagtgggtaaagcggcagatctgagcctccgagctctctgccgcatcagag

SEQ ID NO: 12072 - RNA, 98 nt, synthetic construct
  misc_feature 1..98: note = engineered ribonucleic acid scaffold (ERS) sequence
  source 1..98: mol_type = other RNA
acgggcgcttctatctgattactctgagcgccatcaccagcgactatgtcgtagtgggtaaagcggttacggacttcggtccgtaagacgcatcagag

SEQ ID NO: 12073 - RNA, 75 nt, synthetic construct
  misc_feature 1..75: note = engineered ribonucleic acid scaffold (ERS) sequence
  source 1..75: mol_type = other RNA
acgggcgcttctatctgattactctgagcgccatcaccagcgactatgtcgtagtgggtaaagctagcatcagag

SEQ ID NO: 12074 - RNA, 89 nt, synthetic construct
  misc_feature 1..89: note = engineered ribonucleic acid scaffold (ERS) sequence
  source 1..89: mol_type = other RNA
acgggcgcttctatctgattactctgagcgccatcaccagcgactatgtcgtagtgggtaaagctccctattcggatggagcatcagag

SEQ ID NO: 12075 - RNA, 95 nt, synthetic construct
  misc_feature 1..95: note = engineered ribonucleic acid scaffold (ERS) sequence
  source 1..95: mol_type = other RNA
acgggcgcttctatctgattactctgagcgccatcaccagcgactatgtcgtagtgggtaaagctccctcacagggatgtgagggagcatcagag

SEQ ID NO: 12076 - RNA, 94 nt, synthetic construct
  misc_feature 1..94: note = engineered ribonucleic acid scaffold (ERS) sequence
  source 1..94: mol_type = other RNA
acgggcgcttctatctgattactctgagcgccatcaccagcgactatgtcgtagtgggtaaagctccctcagctgcagtgagggagcatcagag

SEQ ID NO: 12077 - RNA, 89 nt, synthetic construct
  misc_feature 1..89: note = engineered ribonucleic acid scaffold (ERS) sequence
  source 1..89: mol_type = other RNA
acgggcgcttctatctgattactctgagcgccatcaccagcgactatgtcgtagtgggtaaagctccctcataggagggagcatcagag

SEQ ID NO: 12078 - RNA, 90 nt, synthetic construct
  misc_feature 1..90: note = engineered ribonucleic acid scaffold (ERS) sequence
  source 1..90: mol_type = other RNA
acgggcgcttctatctgattactctgagcgccatcaccagcgactatgtcgtagtgggtaaagctccctcttcaggagggagcatcagag

SEQ ID NO: 12079 - RNA, 89 nt, synthetic construct
  misc_feature 1..89: note = engineered ribonucleic acid scaffold (ERS) sequence
  source 1..89: mol_type = other RNA
acgggcgcttctatctgattactctgagcgccatcaccagcgactatgtcgtagtgggtaaagctccctcttcggagagtgcatcagag

SEQ ID NO: 12080 - RNA, 89 nt, synthetic construct
  misc_feature 1..89: note = engineered ribonucleic acid scaffold (ERS) sequence
  source 1..89: mol_type = other RNA
acgggcgcttctatctgattactctgagcgccatcaccagcgactatgtcgtagtgggtaaagctccctcttcggaggaggcatcagag

SEQ ID NO: 12081 - RNA, 91 nt, synthetic construct
  misc_feature 1..91: note = engineered ribonucleic acid scaffold (ERS) sequence
  source 1..91: mol_type = other RNA
acgggcgcttctatctgattactctgagcgccatcaccagcgactatgtcgtagtgggtaaagctccctcttcggagggaacgcatcagag

SEQ ID NO: 12082 - RNA, 89 nt, synthetic construct; identical to SEQ ID NO: 752
  misc_feature 1..89: note = engineered ribonucleic acid scaffold (ERS) sequence
  source 1..89: mol_type = other RNA

SEQ ID NO: 12083 - RNA, 89 nt, synthetic construct
  misc_feature 1..89: note = engineered ribonucleic acid scaffold (ERS) sequence
  source 1..89: mol_type = other RNA
acgggcgcttctatctgattactctgagcgccatcaccagcgactatgtcgtagtgggtaaagctccctggaaacagggagcatcagag

SEQ ID NO: 12084 - RNA, 85 nt, synthetic construct
  misc_feature 1..85: note = engineered ribonucleic acid scaffold (ERS) sequence
  source 1..85: mol_type = other RNA
acgggcgcttctatctgattactctgagcgccatcaccagcgactatgtcgtagtgggtaaagctcccttcggggagcatcagag

SEQ ID NO: 12085 - RNA, 85 nt, synthetic construct
  misc_feature 1..85: note = engineered ribonucleic acid scaffold (ERS) sequence
  source 1..85: mol_type = other RNA
acgggcgcttctatctgattactctgagcgccatcaccagcgactatgtcgtagtgggtaaagctccgttcgcggagcatcagag

SEQ ID NO: 12086 - RNA, 87 nt, synthetic construct
  misc_feature 1..87: note = engineered ribonucleic acid scaffold (ERS) sequence
  source 1..87: mol_type = other RNA
acgggcgcttctatctgattactctgagcgccatcaccagcgactatgtcgtagtgggtaaagctcctcttcggaggagcatcagag

SEQ ID NO: 12087 - RNA, 85 nt, synthetic construct
  misc_feature 1..85: note = engineered ribonucleic acid scaffold (ERS) sequence
  source 1..85: mol_type = other RNA
acgggcgcttctatctgattactctgagcgccatcaccagcgactatgtcgtagtgggtaaagctctcttcggagagcatcagag

SEQ ID NO: 12088 - RNA, 77 nt, synthetic construct
  misc_feature 1..77: note = engineered ribonucleic acid scaffold (ERS) sequence
  source 1..77: mol_type = other RNA
acgggcgcttctatctgattactctgagcgccatcaccagcgactatgtcgtagtgggtaaagctgcagcatcagag

SEQ ID NO: 12089 - RNA, 83 nt, synthetic construct
  misc_feature 1..83: note = engineered ribonucleic acid scaffold (ERS) sequence
  source 1..83: mol_type = other RNA
acgggcgcttctatctgattactctgagcgccatcaccagcgactatgtcgtagtgggtaaagctgcttcggcagcatcagag

SEQ ID NO: 12090 - RNA, 89 nt, synthetic construct
  misc_feature 1..89: note = engineered ribonucleic acid scaffold (ERS) sequence
  source 1..89: mol_type = other RNA
acgggcgcttctatctgattactctgagcgccatcaccagcgactatgtcgtagtgggtaaaggtccctcttcggagggaacatcagag

SEQ ID NO: 12091 - RNA, 93 nt, synthetic construct
  misc_feature 1..93: note = engineered ribonucleic acid scaffold (ERS) sequence
  source 1..93: mol_type = other RNA
acgggcgcttctatctgattactctgagcgccatcaccagcgactatgtcgtagtgggtaaaggtgacggtcttcggaccgtcaccatcagag

SEQ ID NO: 12092 - RNA, 91 nt, synthetic construct
  misc_feature 1..91: note = engineered ribonucleic acid scaffold (ERS) sequence
  source 1..91: mol_type = other RNA
acgggcgcttctatctgattactctgagcgccatcaccagcgactatgtcgtagtgggtaaagtctccctcttcggagggaggcatcagag

SEQ ID NO: 12093 - RNA, 93 nt, synthetic construct
  misc_feature 1..93: note = engineered ribonucleic acid scaffold (ERS) sequence
  source 1..93: mol_type = other RNA
acgggcgcttctatctgattactctgagcgccatcaccagcgactatgtcgtagtgggtaaagtgcgcccgcttcggcgggcgcacatcagag

SEQ ID NO: 12094 - RNA, 93 nt, synthetic construct
  misc_feature 1..93: note = engineered ribonucleic acid scaffold (ERS) sequence
  source 1..93: mol_type = other RNA
acgggcgcttctatctgattactctgagcgccatcaccagcgactatgtcgtagtgggtaaataatgaaaacttcggttttcattaatcagag

SEQ ID NO: 12095 - RNA, 93 nt, synthetic construct
  misc_feature 1..93: note = engineered ribonucleic acid scaffold (ERS) sequence
  source 1..93: mol_type = other RNA
acgggcgcttctatctgattactctgagcgccatcaccagcgactatgtcgtagtgggtaaatcgtaagaacttcggttcttacgaatcagag

SEQ ID NO: 12096 - RNA, 93 nt, synthetic construct
  misc_feature 1..93: note = engineered ribonucleic acid scaffold (ERS) sequence
  source 1..93: mol_type = other RNA
acgggcgcttctatctgattactctgagcgccatcaccagcgactatgtcgtagtgggtaaatggaagatgcttcggcatcttccaatcagag

SEQ ID NO: 12097 - RNA, 97 nt, synthetic construct
  misc_feature 1..97: note = engineered ribonucleic acid scaffold (ERS) sequence
  source 1..97: mol_type = other RNA
acgggcgcttctatctgattactctgagcgccatcaccagcgactatgtcgtagtgggtaaagcccttacggacttcggtccgtaagggcatcagag

SEQ ID NO: 12098 - RNA, 99 nt, synthetic construct
  misc_feature 1..99: note = engineered ribonucleic acid scaffold (ERS) sequence
  source 1..99: mol_type = other RNA
acgggcgcttctatctgattactctgagcgccatcaccagcgactatgtcgtagtgggtaaagcctcttacggacttcggtccgtaagaggcatcagag

SEQ ID NO: 12099 - RNA, 99 nt, synthetic construct
  misc_feature 1..99: note = engineered ribonucleic acid scaffold (ERS) sequence
  source 1..99: mol_type = other RNA
acgggcgcttctatctgattactctgagcgccatcaccagcgactatgtcgtagtgggtaaagccgcttagggacttcggtccctaagaggcatcagag

SEQ ID NO: 12100 - RNA, 88 nt, synthetic construct
  misc_feature 1..88: note = engineered ribonucleic acid scaffold (ERS) sequence
  source 1..88: mol_type = other RNA
actaggcgcttctatctgattactctgagcgccatcaccagcgactatgtcgtagtgggtaaactccctcttcggagggagatcagag

SEQ ID NO: 12101 - RNA, 90 nt, synthetic construct
  misc_feature 1..90: note = engineered ribonucleic acid scaffold (ERS) sequence
  source 1..90: mol_type = other RNA
actaggcgcttctatctgattactctgagcgccatcaccagcgactatgtcgtagtgggtaaagcgccctcttcggagggagcatcagag

SEQ ID NO: 12102 - RNA, 100 nt, synthetic construct
  misc_feature 1..100: note = engineered ribonucleic acid scaffold (ERS) sequence
  source 1..100: mol_type = other RNA
actaggcgcttctatctgattactctgagcgccatcaccagcgactatgtcgtagtgggtaaagcgccttacggacttcggtccgtaaggagcatcagag

SEQ ID NO: 12103 - RNA, 100 nt, synthetic construct
  misc_feature 1..100: note = engineered ribonucleic acid scaffold (ERS) sequence
  source 1..100: mol_type = other RNA
actaggcgcttctatctgattactctgagcgccatcaccagcgactatgtcgtagtgggtaaagcgcttacggaattcgtgtccgtaagaagcatcagag

SEQ ID NO: 12104 - RNA, 101 nt, synthetic construct
  misc_feature 1..101: note = engineered ribonucleic acid scaffold (ERS) sequence
  source 1..101: mol_type = other RNA
actaggcgcttctatctgattactctgagcgccatcaccagcgactatgtcgtagtgggtaaagcgcttacggacttcgcggtccgtaagaagcatcagag

SEQ ID NO: 12105 - RNA, 99 nt, synthetic construct
  misc_feature 1..99: note = engineered ribonucleic acid scaffold (ERS) sequence
  source 1..99: mol_type = other RNA
actaggcgcttctatctgattactctgagcgccatcaccagcgactatgtcgtagtgggtaaagcgcttacggacttcggtccgtaagaagcatcagag

SEQ ID NO: 12106 - RNA, 99 nt, synthetic construct
  misc_feature 1..99: note = engineered ribonucleic acid scaffold (ERS) sequence
  source 1..99: mol_type = other RNA
actaggcgcttctatctgattactctgagcgccatcaccagcgactatgtcgtagtgggtaaagcgcttacggacttcggtccgtaagtcgcatcagag

SEQ ID NO: 12107 - RNA, 99 nt, synthetic construct
  misc_feature 1..99: note = engineered ribonucleic acid scaffold (ERS) sequence
  source 1..99: mol_type = other RNA
actaggcgcttctatctgattactctgagcgccatcaccagcgactatgtcgtagtgggtaaagcgcttacggagttcgatccgtaagaagcatcagag

SEQ ID NO: 12108 - RNA, 99 nt, synthetic construct
  misc_feature 1..99: note = engineered ribonucleic acid scaffold (ERS) sequence
  source 1..99: mol_type = other RNA
actaggcgcttctatctgattactctgagcgccatcaccagcgactatgtcgtagtgggtaaagcgctttcggacttcggtccggaagaagcatcagag

SEQ ID NO: 12109 - RNA, 103 nt, synthetic construct
  misc_feature 1..103: note = engineered ribonucleic acid scaffold (ERS) sequence
  source 1..103: mol_type = other RNA
actaggcgcttctatctgattactctgagcgccatcaccagcgactatgtcgtagtgggtaaagcggcagatctgagcctccgagctctctgccgcatcagag

SEQ ID NO: 12110 - RNA, 99 nt, synthetic construct
  misc_feature 1..99: note = engineered ribonucleic acid scaffold (ERS) sequence
  source 1..99: mol_type = other RNA
actaggcgcttctatctgattactctgagcgccatcaccagcgactatgtcgtagtgggtaaagcggttacggacttcggtccgtaagacgcatcagag

SEQ ID NO: 12111 - RNA, 76 nt, synthetic construct
  misc_feature 1..76: note = engineered ribonucleic acid scaffold (ERS) sequence
  source 1..76: mol_type = other RNA
actaggcgcttctatctgattactctgagcgccatcaccagcgactatgtcgtagtgggtaaagctagcatcagag

SEQ ID NO: 12112 - RNA, 90 nt, synthetic construct
  misc_feature 1..90: note = engineered ribonucleic acid scaffold (ERS) sequence
  source 1..90: mol_type = other RNA
actaggcgcttctatctgattactctgagcgccatcaccagcgactatgtcgtagtgggtaaagctccctattcggatggagcatcagag

SEQ ID NO: 12113 - RNA, 96 nt, synthetic construct
  misc_feature 1..96: note = engineered ribonucleic acid scaffold (ERS) sequence
  source 1..96: mol_type = other RNA
actaggcgcttctatctgattactctgagcgccatcaccagcgactatgtcgtagtgggtaaagctccctcacagggatgtgagggagcatcagag

SEQ ID NO: 12114 - RNA, 95 nt, synthetic construct
  misc_feature 1..95: note = engineered ribonucleic acid scaffold (ERS) sequence
  source 1..95: mol_type = other RNA
actaggcgcttctatctgattactctgagcgccatcaccagcgactatgtcgtagtgggtaaagctccctcagctgcagtgagggagcatcagag

SEQ ID NO: 12115 - RNA, 90 nt, synthetic construct
  misc_feature 1..90: note = engineered ribonucleic acid scaffold (ERS) sequence
  source 1..90: mol_type = other RNA
actaggcgcttctatctgattactctgagcgccatcaccagcgactatgtcgtagtgggtaaagctccctcataggagggagcatcagag

SEQ ID NO: 12116 - RNA, 91 nt, synthetic construct
  misc_feature 1..91: note = engineered ribonucleic acid scaffold (ERS) sequence
  source 1..91: mol_type = other RNA
actaggcgcttctatctgattactctgagcgccatcaccagcgactatgtcgtagtgggtaaagctccctcttcaggagggagcatcagag

SEQ ID NO: 12117 - RNA, 90 nt, synthetic construct
  misc_feature 1..90: note = engineered ribonucleic acid scaffold (ERS) sequence
  source 1..90: mol_type = other RNA
actaggcgcttctatctgattactctgagcgccatcaccagcgactatgtcgtagtgggtaaagctccctcttcggagagtgcatcagag

SEQ ID NO: 12118 - RNA, 90 nt, synthetic construct
  misc_feature 1..90: note = engineered ribonucleic acid scaffold (ERS) sequence
  source 1..90: mol_type = other RNA
actaggcgcttctatctgattactctgagcgccatcaccagcgactatgtcgtagtgggtaaagctccctcttcggaggaggcatcagag

SEQ ID NO: 12119 - RNA, 92 nt, synthetic construct
  misc_feature 1..92: note = engineered ribonucleic acid scaffold (ERS) sequence
  source 1..92: mol_type = other RNA
actaggcgcttctatctgattactctgagcgccatcaccagcgactatgtcgtagtgggtaaagctccctcttcggagggaacgcatcagag

SEQ ID NO: 12120 - RNA, 90 nt, synthetic construct; identical to SEQ ID NO: 744
  misc_feature 1..90: note = engineered ribonucleic acid scaffold (ERS) sequence
  source 1..90: mol_type = other RNA

SEQ ID NO: 12121 - RNA, 90 nt, synthetic construct
  misc_feature 1..90: note = engineered ribonucleic acid scaffold (ERS) sequence
  source 1..90: mol_type = other RNA
actaggcgcttctatctgattactctgagcgccatcaccagcgactatgtcgtagtgggtaaagctccctggaaacagggagcatcagag

SEQ ID NO: 12122 - RNA, 86 nt, synthetic construct
  misc_feature 1..86: note = engineered ribonucleic acid scaffold (ERS) sequence
  source 1..86: mol_type = other RNA
actaggcgcttctatctgattactctgagcgccatcaccagcgactatgtcgtagtgggtaaagctcccttcggggagcatcagag

SEQ ID NO: 12123 - RNA, 86 nt, synthetic construct
  misc_feature 1..86: note = engineered ribonucleic acid scaffold (ERS) sequence
  source 1..86: mol_type = other RNA
actaggcgcttctatctgattactctgagcgccatcaccagcgactatgtcgtagtgggtaaagctccgttcgcggagcatcagag

SEQ ID NO: 12124 - RNA, 88 nt, synthetic construct
  misc_feature 1..88: note = engineered ribonucleic acid scaffold (ERS) sequence
  source 1..88: mol_type = other RNA
actaggcgcttctatctgattactctgagcgccatcaccagcgactatgtcgtagtgggtaaagctcctcttcggaggagcatcagag

SEQ ID NO: 12125 - RNA, 86 nt, synthetic construct
  misc_feature 1..86: note = engineered ribonucleic acid scaffold (ERS) sequence
  source 1..86: mol_type = other RNA
actaggcgcttctatctgattactctgagcgccatcaccagcgactatgtcgtagtgggtaaagctctcttcggagagcatcagag

SEQ ID NO: 12126 - RNA, 78 nt, synthetic construct
  misc_feature 1..78: note = engineered ribonucleic acid scaffold (ERS) sequence
  source 1..78: mol_type = other RNA
actaggcgcttctatctgattactctgagcgccatcaccagcgactatgtcgtagtgggtaaagctgcagcatcagag

SEQ ID NO: 12127 - RNA, 84 nt, synthetic construct
  misc_feature 1..84: note = engineered ribonucleic acid scaffold (ERS) sequence
  source 1..84: mol_type = other RNA
actaggcgcttctatctgattactctgagcgccatcaccagcgactatgtcgtagtgggtaaagctgcttcggcagcatcagag

SEQ ID NO: 12128 - RNA, 90 nt, synthetic construct
  misc_feature 1..90: note = engineered ribonucleic acid scaffold (ERS) sequence
  source 1..90: mol_type = other RNA
actaggcgcttctatctgattactctgagcgccatcaccagcgactatgtcgtagtgggtaaaggtccctcttcggagggaacatcagag

SEQ ID NO: 12129 - RNA, 94 nt, synthetic construct
  misc_feature 1..94: note = engineered ribonucleic acid scaffold (ERS) sequence
  source 1..94: mol_type = other RNA
actaggcgcttctatctgattactctgagcgccatcaccagcgactatgtcgtagtgggtaaaggtgacggtcttcggaccgtcaccatcagag

SEQ ID NO: 12130 - RNA, 92 nt, synthetic construct
  misc_feature 1..92: note = engineered ribonucleic acid scaffold (ERS) sequence
  source 1..92: mol_type = other RNA
actaggcgcttctatctgattactctgagcgccatcaccagcgactatgtcgtagtgggtaaagtctccctcttcggagggaggcatcagag

SEQ ID NO: 12131 - RNA, 94 nt, synthetic construct
  misc_feature 1..94: note = engineered ribonucleic acid scaffold (ERS) sequence
  source 1..94: mol_type = other RNA
actaggcgcttctatctgattactctgagcgccatcaccagcgactatgtcgtagtgggtaaagtgcgcccgcttcggcgggcgcacatcagag

SEQ ID NO: 12132 - RNA, 94 nt, synthetic construct
  misc_feature 1..94: note = engineered ribonucleic acid scaffold (ERS) sequence
  source 1..94: mol_type = other RNA
actaggcgcttctatctgattactctgagcgccatcaccagcgactatgtcgtagtgggtaaataatgaaaacttcggttttcattaatcagag

SEQ ID NO: 12133 - RNA, 94 nt, synthetic construct
  misc_feature 1..94: note = engineered ribonucleic acid scaffold (ERS) sequence
  source 1..94: mol_type = other RNA
actaggcgcttctatctgattactctgagcgccatcaccagcgactatgtcgtagtgggtaaatcgtaagaacttcggttcttacgaatcagag

SEQ ID NO: 12134 - RNA, 94 nt, synthetic construct
  misc_feature 1..94: note = engineered ribonucleic acid scaffold (ERS) sequence
  source 1..94: mol_type = other RNA
actaggcgcttctatctgattactctgagcgccatcaccagcgactatgtcgtagtgggtaaatggaagatgcttcggcatcttccaatcagag

SEQ ID NO: 12135 - RNA, 98 nt, synthetic construct
  misc_feature 1..98: note = engineered ribonucleic acid scaffold (ERS) sequence
  source 1..98: mol_type = other RNA
actaggcgcttctatctgattactctgagcgccatcaccagcgactatgtcgtagtgggtaaagcccttacggacttcggtccgtaagggcatcagag

SEQ ID NO: 12136 - RNA, 100 nt, synthetic construct
  misc_feature 1..100: note = engineered ribonucleic acid scaffold (ERS) sequence
  source 1..100: mol_type = other RNA
actaggcgcttctatctgattactctgagcgccatcaccagcgactatgtcgtagtgggtaaagcctcttacggacttcggtccgtaagaggcatcagag

SEQ ID NO: 12137 - RNA, 100 nt, synthetic construct
  misc_feature 1..100: note = engineered ribonucleic acid scaffold (ERS) sequence
  source 1..100: mol_type = other RNA
actaggcgcttctatctgattactctgagcgccatcaccagcgactatgtcgtagtgggtaaagccgcttagggacttcggtccctaagaggcatcagag

SEQ ID NO: 12138 - RNA, 89 nt, synthetic construct
  misc_feature 1..89: note = engineered ribonucleic acid scaffold (ERS) sequence
  source 1..89: mol_type = other RNA
aacacacggttctatctgattactctgccgtgttcaccagcgactatgtcgtagtgggtaaagctccctcttcggagggagcatcagag

SEQ ID NO: 12139 - RNA, 89 nt, synthetic construct
  misc_feature 1..89: note = engineered ribonucleic acid scaffold (ERS) sequence
  source 1..89: mol_type = other RNA
aacactggtttctatctgattactctgaccagttcaccagcgactatgtcgtagtgggtaaagctccctcttcggagggagcatcagag

SEQ ID NO: 12140 - RNA, 89 nt, synthetic construct
  misc_feature 1..89: note = engineered ribonucleic acid scaffold (ERS) sequence
  source 1..89: mol_type = other RNA
aacaggccgttctatctgattactctgcggccttcaccagcgactatgtcgtagtgggtaaagctccctcttcggagggagcatcagag

SEQ ID NO: 12141 - RNA, 89 nt, synthetic construct
  misc_feature 1..89: note = engineered ribonucleic acid scaffold (ERS) sequence
  source 1..89: mol_type = other RNA
aacaggtccttctatctgattactctgggaccttcaccagcgactatgtcgtagtgggtaaagctccctcttcggagggagcatcagag

SEQ ID NO: 12142 - RNA, 89 nt, synthetic construct
  misc_feature 1..89: note = engineered ribonucleic acid scaffold (ERS) sequence
  source 1..89: mol_type = other RNA
aaccagcaattctatctgattactctgttgctgtcaccagcgactatgtcgtagtgggtaaagctccctcttcggagggagcatcagag

SEQ ID NO: 12143 - RNA, 89 nt, synthetic construct
  misc_feature 1..89: note = engineered ribonucleic acid scaffold (ERS) sequence
  source 1..89: mol_type = other RNA
aaccgagacttctatctgattactctgggctcgtcaccagcgactatgtcgtagtgggtaaagctccctcttcggagggagcatcagag

SEQ ID NO: 12144 - RNA, 89 nt, synthetic construct
  misc_feature 1..89: note = engineered ribonucleic acid scaffold (ERS) sequence
  source 1..89: mol_type = other RNA
aacctgtagttctatctgattactctgctacagtcaccagcgactatgtcgtagtgggtaaagctccctcttcggagggagcatcagag

SEQ ID NO: 12145 - RNA, 89 nt, synthetic construct
  misc_feature 1..89: note = engineered ribonucleic acid scaffold (ERS) sequence
  source 1..89: mol_type = other RNA
aacgagcacttctatctgattactctggggctctcaccagcgactatgtcgtagtgggtaaagctccctcttcggagggagcatcagag

SEQ ID NO: 12146 - RNA, 89 nt, synthetic construct
  misc_feature 1..89: note = engineered ribonucleic acid scaffold (ERS) sequence
  source 1..89: mol_type = other RNA
aacgaggtgttctatctgattactctgcacctctcaccagcgactatgtcgtagtgggtaaagctccctcttcggagggagcatcagag

SEQ ID NO: 12147 - RNA, 89 nt, synthetic construct
  misc_feature 1..89: note = engineered ribonucleic acid scaffold (ERS) sequence
  source 1..89: mol_type = other RNA
aacgggactttctatctgattactctgagtccctcaccagcgactatgtcgtagtgggtaaagctccctcttcggagggagcatcagag

SEQ ID NO: 12148 - RNA, 89 nt, synthetic construct
  misc_feature 1..89: note = engineered ribonucleic acid scaffold (ERS) sequence
  source 1..89: mol_type = other RNA
aacgggcaattctatctgattactctgttgccctcaccagcgactatgtcgtagtgggtaaagctccctcttcggagggagcatcagag

SEQ ID NO: 12149 - RNA, 89 nt, synthetic construct
  misc_feature 1..89: note = engineered ribonucleic acid scaffold (ERS) sequence
  source 1..89: mol_type = other RNA
aactgtgcgttctatctgattactctgcgcacatcaccagcgactatgtcgtagtgggtaaagctccctcttcggagggagcatcagag

SEQ ID NO: 12150 - RNA, 90 nt, synthetic construct
  misc_feature 1..90: note = engineered ribonucleic acid scaffold (ERS) sequence
  source 1..90: mol_type = other RNA
aactggcgcttctatctgattactctgggcgccatcaccagcgactatgtcgtagtgggtaaagctccctcttcggagggagcatcagag

SEQ ID NO: 12151 - RNA, 90 nt, synthetic construct
  misc_feature 1..90: note = engineered ribonucleic acid scaffold (ERS) sequence
  source 1..90: mol_type = other RNA
aactggcgcttctatctgattactctgggagccatcaccagcgactatgtcgtagtgggtaaagctccctcttcggagggagcatcagag

SEQ ID NO: 12152 - RNA, 90 nt, synthetic construct
  misc_feature 1..90: note = engineered ribonucleic acid scaffold (ERS) sequence
  source 1..90: mol_type = other RNA
aactggcgcttctatctgattactctgtgagccatcaccagcgactatgtcgtagtgggtaaagctccctcttcggagggagcatcagag

SEQ ID NO: 12153 - RNA, 91 nt, synthetic construct
  misc_feature 1..91: note = engineered ribonucleic acid scaffold (ERS) sequence
  source 1..91: mol_type = other RNA
aactggcgcttctatctgattactctgaggagccatcaccagcgactatgtcgtagtgggtaaagctccctcttcggagggagcatcagag

SEQ ID NO: 12154 - RNA, 90 nt, synthetic construct
  misc_feature 1..90: note = engineered ribonucleic acid scaffold (ERS) sequence
  source 1..90: mol_type = other RNA
aactggcgcttctatctgattactctgatagccatcaccagcgactatgtcgtagtgggtaaagctccctcttcggagggagcatcagag

SEQ ID NO: 12155 - RNA, 91 nt, synthetic construct
  misc_feature 1..91: note = engineered ribonucleic acid scaffold (ERS) sequence
  source 1..91: mol_type = other RNA
aactggcgcttctatctgattactctgagctgccatcaccagcgactatgtcgtagtgggtaaagctccctcttcggagggagcatcagag

SEQ ID NO: 12156 - RNA, 91 nt, synthetic construct
  misc_feature 1..91: note = engineered ribonucleic acid scaffold (ERS) sequence
  source 1..91: mol_type = other RNA
aactggcgcttctatctgattactctgagtagccatcaccagcgactatgtcgtagtgggtaaagctccctcttcggagggagcatcagag

SEQ ID NO: 12157 - RNA, 91 nt, synthetic construct
  misc_feature 1..91: note = engineered ribonucleic acid scaffold (ERS) sequence
  source 1..91: mol_type = other RNA
aactggcacttctatctgattactctgagtagccatcaccagcgactatgtcgtagtgggtaaagctccctcttcggagggagcatcagag

SEQ ID NO: 12158 - RNA, 90 nt, synthetic construct
  misc_feature 1..90: note = engineered ribonucleic acid scaffold (ERS) sequence
  source 1..90: mol_type = other RNA
aactggcgcttctatctgattactctgagcaccatcaccagcgactatgtcgtagtgggtaaagctccctcttcggagggagcatcagag

SEQ ID NO: 12159 - RNA, 90 nt, synthetic construct
  misc_feature 1..90: note = engineered ribonucleic acid scaffold (ERS) sequence
  source 1..90: mol_type = other RNA
aactggcacttctatctgattactctgagcgccatcaccagcgactatgtcgtagtgggtaaagctccctcttcggagggagcatcagag

SEQ ID NO: 12160 - RNA, 90 nt, synthetic construct
  misc_feature 1..90: note = engineered ribonucleic acid scaffold (ERS) sequence
  source 1..90: mol_type = other RNA
aactggcgcttctatctgattactctgagggccatcaccagcgactatgtcgtagtgggtaaagctccctcttcggagggagcatcagag

SEQ ID NO: 12161 - RNA, 90 nt, synthetic construct
  misc_feature 1..90: note = engineered ribonucleic acid scaffold (ERS) sequence
  source 1..90: mol_type = other RNA
aactggcgcttctatctgattactctgagtgccgtcaccagcgactatgtcgtagtgggtaaagctccctcttcggagggagcatcagag

SEQ ID NO: 12162 - RNA, 90 nt, synthetic construct
  misc_feature 1..90: note = engineered ribonucleic acid scaffold (ERS) sequence
  source 1..90: mol_type = other RNA
aactggcacttctatctgattactctgagtgccatcaccagcgactatgtcgtagtgggtaaagctccctcttcggagggagcatcagag

SEQ ID NO: 12163 - RNA, 90 nt, synthetic construct
  misc_feature 1..90: note = engineered ribonucleic acid scaffold (ERS) sequence
  source 1..90: mol_type = other RNA
aactggcgcttctatctgattactctgagaaccatcaccagcgactatgtcgtagtgggtaaagctccctcttcggagggagcatcagag

SEQ ID NO: 12164 - RNA, 90 nt, synthetic construct
  misc_feature 1..90: note = engineered ribonucleic acid scaffold (ERS) sequence
  source 1..90: mol_type = other RNA
aactggcgcttctatctgattactctgagagccgtcaccagcgactatgtcgtagtgggtaaagctccctcttcggagggagcatcagag

SEQ ID NO: 12165 - RNA, 90 nt, synthetic construct
  misc_feature 1..90: note = engineered ribonucleic acid scaffold (ERS) sequence
  source 1..90: mol_type = other RNA
aactggcgcttctatctgattactctgagagccttcaccagcgactatgtcgtagtgggtaaagctccctcttcggagggagcatcagag

SEQ ID NO: 12166 - RNA, 90 nt, synthetic construct
  misc_feature 1..90: note = engineered ribonucleic acid scaffold (ERS) sequence
  source 1..90: mol_type = other RNA
aactggggcttctatctgattactctgagacccatcaccagcgactatgtcgtagtgggtaaagctccctcttcggagggagcatcagag

SEQ ID NO: 12167 - RNA, 90 nt, synthetic construct
  misc_feature 1..90: note = engineered ribonucleic acid scaffold (ERS) sequence
  source 1..90: mol_type = other RNA
aactggtgcttctatctgattactctgagagccatcaccagcgactatgtcgtagtgggtaaagctccctcttcggagggagcatcagag

SEQ ID NO: 12168 - RNA, 90 nt, synthetic construct
  misc_feature 1..90: note = engineered ribonucleic acid scaffold (ERS) sequence
  source 1..90: mol_type = other RNA
aactgggccttctatctgattactctgaggcccatcaccagcgactatgtcgtagtgggtaaagctccctcttcggagggagcatcagag

SEQ ID NO: 12169 - RNA, 91 nt, synthetic construct
  misc_feature 1..91: note = engineered ribonucleic acid scaffold (ERS) sequence
  source 1..91: mol_type = other RNA
aactggcccttctatctgattactctgaggagccatcaccagcgactatgtcgtagtgggtaaagctccctcttcggagggagcatcagag

SEQ ID NO: 12170 - RNA, 90 nt, synthetic construct
  misc_feature 1..90: note = engineered ribonucleic acid scaffold (ERS) sequence
  source 1..90: mol_type = other RNA
aactggcccttctatctgattactctgagggccatcaccagcgactatgtcgtagtgggtaaagctccctcttcggagggagcatcagag

SEQ ID NO: 12171 - RNA, 90 nt, synthetic construct
  misc_feature 1..90: note = engineered ribonucleic acid scaffold (ERS) sequence
  source 1..90: mol_type = other RNA
aactggcccttctatctgattactctgagtgccatcaccagcgactatgtcgtagtgggtaaagctccctcttcggagggagcatcagag

SEQ ID NO: 12172 - RNA, 90 nt, synthetic construct
  misc_feature 1..90: note = engineered ribonucleic acid scaffold (ERS) sequence
  source 1..90: mol_type = other RNA
aactggcccttctatctgattactctgagagccatcaccagcgactatgtcgtagtgggtaaagctccctcttcggagggagcatcagag

SEQ ID NO: 12173 - RNA, 91 nt, synthetic construct
  misc_feature 1..91: note = engineered ribonucleic acid scaffold (ERS) sequence
  source 1..91: mol_type = other RNA
aactggcgcttctatctgattactctgagcagccatcaccagcgactatgtcgtagtgggtaaagctccctcttcggagggagcatcagag

SEQ ID NO: 12174 - RNA, 90 nt, synthetic construct
  misc_feature 1..90: note = engineered ribonucleic acid scaffold (ERS) sequence
  source 1..90: mol_type = other RNA
aactggcgcttctatctgattactctgagtgccatcaccagcgactatgtcgtagtgggtaaagctccctcttcggagggagcatcagag

SEQ ID NO: 12175 - RNA, 90 nt, synthetic construct
  misc_feature 1..90: note = engineered ribonucleic acid scaffold (ERS) sequence
  source 1..90: mol_type = other RNA
aactggcgcttctatctgattactctgagagccatcaccagcgactatgtcgtagtgggtaaagctccctcttcggagggagcatcagag

SEQ ID NO: 12176 - RNA, 90 nt, synthetic construct
  misc_feature 1..90: note = engineered ribonucleic acid scaffold (ERS) sequence
  source 1..90: mol_type = other RNA
aactggctcttctatctgattactctgagcgccatcaccagcgactatgtcgtagtgggtaaagctccctcttcggagggagcatcagag

SEQ ID NO: 12177 - RNA, 90 nt, synthetic construct
  misc_feature 1..90: note = engineered ribonucleic acid scaffold (ERS) sequence
  source 1..90: mol_type = other RNA
aactggctcttctatctgattactctgagggccatcaccagcgactatgtcgtagtgggtaaagctccctcttcggagggagcatcagag

SEQ ID NO: 12178 - RNA, 90 nt, synthetic construct
  misc_feature 1..90: note = engineered ribonucleic acid scaffold (ERS) sequence
  source 1..90: mol_type = other RNA
aactggctcttctatctgattactctgagtgccatcaccagcgactatgtcgtagtgggtaaagctccctcttcggagggagcatcagag

SEQ ID NO: 12179 - RNA, 90 nt, synthetic construct
  misc_feature 1..90: note = engineered ribonucleic acid scaffold (ERS) sequence
  source 1..90: mol_type = other RNA
aactggctcttctatctgattactctgagagccatcaccagcgactatgtcgtagtgggtaaagctccctcttcggagggagcatcagag

SEQ ID NO: 12180 - RNA, 90 nt, synthetic construct
  misc_feature 1..90: note = engineered ribonucleic acid scaffold (ERS) sequence
  source 1..90: mol_type = other RNA
aactggcggttctatctgattactctgagcgccatcaccagcgactatgtcgtagtgggtaaagctccctcttcggagggagcatcagag

SEQ ID NO: 12181 - RNA, 90 nt, synthetic construct
  misc_feature 1..90: note = engineered ribonucleic acid scaffold (ERS) sequence
  source 1..90: mol_type = other RNA
aactggcggttctatctgattactctgagagccatcaccagcgactatgtcgtagtgggtaaagctccctcttcggagggagcatcagag

SEQ ID NO: 12182 - RNA, 88 nt, synthetic construct
  misc_feature 1..88: note = engineered ribonucleic acid scaffold (ERS) sequence
  source 1..88: mol_type = other RNA
gacacggttctatctgattactctgccgtgtctcaccagcgactatgtcgtagtgggtaaagctccctcttcggagggagcatcagag

SEQ ID NO: 12183 - RNA, 88 nt, synthetic construct
  misc_feature 1..88: note = engineered ribonucleic acid scaffold (ERS) sequence
  source 1..88: mol_type = other RNA
gactggtttctatctgattactctgaccagtctcaccagcgactatgtcgtagtgggtaaagctccctcttcggagggagcatcagag

SEQ ID NO: 12184 - RNA, 88 nt, synthetic construct
  misc_feature 1..88: note = engineered ribonucleic acid scaffold (ERS) sequence
  source 1..88: mol_type = other RNA
gaggccgttctatctgattactctgcggcctctcaccagcgactatgtcgtagtgggtaaagctccctcttcggagggagcatcagag

SEQ ID NO: 12185 - RNA, 88 nt, synthetic construct
  misc_feature 1..88: note = engineered ribonucleic acid scaffold (ERS) sequence
  source 1..88: mol_type = other RNA
gaggtccttctatctgattactctgggacctctcaccagcgactatgtcgtagtgggtaaagctccctcttcggagggagcatcagag

SEQ ID NO: 12186 - RNA, 88 nt, synthetic construct
  misc_feature 1..88: note = engineered ribonucleic acid scaffold (ERS) sequence
  source 1..88: mol_type = other RNA
gcagcaattctatctgattactctgttgctgctcaccagcgactatgtcgtagtgggtaaagctccctcttcggagggagcatcagag

SEQ ID NO: 12187 - RNA, 88 nt, synthetic construct
  misc_feature 1..88: note = engineered ribonucleic acid scaffold (ERS) sequence
  source 1..88: mol_type = other RNA
gcgagacttctatctgattactctgggctcgctcaccagcgactatgtcgtagtgggtaaagctccctcttcggagggagcatcagag

SEQ ID NO: 12188 - RNA, 88 nt, synthetic construct
  misc_feature 1..88: note = engineered ribonucleic acid scaffold (ERS) sequence
  source 1..88: mol_type = other RNA
gctgtagttctatctgattactctgctacagctcaccagcgactatgtcgtagtgggtaaagctccctcttcggagggagcatcagag

SEQ ID NO: 12189 - RNA, 88 nt, synthetic construct
  misc_feature 1..88: note = engineered ribonucleic acid scaffold (ERS) sequence
  source 1..88: mol_type = other RNA
ggagcacttctatctgattactctggggctcctcaccagcgactatgtcgtagtgggtaaagctccctcttcggagggagcatcagag

SEQ ID NO: 12190 - RNA, 88 nt, synthetic construct
  misc_feature 1..88: note = engineered ribonucleic acid scaffold (ERS) sequence
  source 1..88: mol_type = other RNA
ggaggtgttctatctgattactctgcacctcctcaccagcgactatgtcgtagtgggtaaagctccctcttcggagggagcatcagag

SEQ ID NO: 12191 - RNA, 88 nt, synthetic construct
  misc_feature 1..88: note = engineered ribonucleic acid scaffold (ERS) sequence
  source 1..88: mol_type = other RNA
ggggactttctatctgattactctgagtcccctcaccagcgactatgtcgtagtgggtaaagctccctcttcggagggagcatcagag

SEQ ID NO: 12192 - RNA, 88 nt, synthetic construct
  misc_feature 1..88: note = engineered ribonucleic acid scaffold (ERS) sequence
  source 1..88: mol_type = other RNA
ggggcaattctatctgattactctgttgcccctcaccagcgactatgtcgtagtgggtaaagctccctcttcggagggagcatcagag

SEQ ID NO: 12193 - RNA, 88 nt, synthetic construct
  misc_feature 1..88: note = engineered ribonucleic acid scaffold (ERS) sequence
  source 1..88: mol_type = other RNA
gtgtgcgttctatctgattactctgcgcacactcaccagcgactatgtcgtagtgggtaaagctccctcttcggagggagcatcagag

SEQ ID NO: 12194 - RNA, 87 nt, synthetic construct
  misc_feature 1..87: note = engineered ribonucleic acid scaffold (ERS) sequence
  source 1..87: mol_type = other RNA
gggcgcttctatctgattactctgggcgccctcaccagcgactatgtcgtagtgggtaaagctccctcttcggagggagcatcagag

SEQ ID NO: 12195 - RNA, 87 nt, synthetic construct
  misc_feature 1..87: note = engineered ribonucleic acid scaffold (ERS) sequence
  source 1..87: mol_type = other RNA
gggcgcttctatctgattactctgggagccctcaccagcgactatgtcgtagtgggtaaagctccctcttcggagggagcatcagag

SEQ ID NO: 12196 - RNA, 87 nt, synthetic construct
  misc_feature 1..87: note = engineered ribonucleic acid scaffold (ERS) sequence
  source 1..87: mol_type = other RNA
gggcgcttctatctgattactctgtgagccctcaccagcgactatgtcgtagtgggtaaagctccctcttcggagggagcatcagag

SEQ ID NO: 12197 - RNA, 88 nt, synthetic construct
  misc_feature 1..88: note = engineered ribonucleic acid scaffold (ERS) sequence
  source 1..88: mol_type = other RNA
gggcgcttctatctgattactctgaggagccctcaccagcgactatgtcgtagtgggtaaagctccctcttcggagggagcatcagag

SEQ ID NO: 12198 - RNA, 87 nt, synthetic construct
  misc_feature 1..87: note = engineered ribonucleic acid scaffold (ERS) sequence
  source 1..87: mol_type = other RNA
gggcgcttctatctgattactctgatagccctcaccagcgactatgtcgtagtgggtaaagctccctcttcggagggagcatcagag

SEQ ID NO: 12199 - RNA, 88 nt, synthetic construct
  misc_feature 1..88: note = engineered ribonucleic acid scaffold (ERS) sequence
  source 1..88: mol_type = other RNA
gggcgcttctatctgattactctgagctgccctcaccagcgactatgtcgtagtgggtaaagctccctcttcggagggagcatcagag

SEQ ID NO: 12200 - RNA, 88 nt, synthetic construct
  misc_feature 1..88: note = engineered ribonucleic acid scaffold (ERS) sequence
  source 1..88: mol_type = other RNA
gggcgcttctatctgattactctgagtagccctcaccagcgactatgtcgtagtgggtaaagctccctcttcggagggagcatcagag

SEQ ID NO: 12201 - RNA, 88 nt, synthetic construct
  misc_feature 1..88: note = engineered ribonucleic acid scaffold (ERS) sequence
  source 1..88: mol_type = other RNA
gggcacttctatctgattactctgagtagccctcaccagcgactatgtcgtagtgggtaaagctccctcttcggagggagcatcagag

SEQ ID NO: 12202 - RNA, 87 nt, synthetic construct
  misc_feature 1..87: note = engineered ribonucleic acid scaffold (ERS) sequence
  source 1..87: mol_type = other RNA
gggcgcttctatctgattactctgagcaccctcaccagcgactatgtcgtagtgggtaaagctccctcttcggagggagcatcagag

SEQ ID NO: 12203 - RNA, 87 nt, synthetic construct
  misc_feature 1..87: note = engineered ribonucleic acid scaffold (ERS) sequence
  source 1..87: mol_type = other RNA
gggcacttctatctgattactctgagcgccctcaccagcgactatgtcgtagtgggtaaagctccctcttcggagggagcatcagag

SEQ ID NO: 12204 - RNA, 87 nt, synthetic construct
  misc_feature 1..87: note = engineered ribonucleic acid scaffold (ERS) sequence
  source 1..87: mol_type = other RNA
gggcgcttctatctgattactctgagggccctcaccagcgactatgtcgtagtgggtaaagctccctcttcggagggagcatcagag

SEQ ID NO: 12205 - RNA, 88 nt, synthetic construct
  misc_feature 1..88: note = engineered ribonucleic acid scaffold (ERS) sequence
  source 1..88: mol_type = other RNA
gggcgcttctatctgattactctgagtgcccgtcaccagcgactatgtcgtagtgggtaaagctccctcttcggagggagcatcagag

SEQ ID NO: 12206 - RNA, 87 nt, synthetic construct
  misc_feature 1..87: note = engineered ribonucleic acid scaffold (ERS) sequence
  source 1..87: mol_type = other RNA
gggcacttctatctgattactctgagtgccctcaccagcgactatgtcgtagtgggtaaagctccctcttcggagggagcatcagag

SEQ ID NO: 12207 - RNA, 87 nt, synthetic construct
  misc_feature 1..87: note = engineered ribonucleic acid scaffold (ERS) sequence
  source 1..87: mol_type = other RNA
gggcgcttctatctgattactctgagaaccctcaccagcgactatgtcgtagtgggtaaagctccctcttcggagggagcatcagag

SEQ ID NO: 12208 - RNA, 88 nt, synthetic construct
  misc_feature 1..88: note = engineered ribonucleic acid scaffold (ERS) sequence
  source 1..88: mol_type = other RNA
gggcgcttctatctgattactctgagagcccgtcaccagcgactatgtcgtagtgggtaaagctccctcttcggagggagcatcagag

SEQ ID NO: 12209 - RNA, 88 nt, synthetic construct
  misc_feature 1..88: note = engineered ribonucleic acid scaffold (ERS) sequence
  source 1..88: mol_type = other RNA
gggcgcttctatctgattactctgagagcccttcaccagcgactatgtcgtagtgggtaaagctccctcttcggagggagcatcagag

SEQ ID NO: 12210 - RNA, 87 nt, synthetic construct
  misc_feature 1..87: note = engineered ribonucleic acid scaffold (ERS) sequence
  source 1..87: mol_type = other RNA
gggggcttctatctgattactctgagacccctcaccagcgactatgtcgtagtgggtaaagctccctcttcggagggagcatcagag

SEQ ID NO: 12211 - RNA, 87 nt, synthetic construct
  misc_feature 1..87: note = engineered ribonucleic acid scaffold (ERS) sequence
  source 1..87: mol_type = other RNA
gggtgcttctatctgattactctgagagccctcaccagcgactatgtcgtagtgggtaaagctccctcttcggagggagcatcagag

SEQ ID NO: 12212 - RNA, 87 nt, synthetic construct
  misc_feature 1..87: note = engineered ribonucleic acid scaffold (ERS) sequence
  source 1..87: mol_type = other RNA
ggggccttctatctgattactctgaggcccctcaccagcgactatgtcgtagtgggtaaagctccctcttcggagggagcatcagag

SEQ ID NO: 12213 - RNA, 88 nt, synthetic construct
  misc_feature 1..88: note = engineered ribonucleic acid scaffold (ERS) sequence
  source 1..88: mol_type = other RNA
gggcccttctatctgattactctgaggagccctcaccagcgactatgtcgtagtgggtaaagctccctcttcggagggagcatcagag

SEQ ID NO: 12214 - RNA, 87 nt, synthetic construct
  misc_feature 1..87: note = engineered ribonucleic acid scaffold (ERS) sequence
  source 1..87: mol_type = other RNA
gggcccttctatctgattactctgagggccctcaccagcgactatgtcgtagtgggtaaagctccctcttcggagggagcatcagag

SEQ ID NO: 12215 - RNA, 87 nt, synthetic construct
  misc_feature 1..87: note = engineered ribonucleic acid scaffold (ERS) sequence
  source 1..87: mol_type = other RNA
gggcccttctatctgattactctgagtgccctcaccagcgactatgtcgtagtgggtaaagctccctcttcggagggagcatcagag

SEQ ID NO: 12216 - RNA, 87 nt, synthetic construct
  misc_feature 1..87: note = engineered ribonucleic acid scaffold (ERS) sequence
  source 1..87: mol_type = other RNA
gggcccttctatctgattactctgagagccctcaccagcgactatgtcgtagtgggtaaagctccctcttcggagggagcatcagag

SEQ ID NO: 12217 - RNA, 88 nt, synthetic construct
  misc_feature 1..88: note = engineered ribonucleic acid scaffold (ERS) sequence
  source 1..88: mol_type = other RNA
gggcgcttctatctgattactctgagcagccctcaccagcgactatgtcgtagtgggtaaagctccctcttcggagggagcatcagag

SEQ ID NO: 12218 - RNA, 87 nt, synthetic construct
  misc_feature 1..87: note = engineered ribonucleic acid scaffold (ERS) sequence
  source 1..87: mol_type = other RNA
gggcgcttctatctgattactctgagtgccctcaccagcgactatgtcgtagtgggtaaagctccctcttcggagggagcatcagag

SEQ ID NO: 12219 - RNA, 87 nt, synthetic construct
  misc_feature 1..87: note = engineered ribonucleic acid scaffold (ERS) sequence
  source 1..87: mol_type = other RNA
gggcgcttctatctgattactctgagagccctcaccagcgactatgtcgtagtgggtaaagctccctcttcggagggagcatcagag

SEQ ID NO: 12220 - RNA, 87 nt, synthetic construct
  misc_feature 1..87: note = engineered ribonucleic acid scaffold (ERS) sequence
  source 1..87: mol_type = other RNA
gggctcttctatctgattactctgagcgccctcaccagcgactatgtcgtagtgggtaaagctccctcttcggagggagcatcagag

SEQ ID NO: 12221 - RNA, 87 nt, synthetic construct
  misc_feature 1..87: note = engineered ribonucleic acid scaffold (ERS) sequence
  source 1..87: mol_type = other RNA
gggctcttctatctgattactctgagggccctcaccagcgactatgtcgtagtgggtaaagctccctcttcggagggagcatcagag

SEQ ID NO: 12222 - RNA, 87 nt, synthetic construct
  misc_feature 1..87: note = engineered ribonucleic acid scaffold (ERS) sequence
  source 1..87: mol_type = other RNA
gggctcttctatctgattactctgagtgccctcaccagcgactatgtcgtagtgggtaaagctccctcttcggagggagcatcagag

SEQ ID NO: 12223 - RNA, 87 nt, synthetic construct
  misc_feature 1..87: note = engineered ribonucleic acid scaffold (ERS) sequence
  source 1..87: mol_type = other RNA
gggctcttctatctgattactctgagagccctcaccagcgactatgtcgtagtgggtaaagctccctcttcggagggagcatcagag

SEQ ID NO: 12224 - RNA, 87 nt, synthetic construct
  misc_feature 1..87: note = engineered ribonucleic acid scaffold (ERS) sequence
  source 1..87: mol_type = other RNA
gggcggttctatctgattactctgagcgccctcaccagcgactatgtcgtagtgggtaaagctccctcttcggagggagcatcagag

SEQ ID NO: 12225 - RNA, 87 nt, synthetic construct
  misc_feature 1..87: note = engineered ribonucleic acid scaffold (ERS) sequence
  source 1..87: mol_type = other RNA
gggcggttctatctgattactctgagagccctcaccagcgactatgtcgtagtgggtaaagctccctcttcggagggagcatcagag

SEQ ID NO: 12226 - RNA, 88 nt, synthetic construct
  misc_feature 1..88: note = engineered ribonucleic acid scaffold (ERS) sequence
  source 1..88: mol_type = other RNA
gcacacggttctatctgattactctgccgtgttcaccagcgactatgtcgtagtgggtaaagctccctcttcggagggagcatcagag

SEQ ID NO: 12227 - RNA, 88 nt, synthetic construct
  misc_feature 1..88: note = engineered ribonucleic acid scaffold (ERS) sequence
  source 1..88: mol_type = other RNA
gcactggtttctatctgattactctgaccagttcaccagcgactatgtcgtagtgggtaaagctccctcttcggagggagcatcagag

SEQ ID NO: 12228 - RNA, 88 nt, synthetic construct
  misc_feature 1..88: note = engineered ribonucleic acid scaffold (ERS) sequence
  source 1..88: mol_type = other RNA
gcaggccgttctatctgattactctgcggccttcaccagcgactatgtcgtagtgggtaaagctccctcttcggagggagcatcagag

SEQ ID NO: 12229 - RNA, 88 nt, synthetic construct
  misc_feature 1..88: note = engineered ribonucleic acid scaffold (ERS) sequence
  source 1..88: mol_type = other RNA
gcaggtccttctatctgattactctgggaccttcaccagcgactatgtcgtagtgggtaaagctccctcttcggagggagcatcagag

SEQ ID NO: 12230 - RNA, 88 nt, synthetic construct
  misc_feature 1..88: note = engineered ribonucleic acid scaffold (ERS) sequence
  source 1..88: mol_type = other RNA
gccagcaattctatctgattactctgttgctgtcaccagcgactatgtcgtagtgggtaaagctccctcttcggagggagcatcagag

SEQ ID NO: 12231 - RNA, 88 nt, synthetic construct
  misc_feature 1..88: note = engineered ribonucleic acid scaffold (ERS) sequence
  source 1..88: mol_type = other RNA
gccgagacttctatctgattactctgggctcgtcaccagcgactatgtcgtagtgggtaaagctccctcttcggagggagcatcagag

SEQ ID NO: 12232 - RNA, 88 nt, synthetic construct
  misc_feature 1..88: note = engineered ribonucleic acid scaffold (ERS) sequence
  source 1..88: mol_type = other RNA
gcctgtagttctatctgattactctgctacagtcaccagcgactatgtcgtagtgggtaaagctccctcttcggagggagcatcagag

SEQ ID NO: 12233 - RNA, 88 nt, synthetic construct
  misc_feature 1..88: note = engineered ribonucleic acid scaffold (ERS) sequence
  source 1..88: mol_type = other RNA
gcgagcacttctatctgattactctggggctctcaccagcgactatgtcgtagtgggtaaagctccctcttcggagggagcatcagag

SEQ ID NO: 12234 - RNA, 88 nt, synthetic construct
  misc_feature 1..88: note = engineered ribonucleic acid scaffold (ERS) sequence
  source 1..88: mol_type = other RNA
gcgaggtgttctatctgattactctgcacctctcaccagcgactatgtcgtagtgggtaaagctccctcttcggagggagcatcagag

SEQ ID NO: 12235 - RNA, 88 nt, synthetic construct
  misc_feature 1..88: note = engineered ribonucleic acid scaffold (ERS) sequence
  source 1..88: mol_type = other RNA
gcgggactttctatctgattactctgagtccctcaccagcgactatgtcgtagtgggtaaagctccctcttcggagggagcatcagag

SEQ ID NO: 12236 - RNA, 88 nt, synthetic construct
  misc_feature 1..88: note = engineered ribonucleic acid scaffold (ERS) sequence
  source 1..88: mol_type = other RNA
gcgggcaattctatctgattactctgttgccctcaccagcgactatgtcgtagtgggtaaagctccctcttcggagggagcatcagag

SEQ ID NO: 12237 - RNA, 88 nt, synthetic construct
  misc_feature 1..88: note = engineered ribonucleic acid scaffold (ERS) sequence
  source 1..88: mol_type = other RNA
gctgtgcgttctatctgattactctgcgcacatcaccagcgactatgtcgtagtgggtaaagctccctcttcggagggagcatcagag

SEQ ID NO: 12238 - RNA, 89 nt, synthetic construct
  misc_feature 1..89: note = engineered ribonucleic acid scaffold (ERS) sequence
  source 1..89: mol_type = other RNA
gctggcgcttctatctgattactctgggcgccatcaccagcgactatgtcgtagtgggtaaagctccctcttcggagggagcatcagag

SEQ ID NO: 12239 - RNA, 89 nt, synthetic construct
  misc_feature 1..89: note = engineered ribonucleic acid scaffold (ERS) sequence
  source 1..89: mol_type = other RNA
gctggcgcttctatctgattactctgggagccatcaccagcgactatgtcgtagtgggtaaagctccctcttcggagggagcatcagag

SEQ ID NO: 12240 - RNA, 89 nt, synthetic construct
  misc_feature 1..89: note = engineered ribonucleic acid scaffold (ERS) sequence
  source 1..89: mol_type = other RNA
gctggcgcttctatctgattactctgtgagccatcaccagcgactatgtcgtagtgggtaaagctccctcttcggagggagcatcagag

SEQ ID NO: 12241 - RNA, 90 nt, synthetic construct
  misc_feature 1..90: note = engineered ribonucleic acid scaffold (ERS) sequence
  source 1..90: mol_type = other RNA
gctggcgcttctatctgattactctgaggagccatcaccagcgactatgtcgtagtgggtaaagctccctcttcggagggagcatcagag

SEQ ID NO: 12242 - RNA, 89 nt, synthetic construct
  misc_feature 1..89: note = engineered ribonucleic acid scaffold (ERS) sequence
  source 1..89: mol_type = other RNA
gctggcgcttctatctgattactctgatagccatcaccagcgactatgtcgtagtgggtaaagctccctcttcggagggagcatcagag

SEQ ID NO: 12243 - RNA, 90 nt, synthetic construct
  misc_feature 1..90: note = engineered ribonucleic acid scaffold (ERS) sequence
  source 1..90: mol_type = other RNA
gctggcgcttctatctgattactctgagctgccatcaccagcgactatgtcgtagtgggtaaagctccctcttcggagggagcatcagag

SEQ ID NO: 12244 - RNA, 90 nt, synthetic construct
  misc_feature 1..90: note = engineered ribonucleic acid scaffold (ERS) sequence
  source 1..90: mol_type = other RNA
gctggcgcttctatctgattactctgagtagccatcaccagcgactatgtcgtagtgggtaaagctccctcttcggagggagcatcagag

SEQ ID NO: 12245 - RNA, 90 nt, synthetic construct
  misc_feature 1..90: note = engineered ribonucleic acid scaffold (ERS) sequence
  source 1..90: mol_type = other RNA
gctggcacttctatctgattactctgagtagccatcaccagcgactatgtcgtagtgggtaaagctccctcttcggagggagcatcagag

SEQ ID NO: 12246 - RNA, 89 nt, synthetic construct
  misc_feature 1..89: note = engineered ribonucleic acid scaffold (ERS) sequence
  source 1..89: mol_type = other RNA
gctggcgcttctatctgattactctgagcaccatcaccagcgactatgtcgtagtgggtaaagctccctcttcggagggagcatcagag

SEQ ID NO: 12247 - RNA, 89 nt, synthetic construct
  misc_feature 1..89: note = engineered ribonucleic acid scaffold (ERS) sequence
  source 1..89: mol_type = other RNA
gctggcacttctatctgattactctgagcgccatcaccagcgactatgtcgtagtgggtaaagctccctcttcggagggagcatcagag

SEQ ID NO: 12248 - RNA, 89 nt, synthetic construct
  misc_feature 1..89: note = engineered ribonucleic acid scaffold (ERS) sequence
  source 1..89: mol_type = other RNA
gctggcgcttctatctgattactctgagggccatcaccagcgactatgtcgtagtgggtaaagctccctcttcggagggagcatcagag

SEQ ID NO: 12249 - RNA, 89 nt, synthetic construct
  misc_feature 1..89: note = engineered ribonucleic acid scaffold (ERS) sequence
  source 1..89: mol_type = other RNA
gctggcgcttctatctgattactctgagtgccgtcaccagcgactatgtcgtagtgggtaaagctccctcttcggagggagcatcagag

SEQ ID NO: 12250 - RNA, 89 nt, synthetic construct
  misc_feature 1..89: note = engineered ribonucleic acid scaffold (ERS) sequence
  source 1..89: mol_type = other RNA
gctggcacttctatctgattactctgagtgccatcaccagcgactatgtcgtagtgggtaaagctccctcttcggagggagcatcagag

SEQ ID NO: 12251 - RNA, 89 nt, synthetic construct
  misc_feature 1..89: note = engineered ribonucleic acid scaffold (ERS) sequence
  source 1..89: mol_type = other RNA
gctggcgcttctatctgattactctgagaaccatcaccagcgactatgtcgtagtgggtaaagctccctcttcggagggagcatcagag

SEQ ID NO: 12252 - RNA, 89 nt, synthetic construct
  misc_feature 1..89: note = engineered ribonucleic acid scaffold (ERS) sequence
  source 1..89: mol_type = other RNA
gctggcgcttctatctgattactctgagagccgtcaccagcgactatgtcgtagtgggtaaagctccctcttcggagggagcatcagag

SEQ ID NO: 12253 - RNA, 89 nt, synthetic construct
  misc_feature 1..89: note = engineered ribonucleic acid scaffold (ERS) sequence
  source 1..89: mol_type = other RNA
gctggcgcttctatctgattactctgagagccttcaccagcgactatgtcgtagtgggtaaagctccctcttcggagggagcatcagag

SEQ ID NO: 12254 - RNA, 89 nt, synthetic construct
  misc_feature 1..89: note = engineered ribonucleic acid scaffold (ERS) sequence
  source 1..89: mol_type = other RNA
gctggggcttctatctgattactctgagacccatcaccagcgactatgtcgtagtgggtaaagctccctcttcggagggagcatcagag

SEQ ID NO: 12255 - RNA, 89 nt, synthetic construct
  misc_feature 1..89: note = engineered ribonucleic acid scaffold (ERS) sequence
  source 1..89: mol_type = other RNA
gctggtgcttctatctgattactctgagagccatcaccagcgactatgtcgtagtgggtaaagctccctcttcggagggagcatcagag

SEQ ID NO: 12256 - RNA, 89 nt, synthetic construct
  misc_feature 1..89: note = engineered ribonucleic acid scaffold (ERS) sequence
  source 1..89: mol_type = other RNA
gctgggccttctatctgattactctgaggcccatcaccagcgactatgtcgtagtgggtaaagctccctcttcggagggagcatcagag

SEQ ID NO: 12257 - RNA, 90 nt, synthetic construct
  misc_feature 1..90: note = engineered ribonucleic acid scaffold (ERS) sequence
  source 1..90: mol_type = other RNA
gctggcccttctatctgattactctgaggagccatcaccagcgactatgtcgtagtgggtaaagctccctcttcggagggagcatcagag

SEQ ID NO: 12258 - RNA, 89 nt, synthetic construct
  misc_feature 1..89: note = engineered ribonucleic acid scaffold (ERS) sequence
  source 1..89: mol_type = other RNA
gctggcccttctatctgattactctgagggccatcaccagcgactatgtcgtagtgggtaaagctccctcttcggagggagcatcagag

SEQ ID NO: 12259 - RNA, 89 nt, synthetic construct
  misc_feature 1..89: note = engineered ribonucleic acid scaffold (ERS) sequence
  source 1..89: mol_type = other RNA
gctggcccttctatctgattactctgagtgccatcaccagcgactatgtcgtagtgggtaaagctccctcttcggagggagcatcagag

SEQ ID NO: 12260 - RNA, 89 nt, synthetic construct
  misc_feature 1..89: note = engineered ribonucleic acid scaffold (ERS) sequence
  source 1..89: mol_type = other RNA
gctggcccttctatctgattactctgagagccatcaccagcgactatgtcgtagtgggtaaagctccctcttcggagggagcatcagag

SEQ ID NO: 12261 - RNA, 90 nt, synthetic construct
  misc_feature 1..90: note = engineered ribonucleic acid scaffold (ERS) sequence
  source 1..90: mol_type = other RNA
gctggcgcttctatctgattactctgagcagccatcaccagcgactatgtcgtagtgggtaaagctccctcttcggagggagcatcagag

SEQ ID NO: 12262 - RNA, 89 nt, synthetic construct
  misc_feature 1..89: note = engineered ribonucleic acid scaffold (ERS) sequence
  source 1..89: mol_type = other RNA
gctggcgcttctatctgattactctgagtgccatcaccagcgactatgtcgtagtgggtaaagctccctcttcggagggagcatcagag

SEQ ID NO: 12263 - RNA, 89 nt, synthetic construct
  misc_feature 1..89: note = engineered ribonucleic acid scaffold (ERS) sequence
  source 1..89: mol_type = other RNA
gctggcgcttctatctgattactctgagagccatcaccagcgactatgtcgtagtgggtaaagctccctcttcggagggagcatcagag

SEQ ID NO: 12264 - RNA, 89 nt, synthetic construct
  misc_feature 1..89: note = engineered ribonucleic acid scaffold (ERS) sequence
  source 1..89: mol_type = other RNA
gctggctcttctatctgattactctgagcgccatcaccagcgactatgtcgtagtgggtaaagctccctcttcggagggagcatcagag

SEQ ID NO: 12265 - RNA, 89 nt, synthetic construct
  misc_feature 1..89: note = engineered ribonucleic acid scaffold (ERS) sequence
  source 1..89: mol_type = other RNA
gctggctcttctatctgattactctgagggccatcaccagcgactatgtcgtagtgggtaaagctccctcttcggagggagcatcagag

SEQ ID NO: 12266 - RNA, 89 nt, synthetic construct
  misc_feature 1..89: note = engineered ribonucleic acid scaffold (ERS) sequence
  source 1..89: mol_type = other RNA
gctggctcttctatctgattactctgagtgccatcaccagcgactatgtcgtagtgggtaaagctccctcttcggagggagcatcagag

SEQ ID NO: 12267 - RNA, 89 nt, synthetic construct
  misc_feature 1..89: note = engineered ribonucleic acid scaffold (ERS) sequence
  source 1..89: mol_type = other RNA
gctggctcttctatctgattactctgagagccatcaccagcgactatgtcgtagtgggtaaagctccctcttcggagggagcatcagag

SEQ ID NO: 12268 - RNA, 89 nt, synthetic construct
  misc_feature 1..89: note = engineered ribonucleic acid scaffold (ERS) sequence
  source 1..89: mol_type = other RNA
gctggcggttctatctgattactctgagcgccatcaccagcgactatgtcgtagtgggtaaagctccctcttcggagggagcatcagag

SEQ ID NO: 12269 - RNA, 89 nt, synthetic construct
  misc_feature 1..89: note = engineered ribonucleic acid scaffold (ERS) sequence
  source 1..89: mol_type = other RNA
gctggcggttctatctgattactctgagagccatcaccagcgactatgtcgtagtgggtaaagctccctcttcggagggagcatcagag

SEQ ID NO: 12270 - RNA, 88 nt, synthetic construct
  misc_feature 1..88: note = engineered ribonucleic acid scaffold (ERS) sequence
  source 1..88: mol_type = other RNA
taacacggttctatctgattactctgccgtgttcaccagcgactatgtcgtagtgggtaaagctccctcttcggagggagcatcagag

SEQ ID NO: 12271 - RNA, 88 nt, synthetic construct
  misc_feature 1..88: note = engineered ribonucleic acid scaffold (ERS) sequence
  source 1..88: mol_type = other RNA
taactggtttctatctgattactctgaccagttcaccagcgactatgtcgtagtgggtaaagctccctcttcggagggagcatcagag

SEQ ID NO: 12272 - RNA, 88 nt, synthetic construct
  misc_feature 1..88: note = engineered ribonucleic acid scaffold (ERS) sequence
  source 1..88: mol_type = other RNA
taaggccgttctatctgattactctgcggccttcaccagcgactatgtcgtagtgggtaaagctccctcttcggagggagcatcagag

SEQ ID NO: 12273 - RNA, 88 nt, synthetic construct
  misc_feature 1..88: note = engineered ribonucleic acid scaffold (ERS) sequence
  source 1..88: mol_type = other RNA
taaggtccttctatctgattactctgggaccttcaccagcgactatgtcgtagtgggtaaagctccctcttcggagggagcatcagag

SEQ ID NO: 12274 - RNA, 88 nt, synthetic construct
  misc_feature 1..88: note = engineered ribonucleic acid scaffold (ERS) sequence
  source 1..88: mol_type = other RNA
tacagcaattctatctgattactctgttgctgtcaccagcgactatgtcgtagtgggtaaagctccctcttcggagggagcatcagag

SEQ ID NO: 12275 - RNA, 88 nt, synthetic construct
  misc_feature 1..88: note = engineered ribonucleic acid scaffold (ERS) sequence
  source 1..88: mol_type = other RNA
tacgagacttctatctgattactctgggctcgtcaccagcgactatgtcgtagtgggtaaagctccctcttcggagggagcatcagag

SEQ ID NO: 12276 - RNA, 88 nt, synthetic construct
  misc_feature 1..88: note = engineered ribonucleic acid scaffold (ERS) sequence
  source 1..88: mol_type = other RNA
tactgtagttctatctgattactctgctacagtcaccagcgactatgtcgtagtgggtaaagctccctcttcggagggagcatcagag

SEQ ID NO: 12277 - RNA, 88 nt, synthetic construct
  misc_feature 1..88: note = engineered ribonucleic acid scaffold (ERS) sequence
  source 1..88: mol_type = other RNA
tagagcacttctatctgattactctggggctctcaccagcgactatgtcgtagtgggtaaagctccctcttcggagggagcatcagag

SEQ ID NO: 12278 - RNA, 88 nt, synthetic construct
  misc_feature 1..88: note = engineered ribonucleic acid scaffold (ERS) sequence
  source 1..88: mol_type = other RNA
tagaggtgttctatctgattactctgcacctctcaccagcgactatgtcgtagtgggtaaagctccctcttcggagggagcatcagag

SEQ ID NO: 12279 - RNA, 88 nt, synthetic construct
  misc_feature 1..88: note = engineered ribonucleic acid scaffold (ERS) sequence
  source 1..88: mol_type = other RNA
tagggactttctatctgattactctgagtccctcaccagcgactatgtcgtagtgggtaaagctccctcttcggagggagcatcagag

SEQ ID NO: 12280 - RNA, 88 nt, synthetic construct
  misc_feature 1..88: note = engineered ribonucleic acid scaffold (ERS) sequence
  source 1..88: mol_type = other RNA
tagggcaattctatctgattactctgttgccctcaccagcgactatgtcgtagtgggtaaagctccctcttcggagggagcatcagag

SEQ ID NO: 12281 - RNA, 88 nt, synthetic construct
  misc_feature 1..88: note = engineered ribonucleic acid scaffold (ERS) sequence
  source 1..88: mol_type = other RNA
tatgtgcgttctatctgattactctgcgcacatcaccagcgactatgtcgtagtgggtaaagctccctcttcggagggagcatcagag

SEQ ID NO: 12282 - RNA, 89 nt, synthetic construct
  misc_feature 1..89: note = engineered ribonucleic acid scaffold (ERS) sequence
  source 1..89: mol_type = other RNA
tatggcgcttctatctgattactctgggcgccatcaccagcgactatgtcgtagtgggtaaagctccctcttcggagggagcatcagag

SEQ ID NO: 12283 - RNA, 89 nt, synthetic construct
  misc_feature 1..89: note = engineered ribonucleic acid scaffold (ERS) sequence
  source 1..89: mol_type = other RNA
tatggcgcttctatctgattactctgggagccatcaccagcgactatgtcgtagtgggtaaagctccctcttcggagggagcatcagag

SEQ ID NO: 12284 - RNA, 89 nt, synthetic construct
  misc_feature 1..89: note = engineered ribonucleic acid scaffold (ERS) sequence
  source 1..89: mol_type = other RNA
tatggcgcttctatctgattactctgtgagccatcaccagcgactatgtcgtagtgggtaaagctccctcttcggagggagcatcagag

SEQ ID NO: 12285 - RNA, 90 nt, synthetic construct
  misc_feature 1..90: note = engineered ribonucleic acid scaffold (ERS) sequence
  source 1..90: mol_type = other RNA
tatggcgcttctatctgattactctgaggagccatcaccagcgactatgtcgtagtgggtaaagctccctcttcggagggagcatcagag

SEQ ID NO: 12286 - RNA, 89 nt, synthetic construct
  misc_feature 1..89: note = engineered ribonucleic acid scaffold (ERS) sequence
  source 1..89: mol_type = other RNA
tatggcgcttctatctgattactctgatagccatcaccagcgactatgtcgtagtgggtaaagctccctcttcggagggagcatcagag

SEQ ID NO: 12287 - RNA, 90 nt, synthetic construct
  misc_feature 1..90: note = engineered ribonucleic acid scaffold (ERS) sequence
  source 1..90: mol_type = other RNA
tatggcgcttctatctgattactctgagctgccatcaccagcgactatgtcgtagtgggtaaagctccctcttcggagggagcatcagag

SEQ ID NO: 12288 - RNA, 90 nt, synthetic construct
  misc_feature 1..90: note = engineered ribonucleic acid scaffold (ERS) sequence
  source 1..90: mol_type = other RNA
tatggcgcttctatctgattactctgagtagccatcaccagcgactatgtcgtagtgggtaaagctccctcttcggagggagcatcagag

SEQ ID NO: 12289 - RNA, 90 nt, synthetic construct
  misc_feature 1..90: note = engineered ribonucleic acid scaffold (ERS) sequence
  source 1..90: mol_type = other RNA
tatggcacttctatctgattactctgagtagccatcaccagcgactatgtcgtagtgggtaaagctccctcttcggagggagcatcagag

SEQ ID NO: 12290 - RNA, 89 nt, synthetic construct
  misc_feature 1..89: note = engineered ribonucleic acid scaffold (ERS) sequence
  source 1..89: mol_type = other RNA
tatggcgcttctatctgattactctgagcaccatcaccagcgactatgtcgtagtgggtaaagctccctcttcggagggagcatcagag

SEQ ID NO: 12291 - RNA, 89 nt, synthetic construct
  misc_feature 1..89: note = engineered ribonucleic acid scaffold (ERS) sequence
  source 1..89: mol_type = other RNA
tatggcacttctatctgattactctgagcgccatcaccagcgactatgtcgtagtgggtaaagctccctcttcggagggagcatcagag

SEQ ID NO: 12292 - RNA, 89 nt, synthetic construct
  misc_feature 1..89: note = engineered ribonucleic acid scaffold (ERS) sequence
  source 1..89: mol_type = other RNA
tatggcgcttctatctgattactctgagggccatcaccagcgactatgtcgtagtgggtaaagctccctcttcggagggagcatcagag

SEQ ID NO: 12293 - RNA, 89 nt, synthetic construct
  misc_feature 1..89: note = engineered ribonucleic acid scaffold (ERS) sequence
  source 1..89: mol_type = other RNA
tatggcgcttctatctgattactctgagtgccgtcaccagcgactatgtcgtagtgggtaaagctccctcttcggagggagcatcagag

SEQ ID NO: 12294 - RNA, 89 nt, synthetic construct
  misc_feature 1..89: note = engineered ribonucleic acid scaffold (ERS) sequence
  source 1..89: mol_type = other RNA
tatggcacttctatctgattactctgagtgccatcaccagcgactatgtcgtagtgggtaaagctccctcttcggagggagcatcagag

SEQ ID NO: 12295 - RNA, 89 nt, synthetic construct
  misc_feature 1..89: note = engineered ribonucleic acid scaffold (ERS) sequence
  source 1..89: mol_type = other RNA
tatggcgcttctatctgattactctgagaaccatcaccagcgactatgtcgtagtgggtaaagctccctcttcggagggagcatcagag

SEQ ID NO: 12296 - RNA, 89 nt, synthetic construct
  misc_feature 1..89: note = engineered ribonucleic acid scaffold (ERS) sequence
  source 1..89: mol_type = other RNA
tatggcgcttctatctgattactctgagagccgtcaccagcgactatgtcgtagtgggtaaagctccctcttcggagggagcatcagag

SEQ ID NO: 12297 - RNA, 89 nt, synthetic construct
  misc_feature 1..89: note = engineered ribonucleic acid scaffold (ERS) sequence
  source 1..89: mol_type = other RNA
tatggcgcttctatctgattactctgagagccttcaccagcgactatgtcgtagtgggtaaagctccctcttcggagggagcatcagag

SEQ ID NO: 12298 - RNA, 89 nt, synthetic construct
  misc_feature 1..89: note = engineered ribonucleic acid scaffold (ERS) sequence
  source 1..89: mol_type = other RNA
tatggggcttctatctgattactctgagacccatcaccagcgactatgtcgtagtgggtaaagctccctcttcggagggagcatcagag

SEQ ID NO: 12299 - RNA, 89 nt, synthetic construct
  misc_feature 1..89: note = engineered ribonucleic acid scaffold (ERS) sequence
  source 1..89: mol_type = other RNA
tatggtgcttctatctgattactctgagagccatcaccagcgactatgtcgtagtgggtaaagctccctcttcggagggagcatcagag

SEQ ID NO: 12300 - RNA, 89 nt, synthetic construct
  misc_feature 1..89: note = engineered ribonucleic acid scaffold (ERS) sequence
  source 1..89: mol_type = other RNA
tatgggccttctatctgattactctgaggcccatcaccagcgactatgtcgtagtgggtaaagctccctcttcggagggagcatcagag

SEQ ID NO: 12301 - RNA, 90 nt, synthetic construct
  misc_feature 1..90: note = engineered ribonucleic acid scaffold (ERS) sequence
  source 1..90: mol_type = other RNA
tatggcccttctatctgattactctgaggagccatcaccagcgactatgtcgtagtgggtaaagctccctcttcggagggagcatcagag

SEQ ID NO: 12302 - RNA, 89 nt, synthetic construct
  misc_feature 1..89: note = engineered ribonucleic acid scaffold (ERS) sequence
  source 1..89: mol_type = other RNA
tatggcccttctatctgattactctgagggccatcaccagcgactatgtcgtagtgggtaaagctccctcttcggagggagcatcagag

SEQ ID NO: 12303 - RNA, 89 nt, synthetic construct
  misc_feature 1..89: note = engineered ribonucleic acid scaffold (ERS) sequence
  source 1..89: mol_type = other RNA
tatggcccttctatctgattactctgagtgccatcaccagcgactatgtcgtagtgggtaaagctccctcttcggagggagcatcagag

SEQ ID NO: 12304 - RNA, 89 nt, synthetic construct
  misc_feature 1..89: note = engineered ribonucleic acid scaffold (ERS) sequence
  source 1..89: mol_type = other RNA
tatggcccttctatctgattactctgagagccatcaccagcgactatgtcgtagtgggtaaagctccctcttcggagggagcatcagag

SEQ ID NO: 12305 - RNA, 90 nt, synthetic construct
  misc_feature 1..90: note = engineered ribonucleic acid scaffold (ERS) sequence
  source 1..90: mol_type = other RNA
tatggcgcttctatctgattactctgagcagccatcaccagcgactatgtcgtagtgggtaaagctccctcttcggagggagcatcagag

SEQ ID NO: 12306 - RNA, 89 nt, synthetic construct
  misc_feature 1..89: note = engineered ribonucleic acid scaffold (ERS) sequence
  source 1..89: mol_type = other RNA
tatggcgcttctatctgattactctgagtgccatcaccagcgactatgtcgtagtgggtaaagctccctcttcggagggagcatcagag

SEQ ID NO: 12307 - RNA, 89 nt, synthetic construct
  misc_feature 1..89: note = engineered ribonucleic acid scaffold (ERS) sequence
  source 1..89: mol_type = other RNA
tatggcgcttctatctgattactctgagagccatcaccagcgactatgtcgtagtgggtaaagctccctcttcggagggagcatcagag

SEQ ID NO: 12308 - RNA, 89 nt, synthetic construct
  misc_feature 1..89: note = engineered ribonucleic acid scaffold (ERS) sequence
  source 1..89: mol_type = other RNA
tatggctcttctatctgattactctgagcgccatcaccagcgactatgtcgtagtgggtaaagctccctcttcggagggagcatcagag

SEQ ID NO: 12309 - RNA, 89 nt, synthetic construct
  misc_feature 1..89: note = engineered ribonucleic acid scaffold (ERS) sequence
  source 1..89: mol_type = other RNA
tatggctcttctatctgattactctgagggccatcaccagcgactatgtcgtagtgggtaaagctccctcttcggagggagcatcagag

SEQ ID NO: 12310 - RNA, 89 nt, synthetic construct
  misc_feature 1..89: note = engineered ribonucleic acid scaffold (ERS) sequence
  source 1..89: mol_type = other RNA
tatggctcttctatctgattactctgagtgccatcaccagcgactatgtcgtagtgggtaaagctccctcttcggagggagcatcagag

SEQ ID NO: 12311 - RNA, 89 nt, synthetic construct
  misc_feature 1..89: note = engineered ribonucleic acid scaffold (ERS) sequence
  source 1..89: mol_type = other RNA
tatggctcttctatctgattactctgagagccatcaccagcgactatgtcgtagtgggtaaagctccctcttcggagggagcatcagag

SEQ ID NO: 12312 - RNA, 89 nt, synthetic construct
  misc_feature 1..89: note = engineered ribonucleic acid scaffold (ERS) sequence
  source 1..89: mol_type = other RNA
tatggcggttctatctgattactctgagcgccatcaccagcgactatgtcgtagtgggtaaagctccctcttcggagggagcatcagag

SEQ ID NO: 12313 - RNA, 89 nt, synthetic construct
  misc_feature 1..89: note = engineered ribonucleic acid scaffold (ERS) sequence
  source 1..89: mol_type = other RNA
tatggcggttctatctgattactctgagagccatcaccagcgactatgtcgtagtgggtaaagctccctcttcggagggagcatcagag

SEQ ID NO: 12314 - RNA, 88 nt, synthetic construct
  misc_feature 1..88: note = engineered ribonucleic acid scaffold (ERS) sequence
  source 1..88: mol_type = other RNA
tcacacggttctatctgattactctgccgtgttcaccagcgactatgtcgtagtgggtaaagctccctcttcggagggagcatcagag

SEQ ID NO: 12315 - RNA, 88 nt, synthetic construct
  misc_feature 1..88: note = engineered ribonucleic acid scaffold (ERS) sequence
  source 1..88: mol_type = other RNA
tcactggtttctatctgattactctgaccagttcaccagcgactatgtcgtagtgggtaaagctccctcttcggagggagcatcagag

SEQ ID NO: 12316 - RNA, 88 nt, synthetic construct
  misc_feature 1..88: note = engineered ribonucleic acid scaffold (ERS) sequence
  source 1..88: mol_type = other RNA
tcaggccgttctatctgattactctgcggccttcaccagcgactatgtcgtagtgggtaaagctccctcttcggagggagcatcagag

SEQ ID NO: 12317 - RNA, 88 nt, synthetic construct
  misc_feature 1..88: note = engineered ribonucleic acid scaffold (ERS) sequence
  source 1..88: mol_type = other RNA
tcaggtccttctatctgattactctgggaccttcaccagcgactatgtcgtagtgggtaaagctccctcttcggagggagcatcagag

SEQ ID NO: 12318 - RNA, 88 nt, synthetic construct
  misc_feature 1..88: note = engineered ribonucleic acid scaffold (ERS) sequence
  source 1..88: mol_type = other RNA
tccagcaattctatctgattactctgttgctgtcaccagcgactatgtcgtagtgggtaaagctccctcttcggagggagcatcagag

SEQ ID NO: 12319 - RNA, 88 nt, synthetic construct
  misc_feature 1..88: note = engineered ribonucleic acid scaffold (ERS) sequence
  source 1..88: mol_type = other RNA
tccgagacttctatctgattactctgggctcgtcaccagcgactatgtcgtagtgggtaaagctccctcttcggagggagcatcagag

SEQ ID NO: 12320 - RNA, 88 nt, synthetic construct
  misc_feature 1..88: note = engineered ribonucleic acid scaffold (ERS) sequence
  source 1..88: mol_type = other RNA
tcctgtagttctatctgattactctgctacagtcaccagcgactatgtcgtagtgggtaaagctccctcttcggagggagcatcagag

SEQ ID NO: 12321 - RNA, 88 nt, synthetic construct
  misc_feature 1..88: note = engineered ribonucleic acid scaffold (ERS) sequence
  source 1..88: mol_type = other RNA
tcgagcacttctatctgattactctggggctctcaccagcgactatgtcgtagtgggtaaagctccctcttcggagggagcatcagag

SEQ ID NO: 12322 - RNA, 88 nt, synthetic construct
  misc_feature 1..88: note = engineered ribonucleic acid scaffold (ERS) sequence
  source 1..88: mol_type = other RNA
tcgaggtgttctatctgattactctgcacctctcaccagcgactatgtcgtagtgggtaaagctccctcttcggagggagcatcagag

SEQ ID NO: 12323 - RNA, 88 nt, synthetic construct
  misc_feature 1..88: note = engineered ribonucleic acid scaffold (ERS) sequence
  source 1..88: mol_type = other RNA
tcgggactttctatctgattactctgagtccctcaccagcgactatgtcgtagtgggtaaagctccctcttcggagggagcatcagag

SEQ ID NO: 12324 - RNA, 88 nt, synthetic construct
  misc_feature 1..88: note = engineered ribonucleic acid scaffold (ERS) sequence
  source 1..88: mol_type = other RNA
tcgggcaattctatctgattactctgttgccctcaccagcgactatgtcgtagtgggtaaagctccctcttcggagggagcatcagag

SEQ ID NO: 12325 - RNA, 88 nt, synthetic construct
  misc_feature 1..88: note = engineered ribonucleic acid scaffold (ERS) sequence
  source 1..88: mol_type = other RNA
tctgtgcgttctatctgattactctgcgcacatcaccagcgactatgtcgtagtgggtaaagctccctcttcggagggagcatcagag

SEQ ID NO: 12326 - RNA, 89 nt, synthetic construct
  misc_feature 1..89: note = engineered ribonucleic acid scaffold (ERS) sequence
  source 1..89: mol_type = other RNA
tctggcgcttctatctgattactctgggcgccatcaccagcgactatgtcgtagtgggtaaagctccctcttcggagggagcatcagag

SEQ ID NO: 12327 - RNA, 89 nt, synthetic construct
  misc_feature 1..89: note = engineered ribonucleic acid scaffold (ERS) sequence
  source 1..89: mol_type = other RNA
tctggcgcttctatctgattactctgggagccatcaccagcgactatgtcgtagtgggtaaagctccctcttcggagggagcatcagag

SEQ ID NO: 12328 - RNA, 89 nt, synthetic construct
  misc_feature 1..89: note = engineered ribonucleic acid scaffold (ERS) sequence
  source 1..89: mol_type = other RNA
tctggcgcttctatctgattactctgtgagccatcaccagcgactatgtcgtagtgggtaaagctccctcttcggagggagcatcagag

SEQ ID NO: 12329 - RNA, 90 nt, synthetic construct
  misc_feature 1..90: note = engineered ribonucleic acid scaffold (ERS) sequence
  source 1..90: mol_type = other RNA
tctggcgcttctatctgattactctgaggagccatcaccagcgactatgtcgtagtgggtaaagctccctcttcggagggagcatcagag

SEQ ID NO: 12330 - RNA, 89 nt, synthetic construct
  misc_feature 1..89: note = engineered ribonucleic acid scaffold (ERS) sequence
  source 1..89: mol_type = other RNA
tctggcgcttctatctgattactctgatagccatcaccagcgactatgtcgtagtgggtaaagctccctcttcggagggagcatcagag

SEQ ID NO: 12331 - RNA, 90 nt, synthetic construct
  misc_feature 1..90: note = engineered ribonucleic acid scaffold (ERS) sequence
  source 1..90: mol_type = other RNA
tctggcgcttctatctgattactctgagctgccatcaccagcgactatgtcgtagtgggtaaagctccctcttcggagggagcatcagag

SEQ ID NO: 12332 - RNA, 90 nt, synthetic construct
  misc_feature 1..90: note = engineered ribonucleic acid scaffold (ERS) sequence
  source 1..90: mol_type = other RNA
tctggcgcttctatctgattactctgagtagccatcaccagcgactatgtcgtagtgggtaaagctccctcttcggagggagcatcagag

SEQ ID NO: 12333 - RNA, 90 nt, synthetic construct
  misc_feature 1..90: note = engineered ribonucleic acid scaffold (ERS) sequence
  source 1..90: mol_type = other RNA
tctggcacttctatctgattactctgagtagccatcaccagcgactatgtcgtagtgggtaaagctccctcttcggagggagcatcagag

SEQ ID NO: 12334 - RNA, 89 nt, synthetic construct
  misc_feature 1..89: note = engineered ribonucleic acid scaffold (ERS) sequence
  source 1..89: mol_type = other RNA
tctggcgcttctatctgattactctgagcaccatcaccagcgactatgtcgtagtgggtaaagctccctcttcggagggagcatcagag

SEQ ID NO: 12335 - RNA, 89 nt, synthetic construct
  misc_feature 1..89: note = engineered ribonucleic acid scaffold (ERS) sequence
  source 1..89: mol_type = other RNA
tctggcacttctatctgattactctgagcgccatcaccagcgactatgtcgtagtgggtaaagctccctcttcggagggagcatcagag

SEQ ID NO: 12336 - RNA, 89 nt, synthetic construct
  misc_feature 1..89: note = engineered ribonucleic acid scaffold (ERS) sequence
  source 1..89: mol_type = other RNA
tctggcgcttctatctgattactctgagggccatcaccagcgactatgtcgtagtgggtaaagctccctcttcggagggagcatcagag

SEQ ID NO: 12337 - RNA, 89 nt, synthetic construct
  misc_feature 1..89: note = engineered ribonucleic acid scaffold (ERS) sequence
  source 1..89: mol_type = other RNA
tctggcgcttctatctgattactctgagtgccgtcaccagcgactatgtcgtagtgggtaaagctccctcttcggagggagcatcagag

SEQ ID NO: 12338 - RNA, 89 nt, synthetic construct
  misc_feature 1..89: note = engineered ribonucleic acid scaffold (ERS) sequence
  source 1..89: mol_type = other RNA
tctggcacttctatctgattactctgagtgccatcaccagcgactatgtcgtagtgggtaaagctccctcttcggagggagcatcagag

SEQ ID NO: 12339 - RNA, 89 nt, synthetic construct
  misc_feature 1..89: note = engineered ribonucleic acid scaffold (ERS) sequence
  source 1..89: mol_type = other RNA
tctggcgcttctatctgattactctgagaaccatcaccagcgactatgtcgtagtgggtaaagctccctcttcggagggagcatcagag

SEQ ID NO: 12340 - RNA, 89 nt, synthetic construct
  misc_feature 1..89: note = engineered ribonucleic acid scaffold (ERS) sequence
  source 1..89: mol_type = other RNA
tctggcgcttctatctgattactctgagagccgtcaccagcgactatgtcgtagtgggtaaagctccctcttcggagggagcatcagag

SEQ ID NO: 12341 - RNA, 89 nt, synthetic construct
  misc_feature 1..89: note = engineered ribonucleic acid scaffold (ERS) sequence
  source 1..89: mol_type = other RNA
tctggcgcttctatctgattactctgagagccttcaccagcgactatgtcgtagtgggtaaagctccctcttcggagggagcatcagag

SEQ ID NO: 12342 - RNA, 89 nt, synthetic construct
  misc_feature 1..89: note = engineered ribonucleic acid scaffold (ERS) sequence
  source 1..89: mol_type = other RNA
tctggggcttctatctgattactctgagacccatcaccagcgactatgtcgtagtgggtaaagctccctcttcggagggagcatcagag

SEQ ID NO: 12343 - RNA, 89 nt, synthetic construct
  misc_feature 1..89: note = engineered ribonucleic acid scaffold (ERS) sequence
  source 1..89: mol_type = other RNA
tctggtgcttctatctgattactctgagagccatcaccagcgactatgtcgtagtgggtaaagctccctcttcggagggagcatcagag

SEQ ID NO: 12344 - RNA, 89 nt, synthetic construct
  misc_feature 1..89: note = engineered ribonucleic acid scaffold (ERS) sequence
  source 1..89: mol_type = other RNA
tctgggccttctatctgattactctgaggcccatcaccagcgactatgtcgtagtgggtaaagctccctcttcggagggagcatcagag

SEQ ID NO: 12345 - RNA, 90 nt, synthetic construct
  misc_feature 1..90: note = engineered ribonucleic acid scaffold (ERS) sequence
  source 1..90: mol_type = other RNA
tctggcccttctatctgattactctgaggagccatcaccagcgactatgtcgtagtgggtaaagctccctcttcggagggagcatcagag

SEQ ID NO: 12346 - RNA, 89 nt, synthetic construct
  misc_feature 1..89: note = engineered ribonucleic acid scaffold (ERS) sequence
  source 1..89: mol_type = other RNA
tctggcccttctatctgattactctgagggccatcaccagcgactatgtcgtagtgggtaaagctccctcttcggagggagcatcagag

SEQ ID NO: 12347 - RNA, 89 nt, synthetic construct
  misc_feature 1..89: note = engineered ribonucleic acid scaffold (ERS) sequence
  source 1..89: mol_type = other RNA
tctggcccttctatctgattactctgagtgccatcaccagcgactatgtcgtagtgggtaaagctccctcttcggagggagcatcagag

SEQ ID NO: 12348 - RNA, 89 nt, synthetic construct
  misc_feature 1..89: note = engineered ribonucleic acid scaffold (ERS) sequence
  source 1..89: mol_type = other RNA
tctggcccttctatctgattactctgagagccatcaccagcgactatgtcgtagtgggtaaagctccctcttcggagggagcatcagag

SEQ ID NO: 12349 - RNA, 90 nt, synthetic construct
  misc_feature 1..90: note = engineered ribonucleic acid scaffold (ERS) sequence
  source 1..90: mol_type = other RNA
tctggcgcttctatctgattactctgagcagccatcaccagcgactatgtcgtagtgggtaaagctccctcttcggagggagcatcagag

SEQ ID NO: 12350 - RNA, 89 nt, synthetic construct
  misc_feature 1..89: note = engineered ribonucleic acid scaffold (ERS) sequence
  source 1..89: mol_type = other RNA
tctggcgcttctatctgattactctgagtgccatcaccagcgactatgtcgtagtgggtaaagctccctcttcggagggagcatcagag

SEQ ID NO: 12351 - RNA, 89 nt, synthetic construct
  misc_feature 1..89: note = engineered ribonucleic acid scaffold (ERS) sequence
  source 1..89: mol_type = other RNA
tctggcgcttctatctgattactctgagagccatcaccagcgactatgtcgtagtgggtaaagctccctcttcggagggagcatcagag

SEQ ID NO: 12352 - RNA, 89 nt, synthetic construct
  misc_feature 1..89: note = engineered ribonucleic acid scaffold (ERS) sequence
  source 1..89: mol_type = other RNA
tctggctcttctatctgattactctgagcgccatcaccagcgactatgtcgtagtgggtaaagctccctcttcggagggagcatcagag

SEQ ID NO: 12353 - RNA, 89 nt, synthetic construct
  misc_feature 1..89: note = engineered ribonucleic acid scaffold (ERS) sequence
  source 1..89: mol_type = other RNA
tctggctcttctatctgattactctgagggccatcaccagcgactatgtcgtagtgggtaaagctccctcttcggagggagcatcagag

SEQ ID NO: 12354 - RNA, 89 nt, synthetic construct
  misc_feature 1..89: note = engineered ribonucleic acid scaffold (ERS) sequence
  source 1..89: mol_type = other RNA
tctggctcttctatctgattactctgagtgccatcaccagcgactatgtcgtagtgggtaaagctccctcttcggagggagcatcagag

SEQ ID NO: 12355 - RNA, 89 nt, synthetic construct
  misc_feature 1..89: note = engineered ribonucleic acid scaffold (ERS) sequence
  source 1..89: mol_type = other RNA
tctggctcttctatctgattactctgagagccatcaccagcgactatgtcgtagtgggtaaagctccctcttcggagggagcatcagag

SEQ ID NO: 12356 - RNA, 89 nt, synthetic construct
  misc_feature 1..89: note = engineered ribonucleic acid scaffold (ERS) sequence
  source 1..89: mol_type = other RNA
tctggcggttctatctgattactctgagcgccatcaccagcgactatgtcgtagtgggtaaagctccctcttcggagggagcatcagag

SEQ ID NO: 12357 - RNA, 89 nt, synthetic construct
  misc_feature 1..89: note = engineered ribonucleic acid scaffold (ERS) sequence
  source 1..89: mol_type = other RNA
tctggcggttctatctgattactctgagagccatcaccagcgactatgtcgtagtgggtaaagctccctcttcggagggagcatcagag

SEQ ID NO: 12358 - RNA, 89 nt, synthetic construct
  misc_feature 1..89: note = engineered ribonucleic acid scaffold (ERS) sequence
  source 1..89: mol_type = other RNA
atcacacggttctatctgattactctgccgtgttcaccagcgactatgtcgtagtgggtaaagctccctcttcggagggagcatcagag

SEQ ID NO: 12359 - RNA, 89 nt, synthetic construct
  misc_feature 1..89: note = engineered ribonucleic acid scaffold (ERS) sequence
  source 1..89: mol_type = other RNA
atcactggtttctatctgattactctgaccagttcaccagcgactatgtcgtagtgggtaaagctccctcttcggagggagcatcagag

SEQ ID NO: 12360 - RNA, 89 nt, synthetic construct
  misc_feature 1..89: note = engineered ribonucleic acid scaffold (ERS) sequence
  source 1..89: mol_type = other RNA
atcaggccgttctatctgattactctgcggccttcaccagcgactatgtcgtagtgggtaaagctccctcttcggagggagcatcagag

SEQ ID NO: 12361 - RNA, 89 nt, synthetic construct
  misc_feature 1..89: note = engineered ribonucleic acid scaffold (ERS) sequence
  source 1..89: mol_type = other RNA
atcaggtccttctatctgattactctgggaccttcaccagcgactatgtcgtagtgggtaaagctccctcttcggagggagcatcagag

SEQ ID NO: 12362 - RNA, 89 nt, synthetic construct
  misc_feature 1..89: note = engineered ribonucleic acid scaffold (ERS) sequence
  source 1..89: mol_type = other RNA
atccagcaattctatctgattactctgttgctgtcaccagcgactatgtcgtagtgggtaaagctccctcttcggagggagcatcagag

SEQ ID NO: 12363 - RNA, 89 nt, synthetic construct
  misc_feature 1..89: note = engineered ribonucleic acid scaffold (ERS) sequence
  source 1..89: mol_type = other RNA
atccgagacttctatctgattactctgggctcgtcaccagcgactatgtcgtagtgggtaaagctccctcttcggagggagcatcagag

SEQ ID NO: 12364 - RNA, 89 nt, synthetic construct
  misc_feature 1..89: note = engineered ribonucleic acid scaffold (ERS) sequence
  source 1..89: mol_type = other RNA
atcctgtagttctatctgattactctgctacagtcaccagcgactatgtcgtagtgggtaaagctccctcttcggagggagcatcagag

SEQ ID NO: 12365 - RNA, 89 nt, synthetic construct
  misc_feature 1..89: note = engineered ribonucleic acid scaffold (ERS) sequence
  source 1..89: mol_type = other RNA
atcgagcacttctatctgattactctggggctctcaccagcgactatgtcgtagtgggtaaagctccctcttcggagggagcatcagag

SEQ ID NO: 12366 - RNA, 89 nt, synthetic construct
  misc_feature 1..89: note = engineered ribonucleic acid scaffold (ERS) sequence
  source 1..89: mol_type = other RNA
atcgaggtgttctatctgattactctgcacctctcaccagcgactatgtcgtagtgggtaaagctccctcttcggagggagcatcagag

SEQ ID NO: 12367 - RNA, 89 nt, synthetic construct
  misc_feature 1..89: note = engineered ribonucleic acid scaffold (ERS) sequence
  source 1..89: mol_type = other RNA
atcgggactttctatctgattactctgagtccctcaccagcgactatgtcgtagtgggtaaagctccctcttcggagggagcatcagag

SEQ ID NO: 12368 - RNA, 89 nt, synthetic construct
  misc_feature 1..89: note = engineered ribonucleic acid scaffold (ERS) sequence
  source 1..89: mol_type = other RNA
atcgggcaattctatctgattactctgttgccctcaccagcgactatgtcgtagtgggtaaagctccctcttcggagggagcatcagag

SEQ ID NO: 12369 - RNA, 89 nt, synthetic construct
  misc_feature 1..89: note = engineered ribonucleic acid scaffold (ERS) sequence
  source 1..89: mol_type = other RNA
atctgtgcgttctatctgattactctgcgcacatcaccagcgactatgtcgtagtgggtaaagctccctcttcggagggagcatcagag

SEQ ID NO: 12370 - RNA, 90 nt, synthetic construct
  misc_feature 1..90: note = engineered ribonucleic acid scaffold (ERS) sequence
  source 1..90: mol_type = other RNA
atctggcgcttctatctgattactctgggcgccatcaccagcgactatgtcgtagtgggtaaagctccctcttcggagggagcatcagag

SEQ ID NO: 12371 - RNA, 90 nt, synthetic construct
  misc_feature 1..90: note = engineered ribonucleic acid scaffold (ERS) sequence
  source 1..90: mol_type = other RNA
atctggcgcttctatctgattactctgggagccatcaccagcgactatgtcgtagtgggtaaagctccctcttcggagggagcatcagag

SEQ ID NO: 12372 - RNA, 90 nt, synthetic construct
  misc_feature 1..90: note = engineered ribonucleic acid scaffold (ERS) sequence
  source 1..90: mol_type = other RNA
atctggcgcttctatctgattactctgtgagccatcaccagcgactatgtcgtagtgggtaaagctccctcttcggagggagcatcagag

SEQ ID NO: 12373 - RNA, 91 nt, synthetic construct
  misc_feature 1..91: note = engineered ribonucleic acid scaffold (ERS) sequence
  source 1..91: mol_type = other RNA
atctggcgcttctatctgattactctgaggagccatcaccagcgactatgtcgtagtgggtaaagctccctcttcggagggagcatcagag

SEQ ID NO: 12374 - RNA, 90 nt, synthetic construct
  misc_feature 1..90: note = engineered ribonucleic acid scaffold (ERS) sequence
  source 1..90: mol_type = other RNA
atctggcgcttctatctgattactctgatagccatcaccagcgactatgtcgtagtgggtaaagctccctcttcggagggagcatcagag

SEQ ID NO: 12375 - RNA, 91 nt, synthetic construct
  misc_feature 1..91: note = engineered ribonucleic acid scaffold (ERS) sequence
  source 1..91: mol_type = other RNA
atctggcgcttctatctgattactctgagctgccatcaccagcgactatgtcgtagtgggtaaagctccctcttcggagggagcatcagag

SEQ ID NO: 12376 - RNA, 91 nt, synthetic construct
  misc_feature 1..91: note = engineered ribonucleic acid scaffold (ERS) sequence
  source 1..91: mol_type = other RNA
atctggcgcttctatctgattactctgagtagccatcaccagcgactatgtcgtagtgggtaaagctccctcttcggagggagcatcagag

SEQ ID NO: 12377 - RNA, 91 nt, synthetic construct
  misc_feature 1..91: note = engineered ribonucleic acid scaffold (ERS) sequence
  source 1..91: mol_type = other RNA
atctggcacttctatctgattactctgagtagccatcaccagcgactatgtcgtagtgggtaaagctccctcttcggagggagcatcagag

SEQ ID NO: 12378 - RNA, 90 nt, synthetic construct
  misc_feature 1..90: note = engineered ribonucleic acid scaffold (ERS) sequence
  source 1..90: mol_type = other RNA
atctggcgcttctatctgattactctgagcaccatcaccagcgactatgtcgtagtgggtaaagctccctcttcggagggagcatcagag

SEQ ID NO: 12379 - RNA, 90 nt, synthetic construct
  misc_feature 1..90: note = engineered ribonucleic acid scaffold (ERS) sequence
  source 1..90: mol_type = other RNA
atctggcacttctatctgattactctgagcgccatcaccagcgactatgtcgtagtgggtaaagctccctcttcggagggagcatcagag

SEQ ID NO: 12380 - RNA, 90 nt, synthetic construct
  misc_feature 1..90: note = engineered ribonucleic acid scaffold (ERS) sequence
  source 1..90: mol_type = other RNA
atctggcgcttctatctgattactctgagggccatcaccagcgactatgtcgtagtgggtaaagctccctcttcggagggagcatcagag

SEQ ID NO: 12381 - RNA, 90 nt, synthetic construct
  misc_feature 1..90: note = engineered ribonucleic acid scaffold (ERS) sequence
  source 1..90: mol_type = other RNA
atctggcgcttctatctgattactctgagtgccgtcaccagcgactatgtcgtagtgggtaaagctccctcttcggagggagcatcagag

SEQ ID NO: 12382 - RNA, 90 nt, synthetic construct
  misc_feature 1..90: note = engineered ribonucleic acid scaffold (ERS) sequence
  source 1..90: mol_type = other RNA
atctggcacttctatctgattactctgagtgccatcaccagcgactatgtcgtagtgggtaaagctccctcttcggagggagcatcagag

SEQ ID NO: 12383 - RNA, 90 nt, synthetic construct
  misc_feature 1..90: note = engineered ribonucleic acid scaffold (ERS) sequence
  source 1..90: mol_type = other RNA
atctggcgcttctatctgattactctgagaaccatcaccagcgactatgtcgtagtgggtaaagctccctcttcggagggagcatcagag

SEQ ID NO: 12384 - RNA, 90 nt, synthetic construct
  misc_feature 1..90: note = engineered ribonucleic acid scaffold (ERS) sequence
  source 1..90: mol_type = other RNA
atctggcgcttctatctgattactctgagagccgtcaccagcgactatgtcgtagtgggtaaagctccctcttcggagggagcatcagag

SEQ ID NO: 12385 - RNA, 90 nt, synthetic construct
  misc_feature 1..90: note = engineered ribonucleic acid scaffold (ERS) sequence
  source 1..90: mol_type = other RNA
atctggcgcttctatctgattactctgagagccttcaccagcgactatgtcgtagtgggtaaagctccctcttcggagggagcatcagag

SEQ ID NO: 12386 - RNA, 90 nt, synthetic construct
  misc_feature 1..90: note = engineered ribonucleic acid scaffold (ERS) sequence
  source 1..90: mol_type = other RNA
atctggggcttctatctgattactctgagacccatcaccagcgactatgtcgtagtgggtaaagctccctcttcggagggagcatcagag

SEQ ID NO: 12387 - RNA, 90 nt, synthetic construct
  misc_feature 1..90: note = engineered ribonucleic acid scaffold (ERS) sequence
  source 1..90: mol_type = other RNA
atctggtgcttctatctgattactctgagagccatcaccagcgactatgtcgtagtgggtaaagctccctcttcggagggagcatcagag

SEQ ID NO: 12388 - RNA, 90 nt, synthetic construct
  misc_feature 1..90: note = engineered ribonucleic acid scaffold (ERS) sequence
  source 1..90: mol_type = other RNA
atctgggccttctatctgattactctgaggcccatcaccagcgactatgtcgtagtgggtaaagctccctcttcggagggagcatcagag

SEQ ID NO: 12389 - RNA, 91 nt, synthetic construct
  misc_feature 1..91: note = engineered ribonucleic acid scaffold (ERS) sequence
  source 1..91: mol_type = other RNA
atctggcccttctatctgattactctgaggagccatcaccagcgactatgtcgtagtgggtaaagctccctcttcggagggagcatcagag

SEQ ID NO: 12390 - RNA, 90 nt, synthetic construct
  misc_feature 1..90: note = engineered ribonucleic acid scaffold (ERS) sequence
  source 1..90: mol_type = other RNA
atctggcccttctatctgattactctgagggccatcaccagcgactatgtcgtagtgggtaaagctccctcttcggagggagcatcagag

SEQ ID NO: 12391 - RNA, 90 nt, synthetic construct
  misc_feature 1..90: note = engineered ribonucleic acid scaffold (ERS) sequence
  source 1..90: mol_type = other RNA
atctggcccttctatctgattactctgagtgccatcaccagcgactatgtcgtagtgggtaaagctccctcttcggagggagcatcagag

SEQ ID NO: 12392 - RNA, 90 nt, synthetic construct
  misc_feature 1..90: note = engineered ribonucleic acid scaffold (ERS) sequence
  source 1..90: mol_type = other RNA
atctggcccttctatctgattactctgagagccatcaccagcgactatgtcgtagtgggtaaagctccctcttcggagggagcatcagag

SEQ ID NO: 12393 - RNA, 91 nt, synthetic construct
  misc_feature 1..91: note = engineered ribonucleic acid scaffold (ERS) sequence
  source 1..91: mol_type = other RNA
atctggcgcttctatctgattactctgagcagccatcaccagcgactatgtcgtagtgggtaaagctccctcttcggagggagcatcagag

SEQ ID NO: 12394 - RNA, 90 nt, synthetic construct
  misc_feature 1..90: note = engineered ribonucleic acid scaffold (ERS) sequence
  source 1..90: mol_type = other RNA
atctggcgcttctatctgattactctgagtgccatcaccagcgactatgtcgtagtgggtaaagctccctcttcggagggagcatcagag

SEQ ID NO: 12395 - RNA, 90 nt, synthetic construct
  misc_feature 1..90: note = engineered ribonucleic acid scaffold (ERS) sequence
  source 1..90: mol_type = other RNA
atctggcgcttctatctgattactctgagagccatcaccagcgactatgtcgtagtgggtaaagctccctcttcggagggagcatcagag

SEQ ID NO: 12396 - RNA, 90 nt, synthetic construct
  misc_feature 1..90: note = engineered ribonucleic acid scaffold (ERS) sequence
  source 1..90: mol_type = other RNA
atctggctcttctatctgattactctgagcgccatcaccagcgactatgtcgtagtgggtaaagctccctcttcggagggagcatcagag

SEQ ID NO: 12397 - RNA, 90 nt, synthetic construct
  misc_feature 1..90: note = engineered ribonucleic acid scaffold (ERS) sequence
  source 1..90: mol_type = other RNA
atctggctcttctatctgattactctgagggccatcaccagcgactatgtcgtagtgggtaaagctccctcttcggagggagcatcagag

SEQ ID NO: 12398 - RNA, 90 nt, synthetic construct
  misc_feature 1..90: note = engineered ribonucleic acid scaffold (ERS) sequence
  source 1..90: mol_type = other RNA
atctggctcttctatctgattactctgagtgccatcaccagcgactatgtcgtagtgggtaaagctccctcttcggagggagcatcagag

SEQ ID NO: 12399 - RNA, 90 nt, synthetic construct
  misc_feature 1..90: note = engineered ribonucleic acid scaffold (ERS) sequence
  source 1..90: mol_type = other RNA
atctggctcttctatctgattactctgagagccatcaccagcgactatgtcgtagtgggtaaagctccctcttcggagggagcatcagag

SEQ ID NO: 12400 - RNA, 90 nt, synthetic construct
  misc_feature 1..90: note = engineered ribonucleic acid scaffold (ERS) sequence
  source 1..90: mol_type = other RNA
atctggcggttctatctgattactctgagcgccatcaccagcgactatgtcgtagtgggtaaagctccctcttcggagggagcatcagag

SEQ ID NO: 12401 - RNA, 90 nt, synthetic construct
  misc_feature 1..90: note = engineered ribonucleic acid scaffold (ERS) sequence
  source 1..90: mol_type = other RNA
atctggcggttctatctgattactctgagagccatcaccagcgactatgtcgtagtgggtaaagctccctcttcggagggagcatcagag

SEQ ID NO: 12402 - RNA, 87 nt, synthetic construct
  misc_feature 1..87: note = engineered ribonucleic acid scaffold (ERS) sequence
  source 1..87: mol_type = other RNA
aggcgcttctatctgattactctgggcgccatcaccagcgactatgtcgtagtgggtaaagctccctcttcggagggagcatcagag

SEQ ID NO: 12403 - RNA, 87 nt, synthetic construct
  misc_feature 1..87: note = engineered ribonucleic acid scaffold (ERS) sequence
  source 1..87: mol_type = other RNA
aggcgcttctatctgattactctgggagccatcaccagcgactatgtcgtagtgggtaaagctccctcttcggagggagcatcagag

SEQ ID NO: 12404 - RNA, 87 nt, synthetic construct
  misc_feature 1..87: note = engineered ribonucleic acid scaffold (ERS) sequence
  source 1..87: mol_type = other RNA
aggcgcttctatctgattactctgtgagccatcaccagcgactatgtcgtagtgggtaaagctccctcttcggagggagcatcagag

SEQ ID NO: 12405 - RNA, 88 nt, synthetic construct
  misc_feature 1..88: note = engineered ribonucleic acid scaffold (ERS) sequence
  source 1..88: mol_type = other RNA
aggcgcttctatctgattactctgaggagccatcaccagcgactatgtcgtagtgggtaaagctccctcttcggagggagcatcagag

SEQ ID NO: 12406 - RNA, 87 nt, synthetic construct
  misc_feature 1..87: note = engineered ribonucleic acid scaffold (ERS) sequence
  source 1..87: mol_type = other RNA
aggcgcttctatctgattactctgatagccatcaccagcgactatgtcgtagtgggtaaagctccctcttcggagggagcatcagag

SEQ ID NO: 12407 - RNA, 88 nt, synthetic construct
  misc_feature 1..88: note = engineered ribonucleic acid scaffold (ERS) sequence
  source 1..88: mol_type = other RNA
aggcgcttctatctgattactctgagctgccatcaccagcgactatgtcgtagtgggtaaagctccctcttcggagggagcatcagag

SEQ ID NO: 12408 - RNA, 88 nt, synthetic construct
  misc_feature 1..88: note = engineered ribonucleic acid scaffold (ERS) sequence
  source 1..88: mol_type = other RNA
aggcgcttctatctgattactctgagtagccatcaccagcgactatgtcgtagtgggtaaagctccctcttcggagggagcatcagag

SEQ ID NO: 12409 - RNA, 88 nt, synthetic construct
  misc_feature 1..88: note = engineered ribonucleic acid scaffold (ERS) sequence
  source 1..88: mol_type = other RNA
aggcacttctatctgattactctgagtagccatcaccagcgactatgtcgtagtgggtaaagctccctcttcggagggagcatcagag

SEQ ID NO: 12410 - RNA, 87 nt, synthetic construct
  misc_feature 1..87: note = engineered ribonucleic acid scaffold (ERS) sequence
  source 1..87: mol_type = other RNA
aggcgcttctatctgattactctgagcaccatcaccagcgactatgtcgtagtgggtaaagctccctcttcggagggagcatcagag

SEQ ID NO: 12411 - RNA, 87 nt, synthetic construct
  misc_feature 1..87: note = engineered ribonucleic acid scaffold (ERS) sequence
  source 1..87: mol_type = other RNA
aggcacttctatctgattactctgagcgccatcaccagcgactatgtcgtagtgggtaaagctccctcttcggagggagcatcagag

SEQ ID NO: 12412 - RNA, 87 nt, synthetic construct
  misc_feature 1..87: note = engineered ribonucleic acid scaffold (ERS) sequence
  source 1..87: mol_type = other RNA
aggcgcttctatctgattactctgagggccatcaccagcgactatgtcgtagtgggtaaagctccctcttcggagggagcatcagag

SEQ ID NO: 12413 - RNA, 87 nt, synthetic construct
  misc_feature 1..87: note = engineered ribonucleic acid scaffold (ERS) sequence
  source 1..87: mol_type = other RNA
aggcgcttctatctgattactctgagtgccgtcaccagcgactatgtcgtagtgggtaaagctccctcttcggagggagcatcagag

SEQ ID NO: 12414 - RNA, 87 nt, synthetic construct
  misc_feature 1..87: note = engineered ribonucleic acid scaffold (ERS) sequence
  source 1..87: mol_type = other RNA
aggcacttctatctgattactctgagtgccatcaccagcgactatgtcgtagtgggtaaagctccctcttcggagggagcatcagag

SEQ ID NO: 12415 - RNA, 87 nt, synthetic construct
  misc_feature 1..87: note = engineered ribonucleic acid scaffold (ERS) sequence
  source 1..87: mol_type = other RNA
aggcgcttctatctgattactctgagaaccatcaccagcgactatgtcgtagtgggtaaagctccctcttcggagggagcatcagag

SEQ ID NO: 12416 - RNA, 87 nt, synthetic construct
  misc_feature 1..87: note = engineered ribonucleic acid scaffold (ERS) sequence
  source 1..87: mol_type = other RNA
aggcgcttctatctgattactctgagagccgtcaccagcgactatgtcgtagtgggtaaagctccctcttcggagggagcatcagag

SEQ ID NO: 12417 - RNA, 87 nt, synthetic construct
  misc_feature 1..87: note = engineered ribonucleic acid scaffold (ERS) sequence
  source 1..87: mol_type = other RNA
aggcgcttctatctgattactctgagagccttcaccagcgactatgtcgtagtgggtaaagctccctcttcggagggagcatcagag

SEQ ID NO: 12418 - RNA, 87 nt, synthetic construct
  misc_feature 1..87: note = engineered ribonucleic acid scaffold (ERS) sequence
  source 1..87: mol_type = other RNA
aggggcttctatctgattactctgagacccatcaccagcgactatgtcgtagtgggtaaagctccctcttcggagggagcatcagag

SEQ ID NO: 12419 - RNA, 87 nt, synthetic construct
  misc_feature 1..87: note = engineered ribonucleic acid scaffold (ERS) sequence
  source 1..87: mol_type = other RNA
aggtgcttctatctgattactctgagagccatcaccagcgactatgtcgtagtgggtaaagctccctcttcggagggagcatcagag

SEQ ID NO: 12420 - RNA, 87 nt, synthetic construct
  misc_feature 1..87: note = engineered ribonucleic acid scaffold (ERS) sequence
  source 1..87: mol_type = other RNA
agggccttctatctgattactctgaggcccatcaccagcgactatgtcgtagtgggtaaagctccctcttcggagggagcatcagag

SEQ ID NO: 12421 - RNA, 88 nt, synthetic construct
  misc_feature 1..88: note = engineered ribonucleic acid scaffold (ERS) sequence
  source 1..88: mol_type = other RNA
aggcccttctatctgattactctgaggagccatcaccagcgactatgtcgtagtgggtaaagctccctcttcggagggagcatcagag

SEQ ID NO: 12422 - RNA, 87 nt, synthetic construct
  misc_feature 1..87: note = engineered ribonucleic acid scaffold (ERS) sequence
  source 1..87: mol_type = other RNA
aggcccttctatctgattactctgagggccatcaccagcgactatgtcgtagtgggtaaagctccctcttcggagggagcatcagag

SEQ ID NO: 12423 - RNA, 87 nt, synthetic construct
  misc_feature 1..87: note = engineered ribonucleic acid scaffold (ERS) sequence
  source 1..87: mol_type = other RNA
aggcccttctatctgattactctgagtgccatcaccagcgactatgtcgtagtgggtaaagctccctcttcggagggagcatcagag

SEQ ID NO: 12424 - RNA, 87 nt, synthetic construct
  misc_feature 1..87: note = engineered ribonucleic acid scaffold (ERS) sequence
  source 1..87: mol_type = other RNA
aggcccttctatctgattactctgagagccatcaccagcgactatgtcgtagtgggtaaagctccctcttcggagggagcatcagag

SEQ ID NO: 12425 - RNA, 88 nt, synthetic construct
  misc_feature 1..88: note = engineered ribonucleic acid scaffold (ERS) sequence
  source 1..88: mol_type = other RNA
aggcgcttctatctgattactctgagcagccatcaccagcgactatgtcgtagtgggtaaagctccctcttcggagggagcatcagag

SEQ ID NO: 12426 - RNA, 87 nt, synthetic construct
  misc_feature 1..87: note = engineered ribonucleic acid scaffold (ERS) sequence
  source 1..87: mol_type = other RNA
aggcgcttctatctgattactctgagtgccatcaccagcgactatgtcgtagtgggtaaagctccctcttcggagggagcatcagag

SEQ ID NO: 12427 - RNA, 87 nt, synthetic construct
  misc_feature 1..87: note = engineered ribonucleic acid scaffold (ERS) sequence
  source 1..87: mol_type = other RNA
aggcgcttctatctgattactctgagagccatcaccagcgactatgtcgtagtgggtaaagctccctcttcggagggagcatcagag

SEQ ID NO: 12428 - RNA, 87 nt, synthetic construct
  misc_feature 1..87: note = engineered ribonucleic acid scaffold (ERS) sequence
  source 1..87: mol_type = other RNA
aggctcttctatctgattactctgagcgccatcaccagcgactatgtcgtagtgggtaaagctccctcttcggagggagcatcagag

SEQ ID NO: 12429 - RNA, 87 nt, synthetic construct
  misc_feature 1..87: note = engineered ribonucleic acid scaffold (ERS) sequence
  source 1..87: mol_type = other RNA
aggctcttctatctgattactctgagggccatcaccagcgactatgtcgtagtgggtaaagctccctcttcggagggagcatcagag

SEQ ID NO: 12430 - RNA, 87 nt, synthetic construct
  misc_feature 1..87: note = engineered ribonucleic acid scaffold (ERS) sequence
  source 1..87: mol_type = other RNA
aggctcttctatctgattactctgagtgccatcaccagcgactatgtcgtagtgggtaaagctccctcttcggagggagcatcagag

SEQ ID NO: 12431 - RNA, 87 nt, synthetic construct
  misc_feature 1..87: note = engineered ribonucleic acid scaffold (ERS) sequence
  source 1..87: mol_type = other RNA
aggctcttctatctgattactctgagagccatcaccagcgactatgtcgtagtgggtaaagctccctcttcggagggagcatcagag

SEQ ID NO: 12432 - RNA, 87 nt, synthetic construct
  misc_feature 1..87: note = engineered ribonucleic acid scaffold (ERS) sequence
  source 1..87: mol_type = other RNA
aggcggttctatctgattactctgagcgccatcaccagcgactatgtcgtagtgggtaaagctccctcttcggagggagcatcagag

SEQ ID NO: 12433 - RNA, 87 nt, synthetic construct
  misc_feature 1..87: note = engineered ribonucleic acid scaffold (ERS) sequence
  source 1..87: mol_type = other RNA
aggcggttctatctgattactctgagagccatcaccagcgactatgtcgtagtgggtaaagctccctcttcggagggagcatcagag

SEQ ID NO: 12434 - RNA, 87 nt, synthetic construct
  misc_feature 1..87: note = engineered ribonucleic acid scaffold (ERS) sequence
  source 1..87: mol_type = other RNA
aacacggttctatctgattactctgccgtgttcaccagcgactatgtcgtagtgggtaaagctccctcttcggagggagcatcagag

SEQ ID NO: 12435 - RNA, 87 nt, synthetic construct
  misc_feature 1..87: note = engineered ribonucleic acid scaffold (ERS) sequence
  source 1..87: mol_type = other RNA
aactggtttctatctgattactctgaccagttcaccagcgactatgtcgtagtgggtaaagctccctcttcggagggagcatcagag

SEQ ID NO: 12436 - RNA, 87 nt, synthetic construct
  misc_feature 1..87: note = engineered ribonucleic acid scaffold (ERS) sequence
  source 1..87: mol_type = other RNA
aaggccgttctatctgattactctgcggccttcaccagcgactatgtcgtagtgggtaaagctccctcttcggagggagcatcagag

SEQ ID NO: 12437 - RNA, 87 nt, synthetic construct
  misc_feature 1..87: note = engineered ribonucleic acid scaffold (ERS) sequence
  source 1..87: mol_type = other RNA
aaggtccttctatctgattactctgggaccttcaccagcgactatgtcgtagtgggtaaagctccctcttcggagggagcatcagag

SEQ ID NO: 12438 - RNA, 87 nt, synthetic construct
  misc_feature 1..87: note = engineered ribonucleic acid scaffold (ERS) sequence
  source 1..87: mol_type = other RNA
acagcaattctatctgattactctgttgctgtcaccagcgactatgtcgtagtgggtaaagctccctcttcggagggagcatcagag

SEQ ID NO: 12439 - RNA, 87 nt, synthetic construct
  misc_feature 1..87: note = engineered ribonucleic acid scaffold (ERS) sequence
  source 1..87: mol_type = other RNA
acgagacttctatctgattactctgggctcgtcaccagcgactatgtcgtagtgggtaaagctccctcttcggagggagcatcagag

SEQ ID NO: 12440 - RNA, 87 nt, synthetic construct
  misc_feature 1..87: note = engineered ribonucleic acid scaffold (ERS) sequence
  source 1..87: mol_type = other RNA
actgtagttctatctgattactctgctacagtcaccagcgactatgtcgtagtgggtaaagctccctcttcggagggagcatcagag

SEQ ID NO: 12441 - RNA, 87 nt, synthetic construct
  misc_feature 1..87: note = engineered ribonucleic acid scaffold (ERS) sequence
  source 1..87: mol_type = other RNA
agagcacttctatctgattactctggggctctcaccagcgactatgtcgtagtgggtaaagctccctcttcggagggagcatcagag

SEQ ID NO: 12442 - RNA, 87 nt, synthetic construct
  misc_feature 1..87: note = engineered ribonucleic acid scaffold (ERS) sequence
  source 1..87: mol_type = other RNA
agaggtgttctatctgattactctgcacctctcaccagcgactatgtcgtagtgggtaaagctccctcttcggagggagcatcagag

SEQ ID NO: 12443 - RNA, 87 nt, synthetic construct
  misc_feature 1..87: note = engineered ribonucleic acid scaffold (ERS) sequence
  source 1..87: mol_type = other RNA
agggactttctatctgattactctgagtccctcaccagcgactatgtcgtagtgggtaaagctccctcttcggagggagcatcagag

SEQ ID NO: 12444 - RNA, 87 nt, synthetic construct
  misc_feature 1..87: note = engineered ribonucleic acid scaffold (ERS) sequence
  source 1..87: mol_type = other RNA
agggcaattctatctgattactctgttgccctcaccagcgactatgtcgtagtgggtaaagctccctcttcggagggagcatcagag

SEQ ID NO: 12445 - RNA, 87 nt, synthetic construct
  misc_feature 1..87: note = engineered ribonucleic acid scaffold (ERS) sequence
  source 1..87: mol_type = other RNA
atgtgcgttctatctgattactctgcgcacatcaccagcgactatgtcgtagtgggtaaagctccctcttcggagggagcatcagag

SEQ ID NO: 12446 - RNA, 88 nt, synthetic construct
  misc_feature 1..88: note = engineered ribonucleic acid scaffold (ERS) sequence
  source 1..88: mol_type = other RNA
atggcgcttctatctgattactctgggcgccatcaccagcgactatgtcgtagtgggtaaagctccctcttcggagggagcatcagag

SEQ ID NO: 12447 - RNA, 88 nt, synthetic construct
  misc_feature 1..88: note = engineered ribonucleic acid scaffold (ERS) sequence
  source 1..88: mol_type = other RNA
atggcgcttctatctgattactctgggagccatcaccagcgactatgtcgtagtgggtaaagctccctcttcggagggagcatcagag

SEQ ID NO: 12448 - RNA, 88 nt, synthetic construct
  misc_feature 1..88: note = engineered ribonucleic acid scaffold (ERS) sequence
  source 1..88: mol_type = other RNA
atggcgcttctatctgattactctgtgagccatcaccagcgactatgtcgtagtgggtaaagctccctcttcggagggagcatcagag

SEQ ID NO: 12449 - RNA, 89 nt, synthetic construct
  misc_feature 1..89: note = engineered ribonucleic acid scaffold (ERS) sequence
  source 1..89: mol_type = other RNA
atggcgcttctatctgattactctgaggagccatcaccagcgactatgtcgtagtgggtaaagctccctcttcggagggagcatcagag

SEQ ID NO: 12450 - RNA, 88 nt, synthetic construct
  misc_feature 1..88: note = engineered ribonucleic acid scaffold (ERS) sequence
  source 1..88: mol_type = other RNA
atggcgcttctatctgattactctgatagccatcaccagcgactatgtcgtagtgggtaaagctccctcttcggagggagcatcagag

SEQ ID NO: 12451 - RNA, 89 nt, synthetic construct
  misc_feature 1..89: note = engineered ribonucleic acid scaffold (ERS) sequence
  source 1..89: mol_type = other RNA
atggcgcttctatctgattactctgagctgccatcaccagcgactatgtcgtagtgggtaaagctccctcttcggagggagcatcagag

SEQ ID NO: 12452 - RNA, 89 nt, synthetic construct
  misc_feature 1..89: note = engineered ribonucleic acid scaffold (ERS) sequence
  source 1..89: mol_type = other RNA
atggcgcttctatctgattactctgagtagccatcaccagcgactatgtcgtagtgggtaaagctccctcttcggagggagcatcagag

SEQ ID NO: 12453 - RNA, 89 nt, synthetic construct
  misc_feature 1..89: note = engineered ribonucleic acid scaffold (ERS) sequence
  source 1..89: mol_type = other RNA
atggcacttctatctgattactctgagtagccatcaccagcgactatgtcgtagtgggtaaagctccctcttcggagggagcatcagag

SEQ ID NO: 12454 - RNA, 88 nt, synthetic construct
  misc_feature 1..88: note = engineered ribonucleic acid scaffold (ERS) sequence
  source 1..88: mol_type = other RNA
atggcgcttctatctgattactctgagcaccatcaccagcgactatgtcgtagtgggtaaagctccctcttcggagggagcatcagag

SEQ ID NO: 12455 - RNA, 88 nt, synthetic construct
  misc_feature 1..88: note = engineered ribonucleic acid scaffold (ERS) sequence
  source 1..88: mol_type = other RNA
atggcacttctatctgattactctgagcgccatcaccagcgactatgtcgtagtgggtaaagctccctcttcggagggagcatcagag

SEQ ID NO: 12456 - RNA, 88 nt, synthetic construct
  misc_feature 1..88: note = engineered ribonucleic acid scaffold (ERS) sequence
  source 1..88: mol_type = other RNA
atggcgcttctatctgattactctgagggccatcaccagcgactatgtcgtagtgggtaaagctccctcttcggagggagcatcagag

SEQ ID NO: 12457 - RNA, 88 nt, synthetic construct
  misc_feature 1..88: note = engineered ribonucleic acid scaffold (ERS) sequence
  source 1..88: mol_type = other RNA
atggcgcttctatctgattactctgagtgccgtcaccagcgactatgtcgtagtgggtaaagctccctcttcggagggagcatcagag

SEQ ID NO: 12458 - RNA, 88 nt, synthetic construct
  misc_feature 1..88: note = engineered ribonucleic acid scaffold (ERS) sequence
  source 1..88: mol_type = other RNA
atggcacttctatctgattactctgagtgccatcaccagcgactatgtcgtagtgggtaaagctccctcttcggagggagcatcagag

SEQ ID NO: 12459 - RNA, 88 nt, synthetic construct
  misc_feature 1..88: note = engineered ribonucleic acid scaffold (ERS) sequence
  source 1..88: mol_type = other RNA
atggcgcttctatctgattactctgagaaccatcaccagcgactatgtcgtagtgggtaaagctccctcttcggagggagcatcagag

SEQ ID NO: 12460 - RNA, 88 nt, synthetic construct
  misc_feature 1..88: note = engineered ribonucleic acid scaffold (ERS) sequence
  source 1..88: mol_type = other RNA
atggcgcttctatctgattactctgagagccgtcaccagcgactatgtcgtagtgggtaaagctccctcttcggagggagcatcagag

SEQ ID NO: 12461 - RNA, 88 nt, synthetic construct
  misc_feature 1..88: note = engineered ribonucleic acid scaffold (ERS) sequence
  source 1..88: mol_type = other RNA
atggcgcttctatctgattactctgagagccttcaccagcgactatgtcgtagtgggtaaagctccctcttcggagggagcatcagag

SEQ ID NO: 12462 - RNA, 88 nt, synthetic construct
  misc_feature 1..88: note = engineered ribonucleic acid scaffold (ERS) sequence
  source 1..88: mol_type = other RNA
atggggcttctatctgattactctgagacccatcaccagcgactatgtcgtagtgggtaaagctccctcttcggagggagcatcagag

SEQ ID NO: 12463 - RNA, 90 nt, synthetic construct
  misc_feature 1..90: note = engineered ribonucleic acid scaffold (ERS) sequence
  source 1..90: mol_type = other RNA
aacacggtacttctatctgattactctgccgtgttcaccagcgactatgtcgtagtgggtaaagctccctcttcggagggagcatcagag

SEQ ID NO: 12464 - RNA, 90 nt, synthetic construct
  misc_feature 1..90: note = engineered ribonucleic acid scaffold (ERS) sequence
  source 1..90: mol_type = other RNA
aactggttacttctatctgattactctgaccagttcaccagcgactatgtcgtagtgggtaaagctccctcttcggagggagcatcagag

SEQ ID NO: 12465 - RNA, 90 nt, synthetic construct
  misc_feature 1..90: note = engineered ribonucleic acid scaffold (ERS) sequence
  source 1..90: mol_type = other RNA
aaggccgtacttctatctgattactctgcggccttcaccagcgactatgtcgtagtgggtaaagctccctcttcggagggagcatcagag

SEQ ID NO: 12466 - RNA, 90 nt, synthetic construct
  misc_feature 1..90: note = engineered ribonucleic acid scaffold (ERS) sequence
  source 1..90: mol_type = other RNA
aaggtcctacttctatctgattactctgggaccttcaccagcgactatgtcgtagtgggtaaagctccctcttcggagggagcatcagag

SEQ ID NO: 12467 - RNA, 90 nt, synthetic construct
  misc_feature 1..90: note = engineered ribonucleic acid scaffold (ERS) sequence
  source 1..90: mol_type = other RNA
acagcaatacttctatctgattactctgttgctgtcaccagcgactatgtcgtagtgggtaaagctccctcttcggagggagcatcagag

SEQ ID NO: 12468 - RNA, 90 nt, synthetic construct
  misc_feature 1..90: note = engineered ribonucleic acid scaffold (ERS) sequence
  source 1..90: mol_type = other RNA
acgagactacttctatctgattactctgggctcgtcaccagcgactatgtcgtagtgggtaaagctccctcttcggagggagcatcagag

SEQ ID NO: 12469 - RNA, 90 nt, synthetic construct
  misc_feature 1..90: note = engineered ribonucleic acid scaffold (ERS) sequence
  source 1..90: mol_type = other RNA
actgtagtacttctatctgattactctgctacagtcaccagcgactatgtcgtagtgggtaaagctccctcttcggagggagcatcagag

SEQ ID NO: 12470 - RNA, 90 nt, synthetic construct
  misc_feature 1..90: note = engineered ribonucleic acid scaffold (ERS) sequence
  source 1..90: mol_type = other RNA
agagcactacttctatctgattactctggggctctcaccagcgactatgtcgtagtgggtaaagctccctcttcggagggagcatcagag

SEQ ID NO: 12471 - RNA, 90 nt, synthetic construct
  misc_feature 1..90: note = engineered ribonucleic acid scaffold (ERS) sequence
  source 1..90: mol_type = other RNA
agaggtgtacttctatctgattactctgcacctctcaccagcgactatgtcgtagtgggtaaagctccctcttcggagggagcatcagag

SEQ ID NO: 12472 - RNA, 90 nt, synthetic construct
  misc_feature 1..90: note = engineered ribonucleic acid scaffold (ERS) sequence
  source 1..90: mol_type = other RNA
agggacttacttctatctgattactctgagtccctcaccagcgactatgtcgtagtgggtaaagctccctcttcggagggagcatcagag

SEQ ID NO: 12473 - RNA, 90 nt, synthetic construct
  misc_feature 1..90: note = engineered ribonucleic acid scaffold (ERS) sequence
  source 1..90: mol_type = other RNA
agggcaatacttctatctgattactctgttgccctcaccagcgactatgtcgtagtgggtaaagctccctcttcggagggagcatcagag

SEQ ID NO: 12474 - RNA, 90 nt, synthetic construct
  misc_feature 1..90: note = engineered ribonucleic acid scaffold (ERS) sequence
  source 1..90: mol_type = other RNA
atgtgcgtacttctatctgattactctgcgcacatcaccagcgactatgtcgtagtgggtaaagctccctcttcggagggagcatcagag

SEQ ID NO: 12475 - RNA, 88 nt, synthetic construct
  misc_feature 1..88: note = engineered ribonucleic acid scaffold (ERS) sequence
  source 1..88: mol_type = other RNA
atggtgcttctatctgattactctgggcgccatcaccagcgactatgtcgtagtgggtaaagctccctcttcggagggagcatcagag

SEQ ID NO: 12476 - RNA, 88 nt, synthetic construct
  misc_feature 1..88: note = engineered ribonucleic acid scaffold (ERS) sequence
  source 1..88: mol_type = other RNA
atggtgcttctatctgattactctgggagccatcaccagcgactatgtcgtagtgggtaaagctccctcttcggagggagcatcagag

SEQ ID NO: 12477 - RNA, 88 nt, synthetic construct
  misc_feature 1..88: note = engineered ribonucleic acid scaffold (ERS) sequence
  source 1..88: mol_type = other RNA
atggtgcttctatctgattactctgtgagccatcaccagcgactatgtcgtagtgggtaaagctccctcttcggagggagcatcagag

SEQ ID NO: 12478 - RNA, 89 nt, synthetic construct
  misc_feature 1..89: note = engineered ribonucleic acid scaffold (ERS) sequence
  source 1..89: mol_type = other RNA
atggtgcttctatctgattactctgaggagccatcaccagcgactatgtcgtagtgggtaaagctccctcttcggagggagcatcagag

SEQ ID NO: 12479 - RNA, 88 nt, synthetic construct
  misc_feature 1..88: note = engineered ribonucleic acid scaffold (ERS) sequence
  source 1..88: mol_type = other RNA
atggtgcttctatctgattactctgatagccatcaccagcgactatgtcgtagtgggtaaagctccctcttcggagggagcatcagag

SEQ ID NO: 12480 - RNA, 89 nt, synthetic construct
  misc_feature 1..89: note = engineered ribonucleic acid scaffold (ERS) sequence
  source 1..89: mol_type = other RNA
atggtgcttctatctgattactctgagctgccatcaccagcgactatgtcgtagtgggtaaagctccctcttcggagggagcatcagag

SEQ ID NO: 12481 - RNA, 89 nt, synthetic construct
  misc_feature 1..89: note = engineered ribonucleic acid scaffold (ERS) sequence
  source 1..89: mol_type = other RNA
atggtgcttctatctgattactctgagtagccatcaccagcgactatgtcgtagtgggtaaagctccctcttcggagggagcatcagag

SEQ ID NO: 12482 - RNA, 89 nt, synthetic construct
  misc_feature 1..89: note = engineered ribonucleic acid scaffold (ERS) sequence
  source 1..89: mol_type = other RNA
atggtacttctatctgattactctgagtagccatcaccagcgactatgtcgtagtgggtaaagctccctcttcggagggagcatcagag

SEQ ID NO: 12483 - RNA, 88 nt, synthetic construct
  misc_feature 1..88: note = engineered ribonucleic acid scaffold (ERS) sequence
  source 1..88: mol_type = other RNA
atggtgcttctatctgattactctgagcaccatcaccagcgactatgtcgtagtgggtaaagctccctcttcggagggagcatcagag

SEQ ID NO: 12484 - RNA, 88 nt, synthetic construct
  misc_feature 1..88: note = engineered ribonucleic acid scaffold (ERS) sequence
  source 1..88: mol_type = other RNA
atggtacttctatctgattactctgagcgccatcaccagcgactatgtcgtagtgggtaaagctccctcttcggagggagcatcagag

SEQ ID NO: 12485 - RNA, 88 nt, synthetic construct
  misc_feature 1..88: note = engineered ribonucleic acid scaffold (ERS) sequence
  source 1..88: mol_type = other RNA
atggtgcttctatctgattactctgagggccatcaccagcgactatgtcgtagtgggtaaagctccctcttcggagggagcatcagag

SEQ ID NO: 12486 - RNA, 88 nt, synthetic construct
  misc_feature 1..88: note = engineered ribonucleic acid scaffold (ERS) sequence
  source 1..88: mol_type = other RNA
atggtgcttctatctgattactctgagtgccgtcaccagcgactatgtcgtagtgggtaaagctccctcttcggagggagcatcagag

SEQ ID NO: 12487 - RNA, 88 nt, synthetic construct
  misc_feature 1..88: note = engineered ribonucleic acid scaffold (ERS) sequence
  source 1..88: mol_type = other RNA
atggtacttctatctgattactctgagtgccatcaccagcgactatgtcgtagtgggtaaagctccctcttcggagggagcatcagag

SEQ ID NO: 12488 - RNA, 88 nt, synthetic construct
  misc_feature 1..88: note = engineered ribonucleic acid scaffold (ERS) sequence
  source 1..88: mol_type = other RNA
atggtgcttctatctgattactctgagaaccatcaccagcgactatgtcgtagtgggtaaagctccctcttcggagggagcatcagag

SEQ ID NO: 12489 - RNA, 88 nt, synthetic construct
  misc_feature 1..88: note = engineered ribonucleic acid scaffold (ERS) sequence
  source 1..88: mol_type = other RNA
atggtgcttctatctgattactctgagagccgtcaccagcgactatgtcgtagtgggtaaagctccctcttcggagggagcatcagag

SEQ ID NO: 12490 - RNA, 88 nt, synthetic construct
  misc_feature 1..88: note = engineered ribonucleic acid scaffold (ERS) sequence
  source 1..88: mol_type = other RNA
atggtgcttctatctgattactctgagagccttcaccagcgactatgtcgtagtgggtaaagctccctcttcggagggagcatcagag

SEQ ID NO: 12491 - RNA, 89 nt, synthetic construct
  misc_feature 1..89: note = engineered ribonucleic acid scaffold (ERS) sequence
  source 1..89: mol_type = other RNA
atggtggcttctatctgattactctgagacccatcaccagcgactatgtcgtagtgggtaaagctccctcttcggagggagcatcagag

SEQ ID NO: 12492 - RNA, 89 nt, synthetic construct
  misc_feature 1..89: note = engineered ribonucleic acid scaffold (ERS) sequence
  source 1..89: mol_type = other RNA
atggttgcttctatctgattactctgagagccatcaccagcgactatgtcgtagtgggtaaagctccctcttcggagggagcatcagag

SEQ ID NO: 12493 - RNA, 89 nt, synthetic construct
  misc_feature 1..89: note = engineered ribonucleic acid scaffold (ERS) sequence
  source 1..89: mol_type = other RNA
atggtgccttctatctgattactctgaggcccatcaccagcgactatgtcgtagtgggtaaagctccctcttcggagggagcatcagag

SEQ ID NO: 12494 - RNA, 89 nt, synthetic construct
  misc_feature 1..89: note = engineered ribonucleic acid scaffold (ERS) sequence
  source 1..89: mol_type = other RNA
atggtccttctatctgattactctgaggagccatcaccagcgactatgtcgtagtgggtaaagctccctcttcggagggagcatcagag

SEQ ID NO: 12495 - RNA, 88 nt, synthetic construct
  misc_feature 1..88: note = engineered ribonucleic acid scaffold (ERS) sequence
  source 1..88: mol_type = other RNA
atggtccttctatctgattactctgagggccatcaccagcgactatgtcgtagtgggtaaagctccctcttcggagggagcatcagag

SEQ ID NO: 12496 - RNA, 88 nt, synthetic construct
  misc_feature 1..88: note = engineered ribonucleic acid scaffold (ERS) sequence
  source 1..88: mol_type = other RNA
atggtccttctatctgattactctgagtgccatcaccagcgactatgtcgtagtgggtaaagctccctcttcggagggagcatcagag

SEQ ID NO: 12497 - RNA, 88 nt, synthetic construct
  misc_feature 1..88: note = engineered ribonucleic acid scaffold (ERS) sequence
  source 1..88: mol_type = other RNA
atggtccttctatctgattactctgagagccatcaccagcgactatgtcgtagtgggtaaagctccctcttcggagggagcatcagag

SEQ ID NO: 12498 - RNA, 89 nt, synthetic construct
  misc_feature 1..89: note = engineered ribonucleic acid scaffold (ERS) sequence
  source 1..89: mol_type = other RNA
atggtgcttctatctgattactctgagcagccatcaccagcgactatgtcgtagtgggtaaagctccctcttcggagggagcatcagag

SEQ ID NO: 12499 - RNA, 88 nt, synthetic construct
  misc_feature 1..88: note = engineered ribonucleic acid scaffold (ERS) sequence
  source 1..88: mol_type = other RNA
atggtgcttctatctgattactctgagtgccatcaccagcgactatgtcgtagtgggtaaagctccctcttcggagggagcatcagag

SEQ ID NO: 12500 - RNA, 88 nt, synthetic construct
  misc_feature 1..88: note = engineered ribonucleic acid scaffold (ERS) sequence
  source 1..88: mol_type = other RNA
atggtgcttctatctgattactctgagagccatcaccagcgactatgtcgtagtgggtaaagctccctcttcggagggagcatcagag

SEQ ID NO: 12501 - RNA, 88 nt, synthetic construct
  misc_feature 1..88: note = engineered ribonucleic acid scaffold (ERS) sequence
  source 1..88: mol_type = other RNA
atggttcttctatctgattactctgagcgccatcaccagcgactatgtcgtagtgggtaaagctccctcttcggagggagcatcagag

SEQ ID NO: 12502 - RNA, 88 nt, synthetic construct
  misc_feature 1..88: note = engineered ribonucleic acid scaffold (ERS) sequence
  source 1..88: mol_type = other RNA
atggttcttctatctgattactctgagggccatcaccagcgactatgtcgtagtgggtaaagctccctcttcggagggagcatcagag

SEQ ID NO: 12503 - RNA, 88 nt, synthetic construct
  misc_feature 1..88: note = engineered ribonucleic acid scaffold (ERS) sequence
  source 1..88: mol_type = other RNA
atggttcttctatctgattactctgagtgccatcaccagcgactatgtcgtagtgggtaaagctccctcttcggagggagcatcagag

SEQ ID NO: 12504 - RNA, 88 nt, synthetic construct
  misc_feature 1..88: note = engineered ribonucleic acid scaffold (ERS) sequence
  source 1..88: mol_type = other RNA
atggttcttctatctgattactctgagagccatcaccagcgactatgtcgtagtgggtaaagctccctcttcggagggagcatcagag

SEQ ID NO: 12505 - RNA, 88 nt, synthetic construct
  misc_feature 1..88: note = engineered ribonucleic acid scaffold (ERS) sequence
  source 1..88: mol_type = other RNA
atggtggttctatctgattactctgagcgccatcaccagcgactatgtcgtagtgggtaaagctccctcttcggagggagcatcagag

SEQ ID NO: 12506 - RNA, 88 nt, synthetic construct
  misc_feature 1..88: note = engineered ribonucleic acid scaffold (ERS) sequence
  source 1..88: mol_type = other RNA
atggtggttctatctgattactctgagagccatcaccagcgactatgtcgtagtgggtaaagctccctcttcggagggagcatcagag

SEQ ID NO: 12507 - RNA, 88 nt, synthetic construct
  misc_feature 1..88: note = engineered ribonucleic acid scaffold (ERS) sequence
  source 1..88: mol_type = other RNA
atgggccttctatctgattactctgaggcccatcaccagcgactatgtcgtagtgggtaaagctccctcttcggagggagcatcagag

SEQ ID NO: 12508 - RNA, 89 nt, synthetic construct
  misc_feature 1..89: note = engineered ribonucleic acid scaffold (ERS) sequence
  source 1..89: mol_type = other RNA
atggcccttctatctgattactctgaggagccatcaccagcgactatgtcgtagtgggtaaagctccctcttcggagggagcatcagag

SEQ ID NO: 12509 - RNA, 88 nt, synthetic construct
  misc_feature 1..88: note = engineered ribonucleic acid scaffold (ERS) sequence
  source 1..88: mol_type = other RNA
atggcccttctatctgattactctgagggccatcaccagcgactatgtcgtagtgggtaaagctccctcttcggagggagcatcagag

SEQ ID NO: 12510 - RNA, 88 nt, synthetic construct
  misc_feature 1..88: note = engineered ribonucleic acid scaffold (ERS) sequence
  source 1..88: mol_type = other RNA
atggcccttctatctgattactctgagtgccatcaccagcgactatgtcgtagtgggtaaagctccctcttcggagggagcatcagag

SEQ ID NO: 12511 - RNA, 88 nt, synthetic construct
  misc_feature 1..88: note = engineered ribonucleic acid scaffold (ERS) sequence
  source 1..88: mol_type = other RNA
atggcccttctatctgattactctgagagccatcaccagcgactatgtcgtagtgggtaaagctccctcttcggagggagcatcagag

SEQ ID NO: 12512 - RNA, 89 nt, synthetic construct
  misc_feature 1..89: note = engineered ribonucleic acid scaffold (ERS) sequence
  source 1..89: mol_type = other RNA
atggcgcttctatctgattactctgagcagccatcaccagcgactatgtcgtagtgggtaaagctccctcttcggagggagcatcagag

SEQ ID NO: 12513 - RNA, 88 nt, synthetic construct
  misc_feature 1..88: note = engineered ribonucleic acid scaffold (ERS) sequence
  source 1..88: mol_type = other RNA
atggcgcttctatctgattactctgagtgccatcaccagcgactatgtcgtagtgggtaaagctccctcttcggagggagcatcagag

SEQ ID NO: 12514 - RNA, 88 nt, synthetic construct
  misc_feature 1..88: note = engineered ribonucleic acid scaffold (ERS) sequence
  source 1..88: mol_type = other RNA
atggcgcttctatctgattactctgagagccatcaccagcgactatgtcgtagtgggtaaagctccctcttcggagggagcatcagag

SEQ ID NO: 12515 - RNA, 88 nt, synthetic construct
  misc_feature 1..88: note = engineered ribonucleic acid scaffold (ERS) sequence
  source 1..88: mol_type = other RNA
atggctcttctatctgattactctgagcgccatcaccagcgactatgtcgtagtgggtaaagctccctcttcggagggagcatcagag

SEQ ID NO: 12516 - RNA, 88 nt, synthetic construct
  misc_feature 1..88: note = engineered ribonucleic acid scaffold (ERS) sequence
  source 1..88: mol_type = other RNA
atggctcttctatctgattactctgagggccatcaccagcgactatgtcgtagtgggtaaagctccctcttcggagggagcatcagag

SEQ ID NO: 12517 - RNA, 88 nt, synthetic construct
  misc_feature 1..88: note = engineered ribonucleic acid scaffold (ERS) sequence
  source 1..88: mol_type = other RNA
atggctcttctatctgattactctgagtgccatcaccagcgactatgtcgtagtgggtaaagctccctcttcggagggagcatcagag

SEQ ID NO: 12518 - RNA, 88 nt, synthetic construct
  misc_feature 1..88: note = engineered ribonucleic acid scaffold (ERS) sequence
  source 1..88: mol_type = other RNA
atggctcttctatctgattactctgagagccatcaccagcgactatgtcgtagtgggtaaagctccctcttcggagggagcatcagag

SEQ ID NO: 12519 - RNA, 88 nt, synthetic construct
  misc_feature 1..88: note = engineered ribonucleic acid scaffold (ERS) sequence
  source 1..88: mol_type = other RNA
atggcggttctatctgattactctgagcgccatcaccagcgactatgtcgtagtgggtaaagctccctcttcggagggagcatcagag

SEQ ID NO: 12520 - RNA, 88 nt, synthetic construct
  misc_feature 1..88: note = engineered ribonucleic acid scaffold (ERS) sequence
  source 1..88: mol_type = other RNA
atggcggttctatctgattactctgagagccatcaccagcgactatgtcgtagtgggtaaagctccctcttcggagggagcatcagag

SEQ ID NO: 12521 - RNA, 88 nt, synthetic construct
  misc_feature 1..88: note = engineered ribonucleic acid scaffold (ERS) sequence
  source 1..88: mol_type = other RNA
aaacacggttctatctgattactctgccgtgttcaccagcgactatgtcgtagtgggtaaagctccctcttcggagggagcatcagag

SEQ ID NO: 12522 - RNA, 88 nt, synthetic construct
  misc_feature 1..88: note = engineered ribonucleic acid scaffold (ERS) sequence
  source 1..88: mol_type = other RNA
aaactggtttctatctgattactctgaccagttcaccagcgactatgtcgtagtgggtaaagctccctcttcggagggagcatcagag

SEQ ID NO: 12523 - RNA, 88 nt, synthetic construct
  misc_feature 1..88: note = engineered ribonucleic acid scaffold (ERS) sequence
  source 1..88: mol_type = other RNA
aaaggccgttctatctgattactctgcggccttcaccagcgactatgtcgtagtgggtaaagctccctcttcggagggagcatcagag

SEQ ID NO: 12524 - RNA, 88 nt, synthetic construct
  misc_feature 1..88: note = engineered ribonucleic acid scaffold (ERS) sequence
  source 1..88: mol_type = other RNA
aaaggtccttctatctgattactctgggaccttcaccagcgactatgtcgtagtgggtaaagctccctcttcggagggagcatcagag

SEQ ID NO: 12525 - RNA, 88 nt, synthetic construct
  misc_feature 1..88: note = engineered ribonucleic acid scaffold (ERS) sequence
  source 1..88: mol_type = other RNA
aacagcaattctatctgattactctgttgctgtcaccagcgactatgtcgtagtgggtaaagctccctcttcggagggagcatcagag

SEQ ID NO: 12526 - RNA, 88 nt, synthetic construct
  misc_feature 1..88: note = engineered ribonucleic acid scaffold (ERS) sequence
  source 1..88: mol_type = other RNA
aacgagacttctatctgattactctgggctcgtcaccagcgactatgtcgtagtgggtaaagctccctcttcggagggagcatcagag

SEQ ID NO: 12527 - RNA, 88 nt, synthetic construct
  misc_feature 1..88: note = engineered ribonucleic acid scaffold (ERS) sequence
  source 1..88: mol_type = other RNA
aactgtagttctatctgattactctgctacagtcaccagcgactatgtcgtagtgggtaaagctccctcttcggagggagcatcagag

SEQ ID NO: 12528 - RNA, 88 nt, synthetic construct
  misc_feature 1..88: note = engineered ribonucleic acid scaffold (ERS) sequence
  source 1..88: mol_type = other RNA
aagagcacttctatctgattactctggggctctcaccagcgactatgtcgtagtgggtaaagctccctcttcggagggagcatcagag

SEQ ID NO: 12529 - RNA, 88 nt, synthetic construct
  misc_feature 1..88: note = engineered ribonucleic acid scaffold (ERS) sequence
  source 1..88: mol_type = other RNA
aagaggtgttctatctgattactctgcacctctcaccagcgactatgtcgtagtgggtaaagctccctcttcggagggagcatcagag

SEQ ID NO: 12530 - RNA, 88 nt, synthetic construct
  misc_feature 1..88: note = engineered ribonucleic acid scaffold (ERS) sequence
  source 1..88: mol_type = other RNA
aagggactttctatctgattactctgagtccctcaccagcgactatgtcgtagtgggtaaagctccctcttcggagggagcatcagag

SEQ ID NO: 12531 - RNA, 88 nt, synthetic construct
  misc_feature 1..88: note = engineered ribonucleic acid scaffold (ERS) sequence
  source 1..88: mol_type = other RNA
aagggcaattctatctgattactctgttgccctcaccagcgactatgtcgtagtgggtaaagctccctcttcggagggagcatcagag

SEQ ID NO: 12532 - RNA, 88 nt, synthetic construct
  misc_feature 1..88: note = engineered ribonucleic acid scaffold (ERS) sequence
  source 1..88: mol_type = other RNA
aatgtgcgttctatctgattactctgcgcacatcaccagcgactatgtcgtagtgggtaaagctccctcttcggagggagcatcagag

SEQ ID NO: 12533 - RNA, 89 nt, synthetic construct
  misc_feature 1..89: note = engineered ribonucleic acid scaffold (ERS) sequence
  source 1..89: mol_type = other RNA
aatggcgcttctatctgattactctgggcgccatcaccagcgactatgtcgtagtgggtaaagctccctcttcggagggagcatcagag

SEQ ID NO: 12534 - RNA, 89 nt, synthetic construct
  misc_feature 1..89: note = engineered ribonucleic acid scaffold (ERS) sequence
  source 1..89: mol_type = other RNA
aatggcgcttctatctgattactctgggagccatcaccagcgactatgtcgtagtgggtaaagctccctcttcggagggagcatcagag

SEQ ID NO: 12535 - RNA, 89 nt, synthetic construct
  misc_feature 1..89: note = engineered ribonucleic acid scaffold (ERS) sequence
  source 1..89: mol_type = other RNA
aatggcgcttctatctgattactctgtgagccatcaccagcgactatgtcgtagtgggtaaagctccctcttcggagggagcatcagag

SEQ ID NO: 12536 - RNA, 90 nt, synthetic construct
  misc_feature 1..90: note = engineered ribonucleic acid scaffold (ERS) sequence
  source 1..90: mol_type = other RNA
aatggcgcttctatctgattactctgaggagccatcaccagcgactatgtcgtagtgggtaaagctccctcttcggagggagcatcagag

SEQ ID NO: 12537 - RNA, 89 nt, synthetic construct
  misc_feature 1..89: note = engineered ribonucleic acid scaffold (ERS) sequence
  source 1..89: mol_type = other RNA
aatggcgcttctatctgattactctgatagccatcaccagcgactatgtcgtagtgggtaaagctccctcttcggagggagcatcagag

SEQ ID NO: 12538 - RNA, 90 nt, synthetic construct
  misc_feature 1..90: note = engineered ribonucleic acid scaffold (ERS) sequence
  source 1..90: mol_type = other RNA
aatggcgcttctatctgattactctgagctgccatcaccagcgactatgtcgtagtgggtaaagctccctcttcggagggagcatcagag

SEQ ID NO: 12539 - RNA, 90 nt, synthetic construct
  misc_feature 1..90: note = engineered ribonucleic acid scaffold (ERS) sequence
  source 1..90: mol_type = other RNA
aatggcgcttctatctgattactctgagtagccatcaccagcgactatgtcgtagtgggtaaagctccctcttcggagggagcatcagag

SEQ ID NO: 12540 - RNA, 90 nt, synthetic construct
  misc_feature 1..90: note = engineered ribonucleic acid scaffold (ERS) sequence
  source 1..90: mol_type = other RNA
aatggcacttctatctgattactctgagtagccatcaccagcgactatgtcgtagtgggtaaagctccctcttcggagggagcatcagag

SEQ ID NO: 12541 - RNA, 89 nt, synthetic construct
  misc_feature 1..89: note = engineered ribonucleic acid scaffold (ERS) sequence
  source 1..89: mol_type = other RNA
aatggcgcttctatctgattactctgagcaccatcaccagcgactatgtcgtagtgggtaaagctccctcttcggagggagcatcagag

SEQ ID NO: 12542 - RNA, 89 nt, synthetic construct
  misc_feature 1..89: note = engineered ribonucleic acid scaffold (ERS) sequence
  source 1..89: mol_type = other RNA
aatggcacttctatctgattactctgagcgccatcaccagcgactatgtcgtagtgggtaaagctccctcttcggagggagcatcagag

SEQ ID NO: 12543 - RNA, 89 nt, synthetic construct
  misc_feature 1..89: note = engineered ribonucleic acid scaffold (ERS) sequence
  source 1..89: mol_type = other RNA
aatggcgcttctatctgattactctgagggccatcaccagcgactatgtcgtagtgggtaaagctccctcttcggagggagcatcagag

SEQ ID NO: 12544 - RNA, 89 nt, synthetic construct
  misc_feature 1..89: note = engineered ribonucleic acid scaffold (ERS) sequence
  source 1..89: mol_type = other RNA
aatggcgcttctatctgattactctgagtgccgtcaccagcgactatgtcgtagtgggtaaagctccctcttcggagggagcatcagag

SEQ ID NO: 12545 - RNA, 89 nt, synthetic construct
  misc_feature 1..89: note = engineered ribonucleic acid scaffold (ERS) sequence
  source 1..89: mol_type = other RNA
aatggcacttctatctgattactctgagtgccatcaccagcgactatgtcgtagtgggtaaagctccctcttcggagggagcatcagag

SEQ ID NO: 12546 - RNA, 89 nt, synthetic construct
  misc_feature 1..89: note = engineered ribonucleic acid scaffold (ERS) sequence
  source 1..89: mol_type = other RNA
aatggcgcttctatctgattactctgagaaccatcaccagcgactatgtcgtagtgggtaaagctccctcttcggagggagcatcagag

SEQ ID NO: 12547 - RNA, 89 nt, synthetic construct
  misc_feature 1..89: note = engineered ribonucleic acid scaffold (ERS) sequence
  source 1..89: mol_type = other RNA
aatggcgcttctatctgattactctgagagccgtcaccagcgactatgtcgtagtgggtaaagctccctcttcggagggagcatcagag

SEQ ID NO: 12548 - RNA, 89 nt, synthetic construct
  misc_feature 1..89: note = engineered ribonucleic acid scaffold (ERS) sequence
  source 1..89: mol_type = other RNA
aatggcgcttctatctgattactctgagagccttcaccagcgactatgtcgtagtgggtaaagctccctcttcggagggagcatcagag

SEQ ID NO: 12549 - RNA, 89 nt, synthetic construct
  misc_feature 1..89: note = engineered ribonucleic acid scaffold (ERS) sequence
  source 1..89: mol_type = other RNA
aatggggcttctatctgattactctgagacccatcaccagcgactatgtcgtagtgggtaaagctccctcttcggagggagcatcagag

SEQ ID NO: 12550 - RNA, 89 nt, synthetic construct
  misc_feature 1..89: note = engineered ribonucleic acid scaffold (ERS) sequence
  source 1..89: mol_type = other RNA
aatggtgcttctatctgattactctgagagccatcaccagcgactatgtcgtagtgggtaaagctccctcttcggagggagcatcagag

SEQ ID NO: 12551 - RNA, 89 nt, synthetic construct
  misc_feature 1..89: note = engineered ribonucleic acid scaffold (ERS) sequence
  source 1..89: mol_type = other RNA
aatgggccttctatctgattactctgaggcccatcaccagcgactatgtcgtagtgggtaaagctccctcttcggagggagcatcagag

SEQ ID NO: 12552 - RNA, 90 nt, synthetic construct
  misc_feature 1..90: note = engineered ribonucleic acid scaffold (ERS) sequence
  source 1..90: mol_type = other RNA
aatggcccttctatctgattactctgaggagccatcaccagcgactatgtcgtagtgggtaaagctccctcttcggagggagcatcagag

SEQ ID NO: 12553 - RNA, 89 nt, synthetic construct
  misc_feature 1..89: note = engineered ribonucleic acid scaffold (ERS) sequence
  source 1..89: mol_type = other RNA
aatggcccttctatctgattactctgagggccatcaccagcgactatgtcgtagtgggtaaagctccctcttcggagggagcatcagag

SEQ ID NO: 12554 - RNA, 89 nt, synthetic construct
  misc_feature 1..89: note = engineered ribonucleic acid scaffold (ERS) sequence
  source 1..89: mol_type = other RNA
aatggcccttctatctgattactctgagtgccatcaccagcgactatgtcgtagtgggtaaagctccctcttcggagggagcatcagag

SEQ ID NO: 12555 - RNA, 89 nt, synthetic construct
  misc_feature 1..89: note = engineered ribonucleic acid scaffold (ERS) sequence
  source 1..89: mol_type = other RNA
aatggcccttctatctgattactctgagagccatcaccagcgactatgtcgtagtgggtaaagctccctcttcggagggagcatcagag

SEQ ID NO: 12556 - RNA, 90 nt, synthetic construct
  misc_feature 1..90: note = engineered ribonucleic acid scaffold (ERS) sequence
  source 1..90: mol_type = other RNA
aatggcgcttctatctgattactctgagcagccatcaccagcgactatgtcgtagtgggtaaagctccctcttcggagggagcatcagag

SEQ ID NO: 12557 - RNA, 89 nt, synthetic construct
  misc_feature 1..89: note = engineered ribonucleic acid scaffold (ERS) sequence
  source 1..89: mol_type = other RNA
aatggcgcttctatctgattactctgagtgccatcaccagcgactatgtcgtagtgggtaaagctccctcttcggagggagcatcagag

SEQ ID NO: 12558 - RNA, 89 nt, synthetic construct
  misc_feature 1..89: note = engineered ribonucleic acid scaffold (ERS) sequence
  source 1..89: mol_type = other RNA
aatggcgcttctatctgattactctgagagccatcaccagcgactatgtcgtagtgggtaaagctccctcttcggagggagcatcagag

SEQ ID NO: 12559 - RNA, 89 nt, synthetic construct
  misc_feature 1..89: note = engineered ribonucleic acid scaffold (ERS) sequence
  source 1..89: mol_type = other RNA
aatggctcttctatctgattactctgagcgccatcaccagcgactatgtcgtagtgggtaaagctccctcttcggagggagcatcagag

SEQ ID NO: 12560 - RNA, 89 nt, synthetic construct
  misc_feature 1..89: note = engineered ribonucleic acid scaffold (ERS) sequence
  source 1..89: mol_type = other RNA
aatggctcttctatctgattactctgagggccatcaccagcgactatgtcgtagtgggtaaagctccctcttcggagggagcatcagag

SEQ ID NO: 12561 - RNA, 89 nt, synthetic construct
  misc_feature 1..89: note = engineered ribonucleic acid scaffold (ERS) sequence
  source 1..89: mol_type = other RNA
aatggctcttctatctgattactctgagtgccatcaccagcgactatgtcgtagtgggtaaagctccctcttcggagggagcatcagag

SEQ ID NO: 12562 - RNA, 89 nt, synthetic construct
  misc_feature 1..89: note = engineered ribonucleic acid scaffold (ERS) sequence
  source 1..89: mol_type = other RNA
aatggctcttctatctgattactctgagagccatcaccagcgactatgtcgtagtgggtaaagctccctcttcggagggagcatcagag

SEQ ID NO: 12563 - RNA, 89 nt, synthetic construct
  misc_feature 1..89: note = engineered ribonucleic acid scaffold (ERS) sequence
  source 1..89: mol_type = other RNA
aatggcggttctatctgattactctgagcgccatcaccagcgactatgtcgtagtgggtaaagctccctcttcggagggagcatcagag

SEQ ID NO: 12564 - RNA, 89 nt, synthetic construct
  misc_feature 1..89: note = engineered ribonucleic acid scaffold (ERS) sequence
  source 1..89: mol_type = other RNA
aatggcggttctatctgattactctgagagccatcaccagcgactatgtcgtagtgggtaaagctccctcttcggagggagcatcagag

SEQ ID NO: 12565 - RNA, 88 nt, synthetic construct
  misc_feature 1..88: note = engineered ribonucleic acid scaffold (ERS) sequence
  source 1..88: mol_type = other RNA
agacacggttctatctgattactctgccgtgttcaccagcgactatgtcgtagtgggtaaagctccctcttcggagggagcatcagag

SEQ ID NO: 12566 - RNA, 88 nt, synthetic construct
  misc_feature 1..88: note = engineered ribonucleic acid scaffold (ERS) sequence
  source 1..88: mol_type = other RNA
agactggtttctatctgattactctgaccagttcaccagcgactatgtcgtagtgggtaaagctccctcttcggagggagcatcagag

SEQ ID NO: 12567 - RNA, 88 nt, synthetic construct
  misc_feature 1..88: note = engineered ribonucleic acid scaffold (ERS) sequence
  source 1..88: mol_type = other RNA
agaggccgttctatctgattactctgcggccttcaccagcgactatgtcgtagtgggtaaagctccctcttcggagggagcatcagag

SEQ ID NO: 12568 - RNA, 88 nt, synthetic construct
  misc_feature 1..88: note = engineered ribonucleic acid scaffold (ERS) sequence
  source 1..88: mol_type = other RNA
agaggtccttctatctgattactctgggaccttcaccagcgactatgtcgtagtgggtaaagctccctcttcggagggagcatcagag

SEQ ID NO: 12569 - RNA, 88 nt, synthetic construct
  misc_feature 1..88: note = engineered ribonucleic acid scaffold (ERS) sequence
  source 1..88: mol_type = other RNA
agcagcaattctatctgattactctgttgctgtcaccagcgactatgtcgtagtgggtaaagctccctcttcggagggagcatcagag

SEQ ID NO: 12570 - RNA, 88 nt, synthetic construct
  misc_feature 1..88: note = engineered ribonucleic acid scaffold (ERS) sequence
  source 1..88: mol_type = other RNA
agcgagacttctatctgattactctgggctcgtcaccagcgactatgtcgtagtgggtaaagctccctcttcggagggagcatcagag

SEQ ID NO: 12571 - RNA, 88 nt, synthetic construct
  misc_feature 1..88: note = engineered ribonucleic acid scaffold (ERS) sequence
  source 1..88: mol_type = other RNA
agctgtagttctatctgattactctgctacagtcaccagcgactatgtcgtagtgggtaaagctccctcttcggagggagcatcagag

SEQ ID NO: 12572 - RNA, 88 nt, synthetic construct
  misc_feature 1..88: note = engineered ribonucleic acid scaffold (ERS) sequence
  source 1..88: mol_type = other RNA
aggagcacttctatctgattactctggggctctcaccagcgactatgtcgtagtgggtaaagctccctcttcggagggagcatcagag

SEQ ID NO: 12573 - RNA, 88 nt, synthetic construct
  misc_feature 1..88: note = engineered ribonucleic acid scaffold (ERS) sequence
  source 1..88: mol_type = other RNA
aggaggtgttctatctgattactctgcacctctcaccagcgactatgtcgtagtgggtaaagctccctcttcggagggagcatcagag

SEQ ID NO: 12574 - RNA, 88 nt, synthetic construct
  misc_feature 1..88: note = engineered ribonucleic acid scaffold (ERS) sequence
  source 1..88: mol_type = other RNA
aggggactttctatctgattactctgagtccctcaccagcgactatgtcgtagtgggtaaagctccctcttcggagggagcatcagag

SEQ ID NO: 12575 - RNA, 88 nt, synthetic construct
  misc_feature 1..88: note = engineered ribonucleic acid scaffold (ERS) sequence
  source 1..88: mol_type = other RNA
aggggcaattctatctgattactctgttgccctcaccagcgactatgtcgtagtgggtaaagctccctcttcggagggagcatcagag

SEQ ID NO: 12576 - RNA, 88 nt, synthetic construct
  misc_feature 1..88: note = engineered ribonucleic acid scaffold (ERS) sequence
  source 1..88: mol_type = other RNA
agtgtgcgttctatctgattactctgcgcacatcaccagcgactatgtcgtagtgggtaaagctccctcttcggagggagcatcagag

SEQ ID NO: 12577 - RNA, 89 nt, synthetic construct
  misc_feature 1..89: note = engineered ribonucleic acid scaffold (ERS) sequence
  source 1..89: mol_type = other RNA
agtggcgcttctatctgattactctgggcgccatcaccagcgactatgtcgtagtgggtaaagctccctcttcggagggagcatcagag

SEQ ID NO: 12578 - RNA, 89 nt, synthetic construct
  misc_feature 1..89: note = engineered ribonucleic acid scaffold (ERS) sequence
  source 1..89: mol_type = other RNA
agtggcgcttctatctgattactctgggagccatcaccagcgactatgtcgtagtgggtaaagctccctcttcggagggagcatcagag

SEQ ID NO: 12579 - RNA, 89 nt, synthetic construct
  misc_feature 1..89: note = engineered ribonucleic acid scaffold (ERS) sequence
  source 1..89: mol_type = other RNA
agtggcgcttctatctgattactctgtgagccatcaccagcgactatgtcgtagtgggtaaagctccctcttcggagggagcatcagag

SEQ ID NO: 12580 - RNA, 90 nt, synthetic construct
  misc_feature 1..90: note = engineered ribonucleic acid scaffold (ERS) sequence
  source 1..90: mol_type = other RNA
agtggcgcttctatctgattactctgaggagccatcaccagcgactatgtcgtagtgggtaaagctccctcttcggagggagcatcagag

SEQ ID NO: 12581 - RNA, 89 nt, synthetic construct
  misc_feature 1..89: note = engineered ribonucleic acid scaffold (ERS) sequence
  source 1..89: mol_type = other RNA
agtggcgcttctatctgattactctgatagccatcaccagcgactatgtcgtagtgggtaaagctccctcttcggagggagcatcagag

SEQ ID NO: 12582 - RNA, 90 nt, synthetic construct
  misc_feature 1..90: note = engineered ribonucleic acid scaffold (ERS) sequence
  source 1..90: mol_type = other RNA
agtggcgcttctatctgattactctgagctgccatcaccagcgactatgtcgtagtgggtaaagctccctcttcggagggagcatcagag

SEQ ID NO: 12583 - RNA, 90 nt, synthetic construct
  misc_feature 1..90: note = engineered ribonucleic acid scaffold (ERS) sequence
  source 1..90: mol_type = other RNA
agtggcgcttctatctgattactctgagtagccatcaccagcgactatgtcgtagtgggtaaagctccctcttcggagggagcatcagag

SEQ ID NO: 12584 - RNA, 90 nt, synthetic construct
  misc_feature 1..90: note = engineered ribonucleic acid scaffold (ERS) sequence
  source 1..90: mol_type = other RNA
agtggcacttctatctgattactctgagtagccatcaccagcgactatgtcgtagtgggtaaagctccctcttcggagggagcatcagag

SEQ ID NO: 12585 - RNA, 89 nt, synthetic construct
  misc_feature 1..89: note = engineered ribonucleic acid scaffold (ERS) sequence
  source 1..89: mol_type = other RNA
agtggcgcttctatctgattactctgagcaccatcaccagcgactatgtcgtagtgggtaaagctccctcttcggagggagcatcagag

SEQ ID NO: 12586 - RNA, 89 nt, synthetic construct
  misc_feature 1..89: note = engineered ribonucleic acid scaffold (ERS) sequence
  source 1..89: mol_type = other RNA
agtggcacttctatctgattactctgagcgccatcaccagcgactatgtcgtagtgggtaaagctccctcttcggagggagcatcagag

SEQ ID NO: 12587 - RNA, 89 nt, synthetic construct
  misc_feature 1..89: note = engineered ribonucleic acid scaffold (ERS) sequence
  source 1..89: mol_type = other RNA
agtggcgcttctatctgattactctgagggccatcaccagcgactatgtcgtagtgggtaaagctccctcttcggagggagcatcagag

SEQ ID NO: 12588 - RNA, 89 nt, synthetic construct
  misc_feature 1..89: note = engineered ribonucleic acid scaffold (ERS) sequence
  source 1..89: mol_type = other RNA
agtggcgcttctatctgattactctgagtgccgtcaccagcgactatgtcgtagtgggtaaagctccctcttcggagggagcatcagag

SEQ ID NO: 12589 - RNA, 89 nt, synthetic construct
  misc_feature 1..89: note = engineered ribonucleic acid scaffold (ERS) sequence
  source 1..89: mol_type = other RNA
agtggcacttctatctgattactctgagtgccatcaccagcgactatgtcgtagtgggtaaagctccctcttcggagggagcatcagag

SEQ ID NO: 12590 - RNA, 89 nt, synthetic construct
  misc_feature 1..89: note = engineered ribonucleic acid scaffold (ERS) sequence
  source 1..89: mol_type = other RNA
agtggcgcttctatctgattactctgagaaccatcaccagcgactatgtcgtagtgggtaaagctccctcttcggagggagcatcagag

SEQ ID NO: 12591 - RNA, 89 nt, synthetic construct
  misc_feature 1..89: note = engineered ribonucleic acid scaffold (ERS) sequence
  source 1..89: mol_type = other RNA
agtggcgcttctatctgattactctgagagccgtcaccagcgactatgtcgtagtgggtaaagctccctcttcggagggagcatcagag

SEQ ID NO: 12592 - RNA, 89 nt, synthetic construct
  misc_feature 1..89: note = engineered ribonucleic acid scaffold (ERS) sequence
  source 1..89: mol_type = other RNA
agtggcgcttctatctgattactctgagagccttcaccagcgactatgtcgtagtgggtaaagctccctcttcggagggagcatcagag

SEQ ID NO: 12593 - RNA, 89 nt, synthetic construct
  misc_feature 1..89: note = engineered ribonucleic acid scaffold (ERS) sequence
  source 1..89: mol_type = other RNA
agtggggcttctatctgattactctgagacccatcaccagcgactatgtcgtagtgggtaaagctccctcttcggagggagcatcagag

SEQ ID NO: 12594 - RNA, 89 nt, synthetic construct
  misc_feature 1..89: note = engineered ribonucleic acid scaffold (ERS) sequence
  source 1..89: mol_type = other RNA
agtggtgcttctatctgattactctgagagccatcaccagcgactatgtcgtagtgggtaaagctccctcttcggagggagcatcagag

SEQ ID NO: 12595 - RNA, 89 nt, synthetic construct
  misc_feature 1..89: note = engineered ribonucleic acid scaffold (ERS) sequence
  source 1..89: mol_type = other RNA
agtgggccttctatctgattactctgaggcccatcaccagcgactatgtcgtagtgggtaaagctccctcttcggagggagcatcagag

SEQ ID NO: 12596 - RNA, 90 nt, synthetic construct
  misc_feature 1..90: note = engineered ribonucleic acid scaffold (ERS) sequence
  source 1..90: mol_type = other RNA
agtggcccttctatctgattactctgaggagccatcaccagcgactatgtcgtagtgggtaaagctccctcttcggagggagcatcagag

SEQ ID NO: 12597 - RNA, 89 nt, synthetic construct
  misc_feature 1..89: note = engineered ribonucleic acid scaffold (ERS) sequence
  source 1..89: mol_type = other RNA
agtggcccttctatctgattactctgagggccatcaccagcgactatgtcgtagtgggtaaagctccctcttcggagggagcatcagag

SEQ ID NO: 12598 - RNA, 89 nt, synthetic construct
  misc_feature 1..89: note = engineered ribonucleic acid scaffold (ERS) sequence
  source 1..89: mol_type = other RNA
agtggcccttctatctgattactctgagtgccatcaccagcgactatgtcgtagtgggtaaagctccctcttcggagggagcatcagag

SEQ ID NO: 12599 - RNA, 89 nt, synthetic construct
  misc_feature 1..89: note = engineered ribonucleic acid scaffold (ERS) sequence
  source 1..89: mol_type = other RNA
agtggcccttctatctgattactctgagagccatcaccagcgactatgtcgtagtgggtaaagctccctcttcggagggagcatcagag

SEQ ID NO: 12600 - RNA, 90 nt, synthetic construct
  misc_feature 1..90: note = engineered ribonucleic acid scaffold (ERS) sequence
  source 1..90: mol_type = other RNA
agtggcgcttctatctgattactctgagcagccatcaccagcgactatgtcgtagtgggtaaagctccctcttcggagggagcatcagag

SEQ ID NO: 12601 - RNA, 89 nt, synthetic construct
  misc_feature 1..89: note = engineered ribonucleic acid scaffold (ERS) sequence
  source 1..89: mol_type = other RNA
agtggcgcttctatctgattactctgagtgccatcaccagcgactatgtcgtagtgggtaaagctccctcttcggagggagcatcagag

SEQ ID NO: 12602 - RNA, 89 nt, synthetic construct
  misc_feature 1..89: note = engineered ribonucleic acid scaffold (ERS) sequence
  source 1..89: mol_type = other RNA
agtggcgcttctatctgattactctgagagccatcaccagcgactatgtcgtagtgggtaaagctccctcttcggagggagcatcagag

SEQ ID NO: 12603 - RNA, 89 nt, synthetic construct
  misc_feature 1..89: note = engineered ribonucleic acid scaffold (ERS) sequence
  source 1..89: mol_type = other RNA
agtggctcttctatctgattactctgagcgccatcaccagcgactatgtcgtagtgggtaaagctccctcttcggagggagcatcagag

SEQ ID NO: 12604 - RNA, 89 nt, synthetic construct
  misc_feature 1..89: note = engineered ribonucleic acid scaffold (ERS) sequence
  source 1..89: mol_type = other RNA
agtggctcttctatctgattactctgagggccatcaccagcgactatgtcgtagtgggtaaagctccctcttcggagggagcatcagag

SEQ ID NO: 12605 - RNA, 89 nt, synthetic construct
  misc_feature 1..89: note = engineered ribonucleic acid scaffold (ERS) sequence
  source 1..89: mol_type = other RNA
agtggctcttctatctgattactctgagtgccatcaccagcgactatgtcgtagtgggtaaagctccctcttcggagggagcatcagag

SEQ ID NO: 12606 - RNA, 89 nt, synthetic construct
  misc_feature 1..89: note = engineered ribonucleic acid scaffold (ERS) sequence
  source 1..89: mol_type = other RNA
agtggctcttctatctgattactctgagagccatcaccagcgactatgtcgtagtgggtaaagctccctcttcggagggagcatcagag

SEQ ID NO: 12607 - RNA, 89 nt, synthetic construct
  misc_feature 1..89: note = engineered ribonucleic acid scaffold (ERS) sequence
  source 1..89: mol_type = other RNA
agtggcggttctatctgattactctgagcgccatcaccagcgactatgtcgtagtgggtaaagctccctcttcggagggagcatcagag

SEQ ID NO: 12608 - RNA, 89 nt, synthetic construct
  misc_feature 1..89: note = engineered ribonucleic acid scaffold (ERS) sequence
  source 1..89: mol_type = other RNA
agtggcggttctatctgattactctgagagccatcaccagcgactatgtcgtagtgggtaaagctccctcttcggagggagcatcagag

SEQ ID NO: 12609 - RNA, 88 nt, synthetic construct
  misc_feature 1..88: note = engineered ribonucleic acid scaffold (ERS) sequence
  source 1..88: mol_type = other RNA
acacacggttctatctgattactctgccgtgttcaccagcgactatgtcgtagtgggtaaagctccctcttcggagggagcatcagag

SEQ ID NO: 12610 - RNA, 88 nt, synthetic construct
  misc_feature 1..88: note = engineered ribonucleic acid scaffold (ERS) sequence
  source 1..88: mol_type = other RNA
acactggtttctatctgattactctgaccagttcaccagcgactatgtcgtagtgggtaaagctccctcttcggagggagcatcagag

SEQ ID NO: 12611 - RNA, 88 nt, synthetic construct
  misc_feature 1..88: note = engineered ribonucleic acid scaffold (ERS) sequence
  source 1..88: mol_type = other RNA
acaggccgttctatctgattactctgcggccttcaccagcgactatgtcgtagtgggtaaagctccctcttcggagggagcatcagag

SEQ ID NO: 12612 - RNA, 88 nt, synthetic construct
  misc_feature 1..88: note = engineered ribonucleic acid scaffold (ERS) sequence
  source 1..88: mol_type = other RNA
acaggtccttctatctgattactctgggaccttcaccagcgactatgtcgtagtgggtaaagctccctcttcggagggagcatcagag

SEQ ID NO: 12613 - RNA, 88 nt, synthetic construct
  misc_feature 1..88: note = engineered ribonucleic acid scaffold (ERS) sequence
  source 1..88: mol_type = other RNA
accagcaattctatctgattactctgttgctgtcaccagcgactatgtcgtagtgggtaaagctccctcttcggagggagcatcagag

SEQ ID NO: 12614 - RNA, 88 nt, synthetic construct
  misc_feature 1..88: note = engineered ribonucleic acid scaffold (ERS) sequence
  source 1..88: mol_type = other RNA
accgagacttctatctgattactctgggctcgtcaccagcgactatgtcgtagtgggtaaagctccctcttcggagggagcatcagag

SEQ ID NO: 12615 - RNA, 88 nt, synthetic construct
  misc_feature 1..88: note = engineered ribonucleic acid scaffold (ERS) sequence
  source 1..88: mol_type = other RNA
acctgtagttctatctgattactctgctacagtcaccagcgactatgtcgtagtgggtaaagctccctcttcggagggagcatcagag

SEQ ID NO: 12616 - RNA, 88 nt, synthetic construct
  misc_feature 1..88: note = engineered ribonucleic acid scaffold (ERS) sequence
  source 1..88: mol_type = other RNA
acgagcacttctatctgattactctggggctctcaccagcgactatgtcgtagtgggtaaagctccctcttcggagggagcatcagag

SEQ ID NO: 12617 - RNA, 88 nt, synthetic construct
  misc_feature 1..88: note = engineered ribonucleic acid scaffold (ERS) sequence
  source 1..88: mol_type = other RNA
acgaggtgttctatctgattactctgcacctctcaccagcgactatgtcgtagtgggtaaagctccctcttcggagggagcatcagag

SEQ ID NO: 12618 - RNA, 88 nt, synthetic construct
  misc_feature 1..88: note = engineered ribonucleic acid scaffold (ERS) sequence
  source 1..88: mol_type = other RNA
acgggactttctatctgattactctgagtccctcaccagcgactatgtcgtagtgggtaaagctccctcttcggagggagcatcagag

SEQ ID NO: 12619 - RNA, 88 nt, synthetic construct
  misc_feature 1..88: note = engineered ribonucleic acid scaffold (ERS) sequence
  source 1..88: mol_type = other RNA
acgggcaattctatctgattactctgttgccctcaccagcgactatgtcgtagtgggtaaagctccctcttcggagggagcatcagag

SEQ ID NO: 12620 - RNA, 88 nt, synthetic construct
  misc_feature 1..88: note = engineered ribonucleic acid scaffold (ERS) sequence
  source 1..88: mol_type = other RNA
actgtgcgttctatctgattactctgcgcacatcaccagcgactatgtcgtagtgggtaaagctccctcttcggagggagcatcagag

SEQ ID NO: 12621 - RNA, 88 nt, synthetic construct
  misc_feature 1..88: note = engineered ribonucleic acid scaffold (ERS) sequence
  source 1..88: mol_type = other RNA
acggcgcttctatctgattactctgggcgccatcaccagcgactatgtcgtagtgggtaaagctccctcttcggagggagcatcagag

SEQ ID NO: 12622 - RNA, 88 nt, synthetic construct
  misc_feature 1..88: note = engineered ribonucleic acid scaffold (ERS) sequence
  source 1..88: mol_type = other RNA
acggcgcttctatctgattactctgggagccatcaccagcgactatgtcgtagtgggtaaagctccctcttcggagggagcatcagag

SEQ ID NO: 12623 - RNA, 88 nt, synthetic construct
  misc_feature 1..88: note = engineered ribonucleic acid scaffold (ERS) sequence
  source 1..88: mol_type = other RNA
acggcgcttctatctgattactctgtgagccatcaccagcgactatgtcgtagtgggtaaagctccctcttcggagggagcatcagag

SEQ ID NO: 12624 - RNA, 89 nt, synthetic construct
  misc_feature 1..89: note = engineered ribonucleic acid scaffold (ERS) sequence
  source 1..89: mol_type = other RNA
acggcgcttctatctgattactctgaggagccatcaccagcgactatgtcgtagtgggtaaagctccctcttcggagggagcatcagag

SEQ ID NO: 12625 - RNA, 88 nt, synthetic construct
  misc_feature 1..88: note = engineered ribonucleic acid scaffold (ERS) sequence
  source 1..88: mol_type = other RNA
acggcgcttctatctgattactctgatagccatcaccagcgactatgtcgtagtgggtaaagctccctcttcggagggagcatcagag

SEQ ID NO: 12626 - RNA, 89 nt, synthetic construct
  misc_feature 1..89: note = engineered ribonucleic acid scaffold (ERS) sequence
  source 1..89: mol_type = other RNA
acggcgcttctatctgattactctgagctgccatcaccagcgactatgtcgtagtgggtaaagctccctcttcggagggagcatcagag

SEQ ID NO: 12627 - RNA, 89 nt, synthetic construct
  misc_feature 1..89: note = engineered ribonucleic acid scaffold (ERS) sequence
  source 1..89: mol_type = other RNA
acggcgcttctatctgattactctgagtagccatcaccagcgactatgtcgtagtgggtaaagctccctcttcggagggagcatcagag

SEQ ID NO: 12628 - RNA, 89 nt, synthetic construct
  misc_feature 1..89: note = engineered ribonucleic acid scaffold (ERS) sequence
  source 1..89: mol_type = other RNA
acggcacttctatctgattactctgagtagccatcaccagcgactatgtcgtagtgggtaaagctccctcttcggagggagcatcagag

SEQ ID NO: 12629 - RNA, 88 nt, synthetic construct
  misc_feature 1..88: note = engineered ribonucleic acid scaffold (ERS) sequence
  source 1..88: mol_type = other RNA
acggcgcttctatctgattactctgagcaccatcaccagcgactatgtcgtagtgggtaaagctccctcttcggagggagcatcagag

SEQ ID NO: 12630 - RNA, 88 nt, synthetic construct
  misc_feature 1..88: note = engineered ribonucleic acid scaffold (ERS) sequence
  source 1..88: mol_type = other RNA
acggcacttctatctgattactctgagcgccatcaccagcgactatgtcgtagtgggtaaagctccctcttcggagggagcatcagag

SEQ ID NO: 12631 - RNA, 88 nt, synthetic construct
  misc_feature 1..88: note = engineered ribonucleic acid scaffold (ERS) sequence
  source 1..88: mol_type = other RNA
acggcgcttctatctgattactctgagggccatcaccagcgactatgtcgtagtgggtaaagctccctcttcggagggagcatcagag

SEQ ID NO: 12632 - RNA, 88 nt, synthetic construct
  misc_feature 1..88: note = engineered ribonucleic acid scaffold (ERS) sequence
  source 1..88: mol_type = other RNA
acggcgcttctatctgattactctgagtgccgtcaccagcgactatgtcgtagtgggtaaagctccctcttcggagggagcatcagag

SEQ ID NO: 12633 - RNA, 88 nt, synthetic construct
  misc_feature 1..88: note = engineered ribonucleic acid scaffold (ERS) sequence
  source 1..88: mol_type = other RNA
acggcacttctatctgattactctgagtgccatcaccagcgactatgtcgtagtgggtaaagctccctcttcggagggagcatcagag

SEQ ID NO: 12634 - RNA, 88 nt, synthetic construct
  misc_feature 1..88: note = engineered ribonucleic acid scaffold (ERS) sequence
  source 1..88: mol_type = other RNA
acggcgcttctatctgattactctgagaaccatcaccagcgactatgtcgtagtgggtaaagctccctcttcggagggagcatcagag

SEQ ID NO: 12635 - RNA, 88 nt, synthetic construct
  misc_feature 1..88: note = engineered ribonucleic acid scaffold (ERS) sequence
  source 1..88: mol_type = other RNA
acggcgcttctatctgattactctgagagccgtcaccagcgactatgtcgtagtgggtaaagctccctcttcggagggagcatcagag

SEQ ID NO: 12636 - RNA, 88 nt, synthetic construct
  misc_feature 1..88: note = engineered ribonucleic acid scaffold (ERS) sequence
  source 1..88: mol_type = other RNA
acggcgcttctatctgattactctgagagccttcaccagcgactatgtcgtagtgggtaaagctccctcttcggagggagcatcagag

SEQ ID NO: 12637 - RNA, 88 nt, synthetic construct
  misc_feature 1..88: note = engineered ribonucleic acid scaffold (ERS) sequence
  source 1..88: mol_type = other RNA
acggggcttctatctgattactctgagacccatcaccagcgactatgtcgtagtgggtaaagctccctcttcggagggagcatcagag

SEQ ID NO: 12638 - RNA, 88 nt, synthetic construct
  misc_feature 1..88: note = engineered ribonucleic acid scaffold (ERS) sequence
  source 1..88: mol_type = other RNA
acggtgcttctatctgattactctgagagccatcaccagcgactatgtcgtagtgggtaaagctccctcttcggagggagcatcagag

SEQ ID NO: 12639 - RNA, 88 nt, synthetic construct
  misc_feature 1..88: note = engineered ribonucleic acid scaffold (ERS) sequence
  source 1..88: mol_type = other RNA
acgggccttctatctgattactctgaggcccatcaccagcgactatgtcgtagtgggtaaagctccctcttcggagggagcatcagag

SEQ ID NO: 12640 - RNA, 89 nt, synthetic construct
  misc_feature 1..89: note = engineered ribonucleic acid scaffold (ERS) sequence
  source 1..89: mol_type = other RNA
acggcccttctatctgattactctgaggagccatcaccagcgactatgtcgtagtgggtaaagctccctcttcggagggagcatcagag

SEQ ID NO: 12641 - RNA, 88 nt, synthetic construct
  misc_feature 1..88: note = engineered ribonucleic acid scaffold (ERS) sequence
  source 1..88: mol_type = other RNA
acggcccttctatctgattactctgagggccatcaccagcgactatgtcgtagtgggtaaagctccctcttcggagggagcatcagag

SEQ ID NO: 12642 - RNA, 88 nt, synthetic construct
  misc_feature 1..88: note = engineered ribonucleic acid scaffold (ERS) sequence
  source 1..88: mol_type = other RNA
acggcccttctatctgattactctgagtgccatcaccagcgactatgtcgtagtgggtaaagctccctcttcggagggagcatcagag

SEQ ID NO: 12643 - RNA, 88 nt, synthetic construct
  misc_feature 1..88: note = engineered ribonucleic acid scaffold (ERS) sequence
  source 1..88: mol_type = other RNA
acggcccttctatctgattactctgagagccatcaccagcgactatgtcgtagtgggtaaagctccctcttcggagggagcatcagag

SEQ ID NO: 12644 - RNA, 89 nt, synthetic construct
  misc_feature 1..89: note = engineered ribonucleic acid scaffold (ERS) sequence
  source 1..89: mol_type = other RNA
acggcgcttctatctgattactctgagcagccatcaccagcgactatgtcgtagtgggtaaagctccctcttcggagggagcatcagag

SEQ ID NO: 12645 - RNA, 88 nt, synthetic construct
  misc_feature 1..88: note = engineered ribonucleic acid scaffold (ERS) sequence
  source 1..88: mol_type = other RNA
acggcgcttctatctgattactctgagtgccatcaccagcgactatgtcgtagtgggtaaagctccctcttcggagggagcatcagag

SEQ ID NO: 12646 - RNA, 88 nt, synthetic construct
  misc_feature 1..88: note = engineered ribonucleic acid scaffold (ERS) sequence
  source 1..88: mol_type = other RNA
acggcgcttctatctgattactctgagagccatcaccagcgactatgtcgtagtgggtaaagctccctcttcggagggagcatcagag

SEQ ID NO: 12647 - RNA, 88 nt, synthetic construct
  misc_feature 1..88: note = engineered ribonucleic acid scaffold (ERS) sequence
  source 1..88: mol_type = other RNA
acggctcttctatctgattactctgagcgccatcaccagcgactatgtcgtagtgggtaaagctccctcttcggagggagcatcagag

SEQ ID NO: 12648 - RNA, 88 nt, synthetic construct
  misc_feature 1..88: note = engineered ribonucleic acid scaffold (ERS) sequence
  source 1..88: mol_type = other RNA
acggctcttctatctgattactctgagggccatcaccagcgactatgtcgtagtgggtaaagctccctcttcggagggagcatcagag

SEQ ID NO: 12649 - RNA, 88 nt, synthetic construct
  misc_feature 1..88: note = engineered ribonucleic acid scaffold (ERS) sequence
  source 1..88: mol_type = other RNA
acggctcttctatctgattactctgagtgccatcaccagcgactatgtcgtagtgggtaaagctccctcttcggagggagcatcagag

SEQ ID NO: 12650 - RNA, 88 nt, synthetic construct
  misc_feature 1..88: note = engineered ribonucleic acid scaffold (ERS) sequence
  source 1..88: mol_type = other RNA
acggctcttctatctgattactctgagagccatcaccagcgactatgtcgtagtgggtaaagctccctcttcggagggagcatcagag

SEQ ID NO: 12651 - RNA, 88 nt, synthetic construct
  misc_feature 1..88: note = engineered ribonucleic acid scaffold (ERS) sequence
  source 1..88: mol_type = other RNA
acggcggttctatctgattactctgagcgccatcaccagcgactatgtcgtagtgggtaaagctccctcttcggagggagcatcagag

SEQ ID NO: 12652 - RNA, 88 nt, synthetic construct
  misc_feature 1..88: note = engineered ribonucleic acid scaffold (ERS) sequence
  source 1..88: mol_type = other RNA
acggcggttctatctgattactctgagagccatcaccagcgactatgtcgtagtgggtaaagctccctcttcggagggagcatcagag

SEQ ID NO: 12653 - RNA, 89 nt, synthetic construct
  misc_feature 1..89: note = engineered ribonucleic acid scaffold (ERS) sequence
  source 1..89: mol_type = other RNA
acaacacggttctatctgattactctgccgtgttcaccagcgactatgtcgtagtgggtaaagctccctcttcggagggagcatcagag

SEQ ID NO: 12654 - RNA, 89 nt, synthetic construct
  misc_feature 1..89: note = engineered ribonucleic acid scaffold (ERS) sequence
  source 1..89: mol_type = other RNA
acaactggtttctatctgattactctgaccagttcaccagcgactatgtcgtagtgggtaaagctccctcttcggagggagcatcagag

SEQ ID NO: 12655 - RNA, 89 nt, synthetic construct
  misc_feature 1..89: note = engineered ribonucleic acid scaffold (ERS) sequence
  source 1..89: mol_type = other RNA
acaaggccgttctatctgattactctgcggccttcaccagcgactatgtcgtagtgggtaaagctccctcttcggagggagcatcagag

SEQ ID NO: 12656 - RNA, 89 nt, synthetic construct
  misc_feature 1..89: note = engineered ribonucleic acid scaffold (ERS) sequence
  source 1..89: mol_type = other RNA
acaaggtccttctatctgattactctgggaccttcaccagcgactatgtcgtagtgggtaaagctccctcttcggagggagcatcagag

SEQ ID NO: 12657 - RNA, 89 nt, synthetic construct
  misc_feature 1..89: note = engineered ribonucleic acid scaffold (ERS) sequence
  source 1..89: mol_type = other RNA
acacagcaattctatctgattactctgttgctgtcaccagcgactatgtcgtagtgggtaaagctccctcttcggagggagcatcagag

SEQ ID NO: 12658 - RNA, 89 nt, synthetic construct
  misc_feature 1..89: note = engineered ribonucleic acid scaffold (ERS) sequence
  source 1..89: mol_type = other RNA
acacgagacttctatctgattactctgggctcgtcaccagcgactatgtcgtagtgggtaaagctccctcttcggagggagcatcagag

SEQ ID NO: 12659 - RNA, 89 nt, synthetic construct
  misc_feature 1..89: note = engineered ribonucleic acid scaffold (ERS) sequence
  source 1..89: mol_type = other RNA
acactgtagttctatctgattactctgctacagtcaccagcgactatgtcgtagtgggtaaagctccctcttcggagggagcatcagag

SEQ ID NO: 12660 - RNA, 89 nt, synthetic construct
  misc_feature 1..89: note = engineered ribonucleic acid scaffold (ERS) sequence
  source 1..89: mol_type = other RNA
acagagcacttctatctgattactctggggctctcaccagcgactatgtcgtagtgggtaaagctccctcttcggagggagcatcagag

SEQ ID NO: 12661 - RNA, 89 nt, synthetic construct
  misc_feature 1..89: note = engineered ribonucleic acid scaffold (ERS) sequence
  source 1..89: mol_type = other RNA
acagaggtgttctatctgattactctgcacctctcaccagcgactatgtcgtagtgggtaaagctccctcttcggagggagcatcagag

SEQ ID NO: 12662 - RNA, 89 nt, synthetic construct
  misc_feature 1..89: note = engineered ribonucleic acid scaffold (ERS) sequence
  source 1..89: mol_type = other RNA
acagggactttctatctgattactctgagtccctcaccagcgactatgtcgtagtgggtaaagctccctcttcggagggagcatcagag

SEQ ID NO: 12663 - RNA, 89 nt, synthetic construct
  misc_feature 1..89: note = engineered ribonucleic acid scaffold (ERS) sequence
  source 1..89: mol_type = other RNA
acagggcaattctatctgattactctgttgccctcaccagcgactatgtcgtagtgggtaaagctccctcttcggagggagcatcagag

SEQ ID NO: 12664 - RNA, 89 nt, synthetic construct
  misc_feature 1..89: note = engineered ribonucleic acid scaffold (ERS) sequence
  source 1..89: mol_type = other RNA
acatgtgcgttctatctgattactctgcgcacatcaccagcgactatgtcgtagtgggtaaagctccctcttcggagggagcatcagag

SEQ ID NO: 12665 - RNA, 89 nt, synthetic construct
  misc_feature 1..89: note = engineered ribonucleic acid scaffold (ERS) sequence
  source 1..89: mol_type = other RNA
acaggcgcttctatctgattactctgggcgccatcaccagcgactatgtcgtagtgggtaaagctccctcttcggagggagcatcagag

SEQ ID NO: 12666 - RNA, 89 nt, synthetic construct
  misc_feature 1..89: note = engineered ribonucleic acid scaffold (ERS) sequence
  source 1..89: mol_type = other RNA
acaggcgcttctatctgattactctgggagccatcaccagcgactatgtcgtagtgggtaaagctccctcttcggagggagcatcagag

SEQ ID NO: 12667 - RNA, 89 nt, synthetic construct
  misc_feature 1..89: note = engineered ribonucleic acid scaffold (ERS) sequence
  source 1..89: mol_type = other RNA
acaggcgcttctatctgattactctgtgagccatcaccagcgactatgtcgtagtgggtaaagctccctcttcggagggagcatcagag

SEQ ID NO: 12668 - RNA, 90 nt, synthetic construct
  misc_feature 1..90: note = engineered ribonucleic acid scaffold (ERS) sequence
  source 1..90: mol_type = other RNA
acaggcgcttctatctgattactctgaggagccatcaccagcgactatgtcgtagtgggtaaagctccctcttcggagggagcatcagag

SEQ ID NO: 12669 - RNA, 89 nt, synthetic construct
  misc_feature 1..89: note = engineered ribonucleic acid scaffold (ERS) sequence
  source 1..89: mol_type = other RNA
acaggcgcttctatctgattactctgatagccatcaccagcgactatgtcgtagtgggtaaagctccctcttcggagggagcatcagag

SEQ ID NO: 12670 - RNA, 90 nt, synthetic construct
  misc_feature 1..90: note = engineered ribonucleic acid scaffold (ERS) sequence
  source 1..90: mol_type = other RNA
acaggcgcttctatctgattactctgagctgccatcaccagcgactatgtcgtagtgggtaaagctccctcttcggagggagcatcagag

SEQ ID NO: 12671 - RNA, 90 nt, synthetic construct
  misc_feature 1..90: note = engineered ribonucleic acid scaffold (ERS) sequence
  source 1..90: mol_type = other RNA
acaggcgcttctatctgattactctgagtagccatcaccagcgactatgtcgtagtgggtaaagctccctcttcggagggagcatcagag

SEQ ID NO: 12672 - RNA, 90 nt, synthetic construct
  misc_feature 1..90: note = engineered ribonucleic acid scaffold (ERS) sequence
  source 1..90: mol_type = other RNA
acaggcacttctatctgattactctgagtagccatcaccagcgactatgtcgtagtgggtaaagctccctcttcggagggagcatcagag

SEQ ID NO: 12673 - RNA, 89 nt, synthetic construct
  misc_feature 1..89: note = engineered ribonucleic acid scaffold (ERS) sequence
  source 1..89: mol_type = other RNA
acaggcgcttctatctgattactctgagcaccatcaccagcgactatgtcgtagtgggtaaagctccctcttcggagggagcatcagag

SEQ ID NO: 12674 - RNA, 89 nt, synthetic construct
  misc_feature 1..89: note = engineered ribonucleic acid scaffold (ERS) sequence
  source 1..89: mol_type = other RNA
acaggcacttctatctgattactctgagcgccatcaccagcgactatgtcgtagtgggtaaagctccctcttcggagggagcatcagag

SEQ ID NO: 12675 - RNA, 89 nt, synthetic construct
  misc_feature 1..89: note = engineered ribonucleic acid scaffold (ERS) sequence
  source 1..89: mol_type = other RNA
acaggcgcttctatctgattactctgagggccatcaccagcgactatgtcgtagtgggtaaagctccctcttcggagggagcatcagag

SEQ ID NO: 12676 - RNA, 89 nt, synthetic construct
  misc_feature 1..89: note = engineered ribonucleic acid scaffold (ERS) sequence
  source 1..89: mol_type = other RNA
acaggcgcttctatctgattactctgagtgccgtcaccagcgactatgtcgtagtgggtaaagctccctcttcggagggagcatcagag

SEQ ID NO: 12677 - RNA, 89 nt, synthetic construct
  misc_feature 1..89: note = engineered ribonucleic acid scaffold (ERS) sequence
  source 1..89: mol_type = other RNA
acaggcacttctatctgattactctgagtgccatcaccagcgactatgtcgtagtgggtaaagctccctcttcggagggagcatcagag

SEQ ID NO: 12678 - RNA, 89 nt, synthetic construct
  misc_feature 1..89: note = engineered ribonucleic acid scaffold (ERS) sequence
  source 1..89: mol_type = other RNA
acaggcgcttctatctgattactctgagaaccatcaccagcgactatgtcgtagtgggtaaagctccctcttcggagggagcatcagag

SEQ ID NO: 12679 - RNA, 89 nt, synthetic construct
  misc_feature 1..89: note = engineered ribonucleic acid scaffold (ERS) sequence
  source 1..89: mol_type = other RNA
acaggcgcttctatctgattactctgagagccgtcaccagcgactatgtcgtagtgggtaaagctccctcttcggagggagcatcagag

SEQ ID NO: 12680 - RNA, 89 nt, synthetic construct
  misc_feature 1..89: note = engineered ribonucleic acid scaffold (ERS) sequence
  source 1..89: mol_type = other RNA
acaggcgcttctatctgattactctgagagccttcaccagcgactatgtcgtagtgggtaaagctccctcttcggagggagcatcagag

SEQ ID NO: 12681 - RNA, 89 nt, synthetic construct
  misc_feature 1..89: note = engineered ribonucleic acid scaffold (ERS) sequence
  source 1..89: mol_type = other RNA
acaggggcttctatctgattactctgagacccatcaccagcgactatgtcgtagtgggtaaagctccctcttcggagggagcatcagag

SEQ ID NO: 12682 - RNA, 89 nt, synthetic construct
  misc_feature 1..89: note = engineered ribonucleic acid scaffold (ERS) sequence
  source 1..89: mol_type = other RNA
acaggtgcttctatctgattactctgagagccatcaccagcgactatgtcgtagtgggtaaagctccctcttcggagggagcatcagag

SEQ ID NO: 12683 - RNA, 89 nt, synthetic construct
  misc_feature 1..89: note = engineered ribonucleic acid scaffold (ERS) sequence
  source 1..89: mol_type = other RNA
acagggccttctatctgattactctgaggcccatcaccagcgactatgtcgtagtgggtaaagctccctcttcggagggagcatcagag

SEQ ID NO: 12684 - RNA, 90 nt, synthetic construct
  misc_feature 1..90: note = engineered ribonucleic acid scaffold (ERS) sequence
  source 1..90: mol_type = other RNA
acaggcccttctatctgattactctgaggagccatcaccagcgactatgtcgtagtgggtaaagctccctcttcggagggagcatcagag

SEQ ID NO: 12685 - RNA, 89 nt, synthetic construct
  misc_feature 1..89: note = engineered ribonucleic acid scaffold (ERS) sequence
  source 1..89: mol_type = other RNA
acaggcccttctatctgattactctgagggccatcaccagcgactatgtcgtagtgggtaaagctccctcttcggagggagcatcagag

SEQ ID NO: 12686 - RNA, 89 nt, synthetic construct
  misc_feature 1..89: note = engineered ribonucleic acid scaffold (ERS) sequence
  source 1..89: mol_type = other RNA
acaggcccttctatctgattactctgagtgccatcaccagcgactatgtcgtagtgggtaaagctccctcttcggagggagcatcagag

SEQ ID NO: 12687 - RNA, 89 nt, synthetic construct
  misc_feature 1..89: note = engineered ribonucleic acid scaffold (ERS) sequence
  source 1..89: mol_type = other RNA
acaggcccttctatctgattactctgagagccatcaccagcgactatgtcgtagtgggtaaagctccctcttcggagggagcatcagag

SEQ ID NO: 12688 - RNA, 90 nt, synthetic construct
  misc_feature 1..90: note = engineered ribonucleic acid scaffold (ERS) sequence
  source 1..90: mol_type = other RNA
acaggcgcttctatctgattactctgagcagccatcaccagcgactatgtcgtagtgggtaaagctccctcttcggagggagcatcagag

SEQ ID NO: 12689 - RNA, 89 nt, synthetic construct
  misc_feature 1..89: note = engineered ribonucleic acid scaffold (ERS) sequence
  source 1..89: mol_type = other RNA
acaggcgcttctatctgattactctgagtgccatcaccagcgactatgtcgtagtgggtaaagctccctcttcggagggagcatcagag

SEQ ID NO: 12690 - RNA, 89 nt, synthetic construct
  misc_feature 1..89: note = engineered ribonucleic acid scaffold (ERS) sequence
  source 1..89: mol_type = other RNA
acaggcgcttctatctgattactctgagagccatcaccagcgactatgtcgtagtgggtaaagctccctcttcggagggagcatcagag

SEQ ID NO: 12691 - RNA, 89 nt, synthetic construct
  misc_feature 1..89: note = engineered ribonucleic acid scaffold (ERS) sequence
  source 1..89: mol_type = other RNA
acaggctcttctatctgattactctgagcgccatcaccagcgactatgtcgtagtgggtaaagctccctcttcggagggagcatcagag

SEQ ID NO: 12692 - RNA, 89 nt, synthetic construct
  misc_feature 1..89: note = engineered ribonucleic acid scaffold (ERS) sequence
  source 1..89: mol_type = other RNA
acaggctcttctatctgattactctgagggccatcaccagcgactatgtcgtagtgggtaaagctccctcttcggagggagcatcagag

SEQ ID NO: 12693 - RNA, 89 nt, synthetic construct
  misc_feature 1..89: note = engineered ribonucleic acid scaffold (ERS) sequence
  source 1..89: mol_type = other RNA
acaggctcttctatctgattactctgagtgccatcaccagcgactatgtcgtagtgggtaaagctccctcttcggagggagcatcagag

SEQ ID NO: 12694 - RNA, 89 nt, synthetic construct
  misc_feature 1..89: note = engineered ribonucleic acid scaffold (ERS) sequence
  source 1..89: mol_type = other RNA
acaggctcttctatctgattactctgagagccatcaccagcgactatgtcgtagtgggtaaagctccctcttcggagggagcatcagag

SEQ ID NO: 12695 - RNA, 89 nt, synthetic construct
  misc_feature 1..89: note = engineered ribonucleic acid scaffold (ERS) sequence
  source 1..89: mol_type = other RNA
acaggcggttctatctgattactctgagcgccatcaccagcgactatgtcgtagtgggtaaagctccctcttcggagggagcatcagag

SEQ ID NO: 12696 - RNA, 89 nt, synthetic construct
  misc_feature 1..89: note = engineered ribonucleic acid scaffold (ERS) sequence
  source 1..89: mol_type = other RNA
acaggcggttctatctgattactctgagagccatcaccagcgactatgtcgtagtgggtaaagctccctcttcggagggagcatcagag

SEQ ID NO: 12697 - RNA, 89 nt, synthetic construct
  misc_feature 1..89: note = engineered ribonucleic acid scaffold (ERS) sequence
  source 1..89: mol_type = other RNA
acgacacggttctatctgattactctgccgtgttcaccagcgactatgtcgtagtgggtaaagctccctcttcggagggagcatcagag

SEQ ID NO: 12698 - RNA, 89 nt, synthetic construct
  misc_feature 1..89: note = engineered ribonucleic acid scaffold (ERS) sequence
  source 1..89: mol_type = other RNA
acgactggtttctatctgattactctgaccagttcaccagcgactatgtcgtagtgggtaaagctccctcttcggagggagcatcagag

SEQ ID NO: 12699 - RNA, 89 nt, synthetic construct
  misc_feature 1..89: note = engineered ribonucleic acid scaffold (ERS) sequence
  source 1..89: mol_type = other RNA
acgaggccgttctatctgattactctgcggccttcaccagcgactatgtcgtagtgggtaaagctccctcttcggagggagcatcagag

SEQ ID NO: 12700 - RNA, 89 nt, synthetic construct
  misc_feature 1..89: note = engineered ribonucleic acid scaffold (ERS) sequence
  source 1..89: mol_type = other RNA
acgaggtccttctatctgattactctgggaccttcaccagcgactatgtcgtagtgggtaaagctccctcttcggagggagcatcagag

SEQ ID NO: 12701 - RNA, 89 nt, synthetic construct
  misc_feature 1..89: note = engineered ribonucleic acid scaffold (ERS) sequence
  source 1..89: mol_type = other RNA
acgcagcaattctatctgattactctgttgctgtcaccagcgactatgtcgtagtgggtaaagctccctcttcggagggagcatcagag

SEQ ID NO: 12702 - RNA, 89 nt, synthetic construct
  misc_feature 1..89: note = engineered ribonucleic acid scaffold (ERS) sequence
  source 1..89: mol_type = other RNA
acgcgagacttctatctgattactctgggctcgtcaccagcgactatgtcgtagtgggtaaagctccctcttcggagggagcatcagag

SEQ ID NO: 12703 - RNA, 89 nt, synthetic construct
  misc_feature 1..89: note = engineered ribonucleic acid scaffold (ERS) sequence
  source 1..89: mol_type = other RNA
acgctgtagttctatctgattactctgctacagtcaccagcgactatgtcgtagtgggtaaagctccctcttcggagggagcatcagag

SEQ ID NO: 12704 - RNA, 89 nt, synthetic construct
  misc_feature 1..89: note = engineered ribonucleic acid scaffold (ERS) sequence
  source 1..89: mol_type = other RNA
acggagcacttctatctgattactctggggctctcaccagcgactatgtcgtagtgggtaaagctccctcttcggagggagcatcagag

SEQ ID NO: 12705 - RNA, 89 nt, synthetic construct
  misc_feature 1..89: note = engineered ribonucleic acid scaffold (ERS) sequence
  source 1..89: mol_type = other RNA
acggaggtgttctatctgattactctgcacctctcaccagcgactatgtcgtagtgggtaaagctccctcttcggagggagcatcagag

SEQ ID NO: 12706 - RNA, 89 nt, synthetic construct
  misc_feature 1..89: note = engineered ribonucleic acid scaffold (ERS) sequence
  source 1..89: mol_type = other RNA
acggggactttctatctgattactctgagtccctcaccagcgactatgtcgtagtgggtaaagctccctcttcggagggagcatcagag

SEQ ID NO: 12707 - RNA, 89 nt, synthetic construct
  misc_feature 1..89: note = engineered ribonucleic acid scaffold (ERS) sequence
  source 1..89: mol_type = other RNA
acggggcaattctatctgattactctgttgccctcaccagcgactatgtcgtagtgggtaaagctccctcttcggagggagcatcagag

SEQ ID NO: 12708 - RNA, 89 nt, synthetic construct
  misc_feature 1..89: note = engineered ribonucleic acid scaffold (ERS) sequence
  source 1..89: mol_type = other RNA
acgtgtgcgttctatctgattactctgcgcacatcaccagcgactatgtcgtagtgggtaaagctccctcttcggagggagcatcagag

SEQ ID NO: 12709 - RNA, 89 nt, synthetic construct
  misc_feature 1..89: note = engineered ribonucleic acid scaffold (ERS) sequence
  source 1..89: mol_type = other RNA
acgggcgcttctatctgattactctgggcgccatcaccagcgactatgtcgtagtgggtaaagctccctcttcggagggagcatcagag

SEQ ID NO: 12710 - RNA, 89 nt, synthetic construct
  misc_feature 1..89: note = engineered ribonucleic acid scaffold (ERS) sequence
  source 1..89: mol_type = other RNA
acgggcgcttctatctgattactctgggagccatcaccagcgactatgtcgtagtgggtaaagctccctcttcggagggagcatcagag

SEQ ID NO: 12711 - RNA, 89 nt, synthetic construct
  misc_feature 1..89: note = engineered ribonucleic acid scaffold (ERS) sequence
  source 1..89: mol_type = other RNA
acgggcgcttctatctgattactctgtgagccatcaccagcgactatgtcgtagtgggtaaagctccctcttcggagggagcatcagag

SEQ ID NO: 12712 - RNA, 90 nt, synthetic construct
  misc_feature 1..90: note = engineered ribonucleic acid scaffold (ERS) sequence
  source 1..90: mol_type = other RNA
acgggcgcttctatctgattactctgaggagccatcaccagcgactatgtcgtagtgggtaaagctccctcttcggagggagcatcagag

SEQ ID NO: 12713 - RNA, 89 nt, synthetic construct
  misc_feature 1..89: note = engineered ribonucleic acid scaffold (ERS) sequence
  source 1..89: mol_type = other RNA
acgggcgcttctatctgattactctgatagccatcaccagcgactatgtcgtagtgggtaaagctccctcttcggagggagcatcagag

SEQ ID NO: 12714 - RNA, 90 nt, synthetic construct
  misc_feature 1..90: note = engineered ribonucleic acid scaffold (ERS) sequence
  source 1..90: mol_type = other RNA
acgggcgcttctatctgattactctgagctgccatcaccagcgactatgtcgtagtgggtaaagctccctcttcggagggagcatcagag

SEQ ID NO: 12715 - RNA, 90 nt, synthetic construct
  misc_feature 1..90: note = engineered ribonucleic acid scaffold (ERS) sequence
  source 1..90: mol_type = other RNA
acgggcgcttctatctgattactctgagtagccatcaccagcgactatgtcgtagtgggtaaagctccctcttcggagggagcatcagag

SEQ ID NO: 12716 - RNA, 90 nt, synthetic construct
  misc_feature 1..90: note = engineered ribonucleic acid scaffold (ERS) sequence
  source 1..90: mol_type = other RNA
acgggcacttctatctgattactctgagtagccatcaccagcgactatgtcgtagtgggtaaagctccctcttcggagggagcatcagag

SEQ ID NO: 12717 - RNA, 89 nt, synthetic construct
  misc_feature 1..89: note = engineered ribonucleic acid scaffold (ERS) sequence
  source 1..89: mol_type = other RNA
acgggcgcttctatctgattactctgagcaccatcaccagcgactatgtcgtagtgggtaaagctccctcttcggagggagcatcagag

SEQ ID NO: 12718 - RNA, 89 nt, synthetic construct
  misc_feature 1..89: note = engineered ribonucleic acid scaffold (ERS) sequence
  source 1..89: mol_type = other RNA
acgggcacttctatctgattactctgagcgccatcaccagcgactatgtcgtagtgggtaaagctccctcttcggagggagcatcagag

SEQ ID NO: 12719 - RNA, 89 nt, synthetic construct
  misc_feature 1..89: note = engineered ribonucleic acid scaffold (ERS) sequence
  source 1..89: mol_type = other RNA
acgggcgcttctatctgattactctgagggccatcaccagcgactatgtcgtagtgggtaaagctccctcttcggagggagcatcagag

SEQ ID NO: 12720 - RNA, 89 nt, synthetic construct
  misc_feature 1..89: note = engineered ribonucleic acid scaffold (ERS) sequence
  source 1..89: mol_type = other RNA
acgggcgcttctatctgattactctgagtgccgtcaccagcgactatgtcgtagtgggtaaagctccctcttcggagggagcatcagag

SEQ ID NO: 12721 - RNA, 89 nt, synthetic construct
  misc_feature 1..89: note = engineered ribonucleic acid scaffold (ERS) sequence
  source 1..89: mol_type = other RNA
acgggcacttctatctgattactctgagtgccatcaccagcgactatgtcgtagtgggtaaagctccctcttcggagggagcatcagag

SEQ ID NO: 12722 - RNA, 89 nt, synthetic construct
  misc_feature 1..89: note = engineered ribonucleic acid scaffold (ERS) sequence
  source 1..89: mol_type = other RNA
acgggcgcttctatctgattactctgagaaccatcaccagcgactatgtcgtagtgggtaaagctccctcttcggagggagcatcagag

SEQ ID NO: 12723 - RNA, 89 nt, synthetic construct
  misc_feature 1..89: note = engineered ribonucleic acid scaffold (ERS) sequence
  source 1..89: mol_type = other RNA
acgggcgcttctatctgattactctgagagccgtcaccagcgactatgtcgtagtgggtaaagctccctcttcggagggagcatcagag

SEQ ID NO: 12724 - RNA, 89 nt, synthetic construct
  misc_feature 1..89: note = engineered ribonucleic acid scaffold (ERS) sequence
  source 1..89: mol_type = other RNA
acgggcgcttctatctgattactctgagagccttcaccagcgactatgtcgtagtgggtaaagctccctcttcggagggagcatcagag

SEQ ID NO: 12725 - RNA, 89 nt, synthetic construct
  misc_feature 1..89: note = engineered ribonucleic acid scaffold (ERS) sequence
  source 1..89: mol_type = other RNA
acgggggcttctatctgattactctgagacccatcaccagcgactatgtcgtagtgggtaaagctccctcttcggagggagcatcagag

SEQ ID NO: 12726 - RNA, 89 nt, synthetic construct
  misc_feature 1..89: note = engineered ribonucleic acid scaffold (ERS) sequence
  source 1..89: mol_type = other RNA
acgggtgcttctatctgattactctgagagccatcaccagcgactatgtcgtagtgggtaaagctccctcttcggagggagcatcagag

SEQ ID NO: 12727 - RNA, 89 nt, synthetic construct
  misc_feature 1..89: note = engineered ribonucleic acid scaffold (ERS) sequence
  source 1..89: mol_type = other RNA
acggggccttctatctgattactctgaggcccatcaccagcgactatgtcgtagtgggtaaagctccctcttcggagggagcatcagag

SEQ ID NO: 12728 - RNA, 90 nt, synthetic construct
  misc_feature 1..90: note = engineered ribonucleic acid scaffold (ERS) sequence
  source 1..90: mol_type = other RNA
acgggcccttctatctgattactctgaggagccatcaccagcgactatgtcgtagtgggtaaagctccctcttcggagggagcatcagag

SEQ ID NO: 12729 - RNA, 89 nt, synthetic construct
  misc_feature 1..89: note = engineered ribonucleic acid scaffold (ERS) sequence
  source 1..89: mol_type = other RNA
acgggcccttctatctgattactctgagggccatcaccagcgactatgtcgtagtgggtaaagctccctcttcggagggagcatcagag

SEQ ID NO: 12730 - RNA, 89 nt, synthetic construct
  misc_feature 1..89: note = engineered ribonucleic acid scaffold (ERS) sequence
  source 1..89: mol_type = other RNA
acgggcccttctatctgattactctgagtgccatcaccagcgactatgtcgtagtgggtaaagctccctcttcggagggagcatcagag

SEQ ID NO: 12731 - RNA, 89 nt, synthetic construct
  misc_feature 1..89: note = engineered ribonucleic acid scaffold (ERS) sequence
  source 1..89: mol_type = other RNA
acgggcccttctatctgattactctgagagccatcaccagcgactatgtcgtagtgggtaaagctccctcttcggagggagcatcagag

SEQ ID NO: 12732 - RNA, 90 nt, synthetic construct
  misc_feature 1..90: note = engineered ribonucleic acid scaffold (ERS) sequence
  source 1..90: mol_type = other RNA
acgggcgcttctatctgattactctgagcagccatcaccagcgactatgtcgtagtgggtaaagctccctcttcggagggagcatcagag

SEQ ID NO: 12733 - RNA, 89 nt, synthetic construct
  misc_feature 1..89: note = engineered ribonucleic acid scaffold (ERS) sequence
  source 1..89: mol_type = other RNA
acgggcgcttctatctgattactctgagtgccatcaccagcgactatgtcgtagtgggtaaagctccctcttcggagggagcatcagag

SEQ ID NO: 12734 - RNA, 89 nt, synthetic construct
  misc_feature 1..89: note = engineered ribonucleic acid scaffold (ERS) sequence
  source 1..89: mol_type = other RNA
acgggcgcttctatctgattactctgagagccatcaccagcgactatgtcgtagtgggtaaagctccctcttcggagggagcatcagag

SEQ ID NO: 12735 - RNA, 89 nt, synthetic construct
  misc_feature 1..89: note = engineered ribonucleic acid scaffold (ERS) sequence
  source 1..89: mol_type = other RNA
acgggctcttctatctgattactctgagcgccatcaccagcgactatgtcgtagtgggtaaagctccctcttcggagggagcatcagag

SEQ ID NO: 12736 - RNA, 89 nt, synthetic construct
  misc_feature 1..89: note = engineered ribonucleic acid scaffold (ERS) sequence
  source 1..89: mol_type = other RNA
acgggctcttctatctgattactctgagggccatcaccagcgactatgtcgtagtgggtaaagctccctcttcggagggagcatcagag

SEQ ID NO: 12737 - RNA, 89 nt, synthetic construct
  misc_feature 1..89: note = engineered ribonucleic acid scaffold (ERS) sequence
  source 1..89: mol_type = other RNA
acgggctcttctatctgattactctgagtgccatcaccagcgactatgtcgtagtgggtaaagctccctcttcggagggagcatcagag

SEQ ID NO: 12738 - RNA, 89 nt, synthetic construct
  misc_feature 1..89: note = engineered ribonucleic acid scaffold (ERS) sequence
  source 1..89: mol_type = other RNA
acgggctcttctatctgattactctgagagccatcaccagcgactatgtcgtagtgggtaaagctccctcttcggagggagcatcagag

SEQ ID NO: 12739 - RNA, 89 nt, synthetic construct
  misc_feature 1..89: note = engineered ribonucleic acid scaffold (ERS) sequence
  source 1..89: mol_type = other RNA
acgggcggttctatctgattactctgagcgccatcaccagcgactatgtcgtagtgggtaaagctccctcttcggagggagcatcagag

SEQ ID NO: 12740 - RNA, 89 nt, synthetic construct
  misc_feature 1..89: note = engineered ribonucleic acid scaffold (ERS) sequence
  source 1..89: mol_type = other RNA
acgggcggttctatctgattactctgagagccatcaccagcgactatgtcgtagtgggtaaagctccctcttcggagggagcatcagag

SEQ ID NO: 12741 - RNA, 94 nt, synthetic construct
  misc_feature 1..94: note = engineered ribonucleic acid scaffold (ERS) sequence
  source 1..94: mol_type = other RNA
acacacggaggcacttctatctgattactctgccgtgttcaccagcgactatgtcgtagtgggtaaagctccctcttcggagggagcatcagag

SEQ ID NO: 12742 - RNA, 94 nt, synthetic construct
  misc_feature 1..94: note = engineered ribonucleic acid scaffold (ERS) sequence
  source 1..94: mol_type = other RNA
acactggtaggcacttctatctgattactctgaccagttcaccagcgactatgtcgtagtgggtaaagctccctcttcggagggagcatcagag

SEQ ID NO: 12743 - RNA, 94 nt, synthetic construct
  misc_feature 1..94: note = engineered ribonucleic acid scaffold (ERS) sequence
  source 1..94: mol_type = other RNA
acaggccgaggcacttctatctgattactctgcggccttcaccagcgactatgtcgtagtgggtaaagctccctcttcggagggagcatcagag

SEQ ID NO: 12744 - RNA, 94 nt, synthetic construct
  misc_feature 1..94: note = engineered ribonucleic acid scaffold (ERS) sequence
  source 1..94: mol_type = other RNA
acaggtccaggcacttctatctgattactctgggaccttcaccagcgactatgtcgtagtgggtaaagctccctcttcggagggagcatcagag

SEQ ID NO: 12745 - RNA, 94 nt, synthetic construct
  misc_feature 1..94: note = engineered ribonucleic acid scaffold (ERS) sequence
  source 1..94: mol_type = other RNA
accagcaaaggcacttctatctgattactctgttgctgtcaccagcgactatgtcgtagtgggtaaagctccctcttcggagggagcatcagag

SEQ ID NO: 12746 - RNA, 94 nt, synthetic construct
  misc_feature 1..94: note = engineered ribonucleic acid scaffold (ERS) sequence
  source 1..94: mol_type = other RNA
accgagacaggcacttctatctgattactctgggctcgtcaccagcgactatgtcgtagtgggtaaagctccctcttcggagggagcatcagag

SEQ ID NO: 12747 - RNA, 94 nt, synthetic construct
  misc_feature 1..94: note = engineered ribonucleic acid scaffold (ERS) sequence
  source 1..94: mol_type = other RNA
acctgtagaggcacttctatctgattactctgctacagtcaccagcgactatgtcgtagtgggtaaagctccctcttcggagggagcatcagag

SEQ ID NO: 12748 - RNA, 94 nt, synthetic construct
  misc_feature 1..94: note = engineered ribonucleic acid scaffold (ERS) sequence
  source 1..94: mol_type = other RNA
acgagcacaggcacttctatctgattactctggggctctcaccagcgactatgtcgtagtgggtaaagctccctcttcggagggagcatcagag

SEQ ID NO: 12749 - RNA, 94 nt, synthetic construct
  misc_feature 1..94: note = engineered ribonucleic acid scaffold (ERS) sequence
  source 1..94: mol_type = other RNA
acgaggtgaggcacttctatctgattactctgcacctctcaccagcgactatgtcgtagtgggtaaagctccctcttcggagggagcatcagag

SEQ ID NO: 12750 - RNA, 94 nt, synthetic construct
  misc_feature 1..94: note = engineered ribonucleic acid scaffold (ERS) sequence
  source 1..94: mol_type = other RNA
acgggactaggcacttctatctgattactctgagtccctcaccagcgactatgtcgtagtgggtaaagctccctcttcggagggagcatcagag

SEQ ID NO: 12751 - RNA, 94 nt, synthetic construct
  misc_feature 1..94: note = engineered ribonucleic acid scaffold (ERS) sequence
  source 1..94: mol_type = other RNA
acgggcaaaggcacttctatctgattactctgttgccctcaccagcgactatgtcgtagtgggtaaagctccctcttcggagggagcatcagag

SEQ ID NO: 12752 - RNA, 94 nt, synthetic construct
  misc_feature 1..94: note = engineered ribonucleic acid scaffold (ERS) sequence
  source 1..94: mol_type = other RNA
actgtgcgaggcacttctatctgattactctgcgcacatcaccagcgactatgtcgtagtgggtaaagctccctcttcggagggagcatcagag

SEQ ID NO: 12753 - RNA, 90 nt, synthetic construct
  misc_feature 1..90: note = engineered ribonucleic acid scaffold (ERS) sequence
  source 1..90: mol_type = other RNA
actaggcgcttctatctgattactctgggcgccatcaccagcgactatgtcgtagtgggtaaagctccctcttcggagggagcatcagag

SEQ ID NO: 12754 - RNA, 90 nt, synthetic construct
  misc_feature 1..90: note = engineered ribonucleic acid scaffold (ERS) sequence
  source 1..90: mol_type = other RNA
actaggcgcttctatctgattactctgggagccatcaccagcgactatgtcgtagtgggtaaagctccctcttcggagggagcatcagag

SEQ ID NO: 12755 - RNA, 90 nt, synthetic construct
  misc_feature 1..90: note = engineered ribonucleic acid scaffold (ERS) sequence
  source 1..90: mol_type = other RNA
actaggcgcttctatctgattactctgtgagccatcaccagcgactatgtcgtagtgggtaaagctccctcttcggagggagcatcagag

SEQ ID NO: 12756 - RNA, 91 nt, synthetic construct
  misc_feature 1..91: note = engineered ribonucleic acid scaffold (ERS) sequence
  source 1..91: mol_type = other RNA
actaggcgcttctatctgattactctgaggagccatcaccagcgactatgtcgtagtgggtaaagctccctcttcggagggagcatcagag

SEQ ID NO: 12757 - RNA, 90 nt, synthetic construct
  misc_feature 1..90: note = engineered ribonucleic acid scaffold (ERS) sequence
  source 1..90: mol_type = other RNA
actaggcgcttctatctgattactctgatagccatcaccagcgactatgtcgtagtgggtaaagctccctcttcggagggagcatcagag

SEQ ID NO: 12758 - RNA, 91 nt, synthetic construct
  misc_feature 1..91: note = engineered ribonucleic acid scaffold (ERS) sequence
  source 1..91: mol_type = other RNA
actaggcgcttctatctgattactctgagctgccatcaccagcgactatgtcgtagtgggtaaagctccctcttcggagggagcatcagag

SEQ ID NO: 12759 - RNA, 91 nt, synthetic construct
  misc_feature 1..91: note = engineered ribonucleic acid scaffold (ERS) sequence
  source 1..91: mol_type = other RNA
actaggcgcttctatctgattactctgagtagccatcaccagcgactatgtcgtagtgggtaaagctccctcttcggagggagcatcagag

SEQ ID NO: 12760 - RNA, 91 nt, synthetic construct
  misc_feature 1..91: note = engineered ribonucleic acid scaffold (ERS) sequence
  source 1..91: mol_type = other RNA
actaggcacttctatctgattactctgagtagccatcaccagcgactatgtcgtagtgggtaaagctccctcttcggagggagcatcagag

SEQ ID NO: 12761 - RNA, 90 nt, synthetic construct
  misc_feature 1..90: note = engineered ribonucleic acid scaffold (ERS) sequence
  source 1..90: mol_type = other RNA
actaggcgcttctatctgattactctgagcaccatcaccagcgactatgtcgtagtgggtaaagctccctcttcggagggagcatcagag

SEQ ID NO: 12762 - RNA, 90 nt, synthetic construct
  misc_feature 1..90: note = engineered ribonucleic acid scaffold (ERS) sequence
  source 1..90: mol_type = other RNA
actaggcacttctatctgattactctgagcgccatcaccagcgactatgtcgtagtgggtaaagctccctcttcggagggagcatcagag

SEQ ID NO: 12763 - RNA, 90 nt, synthetic construct
  misc_feature 1..90: note = engineered ribonucleic acid scaffold (ERS) sequence
  source 1..90: mol_type = other RNA
actaggcgcttctatctgattactctgagggccatcaccagcgactatgtcgtagtgggtaaagctccctcttcggagggagcatcagag

SEQ ID NO: 12764 - RNA, 90 nt, synthetic construct
  misc_feature 1..90: note = engineered ribonucleic acid scaffold (ERS) sequence
  source 1..90: mol_type = other RNA
actaggcgcttctatctgattactctgagtgccgtcaccagcgactatgtcgtagtgggtaaagctccctcttcggagggagcatcagag

SEQ ID NO: 12765 - RNA, 90 nt, synthetic construct
  misc_feature 1..90: note = engineered ribonucleic acid scaffold (ERS) sequence
  source 1..90: mol_type = other RNA
actaggcacttctatctgattactctgagtgccatcaccagcgactatgtcgtagtgggtaaagctccctcttcggagggagcatcagag

SEQ ID NO: 12766 - RNA, 90 nt, synthetic construct
  misc_feature 1..90: note = engineered ribonucleic acid scaffold (ERS) sequence
  source 1..90: mol_type = other RNA
actaggcgcttctatctgattactctgagaaccatcaccagcgactatgtcgtagtgggtaaagctccctcttcggagggagcatcagag

SEQ ID NO: 12767 - RNA, 90 nt, synthetic construct
  misc_feature 1..90: note = engineered ribonucleic acid scaffold (ERS) sequence
  source 1..90: mol_type = other RNA
actaggcgcttctatctgattactctgagagccgtcaccagcgactatgtcgtagtgggtaaagctccctcttcggagggagcatcagag

SEQ ID NO: 12768 - RNA, 90 nt, synthetic construct
  misc_feature 1..90: note = engineered ribonucleic acid scaffold (ERS) sequence
  source 1..90: mol_type = other RNA
actaggcgcttctatctgattactctgagagccttcaccagcgactatgtcgtagtgggtaaagctccctcttcggagggagcatcagag

SEQ ID NO: 12769 - RNA, 90 nt, synthetic construct
  misc_feature 1..90: note = engineered ribonucleic acid scaffold (ERS) sequence
  source 1..90: mol_type = other RNA
actaggggcttctatctgattactctgagacccatcaccagcgactatgtcgtagtgggtaaagctccctcttcggagggagcatcagag

SEQ ID NO: 12770 - RNA, 90 nt, synthetic construct
  misc_feature 1..90: note = engineered ribonucleic acid scaffold (ERS) sequence
  source 1..90: mol_type = other RNA
actaggtgcttctatctgattactctgagagccatcaccagcgactatgtcgtagtgggtaaagctccctcttcggagggagcatcagag

SEQ ID NO: 12771 - RNA, 90 nt, synthetic construct
  misc_feature 1..90: note = engineered ribonucleic acid scaffold (ERS) sequence
  source 1..90: mol_type = other RNA
actagggccttctatctgattactctgaggcccatcaccagcgactatgtcgtagtgggtaaagctccctcttcggagggagcatcagag

SEQ ID NO: 12772 - RNA, 91 nt, synthetic construct
  misc_feature 1..91: note = engineered ribonucleic acid scaffold (ERS) sequence
  source 1..91: mol_type = other RNA
actaggcccttctatctgattactctgaggagccatcaccagcgactatgtcgtagtgggtaaagctccctcttcggagggagcatcagag

SEQ ID NO: 12773 - RNA, 90 nt, synthetic construct
  misc_feature 1..90: note = engineered ribonucleic acid scaffold (ERS) sequence
  source 1..90: mol_type = other RNA
actaggcccttctatctgattactctgagggccatcaccagcgactatgtcgtagtgggtaaagctccctcttcggagggagcatcagag

SEQ ID NO: 12774 - RNA, 90 nt, synthetic construct
  misc_feature 1..90: note = engineered ribonucleic acid scaffold (ERS) sequence
  source 1..90: mol_type = other RNA
actaggcccttctatctgattactctgagtgccatcaccagcgactatgtcgtagtgggtaaagctccctcttcggagggagcatcagag

SEQ ID NO: 12775 - RNA, 90 nt, synthetic construct
  misc_feature 1..90: note = engineered ribonucleic acid scaffold (ERS) sequence
  source 1..90: mol_type = other RNA
actaggcccttctatctgattactctgagagccatcaccagcgactatgtcgtagtgggtaaagctccctcttcggagggagcatcagag

SEQ ID NO: 12776 - RNA, 91 nt, synthetic construct
  misc_feature 1..91: note = engineered ribonucleic acid scaffold (ERS) sequence
  source 1..91: mol_type = other RNA
actaggcgcttctatctgattactctgagcagccatcaccagcgactatgtcgtagtgggtaaagctccctcttcggagggagcatcagag

SEQ ID NO: 12777 - RNA, 90 nt, synthetic construct
  misc_feature 1..90: note = engineered ribonucleic acid scaffold (ERS) sequence
  source 1..90: mol_type = other RNA
actaggcgcttctatctgattactctgagtgccatcaccagcgactatgtcgtagtgggtaaagctccctcttcggagggagcatcagag

SEQ ID NO: 12778 - RNA, 90 nt, synthetic construct
  misc_feature 1..90: note = engineered ribonucleic acid scaffold (ERS) sequence
  source 1..90: mol_type = other RNA
actaggcgcttctatctgattactctgagagccatcaccagcgactatgtcgtagtgggtaaagctccctcttcggagggagcatcagag

SEQ ID NO: 12779 - RNA, 90 nt, synthetic construct
  misc_feature 1..90: note = engineered ribonucleic acid scaffold (ERS) sequence
  source 1..90: mol_type = other RNA
actaggctcttctatctgattactctgagcgccatcaccagcgactatgtcgtagtgggtaaagctccctcttcggagggagcatcagag

SEQ ID NO: 12780 - RNA, 90 nt, synthetic construct
  misc_feature 1..90: note = engineered ribonucleic acid scaffold (ERS) sequence
  source 1..90: mol_type = other RNA
actaggctcttctatctgattactctgagggccatcaccagcgactatgtcgtagtgggtaaagctccctcttcggagggagcatcagag

SEQ ID NO: 12781 - RNA, 90 nt, synthetic construct
  misc_feature 1..90: note = engineered ribonucleic acid scaffold (ERS) sequence
  source 1..90: mol_type = other RNA
actaggctcttctatctgattactctgagtgccatcaccagcgactatgtcgtagtgggtaaagctccctcttcggagggagcatcagag

SEQ ID NO: 12782 - RNA, 90 nt, synthetic construct
  misc_feature 1..90: note = engineered ribonucleic acid scaffold (ERS) sequence
  source 1..90: mol_type = other RNA
actaggctcttctatctgattactctgagagccatcaccagcgactatgtcgtagtgggtaaagctccctcttcggagggagcatcagag

SEQ ID NO: 12783 - RNA, 90 nt, synthetic construct
  misc_feature 1..90: note = engineered ribonucleic acid scaffold (ERS) sequence
  source 1..90: mol_type = other RNA
actaggcggttctatctgattactctgagcgccatcaccagcgactatgtcgtagtgggtaaagctccctcttcggagggagcatcagag

SEQ ID NO: 12784 - RNA, 90 nt, synthetic construct
  misc_feature 1..90: note = engineered ribonucleic acid scaffold (ERS) sequence
  source 1..90: mol_type = other RNA
actaggcggttctatctgattactctgagagccatcaccagcgactatgtcgtagtgggtaaagctccctcttcggagggagcatcagag

SEQ ID NO: 12785 - RNA, 89 nt, synthetic construct
  misc_feature 1..89: note = engineered ribonucleic acid scaffold (ERS) sequence
  source 1..89: mol_type = other RNA
aactggcgcttctatctgattactctgagcgccaacaccagcgactatgtcgtatgggtaaagctccctcttcggagggagcatcagag

SEQ ID NO: 12786 - RNA, 89 nt, synthetic construct
  misc_feature 1..89: note = engineered ribonucleic acid scaffold (ERS) sequence
  source 1..89: mol_type = other RNA
aactggcgcttctatctgattactctgagcgccagcaccagcgactatgtcgtatgggtaaagctccctcttcggagggagcatcagag

SEQ ID NO: 12787 - RNA, 89 nt, synthetic construct
  misc_feature 1..89: note = engineered ribonucleic acid scaffold (ERS) sequence
  source 1..89: mol_type = other RNA
aactggcgcttctatctgattactctgagcgccatgaccagcgactatgtcgtatggctaaagctccctcttcggagggagcatcagag

SEQ ID NO: 12788 - RNA, 90 nt, synthetic construct
  misc_feature 1..90: note = engineered ribonucleic acid scaffold (ERS) sequence
  source 1..90: mol_type = other RNA
aactggcgcttctatctgattactctgagcgccatgaccagcgactatgtcgtatgggctaaagctccctcttcggagggagcatcagag

SEQ ID NO: 12789 - RNA, 89 nt, synthetic construct
  misc_feature 1..89: note = engineered ribonucleic acid scaffold (ERS) sequence
  source 1..89: mol_type = other RNA
aactggcgcttctatctgattactctgagcgccatgaccagcgactatgtcgtatgggtaaagctccctcttcggagggagcatcagag

SEQ ID NO: 12790 - RNA, 89 nt, synthetic construct
  misc_feature 1..89: note = engineered ribonucleic acid scaffold (ERS) sequence
  source 1..89: mol_type = other RNA
aactggcgcttctatctgattactctgagcgccatccccagcgactatgtcgtatgggtaaagctccctcttcggagggagcatcagag

SEQ ID NO: 12791 - RNA, 90 nt, synthetic construct
  misc_feature 1..90: note = engineered ribonucleic acid scaffold (ERS) sequence
  source 1..90: mol_type = other RNA
aactggcgcttctatctgattactctgagcgccatcgccagcgactatgtcgtatggcgtaaagctccctcttcggagggagcatcagag

SEQ ID NO: 12792 - RNA, 89 nt, synthetic construct
  misc_feature 1..89: note = engineered ribonucleic acid scaffold (ERS) sequence
  source 1..89: mol_type = other RNA
aactggcgcttctatctgattactctgagcgccatcgccagcgactatgtcgtatgggtaaagctccctcttcggagggagcatcagag

SEQ ID NO: 12793 - RNA, 89 nt, synthetic construct
  misc_feature 1..89: note = engineered ribonucleic acid scaffold (ERS) sequence
  source 1..89: mol_type = other RNA
aactggcgcttctatctgattactctgagcgccatctccagcgactatgtcgtatgggtaaagctccctcttcggagggagcatcagag

SEQ ID NO: 12794 - RNA, 89 nt, synthetic construct
  misc_feature 1..89: note = engineered ribonucleic acid scaffold (ERS) sequence
  source 1..89: mol_type = other RNA
aactggcgcttctatctgattactctgagcgccatcacctgcgactatgtcgtaagggtaaagctccctcttcggagggagcatcagag

SEQ ID NO: 12795 - RNA, 89 nt, synthetic construct
  misc_feature 1..89: note = engineered ribonucleic acid scaffold (ERS) sequence
  source 1..89: mol_type = other RNA
aactggcgcttctatctgattactctgagcgccatcaccagagactatgtcttatgggtaaagctccctcttcggagggagcatcagag

SEQ ID NO: 12796 - RNA, 89 nt, synthetic construct
  misc_feature 1..89: note = engineered ribonucleic acid scaffold (ERS) sequence
  source 1..89: mol_type = other RNA
aactggcgcttctatctgattactctgagcgccatcaccagggactatgtcctatgggtaaagctccctcttcggagggagcatcagag

SEQ ID NO: 12797 - RNA, 90 nt, synthetic construct
  misc_feature 1..90: note = engineered ribonucleic acid scaffold (ERS) sequence
  source 1..90: mol_type = other RNA
aactggcgcttctatctgattactctgagcgccatcaccaggcactatgtgctattgggtaaagctccctcttcggagggagcatcagag

SEQ ID NO: 12798 - RNA, 89 nt, synthetic construct
  misc_feature 1..89: note = engineered ribonucleic acid scaffold (ERS) sequence
  source 1..89: mol_type = other RNA
aactggcgcttctatctgattactctgagcgccatcaccagccactatgtggtatgggtaaagctccctcttcggagggagcatcagag

SEQ ID NO: 12799 - RNA, 89 nt, synthetic construct
  misc_feature 1..89: note = engineered ribonucleic acid scaffold (ERS) sequence
  source 1..89: mol_type = other RNA
aactggcgcttctatctgattactctgagcgccatcaccagctactatgtagtatgggtaaagctccctcttcggagggagcatcagag

SEQ ID NO: 12800 - RNA, 89 nt, synthetic construct
  misc_feature 1..89: note = engineered ribonucleic acid scaffold (ERS) sequence
  source 1..89: mol_type = other RNA
aactggcgcttctatctgattactctgagcgccatcaccagcgattatgtcgtatgggtaaagctccctcttcggagggagcatcagag

SEQ ID NO: 12801 - RNA, 89 nt, synthetic construct
  misc_feature 1..89: note = engineered ribonucleic acid scaffold (ERS) sequence
  source 1..89: mol_type = other RNA
aactggcgcttctatctgattactctgagcgccatcaccagcgacgatgtcgtatgggtaaagctccctcttcggagggagcatcagag

SEQ ID NO: 12802 - RNA, 89 nt, synthetic construct
  misc_feature 1..89: note = engineered ribonucleic acid scaffold (ERS) sequence
  source 1..89: mol_type = other RNA
aactggcgcttctatctgattactctgagcgccatcaccagcgactctgtcgtatgggtaaagctccctcttcggagggagcatcagag

SEQ ID NO: 12803 - RNA, 89 nt, synthetic construct
  misc_feature 1..89: note = engineered ribonucleic acid scaffold (ERS) sequence
  source 1..89: mol_type = other RNA
aactggcgcttctatctgattactctgagcgccatcaccagcgactatgtcgtgtgggtaaagctccctcttcggagggagcatcagag

SEQ ID NO: 12804 - RNA, 90 nt, synthetic construct
  misc_feature 1..90: note = engineered ribonucleic acid scaffold (ERS) sequence
  source 1..90: mol_type = other RNA
aactggcgcttctatctgattactctgagcgccatcaccagcgactatgtcgtattgggtaaagctccctcttcggagggagcatcagag

SEQ ID NO: 12805 - RNA, 90 nt, synthetic construct
  misc_feature 1..90: note = engineered ribonucleic acid scaffold (ERS) sequence
  source 1..90: mol_type = other RNA
aactggcgcttctatctgattactctgagcgccatcaccagcgactatgtcgtatggagtaaagctccctcttcggagggagcatcagag

SEQ ID NO: 12806 - RNA, 90 nt, synthetic construct
  misc_feature 1..90: note = engineered ribonucleic acid scaffold (ERS) sequence
  source 1..90: mol_type = other RNA
aactggcgcttctatctgattactctgagcgccatcaccagcgactatgtcgtatggcgtaaagctccctcttcggagggagcatcagag

SEQ ID NO: 12807 - RNA, 90 nt, synthetic construct
  misc_feature 1..90: note = engineered ribonucleic acid scaffold (ERS) sequence
  source 1..90: mol_type = other RNA
aactggcgcttctatctgattactctgagcgccatcaccagcgactatgtcgtatggtgtaaagctccctcttcggagggagcatcagag

SEQ ID NO: 12808 - RNA, 90 nt, synthetic construct
  misc_feature 1..90: note = engineered ribonucleic acid scaffold (ERS) sequence
  source 1..90: mol_type = other RNA
aactggcgcttctatctgattactctgagcgccatcaccagcgactatgtcgtatgggctaaagctccctcttcggagggagcatcagag

SEQ ID NO: 12809 - RNA, 87 nt, synthetic construct
  misc_feature 1..87: note = engineered ribonucleic acid scaffold (ERS) sequence
  source 1..87: mol_type = other RNA
aactggcgcttctatctgattactctgagcgccatcaccagcgactatgtcgtatgggtagctccctcttcggagggagcatcagag

SEQ ID NO: 12810 - RNA, 89 nt, synthetic construct
  misc_feature 1..89: note = engineered ribonucleic acid scaffold (ERS) sequence
  source 1..89: mol_type = other RNA
aactggcgcttctatctgattactctgagcgccatcaccagcgactatgtcgtatgggtgaagctccctcttcggagggagcatcagag

SEQ ID NO: 12811 - RNA, 89 nt, synthetic construct
  misc_feature 1..89: note = engineered ribonucleic acid scaffold (ERS) sequence
  source 1..89: mol_type = other RNA
aactggcgcttctatctgattactctgagcgccatcaccagcgactatgtcgtatgggtagagctccctcttcggagggagcatcagag

SEQ ID NO: 12812 - RNA, 86 nt, synthetic construct
  misc_feature 1..86: note = engineered ribonucleic acid scaffold (ERS) sequence
  source 1..86: mol_type = other RNA
gggcgcttctatctgattactctgagcgcccacaccagcgactatgtcgtatgggtaaagctccctcttcggagggagcatcagag

SEQ ID NO: 12813 - RNA, 86 nt, synthetic construct
  misc_feature 1..86: note = engineered ribonucleic acid scaffold (ERS) sequence
  source 1..86: mol_type = other RNA
gggcgcttctatctgattactctgagcgcccgcaccagcgactatgtcgtatgggtaaagctccctcttcggagggagcatcagag

SEQ ID NO: 12814 - RNA, 86 nt, synthetic construct
  misc_feature 1..86: note = engineered ribonucleic acid scaffold (ERS) sequence
  source 1..86: mol_type = other RNA
gggcgcttctatctgattactctgagcgccctgaccagcgactatgtcgtatggctaaagctccctcttcggagggagcatcagag

SEQ ID NO: 12815 - RNA, 87 nt, synthetic construct
  misc_feature 1..87: note = engineered ribonucleic acid scaffold (ERS) sequence
  source 1..87: mol_type = other RNA
gggcgcttctatctgattactctgagcgccctgaccagcgactatgtcgtatgggctaaagctccctcttcggagggagcatcagag

SEQ ID NO: 12816 - RNA, 86 nt, synthetic construct
  misc_feature 1..86: note = engineered ribonucleic acid scaffold (ERS) sequence
  source 1..86: mol_type = other RNA
gggcgcttctatctgattactctgagcgccctgaccagcgactatgtcgtatgggtaaagctccctcttcggagggagcatcagag

SEQ ID NO: 12817 - RNA, 86 nt, synthetic construct
  misc_feature 1..86: note = engineered ribonucleic acid scaffold (ERS) sequence
  source 1..86: mol_type = other RNA
gggcgcttctatctgattactctgagcgccctccccagcgactatgtcgtatgggtaaagctccctcttcggagggagcatcagag

SEQ ID NO: 12818 - RNA, 87 nt, synthetic construct
  misc_feature 1..87: note = engineered ribonucleic acid scaffold (ERS) sequence
  source 1..87: mol_type = other RNA
gggcgcttctatctgattactctgagcgccctcgccagcgactatgtcgtatggcgtaaagctccctcttcggagggagcatcagag

SEQ ID NO: 12819 - RNA, 86 nt, synthetic construct
  misc_feature 1..86: note = engineered ribonucleic acid scaffold (ERS) sequence
  source 1..86: mol_type = other RNA
gggcgcttctatctgattactctgagcgccctcgccagcgactatgtcgtatgggtaaagctccctcttcggagggagcatcagag

SEQ ID NO: 12820 - RNA, 86 nt, synthetic construct
  misc_feature 1..86: note = engineered ribonucleic acid scaffold (ERS) sequence
  source 1..86: mol_type = other RNA
gggcgcttctatctgattactctgagcgccctctccagcgactatgtcgtatgggtaaagctccctcttcggagggagcatcagag

SEQ ID NO: 12821 - RNA, 86 nt, synthetic construct
  misc_feature 1..86: note = engineered ribonucleic acid scaffold (ERS) sequence
  source 1..86: mol_type = other RNA
gggcgcttctatctgattactctgagcgccctcacctgcgactatgtcgtaagggtaaagctccctcttcggagggagcatcagag

SEQ ID NO: 12822 - RNA, 86 nt, synthetic construct
  misc_feature 1..86: note = engineered ribonucleic acid scaffold (ERS) sequence
  source 1..86: mol_type = other RNA
gggcgcttctatctgattactctgagcgccctcaccagagactatgtcttatgggtaaagctccctcttcggagggagcatcagag

SEQ ID NO: 12823 - RNA, 86 nt, synthetic construct
  misc_feature 1..86: note = engineered ribonucleic acid scaffold (ERS) sequence
  source 1..86: mol_type = other RNA
gggcgcttctatctgattactctgagcgccctcaccagggactatgtcctatgggtaaagctccctcttcggagggagcatcagag

SEQ ID NO: 12824 - RNA, 87 nt, synthetic construct
  misc_feature 1..87: note = engineered ribonucleic acid scaffold (ERS) sequence
  source 1..87: mol_type = other RNA
gggcgcttctatctgattactctgagcgccctcaccaggcactatgtgctattgggtaaagctccctcttcggagggagcatcagag

SEQ ID NO: 12825 - RNA, 86 nt, synthetic construct
  misc_feature 1..86: note = engineered ribonucleic acid scaffold (ERS) sequence
  source 1..86: mol_type = other RNA
gggcgcttctatctgattactctgagcgccctcaccagccactatgtggtatgggtaaagctccctcttcggagggagcatcagag

SEQ ID NO: 12826 - RNA, 86 nt, synthetic construct
  misc_feature 1..86: note = engineered ribonucleic acid scaffold (ERS) sequence
  source 1..86: mol_type = other RNA
gggcgcttctatctgattactctgagcgccctcaccagctactatgtagtatgggtaaagctccctcttcggagggagcatcagag

SEQ ID NO: 12827 - RNA, 86 nt, synthetic construct
  misc_feature 1..86: note = engineered ribonucleic acid scaffold (ERS) sequence
  source 1..86: mol_type = other RNA
gggcgcttctatctgattactctgagcgccctcaccagcgattatgtcgtatgggtaaagctccctcttcggagggagcatcagag

SEQ ID NO: 12828 - RNA, 86 nt, synthetic construct
  misc_feature 1..86: note = engineered ribonucleic acid scaffold (ERS) sequence
  source 1..86: mol_type = other RNA
gggcgcttctatctgattactctgagcgccctcaccagcgacgatgtcgtatgggtaaagctccctcttcggagggagcatcagag

SEQ ID NO: 12829 - RNA, 86 nt, synthetic construct
  misc_feature 1..86: note = engineered ribonucleic acid scaffold (ERS) sequence
  source 1..86: mol_type = other RNA
gggcgcttctatctgattactctgagcgccctcaccagcgactctgtcgtatgggtaaagctccctcttcggagggagcatcagag

SEQ ID NO: 12830 - RNA, 86 nt, synthetic construct
  misc_feature 1..86: note = engineered ribonucleic acid scaffold (ERS) sequence
  source 1..86: mol_type = other RNA
gggcgcttctatctgattactctgagcgccctcaccagcgactatgtcgtgtgggtaaagctccctcttcggagggagcatcagag

SEQ ID NO: 12831 - RNA, 87 nt, synthetic construct
  misc_feature 1..87: note = engineered ribonucleic acid scaffold (ERS) sequence
  source 1..87: mol_type = other RNA
gggcgcttctatctgattactctgagcgccctcaccagcgactatgtcgtattgggtaaagctccctcttcggagggagcatcagag

SEQ ID NO: 12832 - RNA, 87 nt, synthetic construct
  misc_feature 1..87: note = engineered ribonucleic acid scaffold (ERS) sequence
  source 1..87: mol_type = other RNA
gggcgcttctatctgattactctgagcgccctcaccagcgactatgtcgtatggagtaaagctccctcttcggagggagcatcagag

SEQ ID NO: 12833 - RNA, 87 nt, synthetic construct
  misc_feature 1..87: note = engineered ribonucleic acid scaffold (ERS) sequence
  source 1..87: mol_type = other RNA
gggcgcttctatctgattactctgagcgccctcaccagcgactatgtcgtatggcgtaaagctccctcttcggagggagcatcagag

SEQ ID NO: 12834 - RNA, 87 nt, synthetic construct
  misc_feature 1..87: note = engineered ribonucleic acid scaffold (ERS) sequence
  source 1..87: mol_type = other RNA
gggcgcttctatctgattactctgagcgccctcaccagcgactatgtcgtatggtgtaaagctccctcttcggagggagcatcagag

SEQ ID NO: 12835 - RNA, 87 nt, synthetic construct
  misc_feature 1..87: note = engineered ribonucleic acid scaffold (ERS) sequence
  source 1..87: mol_type = other RNA
gggcgcttctatctgattactctgagcgccctcaccagcgactatgtcgtatgggctaaagctccctcttcggagggagcatcagag

SEQ ID NO: 12836 - RNA, 84 nt, synthetic construct
  misc_feature 1..84: note = engineered ribonucleic acid scaffold (ERS) sequence
  source 1..84: mol_type = other RNA
gggcgcttctatctgattactctgagcgccctcaccagcgactatgtcgtatgggtagctccctcttcggagggagcatcagag

SEQ ID NO: 12837 - RNA, 86 nt, synthetic construct
  misc_feature 1..86: note = engineered ribonucleic acid scaffold (ERS) sequence
  source 1..86: mol_type = other RNA
gggcgcttctatctgattactctgagcgccctcaccagcgactatgtcgtatgggtgaagctccctcttcggagggagcatcagag

SEQ ID NO: 12838 - RNA, 86 nt, synthetic construct
  misc_feature 1..86: note = engineered ribonucleic acid scaffold (ERS) sequence
  source 1..86: mol_type = other RNA
gggcgcttctatctgattactctgagcgccctcaccagcgactatgtcgtatgggtagagctccctcttcggagggagcatcagag

SEQ ID NO: 12839 - RNA, 88 nt, synthetic construct
  misc_feature 1..88: note = engineered ribonucleic acid scaffold (ERS) sequence
  source 1..88: mol_type = other RNA
gctggcgcttctatctgattactctgagcgccaacaccagcgactatgtcgtatgggtaaagctccctcttcggagggagcatcagag

SEQ ID NO: 12840 - RNA, 88 nt, synthetic construct
  misc_feature 1..88: note = engineered ribonucleic acid scaffold (ERS) sequence
  source 1..88: mol_type = other RNA
gctggcgcttctatctgattactctgagcgccagcaccagcgactatgtcgtatgggtaaagctccctcttcggagggagcatcagag

SEQ ID NO: 12841 - RNA, 88 nt, synthetic construct
  misc_feature 1..88: note = engineered ribonucleic acid scaffold (ERS) sequence
  source 1..88: mol_type = other RNA
gctggcgcttctatctgattactctgagcgccatgaccagcgactatgtcgtatggctaaagctccctcttcggagggagcatcagag

SEQ ID NO: 12842 - RNA, 89 nt, synthetic construct
  misc_feature 1..89: note = engineered ribonucleic acid scaffold (ERS) sequence
  source 1..89: mol_type = other RNA
gctggcgcttctatctgattactctgagcgccatgaccagcgactatgtcgtatgggctaaagctccctcttcggagggagcatcagag

SEQ ID NO: 12843 - RNA, 88 nt, synthetic construct
  misc_feature 1..88: note = engineered ribonucleic acid scaffold (ERS) sequence
  source 1..88: mol_type = other RNA
gctggcgcttctatctgattactctgagcgccatgaccagcgactatgtcgtatgggtaaagctccctcttcggagggagcatcagag

SEQ ID NO: 12844 - RNA, 88 nt, synthetic construct
  misc_feature 1..88: note = engineered ribonucleic acid scaffold (ERS) sequence
  source 1..88: mol_type = other RNA
gctggcgcttctatctgattactctgagcgccatccccagcgactatgtcgtatgggtaaagctccctcttcggagggagcatcagag

SEQ ID NO: 12845 - RNA, 89 nt, synthetic construct
  misc_feature 1..89: note = engineered ribonucleic acid scaffold (ERS) sequence
  source 1..89: mol_type = other RNA
gctggcgcttctatctgattactctgagcgccatcgccagcgactatgtcgtatggcgtaaagctccctcttcggagggagcatcagag

SEQ ID NO: 12846 - RNA, 88 nt, synthetic construct
  misc_feature 1..88: note = engineered ribonucleic acid scaffold (ERS) sequence
  source 1..88: mol_type = other RNA
gctggcgcttctatctgattactctgagcgccatcgccagcgactatgtcgtatgggtaaagctccctcttcggagggagcatcagag

SEQ ID NO: 12847 - RNA, 88 nt, synthetic construct
  misc_feature 1..88: note = engineered ribonucleic acid scaffold (ERS) sequence
  source 1..88: mol_type = other RNA
gctggcgcttctatctgattactctgagcgccatctccagcgactatgtcgtatgggtaaagctccctcttcggagggagcatcagag

SEQ ID NO: 12848 - RNA, 88 nt, synthetic construct
  misc_feature 1..88: note = engineered ribonucleic acid scaffold (ERS) sequence
  source 1..88: mol_type = other RNA
gctggcgcttctatctgattactctgagcgccatcacctgcgactatgtcgtaagggtaaagctccctcttcggagggagcatcagag

SEQ ID NO: 12849 - RNA, 88 nt, synthetic construct
  misc_feature 1..88: note = engineered ribonucleic acid scaffold (ERS) sequence
  source 1..88: mol_type = other RNA
gctggcgcttctatctgattactctgagcgccatcaccagagactatgtcttatgggtaaagctccctcttcggagggagcatcagag

SEQ ID NO: 12850 - RNA, 88 nt, synthetic construct
  misc_feature 1..88: note = engineered ribonucleic acid scaffold (ERS) sequence
  source 1..88: mol_type = other RNA
gctggcgcttctatctgattactctgagcgccatcaccagggactatgtcctatgggtaaagctccctcttcggagggagcatcagag

SEQ ID NO: 12851 - RNA, 89 nt, synthetic construct
  misc_feature 1..89: note = engineered ribonucleic acid scaffold (ERS) sequence
  source 1..89: mol_type = other RNA
gctggcgcttctatctgattactctgagcgccatcaccaggcactatgtgctattgggtaaagctccctcttcggagggagcatcagag

SEQ ID NO: 12852 - RNA, 88 nt, synthetic construct
  misc_feature 1..88: note = engineered ribonucleic acid scaffold (ERS) sequence
  source 1..88: mol_type = other RNA
gctggcgcttctatctgattactctgagcgccatcaccagccactatgtggtatgggtaaagctccctcttcggagggagcatcagag

SEQ ID NO: 12853 - RNA, 88 nt, synthetic construct
  misc_feature 1..88: note = engineered ribonucleic acid scaffold (ERS) sequence
  source 1..88: mol_type = other RNA
gctggcgcttctatctgattactctgagcgccatcaccagctactatgtagtatgggtaaagctccctcttcggagggagcatcagag

SEQ ID NO: 12854 - RNA, 88 nt, synthetic construct
  misc_feature 1..88: note = engineered ribonucleic acid scaffold (ERS) sequence
  source 1..88: mol_type = other RNA
gctggcgcttctatctgattactctgagcgccatcaccagcgattatgtcgtatgggtaaagctccctcttcggagggagcatcagag

SEQ ID NO: 12855 - RNA, 88 nt, synthetic construct
  misc_feature 1..88: note = engineered ribonucleic acid scaffold (ERS) sequence
  source 1..88: mol_type = other RNA
gctggcgcttctatctgattactctgagcgccatcaccagcgacgatgtcgtatgggtaaagctccctcttcggagggagcatcagag

SEQ ID NO: 12856 - RNA, 88 nt, synthetic construct
  misc_feature 1..88: note = engineered ribonucleic acid scaffold (ERS) sequence
  source 1..88: mol_type = other RNA
gctggcgcttctatctgattactctgagcgccatcaccagcgactctgtcgtatgggtaaagctccctcttcggagggagcatcagag

SEQ ID NO: 12857 - RNA, 88 nt, synthetic construct
  misc_feature 1..88: note = engineered ribonucleic acid scaffold (ERS) sequence
  source 1..88: mol_type = other RNA
gctggcgcttctatctgattactctgagcgccatcaccagcgactatgtcgtgtgggtaaagctccctcttcggagggagcatcagag

SEQ ID NO: 12858 - RNA, 89 nt, synthetic construct
  misc_feature 1..89: note = engineered ribonucleic acid scaffold (ERS) sequence
  source 1..89: mol_type = other RNA
gctggcgcttctatctgattactctgagcgccatcaccagcgactatgtcgtattgggtaaagctccctcttcggagggagcatcagag

SEQ ID NO: 12859 - RNA, 89 nt, synthetic construct
  misc_feature 1..89: note = engineered ribonucleic acid scaffold (ERS) sequence
  source 1..89: mol_type = other RNA
gctggcgcttctatctgattactctgagcgccatcaccagcgactatgtcgtatggagtaaagctccctcttcggagggagcatcagag

SEQ ID NO: 12860 - RNA, 89 nt, synthetic construct
  misc_feature 1..89: note = engineered ribonucleic acid scaffold (ERS) sequence
  source 1..89: mol_type = other RNA
gctggcgcttctatctgattactctgagcgccatcaccagcgactatgtcgtatggcgtaaagctccctcttcggagggagcatcagag

SEQ ID NO: 12861 - RNA, 89 nt, synthetic construct
  misc_feature 1..89: note = engineered ribonucleic acid scaffold (ERS) sequence
  source 1..89: mol_type = other RNA
gctggcgcttctatctgattactctgagcgccatcaccagcgactatgtcgtatggtgtaaagctccctcttcggagggagcatcagag

SEQ ID NO: 12862 - RNA, 89 nt, synthetic construct
  misc_feature 1..89: note = engineered ribonucleic acid scaffold (ERS) sequence
  source 1..89: mol_type = other RNA
gctggcgcttctatctgattactctgagcgccatcaccagcgactatgtcgtatgggctaaagctccctcttcggagggagcatcagag

SEQ ID NO: 12863 - RNA, 86 nt, synthetic construct
  misc_feature 1..86: note = engineered ribonucleic acid scaffold (ERS) sequence
  source 1..86: mol_type = other RNA
gctggcgcttctatctgattactctgagcgccatcaccagcgactatgtcgtatgggtagctccctcttcggagggagcatcagag

SEQ ID NO: 12864 - RNA, 88 nt, synthetic construct
  misc_feature 1..88: note = engineered ribonucleic acid scaffold (ERS) sequence
  source 1..88: mol_type = other RNA
gctggcgcttctatctgattactctgagcgccatcaccagcgactatgtcgtatgggtgaagctccctcttcggagggagcatcagag

SEQ ID NO: 12865 - RNA, 88 nt, synthetic construct
  misc_feature 1..88: note = engineered ribonucleic acid scaffold (ERS) sequence
  source 1..88: mol_type = other RNA
gctggcgcttctatctgattactctgagcgccatcaccagcgactatgtcgtatgggtagagctccctcttcggagggagcatcagag

SEQ ID NO: 12866 - RNA, 88 nt, synthetic construct
  misc_feature 1..88: note = engineered ribonucleic acid scaffold (ERS) sequence
  source 1..88: mol_type = other RNA
tatggcgcttctatctgattactctgagcgccaacaccagcgactatgtcgtatgggtaaagctccctcttcggagggagcatcagag

SEQ ID NO: 12867 - RNA, 88 nt, synthetic construct
  misc_feature 1..88: note = engineered ribonucleic acid scaffold (ERS) sequence
  source 1..88: mol_type = other RNA
tatggcgcttctatctgattactctgagcgccagcaccagcgactatgtcgtatgggtaaagctccctcttcggagggagcatcagag

SEQ ID NO: 12868 - RNA, 88 nt, synthetic construct
  misc_feature 1..88: note = engineered ribonucleic acid scaffold (ERS) sequence
  source 1..88: mol_type = other RNA
tatggcgcttctatctgattactctgagcgccatgaccagcgactatgtcgtatggctaaagctccctcttcggagggagcatcagag

SEQ ID NO: 12869 - RNA, 89 nt, synthetic construct
  misc_feature 1..89: note = engineered ribonucleic acid scaffold (ERS) sequence
  source 1..89: mol_type = other RNA
tatggcgcttctatctgattactctgagcgccatgaccagcgactatgtcgtatgggctaaagctccctcttcggagggagcatcagag

SEQ ID NO: 12870 - RNA, 88 nt, synthetic construct
  misc_feature 1..88: note = engineered ribonucleic acid scaffold (ERS) sequence
  source 1..88: mol_type = other RNA
tatggcgcttctatctgattactctgagcgccatgaccagcgactatgtcgtatgggtaaagctccctcttcggagggagcatcagag

SEQ ID NO: 12871 - RNA, 88 nt, synthetic construct
  misc_feature 1..88: note = engineered ribonucleic acid scaffold (ERS) sequence
  source 1..88: mol_type = other RNA
tatggcgcttctatctgattactctgagcgccatccccagcgactatgtcgtatgggtaaagctccctcttcggagggagcatcagag

SEQ ID NO: 12872 - RNA, 89 nt, synthetic construct
  misc_feature 1..89: note = engineered ribonucleic acid scaffold (ERS) sequence
  source 1..89: mol_type = other RNA
tatggcgcttctatctgattactctgagcgccatcgccagcgactatgtcgtatggcgtaaagctccctcttcggagggagcatcagag

SEQ ID NO: 12873 - RNA, 88 nt, synthetic construct
  misc_feature 1..88: note = engineered ribonucleic acid scaffold (ERS) sequence
  source 1..88: mol_type = other RNA
tatggcgcttctatctgattactctgagcgccatcgccagcgactatgtcgtatgggtaaagctccctcttcggagggagcatcagag

SEQ ID NO: 12874 - RNA, 88 nt, synthetic construct
  misc_feature 1..88: note = engineered ribonucleic acid scaffold (ERS) sequence
  source 1..88: mol_type = other RNA
tatggcgcttctatctgattactctgagcgccatctccagcgactatgtcgtatgggtaaagctccctcttcggagggagcatcagag

SEQ ID NO: 12875 - RNA, 88 nt, synthetic construct
  misc_feature 1..88: note = engineered ribonucleic acid scaffold (ERS) sequence
  source 1..88: mol_type = other RNA
tatggcgcttctatctgattactctgagcgccatcacctgcgactatgtcgtaagggtaaagctccctcttcggagggagcatcagag

SEQ ID NO: 12876 - RNA, 88 nt, synthetic construct
  misc_feature 1..88: note = engineered ribonucleic acid scaffold (ERS) sequence
  source 1..88: mol_type = other RNA
tatggcgcttctatctgattactctgagcgccatcaccagagactatgtcttatgggtaaagctccctcttcggagggagcatcagag

SEQ ID NO: 12877 - RNA, 88 nt, synthetic construct
  misc_feature 1..88: note = engineered ribonucleic acid scaffold (ERS) sequence
  source 1..88: mol_type = other RNA
tatggcgcttctatctgattactctgagcgccatcaccagggactatgtcctatgggtaaagctccctcttcggagggagcatcagag

SEQ ID NO: 12878 - RNA, 89 nt, synthetic construct
  misc_feature 1..89: note = engineered ribonucleic acid scaffold (ERS) sequence
  source 1..89: mol_type = other RNA
tatggcgcttctatctgattactctgagcgccatcaccaggcactatgtgctattgggtaaagctccctcttcggagggagcatcagag

SEQ ID NO: 12879 - RNA, 88 nt, synthetic construct
  misc_feature 1..88: note = engineered ribonucleic acid scaffold (ERS) sequence
  source 1..88: mol_type = other RNA
tatggcgcttctatctgattactctgagcgccatcaccagccactatgtggtatgggtaaagctccctcttcggagggagcatcagag

SEQ ID NO: 12880 - RNA, 88 nt, synthetic construct
  misc_feature 1..88: note = engineered ribonucleic acid scaffold (ERS) sequence
  source 1..88: mol_type = other RNA
tatggcgcttctatctgattactctgagcgccatcaccagctactatgtagtatgggtaaagctccctcttcggagggagcatcagag

SEQ ID NO: 12881 - RNA, 88 nt, synthetic construct
  misc_feature 1..88: note = engineered ribonucleic acid scaffold (ERS) sequence
  source 1..88: mol_type = other RNA
tatggcgcttctatctgattactctgagcgccatcaccagcgattatgtcgtatgggtaaagctccctcttcggagggagcatcagag

SEQ ID NO: 12882 - RNA, 88 nt, synthetic construct
  misc_feature 1..88: note = engineered ribonucleic acid scaffold (ERS) sequence
  source 1..88: mol_type = other RNA
tatggcgcttctatctgattactctgagcgccatcaccagcgacgatgtcgtatgggtaaagctccctcttcggagggagcatcagag

SEQ ID NO: 12883 - RNA, 88 nt, synthetic construct
  misc_feature 1..88: note = engineered ribonucleic acid scaffold (ERS) sequence
  source 1..88: mol_type = other RNA
tatggcgcttctatctgattactctgagcgccatcaccagcgactctgtcgtatgggtaaagctccctcttcggagggagcatcagag

SEQ ID NO: 12884 - RNA, 88 nt, synthetic construct
  misc_feature 1..88: note = engineered ribonucleic acid scaffold (ERS) sequence
  source 1..88: mol_type = other RNA
tatggcgcttctatctgattactctgagcgccatcaccagcgactatgtcgtgtgggtaaagctccctcttcggagggagcatcagag

SEQ ID NO: 12885 - RNA, 89 nt, synthetic construct
  misc_feature 1..89: note = engineered ribonucleic acid scaffold (ERS) sequence
  source 1..89: mol_type = other RNA
tatggcgcttctatctgattactctgagcgccatcaccagcgactatgtcgtattgggtaaagctccctcttcggagggagcatcagag

SEQ ID NO: 12886 - RNA, 89 nt, synthetic construct
  misc_feature 1..89: note = engineered ribonucleic acid scaffold (ERS) sequence
  source 1..89: mol_type = other RNA
tatggcgcttctatctgattactctgagcgccatcaccagcgactatgtcgtatggagtaaagctccctcttcggagggagcatcagag

SEQ ID NO: 12887 - RNA, 89 nt, synthetic construct
  misc_feature 1..89: note = engineered ribonucleic acid scaffold (ERS) sequence
  source 1..89: mol_type = other RNA
tatggcgcttctatctgattactctgagcgccatcaccagcgactatgtcgtatggcgtaaagctccctcttcggagggagcatcagag

SEQ ID NO: 12888 - RNA, 89 nt, synthetic construct
  misc_feature 1..89: note = engineered ribonucleic acid scaffold (ERS) sequence
  source 1..89: mol_type = other RNA
tatggcgcttctatctgattactctgagcgccatcaccagcgactatgtcgtatggtgtaaagctccctcttcggagggagcatcagag

SEQ ID NO: 12889 - RNA, 89 nt, synthetic construct
  misc_feature 1..89: note = engineered ribonucleic acid scaffold (ERS) sequence
  source 1..89: mol_type = other RNA
tatggcgcttctatctgattactctgagcgccatcaccagcgactatgtcgtatgggctaaagctccctcttcggagggagcatcagag

SEQ ID NO: 12890 - RNA, 86 nt, synthetic construct
  misc_feature 1..86: note = engineered ribonucleic acid scaffold (ERS) sequence
  source 1..86: mol_type = other RNA
tatggcgcttctatctgattactctgagcgccatcaccagcgactatgtcgtatgggtagctccctcttcggagggagcatcagag

SEQ ID NO: 12891 - RNA, 88 nt, synthetic construct
  misc_feature 1..88: note = engineered ribonucleic acid scaffold (ERS) sequence
  source 1..88: mol_type = other RNA
tatggcgcttctatctgattactctgagcgccatcaccagcgactatgtcgtatgggtgaagctccctcttcggagggagcatcagag

SEQ ID NO: 12892 - RNA, 88 nt, synthetic construct
  misc_feature 1..88: note = engineered ribonucleic acid scaffold (ERS) sequence
  source 1..88: mol_type = other RNA
tatggcgcttctatctgattactctgagcgccatcaccagcgactatgtcgtatgggtagagctccctcttcggagggagcatcagag

SEQ ID NO: 12893 - RNA, 88 nt, synthetic construct
  misc_feature 1..88: note = engineered ribonucleic acid scaffold (ERS) sequence
  source 1..88: mol_type = other RNA
tctggcgcttctatctgattactctgagcgccaacaccagcgactatgtcgtatgggtaaagctccctcttcggagggagcatcagag

SEQ ID NO: 12894 - RNA, 88 nt, synthetic construct
  misc_feature 1..88: note = engineered ribonucleic acid scaffold (ERS) sequence
  source 1..88: mol_type = other RNA
tctggcgcttctatctgattactctgagcgccagcaccagcgactatgtcgtatgggtaaagctccctcttcggagggagcatcagag

SEQ ID NO: 12895 - RNA, 88 nt, synthetic construct
  misc_feature 1..88: note = engineered ribonucleic acid scaffold (ERS) sequence
  source 1..88: mol_type = other RNA
tctggcgcttctatctgattactctgagcgccatgaccagcgactatgtcgtatggctaaagctccctcttcggagggagcatcagag

SEQ ID NO: 12896 - RNA, 89 nt, synthetic construct
  misc_feature 1..89: note = engineered ribonucleic acid scaffold (ERS) sequence
  source 1..89: mol_type = other RNA
tctggcgcttctatctgattactctgagcgccatgaccagcgactatgtcgtatgggctaaagctccctcttcggagggagcatcagag

SEQ ID NO: 12897 - RNA, 88 nt, synthetic construct
  misc_feature 1..88: note = engineered ribonucleic acid scaffold (ERS) sequence
  source 1..88: mol_type = other RNA
tctggcgcttctatctgattactctgagcgccatgaccagcgactatgtcgtatgggtaaagctccctcttcggagggagcatcagag

SEQ ID NO: 12898 - RNA, 88 nt, synthetic construct
  misc_feature 1..88: note = engineered ribonucleic acid scaffold (ERS) sequence
  source 1..88: mol_type = other RNA
tctggcgcttctatctgattactctgagcgccatccccagcgactatgtcgtatgggtaaagctccctcttcggagggagcatcagag

SEQ ID NO: 12899 - RNA, 89 nt, synthetic construct
  misc_feature 1..89: note = engineered ribonucleic acid scaffold (ERS) sequence
  source 1..89: mol_type = other RNA
tctggcgcttctatctgattactctgagcgccatcgccagcgactatgtcgtatggcgtaaagctccctcttcggagggagcatcagag

SEQ ID NO: 12900 - RNA, 88 nt, synthetic construct
  misc_feature 1..88: note = engineered ribonucleic acid scaffold (ERS) sequence
  source 1..88: mol_type = other RNA
tctggcgcttctatctgattactctgagcgccatcgccagcgactatgtcgtatgggtaaagctccctcttcggagggagcatcagag

SEQ ID NO: 12901 - RNA, 88 nt, synthetic construct
  misc_feature 1..88: note = engineered ribonucleic acid scaffold (ERS) sequence
  source 1..88: mol_type = other RNA
tctggcgcttctatctgattactctgagcgccatctccagcgactatgtcgtatgggtaaagctccctcttcggagggagcatcagag

SEQ ID NO: 12902 - RNA, 88 nt, synthetic construct
  misc_feature 1..88: note = engineered ribonucleic acid scaffold (ERS) sequence
  source 1..88: mol_type = other RNA
tctggcgcttctatctgattactctgagcgccatcacctgcgactatgtcgtaagggtaaagctccctcttcggagggagcatcagag

SEQ ID NO: 12903 - RNA, 88 nt, synthetic construct
  misc_feature 1..88: note = engineered ribonucleic acid scaffold (ERS) sequence
  source 1..88: mol_type = other RNA
tctggcgcttctatctgattactctgagcgccatcaccagagactatgtcttatgggtaaagctccctcttcggagggagcatcagag

SEQ ID NO: 12904 - RNA, 88 nt, synthetic construct
  misc_feature 1..88: note = engineered ribonucleic acid scaffold (ERS) sequence
  source 1..88: mol_type = other RNA
tctggcgcttctatctgattactctgagcgccatcaccagggactatgtcctatgggtaaagctccctcttcggagggagcatcagag

SEQ ID NO: 12905 - RNA, 89 nt, synthetic construct
  misc_feature 1..89: note = engineered ribonucleic acid scaffold (ERS) sequence
  source 1..89: mol_type = other RNA
tctggcgcttctatctgattactctgagcgccatcaccaggcactatgtgctattgggtaaagctccctcttcggagggagcatcagag

SEQ ID NO: 12906 - RNA, 88 nt, synthetic construct
  misc_feature 1..88: note = engineered ribonucleic acid scaffold (ERS) sequence
  source 1..88: mol_type = other RNA
tctggcgcttctatctgattactctgagcgccatcaccagccactatgtggtatgggtaaagctccctcttcggagggagcatcagag

SEQ ID NO: 12907 - RNA, 88 nt, synthetic construct
  misc_feature 1..88: note = engineered ribonucleic acid scaffold (ERS) sequence
  source 1..88: mol_type = other RNA
tctggcgcttctatctgattactctgagcgccatcaccagctactatgtagtatgggtaaagctccctcttcggagggagcatcagag

SEQ ID NO: 12908 - RNA, 88 nt, synthetic construct
  misc_feature 1..88: note = engineered ribonucleic acid scaffold (ERS) sequence
  source 1..88: mol_type = other RNA
tctggcgcttctatctgattactctgagcgccatcaccagcgattatgtcgtatgggtaaagctccctcttcggagggagcatcagag

SEQ ID NO: 12909 - RNA, 88 nt, synthetic construct
  misc_feature 1..88: note = engineered ribonucleic acid scaffold (ERS) sequence
  source 1..88: mol_type = other RNA
tctggcgcttctatctgattactctgagcgccatcaccagcgacgatgtcgtatgggtaaagctccctcttcggagggagcatcagag

SEQ ID NO: 12910 - RNA, 88 nt, synthetic construct
  misc_feature 1..88: note = engineered ribonucleic acid scaffold (ERS) sequence
  source 1..88: mol_type = other RNA
tctggcgcttctatctgattactctgagcgccatcaccagcgactctgtcgtatgggtaaagctccctcttcggagggagcatcagag

SEQ ID NO: 12911 - RNA, 88 nt, synthetic construct
  misc_feature 1..88: note = engineered ribonucleic acid scaffold (ERS) sequence
  source 1..88: mol_type = other RNA
tctggcgcttctatctgattactctgagcgccatcaccagcgactatgtcgtgtgggtaaagctccctcttcggagggagcatcagag

SEQ ID NO: 12912 - RNA, 89 nt, synthetic construct
  misc_feature 1..89: note = engineered ribonucleic acid scaffold (ERS) sequence
  source 1..89: mol_type = other RNA
tctggcgcttctatctgattactctgagcgccatcaccagcgactatgtcgtattgggtaaagctccctcttcggagggagcatcagag

SEQ ID NO: 12913 - RNA, 89 nt, synthetic construct
  misc_feature 1..89: note = engineered ribonucleic acid scaffold (ERS) sequence
  source 1..89: mol_type = other RNA
tctggcgcttctatctgattactctgagcgccatcaccagcgactatgtcgtatggagtaaagctccctcttcggagggagcatcagag

SEQ ID NO: 12914 - RNA, 89 nt, synthetic construct
  misc_feature 1..89: note = engineered ribonucleic acid scaffold (ERS) sequence
  source 1..89: mol_type = other RNA
tctggcgcttctatctgattactctgagcgccatcaccagcgactatgtcgtatggcgtaaagctccctcttcggagggagcatcagag

SEQ ID NO: 12915 - RNA, 89 nt, synthetic construct
  misc_feature 1..89: note = engineered ribonucleic acid scaffold (ERS) sequence
  source 1..89: mol_type = other RNA
tctggcgcttctatctgattactctgagcgccatcaccagcgactatgtcgtatggtgtaaagctccctcttcggagggagcatcagag

SEQ ID NO: 12916 - RNA, 89 nt, synthetic construct
  misc_feature 1..89: note = engineered ribonucleic acid scaffold (ERS) sequence
  source 1..89: mol_type = other RNA
tctggcgcttctatctgattactctgagcgccatcaccagcgactatgtcgtatgggctaaagctccctcttcggagggagcatcagag

SEQ ID NO: 12917 - RNA, 86 nt, synthetic construct
  misc_feature 1..86: note = engineered ribonucleic acid scaffold (ERS) sequence
  source 1..86: mol_type = other RNA
tctggcgcttctatctgattactctgagcgccatcaccagcgactatgtcgtatgggtagctccctcttcggagggagcatcagag

SEQ ID NO: 12918 - RNA, 88 nt, synthetic construct
  misc_feature 1..88: note = engineered ribonucleic acid scaffold (ERS) sequence
  source 1..88: mol_type = other RNA
tctggcgcttctatctgattactctgagcgccatcaccagcgactatgtcgtatgggtgaagctccctcttcggagggagcatcagag

SEQ ID NO: 12919 - RNA, 88 nt, synthetic construct
  misc_feature 1..88: note = engineered ribonucleic acid scaffold (ERS) sequence
  source 1..88: mol_type = other RNA
tctggcgcttctatctgattactctgagcgccatcaccagcgactatgtcgtatgggtagagctccctcttcggagggagcatcagag

SEQ ID NO: 12920 - RNA, 89 nt, synthetic construct
  misc_feature 1..89: note = engineered ribonucleic acid scaffold (ERS) sequence
  source 1..89: mol_type = other RNA
atctggcgcttctatctgattactctgagcgccaacaccagcgactatgtcgtatgggtaaagctccctcttcggagggagcatcagag

SEQ ID NO: 12921 - RNA, 89 nt, synthetic construct
  misc_feature 1..89: note = engineered ribonucleic acid scaffold (ERS) sequence
  source 1..89: mol_type = other RNA
atctggcgcttctatctgattactctgagcgccagcaccagcgactatgtcgtatgggtaaagctccctcttcggagggagcatcagag

SEQ ID NO: 12922 - RNA, 89 nt, synthetic construct
  misc_feature 1..89: note = engineered ribonucleic acid scaffold (ERS) sequence
  source 1..89: mol_type = other RNA
atctggcgcttctatctgattactctgagcgccatgaccagcgactatgtcgtatggctaaagctccctcttcggagggagcatcagag

SEQ ID NO: 12923 - RNA, 90 nt, synthetic construct
  misc_feature 1..90: note = engineered ribonucleic acid scaffold (ERS) sequence
  source 1..90: mol_type = other RNA
atctggcgcttctatctgattactctgagcgccatgaccagcgactatgtcgtatgggctaaagctccctcttcggagggagcatcagag

SEQ ID NO: 12924 - RNA, 89 nt, synthetic construct
  misc_feature 1..89: note = engineered ribonucleic acid scaffold (ERS) sequence
  source 1..89: mol_type = other RNA
atctggcgcttctatctgattactctgagcgccatgaccagcgactatgtcgtatgggtaaagctccctcttcggagggagcatcagag

SEQ ID NO: 12925 - RNA, 89 nt, synthetic construct
  misc_feature 1..89: note = engineered ribonucleic acid scaffold (ERS) sequence
  source 1..89: mol_type = other RNA
atctggcgcttctatctgattactctgagcgccatccccagcgactatgtcgtatgggtaaagctccctcttcggagggagcatcagag

SEQ ID NO: 12926 - RNA, 90 nt, synthetic construct
  misc_feature 1..90: note = engineered ribonucleic acid scaffold (ERS) sequence
  source 1..90: mol_type = other RNA
atctggcgcttctatctgattactctgagcgccatcgccagcgactatgtcgtatggcgtaaagctccctcttcggagggagcatcagag

SEQ ID NO: 12927 - RNA, 89 nt, synthetic construct
  misc_feature 1..89: note = engineered ribonucleic acid scaffold (ERS) sequence
  source 1..89: mol_type = other RNA
atctggcgcttctatctgattactctgagcgccatcgccagcgactatgtcgtatgggtaaagctccctcttcggagggagcatcagag

SEQ ID NO: 12928 - RNA, 89 nt, synthetic construct
  misc_feature 1..89: note = engineered ribonucleic acid scaffold (ERS) sequence
  source 1..89: mol_type = other RNA
atctggcgcttctatctgattactctgagcgccatctccagcgactatgtcgtatgggtaaagctccctcttcggagggagcatcagag

SEQ ID NO: 12929 - RNA, 89 nt, synthetic construct
  misc_feature 1..89: note = engineered ribonucleic acid scaffold (ERS) sequence
  source 1..89: mol_type = other RNA
atctggcgcttctatctgattactctgagcgccatcacctgcgactatgtcgtaagggtaaagctccctcttcggagggagcatcagag

SEQ ID NO: 12930 - RNA, 89 nt, synthetic construct
  misc_feature 1..89: note = engineered ribonucleic acid scaffold (ERS) sequence
  source 1..89: mol_type = other RNA
atctggcgcttctatctgattactctgagcgccatcaccagagactatgtcttatgggtaaagctccctcttcggagggagcatcagag

SEQ ID NO: 12931 - RNA, 89 nt, synthetic construct
  misc_feature 1..89: note = engineered ribonucleic acid scaffold (ERS) sequence
  source 1..89: mol_type = other RNA
atctggcgcttctatctgattactctgagcgccatcaccagggactatgtcctatgggtaaagctccctcttcggagggagcatcagag

SEQ ID NO: 12932 - RNA, 90 nt, synthetic construct
  misc_feature 1..90: note = engineered ribonucleic acid scaffold (ERS) sequence
  source 1..90: mol_type = other RNA
atctggcgcttctatctgattactctgagcgccatcaccaggcactatgtgctattgggtaaagctccctcttcggagggagcatcagag

SEQ ID NO: 12933 - RNA, 89 nt, synthetic construct
  misc_feature 1..89: note = engineered ribonucleic acid scaffold (ERS) sequence
  source 1..89: mol_type = other RNA
atctggcgcttctatctgattactctgagcgccatcaccagccactatgtggtatgggtaaagctccctcttcggagggagcatcagag

SEQ ID NO: 12934 - RNA, 89 nt, synthetic construct
  misc_feature 1..89: note = engineered ribonucleic acid scaffold (ERS) sequence
  source 1..89: mol_type = other RNA
atctggcgcttctatctgattactctgagcgccatcaccagctactatgtagtatgggtaaagctccctcttcggagggagcatcagag

SEQ ID NO: 12935 - RNA, 89 nt, synthetic construct
  misc_feature 1..89: note = engineered ribonucleic acid scaffold (ERS) sequence
  source 1..89: mol_type = other RNA
atctggcgcttctatctgattactctgagcgccatcaccagcgattatgtcgtatgggtaaagctccctcttcggagggagcatcagag

SEQ ID NO: 12936 - RNA, 89 nt, synthetic construct
  misc_feature 1..89: note = engineered ribonucleic acid scaffold (ERS) sequence
  source 1..89: mol_type = other RNA
atctggcgcttctatctgattactctgagcgccatcaccagcgacgatgtcgtatgggtaaagctccctcttcggagggagcatcagag

SEQ ID NO: 12937 - RNA, 89 nt, synthetic construct
  misc_feature 1..89: note = engineered ribonucleic acid scaffold (ERS) sequence
  source 1..89: mol_type = other RNA
atctggcgcttctatctgattactctgagcgccatcaccagcgactctgtcgtatgggtaaagctccctcttcggagggagcatcagag

SEQ ID NO: 12938 - RNA, 89 nt, synthetic construct
  misc_feature 1..89: note = engineered ribonucleic acid scaffold (ERS) sequence
  source 1..89: mol_type = other RNA
atctggcgcttctatctgattactctgagcgccatcaccagcgactatgtcgtgtgggtaaagctccctcttcggagggagcatcagag

SEQ ID NO: 12939 - RNA, 90 nt, synthetic construct
  misc_feature 1..90: note = engineered ribonucleic acid scaffold (ERS) sequence
  source 1..90: mol_type = other RNA
atctggcgcttctatctgattactctgagcgccatcaccagcgactatgtcgtattgggtaaagctccctcttcggagggagcatcagag

SEQ ID NO: 12940 - RNA, 90 nt, synthetic construct
  misc_feature 1..90: note = engineered ribonucleic acid scaffold (ERS) sequence
  source 1..90: mol_type = other RNA
atctggcgcttctatctgattactctgagcgccatcaccagcgactatgtcgtatggagtaaagctccctcttcggagggagcatcagag

SEQ ID NO: 12941 - RNA, 90 nt, synthetic construct
  misc_feature 1..90: note = engineered ribonucleic acid scaffold (ERS) sequence
  source 1..90: mol_type = other RNA
atctggcgcttctatctgattactctgagcgccatcaccagcgactatgtcgtatggcgtaaagctccctcttcggagggagcatcagag

SEQ ID NO: 12942 - RNA, 90 nt, synthetic construct
  misc_feature 1..90: note = engineered ribonucleic acid scaffold (ERS) sequence
  source 1..90: mol_type = other RNA
atctggcgcttctatctgattactctgagcgccatcaccagcgactatgtcgtatggtgtaaagctccctcttcggagggagcatcagag

SEQ ID NO: 12943 - RNA, 90 nt, synthetic construct
  misc_feature 1..90: note = engineered ribonucleic acid scaffold (ERS) sequence
  source 1..90: mol_type = other RNA
atctggcgcttctatctgattactctgagcgccatcaccagcgactatgtcgtatgggctaaagctccctcttcggagggagcatcagag

SEQ ID NO: 12944 - RNA, 87 nt, synthetic construct
  misc_feature 1..87: note = engineered ribonucleic acid scaffold (ERS) sequence
  source 1..87: mol_type = other RNA
atctggcgcttctatctgattactctgagcgccatcaccagcgactatgtcgtatgggtagctccctcttcggagggagcatcagag

SEQ ID NO: 12945 - RNA, 89 nt, synthetic construct
  misc_feature 1..89: note = engineered ribonucleic acid scaffold (ERS) sequence
  source 1..89: mol_type = other RNA
atctggcgcttctatctgattactctgagcgccatcaccagcgactatgtcgtatgggtgaagctccctcttcggagggagcatcagag

SEQ ID NO: 12946 - RNA, 89 nt, synthetic construct
  misc_feature 1..89: note = engineered ribonucleic acid scaffold (ERS) sequence
  source 1..89: mol_type = other RNA
atctggcgcttctatctgattactctgagcgccatcaccagcgactatgtcgtatgggtagagctccctcttcggagggagcatcagag

SEQ ID NO: 12947 - RNA, 86 nt, synthetic construct
  misc_feature 1..86: note = engineered ribonucleic acid scaffold (ERS) sequence
  source 1..86: mol_type = other RNA
aggcgcttctatctgattactctgagcgccaacaccagcgactatgtcgtatgggtaaagctccctcttcggagggagcatcagag

SEQ ID NO: 12948 - RNA, 86 nt, synthetic construct
  misc_feature 1..86: note = engineered ribonucleic acid scaffold (ERS) sequence
  source 1..86: mol_type = other RNA
aggcgcttctatctgattactctgagcgccagcaccagcgactatgtcgtatgggtaaagctccctcttcggagggagcatcagag

SEQ ID NO: 12949 - RNA, 86 nt, synthetic construct
  misc_feature 1..86: note = engineered ribonucleic acid scaffold (ERS) sequence
  source 1..86: mol_type = other RNA
aggcgcttctatctgattactctgagcgccatgaccagcgactatgtcgtatggctaaagctccctcttcggagggagcatcagag

SEQ ID NO: 12950 - RNA, 87 nt, synthetic construct
  misc_feature 1..87: note = engineered ribonucleic acid scaffold (ERS) sequence
  source 1..87: mol_type = other RNA
aggcgcttctatctgattactctgagcgccatgaccagcgactatgtcgtatgggctaaagctccctcttcggagggagcatcagag

SEQ ID NO: 12951 - RNA, 86 nt, synthetic construct
  misc_feature 1..86: note = engineered ribonucleic acid scaffold (ERS) sequence
  source 1..86: mol_type = other RNA
aggcgcttctatctgattactctgagcgccatgaccagcgactatgtcgtatgggtaaagctccctcttcggagggagcatcagag

SEQ ID NO: 12952 - RNA, 86 nt, synthetic construct
  misc_feature 1..86: note = engineered ribonucleic acid scaffold (ERS) sequence
  source 1..86: mol_type = other RNA
aggcgcttctatctgattactctgagcgccatccccagcgactatgtcgtatgggtaaagctccctcttcggagggagcatcagag

SEQ ID NO: 12953 - RNA, 87 nt, synthetic construct
  misc_feature 1..87: note = engineered ribonucleic acid scaffold (ERS) sequence
  source 1..87: mol_type = other RNA
aggcgcttctatctgattactctgagcgccatcgccagcgactatgtcgtatggcgtaaagctccctcttcggagggagcatcagag

SEQ ID NO: 12954 - RNA, 86 nt, synthetic construct
  misc_feature 1..86: note = engineered ribonucleic acid scaffold (ERS) sequence
  source 1..86: mol_type = other RNA
aggcgcttctatctgattactctgagcgccatcgccagcgactatgtcgtatgggtaaagctccctcttcggagggagcatcagag

SEQ ID NO: 12955 - RNA, 86 nt, synthetic construct
  misc_feature 1..86: note = engineered ribonucleic acid scaffold (ERS) sequence
  source 1..86: mol_type = other RNA
aggcgcttctatctgattactctgagcgccatctccagcgactatgtcgtatgggtaaagctccctcttcggagggagcatcagag

SEQ ID NO: 12956 - RNA, 86 nt, synthetic construct
  misc_feature 1..86: note = engineered ribonucleic acid scaffold (ERS) sequence
  source 1..86: mol_type = other RNA
aggcgcttctatctgattactctgagcgccatcacctgcgactatgtcgtaagggtaaagctccctcttcggagggagcatcagag

SEQ ID NO: 12957 - RNA, 86 nt, synthetic construct
  misc_feature 1..86: note = engineered ribonucleic acid scaffold (ERS) sequence
  source 1..86: mol_type = other RNA
aggcgcttctatctgattactctgagcgccatcaccagagactatgtcttatgggtaaagctccctcttcggagggagcatcagag

SEQ ID NO: 12958 - RNA, 86 nt, synthetic construct
  misc_feature 1..86: note = engineered ribonucleic acid scaffold (ERS) sequence
  source 1..86: mol_type = other RNA
aggcgcttctatctgattactctgagcgccatcaccagggactatgtcctatgggtaaagctccctcttcggagggagcatcagag

SEQ ID NO: 12959 - RNA, 87 nt, synthetic construct
  misc_feature 1..87: note = engineered ribonucleic acid scaffold (ERS) sequence
  source 1..87: mol_type = other RNA
aggcgcttctatctgattactctgagcgccatcaccaggcactatgtgctattgggtaaagctccctcttcggagggagcatcagag

SEQ ID NO: 12960 - RNA, 86 nt, synthetic construct
  misc_feature 1..86: note = engineered ribonucleic acid scaffold (ERS) sequence
  source 1..86: mol_type = other RNA
aggcgcttctatctgattactctgagcgccatcaccagccactatgtggtatgggtaaagctccctcttcggagggagcatcagag

SEQ ID NO: 12961 - RNA, 86 nt, synthetic construct
  misc_feature 1..86: note = engineered ribonucleic acid scaffold (ERS) sequence
  source 1..86: mol_type = other RNA
aggcgcttctatctgattactctgagcgccatcaccagctactatgtagtatgggtaaagctccctcttcggagggagcatcagag

SEQ ID NO: 12962 - RNA, 86 nt, synthetic construct
  misc_feature 1..86: note = engineered ribonucleic acid scaffold (ERS) sequence
  source 1..86: mol_type = other RNA
aggcgcttctatctgattactctgagcgccatcaccagcgattatgtcgtatgggtaaagctccctcttcggagggagcatcagag

SEQ ID NO: 12963 - RNA, 86 nt, synthetic construct
  misc_feature 1..86: note = engineered ribonucleic acid scaffold (ERS) sequence
  source 1..86: mol_type = other RNA
aggcgcttctatctgattactctgagcgccatcaccagcgacgatgtcgtatgggtaaagctccctcttcggagggagcatcagag

SEQ ID NO: 12964 - RNA, 86 nt, synthetic construct
  misc_feature 1..86: note = engineered ribonucleic acid scaffold (ERS) sequence
  source 1..86: mol_type = other RNA
aggcgcttctatctgattactctgagcgccatcaccagcgactctgtcgtatgggtaaagctccctcttcggagggagcatcagag

SEQ ID NO: 12965 - RNA, 86 nt, synthetic construct
  misc_feature 1..86: note = engineered ribonucleic acid scaffold (ERS) sequence
  source 1..86: mol_type = other RNA
aggcgcttctatctgattactctgagcgccatcaccagcgactatgtcgtgtgggtaaagctccctcttcggagggagcatcagag

SEQ ID NO: 12966 - RNA, 87 nt, synthetic construct
  misc_feature 1..87: note = engineered ribonucleic acid scaffold (ERS) sequence
  source 1..87: mol_type = other RNA
aggcgcttctatctgattactctgagcgccatcaccagcgactatgtcgtattgggtaaagctccctcttcggagggagcatcagag

SEQ ID NO: 12967 - RNA, 87 nt, synthetic construct
  misc_feature 1..87: note = engineered ribonucleic acid scaffold (ERS) sequence
  source 1..87: mol_type = other RNA
aggcgcttctatctgattactctgagcgccatcaccagcgactatgtcgtatggagtaaagctccctcttcggagggagcatcagag

SEQ ID NO: 12968 - RNA, 87 nt, synthetic construct
  misc_feature 1..87: note = engineered ribonucleic acid scaffold (ERS) sequence
  source 1..87: mol_type = other RNA
aggcgcttctatctgattactctgagcgccatcaccagcgactatgtcgtatggcgtaaagctccctcttcggagggagcatcagag

SEQ ID NO: 12969 - RNA, 87 nt, synthetic construct
  misc_feature 1..87: note = engineered ribonucleic acid scaffold (ERS) sequence
  source 1..87: mol_type = other RNA
aggcgcttctatctgattactctgagcgccatcaccagcgactatgtcgtatggtgtaaagctccctcttcggagggagcatcagag

SEQ ID NO: 12970 - RNA, 87 nt, synthetic construct
  misc_feature 1..87: note = engineered ribonucleic acid scaffold (ERS) sequence
  source 1..87: mol_type = other RNA
aggcgcttctatctgattactctgagcgccatcaccagcgactatgtcgtatgggctaaagctccctcttcggagggagcatcagag

SEQ ID NO: 12971 - RNA, 84 nt, synthetic construct
  misc_feature 1..84: note = engineered ribonucleic acid scaffold (ERS) sequence
  source 1..84: mol_type = other RNA
aggcgcttctatctgattactctgagcgccatcaccagcgactatgtcgtatgggtagctccctcttcggagggagcatcagag

SEQ ID NO: 12972 - RNA, 86 nt, synthetic construct
  misc_feature 1..86: note = engineered ribonucleic acid scaffold (ERS) sequence
  source 1..86: mol_type = other RNA
aggcgcttctatctgattactctgagcgccatcaccagcgactatgtcgtatgggtgaagctccctcttcggagggagcatcagag

SEQ ID NO: 12973 - RNA, 86 nt, synthetic construct
  misc_feature 1..86: note = engineered ribonucleic acid scaffold (ERS) sequence
  source 1..86: mol_type = other RNA
aggcgcttctatctgattactctgagcgccatcaccagcgactatgtcgtatgggtagagctccctcttcggagggagcatcagag

SEQ ID NO: 12974 - RNA, 87 nt, synthetic construct
  misc_feature 1..87: note = engineered ribonucleic acid scaffold (ERS) sequence
  source 1..87: mol_type = other RNA
atggcgcttctatctgattactctgagcgccaacaccagcgactatgtcgtatgggtaaagctccctcttcggagggagcatcagag

SEQ ID NO: 12975 - RNA, 87 nt, synthetic construct
  misc_feature 1..87: note = engineered ribonucleic acid scaffold (ERS) sequence
  source 1..87: mol_type = other RNA
atggcgcttctatctgattactctgagcgccagcaccagcgactatgtcgtatgggtaaagctccctcttcggagggagcatcagag

SEQ ID NO: 12976 - RNA, 87 nt, synthetic construct
  misc_feature 1..87: note = engineered ribonucleic acid scaffold (ERS) sequence
  source 1..87: mol_type = other RNA
atggcgcttctatctgattactctgagcgccatgaccagcgactatgtcgtatggctaaagctccctcttcggagggagcatcagag

SEQ ID NO: 12977 - RNA, 88 nt, synthetic construct
  misc_feature 1..88: note = engineered ribonucleic acid scaffold (ERS) sequence
  source 1..88: mol_type = other RNA
atggcgcttctatctgattactctgagcgccatgaccagcgactatgtcgtatgggctaaagctccctcttcggagggagcatcagag

SEQ ID NO: 12978 - RNA, 87 nt, synthetic construct
  misc_feature 1..87: note = engineered ribonucleic acid scaffold (ERS) sequence
  source 1..87: mol_type = other RNA
atggcgcttctatctgattactctgagcgccatgaccagcgactatgtcgtatgggtaaagctccctcttcggagggagcatcagag

SEQ ID NO: 12979 - RNA, 87 nt, synthetic construct
  misc_feature 1..87: note = engineered ribonucleic acid scaffold (ERS) sequence
  source 1..87: mol_type = other RNA
atggcgcttctatctgattactctgagcgccatccccagcgactatgtcgtatgggtaaagctccctcttcggagggagcatcagag

SEQ ID NO: 12980 - RNA, 88 nt, synthetic construct
  misc_feature 1..88: note = engineered ribonucleic acid scaffold (ERS) sequence
  source 1..88: mol_type = other RNA
atggcgcttctatctgattactctgagcgccatcgccagcgactatgtcgtatggcgtaaagctccctcttcggagggagcatcagag

SEQ ID NO: 12981 - RNA, 87 nt, synthetic construct
  misc_feature 1..87: note = engineered ribonucleic acid scaffold (ERS) sequence
  source 1..87: mol_type = other RNA
atggcgcttctatctgattactctgagcgccatcgccagcgactatgtcgtatgggtaaagctccctcttcggagggagcatcagag

SEQ ID NO: 12982 - RNA, 87 nt, synthetic construct
  misc_feature 1..87: note = engineered ribonucleic acid scaffold (ERS) sequence
  source 1..87: mol_type = other RNA
atggcgcttctatctgattactctgagcgccatctccagcgactatgtcgtatgggtaaagctccctcttcggagggagcatcagag

SEQ ID NO: 12983 - RNA, 87 nt, synthetic construct
  misc_feature 1..87: note = engineered ribonucleic acid scaffold (ERS) sequence
  source 1..87: mol_type = other RNA
atggcgcttctatctgattactctgagcgccatcacctgcgactatgtcgtaagggtaaagctccctcttcggagggagcatcagag

SEQ ID NO: 12984 - RNA, 87 nt, synthetic construct
  misc_feature 1..87: note = engineered ribonucleic acid scaffold (ERS) sequence
  source 1..87: mol_type = other RNA
atggcgcttctatctgattactctgagcgccatcaccagagactatgtcttatgggtaaagctccctcttcggagggagcatcagag

SEQ ID NO: 12985 - RNA, 87 nt, synthetic construct
  misc_feature 1..87: note = engineered ribonucleic acid scaffold (ERS) sequence
  source 1..87: mol_type = other RNA
atggcgcttctatctgattactctgagcgccatcaccagggactatgtcctatgggtaaagctccctcttcggagggagcatcagag

SEQ ID NO: 12986 - RNA, 88 nt, synthetic construct
  misc_feature 1..88: note = engineered ribonucleic acid scaffold (ERS) sequence
  source 1..88: mol_type = other RNA
atggcgcttctatctgattactctgagcgccatcaccaggcactatgtgctattgggtaaagctccctcttcggagggagcatcagag

SEQ ID NO: 12987 - RNA, 87 nt, synthetic construct
  misc_feature 1..87: note = engineered ribonucleic acid scaffold (ERS) sequence
  source 1..87: mol_type = other RNA
atggcgcttctatctgattactctgagcgccatcaccagccactatgtggtatgggtaaagctccctcttcggagggagcatcagag

SEQ ID NO: 12988 - RNA, 87 nt, synthetic construct
  misc_feature 1..87: note = engineered ribonucleic acid scaffold (ERS) sequence
  source 1..87: mol_type = other RNA
atggcgcttctatctgattactctgagcgccatcaccagctactatgtagtatgggtaaagctccctcttcggagggagcatcagag

SEQ ID NO: 12989 - RNA, 87 nt, synthetic construct
  misc_feature 1..87: note = engineered ribonucleic acid scaffold (ERS) sequence
  source 1..87: mol_type = other RNA
atggcgcttctatctgattactctgagcgccatcaccagcgattatgtcgtatgggtaaagctccctcttcggagggagcatcagag

SEQ ID NO: 12990 - RNA, 87 nt, synthetic construct
  misc_feature 1..87: note = engineered ribonucleic acid scaffold (ERS) sequence
  source 1..87: mol_type = other RNA
atggcgcttctatctgattactctgagcgccatcaccagcgacgatgtcgtatgggtaaagctccctcttcggagggagcatcagag

SEQ ID NO: 12991 - RNA, 87 nt, synthetic construct
  misc_feature 1..87: note = engineered ribonucleic acid scaffold (ERS) sequence
  source 1..87: mol_type = other RNA
atggcgcttctatctgattactctgagcgccatcaccagcgactctgtcgtatgggtaaagctccctcttcggagggagcatcagag

SEQ ID NO: 12992 - RNA, 87 nt, synthetic construct
  misc_feature 1..87: note = engineered ribonucleic acid scaffold (ERS) sequence
  source 1..87: mol_type = other RNA
atggtgcttctatctgattactctgagcgccaacaccagcgactatgtcgtatgggtaaagctccctcttcggagggagcatcagag

SEQ ID NO: 12993 - RNA, 87 nt, synthetic construct
  misc_feature 1..87: note = engineered ribonucleic acid scaffold (ERS) sequence
  source 1..87: mol_type = other RNA
atggtgcttctatctgattactctgagcgccagcaccagcgactatgtcgtatgggtaaagctccctcttcggagggagcatcagag

SEQ ID NO: 12994 - RNA, 87 nt, synthetic construct
  misc_feature 1..87: note = engineered ribonucleic acid scaffold (ERS) sequence
  source 1..87: mol_type = other RNA
atggtgcttctatctgattactctgagcgccatgaccagcgactatgtcgtatggctaaagctccctcttcggagggagcatcagag

SEQ ID NO: 12995 - RNA, 88 nt, synthetic construct
  misc_feature 1..88: note = engineered ribonucleic acid scaffold (ERS) sequence
  source 1..88: mol_type = other RNA
atggtgcttctatctgattactctgagcgccatgaccagcgactatgtcgtatgggctaaagctccctcttcggagggagcatcagag

SEQ ID NO: 12996 - RNA, 87 nt, synthetic construct
  misc_feature 1..87: note = engineered ribonucleic acid scaffold (ERS) sequence
  source 1..87: mol_type = other RNA
atggtgcttctatctgattactctgagcgccatgaccagcgactatgtcgtatgggtaaagctccctcttcggagggagcatcagag

SEQ ID NO: 12997 - RNA, 87 nt, synthetic construct
  misc_feature 1..87: note = engineered ribonucleic acid scaffold (ERS) sequence
  source 1..87: mol_type = other RNA
atggtgcttctatctgattactctgagcgccatccccagcgactatgtcgtatgggtaaagctccctcttcggagggagcatcagag

SEQ ID NO: 12998 - RNA, 88 nt, synthetic construct
  misc_feature 1..88: note = engineered ribonucleic acid scaffold (ERS) sequence
  source 1..88: mol_type = other RNA
atggtgcttctatctgattactctgagcgccatcgccagcgactatgtcgtatggcgtaaagctccctcttcggagggagcatcagag

SEQ ID NO: 12999 - RNA, 87 nt, synthetic construct
  misc_feature 1..87: note = engineered ribonucleic acid scaffold (ERS) sequence
  source 1..87: mol_type = other RNA
atggtgcttctatctgattactctgagcgccatcgccagcgactatgtcgtatgggtaaagctccctcttcggagggagcatcagag

SEQ ID NO: 13000 - RNA, 87 nt, synthetic construct
  misc_feature 1..87: note = engineered ribonucleic acid scaffold (ERS) sequence
  source 1..87: mol_type = other RNA
atggtgcttctatctgattactctgagcgccatctccagcgactatgtcgtatgggtaaagctccctcttcggagggagcatcagag

SEQ ID NO: 13001 - RNA, 87 nt, synthetic construct
  misc_feature 1..87: note = engineered ribonucleic acid scaffold (ERS) sequence
  source 1..87: mol_type = other RNA
atggtgcttctatctgattactctgagcgccatcacctgcgactatgtcgtaagggtaaagctccctcttcggagggagcatcagag

SEQ ID NO: 13002 - RNA, 87 nt, synthetic construct
  misc_feature 1..87: note = engineered ribonucleic acid scaffold (ERS) sequence
  source 1..87: mol_type = other RNA
atggtgcttctatctgattactctgagcgccatcaccagagactatgtcttatgggtaaagctccctcttcggagggagcatcagag

SEQ ID NO: 13003 - RNA, 87 nt, synthetic construct
  misc_feature 1..87: note = engineered ribonucleic acid scaffold (ERS) sequence
  source 1..87: mol_type = other RNA
atggtgcttctatctgattactctgagcgccatcaccagggactatgtcctatgggtaaagctccctcttcggagggagcatcagag

SEQ ID NO: 13004 - RNA, 88 nt, synthetic construct
  misc_feature 1..88: note = engineered ribonucleic acid scaffold (ERS) sequence
  source 1..88: mol_type = other RNA
atggtgcttctatctgattactctgagcgccatcaccaggcactatgtgctattgggtaaagctccctcttcggagggagcatcagag

SEQ ID NO: 13005 - RNA, 87 nt, synthetic construct
  misc_feature 1..87: note = engineered ribonucleic acid scaffold (ERS) sequence
  source 1..87: mol_type = other RNA
atggtgcttctatctgattactctgagcgccatcaccagccactatgtggtatgggtaaagctccctcttcggagggagcatcagag

SEQ ID NO: 13006 - RNA, 87 nt, synthetic construct
  misc_feature 1..87: note = engineered ribonucleic acid scaffold (ERS) sequence
  source 1..87: mol_type = other RNA
atggtgcttctatctgattactctgagcgccatcaccagctactatgtagtatgggtaaagctccctcttcggagggagcatcagag

SEQ ID NO: 13007 - RNA, 87 nt, synthetic construct
  misc_feature 1..87: note = engineered ribonucleic acid scaffold (ERS) sequence
  source 1..87: mol_type = other RNA
atggtgcttctatctgattactctgagcgccatcaccagcgattatgtcgtatgggtaaagctccctcttcggagggagcatcagag

SEQ ID NO: 13008 - RNA, 87 nt, synthetic construct
  misc_feature 1..87: note = engineered ribonucleic acid scaffold (ERS) sequence
  source 1..87: mol_type = other RNA
atggtgcttctatctgattactctgagcgccatcaccagcgacgatgtcgtatgggtaaagctccctcttcggagggagcatcagag

SEQ ID NO: 13009 - RNA, 87 nt, synthetic construct
  misc_feature 1..87: note = engineered ribonucleic acid scaffold (ERS) sequence
  source 1..87: mol_type = other RNA
atggtgcttctatctgattactctgagcgccatcaccagcgactctgtcgtatgggtaaagctccctcttcggagggagcatcagag

SEQ ID NO: 13010 - RNA, 87 nt, synthetic construct
  misc_feature 1..87: note = engineered ribonucleic acid scaffold (ERS) sequence
  source 1..87: mol_type = other RNA
atggtgcttctatctgattactctgagcgccatcaccagcgactatgtcgtgtgggtaaagctccctcttcggagggagcatcagag

SEQ ID NO: 13011 - RNA, 88 nt, synthetic construct
  misc_feature 1..88: note = engineered ribonucleic acid scaffold (ERS) sequence
  source 1..88: mol_type = other RNA
atggtgcttctatctgattactctgagcgccatcaccagcgactatgtcgtattgggtaaagctccctcttcggagggagcatcagag

SEQ ID NO: 13012 - RNA, 88 nt, synthetic construct
  misc_feature 1..88: note = engineered ribonucleic acid scaffold (ERS) sequence
  source 1..88: mol_type = other RNA
atggtgcttctatctgattactctgagcgccatcaccagcgactatgtcgtatggagtaaagctccctcttcggagggagcatcagag

SEQ ID NO: 13013 - RNA, 88 nt, synthetic construct
  misc_feature 1..88: note = engineered ribonucleic acid scaffold (ERS) sequence
  source 1..88: mol_type = other RNA
atggtgcttctatctgattactctgagcgccatcaccagcgactatgtcgtatggcgtaaagctccctcttcggagggagcatcagag

SEQ ID NO: 13014 - RNA, 88 nt, synthetic construct
  misc_feature 1..88: note = engineered ribonucleic acid scaffold (ERS) sequence
  source 1..88: mol_type = other RNA
atggtgcttctatctgattactctgagcgccatcaccagcgactatgtcgtatggtgtaaagctccctcttcggagggagcatcagag

SEQ ID NO: 13015 - RNA, 88 nt, synthetic construct
  misc_feature 1..88: note = engineered ribonucleic acid scaffold (ERS) sequence
  source 1..88: mol_type = other RNA
atggtgcttctatctgattactctgagcgccatcaccagcgactatgtcgtatgggctaaagctccctcttcggagggagcatcagag

SEQ ID NO: 13016 - RNA, 85 nt, synthetic construct
  misc_feature 1..85: note = engineered ribonucleic acid scaffold (ERS) sequence
  source 1..85: mol_type = other RNA
atggtgcttctatctgattactctgagcgccatcaccagcgactatgtcgtatgggtagctccctcttcggagggagcatcagag

SEQ ID NO: 13017 - RNA, 87 nt, synthetic construct
  misc_feature 1..87: note = engineered ribonucleic acid scaffold (ERS) sequence
  source 1..87: mol_type = other RNA
atggtgcttctatctgattactctgagcgccatcaccagcgactatgtcgtatgggtgaagctccctcttcggagggagcatcagag

SEQ ID NO: 13018 - RNA, 87 nt, synthetic construct
  misc_feature 1..87: note = engineered ribonucleic acid scaffold (ERS) sequence
  source 1..87: mol_type = other RNA
atggtgcttctatctgattactctgagcgccatcaccagcgactatgtcgtatgggtagagctccctcttcggagggagcatcagag

SEQ ID NO: 13019 - RNA, 87 nt, synthetic construct
  misc_feature 1..87: note = engineered ribonucleic acid scaffold (ERS) sequence
  source 1..87: mol_type = other RNA
atggcgcttctatctgattactctgagcgccatcaccagcgactatgtcgtgtgggtaaagctccctcttcggagggagcatcagag

SEQ ID NO: 13020 - RNA, 88 nt, synthetic construct
  misc_feature 1..88: note = engineered ribonucleic acid scaffold (ERS) sequence
  source 1..88: mol_type = other RNA
atggcgcttctatctgattactctgagcgccatcaccagcgactatgtcgtattgggtaaagctccctcttcggagggagcatcagag

SEQ ID NO: 13021 - RNA, 88 nt, synthetic construct
  misc_feature 1..88: note = engineered ribonucleic acid scaffold (ERS) sequence
  source 1..88: mol_type = other RNA
atggcgcttctatctgattactctgagcgccatcaccagcgactatgtcgtatggagtaaagctccctcttcggagggagcatcagag

SEQ ID NO: 13022 - RNA, 88 nt, synthetic construct
  misc_feature 1..88: note = engineered ribonucleic acid scaffold (ERS) sequence
  source 1..88: mol_type = other RNA
atggcgcttctatctgattactctgagcgccatcaccagcgactatgtcgtatggcgtaaagctccctcttcggagggagcatcagag

SEQ ID NO: 13023 - RNA, 88 nt, synthetic construct
  misc_feature 1..88: note = engineered ribonucleic acid scaffold (ERS) sequence
  source 1..88: mol_type = other RNA
atggcgcttctatctgattactctgagcgccatcaccagcgactatgtcgtatggtgtaaagctccctcttcggagggagcatcagag

SEQ ID NO: 13024 - RNA, 88 nt, synthetic construct
  misc_feature 1..88: note = engineered ribonucleic acid scaffold (ERS) sequence
  source 1..88: mol_type = other RNA
atggcgcttctatctgattactctgagcgccatcaccagcgactatgtcgtatgggctaaagctccctcttcggagggagcatcagag

SEQ ID NO: 13025 - RNA, 85 nt, synthetic construct
  misc_feature 1..85: note = engineered ribonucleic acid scaffold (ERS) sequence
  source 1..85: mol_type = other RNA
atggcgcttctatctgattactctgagcgccatcaccagcgactatgtcgtatgggtagctccctcttcggagggagcatcagag

SEQ ID NO: 13026 - RNA, 87 nt, synthetic construct
  misc_feature 1..87: note = engineered ribonucleic acid scaffold (ERS) sequence
  source 1..87: mol_type = other RNA
atggcgcttctatctgattactctgagcgccatcaccagcgactatgtcgtatgggtgaagctccctcttcggagggagcatcagag

SEQ ID NO: 13027 - RNA, 87 nt, synthetic construct
  misc_feature 1..87: note = engineered ribonucleic acid scaffold (ERS) sequence
  source 1..87: mol_type = other RNA
atggcgcttctatctgattactctgagcgccatcaccagcgactatgtcgtatgggtagagctccctcttcggagggagcatcagag

SEQ ID NO: 13028 - RNA, 88 nt, synthetic construct
  misc_feature 1..88: note = engineered ribonucleic acid scaffold (ERS) sequence
  source 1..88: mol_type = other RNA
aatggcgcttctatctgattactctgagcgccaacaccagcgactatgtcgtatgggtaaagctccctcttcggagggagcatcagag

SEQ ID NO: 13029 - RNA, 88 nt, synthetic construct
  misc_feature 1..88: note = engineered ribonucleic acid scaffold (ERS) sequence
  source 1..88: mol_type = other RNA
aatggcgcttctatctgattactctgagcgccagcaccagcgactatgtcgtatgggtaaagctccctcttcggagggagcatcagag

SEQ ID NO: 13030 - RNA, 88 nt, synthetic construct
  misc_feature 1..88: note = engineered ribonucleic acid scaffold (ERS) sequence
  source 1..88: mol_type = other RNA
aatggcgcttctatctgattactctgagcgccatgaccagcgactatgtcgtatggctaaagctccctcttcggagggagcatcagag

SEQ ID NO: 13031 - RNA, 89 nt, synthetic construct
  misc_feature 1..89: note = engineered ribonucleic acid scaffold (ERS) sequence
  source 1..89: mol_type = other RNA
aatggcgcttctatctgattactctgagcgccatgaccagcgactatgtcgtatgggctaaagctccctcttcggagggagcatcagag

SEQ ID NO: 13032 - RNA, 88 nt, synthetic construct
  misc_feature 1..88: note = engineered ribonucleic acid scaffold (ERS) sequence
  source 1..88: mol_type = other RNA
aatggcgcttctatctgattactctgagcgccatgaccagcgactatgtcgtatgggtaaagctccctcttcggagggagcatcagag

SEQ ID NO: 13033 - RNA, 88 nt, synthetic construct
  misc_feature 1..88: note = engineered ribonucleic acid scaffold (ERS) sequence
  source 1..88: mol_type = other RNA
aatggcgcttctatctgattactctgagcgccatccccagcgactatgtcgtatgggtaaagctccctcttcggagggagcatcagag

SEQ ID NO: 13034 - RNA, 89 nt, synthetic construct
  misc_feature 1..89: note = engineered ribonucleic acid scaffold (ERS) sequence
  source 1..89: mol_type = other RNA
aatggcgcttctatctgattactctgagcgccatcgccagcgactatgtcgtatggcgtaaagctccctcttcggagggagcatcagag

SEQ ID NO: 13035 - RNA, 88 nt, synthetic construct
  misc_feature 1..88: note = engineered ribonucleic acid scaffold (ERS) sequence
  source 1..88: mol_type = other RNA
aatggcgcttctatctgattactctgagcgccatcgccagcgactatgtcgtatgggtaaagctccctcttcggagggagcatcagag

SEQ ID NO: 13036 - RNA, 88 nt, synthetic construct
  misc_feature 1..88: note = engineered ribonucleic acid scaffold (ERS) sequence
  source 1..88: mol_type = other RNA
aatggcgcttctatctgattactctgagcgccatctccagcgactatgtcgtatgggtaaagctccctcttcggagggagcatcagag

SEQ ID NO: 13037 - RNA, 88 nt, synthetic construct
  misc_feature 1..88: note = engineered ribonucleic acid scaffold (ERS) sequence
  source 1..88: mol_type = other RNA
aatggcgcttctatctgattactctgagcgccatcacctgcgactatgtcgtaagggtaaagctccctcttcggagggagcatcagag

SEQ ID NO: 13038 - RNA, 88 nt, synthetic construct
  misc_feature 1..88: note = engineered ribonucleic acid scaffold (ERS) sequence
  source 1..88: mol_type = other RNA
aatggcgcttctatctgattactctgagcgccatcaccagagactatgtcttatgggtaaagctccctcttcggagggagcatcagag

SEQ ID NO: 13039 - RNA, 88 nt, synthetic construct
  misc_feature 1..88: note = engineered ribonucleic acid scaffold (ERS) sequence
  source 1..88: mol_type = other RNA
aatggcgcttctatctgattactctgagcgccatcaccagggactatgtcctatgggtaaagctccctcttcggagggagcatcagag

SEQ ID NO: 13040 - RNA, 89 nt, synthetic construct
  misc_feature 1..89: note = engineered ribonucleic acid scaffold (ERS) sequence
  source 1..89: mol_type = other RNA
aatggcgcttctatctgattactctgagcgccatcaccaggcactatgtgctattgggtaaagctccctcttcggagggagcatcagag

SEQ ID NO: 13041 - RNA, 88 nt, synthetic construct
  misc_feature 1..88: note = engineered ribonucleic acid scaffold (ERS) sequence
  source 1..88: mol_type = other RNA
aatggcgcttctatctgattactctgagcgccatcaccagccactatgtggtatgggtaaagctccctcttcggagggagcatcagag

SEQ ID NO: 13042 - RNA, 88 nt, synthetic construct
  misc_feature 1..88: note = engineered ribonucleic acid scaffold (ERS) sequence
  source 1..88: mol_type = other RNA
aatggcgcttctatctgattactctgagcgccatcaccagctactatgtagtatgggtaaagctccctcttcggagggagcatcagag

SEQ ID NO: 13043 - RNA, 88 nt, synthetic construct
  misc_feature 1..88: note = engineered ribonucleic acid scaffold (ERS) sequence
  source 1..88: mol_type = other RNA
aatggcgcttctatctgattactctgagcgccatcaccagcgattatgtcgtatgggtaaagctccctcttcggagggagcatcagag

SEQ ID NO: 13044 - RNA, 88 nt, synthetic construct
  misc_feature 1..88: note = engineered ribonucleic acid scaffold (ERS) sequence
  source 1..88: mol_type = other RNA
aatggcgcttctatctgattactctgagcgccatcaccagcgacgatgtcgtatgggtaaagctccctcttcggagggagcatcagag

SEQ ID NO: 13045 - RNA, 88 nt, synthetic construct
  misc_feature 1..88: note = engineered ribonucleic acid scaffold (ERS) sequence
  source 1..88: mol_type = other RNA
aatggcgcttctatctgattactctgagcgccatcaccagcgactctgtcgtatgggtaaagctccctcttcggagggagcatcagag

SEQ ID NO: 13046 - RNA, 88 nt, synthetic construct
  misc_feature 1..88: note = engineered ribonucleic acid scaffold (ERS) sequence
  source 1..88: mol_type = other RNA
aatggcgcttctatctgattactctgagcgccatcaccagcgactatgtcgtgtgggtaaagctccctcttcggagggagcatcagag

SEQ ID NO: 13047 - RNA, 89 nt, synthetic construct
  misc_feature 1..89: note = engineered ribonucleic acid scaffold (ERS) sequence
  source 1..89: mol_type = other RNA
aatggcgcttctatctgattactctgagcgccatcaccagcgactatgtcgtattgggtaaagctccctcttcggagggagcatcagag

SEQ ID NO: 13048 - RNA, 89 nt, synthetic construct
  misc_feature 1..89: note = engineered ribonucleic acid scaffold (ERS) sequence
  source 1..89: mol_type = other RNA
aatggcgcttctatctgattactctgagcgccatcaccagcgactatgtcgtatggagtaaagctccctcttcggagggagcatcagag

SEQ ID NO: 13049 - RNA, 89 nt, synthetic construct
  misc_feature 1..89: note = engineered ribonucleic acid scaffold (ERS) sequence
  source 1..89: mol_type = other RNA
aatggcgcttctatctgattactctgagcgccatcaccagcgactatgtcgtatggcgtaaagctccctcttcggagggagcatcagag

SEQ ID NO: 13050 - RNA, 89 nt, synthetic construct
  misc_feature 1..89: note = engineered ribonucleic acid scaffold (ERS) sequence
  source 1..89: mol_type = other RNA
aatggcgcttctatctgattactctgagcgccatcaccagcgactatgtcgtatggtgtaaagctccctcttcggagggagcatcagag

SEQ ID NO: 13051 - RNA, 89 nt, synthetic construct
  misc_feature 1..89: note = engineered ribonucleic acid scaffold (ERS) sequence
  source 1..89: mol_type = other RNA
aatggcgcttctatctgattactctgagcgccatcaccagcgactatgtcgtatgggctaaagctccctcttcggagggagcatcagag

SEQ ID NO: 13052 - RNA, 86 nt, synthetic construct
  misc_feature 1..86: note = engineered ribonucleic acid scaffold (ERS) sequence
  source 1..86: mol_type = other RNA
aatggcgcttctatctgattactctgagcgccatcaccagcgactatgtcgtatgggtagctccctcttcggagggagcatcagag

SEQ ID NO: 13053 - RNA, 88 nt, synthetic construct
  misc_feature 1..88: note = engineered ribonucleic acid scaffold (ERS) sequence
  source 1..88: mol_type = other RNA
aatggcgcttctatctgattactctgagcgccatcaccagcgactatgtcgtatgggtgaagctccctcttcggagggagcatcagag

SEQ ID NO: 13054 - RNA, 88 nt, synthetic construct
  misc_feature 1..88: note = engineered ribonucleic acid scaffold (ERS) sequence
  source 1..88: mol_type = other RNA
aatggcgcttctatctgattactctgagcgccatcaccagcgactatgtcgtatgggtagagctccctcttcggagggagcatcagag

SEQ ID NO: 13055 - RNA, 88 nt, synthetic construct
  misc_feature 1..88: note = engineered ribonucleic acid scaffold (ERS) sequence
  source 1..88: mol_type = other RNA
agtggcgcttctatctgattactctgagcgccaacaccagcgactatgtcgtatgggtaaagctccctcttcggagggagcatcagag

SEQ ID NO: 13056 - RNA, 88 nt, synthetic construct
  misc_feature 1..88: note = engineered ribonucleic acid scaffold (ERS) sequence
  source 1..88: mol_type = other RNA
agtggcgcttctatctgattactctgagcgccagcaccagcgactatgtcgtatgggtaaagctccctcttcggagggagcatcagag

SEQ ID NO: 13057 - RNA, 88 nt, synthetic construct
  misc_feature 1..88: note = engineered ribonucleic acid scaffold (ERS) sequence
  source 1..88: mol_type = other RNA
agtggcgcttctatctgattactctgagcgccatgaccagcgactatgtcgtatggctaaagctccctcttcggagggagcatcagag

SEQ ID NO: 13058 - RNA, 89 nt, synthetic construct
  misc_feature 1..89: note = engineered ribonucleic acid scaffold (ERS) sequence
  source 1..89: mol_type = other RNA
agtggcgcttctatctgattactctgagcgccatgaccagcgactatgtcgtatgggctaaagctccctcttcggagggagcatcagag

SEQ ID NO: 13059 - RNA, 88 nt, synthetic construct
  misc_feature 1..88: note = engineered ribonucleic acid scaffold (ERS) sequence
  source 1..88: mol_type = other RNA
agtggcgcttctatctgattactctgagcgccatgaccagcgactatgtcgtatgggtaaagctccctcttcggagggagcatcagag

SEQ ID NO: 13060 - RNA, 88 nt, synthetic construct
  misc_feature 1..88: note = engineered ribonucleic acid scaffold (ERS) sequence
  source 1..88: mol_type = other RNA
agtggcgcttctatctgattactctgagcgccatccccagcgactatgtcgtatgggtaaagctccctcttcggagggagcatcagag

SEQ ID NO: 13061 - RNA, 89 nt, synthetic construct
  misc_feature 1..89: note = engineered ribonucleic acid scaffold (ERS) sequence
  source 1..89: mol_type = other RNA
agtggcgcttctatctgattactctgagcgccatcgccagcgactatgtcgtatggcgtaaagctccctcttcggagggagcatcagag

SEQ ID NO: 13062 - RNA, 88 nt, synthetic construct
  misc_feature 1..88: note = engineered ribonucleic acid scaffold (ERS) sequence
  source 1..88: mol_type = other RNA
agtggcgcttctatctgattactctgagcgccatcgccagcgactatgtcgtatgggtaaagctccctcttcggagggagcatcagag

SEQ ID NO: 13063 - RNA, 88 nt, synthetic construct
  misc_feature 1..88: note = engineered ribonucleic acid scaffold (ERS) sequence
  source 1..88: mol_type = other RNA
agtggcgcttctatctgattactctgagcgccatctccagcgactatgtcgtatgggtaaagctccctcttcggagggagcatcagag

SEQ ID NO: 13064 - RNA, 88 nt, synthetic construct
  misc_feature 1..88: note = engineered ribonucleic acid scaffold (ERS) sequence
  source 1..88: mol_type = other RNA
agtggcgcttctatctgattactctgagcgccatcacctgcgactatgtcgtaagggtaaagctccctcttcggagggagcatcagag

SEQ ID NO: 13065 - RNA, 88 nt, synthetic construct
  misc_feature 1..88: note = engineered ribonucleic acid scaffold (ERS) sequence
  source 1..88: mol_type = other RNA
agtggcgcttctatctgattactctgagcgccatcaccagagactatgtcttatgggtaaagctccctcttcggagggagcatcagag

SEQ ID NO: 13066 - RNA, 88 nt, synthetic construct
  misc_feature 1..88: note = engineered ribonucleic acid scaffold (ERS) sequence
  source 1..88: mol_type = other RNA
agtggcgcttctatctgattactctgagcgccatcaccagggactatgtcctatgggtaaagctccctcttcggagggagcatcagag

SEQ ID NO: 13067 - RNA, 89 nt, synthetic construct
  misc_feature 1..89: note = engineered ribonucleic acid scaffold (ERS) sequence
  source 1..89: mol_type = other RNA
agtggcgcttctatctgattactctgagcgccatcaccaggcactatgtgctattgggtaaagctccctcttcggagggagcatcagag

SEQ ID NO: 13068 - RNA, 88 nt, synthetic construct
  misc_feature 1..88: note = engineered ribonucleic acid scaffold (ERS) sequence
  source 1..88: mol_type = other RNA
agtggcgcttctatctgattactctgagcgccatcaccagccactatgtggtatgggtaaagctccctcttcggagggagcatcagag

SEQ ID NO: 13069 - RNA, 88 nt, synthetic construct
  misc_feature 1..88: note = engineered ribonucleic acid scaffold (ERS) sequence
  source 1..88: mol_type = other RNA
agtggcgcttctatctgattactctgagcgccatcaccagctactatgtagtatgggtaaagctccctcttcggagggagcatcagag

SEQ ID NO: 13070 - RNA, 88 nt, synthetic construct
  misc_feature 1..88: note = engineered ribonucleic acid scaffold (ERS) sequence
  source 1..88: mol_type = other RNA
agtggcgcttctatctgattactctgagcgccatcaccagcgattatgtcgtatgggtaaagctccctcttcggagggagcatcagag

SEQ ID NO: 13071 - RNA, 88 nt, synthetic construct
  misc_feature 1..88: note = engineered ribonucleic acid scaffold (ERS) sequence
  source 1..88: mol_type = other RNA
agtggcgcttctatctgattactctgagcgccatcaccagcgacgatgtcgtatgggtaaagctccctcttcggagggagcatcagag

SEQ ID NO: 13072 - RNA, 88 nt, synthetic construct
  misc_feature 1..88: note = engineered ribonucleic acid scaffold (ERS) sequence
  source 1..88: mol_type = other RNA
agtggcgcttctatctgattactctgagcgccatcaccagcgactctgtcgtatgggtaaagctccctcttcggagggagcatcagag

SEQ ID NO: 13073 - RNA, 88 nt, synthetic construct
  misc_feature 1..88: note = engineered ribonucleic acid scaffold (ERS) sequence
  source 1..88: mol_type = other RNA
agtggcgcttctatctgattactctgagcgccatcaccagcgactatgtcgtgtgggtaaagctccctcttcggagggagcatcagag

SEQ ID NO: 13074 - RNA, 89 nt, synthetic construct
  misc_feature 1..89: note = engineered ribonucleic acid scaffold (ERS) sequence
  source 1..89: mol_type = other RNA
agtggcgcttctatctgattactctgagcgccatcaccagcgactatgtcgtattgggtaaagctccctcttcggagggagcatcagag

SEQ ID NO: 13075 - RNA, 89 nt, synthetic construct
  misc_feature 1..89: note = engineered ribonucleic acid scaffold (ERS) sequence
  source 1..89: mol_type = other RNA
agtggcgcttctatctgattactctgagcgccatcaccagcgactatgtcgtatggagtaaagctccctcttcggagggagcatcagag

SEQ ID NO: 13076 - RNA, 89 nt, synthetic construct
  misc_feature 1..89: note = engineered ribonucleic acid scaffold (ERS) sequence
  source 1..89: mol_type = other RNA
agtggcgcttctatctgattactctgagcgccatcaccagcgactatgtcgtatggcgtaaagctccctcttcggagggagcatcagag

SEQ ID NO: 13077 - RNA, 89 nt, synthetic construct
  misc_feature 1..89: note = engineered ribonucleic acid scaffold (ERS) sequence
  source 1..89: mol_type = other RNA
agtggcgcttctatctgattactctgagcgccatcaccagcgactatgtcgtatggtgtaaagctccctcttcggagggagcatcagag

SEQ ID NO: 13078 - RNA, 89 nt, synthetic construct
  misc_feature 1..89: note = engineered ribonucleic acid scaffold (ERS) sequence
  source 1..89: mol_type = other RNA
agtggcgcttctatctgattactctgagcgccatcaccagcgactatgtcgtatgggctaaagctccctcttcggagggagcatcagag

SEQ ID NO: 13079 - RNA, 86 nt, synthetic construct
  misc_feature 1..86: note = engineered ribonucleic acid scaffold (ERS) sequence
  source 1..86: mol_type = other RNA
agtggcgcttctatctgattactctgagcgccatcaccagcgactatgtcgtatgggtagctccctcttcggagggagcatcagag

SEQ ID NO: 13080 - RNA, 88 nt, synthetic construct
  misc_feature 1..88: note = engineered ribonucleic acid scaffold (ERS) sequence
  source 1..88: mol_type = other RNA
agtggcgcttctatctgattactctgagcgccatcaccagcgactatgtcgtatgggtgaagctccctcttcggagggagcatcagag

SEQ ID NO: 13081 - RNA, 88 nt, synthetic construct
  misc_feature 1..88: note = engineered ribonucleic acid scaffold (ERS) sequence
  source 1..88: mol_type = other RNA
agtggcgcttctatctgattactctgagcgccatcaccagcgactatgtcgtatgggtagagctccctcttcggagggagcatcagag

SEQ ID NO: 13082 - RNA, 87 nt, synthetic construct
  misc_feature 1..87: note = engineered ribonucleic acid scaffold (ERS) sequence
  source 1..87: mol_type = other RNA
acggcgcttctatctgattactctgagcgccaacaccagcgactatgtcgtatgggtaaagctccctcttcggagggagcatcagag

SEQ ID NO: 13083 - RNA, 87 nt, synthetic construct
  misc_feature 1..87: note = engineered ribonucleic acid scaffold (ERS) sequence
  source 1..87: mol_type = other RNA
acggcgcttctatctgattactctgagcgccagcaccagcgactatgtcgtatgggtaaagctccctcttcggagggagcatcagag

SEQ ID NO: 13084 - RNA, 87 nt, synthetic construct
  misc_feature 1..87: note = engineered ribonucleic acid scaffold (ERS) sequence
  source 1..87: mol_type = other RNA
acggcgcttctatctgattactctgagcgccatgaccagcgactatgtcgtatggctaaagctccctcttcggagggagcatcagag

SEQ ID NO: 13085 - RNA, 88 nt, synthetic construct
  misc_feature 1..88: note = engineered ribonucleic acid scaffold (ERS) sequence
  source 1..88: mol_type = other RNA
acggcgcttctatctgattactctgagcgccatgaccagcgactatgtcgtatgggctaaagctccctcttcggagggagcatcagag

SEQ ID NO: 13086 - RNA, 87 nt, synthetic construct
  misc_feature 1..87: note = engineered ribonucleic acid scaffold (ERS) sequence
  source 1..87: mol_type = other RNA
acggcgcttctatctgattactctgagcgccatgaccagcgactatgtcgtatgggtaaagctccctcttcggagggagcatcagag

SEQ ID NO: 13087 - RNA, 87 nt, synthetic construct
  misc_feature 1..87: note = engineered ribonucleic acid scaffold (ERS) sequence
  source 1..87: mol_type = other RNA
acggcgcttctatctgattactctgagcgccatccccagcgactatgtcgtatgggtaaagctccctcttcggagggagcatcagag

SEQ ID NO: 13088 - RNA, 88 nt, synthetic construct
  misc_feature 1..88: note = engineered ribonucleic acid scaffold (ERS) sequence
  source 1..88: mol_type = other RNA
acggcgcttctatctgattactctgagcgccatcgccagcgactatgtcgtatggcgtaaagctccctcttcggagggagcatcagag

SEQ ID NO: 13089 - RNA, 87 nt, synthetic construct
  misc_feature 1..87: note = engineered ribonucleic acid scaffold (ERS) sequence
  source 1..87: mol_type = other RNA
acggcgcttctatctgattactctgagcgccatcgccagcgactatgtcgtatgggtaaagctccctcttcggagggagcatcagag

SEQ ID NO: 13090 - RNA, 87 nt, synthetic construct
  misc_feature 1..87: note = engineered ribonucleic acid scaffold (ERS) sequence
  source 1..87: mol_type = other RNA
acggcgcttctatctgattactctgagcgccatctccagcgactatgtcgtatgggtaaagctccctcttcggagggagcatcagag

SEQ ID NO: 13091 - RNA, 87 nt, synthetic construct
  misc_feature 1..87: note = engineered ribonucleic acid scaffold (ERS) sequence
  source 1..87: mol_type = other RNA
acggcgcttctatctgattactctgagcgccatcacctgcgactatgtcgtaagggtaaagctccctcttcggagggagcatcagag

SEQ ID NO: 13092 - RNA, 87 nt, synthetic construct
  misc_feature 1..87: note = engineered ribonucleic acid scaffold (ERS) sequence
  source 1..87: mol_type = other RNA
acggcgcttctatctgattactctgagcgccatcaccagagactatgtcttatgggtaaagctccctcttcggagggagcatcagag

SEQ ID NO: 13093 - RNA, 87 nt, synthetic construct
  misc_feature 1..87: note = engineered ribonucleic acid scaffold (ERS) sequence
  source 1..87: mol_type = other RNA
acggcgcttctatctgattactctgagcgccatcaccagggactatgtcctatgggtaaagctccctcttcggagggagcatcagag

SEQ ID NO: 13094 - RNA, 88 nt, synthetic construct
  misc_feature 1..88: note = engineered ribonucleic acid scaffold (ERS) sequence
  source 1..88: mol_type = other RNA
acggcgcttctatctgattactctgagcgccatcaccaggcactatgtgctattgggtaaagctccctcttcggagggagcatcagag

SEQ ID NO: 13095 - RNA, 87 nt, synthetic construct
  misc_feature 1..87: note = engineered ribonucleic acid scaffold (ERS) sequence
  source 1..87: mol_type = other RNA
acggcgcttctatctgattactctgagcgccatcaccagccactatgtggtatgggtaaagctccctcttcggagggagcatcagag

SEQ ID NO: 13096 - RNA, 87 nt, synthetic construct
  misc_feature 1..87: note = engineered ribonucleic acid scaffold (ERS) sequence
  source 1..87: mol_type = other RNA
acggcgcttctatctgattactctgagcgccatcaccagctactatgtagtatgggtaaagctccctcttcggagggagcatcagag

SEQ ID NO: 13097 - RNA, 87 nt, synthetic construct
  misc_feature 1..87: note = engineered ribonucleic acid scaffold (ERS) sequence
  source 1..87: mol_type = other RNA
acggcgcttctatctgattactctgagcgccatcaccagcgattatgtcgtatgggtaaagctccctcttcggagggagcatcagag

SEQ ID NO: 13098 - RNA, 87 nt, synthetic construct
  misc_feature 1..87: note = engineered ribonucleic acid scaffold (ERS) sequence
  source 1..87: mol_type = other RNA
acggcgcttctatctgattactctgagcgccatcaccagcgacgatgtcgtatgggtaaagctccctcttcggagggagcatcagag

SEQ ID NO: 13099 - RNA, 87 nt, synthetic construct
  misc_feature 1..87: note = engineered ribonucleic acid scaffold (ERS) sequence
  source 1..87: mol_type = other RNA
acggcgcttctatctgattactctgagcgccatcaccagcgactctgtcgtatgggtaaagctccctcttcggagggagcatcagag

SEQ ID NO: 13100 - RNA, 87 nt, synthetic construct
  misc_feature 1..87: note = engineered ribonucleic acid scaffold (ERS) sequence
  source 1..87: mol_type = other RNA
acggcgcttctatctgattactctgagcgccatcaccagcgactatgtcgtgtgggtaaagctccctcttcggagggagcatcagag

SEQ ID NO: 13101 - RNA, 88 nt, synthetic construct
  misc_feature 1..88: note = engineered ribonucleic acid scaffold (ERS) sequence
  source 1..88: mol_type = other RNA
acggcgcttctatctgattactctgagcgccatcaccagcgactatgtcgtattgggtaaagctccctcttcggagggagcatcagag

SEQ ID NO: 13102 - RNA, 88 nt, synthetic construct
  misc_feature 1..88: note = engineered ribonucleic acid scaffold (ERS) sequence
  source 1..88: mol_type = other RNA
acggcgcttctatctgattactctgagcgccatcaccagcgactatgtcgtatggagtaaagctccctcttcggagggagcatcagag

SEQ ID NO: 13103 - RNA, 88 nt, synthetic construct
  misc_feature 1..88: note = engineered ribonucleic acid scaffold (ERS) sequence
  source 1..88: mol_type = other RNA
acggcgcttctatctgattactctgagcgccatcaccagcgactatgtcgtatggcgtaaagctccctcttcggagggagcatcagag

SEQ ID NO: 13104 - RNA, 88 nt, synthetic construct
  misc_feature 1..88: note = engineered ribonucleic acid scaffold (ERS) sequence
  source 1..88: mol_type = other RNA
acggcgcttctatctgattactctgagcgccatcaccagcgactatgtcgtatggtgtaaagctccctcttcggagggagcatcagag

SEQ ID NO: 13105 - RNA, 88 nt, synthetic construct
  misc_feature 1..88: note = engineered ribonucleic acid scaffold (ERS) sequence
  source 1..88: mol_type = other RNA
acggcgcttctatctgattactctgagcgccatcaccagcgactatgtcgtatgggctaaagctccctcttcggagggagcatcagag

SEQ ID NO: 13106 - RNA, 85 nt, synthetic construct
  misc_feature 1..85: note = engineered ribonucleic acid scaffold (ERS) sequence
  source 1..85: mol_type = other RNA
acggcgcttctatctgattactctgagcgccatcaccagcgactatgtcgtatgggtagctccctcttcggagggagcatcagag

SEQ ID NO: 13107 - RNA, 87 nt, synthetic construct
  misc_feature 1..87: note = engineered ribonucleic acid scaffold (ERS) sequence
  source 1..87: mol_type = other RNA
acggcgcttctatctgattactctgagcgccatcaccagcgactatgtcgtatgggtgaagctccctcttcggagggagcatcagag

SEQ ID NO: 13108 - RNA, 87 nt, synthetic construct
  misc_feature 1..87: note = engineered ribonucleic acid scaffold (ERS) sequence
  source 1..87: mol_type = other RNA
acggcgcttctatctgattactctgagcgccatcaccagcgactatgtcgtatgggtagagctccctcttcggagggagcatcagag

SEQ ID NO: 13109 - RNA, 88 nt, synthetic construct
  misc_feature 1..88: note = engineered ribonucleic acid scaffold (ERS) sequence
  source 1..88: mol_type = other RNA
acaggcgcttctatctgattactctgagcgccaacaccagcgactatgtcgtatgggtaaagctccctcttcggagggagcatcagag

SEQ ID NO: 13110 - RNA, 88 nt, synthetic construct
  misc_feature 1..88: note = engineered ribonucleic acid scaffold (ERS) sequence
  source 1..88: mol_type = other RNA
acaggcgcttctatctgattactctgagcgccagcaccagcgactatgtcgtatgggtaaagctccctcttcggagggagcatcagag

SEQ ID NO: 13111 - RNA, 88 nt, synthetic construct
  misc_feature 1..88: note = engineered ribonucleic acid scaffold (ERS) sequence
  source 1..88: mol_type = other RNA
acaggcgcttctatctgattactctgagcgccatgaccagcgactatgtcgtatggctaaagctccctcttcggagggagcatcagag

SEQ ID NO: 13112 - RNA, 89 nt, synthetic construct
  misc_feature 1..89: note = engineered ribonucleic acid scaffold (ERS) sequence
  source 1..89: mol_type = other RNA
acaggcgcttctatctgattactctgagcgccatgaccagcgactatgtcgtatgggctaaagctccctcttcggagggagcatcagag

SEQ ID NO: 13113 - RNA, 88 nt, synthetic construct
  misc_feature 1..88: note = engineered ribonucleic acid scaffold (ERS) sequence
  source 1..88: mol_type = other RNA
acaggcgcttctatctgattactctgagcgccatgaccagcgactatgtcgtatgggtaaagctccctcttcggagggagcatcagag

SEQ ID NO: 13114 - RNA, 88 nt, synthetic construct
  misc_feature 1..88: note = engineered ribonucleic acid scaffold (ERS) sequence
  source 1..88: mol_type = other RNA
acaggcgcttctatctgattactctgagcgccatccccagcgactatgtcgtatgggtaaagctccctcttcggagggagcatcagag

SEQ ID NO: 13115 - RNA, 89 nt, synthetic construct
  misc_feature 1..89: note = engineered ribonucleic acid scaffold (ERS) sequence
  source 1..89: mol_type = other RNA
acaggcgcttctatctgattactctgagcgccatcgccagcgactatgtcgtatggcgtaaagctccctcttcggagggagcatcagag

SEQ ID NO: 13116 - RNA, 88 nt, synthetic construct
  misc_feature 1..88: note = engineered ribonucleic acid scaffold (ERS) sequence
  source 1..88: mol_type = other RNA
acaggcgcttctatctgattactctgagcgccatcgccagcgactatgtcgtatgggtaaagctccctcttcggagggagcatcagag

SEQ ID NO: 13117 - RNA, 88 nt, synthetic construct
  misc_feature 1..88: note = engineered ribonucleic acid scaffold (ERS) sequence
  source 1..88: mol_type = other RNA
acaggcgcttctatctgattactctgagcgccatctccagcgactatgtcgtatgggtaaagctccctcttcggagggagcatcagag

SEQ ID NO: 13118 - RNA, 88 nt, synthetic construct
  misc_feature 1..88: note = engineered ribonucleic acid scaffold (ERS) sequence
  source 1..88: mol_type = other RNA
acaggcgcttctatctgattactctgagcgccatcacctgcgactatgtcgtaagggtaaagctccctcttcggagggagcatcagag

SEQ ID NO: 13119 - RNA, 88 nt, synthetic construct
  misc_feature 1..88: note = engineered ribonucleic acid scaffold (ERS) sequence
  source 1..88: mol_type = other RNA
acaggcgcttctatctgattactctgagcgccatcaccagagactatgtcttatgggtaaagctccctcttcggagggagcatcagag

SEQ ID NO: 13120 - RNA, 88 nt, synthetic construct
  misc_feature 1..88: note = engineered ribonucleic acid scaffold (ERS) sequence
  source 1..88: mol_type = other RNA
acaggcgcttctatctgattactctgagcgccatcaccagggactatgtcctatgggtaaagctccctcttcggagggagcatcagag

SEQ ID NO: 13121 - RNA, 89 nt, synthetic construct
  misc_feature 1..89: note = engineered ribonucleic acid scaffold (ERS) sequence
  source 1..89: mol_type = other RNA
acaggcgcttctatctgattactctgagcgccatcaccaggcactatgtgctattgggtaaagctccctcttcggagggagcatcagag

SEQ ID NO: 13122 - RNA, 88 nt, synthetic construct
  misc_feature 1..88: note = engineered ribonucleic acid scaffold (ERS) sequence
  source 1..88: mol_type = other RNA
acaggcgcttctatctgattactctgagcgccatcaccagccactatgtggtatgggtaaagctccctcttcggagggagcatcagag

SEQ ID NO: 13123 - RNA, 88 nt, synthetic construct
  misc_feature 1..88: note = engineered ribonucleic acid scaffold (ERS) sequence
  source 1..88: mol_type = other RNA
acaggcgcttctatctgattactctgagcgccatcaccagctactatgtagtatgggtaaagctccctcttcggagggagcatcagag

SEQ ID NO: 13124 - RNA, 88 nt, synthetic construct
  misc_feature 1..88: note = engineered ribonucleic acid scaffold (ERS) sequence
  source 1..88: mol_type = other RNA
acaggcgcttctatctgattactctgagcgccatcaccagcgattatgtcgtatgggtaaagctccctcttcggagggagcatcagag

SEQ ID NO: 13125 - RNA, 88 nt, synthetic construct
  misc_feature 1..88: note = engineered ribonucleic acid scaffold (ERS) sequence
  source 1..88: mol_type = other RNA
acaggcgcttctatctgattactctgagcgccatcaccagcgacgatgtcgtatgggtaaagctccctcttcggagggagcatcagag

SEQ ID NO: 13126 - RNA, 88 nt, synthetic construct
  misc_feature 1..88: note = engineered ribonucleic acid scaffold (ERS) sequence
  source 1..88: mol_type = other RNA
acaggcgcttctatctgattactctgagcgccatcaccagcgactctgtcgtatgggtaaagctccctcttcggagggagcatcagag

SEQ ID NO: 13127 - RNA, 88 nt, synthetic construct
  misc_feature 1..88: note = engineered ribonucleic acid scaffold (ERS) sequence
  source 1..88: mol_type = other RNA
acaggcgcttctatctgattactctgagcgccatcaccagcgactatgtcgtgtgggtaaagctccctcttcggagggagcatcagag

SEQ ID NO: 13128 - RNA, 89 nt, synthetic construct
  misc_feature 1..89: note = engineered ribonucleic acid scaffold (ERS) sequence
  source 1..89: mol_type = other RNA
acaggcgcttctatctgattactctgagcgccatcaccagcgactatgtcgtattgggtaaagctccctcttcggagggagcatcagag

SEQ ID NO: 13129 - RNA, 89 nt, synthetic construct
  misc_feature 1..89: note = engineered ribonucleic acid scaffold (ERS) sequence
  source 1..89: mol_type = other RNA
acaggcgcttctatctgattactctgagcgccatcaccagcgactatgtcgtatggagtaaagctccctcttcggagggagcatcagag

SEQ ID NO: 13130 - RNA, 89 nt, synthetic construct
  misc_feature 1..89: note = engineered ribonucleic acid scaffold (ERS) sequence
  source 1..89: mol_type = other RNA
acaggcgcttctatctgattactctgagcgccatcaccagcgactatgtcgtatggcgtaaagctccctcttcggagggagcatcagag

SEQ ID NO: 13131 - RNA, 89 nt, synthetic construct
  misc_feature 1..89: note = engineered ribonucleic acid scaffold (ERS) sequence
  source 1..89: mol_type = other RNA
acaggcgcttctatctgattactctgagcgccatcaccagcgactatgtcgtatggtgtaaagctccctcttcggagggagcatcagag

SEQ ID NO: 13132 - RNA, 89 nt, synthetic construct
  misc_feature 1..89: note = engineered ribonucleic acid scaffold (ERS) sequence
  source 1..89: mol_type = other RNA
acaggcgcttctatctgattactctgagcgccatcaccagcgactatgtcgtatgggctaaagctccctcttcggagggagcatcagag

SEQ ID NO: 13133 - RNA, 86 nt, synthetic construct
  misc_feature 1..86: note = engineered ribonucleic acid scaffold (ERS) sequence
  source 1..86: mol_type = other RNA
acaggcgcttctatctgattactctgagcgccatcaccagcgactatgtcgtatgggtagctccctcttcggagggagcatcagag

SEQ ID NO: 13134 - RNA, 88 nt, synthetic construct
  misc_feature 1..88: note = engineered ribonucleic acid scaffold (ERS) sequence
  source 1..88: mol_type = other RNA
acaggcgcttctatctgattactctgagcgccatcaccagcgactatgtcgtatgggtgaagctccctcttcggagggagcatcagag

SEQ ID NO: 13135 - RNA, 88 nt, synthetic construct
  misc_feature 1..88: note = engineered ribonucleic acid scaffold (ERS) sequence
  source 1..88: mol_type = other RNA
acaggcgcttctatctgattactctgagcgccatcaccagcgactatgtcgtatgggtagagctccctcttcggagggagcatcagag

SEQ ID NO: 13136 - RNA, 88 nt, synthetic construct
  misc_feature 1..88: note = engineered ribonucleic acid scaffold (ERS) sequence
  source 1..88: mol_type = other RNA
acgggcgcttctatctgattactctgagcgccaacaccagcgactatgtcgtatgggtaaagctccctcttcggagggagcatcagag

SEQ ID NO: 13137 - RNA, 88 nt, synthetic construct
  misc_feature 1..88: note = engineered ribonucleic acid scaffold (ERS) sequence
  source 1..88: mol_type = other RNA
acgggcgcttctatctgattactctgagcgccagcaccagcgactatgtcgtatgggtaaagctccctcttcggagggagcatcagag

SEQ ID NO: 13138 - RNA, 88 nt, synthetic construct
  misc_feature 1..88: note = engineered ribonucleic acid scaffold (ERS) sequence
  source 1..88: mol_type = other RNA
acgggcgcttctatctgattactctgagcgccatgaccagcgactatgtcgtatggctaaagctccctcttcggagggagcatcagag

SEQ ID NO: 13139 - RNA, 89 nt, synthetic construct
  misc_feature 1..89: note = engineered ribonucleic acid scaffold (ERS) sequence
  source 1..89: mol_type = other RNA
acgggcgcttctatctgattactctgagcgccatgaccagcgactatgtcgtatgggctaaagctccctcttcggagggagcatcagag

SEQ ID NO: 13140 - RNA, 88 nt, synthetic construct
  misc_feature 1..88: note = engineered ribonucleic acid scaffold (ERS) sequence
  source 1..88: mol_type = other RNA
acgggcgcttctatctgattactctgagcgccatgaccagcgactatgtcgtatgggtaaagctccctcttcggagggagcatcagag

SEQ ID NO: 13141 - RNA, 88 nt, synthetic construct
  misc_feature 1..88: note = engineered ribonucleic acid scaffold (ERS) sequence
  source 1..88: mol_type = other RNA
acgggcgcttctatctgattactctgagcgccatccccagcgactatgtcgtatgggtaaagctccctcttcggagggagcatcagag

SEQ ID NO: 13142 - RNA, 89 nt, synthetic construct
  misc_feature 1..89: note = engineered ribonucleic acid scaffold (ERS) sequence
  source 1..89: mol_type = other RNA
acgggcgcttctatctgattactctgagcgccatcgccagcgactatgtcgtatggcgtaaagctccctcttcggagggagcatcagag

SEQ ID NO: 13143 - RNA, 88 nt, synthetic construct
  misc_feature 1..88: note = engineered ribonucleic acid scaffold (ERS) sequence
  source 1..88: mol_type = other RNA
acgggcgcttctatctgattactctgagcgccatcgccagcgactatgtcgtatgggtaaagctccctcttcggagggagcatcagag

SEQ ID NO: 13144 - RNA, 88 nt, synthetic construct
  misc_feature 1..88: note = engineered ribonucleic acid scaffold (ERS) sequence
  source 1..88: mol_type = other RNA
acgggcgcttctatctgattactctgagcgccatctccagcgactatgtcgtatgggtaaagctccctcttcggagggagcatcagag

SEQ ID NO: 13145 - RNA, 88 nt, synthetic construct
  misc_feature 1..88: note = engineered ribonucleic acid scaffold (ERS) sequence
  source 1..88: mol_type = other RNA
acgggcgcttctatctgattactctgagcgccatcacctgcgactatgtcgtaagggtaaagctccctcttcggagggagcatcagag

SEQ ID NO: 13146 - RNA, 88 nt, synthetic construct
  misc_feature 1..88: note = engineered ribonucleic acid scaffold (ERS) sequence
  source 1..88: mol_type = other RNA
acgggcgcttctatctgattactctgagcgccatcaccagagactatgtcttatgggtaaagctccctcttcggagggagcatcagag

SEQ ID NO: 13147 - RNA, 88 nt, synthetic construct
  misc_feature 1..88: note = engineered ribonucleic acid scaffold (ERS) sequence
  source 1..88: mol_type = other RNA
acgggcgcttctatctgattactctgagcgccatcaccagggactatgtcctatgggtaaagctccctcttcggagggagcatcagag

SEQ ID NO: 13148 - RNA, 89 nt, synthetic construct
  misc_feature 1..89: note = engineered ribonucleic acid scaffold (ERS) sequence
  source 1..89: mol_type = other RNA
acgggcgcttctatctgattactctgagcgccatcaccaggcactatgtgctattgggtaaagctccctcttcggagggagcatcagag

SEQ ID NO: 13149 - RNA, 88 nt, synthetic construct
  misc_feature 1..88: note = engineered ribonucleic acid scaffold (ERS) sequence
  source 1..88: mol_type = other RNA
acgggcgcttctatctgattactctgagcgccatcaccagccactatgtggtatgggtaaagctccctcttcggagggagcatcagag

SEQ ID NO: 13150 - RNA, 88 nt, synthetic construct
  misc_feature 1..88: note = engineered ribonucleic acid scaffold (ERS) sequence
  source 1..88: mol_type = other RNA
acgggcgcttctatctgattactctgagcgccatcaccagctactatgtagtatgggtaaagctccctcttcggagggagcatcagag

SEQ ID NO: 13151 - RNA, 88 nt, synthetic construct
  misc_feature 1..88: note = engineered ribonucleic acid scaffold (ERS) sequence
  source 1..88: mol_type = other RNA
acgggcgcttctatctgattactctgagcgccatcaccagcgattatgtcgtatgggtaaagctccctcttcggagggagcatcagag

SEQ ID NO: 13152 - RNA, 88 nt, synthetic construct
  misc_feature 1..88: note = engineered ribonucleic acid scaffold (ERS) sequence
  source 1..88: mol_type = other RNA
acgggcgcttctatctgattactctgagcgccatcaccagcgacgatgtcgtatgggtaaagctccctcttcggagggagcatcagag

SEQ ID NO: 13153 - RNA, 88 nt, synthetic construct
  misc_feature 1..88: note = engineered ribonucleic acid scaffold (ERS) sequence
  source 1..88: mol_type = other RNA
acgggcgcttctatctgattactctgagcgccatcaccagcgactctgtcgtatgggtaaagctccctcttcggagggagcatcagag

SEQ ID NO: 13154 - RNA, 88 nt, synthetic construct
  misc_feature 1..88: note = engineered ribonucleic acid scaffold (ERS) sequence
  source 1..88: mol_type = other RNA
acgggcgcttctatctgattactctgagcgccatcaccagcgactatgtcgtgtgggtaaagctccctcttcggagggagcatcagag

SEQ ID NO: 13155 - RNA, 89 nt, synthetic construct
  misc_feature 1..89: note = engineered ribonucleic acid scaffold (ERS) sequence
  source 1..89: mol_type = other RNA
acgggcgcttctatctgattactctgagcgccatcaccagcgactatgtcgtattgggtaaagctccctcttcggagggagcatcagag

SEQ ID NO: 13156 - RNA, 89 nt, synthetic construct
  misc_feature 1..89: note = engineered ribonucleic acid scaffold (ERS) sequence
  source 1..89: mol_type = other RNA
acgggcgcttctatctgattactctgagcgccatcaccagcgactatgtcgtatggagtaaagctccctcttcggagggagcatcagag

SEQ ID NO: 13157 - RNA, 89 nt, synthetic construct
  misc_feature 1..89: note = engineered ribonucleic acid scaffold (ERS) sequence
  source 1..89: mol_type = other RNA
acgggcgcttctatctgattactctgagcgccatcaccagcgactatgtcgtatggcgtaaagctccctcttcggagggagcatcagag

SEQ ID NO: 13158 - RNA, 89 nt, synthetic construct
  misc_feature 1..89: note = engineered ribonucleic acid scaffold (ERS) sequence
  source 1..89: mol_type = other RNA
acgggcgcttctatctgattactctgagcgccatcaccagcgactatgtcgtatggtgtaaagctccctcttcggagggagcatcagag

SEQ ID NO: 13159 - RNA, 89 nt, synthetic construct
  misc_feature 1..89: note = engineered ribonucleic acid scaffold (ERS) sequence
  source 1..89: mol_type = other RNA
acgggcgcttctatctgattactctgagcgccatcaccagcgactatgtcgtatgggctaaagctccctcttcggagggagcatcagag

SEQ ID NO: 13160 - RNA, 86 nt, synthetic construct
  misc_feature 1..86: note = engineered ribonucleic acid scaffold (ERS) sequence
  source 1..86: mol_type = other RNA
acgggcgcttctatctgattactctgagcgccatcaccagcgactatgtcgtatgggtagctccctcttcggagggagcatcagag

SEQ ID NO: 13161 - RNA, 88 nt, synthetic construct
  misc_feature 1..88: note = engineered ribonucleic acid scaffold (ERS) sequence
  source 1..88: mol_type = other RNA
acgggcgcttctatctgattactctgagcgccatcaccagcgactatgtcgtatgggtgaagctccctcttcggagggagcatcagag

SEQ ID NO: 13162 - RNA, 88 nt, synthetic construct
  misc_feature 1..88: note = engineered ribonucleic acid scaffold (ERS) sequence
  source 1..88: mol_type = other RNA
acgggcgcttctatctgattactctgagcgccatcaccagcgactatgtcgtatgggtagagctccctcttcggagggagcatcagag

SEQ ID NO: 13163 - RNA, 89 nt, synthetic construct
  misc_feature 1..89: note = engineered ribonucleic acid scaffold (ERS) sequence
  source 1..89: mol_type = other RNA
actaggcgcttctatctgattactctgagcgccaacaccagcgactatgtcgtatgggtaaagctccctcttcggagggagcatcagag

SEQ ID NO: 13164 - RNA, 89 nt, synthetic construct
  misc_feature 1..89: note = engineered ribonucleic acid scaffold (ERS) sequence
  source 1..89: mol_type = other RNA
actaggcgcttctatctgattactctgagcgccagcaccagcgactatgtcgtatgggtaaagctccctcttcggagggagcatcagag

SEQ ID NO: 13165 - RNA, 89 nt, synthetic construct
  misc_feature 1..89: note = engineered ribonucleic acid scaffold (ERS) sequence
  source 1..89: mol_type = other RNA
actaggcgcttctatctgattactctgagcgccatgaccagcgactatgtcgtatggctaaagctccctcttcggagggagcatcagag

SEQ ID NO: 13166 - RNA, 90 nt, synthetic construct
  misc_feature 1..90: note = engineered ribonucleic acid scaffold (ERS) sequence
  source 1..90: mol_type = other RNA
actaggcgcttctatctgattactctgagcgccatgaccagcgactatgtcgtatgggctaaagctccctcttcggagggagcatcagag

SEQ ID NO: 13167 - RNA, 89 nt, synthetic construct
  misc_feature 1..89: note = engineered ribonucleic acid scaffold (ERS) sequence
  source 1..89: mol_type = other RNA
actaggcgcttctatctgattactctgagcgccatgaccagcgactatgtcgtatgggtaaagctccctcttcggagggagcatcagag

SEQ ID NO: 13168 - RNA, 89 nt, synthetic construct
  misc_feature 1..89: note = engineered ribonucleic acid scaffold (ERS) sequence
  source 1..89: mol_type = other RNA
actaggcgcttctatctgattactctgagcgccatccccagcgactatgtcgtatgggtaaagctccctcttcggagggagcatcagag

SEQ ID NO: 13169 - RNA, 90 nt, synthetic construct
  misc_feature 1..90: note = engineered ribonucleic acid scaffold (ERS) sequence
  source 1..90: mol_type = other RNA
actaggcgcttctatctgattactctgagcgccatcgccagcgactatgtcgtatggcgtaaagctccctcttcggagggagcatcagag

SEQ ID NO: 13170 - RNA, 89 nt, synthetic construct
  misc_feature 1..89: note = engineered ribonucleic acid scaffold (ERS) sequence
  source 1..89: mol_type = other RNA
actaggcgcttctatctgattactctgagcgccatcgccagcgactatgtcgtatgggtaaagctccctcttcggagggagcatcagag

SEQ ID NO: 13171 - RNA, 89 nt, synthetic construct
  misc_feature 1..89: note = engineered ribonucleic acid scaffold (ERS) sequence
  source 1..89: mol_type = other RNA
actaggcgcttctatctgattactctgagcgccatctccagcgactatgtcgtatgggtaaagctccctcttcggagggagcatcagag

SEQ ID NO: 13172 - RNA, 89 nt, synthetic construct
  misc_feature 1..89: note = engineered ribonucleic acid scaffold (ERS) sequence
  source 1..89: mol_type = other RNA
actaggcgcttctatctgattactctgagcgccatcacctgcgactatgtcgtaagggtaaagctccctcttcggagggagcatcagag

SEQ ID NO: 13173 - RNA, 89 nt, synthetic construct
  misc_feature 1..89: note = engineered ribonucleic acid scaffold (ERS) sequence
  source 1..89: mol_type = other RNA
actaggcgcttctatctgattactctgagcgccatcaccagagactatgtcttatgggtaaagctccctcttcggagggagcatcagag

SEQ ID NO: 13174 - RNA, 89 nt, synthetic construct
  misc_feature 1..89: note = engineered ribonucleic acid scaffold (ERS) sequence
  source 1..89: mol_type = other RNA
actaggcgcttctatctgattactctgagcgccatcaccagggactatgtcctatgggtaaagctccctcttcggagggagcatcagag

SEQ ID NO: 13175 - RNA, 90 nt, synthetic construct
  misc_feature 1..90: note = engineered ribonucleic acid scaffold (ERS) sequence
  source 1..90: mol_type = other RNA
actaggcgcttctatctgattactctgagcgccatcaccaggcactatgtgctattgggtaaagctccctcttcggagggagcatcagag

SEQ ID NO: 13176 - RNA, 89 nt, synthetic construct
  misc_feature 1..89: note = engineered ribonucleic acid scaffold (ERS) sequence
  source 1..89: mol_type = other RNA
actaggcgcttctatctgattactctgagcgccatcaccagccactatgtggtatgggtaaagctccctcttcggagggagcatcagag

SEQ ID NO: 13177 - RNA, 89 nt, synthetic construct
  misc_feature 1..89: note = engineered ribonucleic acid scaffold (ERS) sequence
  source 1..89: mol_type = other RNA
actaggcgcttctatctgattactctgagcgccatcaccagctactatgtagtatgggtaaagctccctcttcggagggagcatcagag

SEQ ID NO: 13178 - RNA, 89 nt, synthetic construct
  misc_feature 1..89: note = engineered ribonucleic acid scaffold (ERS) sequence
  source 1..89: mol_type = other RNA
actaggcgcttctatctgattactctgagcgccatcaccagcgattatgtcgtatgggtaaagctccctcttcggagggagcatcagag

SEQ ID NO: 13179 - RNA, 89 nt, synthetic construct
  misc_feature 1..89: note = engineered ribonucleic acid scaffold (ERS) sequence
  source 1..89: mol_type = other RNA
actaggcgcttctatctgattactctgagcgccatcaccagcgacgatgtcgtatgggtaaagctccctcttcggagggagcatcagag

SEQ ID NO: 13180 - RNA, 89 nt, synthetic construct
  misc_feature 1..89: note = engineered ribonucleic acid scaffold (ERS) sequence
  source 1..89: mol_type = other RNA
actaggcgcttctatctgattactctgagcgccatcaccagcgactctgtcgtatgggtaaagctccctcttcggagggagcatcagag

SEQ ID NO: 13181 - RNA, 89 nt, synthetic construct
  misc_feature 1..89: note = engineered ribonucleic acid scaffold (ERS) sequence
  source 1..89: mol_type = other RNA
actaggcgcttctatctgattactctgagcgccatcaccagcgactatgtcgtgtgggtaaagctccctcttcggagggagcatcagag

SEQ ID NO: 13182 - RNA, 90 nt, synthetic construct
  misc_feature 1..90: note = engineered ribonucleic acid scaffold (ERS) sequence
  source 1..90: mol_type = other RNA
actaggcgcttctatctgattactctgagcgccatcaccagcgactatgtcgtattgggtaaagctccctcttcggagggagcatcagag

SEQ ID NO: 13183 - RNA, 90 nt, synthetic construct
  misc_feature 1..90: note = engineered ribonucleic acid scaffold (ERS) sequence
  source 1..90: mol_type = other RNA
actaggcgcttctatctgattactctgagcgccatcaccagcgactatgtcgtatggagtaaagctccctcttcggagggagcatcagag

SEQ ID NO: 13184 - RNA, 90 nt, synthetic construct
  misc_feature 1..90: note = engineered ribonucleic acid scaffold (ERS) sequence
  source 1..90: mol_type = other RNA
actaggcgcttctatctgattactctgagcgccatcaccagcgactatgtcgtatggcgtaaagctccctcttcggagggagcatcagag

SEQ ID NO: 13185 - RNA, 90 nt, synthetic construct
  misc_feature 1..90: note = engineered ribonucleic acid scaffold (ERS) sequence
  source 1..90: mol_type = other RNA
actaggcgcttctatctgattactctgagcgccatcaccagcgactatgtcgtatggtgtaaagctccctcttcggagggagcatcagag

SEQ ID NO: 13186 - RNA, 90 nt, synthetic construct
  misc_feature 1..90: note = engineered ribonucleic acid scaffold (ERS) sequence
  source 1..90: mol_type = other RNA
actaggcgcttctatctgattactctgagcgccatcaccagcgactatgtcgtatgggctaaagctccctcttcggagggagcatcagag

SEQ ID NO: 13187 - RNA, 87 nt, synthetic construct
  misc_feature 1..87: note = engineered ribonucleic acid scaffold (ERS) sequence
  source 1..87: mol_type = other RNA
actaggcgcttctatctgattactctgagcgccatcaccagcgactatgtcgtatgggtagctccctcttcggagggagcatcagag

SEQ ID NO: 13188 - RNA, 89 nt, synthetic construct
  misc_feature 1..89: note = engineered ribonucleic acid scaffold (ERS) sequence
  source 1..89: mol_type = other RNA
actaggcgcttctatctgattactctgagcgccatcaccagcgactatgtcgtatgggtgaagctccctcttcggagggagcatcagag

SEQ ID NO: 13189 - RNA, 89 nt, synthetic construct
  misc_feature 1..89: note = engineered ribonucleic acid scaffold (ERS) sequence
  source 1..89: mol_type = other RNA
actaggcgcttctatctgattactctgagcgccatcaccagcgactatgtcgtatgggtagagctccctcttcggagggagcatcagag

SEQ ID NO: 13190 - RNA, 90 nt, synthetic construct
  misc_feature 1..90: note = engineered ribonucleic acid scaffold (ERS) sequence
  source 1..90: mol_type = other RNA
aactggcgcttctatctgattactctcagcgccatcaccagcgactatgtcgtagtgggtaaagctccctcttcggagggagcatcagac

SEQ ID NO: 13191 - RNA, 90 nt, synthetic construct
  misc_feature 1..90: note = engineered ribonucleic acid scaffold (ERS) sequence
  source 1..90: mol_type = other RNA
aactggcgcttctatctgattactttgagcgccatcaccagcgactatgtcgtagtgggtaaagctccctcttcggagggagcatcagag

SEQ ID NO: 13192 - RNA, 90 nt, synthetic construct
  misc_feature 1..90: note = engineered ribonucleic acid scaffold (ERS) sequence
  source 1..90: mol_type = other RNA
aactggcgcttctatctgattactttgagcgccatcaccagcgactatgtcgtagtgggtaaagctccctcttcggagggagcatcaaag

SEQ ID NO: 13193 - RNA, 90 nt, synthetic construct
  misc_feature 1..90: note = engineered ribonucleic acid scaffold (ERS) sequence
  source 1..90: mol_type = other RNA
aactggcgcttctatctgattagtctcagcgccatcaccagcgactatgtcgtagtgggtaaagctccctcttcggagggagcatgagac

SEQ ID NO: 13194 - RNA, 90 nt, synthetic construct
  misc_feature 1..90: note = engineered ribonucleic acid scaffold (ERS) sequence
  source 1..90: mol_type = other RNA
aactggcgcttctatctgattagtctgagcgccatcaccagcgactatgtcgtagtgggtaaagctccctcttcggagggagcatcagac

SEQ ID NO: 13195 - RNA, 90 nt, synthetic construct
  misc_feature 1..90: note = engineered ribonucleic acid scaffold (ERS) sequence
  source 1..90: mol_type = other RNA
aactggcgcttctatctgattactctcagcgccatcaccagcgactatgtcgtagtgggtaaagctccctcttcggagggagcatgagag

SEQ ID NO: 13196 - RNA, 90 nt, synthetic construct
  misc_feature 1..90: note = engineered ribonucleic acid scaffold (ERS) sequence
  source 1..90: mol_type = other RNA
aactggcgctcccatctgattaccccgagcgccatcaccagcgactatgtcgtagtgggtaaagctccctcttcggagggagcatcgggg

SEQ ID NO: 13197 - RNA, 90 nt, synthetic construct
  misc_feature 1..90: note = engineered ribonucleic acid scaffold (ERS) sequence
  source 1..90: mol_type = other RNA
aactggcgctcctatctgattactccgagcgccatcaccagcgactatgtcgtagtgggtaaagctccctcttcggagggagcatcggag

SEQ ID NO: 13198 - RNA, 90 nt, synthetic construct
  misc_feature 1..90: note = engineered ribonucleic acid scaffold (ERS) sequence
  source 1..90: mol_type = other RNA
aactggcgctgggatctgattaccccgagcgccatcaccagcgactatgtcgtagtgggtaaagctccctcttcggagggagcatcgggg

SEQ ID NO: 13199 - RNA, 90 nt, synthetic construct
  misc_feature 1..90: note = engineered ribonucleic acid scaffold (ERS) sequence
  source 1..90: mol_type = other RNA
aactggcgctggtatctgattactccgagcgccatcaccagcgactatgtcgtagtgggtaaagctccctcttcggagggagcatcggag

SEQ ID NO: 13200 - RNA, 90 nt, synthetic construct
  misc_feature 1..90: note = engineered ribonucleic acid scaffold (ERS) sequence
  source 1..90: mol_type = other RNA
aactggcgcttccatctgattaccctgagcgccatcaccagcgactatgtcgtagtgggtaaagctccctcttcggagggagcatcaggg

SEQ ID NO: 13201 - RNA, 90 nt, synthetic construct
  misc_feature 1..90: note = engineered ribonucleic acid scaffold (ERS) sequence
  source 1..90: mol_type = other RNA
aactggcgcttggatctgattaccctgagcgccatcaccagcgactatgtcgtagtgggtaaagctccctcttcggagggagcatcaggg

SEQ ID NO: 13202 - RNA, 90 nt, synthetic construct
  misc_feature 1..90: note = engineered ribonucleic acid scaffold (ERS) sequence
  source 1..90: mol_type = other RNA
aactggcgcttgtatctgattactctgagcgccatcaccagcgactatgtcgtagtgggtaaagctccctcttcggagggagcatcagag

SEQ ID NO: 13203 - RNA, 90 nt, synthetic construct
  misc_feature 1..90: note = engineered ribonucleic acid scaffold (ERS) sequence
  source 1..90: mol_type = other RNA
aactggcgcttttatctgattactttgagcgccatcaccagcgactatgtcgtagtgggtaaagctccctcttcggagggagcatcagag

SEQ ID NO: 13204 - RNA, 90 nt, synthetic construct
  misc_feature 1..90: note = engineered ribonucleic acid scaffold (ERS) sequence
  source 1..90: mol_type = other RNA
aactggcgcttttatctgattactctgagcgccatcaccagcgactatgtcgtagtgggtaaagctccctcttcggagggagcatcagag

SEQ ID NO: 13205 - RNA, 90 nt, synthetic construct
  misc_feature 1..90: note = engineered ribonucleic acid scaffold (ERS) sequence
  source 1..90: mol_type = other RNA
aactggcgcttttatctgattactctgagcgccatcaccagcgactatgtcgtagtgggtaaagctccctcttcggagggagcatcaaag

SEQ ID NO: 13206 - RNA, 90 nt, synthetic construct
  misc_feature 1..90: note = engineered ribonucleic acid scaffold (ERS) sequence
  source 1..90: mol_type = other RNA
aactggcgcttctatctgattactctgagcgccatcaccagcgactatgtcgtagtgggtaaagctccctcttcggagggagcctcagag

SEQ ID NO: 13207 - RNA, 90 nt, synthetic construct
  misc_feature 1..90: note = engineered ribonucleic acid scaffold (ERS) sequence
  source 1..90: mol_type = other RNA
aactggcgcttctatctgattactctgagcgccatcaccagcgactatgtcgtagtgggtaaagctccctcttcggagggagcgtcagag

SEQ ID NO: 13208 - RNA, 90 nt, synthetic construct
  misc_feature 1..90: note = engineered ribonucleic acid scaffold (ERS) sequence
  source 1..90: mol_type = other RNA
aactggcgcttctatctgattactctgagcgccatcaccagcgactatgtcgtagtgggtaaagctccctcttcggagggagcatcaaag

SEQ ID NO: 13209 - RNA, 87 nt, synthetic construct
  misc_feature 1..87: note = engineered ribonucleic acid scaffold (ERS) sequence
  source 1..87: mol_type = other RNA
gggcgcttctatctgattactctcagcgccctcaccagcgactatgtcgtagtgggtaaagctccctcttcggagggagcatcagac

SEQ ID NO: 13210 - RNA, 87 nt, synthetic construct
  misc_feature 1..87: note = engineered ribonucleic acid scaffold (ERS) sequence
  source 1..87: mol_type = other RNA
gggcgcttctatctgattactttgagcgccctcaccagcgactatgtcgtagtgggtaaagctccctcttcggagggagcatcagag

SEQ ID NO: 13211 - RNA, 87 nt, synthetic construct
  misc_feature 1..87: note = engineered ribonucleic acid scaffold (ERS) sequence
  source 1..87: mol_type = other RNA
gggcgcttctatctgattactttgagcgccctcaccagcgactatgtcgtagtgggtaaagctccctcttcggagggagcatcaaag

SEQ ID NO: 13212 - RNA, 87 nt, synthetic construct
  misc_feature 1..87: note = engineered ribonucleic acid scaffold (ERS) sequence
  source 1..87: mol_type = other RNA
gggcgcttctatctgattagtctcagcgccctcaccagcgactatgtcgtagtgggtaaagctccctcttcggagggagcatgagac

SEQ ID NO: 13213 - RNA, 87 nt, synthetic construct
  misc_feature 1..87: note = engineered ribonucleic acid scaffold (ERS) sequence
  source 1..87: mol_type = other RNA
gggcgcttctatctgattagtctgagcgccctcaccagcgactatgtcgtagtgggtaaagctccctcttcggagggagcatcagac

SEQ ID NO: 13214 - RNA, 87 nt, synthetic construct
  misc_feature 1..87: note = engineered ribonucleic acid scaffold (ERS) sequence
  source 1..87: mol_type = other RNA
gggcgcttctatctgattactctcagcgccctcaccagcgactatgtcgtagtgggtaaagctccctcttcggagggagcatgagag

SEQ ID NO: 13215 - RNA, 87 nt, synthetic construct
  misc_feature 1..87: note = engineered ribonucleic acid scaffold (ERS) sequence
  source 1..87: mol_type = other RNA
gggcgctcccatctgattaccccgagcgccctcaccagcgactatgtcgtagtgggtaaagctccctcttcggagggagcatcgggg

SEQ ID NO: 13216 - RNA, 87 nt, synthetic construct
  misc_feature 1..87: note = engineered ribonucleic acid scaffold (ERS) sequence
  source 1..87: mol_type = other RNA
gggcgctcctatctgattactccgagcgccctcaccagcgactatgtcgtagtgggtaaagctccctcttcggagggagcatcggag

SEQ ID NO: 13217 - RNA, 87 nt, synthetic construct
  misc_feature 1..87: note = engineered ribonucleic acid scaffold (ERS) sequence
  source 1..87: mol_type = other RNA
gggcgctgggatctgattaccccgagcgccctcaccagcgactatgtcgtagtgggtaaagctccctcttcggagggagcatcgggg

SEQ ID NO: 13218 - RNA, 87 nt, synthetic construct
  misc_feature 1..87: note = engineered ribonucleic acid scaffold (ERS) sequence
  source 1..87: mol_type = other RNA
gggcgctggtatctgattactccgagcgccctcaccagcgactatgtcgtagtgggtaaagctccctcttcggagggagcatcggag

SEQ ID NO: 13219 - RNA, 87 nt, synthetic construct
  misc_feature 1..87: note = engineered ribonucleic acid scaffold (ERS) sequence
  source 1..87: mol_type = other RNA
gggcgcttccatctgattaccctgagcgccctcaccagcgactatgtcgtagtgggtaaagctccctcttcggagggagcatcaggg

SEQ ID NO: 13220 - RNA, 87 nt, synthetic construct
  misc_feature 1..87: note = engineered ribonucleic acid scaffold (ERS) sequence
  source 1..87: mol_type = other RNA
gggcgcttggatctgattaccctgagcgccctcaccagcgactatgtcgtagtgggtaaagctccctcttcggagggagcatcaggg

SEQ ID NO: 13221 - RNA, 87 nt, synthetic construct
  misc_feature 1..87: note = engineered ribonucleic acid scaffold (ERS) sequence
  source 1..87: mol_type = other RNA
gggcgcttgtatctgattactctgagcgccctcaccagcgactatgtcgtagtgggtaaagctccctcttcggagggagcatcagag

SEQ ID NO: 13222 - RNA, 87 nt, synthetic construct
  misc_feature 1..87: note = engineered ribonucleic acid scaffold (ERS) sequence
  source 1..87: mol_type = other RNA
gggcgcttttatctgattactttgagcgccctcaccagcgactatgtcgtagtgggtaaagctccctcttcggagggagcatcagag

SEQ ID NO: 13223 - RNA, 87 nt, synthetic construct
  misc_feature 1..87: note = engineered ribonucleic acid scaffold (ERS) sequence
  source 1..87: mol_type = other RNA
gggcgcttttatctgattactctgagcgccctcaccagcgactatgtcgtagtgggtaaagctccctcttcggagggagcatcagag

SEQ ID NO: 13224 - RNA, 87 nt, synthetic construct
  misc_feature 1..87: note = engineered ribonucleic acid scaffold (ERS) sequence
  source 1..87: mol_type = other RNA
gggcgcttttatctgattactctgagcgccctcaccagcgactatgtcgtagtgggtaaagctccctcttcggagggagcatcaaag

SEQ ID NO: 13225 - RNA, 87 nt, synthetic construct
  misc_feature 1..87: note = engineered ribonucleic acid scaffold (ERS) sequence
  source 1..87: mol_type = other RNA
gggcgcttctatctgattactctgagcgccctcaccagcgactatgtcgtagtgggtaaagctccctcttcggagggagcctcagag

SEQ ID NO: 13226 - RNA, 87 nt, synthetic construct
  misc_feature 1..87: note = engineered ribonucleic acid scaffold (ERS) sequence
  source 1..87: mol_type = other RNA
gggcgcttctatctgattactctgagcgccctcaccagcgactatgtcgtagtgggtaaagctccctcttcggagggagcgtcagag

SEQ ID NO: 13227 - RNA, 87 nt, synthetic construct
  misc_feature 1..87: note = engineered ribonucleic acid scaffold (ERS) sequence
  source 1..87: mol_type = other RNA
gggcgcttctatctgattactctgagcgccctcaccagcgactatgtcgtagtgggtaaagctccctcttcggagggagcatcaaag

SEQ ID NO: 13228 - RNA, 89 nt, synthetic construct
  misc_feature 1..89: note = engineered ribonucleic acid scaffold (ERS) sequence
  source 1..89: mol_type = other RNA
gctggcgcttctatctgattactctcagcgccatcaccagcgactatgtcgtagtgggtaaagctccctcttcggagggagcatcagac

SEQ ID NO: 13229 - RNA, 89 nt, synthetic construct
  misc_feature 1..89: note = engineered ribonucleic acid scaffold (ERS) sequence
  source 1..89: mol_type = other RNA
gctggcgcttctatctgattactttgagcgccatcaccagcgactatgtcgtagtgggtaaagctccctcttcggagggagcatcagag

SEQ ID NO: 13230 - RNA, 89 nt, synthetic construct
  misc_feature 1..89: note = engineered ribonucleic acid scaffold (ERS) sequence
  source 1..89: mol_type = other RNA
gctggcgcttctatctgattactttgagcgccatcaccagcgactatgtcgtagtgggtaaagctccctcttcggagggagcatcaaag

SEQ ID NO: 13231 - RNA, 89 nt, synthetic construct
  misc_feature 1..89: note = engineered ribonucleic acid scaffold (ERS) sequence
  source 1..89: mol_type = other RNA
gctggcgcttctatctgattagtctcagcgccatcaccagcgactatgtcgtagtgggtaaagctccctcttcggagggagcatgagac

SEQ ID NO: 13232 - RNA, 89 nt, synthetic construct
  misc_feature 1..89: note = engineered ribonucleic acid scaffold (ERS) sequence
  source 1..89: mol_type = other RNA
gctggcgcttctatctgattagtctgagcgccatcaccagcgactatgtcgtagtgggtaaagctccctcttcggagggagcatcagac

SEQ ID NO: 13233 - RNA, 89 nt, synthetic construct
  misc_feature 1..89: note = engineered ribonucleic acid scaffold (ERS) sequence
  source 1..89: mol_type = other RNA
gctggcgcttctatctgattactctcagcgccatcaccagcgactatgtcgtagtgggtaaagctccctcttcggagggagcatgagag

SEQ ID NO: 13234 - RNA, 89 nt, synthetic construct
  misc_feature 1..89: note = engineered ribonucleic acid scaffold (ERS) sequence
  source 1..89: mol_type = other RNA
gctggcgctcccatctgattaccccgagcgccatcaccagcgactatgtcgtagtgggtaaagctccctcttcggagggagcatcgggg

SEQ ID NO: 13235 - RNA, 89 nt, synthetic construct
  misc_feature 1..89: note = engineered ribonucleic acid scaffold (ERS) sequence
  source 1..89: mol_type = other RNA
gctggcgctcctatctgattactccgagcgccatcaccagcgactatgtcgtagtgggtaaagctccctcttcggagggagcatcggag

SEQ ID NO: 13236 - RNA, 89 nt, synthetic construct
  misc_feature 1..89: note = engineered ribonucleic acid scaffold (ERS) sequence
  source 1..89: mol_type = other RNA
gctggcgctgggatctgattaccccgagcgccatcaccagcgactatgtcgtagtgggtaaagctccctcttcggagggagcatcgggg

SEQ ID NO: 13237 - RNA, 89 nt, synthetic construct
  misc_feature 1..89: note = engineered ribonucleic acid scaffold (ERS) sequence
  source 1..89: mol_type = other RNA
gctggcgctggtatctgattactccgagcgccatcaccagcgactatgtcgtagtgggtaaagctccctcttcggagggagcatcggag

SEQ ID NO: 13238 - RNA, 89 nt, synthetic construct
  misc_feature 1..89: note = engineered ribonucleic acid scaffold (ERS) sequence
  source 1..89: mol_type = other RNA
gctggcgcttccatctgattaccctgagcgccatcaccagcgactatgtcgtagtgggtaaagctccctcttcggagggagcatcaggg

SEQ ID NO: 13239 - RNA, 89 nt, synthetic construct
  misc_feature 1..89: note = engineered ribonucleic acid scaffold (ERS) sequence
  source 1..89: mol_type = other RNA
gctggcgcttggatctgattaccctgagcgccatcaccagcgactatgtcgtagtgggtaaagctccctcttcggagggagcatcaggg

SEQ ID NO: 13240 - RNA, 89 nt, synthetic construct
  misc_feature 1..89: note = engineered ribonucleic acid scaffold (ERS) sequence
  source 1..89: mol_type = other RNA
gctggcgcttgtatctgattactctgagcgccatcaccagcgactatgtcgtagtgggtaaagctccctcttcggagggagcatcagag

SEQ ID NO: 13241 - RNA, 89 nt, synthetic construct
  misc_feature 1..89: note = engineered ribonucleic acid scaffold (ERS) sequence
  source 1..89: mol_type = other RNA
gctggcgcttttatctgattactttgagcgccatcaccagcgactatgtcgtagtgggtaaagctccctcttcggagggagcatcagag

SEQ ID NO: 13242 - RNA, 89 nt, synthetic construct
  misc_feature 1..89: note = engineered ribonucleic acid scaffold (ERS) sequence
  source 1..89: mol_type = other RNA
gctggcgcttttatctgattactctgagcgccatcaccagcgactatgtcgtagtgggtaaagctccctcttcggagggagcatcagag

SEQ ID NO: 13243 - RNA, 89 nt, synthetic construct
  misc_feature 1..89: note = engineered ribonucleic acid scaffold (ERS) sequence
  source 1..89: mol_type = other RNA
gctggcgcttttatctgattactctgagcgccatcaccagcgactatgtcgtagtgggtaaagctccctcttcggagggagcatcaaag

SEQ ID NO: 13244 - RNA, 89 nt, synthetic construct
  misc_feature 1..89: note = engineered ribonucleic acid scaffold (ERS) sequence
  source 1..89: mol_type = other RNA
gctggcgcttctatctgattactctgagcgccatcaccagcgactatgtcgtagtgggtaaagctccctcttcggagggagcctcagag

SEQ ID NO: 13245 - RNA, 89 nt, synthetic construct
  misc_feature 1..89: note = engineered ribonucleic acid scaffold (ERS) sequence
  source 1..89: mol_type = other RNA
gctggcgcttctatctgattactctgagcgccatcaccagcgactatgtcgtagtgggtaaagctccctcttcggagggagcgtcagag

SEQ ID NO: 13246 - RNA, 89 nt, synthetic construct
  misc_feature 1..89: note = engineered ribonucleic acid scaffold (ERS) sequence
  source 1..89: mol_type = other RNA
gctggcgcttctatctgattactctgagcgccatcaccagcgactatgtcgtagtgggtaaagctccctcttcggagggagcatcaaag

SEQ ID NO: 13247 - RNA, 89 nt, synthetic construct
  misc_feature 1..89: note = engineered ribonucleic acid scaffold (ERS) sequence
  source 1..89: mol_type = other RNA
tatggcgcttctatctgattactctcagcgccatcaccagcgactatgtcgtagtgggtaaagctccctcttcggagggagcatcagac

SEQ ID NO: 13248 - RNA, 89 nt, synthetic construct
  misc_feature 1..89: note = engineered ribonucleic acid scaffold (ERS) sequence
  source 1..89: mol_type = other RNA
tatggcgcttctatctgattactttgagcgccatcaccagcgactatgtcgtagtgggtaaagctccctcttcggagggagcatcagag

SEQ ID NO: 13249 - RNA, 89 nt, synthetic construct
  misc_feature 1..89: note = engineered ribonucleic acid scaffold (ERS) sequence
  source 1..89: mol_type = other RNA
tatggcgcttctatctgattactttgagcgccatcaccagcgactatgtcgtagtgggtaaagctccctcttcggagggagcatcaaag

SEQ ID NO: 13250 - RNA, 89 nt, synthetic construct
  misc_feature 1..89: note = engineered ribonucleic acid scaffold (ERS) sequence
  source 1..89: mol_type = other RNA
tatggcgcttctatctgattagtctcagcgccatcaccagcgactatgtcgtagtgggtaaagctccctcttcggagggagcatgagac

SEQ ID NO: 13251 - RNA, 89 nt, synthetic construct
  misc_feature 1..89: note = engineered ribonucleic acid scaffold (ERS) sequence
  source 1..89: mol_type = other RNA
tatggcgcttctatctgattagtctgagcgccatcaccagcgactatgtcgtagtgggtaaagctccctcttcggagggagcatcagac

SEQ ID NO: 13252 - RNA, 89 nt, synthetic construct
  misc_feature 1..89: note = engineered ribonucleic acid scaffold (ERS) sequence
  source 1..89: mol_type = other RNA
tatggcgcttctatctgattactctcagcgccatcaccagcgactatgtcgtagtgggtaaagctccctcttcggagggagcatgagag

SEQ ID NO: 13253 - RNA, 89 nt, synthetic construct
  misc_feature 1..89: note = engineered ribonucleic acid scaffold (ERS) sequence
  source 1..89: mol_type = other RNA
tatggcgctcccatctgattaccccgagcgccatcaccagcgactatgtcgtagtgggtaaagctccctcttcggagggagcatcgggg

SEQ ID NO: 13254 - RNA, 89 nt, synthetic construct
  misc_feature 1..89: note = engineered ribonucleic acid scaffold (ERS) sequence
  source 1..89: mol_type = other RNA
tatggcgctcctatctgattactccgagcgccatcaccagcgactatgtcgtagtgggtaaagctccctcttcggagggagcatcggag

SEQ ID NO: 13255 - RNA, 89 nt, synthetic construct
  misc_feature 1..89: note = engineered ribonucleic acid scaffold (ERS) sequence
  source 1..89: mol_type = other RNA
tatggcgctgggatctgattaccccgagcgccatcaccagcgactatgtcgtagtgggtaaagctccctcttcggagggagcatcgggg

SEQ ID NO: 13256 - RNA, 89 nt, synthetic construct
  misc_feature 1..89: note = engineered ribonucleic acid scaffold (ERS) sequence
  source 1..89: mol_type = other RNA
tatggcgctggtatctgattactccgagcgccatcaccagcgactatgtcgtagtgggtaaagctccctcttcggagggagcatcggag

SEQ ID NO: 13257 - RNA, 89 nt, synthetic construct
  misc_feature 1..89: note = engineered ribonucleic acid scaffold (ERS) sequence
  source 1..89: mol_type = other RNA
tatggcgcttccatctgattaccctgagcgccatcaccagcgactatgtcgtagtgggtaaagctccctcttcggagggagcatcaggg

SEQ ID NO: 13258 - RNA, 89 nt, synthetic construct
  misc_feature 1..89: note = engineered ribonucleic acid scaffold (ERS) sequence
  source 1..89: mol_type = other RNA
tatggcgcttggatctgattaccctgagcgccatcaccagcgactatgtcgtagtgggtaaagctccctcttcggagggagcatcaggg

SEQ ID NO: 13259 - RNA, 89 nt, synthetic construct
  misc_feature 1..89: note = engineered ribonucleic acid scaffold (ERS) sequence
  source 1..89: mol_type = other RNA
tatggcgcttgtatctgattactctgagcgccatcaccagcgactatgtcgtagtgggtaaagctccctcttcggagggagcatcagag

SEQ ID NO: 13260 - RNA, 89 nt, synthetic construct
  misc_feature 1..89: note = engineered ribonucleic acid scaffold (ERS) sequence
  source 1..89: mol_type = other RNA
tatggcgcttttatctgattactttgagcgccatcaccagcgactatgtcgtagtgggtaaagctccctcttcggagggagcatcagag

SEQ ID NO: 13261 - RNA, 89 nt, synthetic construct
  misc_feature 1..89: note = engineered ribonucleic acid scaffold (ERS) sequence
  source 1..89: mol_type = other RNA
tatggcgcttttatctgattactctgagcgccatcaccagcgactatgtcgtagtgggtaaagctccctcttcggagggagcatcagag

SEQ ID NO: 13262 - RNA, 89 nt, synthetic construct
  misc_feature 1..89: note = engineered ribonucleic acid scaffold (ERS) sequence
  source 1..89: mol_type = other RNA
tatggcgcttttatctgattactctgagcgccatcaccagcgactatgtcgtagtgggtaaagctccctcttcggagggagcatcaaag

SEQ ID NO: 13263 - RNA, 89 nt, synthetic construct
  misc_feature 1..89: note = engineered ribonucleic acid scaffold (ERS) sequence
  source 1..89: mol_type = other RNA
tatggcgcttctatctgattactctgagcgccatcaccagcgactatgtcgtagtgggtaaagctccctcttcggagggagcctcagag

SEQ ID NO: 13264 - RNA, 89 nt, synthetic construct
  misc_feature 1..89: note = engineered ribonucleic acid scaffold (ERS) sequence
  source 1..89: mol_type = other RNA
tatggcgcttctatctgattactctgagcgccatcaccagcgactatgtcgtagtgggtaaagctccctcttcggagggagcgtcagag

SEQ ID NO: 13265 - RNA, 89 nt, synthetic construct
  misc_feature 1..89: note = engineered ribonucleic acid scaffold (ERS) sequence
  source 1..89: mol_type = other RNA
tatggcgcttctatctgattactctgagcgccatcaccagcgactatgtcgtagtgggtaaagctccctcttcggagggagcatcaaag

SEQ ID NO: 13266 - RNA, 89 nt, synthetic construct
  misc_feature 1..89: note = engineered ribonucleic acid scaffold (ERS) sequence
  source 1..89: mol_type = other RNA
tctggcgcttctatctgattactctcagcgccatcaccagcgactatgtcgtagtgggtaaagctccctcttcggagggagcatcagac

SEQ ID NO: 13267 - RNA, 89 nt, synthetic construct
  misc_feature 1..89: note = engineered ribonucleic acid scaffold (ERS) sequence
  source 1..89: mol_type = other RNA
tctggcgcttctatctgattactttgagcgccatcaccagcgactatgtcgtagtgggtaaagctccctcttcggagggagcatcagag

SEQ ID NO: 13268 - RNA, 89 nt, synthetic construct
  misc_feature 1..89: note = engineered ribonucleic acid scaffold (ERS) sequence
  source 1..89: mol_type = other RNA
tctggcgcttctatctgattactttgagcgccatcaccagcgactatgtcgtagtgggtaaagctccctcttcggagggagcatcaaag

SEQ ID NO: 13269 - RNA, 89 nt, synthetic construct
  misc_feature 1..89: note = engineered ribonucleic acid scaffold (ERS) sequence
  source 1..89: mol_type = other RNA
tctggcgcttctatctgattagtctcagcgccatcaccagcgactatgtcgtagtgggtaaagctccctcttcggagggagcatgagac

SEQ ID NO: 13270 - RNA, 89 nt, synthetic construct
  misc_feature 1..89: note = engineered ribonucleic acid scaffold (ERS) sequence
  source 1..89: mol_type = other RNA
tctggcgcttctatctgattagtctgagcgccatcaccagcgactatgtcgtagtgggtaaagctccctcttcggagggagcatcagac

SEQ ID NO: 13271 - RNA, 89 nt, synthetic construct
  misc_feature 1..89: note = engineered ribonucleic acid scaffold (ERS) sequence
  source 1..89: mol_type = other RNA
tctggcgcttctatctgattactctcagcgccatcaccagcgactatgtcgtagtgggtaaagctccctcttcggagggagcatgagag

SEQ ID NO: 13272 - RNA, 89 nt, synthetic construct
  misc_feature 1..89: note = engineered ribonucleic acid scaffold (ERS) sequence
  source 1..89: mol_type = other RNA
tctggcgctcccatctgattaccccgagcgccatcaccagcgactatgtcgtagtgggtaaagctccctcttcggagggagcatcgggg

SEQ ID NO: 13273 - RNA, 89 nt, synthetic construct
  misc_feature 1..89: note = engineered ribonucleic acid scaffold (ERS) sequence
  source 1..89: mol_type = other RNA
tctggcgctcctatctgattactccgagcgccatcaccagcgactatgtcgtagtgggtaaagctccctcttcggagggagcatcggag

SEQ ID NO: 13274 - RNA, 89 nt, synthetic construct
  misc_feature 1..89: note = engineered ribonucleic acid scaffold (ERS) sequence
  source 1..89: mol_type = other RNA
tctggcgctgggatctgattaccccgagcgccatcaccagcgactatgtcgtagtgggtaaagctccctcttcggagggagcatcgggg

SEQ ID NO: 13275 - RNA, 89 nt, synthetic construct
  misc_feature 1..89: note = engineered ribonucleic acid scaffold (ERS) sequence
  source 1..89: mol_type = other RNA
tctggcgctggtatctgattactccgagcgccatcaccagcgactatgtcgtagtgggtaaagctccctcttcggagggagcatcggag

SEQ ID NO: 13276 - RNA, 89 nt, synthetic construct
  misc_feature 1..89: note = engineered ribonucleic acid scaffold (ERS) sequence
  source 1..89: mol_type = other RNA
tctggcgcttccatctgattaccctgagcgccatcaccagcgactatgtcgtagtgggtaaagctccctcttcggagggagcatcaggg

SEQ ID NO: 13277 - RNA, 89 nt, synthetic construct
  misc_feature 1..89: note = engineered ribonucleic acid scaffold (ERS) sequence
  source 1..89: mol_type = other RNA
tctggcgcttggatctgattaccctgagcgccatcaccagcgactatgtcgtagtgggtaaagctccctcttcggagggagcatcaggg

SEQ ID NO: 13278 - RNA, 89 nt, synthetic construct
  misc_feature 1..89: note = engineered ribonucleic acid scaffold (ERS) sequence
  source 1..89: mol_type = other RNA
tctggcgcttgtatctgattactctgagcgccatcaccagcgactatgtcgtagtgggtaaagctccctcttcggagggagcatcagag

SEQ ID NO: 13279 - RNA, 89 nt, synthetic construct
  misc_feature 1..89: note = engineered ribonucleic acid scaffold (ERS) sequence
  source 1..89: mol_type = other RNA
tctggcgcttttatctgattactttgagcgccatcaccagcgactatgtcgtagtgggtaaagctccctcttcggagggagcatcagag

SEQ ID NO: 13280 - RNA, 89 nt, synthetic construct
  misc_feature 1..89: note = engineered ribonucleic acid scaffold (ERS) sequence
  source 1..89: mol_type = other RNA
tctggcgcttttatctgattactctgagcgccatcaccagcgactatgtcgtagtgggtaaagctccctcttcggagggagcatcagag

SEQ ID NO: 13281 - RNA, 89 nt, synthetic construct
  misc_feature 1..89: note = engineered ribonucleic acid scaffold (ERS) sequence
  source 1..89: mol_type = other RNA
tctggcgcttttatctgattactctgagcgccatcaccagcgactatgtcgtagtgggtaaagctccctcttcggagggagcatcaaag

SEQ ID NO: 13282 - RNA, 89 nt, synthetic construct
  misc_feature 1..89: note = engineered ribonucleic acid scaffold (ERS) sequence
  source 1..89: mol_type = other RNA
tctggcgcttctatctgattactctgagcgccatcaccagcgactatgtcgtagtgggtaaagctccctcttcggagggagcctcagag

SEQ ID NO: 13283 - RNA, 89 nt, synthetic construct
  misc_feature 1..89: note = engineered ribonucleic acid scaffold (ERS) sequence
  source 1..89: mol_type = other RNA
tctggcgcttctatctgattactctgagcgccatcaccagcgactatgtcgtagtgggtaaagctccctcttcggagggagcgtcagag

SEQ ID NO: 13284 - RNA, 89 nt, synthetic construct
  misc_feature 1..89: note = engineered ribonucleic acid scaffold (ERS) sequence
  source 1..89: mol_type = other RNA
tctggcgcttctatctgattactctgagcgccatcaccagcgactatgtcgtagtgggtaaagctccctcttcggagggagcatcaaag

SEQ ID NO: 13285 - RNA, 90 nt, synthetic construct
  misc_feature 1..90: note = engineered ribonucleic acid scaffold (ERS) sequence
  source 1..90: mol_type = other RNA
atctggcgcttctatctgattactctcagcgccatcaccagcgactatgtcgtagtgggtaaagctccctcttcggagggagcatcagac

SEQ ID NO: 13286 - RNA, 90 nt, synthetic construct
  misc_feature 1..90: note = engineered ribonucleic acid scaffold (ERS) sequence
  source 1..90: mol_type = other RNA
atctggcgcttctatctgattactttgagcgccatcaccagcgactatgtcgtagtgggtaaagctccctcttcggagggagcatcagag

SEQ ID NO: 13287 - RNA, 90 nt, synthetic construct
  misc_feature 1..90: note = engineered ribonucleic acid scaffold (ERS) sequence
  source 1..90: mol_type = other RNA
atctggcgcttctatctgattactttgagcgccatcaccagcgactatgtcgtagtgggtaaagctccctcttcggagggagcatcaaag

SEQ ID NO: 13288 - RNA, 90 nt, synthetic construct
  misc_feature 1..90: note = engineered ribonucleic acid scaffold (ERS) sequence
  source 1..90: mol_type = other RNA
atctggcgcttctatctgattagtctcagcgccatcaccagcgactatgtcgtagtgggtaaagctccctcttcggagggagcatgagac

SEQ ID NO: 13289 - RNA, 90 nt, synthetic construct
  misc_feature 1..90: note = engineered ribonucleic acid scaffold (ERS) sequence
  source 1..90: mol_type = other RNA
atctggcgcttctatctgattagtctgagcgccatcaccagcgactatgtcgtagtgggtaaagctccctcttcggagggagcatcagac

SEQ ID NO: 13290 - RNA, 90 nt, synthetic construct
  misc_feature 1..90: note = engineered ribonucleic acid scaffold (ERS) sequence
  source 1..90: mol_type = other RNA
atctggcgcttctatctgattactctcagcgccatcaccagcgactatgtcgtagtgggtaaagctccctcttcggagggagcatgagag

SEQ ID NO: 13291 - RNA, 90 nt, synthetic construct
  misc_feature 1..90: note = engineered ribonucleic acid scaffold (ERS) sequence
  source 1..90: mol_type = other RNA
atctggcgctcccatctgattaccccgagcgccatcaccagcgactatgtcgtagtgggtaaagctccctcttcggagggagcatcgggg

SEQ ID NO: 13292 - RNA, 90 nt, synthetic construct
  misc_feature 1..90: note = engineered ribonucleic acid scaffold (ERS) sequence
  source 1..90: mol_type = other RNA
atctggcgctcctatctgattactccgagcgccatcaccagcgactatgtcgtagtgggtaaagctccctcttcggagggagcatcggag

SEQ ID NO: 13293 - RNA, 90 nt, synthetic construct
  misc_feature 1..90: note = engineered ribonucleic acid scaffold (ERS) sequence
  source 1..90: mol_type = other RNA
atctggcgctgggatctgattaccccgagcgccatcaccagcgactatgtcgtagtgggtaaagctccctcttcggagggagcatcgggg

SEQ ID NO: 13294 - RNA, 90 nt, synthetic construct
  misc_feature 1..90: note = engineered ribonucleic acid scaffold (ERS) sequence
  source 1..90: mol_type = other RNA
atctggcgctggtatctgattactccgagcgccatcaccagcgactatgtcgtagtgggtaaagctccctcttcggagggagcatcggag

SEQ ID NO: 13295 - RNA, 90 nt, synthetic construct
  misc_feature 1..90: note = engineered ribonucleic acid scaffold (ERS) sequence
  source 1..90: mol_type = other RNA
atctggcgcttccatctgattaccctgagcgccatcaccagcgactatgtcgtagtgggtaaagctccctcttcggagggagcatcaggg

SEQ ID NO: 13296 - RNA, 90 nt, synthetic construct
  misc_feature 1..90: note = engineered ribonucleic acid scaffold (ERS) sequence
  source 1..90: mol_type = other RNA
atctggcgcttggatctgattaccctgagcgccatcaccagcgactatgtcgtagtgggtaaagctccctcttcggagggagcatcaggg

SEQ ID NO: 13297 - RNA, 90 nt, synthetic construct
  misc_feature 1..90: note = engineered ribonucleic acid scaffold (ERS) sequence
  source 1..90: mol_type = other RNA
atctggcgcttgtatctgattactctgagcgccatcaccagcgactatgtcgtagtgggtaaagctccctcttcggagggagcatcagag

SEQ ID NO: 13298 - RNA, 90 nt, synthetic construct
  misc_feature 1..90: note = engineered ribonucleic acid scaffold (ERS) sequence
  source 1..90: mol_type = other RNA
atctggcgcttttatctgattactttgagcgccatcaccagcgactatgtcgtagtgggtaaagctccctcttcggagggagcatcagag

SEQ ID NO: 13299 - RNA, 90 nt, synthetic construct
  misc_feature 1..90: note = engineered ribonucleic acid scaffold (ERS) sequence
  source 1..90: mol_type = other RNA
atctggcgcttttatctgattactctgagcgccatcaccagcgactatgtcgtagtgggtaaagctccctcttcggagggagcatcagag

SEQ ID NO: 13300 - RNA, 90 nt, synthetic construct
  misc_feature 1..90: note = engineered ribonucleic acid scaffold (ERS) sequence
  source 1..90: mol_type = other RNA
atctggcgcttttatctgattactctgagcgccatcaccagcgactatgtcgtagtgggtaaagctccctcttcggagggagcatcaaag

SEQ ID NO: 13301 - RNA, 90 nt, synthetic construct
  misc_feature 1..90: note = engineered ribonucleic acid scaffold (ERS) sequence
  source 1..90: mol_type = other RNA
atctggcgcttctatctgattactctgagcgccatcaccagcgactatgtcgtagtgggtaaagctccctcttcggagggagcctcagag

SEQ ID NO: 13302 - RNA, 90 nt, synthetic construct
  misc_feature 1..90: note = engineered ribonucleic acid scaffold (ERS) sequence
  source 1..90: mol_type = other RNA
atctggcgcttctatctgattactctgagcgccatcaccagcgactatgtcgtagtgggtaaagctccctcttcggagggagcgtcagag

SEQ ID NO: 13303 - RNA, 90 nt, synthetic construct
  misc_feature 1..90: note = engineered ribonucleic acid scaffold (ERS) sequence
  source 1..90: mol_type = other RNA
atctggcgcttctatctgattactctgagcgccatcaccagcgactatgtcgtagtgggtaaagctccctcttcggagggagcatcaaag

SEQ ID NO: 13304 - RNA, 87 nt, synthetic construct
  misc_feature 1..87: note = engineered ribonucleic acid scaffold (ERS) sequence
  source 1..87: mol_type = other RNA
aggcgcttctatctgattactctcagcgccatcaccagcgactatgtcgtagtgggtaaagctccctcttcggagggagcatcagac

SEQ ID NO: 13305 - RNA, 87 nt, synthetic construct
  misc_feature 1..87: note = engineered ribonucleic acid scaffold (ERS) sequence
  source 1..87: mol_type = other RNA
aggcgcttctatctgattactttgagcgccatcaccagcgactatgtcgtagtgggtaaagctccctcttcggagggagcatcagag

SEQ ID NO: 13306 - RNA, 87 nt, synthetic construct
  misc_feature 1..87: note = engineered ribonucleic acid scaffold (ERS) sequence
  source 1..87: mol_type = other RNA
aggcgcttctatctgattactttgagcgccatcaccagcgactatgtcgtagtgggtaaagctccctcttcggagggagcatcaaag

SEQ ID NO: 13307 - RNA, 87 nt, synthetic construct
  misc_feature 1..87: note = engineered ribonucleic acid scaffold (ERS) sequence
  source 1..87: mol_type = other RNA
aggcgcttctatctgattagtctcagcgccatcaccagcgactatgtcgtagtgggtaaagctccctcttcggagggagcatgagac

SEQ ID NO: 13308 - RNA, 87 nt, synthetic construct
  misc_feature 1..87: note = engineered ribonucleic acid scaffold (ERS) sequence
  source 1..87: mol_type = other RNA
aggcgcttctatctgattagtctgagcgccatcaccagcgactatgtcgtagtgggtaaagctccctcttcggagggagcatcagac

SEQ ID NO: 13309 - RNA, 87 nt, synthetic construct
  misc_feature 1..87: note = engineered ribonucleic acid scaffold (ERS) sequence
  source 1..87: mol_type = other RNA
aggcgcttctatctgattactctcagcgccatcaccagcgactatgtcgtagtgggtaaagctccctcttcggagggagcatgagag

SEQ ID NO: 13310 - RNA, 87 nt, synthetic construct
  misc_feature 1..87: note = engineered ribonucleic acid scaffold (ERS) sequence
  source 1..87: mol_type = other RNA
aggcgctcccatctgattaccccgagcgccatcaccagcgactatgtcgtagtgggtaaagctccctcttcggagggagcatcgggg

SEQ ID NO: 13311 - RNA, 87 nt, synthetic construct
  misc_feature 1..87: note = engineered ribonucleic acid scaffold (ERS) sequence
  source 1..87: mol_type = other RNA
aggcgctcctatctgattactccgagcgccatcaccagcgactatgtcgtagtgggtaaagctccctcttcggagggagcatcggag

SEQ ID NO: 13312 - RNA, 87 nt, synthetic construct
  misc_feature 1..87: note = engineered ribonucleic acid scaffold (ERS) sequence
  source 1..87: mol_type = other RNA
aggcgctgggatctgattaccccgagcgccatcaccagcgactatgtcgtagtgggtaaagctccctcttcggagggagcatcgggg

SEQ ID NO: 13313 - RNA, 87 nt, synthetic construct
  misc_feature 1..87: note = engineered ribonucleic acid scaffold (ERS) sequence
  source 1..87: mol_type = other RNA
aggcgctggtatctgattactccgagcgccatcaccagcgactatgtcgtagtgggtaaagctccctcttcggagggagcatcggag

SEQ ID NO: 13314 - RNA, 87 nt, synthetic construct
  misc_feature 1..87: note = engineered ribonucleic acid scaffold (ERS) sequence
  source 1..87: mol_type = other RNA
aggcgcttccatctgattaccctgagcgccatcaccagcgactatgtcgtagtgggtaaagctccctcttcggagggagcatcaggg

SEQ ID NO: 13315 - RNA, 87 nt, synthetic construct
  misc_feature 1..87: note = engineered ribonucleic acid scaffold (ERS) sequence
  source 1..87: mol_type = other RNA
aggcgcttggatctgattaccctgagcgccatcaccagcgactatgtcgtagtgggtaaagctccctcttcggagggagcatcaggg

SEQ ID NO: 13316 - RNA, 87 nt, synthetic construct
  misc_feature 1..87: note = engineered ribonucleic acid scaffold (ERS) sequence
  source 1..87: mol_type = other RNA
aggcgcttgtatctgattactctgagcgccatcaccagcgactatgtcgtagtgggtaaagctccctcttcggagggagcatcagag

SEQ ID NO: 13317 - RNA, 87 nt, synthetic construct
  misc_feature 1..87: note = engineered ribonucleic acid scaffold (ERS) sequence
  source 1..87: mol_type = other RNA
aggcgcttttatctgattactttgagcgccatcaccagcgactatgtcgtagtgggtaaagctccctcttcggagggagcatcagag

SEQ ID NO: 13318 - RNA, 87 nt, synthetic construct
  misc_feature 1..87: note = engineered ribonucleic acid scaffold (ERS) sequence
  source 1..87: mol_type = other RNA
aggcgcttttatctgattactctgagcgccatcaccagcgactatgtcgtagtgggtaaagctccctcttcggagggagcatcagag

SEQ ID NO: 13319 - RNA, 87 nt, synthetic construct
  misc_feature 1..87: note = engineered ribonucleic acid scaffold (ERS) sequence
  source 1..87: mol_type = other RNA
aggcgcttttatctgattactctgagcgccatcaccagcgactatgtcgtagtgggtaaagctccctcttcggagggagcatcaaag

SEQ ID NO: 13320 - RNA, 87 nt, synthetic construct
  misc_feature 1..87: note = engineered ribonucleic acid scaffold (ERS) sequence
  source 1..87: mol_type = other RNA
aggcgcttctatctgattactctgagcgccatcaccagcgactatgtcgtagtgggtaaagctccctcttcggagggagcctcagag

SEQ ID NO: 13321 - RNA, 87 nt, synthetic construct
  misc_feature 1..87: note = engineered ribonucleic acid scaffold (ERS) sequence
  source 1..87: mol_type = other RNA
aggcgcttctatctgattactctgagcgccatcaccagcgactatgtcgtagtgggtaaagctccctcttcggagggagcgtcagag

SEQ ID NO: 13322 - RNA, 87 nt, synthetic construct
  misc_feature 1..87: note = engineered ribonucleic acid scaffold (ERS) sequence
  source 1..87: mol_type = other RNA
aggcgcttctatctgattactctgagcgccatcaccagcgactatgtcgtagtgggtaaagctccctcttcggagggagcatcaaag

SEQ ID NO: 13323 - RNA, 88 nt, synthetic construct
  misc_feature 1..88: note = engineered ribonucleic acid scaffold (ERS) sequence
  source 1..88: mol_type = other RNA
atggcgcttctatctgattactctcagcgccatcaccagcgactatgtcgtagtgggtaaagctccctcttcggagggagcatcagac

SEQ ID NO: 13324 - RNA, 88 nt, synthetic construct
  misc_feature 1..88: note = engineered ribonucleic acid scaffold (ERS) sequence
  source 1..88: mol_type = other RNA
atggcgcttctatctgattactttgagcgccatcaccagcgactatgtcgtagtgggtaaagctccctcttcggagggagcatcagag

SEQ ID NO: 13325 - RNA, 88 nt, synthetic construct
  misc_feature 1..88: note = engineered ribonucleic acid scaffold (ERS) sequence
  source 1..88: mol_type = other RNA
atggcgcttctatctgattactttgagcgccatcaccagcgactatgtcgtagtgggtaaagctccctcttcggagggagcatcaaag

SEQ ID NO: 13326 - RNA, 88 nt, synthetic construct
  misc_feature 1..88: note = engineered ribonucleic acid scaffold (ERS) sequence
  source 1..88: mol_type = other RNA
atggcgcttctatctgattagtctcagcgccatcaccagcgactatgtcgtagtgggtaaagctccctcttcggagggagcatgagac

SEQ ID NO: 13327 - RNA, 88 nt, synthetic construct
  misc_feature 1..88: note = engineered ribonucleic acid scaffold (ERS) sequence
  source 1..88: mol_type = other RNA
atggcgcttctatctgattagtctgagcgccatcaccagcgactatgtcgtagtgggtaaagctccctcttcggagggagcatcagac

SEQ ID NO: 13328 - RNA, 88 nt, synthetic construct
  misc_feature 1..88: note = engineered ribonucleic acid scaffold (ERS) sequence
  source 1..88: mol_type = other RNA
atggcgcttctatctgattactctcagcgccatcaccagcgactatgtcgtagtgggtaaagctccctcttcggagggagcatgagag

SEQ ID NO: 13329 - RNA, 88 nt, synthetic construct
  misc_feature 1..88: note = engineered ribonucleic acid scaffold (ERS) sequence
  source 1..88: mol_type = other RNA
atggtgcttctatctgattactctcagcgccatcaccagcgactatgtcgtagtgggtaaagctccctcttcggagggagcatcagac

SEQ ID NO: 13330 - RNA, 88 nt, synthetic construct
  misc_feature 1..88: note = engineered ribonucleic acid scaffold (ERS) sequence
  source 1..88: mol_type = other RNA
atggtgcttctatctgattactttgagcgccatcaccagcgactatgtcgtagtgggtaaagctccctcttcggagggagcatcagag

SEQ ID NO: 13331 - RNA, 88 nt, synthetic construct
  misc_feature 1..88: note = engineered ribonucleic acid scaffold (ERS) sequence
  source 1..88: mol_type = other RNA
atggtgcttctatctgattactttgagcgccatcaccagcgactatgtcgtagtgggtaaagctccctcttcggagggagcatcaaag

SEQ ID NO: 13332 - RNA, 88 nt, synthetic construct
  misc_feature 1..88: note = engineered ribonucleic acid scaffold (ERS) sequence
  source 1..88: mol_type = other RNA
atggtgcttctatctgattagtctcagcgccatcaccagcgactatgtcgtagtgggtaaagctccctcttcggagggagcatgagac

SEQ ID NO: 13333 - RNA, 88 nt, synthetic construct
  misc_feature 1..88: note = engineered ribonucleic acid scaffold (ERS) sequence
  source 1..88: mol_type = other RNA
atggtgcttctatctgattagtctgagcgccatcaccagcgactatgtcgtagtgggtaaagctccctcttcggagggagcatcagac

SEQ ID NO: 13334 - RNA, 88 nt, synthetic construct
  misc_feature 1..88: note = engineered ribonucleic acid scaffold (ERS) sequence
  source 1..88: mol_type = other RNA
atggtgcttctatctgattactctcagcgccatcaccagcgactatgtcgtagtgggtaaagctccctcttcggagggagcatgagag

SEQ ID NO: 13335 - RNA, 88 nt, synthetic construct
  misc_feature 1..88: note = engineered ribonucleic acid scaffold (ERS) sequence
  source 1..88: mol_type = other RNA
atggtgctcccatctgattaccccgagcgccatcaccagcgactatgtcgtagtgggtaaagctccctcttcggagggagcatcgggg

SEQ ID NO: 13336 - RNA, 88 nt, synthetic construct
  misc_feature 1..88: note = engineered ribonucleic acid scaffold (ERS) sequence
  source 1..88: mol_type = other RNA
atggtgctcctatctgattactccgagcgccatcaccagcgactatgtcgtagtgggtaaagctccctcttcggagggagcatcggag

SEQ ID NO: 13337 - RNA, 88 nt, synthetic construct
  misc_feature 1..88: note = engineered ribonucleic acid scaffold (ERS) sequence
  source 1..88: mol_type = other RNA
atggtgctgggatctgattaccccgagcgccatcaccagcgactatgtcgtagtgggtaaagctccctcttcggagggagcatcgggg

SEQ ID NO: 13338 - RNA, 88 nt, synthetic construct
  misc_feature 1..88: note = engineered ribonucleic acid scaffold (ERS) sequence
  source 1..88: mol_type = other RNA
atggtgctggtatctgattactccgagcgccatcaccagcgactatgtcgtagtgggtaaagctccctcttcggagggagcatcggag

SEQ ID NO: 13339 - RNA, 88 nt, synthetic construct
  misc_feature 1..88: note = engineered ribonucleic acid scaffold (ERS) sequence
  source 1..88: mol_type = other RNA
atggtgcttccatctgattaccctgagcgccatcaccagcgactatgtcgtagtgggtaaagctccctcttcggagggagcatcaggg

SEQ ID NO: 13340 - RNA, 88 nt, synthetic construct
  misc_feature 1..88: note = engineered ribonucleic acid scaffold (ERS) sequence
  source 1..88: mol_type = other RNA
atggtgcttggatctgattaccctgagcgccatcaccagcgactatgtcgtagtgggtaaagctccctcttcggagggagcatcaggg

SEQ ID NO: 13341 - RNA, 88 nt, synthetic construct
  misc_feature 1..88: note = engineered ribonucleic acid scaffold (ERS) sequence
  source 1..88: mol_type = other RNA
atggtgcttgtatctgattactctgagcgccatcaccagcgactatgtcgtagtgggtaaagctccctcttcggagggagcatcagag

SEQ ID NO: 13342 - RNA, 88 nt, synthetic construct
  misc_feature 1..88: note = engineered ribonucleic acid scaffold (ERS) sequence
  source 1..88: mol_type = other RNA
atggtgcttttatctgattactttgagcgccatcaccagcgactatgtcgtagtgggtaaagctccctcttcggagggagcatcagag

SEQ ID NO: 13343 - RNA, 88 nt, synthetic construct
  misc_feature 1..88: note = engineered ribonucleic acid scaffold (ERS) sequence
  source 1..88: mol_type = other RNA
atggtgcttttatctgattactctgagcgccatcaccagcgactatgtcgtagtgggtaaagctccctcttcggagggagcatcagag

SEQ ID NO: 13344 - RNA, 88 nt, synthetic construct
  misc_feature 1..88: note = engineered ribonucleic acid scaffold (ERS) sequence
  source 1..88: mol_type = other RNA
atggtgcttttatctgattactctgagcgccatcaccagcgactatgtcgtagtgggtaaagctccctcttcggagggagcatcaaag

SEQ ID NO: 13345 - RNA, 88 nt, synthetic construct
  misc_feature 1..88: note = engineered ribonucleic acid scaffold (ERS) sequence
  source 1..88: mol_type = other RNA
atggtgcttctatctgattactctgagcgccatcaccagcgactatgtcgtagtgggtaaagctccctcttcggagggagcctcagag

SEQ ID NO: 13346 - RNA, 88 nt, synthetic construct
  misc_feature 1..88: note = engineered ribonucleic acid scaffold (ERS) sequence
  source 1..88: mol_type = other RNA
atggtgcttctatctgattactctgagcgccatcaccagcgactatgtcgtagtgggtaaagctccctcttcggagggagcgtcagag

SEQ ID NO: 13347 - RNA, 88 nt, synthetic construct
  misc_feature 1..88: note = engineered ribonucleic acid scaffold (ERS) sequence
  source 1..88: mol_type = other RNA
atggtgcttctatctgattactctgagcgccatcaccagcgactatgtcgtagtgggtaaagctccctcttcggagggagcatcaaag

SEQ ID NO: 13348 - RNA, 88 nt, synthetic construct
  misc_feature 1..88: note = engineered ribonucleic acid scaffold (ERS) sequence
  source 1..88: mol_type = other RNA
atggcgctcccatctgattaccccgagcgccatcaccagcgactatgtcgtagtgggtaaagctccctcttcggagggagcatcgggg

SEQ ID NO: 13349 - RNA, 88 nt, synthetic construct
  misc_feature 1..88: note = engineered ribonucleic acid scaffold (ERS) sequence
  source 1..88: mol_type = other RNA
atggcgctcctatctgattactccgagcgccatcaccagcgactatgtcgtagtgggtaaagctccctcttcggagggagcatcggag

SEQ ID NO: 13350 - RNA, 88 nt, synthetic construct
  misc_feature 1..88: note = engineered ribonucleic acid scaffold (ERS) sequence
  source 1..88: mol_type = other RNA
atggcgctgggatctgattaccccgagcgccatcaccagcgactatgtcgtagtgggtaaagctccctcttcggagggagcatcgggg

SEQ ID NO: 13351 - RNA, 88 nt, synthetic construct
  misc_feature 1..88: note = engineered ribonucleic acid scaffold (ERS) sequence
  source 1..88: mol_type = other RNA
atggcgctggtatctgattactccgagcgccatcaccagcgactatgtcgtagtgggtaaagctccctcttcggagggagcatcggag

SEQ ID NO: 13352 - RNA, 88 nt, synthetic construct
  misc_feature 1..88: note = engineered ribonucleic acid scaffold (ERS) sequence
  source 1..88: mol_type = other RNA
atggcgcttccatctgattaccctgagcgccatcaccagcgactatgtcgtagtgggtaaagctccctcttcggagggagcatcaggg

SEQ ID NO: 13353 - RNA, 88 nt, synthetic construct
  misc_feature 1..88: note = engineered ribonucleic acid scaffold (ERS) sequence
  source 1..88: mol_type = other RNA
atggcgcttggatctgattaccctgagcgccatcaccagcgactatgtcgtagtgggtaaagctccctcttcggagggagcatcaggg

SEQ ID NO: 13354 - RNA, 88 nt, synthetic construct
  misc_feature 1..88: note = engineered ribonucleic acid scaffold (ERS) sequence
  source 1..88: mol_type = other RNA
atggcgcttgtatctgattactctgagcgccatcaccagcgactatgtcgtagtgggtaaagctccctcttcggagggagcatcagag

SEQ ID NO: 13355 - RNA, 88 nt, synthetic construct
  misc_feature 1..88: note = engineered ribonucleic acid scaffold (ERS) sequence
  source 1..88: mol_type = other RNA
atggcgcttttatctgattactttgagcgccatcaccagcgactatgtcgtagtgggtaaagctccctcttcggagggagcatcagag

SEQ ID NO: 13356 - RNA, 88 nt, synthetic construct
  misc_feature 1..88: note = engineered ribonucleic acid scaffold (ERS) sequence
  source 1..88: mol_type = other RNA
atggcgcttttatctgattactctgagcgccatcaccagcgactatgtcgtagtgggtaaagctccctcttcggagggagcatcagag

SEQ ID NO: 13357 - RNA, 88 nt, synthetic construct
  misc_feature 1..88: note = engineered ribonucleic acid scaffold (ERS) sequence
  source 1..88: mol_type = other RNA
atggcgcttttatctgattactctgagcgccatcaccagcgactatgtcgtagtgggtaaagctccctcttcggagggagcatcaaag

SEQ ID NO: 13358 - RNA, 88 nt, synthetic construct
  misc_feature 1..88: note = engineered ribonucleic acid scaffold (ERS) sequence
  source 1..88: mol_type = other RNA
atggcgcttctatctgattactctgagcgccatcaccagcgactatgtcgtagtgggtaaagctccctcttcggagggagcctcagag

SEQ ID NO: 13359 - RNA, 88 nt, synthetic construct
  misc_feature 1..88: note = engineered ribonucleic acid scaffold (ERS) sequence
  source 1..88: mol_type = other RNA
atggcgcttctatctgattactctgagcgccatcaccagcgactatgtcgtagtgggtaaagctccctcttcggagggagcgtcagag

SEQ ID NO: 13360 - RNA, 88 nt, synthetic construct
  misc_feature 1..88: note = engineered ribonucleic acid scaffold (ERS) sequence
  source 1..88: mol_type = other RNA
atggcgcttctatctgattactctgagcgccatcaccagcgactatgtcgtagtgggtaaagctccctcttcggagggagcatcaaag

SEQ ID NO: 13361 - RNA, 89 nt, synthetic construct
  misc_feature 1..89: note = engineered ribonucleic acid scaffold (ERS) sequence
  source 1..89: mol_type = other RNA
aatggcgcttctatctgattactctcagcgccatcaccagcgactatgtcgtagtgggtaaagctccctcttcggagggagcatcagac

SEQ ID NO: 13362 - RNA, 89 nt, synthetic construct
  misc_feature 1..89: note = engineered ribonucleic acid scaffold (ERS) sequence
  source 1..89: mol_type = other RNA
aatggcgcttctatctgattactttgagcgccatcaccagcgactatgtcgtagtgggtaaagctccctcttcggagggagcatcagag

SEQ ID NO: 13363 - RNA, 89 nt, synthetic construct
  misc_feature 1..89: note = engineered ribonucleic acid scaffold (ERS) sequence
  source 1..89: mol_type = other RNA
aatggcgcttctatctgattactttgagcgccatcaccagcgactatgtcgtagtgggtaaagctccctcttcggagggagcatcaaag

SEQ ID NO: 13364 - RNA, 89 nt, synthetic construct
  misc_feature 1..89: note = engineered ribonucleic acid scaffold (ERS) sequence
  source 1..89: mol_type = other RNA
aatggcgcttctatctgattagtctcagcgccatcaccagcgactatgtcgtagtgggtaaagctccctcttcggagggagcatgagac

SEQ ID NO: 13365 - RNA, 89 nt, synthetic construct
  misc_feature 1..89: note = engineered ribonucleic acid scaffold (ERS) sequence
  source 1..89: mol_type = other RNA
aatggcgcttctatctgattagtctgagcgccatcaccagcgactatgtcgtagtgggtaaagctccctcttcggagggagcatcagac

SEQ ID NO: 13366 - RNA, 89 nt, synthetic construct
  misc_feature 1..89: note = engineered ribonucleic acid scaffold (ERS) sequence
  source 1..89: mol_type = other RNA
aatggcgcttctatctgattactctcagcgccatcaccagcgactatgtcgtagtgggtaaagctccctcttcggagggagcatgagag

SEQ ID NO: 13367 - RNA, 89 nt, synthetic construct
  misc_feature 1..89: note = engineered ribonucleic acid scaffold (ERS) sequence
  source 1..89: mol_type = other RNA
aatggcgctcccatctgattaccccgagcgccatcaccagcgactatgtcgtagtgggtaaagctccctcttcggagggagcatcgggg

SEQ ID NO: 13368 - RNA, 89 nt, synthetic construct
  misc_feature 1..89: note = engineered ribonucleic acid scaffold (ERS) sequence
  source 1..89: mol_type = other RNA
aatggcgctcctatctgattactccgagcgccatcaccagcgactatgtcgtagtgggtaaagctccctcttcggagggagcatcggag

SEQ ID NO: 13369 - RNA, 89 nt, synthetic construct
  misc_feature 1..89: note = engineered ribonucleic acid scaffold (ERS) sequence
  source 1..89: mol_type = other RNA
aatggcgctgggatctgattaccccgagcgccatcaccagcgactatgtcgtagtgggtaaagctccctcttcggagggagcatcgggg

SEQ ID NO: 13370 - RNA, 89 nt, synthetic construct
  misc_feature 1..89: note = engineered ribonucleic acid scaffold (ERS) sequence
  source 1..89: mol_type = other RNA
aatggcgctggtatctgattactccgagcgccatcaccagcgactatgtcgtagtgggtaaagctccctcttcggagggagcatcggag

SEQ ID NO: 13371 - RNA, 89 nt, synthetic construct
  misc_feature 1..89: note = engineered ribonucleic acid scaffold (ERS) sequence
  source 1..89: mol_type = other RNA
aatggcgcttccatctgattaccctgagcgccatcaccagcgactatgtcgtagtgggtaaagctccctcttcggagggagcatcaggg

SEQ ID NO: 13372 - RNA, 89 nt, synthetic construct
  misc_feature 1..89: note = engineered ribonucleic acid scaffold (ERS) sequence
  source 1..89: mol_type = other RNA
aatggcgcttggatctgattaccctgagcgccatcaccagcgactatgtcgtagtgggtaaagctccctcttcggagggagcatcaggg

SEQ ID NO: 13373 - RNA, 89 nt, synthetic construct
  misc_feature 1..89: note = engineered ribonucleic acid scaffold (ERS) sequence
  source 1..89: mol_type = other RNA
aatggcgcttgtatctgattactctgagcgccatcaccagcgactatgtcgtagtgggtaaagctccctcttcggagggagcatcagag

SEQ ID NO: 13374 - RNA, 89 nt, synthetic construct
  misc_feature 1..89: note = engineered ribonucleic acid scaffold (ERS) sequence
  source 1..89: mol_type = other RNA
aatggcgcttttatctgattactttgagcgccatcaccagcgactatgtcgtagtgggtaaagctccctcttcggagggagcatcagag

SEQ ID NO: 13375 - RNA, 89 nt, synthetic construct
  misc_feature 1..89: note = engineered ribonucleic acid scaffold (ERS) sequence
  source 1..89: mol_type = other RNA
aatggcgcttttatctgattactctgagcgccatcaccagcgactatgtcgtagtgggtaaagctccctcttcggagggagcatcagag

SEQ ID NO: 13376 - RNA, 89 nt, synthetic construct
  misc_feature 1..89: note = engineered ribonucleic acid scaffold (ERS) sequence
  source 1..89: mol_type = other RNA
aatggcgcttttatctgattactctgagcgccatcaccagcgactatgtcgtagtgggtaaagctccctcttcggagggagcatcaaag

SEQ ID NO: 13377 - RNA, 89 nt, synthetic construct
  misc_feature 1..89: note = engineered ribonucleic acid scaffold (ERS) sequence
  source 1..89: mol_type = other RNA
aatggcgcttctatctgattactctgagcgccatcaccagcgactatgtcgtagtgggtaaagctccctcttcggagggagcctcagag

SEQ ID NO: 13378 - RNA, 89 nt, synthetic construct
  misc_feature 1..89: note = engineered ribonucleic acid scaffold (ERS) sequence
  source 1..89: mol_type = other RNA
aatggcgcttctatctgattactctgagcgccatcaccagcgactatgtcgtagtgggtaaagctccctcttcggagggagcgtcagag

SEQ ID NO: 13379 - RNA, 89 nt, synthetic construct
  misc_feature 1..89: note = engineered ribonucleic acid scaffold (ERS) sequence
  source 1..89: mol_type = other RNA
aatggcgcttctatctgattactctgagcgccatcaccagcgactatgtcgtagtgggtaaagctccctcttcggagggagcatcaaag

SEQ ID NO: 13380 - RNA, 89 nt, synthetic construct
  misc_feature 1..89: note = engineered ribonucleic acid scaffold (ERS) sequence
  source 1..89: mol_type = other RNA
agtggcgcttctatctgattactctcagcgccatcaccagcgactatgtcgtagtgggtaaagctccctcttcggagggagcatcagac

SEQ ID NO: 13381 - RNA, 89 nt, synthetic construct
  misc_feature 1..89: note = engineered ribonucleic acid scaffold (ERS) sequence
  source 1..89: mol_type = other RNA
agtggcgcttctatctgattactttgagcgccatcaccagcgactatgtcgtagtgggtaaagctccctcttcggagggagcatcagag

SEQ ID NO: 13382 - RNA, 89 nt, synthetic construct
  misc_feature 1..89: note = engineered ribonucleic acid scaffold (ERS) sequence
  source 1..89: mol_type = other RNA
agtggcgcttctatctgattactttgagcgccatcaccagcgactatgtcgtagtgggtaaagctccctcttcggagggagcatcaaag

SEQ ID NO: 13383 - RNA, 89 nt, synthetic construct
  misc_feature 1..89: note = engineered ribonucleic acid scaffold (ERS) sequence
  source 1..89: mol_type = other RNA
agtggcgcttctatctgattagtctcagcgccatcaccagcgactatgtcgtagtgggtaaagctccctcttcggagggagcatgagac

SEQ ID NO: 13384 - RNA, 89 nt, synthetic construct
  misc_feature 1..89: note = engineered ribonucleic acid scaffold (ERS) sequence
  source 1..89: mol_type = other RNA
agtggcgcttctatctgattagtctgagcgccatcaccagcgactatgtcgtagtgggtaaagctccctcttcggagggagcatcagac

SEQ ID NO: 13385 - RNA, 89 nt, synthetic construct
  misc_feature 1..89: note = engineered ribonucleic acid scaffold (ERS) sequence
  source 1..89: mol_type = other RNA
agtggcgcttctatctgattactctcagcgccatcaccagcgactatgtcgtagtgggtaaagctccctcttcggagggagcatgagag

SEQ ID NO: 13386 - RNA, 89 nt, synthetic construct
  misc_feature 1..89: note = engineered ribonucleic acid scaffold (ERS) sequence
  source 1..89: mol_type = other RNA
agtggcgctcccatctgattaccccgagcgccatcaccagcgactatgtcgtagtgggtaaagctccctcttcggagggagcatcgggg

SEQ ID NO: 13387 - RNA, 89 nt, synthetic construct
  misc_feature 1..89: note = engineered ribonucleic acid scaffold (ERS) sequence
  source 1..89: mol_type = other RNA
agtggcgctcctatctgattactccgagcgccatcaccagcgactatgtcgtagtgggtaaagctccctcttcggagggagcatcggag

SEQ ID NO: 13388 - RNA, 89 nt, synthetic construct
  misc_feature 1..89: note = engineered ribonucleic acid scaffold (ERS) sequence
  source 1..89: mol_type = other RNA
agtggcgctgggatctgattaccccgagcgccatcaccagcgactatgtcgtagtgggtaaagctccctcttcggagggagcatcgggg

SEQ ID NO: 13389 - RNA, 89 nt, synthetic construct
  misc_feature 1..89: note = engineered ribonucleic acid scaffold (ERS) sequence
  source 1..89: mol_type = other RNA
agtggcgctggtatctgattactccgagcgccatcaccagcgactatgtcgtagtgggtaaagctccctcttcggagggagcatcggag

SEQ ID NO: 13390 - RNA, 89 nt, synthetic construct
  misc_feature 1..89: note = engineered ribonucleic acid scaffold (ERS) sequence
  source 1..89: mol_type = other RNA
agtggcgcttccatctgattaccctgagcgccatcaccagcgactatgtcgtagtgggtaaagctccctcttcggagggagcatcaggg

SEQ ID NO: 13391 - RNA, 89 nt, synthetic construct
  misc_feature 1..89: note = engineered ribonucleic acid scaffold (ERS) sequence
  source 1..89: mol_type = other RNA
agtggcgcttggatctgattaccctgagcgccatcaccagcgactatgtcgtagtgggtaaagctccctcttcggagggagcatcaggg

SEQ ID NO: 13392 - RNA, 89 nt, synthetic construct
  misc_feature 1..89: note = engineered ribonucleic acid scaffold (ERS) sequence
  source 1..89: mol_type = other RNA
agtggcgcttgtatctgattactctgagcgccatcaccagcgactatgtcgtagtgggtaaagctccctcttcggagggagcatcagag

SEQ ID NO: 13393 - RNA, 89 nt, synthetic construct
  misc_feature 1..89: note = engineered ribonucleic acid scaffold (ERS) sequence
  source 1..89: mol_type = other RNA
agtggcgcttttatctgattactttgagcgccatcaccagcgactatgtcgtagtgggtaaagctccctcttcggagggagcatcagag

SEQ ID NO: 13394 - RNA, 89 nt, synthetic construct
  misc_feature 1..89: note = engineered ribonucleic acid scaffold (ERS) sequence
  source 1..89: mol_type = other RNA
agtggcgcttttatctgattactctgagcgccatcaccagcgactatgtcgtagtgggtaaagctccctcttcggagggagcatcagag

SEQ ID NO: 13395 - RNA, 89 nt, synthetic construct
  misc_feature 1..89: note = engineered ribonucleic acid scaffold (ERS) sequence
  source 1..89: mol_type = other RNA
agtggcgcttttatctgattactctgagcgccatcaccagcgactatgtcgtagtgggtaaagctccctcttcggagggagcatcaaag

SEQ ID NO: 13396 - RNA, 89 nt, synthetic construct
  misc_feature 1..89: note = engineered ribonucleic acid scaffold (ERS) sequence
  source 1..89: mol_type = other RNA
agtggcgcttctatctgattactctgagcgccatcaccagcgactatgtcgtagtgggtaaagctccctcttcggagggagcctcagag

SEQ ID NO: 13397 - RNA, 89 nt, synthetic construct
  misc_feature 1..89: note = engineered ribonucleic acid scaffold (ERS) sequence
  source 1..89: mol_type = other RNA
agtggcgcttctatctgattactctgagcgccatcaccagcgactatgtcgtagtgggtaaagctccctcttcggagggagcgtcagag

SEQ ID NO: 13398 - RNA, 89 nt, synthetic construct
  misc_feature 1..89: note = engineered ribonucleic acid scaffold (ERS) sequence
  source 1..89: mol_type = other RNA
agtggcgcttctatctgattactctgagcgccatcaccagcgactatgtcgtagtgggtaaagctccctcttcggagggagcatcaaag

SEQ ID NO: 13399 - RNA, 88 nt, synthetic construct
  misc_feature 1..88: note = engineered ribonucleic acid scaffold (ERS) sequence
  source 1..88: mol_type = other RNA
acggcgcttctatctgattactctcagcgccatcaccagcgactatgtcgtagtgggtaaagctccctcttcggagggagcatcagac

SEQ ID NO: 13400 - RNA, 88 nt, synthetic construct
  misc_feature 1..88: note = engineered ribonucleic acid scaffold (ERS) sequence
  source 1..88: mol_type = other RNA
acggcgcttctatctgattactttgagcgccatcaccagcgactatgtcgtagtgggtaaagctccctcttcggagggagcatcagag

SEQ ID NO: 13401 - RNA, 88 nt, synthetic construct
  misc_feature 1..88: note = engineered ribonucleic acid scaffold (ERS) sequence
  source 1..88: mol_type = other RNA
acggcgcttctatctgattactttgagcgccatcaccagcgactatgtcgtagtgggtaaagctccctcttcggagggagcatcaaag

SEQ ID NO: 13402 - RNA, 88 nt, synthetic construct
  misc_feature 1..88: note = engineered ribonucleic acid scaffold (ERS) sequence
  source 1..88: mol_type = other RNA
acggcgcttctatctgattagtctcagcgccatcaccagcgactatgtcgtagtgggtaaagctccctcttcggagggagcatgagac

SEQ ID NO: 13403 - RNA, 88 nt, synthetic construct
  misc_feature 1..88: note = engineered ribonucleic acid scaffold (ERS) sequence
  source 1..88: mol_type = other RNA
acggcgcttctatctgattagtctgagcgccatcaccagcgactatgtcgtagtgggtaaagctccctcttcggagggagcatcagac

SEQ ID NO: 13404 - RNA, 88 nt, synthetic construct
  misc_feature 1..88: note = engineered ribonucleic acid scaffold (ERS) sequence
  source 1..88: mol_type = other RNA
acggcgcttctatctgattactctcagcgccatcaccagcgactatgtcgtagtgggtaaagctccctcttcggagggagcatgagag

SEQ ID NO: 13405 - RNA, 88 nt, synthetic construct
  misc_feature 1..88: note = engineered ribonucleic acid scaffold (ERS) sequence
  source 1..88: mol_type = other RNA
acggcgctcccatctgattaccccgagcgccatcaccagcgactatgtcgtagtgggtaaagctccctcttcggagggagcatcgggg

SEQ ID NO: 13406 - RNA, 88 nt, synthetic construct
  misc_feature 1..88: note = engineered ribonucleic acid scaffold (ERS) sequence
  source 1..88: mol_type = other RNA
acggcgctcctatctgattactccgagcgccatcaccagcgactatgtcgtagtgggtaaagctccctcttcggagggagcatcggag

SEQ ID NO: 13407 - RNA, 88 nt, synthetic construct
  misc_feature 1..88: note = engineered ribonucleic acid scaffold (ERS) sequence
  source 1..88: mol_type = other RNA
acggcgctgggatctgattaccccgagcgccatcaccagcgactatgtcgtagtgggtaaagctccctcttcggagggagcatcgggg

SEQ ID NO: 13408 - RNA, 88 nt, synthetic construct
  misc_feature 1..88: note = engineered ribonucleic acid scaffold (ERS) sequence
  source 1..88: mol_type = other RNA
acggcgctggtatctgattactccgagcgccatcaccagcgactatgtcgtagtgggtaaagctccctcttcggagggagcatcggag

SEQ ID NO: 13409 - RNA, 88 nt, synthetic construct
  misc_feature 1..88: note = engineered ribonucleic acid scaffold (ERS) sequence
  source 1..88: mol_type = other RNA
acggcgcttccatctgattaccctgagcgccatcaccagcgactatgtcgtagtgggtaaagctccctcttcggagggagcatcaggg

SEQ ID NO: 13410 - RNA, 88 nt, synthetic construct
  misc_feature 1..88: note = engineered ribonucleic acid scaffold (ERS) sequence
  source 1..88: mol_type = other RNA
acggcgcttggatctgattaccctgagcgccatcaccagcgactatgtcgtagtgggtaaagctccctcttcggagggagcatcaggg

SEQ ID NO: 13411 - RNA, 88 nt, synthetic construct
  misc_feature 1..88: note = engineered ribonucleic acid scaffold (ERS) sequence
  source 1..88: mol_type = other RNA
acggcgcttgtatctgattactctgagcgccatcaccagcgactatgtcgtagtgggtaaagctccctcttcggagggagcatcagag

SEQ ID NO: 13412 - RNA, 88 nt, synthetic construct
  misc_feature 1..88: note = engineered ribonucleic acid scaffold (ERS) sequence
  source 1..88: mol_type = other RNA
acggcgcttttatctgattactttgagcgccatcaccagcgactatgtcgtagtgggtaaagctccctcttcggagggagcatcagag

SEQ ID NO: 13413 - RNA, 88 nt, synthetic construct
  misc_feature 1..88: note = engineered ribonucleic acid scaffold (ERS) sequence
  source 1..88: mol_type = other RNA
acggcgcttttatctgattactctgagcgccatcaccagcgactatgtcgtagtgggtaaagctccctcttcggagggagcatcagag

SEQ ID NO: 13414 - RNA, 88 nt, synthetic construct
  misc_feature 1..88: note = engineered ribonucleic acid scaffold (ERS) sequence
  source 1..88: mol_type = other RNA
acggcgcttttatctgattactctgagcgccatcaccagcgactatgtcgtagtgggtaaagctccctcttcggagggagcatcaaag

SEQ ID NO: 13415 - RNA, 88 nt, synthetic construct
  misc_feature 1..88: note = engineered ribonucleic acid scaffold (ERS) sequence
  source 1..88: mol_type = other RNA
acggcgcttctatctgattactctgagcgccatcaccagcgactatgtcgtagtgggtaaagctccctcttcggagggagcctcagag

SEQ ID NO: 13416 - RNA, 88 nt, synthetic construct
  misc_feature 1..88: note = engineered ribonucleic acid scaffold (ERS) sequence
  source 1..88: mol_type = other RNA
acggcgcttctatctgattactctgagcgccatcaccagcgactatgtcgtagtgggtaaagctccctcttcggagggagcgtcagag

SEQ ID NO: 13417 - RNA, 88 nt, synthetic construct
  misc_feature 1..88: note = engineered ribonucleic acid scaffold (ERS) sequence
  source 1..88: mol_type = other RNA
acggcgcttctatctgattactctgagcgccatcaccagcgactatgtcgtagtgggtaaagctccctcttcggagggagcatcaaag

SEQ ID NO: 13418 - RNA, 89 nt, synthetic construct
  misc_feature 1..89: note = engineered ribonucleic acid scaffold (ERS) sequence
  source 1..89: mol_type = other RNA
acaggcgcttctatctgattactctcagcgccatcaccagcgactatgtcgtagtgggtaaagctccctcttcggagggagcatcagac

SEQ ID NO: 13419 - RNA, 89 nt, synthetic construct
  misc_feature 1..89: note = engineered ribonucleic acid scaffold (ERS) sequence
  source 1..89: mol_type = other RNA
acaggcgcttctatctgattactttgagcgccatcaccagcgactatgtcgtagtgggtaaagctccctcttcggagggagcatcagag

SEQ ID NO: 13420 - RNA, 89 nt, synthetic construct
  misc_feature 1..89: note = engineered ribonucleic acid scaffold (ERS) sequence
  source 1..89: mol_type = other RNA
acaggcgcttctatctgattactttgagcgccatcaccagcgactatgtcgtagtgggtaaagctccctcttcggagggagcatcaaag

SEQ ID NO: 13421 - RNA, 89 nt, synthetic construct
  misc_feature 1..89: note = engineered ribonucleic acid scaffold (ERS) sequence
  source 1..89: mol_type = other RNA
acaggcgcttctatctgattagtctcagcgccatcaccagcgactatgtcgtagtgggtaaagctccctcttcggagggagcatgagac

SEQ ID NO: 13422 - RNA, 89 nt, synthetic construct
  misc_feature 1..89: note = engineered ribonucleic acid scaffold (ERS) sequence
  source 1..89: mol_type = other RNA
acaggcgcttctatctgattagtctgagcgccatcaccagcgactatgtcgtagtgggtaaagctccctcttcggagggagcatcagac

SEQ ID NO: 13423 - RNA, 89 nt, synthetic construct
  misc_feature 1..89: note = engineered ribonucleic acid scaffold (ERS) sequence
  source 1..89: mol_type = other RNA
acaggcgcttctatctgattactctcagcgccatcaccagcgactatgtcgtagtgggtaaagctccctcttcggagggagcatgagag

SEQ ID NO: 13424 - RNA, 89 nt, synthetic construct
  misc_feature 1..89: note = engineered ribonucleic acid scaffold (ERS) sequence
  source 1..89: mol_type = other RNA
acaggcgctcccatctgattaccccgagcgccatcaccagcgactatgtcgtagtgggtaaagctccctcttcggagggagcatcgggg

SEQ ID NO: 13425 - RNA, 89 nt, synthetic construct
  misc_feature 1..89: note = engineered ribonucleic acid scaffold (ERS) sequence
  source 1..89: mol_type = other RNA
acaggcgctcctatctgattactccgagcgccatcaccagcgactatgtcgtagtgggtaaagctccctcttcggagggagcatcggag

SEQ ID NO: 13426 - RNA, 89 nt, synthetic construct
  misc_feature 1..89: note = engineered ribonucleic acid scaffold (ERS) sequence
  source 1..89: mol_type = other RNA
acaggcgctgggatctgattaccccgagcgccatcaccagcgactatgtcgtagtgggtaaagctccctcttcggagggagcatcgggg

SEQ ID NO: 13427 - RNA, 89 nt, synthetic construct
  misc_feature 1..89: note = engineered ribonucleic acid scaffold (ERS) sequence
  source 1..89: mol_type = other RNA
acaggcgctggtatctgattactccgagcgccatcaccagcgactatgtcgtagtgggtaaagctccctcttcggagggagcatcggag

SEQ ID NO: 13428 - RNA, 89 nt, synthetic construct
  misc_feature 1..89: note = engineered ribonucleic acid scaffold (ERS) sequence
  source 1..89: mol_type = other RNA
acaggcgcttccatctgattaccctgagcgccatcaccagcgactatgtcgtagtgggtaaagctccctcttcggagggagcatcaggg

SEQ ID NO: 13429 - RNA, 89 nt, synthetic construct
  misc_feature 1..89: note = engineered ribonucleic acid scaffold (ERS) sequence
  source 1..89: mol_type = other RNA
acaggcgcttggatctgattaccctgagcgccatcaccagcgactatgtcgtagtgggtaaagctccctcttcggagggagcatcaggg

SEQ ID NO: 13430 - RNA, 89 nt, synthetic construct
  misc_feature 1..89: note = engineered ribonucleic acid scaffold (ERS) sequence
  source 1..89: mol_type = other RNA
acaggcgcttgtatctgattactctgagcgccatcaccagcgactatgtcgtagtgggtaaagctccctcttcggagggagcatcagag

SEQ ID NO: 13431 - RNA, 89 nt, synthetic construct
  misc_feature 1..89: note = engineered ribonucleic acid scaffold (ERS) sequence
  source 1..89: mol_type = other RNA
acaggcgcttttatctgattactttgagcgccatcaccagcgactatgtcgtagtgggtaaagctccctcttcggagggagcatcagag

SEQ ID NO: 13432 - RNA, 89 nt, synthetic construct
  misc_feature 1..89: note = engineered ribonucleic acid scaffold (ERS) sequence
  source 1..89: mol_type = other RNA
acaggcgcttttatctgattactctgagcgccatcaccagcgactatgtcgtagtgggtaaagctccctcttcggagggagcatcagag

SEQ ID NO: 13433 - RNA, 89 nt, synthetic construct
  misc_feature 1..89: note = engineered ribonucleic acid scaffold (ERS) sequence
  source 1..89: mol_type = other RNA
acaggcgcttttatctgattactctgagcgccatcaccagcgactatgtcgtagtgggtaaagctccctcttcggagggagcatcaaag

SEQ ID NO: 13434 - RNA, 89 nt, synthetic construct
  misc_feature 1..89: note = engineered ribonucleic acid scaffold (ERS) sequence
  source 1..89: mol_type = other RNA
acaggcgcttctatctgattactctgagcgccatcaccagcgactatgtcgtagtgggtaaagctccctcttcggagggagcctcagag

SEQ ID NO: 13435 - RNA, 89 nt, synthetic construct
  misc_feature 1..89: note = engineered ribonucleic acid scaffold (ERS) sequence
  source 1..89: mol_type = other RNA
acaggcgcttctatctgattactctgagcgccatcaccagcgactatgtcgtagtgggtaaagctccctcttcggagggagcgtcagag

SEQ ID NO: 13436 - RNA, 89 nt, synthetic construct
  misc_feature 1..89: note = engineered ribonucleic acid scaffold (ERS) sequence
  source 1..89: mol_type = other RNA
acaggcgcttctatctgattactctgagcgccatcaccagcgactatgtcgtagtgggtaaagctccctcttcggagggagcatcaaag

SEQ ID NO: 13437 - RNA, 89 nt, synthetic construct
  misc_feature 1..89: note = engineered ribonucleic acid scaffold (ERS) sequence
  source 1..89: mol_type = other RNA
acgggcgcttctatctgattactctcagcgccatcaccagcgactatgtcgtagtgggtaaagctccctcttcggagggagcatcagac

SEQ ID NO: 13438 - RNA, 89 nt, synthetic construct
  misc_feature 1..89: note = engineered ribonucleic acid scaffold (ERS) sequence
  source 1..89: mol_type = other RNA
acgggcgcttctatctgattactttgagcgccatcaccagcgactatgtcgtagtgggtaaagctccctcttcggagggagcatcagag

SEQ ID NO: 13439 - RNA, 89 nt, synthetic construct
  misc_feature 1..89: note = engineered ribonucleic acid scaffold (ERS) sequence
  source 1..89: mol_type = other RNA
acgggcgcttctatctgattactttgagcgccatcaccagcgactatgtcgtagtgggtaaagctccctcttcggagggagcatcaaag

SEQ ID NO: 13440 - RNA, 89 nt, synthetic construct
  misc_feature 1..89: note = engineered ribonucleic acid scaffold (ERS) sequence
  source 1..89: mol_type = other RNA
acgggcgcttctatctgattagtctcagcgccatcaccagcgactatgtcgtagtgggtaaagctccctcttcggagggagcatgagac

SEQ ID NO: 13441 - RNA, 89 nt, synthetic construct
  misc_feature 1..89: note = engineered ribonucleic acid scaffold (ERS) sequence
  source 1..89: mol_type = other RNA
acgggcgcttctatctgattagtctgagcgccatcaccagcgactatgtcgtagtgggtaaagctccctcttcggagggagcatcagac

SEQ ID NO: 13442 - RNA, 89 nt, synthetic construct
  misc_feature 1..89: note = engineered ribonucleic acid scaffold (ERS) sequence
  source 1..89: mol_type = other RNA
acgggcgcttctatctgattactctcagcgccatcaccagcgactatgtcgtagtgggtaaagctccctcttcggagggagcatgagag

SEQ ID NO: 13443 - RNA, 89 nt, synthetic construct
  misc_feature 1..89: note = engineered ribonucleic acid scaffold (ERS) sequence
  source 1..89: mol_type = other RNA
acgggcgctcccatctgattaccccgagcgccatcaccagcgactatgtcgtagtgggtaaagctccctcttcggagggagcatcgggg

SEQ ID NO: 13444 - RNA, 89 nt, synthetic construct
  misc_feature 1..89: note = engineered ribonucleic acid scaffold (ERS) sequence
  source 1..89: mol_type = other RNA
acgggcgctcctatctgattactccgagcgccatcaccagcgactatgtcgtagtgggtaaagctccctcttcggagggagcatcggag

SEQ ID NO: 13445 - RNA, 89 nt, synthetic construct
  misc_feature 1..89: note = engineered ribonucleic acid scaffold (ERS) sequence
  source 1..89: mol_type = other RNA
acgggcgctgggatctgattaccccgagcgccatcaccagcgactatgtcgtagtgggtaaagctccctcttcggagggagcatcgggg

SEQ ID NO: 13446 - RNA, 89 nt, synthetic construct
  misc_feature 1..89: note = engineered ribonucleic acid scaffold (ERS) sequence
  source 1..89: mol_type = other RNA
acgggcgctggtatctgattactccgagcgccatcaccagcgactatgtcgtagtgggtaaagctccctcttcggagggagcatcggag

SEQ ID NO: 13447 - RNA, 89 nt, synthetic construct
  misc_feature 1..89: note = engineered ribonucleic acid scaffold (ERS) sequence
  source 1..89: mol_type = other RNA
acgggcgcttccatctgattaccctgagcgccatcaccagcgactatgtcgtagtgggtaaagctccctcttcggagggagcatcaggg

SEQ ID NO: 13448 - RNA, 89 nt, synthetic construct
  misc_feature 1..89: note = engineered ribonucleic acid scaffold (ERS) sequence
  source 1..89: mol_type = other RNA
acgggcgcttggatctgattaccctgagcgccatcaccagcgactatgtcgtagtgggtaaagctccctcttcggagggagcatcaggg

SEQ ID NO: 13449 - RNA, 89 nt, synthetic construct
  misc_feature 1..89: note = engineered ribonucleic acid scaffold (ERS) sequence
  source 1..89: mol_type = other RNA
acgggcgcttgtatctgattactctgagcgccatcaccagcgactatgtcgtagtgggtaaagctccctcttcggagggagcatcagag

SEQ ID NO: 13450 - RNA, 89 nt, synthetic construct
  misc_feature 1..89: note = engineered ribonucleic acid scaffold (ERS) sequence
  source 1..89: mol_type = other RNA
acgggcgcttttatctgattactttgagcgccatcaccagcgactatgtcgtagtgggtaaagctccctcttcggagggagcatcagag

SEQ ID NO: 13451 - RNA, 89 nt, synthetic construct
  misc_feature 1..89: note = engineered ribonucleic acid scaffold (ERS) sequence
  source 1..89: mol_type = other RNA
acgggcgcttttatctgattactctgagcgccatcaccagcgactatgtcgtagtgggtaaagctccctcttcggagggagcatcagag

SEQ ID NO: 13452 - RNA, 89 nt, synthetic construct
  misc_feature 1..89: note = engineered ribonucleic acid scaffold (ERS) sequence
  source 1..89: mol_type = other RNA
acgggcgcttttatctgattactctgagcgccatcaccagcgactatgtcgtagtgggtaaagctccctcttcggagggagcatcaaag

SEQ ID NO: 13453 - RNA, 89 nt, synthetic construct
  misc_feature 1..89: note = engineered ribonucleic acid scaffold (ERS) sequence
  source 1..89: mol_type = other RNA
acgggcgcttctatctgattactctgagcgccatcaccagcgactatgtcgtagtgggtaaagctccctcttcggagggagcctcagag

SEQ ID NO: 13454 - RNA, 89 nt, synthetic construct
  misc_feature 1..89: note = engineered ribonucleic acid scaffold (ERS) sequence
  source 1..89: mol_type = other RNA
acgggcgcttctatctgattactctgagcgccatcaccagcgactatgtcgtagtgggtaaagctccctcttcggagggagcgtcagag

SEQ ID NO: 13455 - RNA, 89 nt, synthetic construct
  misc_feature 1..89: note = engineered ribonucleic acid scaffold (ERS) sequence
  source 1..89: mol_type = other RNA
acgggcgcttctatctgattactctgagcgccatcaccagcgactatgtcgtagtgggtaaagctccctcttcggagggagcatcaaag

SEQ ID NO: 13456 - RNA, 90 nt, synthetic construct
  misc_feature 1..90: note = engineered ribonucleic acid scaffold (ERS) sequence
  source 1..90: mol_type = other RNA
actaggcgcttctatctgattactctcagcgccatcaccagcgactatgtcgtagtgggtaaagctccctcttcggagggagcatcagac

SEQ ID NO: 13457 - RNA, 90 nt, synthetic construct
  misc_feature 1..90: note = engineered ribonucleic acid scaffold (ERS) sequence
  source 1..90: mol_type = other RNA
actaggcgcttctatctgattactttgagcgccatcaccagcgactatgtcgtagtgggtaaagctccctcttcggagggagcatcagag

SEQ ID NO: 13458 - RNA, 90 nt, synthetic construct
  misc_feature 1..90: note = engineered ribonucleic acid scaffold (ERS) sequence
  source 1..90: mol_type = other RNA
actaggcgcttctatctgattactttgagcgccatcaccagcgactatgtcgtagtgggtaaagctccctcttcggagggagcatcaaag

SEQ ID NO: 13459 - RNA, 90 nt, synthetic construct
  misc_feature 1..90: note = engineered ribonucleic acid scaffold (ERS) sequence
  source 1..90: mol_type = other RNA
actaggcgcttctatctgattagtctcagcgccatcaccagcgactatgtcgtagtgggtaaagctccctcttcggagggagcatgagac

SEQ ID NO: 13460 - RNA, 90 nt, synthetic construct
  misc_feature 1..90: note = engineered ribonucleic acid scaffold (ERS) sequence
  source 1..90: mol_type = other RNA
actaggcgcttctatctgattagtctgagcgccatcaccagcgactatgtcgtagtgggtaaagctccctcttcggagggagcatcagac

SEQ ID NO: 13461 - RNA, 90 nt, synthetic construct
  misc_feature 1..90: note = engineered ribonucleic acid scaffold (ERS) sequence
  source 1..90: mol_type = other RNA
actaggcgcttctatctgattactctcagcgccatcaccagcgactatgtcgtagtgggtaaagctccctcttcggagggagcatgagag

SEQ ID NO: 13462 - RNA, 90 nt, synthetic construct
  misc_feature 1..90: note = engineered ribonucleic acid scaffold (ERS) sequence
  source 1..90: mol_type = other RNA
actaggcgctcccatctgattaccccgagcgccatcaccagcgactatgtcgtagtgggtaaagctccctcttcggagggagcatcgggg

SEQ ID NO: 13463 - RNA, 90 nt, synthetic construct
  misc_feature 1..90: note = engineered ribonucleic acid scaffold (ERS) sequence
  source 1..90: mol_type = other RNA
actaggcgctcctatctgattactccgagcgccatcaccagcgactatgtcgtagtgggtaaagctccctcttcggagggagcatcggag

SEQ ID NO: 13464 - RNA, 90 nt, synthetic construct
  misc_feature 1..90: note = engineered ribonucleic acid scaffold (ERS) sequence
  source 1..90: mol_type = other RNA
actaggcgctgggatctgattaccccgagcgccatcaccagcgactatgtcgtagtgggtaaagctccctcttcggagggagcatcgggg

SEQ ID NO: 13465 - RNA, 90 nt, synthetic construct
  misc_feature 1..90: note = engineered ribonucleic acid scaffold (ERS) sequence
  source 1..90: mol_type = other RNA
actaggcgctggtatctgattactccgagcgccatcaccagcgactatgtcgtagtgggtaaagctccctcttcggagggagcatcggag

SEQ ID NO: 13466 - RNA, 90 nt, synthetic construct
  misc_feature 1..90: note = engineered ribonucleic acid scaffold (ERS) sequence
  source 1..90: mol_type = other RNA
actaggcgcttccatctgattaccctgagcgccatcaccagcgactatgtcgtagtgggtaaagctccctcttcggagggagcatcaggg

SEQ ID NO: 13467 - RNA, 90 nt, synthetic construct
  misc_feature 1..90: note = engineered ribonucleic acid scaffold (ERS) sequence
  source 1..90: mol_type = other RNA
actaggcgcttggatctgattaccctgagcgccatcaccagcgactatgtcgtagtgggtaaagctccctcttcggagggagcatcaggg

SEQ ID NO: 13468 - RNA, 90 nt, synthetic construct
  misc_feature 1..90: note = engineered ribonucleic acid scaffold (ERS) sequence
  source 1..90: mol_type = other RNA
actaggcgcttgtatctgattactctgagcgccatcaccagcgactatgtcgtagtgggtaaagctccctcttcggagggagcatcagag

SEQ ID NO: 13469 - RNA, 90 nt, synthetic construct
  misc_feature 1..90: note = engineered ribonucleic acid scaffold (ERS) sequence
  source 1..90: mol_type = other RNA
actaggcgcttttatctgattactttgagcgccatcaccagcgactatgtcgtagtgggtaaagctccctcttcggagggagcatcagag

SEQ ID NO: 13470 - RNA, 90 nt, synthetic construct
  misc_feature 1..90: note = engineered ribonucleic acid scaffold (ERS) sequence
  source 1..90: mol_type = other RNA
actaggcgcttttatctgattactctgagcgccatcaccagcgactatgtcgtagtgggtaaagctccctcttcggagggagcatcagag

SEQ ID NO: 13471 - RNA, 90 nt, synthetic construct
  misc_feature 1..90: note = engineered ribonucleic acid scaffold (ERS) sequence
  source 1..90: mol_type = other RNA
actaggcgcttttatctgattactctgagcgccatcaccagcgactatgtcgtagtgggtaaagctccctcttcggagggagcatcaaag

SEQ ID NO: 13472 - RNA, 90 nt, synthetic construct
  misc_feature 1..90: note = engineered ribonucleic acid scaffold (ERS) sequence
  source 1..90: mol_type = other RNA
actaggcgcttctatctgattactctgagcgccatcaccagcgactatgtcgtagtgggtaaagctccctcttcggagggagcctcagag

SEQ ID NO: 13473 - RNA, 90 nt, synthetic construct
  misc_feature 1..90: note = engineered ribonucleic acid scaffold (ERS) sequence
  source 1..90: mol_type = other RNA
actaggcgcttctatctgattactctgagcgccatcaccagcgactatgtcgtagtgggtaaagctccctcttcggagggagcgtcagag

SEQ ID NO: 13474 - RNA, 90 nt, synthetic construct
  misc_feature 1..90: note = engineered ribonucleic acid scaffold (ERS) sequence
  source 1..90: mol_type = other RNA
actaggcgcttctatctgattactctgagcgccatcaccagcgactatgtcgtagtgggtaaagctccctcttcggagggagcatcaaag

SEQ ID NO: 13475 - RNA, 92 nt, synthetic construct
  misc_feature 1..92: note = engineered ribonucleic acid scaffold (ERS) sequence
  source 1..92: mol_type = other RNA
aactggcgcttctatatctgattactctgagcgccatcaccagcgactatgtcgtagtgggtaaagctccctcttcggagggagcatcagag

SEQ ID NO: 13476 - RNA, 91 nt, synthetic construct
  misc_feature 1..91: note = engineered ribonucleic acid scaffold (ERS) sequence
  source 1..91: mol_type = other RNA
aactggcgcttctaatctgattactctgagcgccatcaccagcgactatgtcgtagtgggtaaagctccctcttcggagggagcatcagag

SEQ ID NO: 13477 - RNA, 89 nt, synthetic construct
  misc_feature 1..89: note = engineered ribonucleic acid scaffold (ERS) sequence
  source 1..89: mol_type = other RNA
aactggcgcttctactgattactctgagcgccatcaccagcgactatgtcgtagtgggtaaagctccctcttcggagggagcatcagag

SEQ ID NO: 13478 - RNA, 90 nt, synthetic construct
  misc_feature 1..90: note = engineered ribonucleic acid scaffold (ERS) sequence
  source 1..90: mol_type = other RNA
aactggcgcttctaactgattactctgagcgccatcaccagcgactatgtcgtagtgggtaaagctccctcttcggagggagcatcagag

SEQ ID NO: 13479 - RNA, 90 nt, synthetic construct
  misc_feature 1..90: note = engineered ribonucleic acid scaffold (ERS) sequence
  source 1..90: mol_type = other RNA
aactggcgcttctacctgattactctgagcgccatcaccagcgactatgtcgtagtgggtaaagctccctcttcggagggagcatcagag

SEQ ID NO: 13480 - RNA, 90 nt, synthetic construct
  misc_feature 1..90: note = engineered ribonucleic acid scaffold (ERS) sequence
  source 1..90: mol_type = other RNA
aactggcgcttctagctgattactctgagcgccatcaccagcgactatgtcgtagtgggtaaagctccctcttcggagggagcatcagag

SEQ ID NO: 13481 - RNA, 92 nt, synthetic construct
  misc_feature 1..92: note = engineered ribonucleic acid scaffold (ERS) sequence
  source 1..92: mol_type = other RNA
aactggcgcttctattactgattactctgagcgccatcaccagcgactatgtcgtagtgggtaaagctccctcttcggagggagcatcagag

SEQ ID NO: 13482 - RNA, 90 nt, synthetic construct
  misc_feature 1..90: note = engineered ribonucleic acid scaffold (ERS) sequence
  source 1..90: mol_type = other RNA
aactggcgcttctatatgattactctgagcgccatcaccagcgactatgtcgtagtgggtaaagctccctcttcggagggagcatcagag

SEQ ID NO: 13483 - RNA, 90 nt, synthetic construct
  misc_feature 1..90: note = engineered ribonucleic acid scaffold (ERS) sequence
  source 1..90: mol_type = other RNA
aactggcgcttctatgtgattactctgagcgccatcaccagcgactatgtcgtagtgggtaaagctccctcttcggagggagcatcagag

SEQ ID NO: 13484 - RNA, 90 nt, synthetic construct
  misc_feature 1..90: note = engineered ribonucleic acid scaffold (ERS) sequence
  source 1..90: mol_type = other RNA
aactggcgcttctatttgattactctgagcgccatcaccagcgactatgtcgtagtgggtaaagctccctcttcggagggagcatcagag

SEQ ID NO: 13485 - RNA, 91 nt, synthetic construct
  misc_feature 1..91: note = engineered ribonucleic acid scaffold (ERS) sequence
  source 1..91: mol_type = other RNA
aactggcgcttctatcttgattactctgagcgccatcaccagcgactatgtcgtagtgggtaaagctccctcttcggagggagcatcagag

SEQ ID NO: 13486 - RNA, 90 nt, synthetic construct
  misc_feature 1..90: note = engineered ribonucleic acid scaffold (ERS) sequence
  source 1..90: mol_type = other RNA
aactggcgcttctatcagattactctgagcgccatcaccagcgactatgtcgtagtgggtaaagctccctcttcggagggagcatcagag

SEQ ID NO: 13487 - RNA, 90 nt, synthetic construct
  misc_feature 1..90: note = engineered ribonucleic acid scaffold (ERS) sequence
  source 1..90: mol_type = other RNA
aactggcgcttctatcggattactctgagcgccatcaccagcgactatgtcgtagtgggtaaagctccctcttcggagggagcatcagag

SEQ ID NO: 13488 - RNA, 91 nt, synthetic construct
  misc_feature 1..91: note = engineered ribonucleic acid scaffold (ERS) sequence
  source 1..91: mol_type = other RNA
aactggcgcttctatctgaattactctgagcgccatcaccagcgactatgtcgtagtgggtaaagctccctcttcggagggagcatcagag

SEQ ID NO: 13489 - RNA, 91 nt, synthetic construct
  misc_feature 1..91: note = engineered ribonucleic acid scaffold (ERS) sequence
  source 1..91: mol_type = other RNA
aactggcgcttctatctgtattactctgagcgccatcaccagcgactatgtcgtagtgggtaaagctccctcttcggagggagcatcagag

SEQ ID NO: 13490 - RNA, 90 nt, synthetic construct
  misc_feature 1..90: note = engineered ribonucleic acid scaffold (ERS) sequence
  source 1..90: mol_type = other RNA
aactggcgcttctatctggttactctgagcgccatcaccagcgactatgtcgtagtgggtaaagctccctcttcggagggagcatcagag

SEQ ID NO: 13491 - RNA, 90 nt, synthetic construct
  misc_feature 1..90: note = engineered ribonucleic acid scaffold (ERS) sequence
  source 1..90: mol_type = other RNA
aactggcgcttctatctgtttactctgagcgccatcaccagcgactatgtcgtagtgggtaaagctccctcttcggagggagcatcagag

SEQ ID NO: 13492 - RNA, 91 nt, synthetic construct
  misc_feature 1..91: note = engineered ribonucleic acid scaffold (ERS) sequence
  source 1..91: mol_type = other RNA
aactggcgcttctatctgatttactctgagcgccatcaccagcgactatgtcgtagtgggtaaagctccctcttcggagggagcatcagag

SEQ ID NO: 13493 - RNA, 90 nt, synthetic construct
  misc_feature 1..90: note = engineered ribonucleic acid scaffold (ERS) sequence
  source 1..90: mol_type = other RNA
aactggcgcttctatctgattgctctgagcgccatcaccagcgactatgtcgtagtgggtaaagctccctcttcggagggagcatcagag

SEQ ID NO: 13494 - RNA, 89 nt, synthetic construct
  misc_feature 1..89: note = engineered ribonucleic acid scaffold (ERS) sequence
  source 1..89: mol_type = other RNA
gggcgcttctatatctgattactctgagcgccctcaccagcgactatgtcgtagtgggtaaagctccctcttcggagggagcatcagag

SEQ ID NO: 13495 - RNA, 88 nt, synthetic construct
  misc_feature 1..88: note = engineered ribonucleic acid scaffold (ERS) sequence
  source 1..88: mol_type = other RNA
gggcgcttctaatctgattactctgagcgccctcaccagcgactatgtcgtagtgggtaaagctccctcttcggagggagcatcagag

SEQ ID NO: 13496 - RNA, 86 nt, synthetic construct
  misc_feature 1..86: note = engineered ribonucleic acid scaffold (ERS) sequence
  source 1..86: mol_type = other RNA
gggcgcttctactgattactctgagcgccctcaccagcgactatgtcgtagtgggtaaagctccctcttcggagggagcatcagag

SEQ ID NO: 13497 - RNA, 87 nt, synthetic construct
  misc_feature 1..87: note = engineered ribonucleic acid scaffold (ERS) sequence
  source 1..87: mol_type = other RNA
gggcgcttctaactgattactctgagcgccctcaccagcgactatgtcgtagtgggtaaagctccctcttcggagggagcatcagag

SEQ ID NO: 13498 - RNA, 87 nt, synthetic construct
  misc_feature 1..87: note = engineered ribonucleic acid scaffold (ERS) sequence
  source 1..87: mol_type = other RNA
gggcgcttctacctgattactctgagcgccctcaccagcgactatgtcgtagtgggtaaagctccctcttcggagggagcatcagag

SEQ ID NO: 13499 - RNA, 87 nt, synthetic construct
  misc_feature 1..87: note = engineered ribonucleic acid scaffold (ERS) sequence
  source 1..87: mol_type = other RNA
gggcgcttctagctgattactctgagcgccctcaccagcgactatgtcgtagtgggtaaagctccctcttcggagggagcatcagag

SEQ ID NO: 13500 - RNA, 89 nt, synthetic construct
  misc_feature 1..89: note = engineered ribonucleic acid scaffold (ERS) sequence
  source 1..89: mol_type = other RNA
gggcgcttctattactgattactctgagcgccctcaccagcgactatgtcgtagtgggtaaagctccctcttcggagggagcatcagag

SEQ ID NO: 13501 - RNA, 87 nt, synthetic construct
  misc_feature 1..87: note = engineered ribonucleic acid scaffold (ERS) sequence
  source 1..87: mol_type = other RNA
gggcgcttctatatgattactctgagcgccctcaccagcgactatgtcgtagtgggtaaagctccctcttcggagggagcatcagag

SEQ ID NO: 13502 - RNA, 87 nt, synthetic construct
  misc_feature 1..87: note = engineered ribonucleic acid scaffold (ERS) sequence
  source 1..87: mol_type = other RNA
gggcgcttctatgtgattactctgagcgccctcaccagcgactatgtcgtagtgggtaaagctccctcttcggagggagcatcagag

SEQ ID NO: 13503 - RNA, 87 nt, synthetic construct
  misc_feature 1..87: note = engineered ribonucleic acid scaffold (ERS) sequence
  source 1..87: mol_type = other RNA
gggcgcttctatttgattactctgagcgccctcaccagcgactatgtcgtagtgggtaaagctccctcttcggagggagcatcagag

SEQ ID NO: 13504 - RNA, 88 nt, synthetic construct
  misc_feature 1..88: note = engineered ribonucleic acid scaffold (ERS) sequence
  source 1..88: mol_type = other RNA
gggcgcttctatcttgattactctgagcgccctcaccagcgactatgtcgtagtgggtaaagctccctcttcggagggagcatcagag

SEQ ID NO: 13505 - RNA, 87 nt, synthetic construct
  misc_feature 1..87: note = engineered ribonucleic acid scaffold (ERS) sequence
  source 1..87: mol_type = other RNA
gggcgcttctatcagattactctgagcgccctcaccagcgactatgtcgtagtgggtaaagctccctcttcggagggagcatcagag

SEQ ID NO: 13506 - RNA, 87 nt, synthetic construct
  misc_feature 1..87: note = engineered ribonucleic acid scaffold (ERS) sequence
  source 1..87: mol_type = other RNA
gggcgcttctatcggattactctgagcgccctcaccagcgactatgtcgtagtgggtaaagctccctcttcggagggagcatcagag

SEQ ID NO: 13507 - RNA, 88 nt, synthetic construct
  misc_feature 1..88: note = engineered ribonucleic acid scaffold (ERS) sequence
  source 1..88: mol_type = other RNA
gggcgcttctatctgaattactctgagcgccctcaccagcgactatgtcgtagtgggtaaagctccctcttcggagggagcatcagag

SEQ ID NO: 13508 - RNA, 88 nt, synthetic construct
  misc_feature 1..88: note = engineered ribonucleic acid scaffold (ERS) sequence
  source 1..88: mol_type = other RNA
gggcgcttctatctgtattactctgagcgccctcaccagcgactatgtcgtagtgggtaaagctccctcttcggagggagcatcagag

SEQ ID NO: 13509 - RNA, 87 nt, synthetic construct
  misc_feature 1..87: note = engineered ribonucleic acid scaffold (ERS) sequence
  source 1..87: mol_type = other RNA
gggcgcttctatctggttactctgagcgccctcaccagcgactatgtcgtagtgggtaaagctccctcttcggagggagcatcagag

SEQ ID NO: 13510 - RNA, 87 nt, synthetic construct
  misc_feature 1..87: note = engineered ribonucleic acid scaffold (ERS) sequence
  source 1..87: mol_type = other RNA
gggcgcttctatctgtttactctgagcgccctcaccagcgactatgtcgtagtgggtaaagctccctcttcggagggagcatcagag

SEQ ID NO: 13511 - RNA, 88 nt, synthetic construct
  misc_feature 1..88: note = engineered ribonucleic acid scaffold (ERS) sequence
  source 1..88: mol_type = other RNA
gggcgcttctatctgatttactctgagcgccctcaccagcgactatgtcgtagtgggtaaagctccctcttcggagggagcatcagag

SEQ ID NO: 13512 - RNA, 87 nt, synthetic construct
  misc_feature 1..87: note = engineered ribonucleic acid scaffold (ERS) sequence
  source 1..87: mol_type = other RNA
gggcgcttctatctgattgctctgagcgccctcaccagcgactatgtcgtagtgggtaaagctccctcttcggagggagcatcagag

SEQ ID NO: 13513 - RNA, 91 nt, synthetic construct
  misc_feature 1..91: note = engineered ribonucleic acid scaffold (ERS) sequence
  source 1..91: mol_type = other RNA
gctggcgcttctatatctgattactctgagcgccatcaccagcgactatgtcgtagtgggtaaagctccctcttcggagggagcatcagag

SEQ ID NO: 13514 - RNA, 90 nt, synthetic construct
  misc_feature 1..90: note = engineered ribonucleic acid scaffold (ERS) sequence
  source 1..90: mol_type = other RNA
gctggcgcttctaatctgattactctgagcgccatcaccagcgactatgtcgtagtgggtaaagctccctcttcggagggagcatcagag

SEQ ID NO: 13515 - RNA, 88 nt, synthetic construct
  misc_feature 1..88: note = engineered ribonucleic acid scaffold (ERS) sequence
  source 1..88: mol_type = other RNA
gctggcgcttctactgattactctgagcgccatcaccagcgactatgtcgtagtgggtaaagctccctcttcggagggagcatcagag

SEQ ID NO: 13516 - RNA, 89 nt, synthetic construct
  misc_feature 1..89: note = engineered ribonucleic acid scaffold (ERS) sequence
  source 1..89: mol_type = other RNA
gctggcgcttctaactgattactctgagcgccatcaccagcgactatgtcgtagtgggtaaagctccctcttcggagggagcatcagag

SEQ ID NO: 13517 - RNA, 89 nt, synthetic construct
  misc_feature 1..89: note = engineered ribonucleic acid scaffold (ERS) sequence
  source 1..89: mol_type = other RNA
gctggcgcttctacctgattactctgagcgccatcaccagcgactatgtcgtagtgggtaaagctccctcttcggagggagcatcagag

SEQ ID NO: 13518 - RNA, 89 nt, synthetic construct
  misc_feature 1..89: note = engineered ribonucleic acid scaffold (ERS) sequence
  source 1..89: mol_type = other RNA
gctggcgcttctagctgattactctgagcgccatcaccagcgactatgtcgtagtgggtaaagctccctcttcggagggagcatcagag

SEQ ID NO: 13519 - RNA, 91 nt, synthetic construct
  misc_feature 1..91: note = engineered ribonucleic acid scaffold (ERS) sequence
  source 1..91: mol_type = other RNA
gctggcgcttctattactgattactctgagcgccatcaccagcgactatgtcgtagtgggtaaagctccctcttcggagggagcatcagag

SEQ ID NO: 13520 - RNA, 89 nt, synthetic construct
  misc_feature 1..89: note = engineered ribonucleic acid scaffold (ERS) sequence
  source 1..89: mol_type = other RNA
gctggcgcttctatatgattactctgagcgccatcaccagcgactatgtcgtagtgggtaaagctccctcttcggagggagcatcagag

SEQ ID NO: 13521 - RNA, 89 nt, synthetic construct
  misc_feature 1..89: note = engineered ribonucleic acid scaffold (ERS) sequence
  source 1..89: mol_type = other RNA
gctggcgcttctatgtgattactctgagcgccatcaccagcgactatgtcgtagtgggtaaagctccctcttcggagggagcatcagag

SEQ ID NO: 13522 - RNA, 89 nt, synthetic construct
  misc_feature 1..89: note = engineered ribonucleic acid scaffold (ERS) sequence
  source 1..89: mol_type = other RNA
gctggcgcttctatttgattactctgagcgccatcaccagcgactatgtcgtagtgggtaaagctccctcttcggagggagcatcagag

SEQ ID NO: 13523 - RNA, 90 nt, synthetic construct
  misc_feature 1..90: note = engineered ribonucleic acid scaffold (ERS) sequence
  source 1..90: mol_type = other RNA
gctggcgcttctatcttgattactctgagcgccatcaccagcgactatgtcgtagtgggtaaagctccctcttcggagggagcatcagag

SEQ ID NO: 13524 - RNA, 89 nt, synthetic construct
  misc_feature 1..89: note = engineered ribonucleic acid scaffold (ERS) sequence
  source 1..89: mol_type = other RNA
gctggcgcttctatcagattactctgagcgccatcaccagcgactatgtcgtagtgggtaaagctccctcttcggagggagcatcagag

SEQ ID NO: 13525 - RNA, 89 nt, synthetic construct
  misc_feature 1..89: note = engineered ribonucleic acid scaffold (ERS) sequence
  source 1..89: mol_type = other RNA
gctggcgcttctatcggattactctgagcgccatcaccagcgactatgtcgtagtgggtaaagctccctcttcggagggagcatcagag

SEQ ID NO: 13526 - RNA, 90 nt, synthetic construct
  misc_feature 1..90: note = engineered ribonucleic acid scaffold (ERS) sequence
  source 1..90: mol_type = other RNA
gctggcgcttctatctgaattactctgagcgccatcaccagcgactatgtcgtagtgggtaaagctccctcttcggagggagcatcagag

SEQ ID NO: 13527 - RNA, 90 nt, synthetic construct
  misc_feature 1..90: note = engineered ribonucleic acid scaffold (ERS) sequence
  source 1..90: mol_type = other RNA
gctggcgcttctatctgtattactctgagcgccatcaccagcgactatgtcgtagtgggtaaagctccctcttcggagggagcatcagag

SEQ ID NO: 13528 - RNA, 89 nt, synthetic construct
  misc_feature 1..89: note = engineered ribonucleic acid scaffold (ERS) sequence
  source 1..89: mol_type = other RNA
gctggcgcttctatctggttactctgagcgccatcaccagcgactatgtcgtagtgggtaaagctccctcttcggagggagcatcagag

SEQ ID NO: 13529 - RNA, 89 nt, synthetic construct
  misc_feature 1..89: note = engineered ribonucleic acid scaffold (ERS) sequence
  source 1..89: mol_type = other RNA
gctggcgcttctatctgtttactctgagcgccatcaccagcgactatgtcgtagtgggtaaagctccctcttcggagggagcatcagag

SEQ ID NO: 13530 - RNA, 90 nt, synthetic construct
  misc_feature 1..90: note = engineered ribonucleic acid scaffold (ERS) sequence
  source 1..90: mol_type = other RNA
gctggcgcttctatctgatttactctgagcgccatcaccagcgactatgtcgtagtgggtaaagctccctcttcggagggagcatcagag

SEQ ID NO: 13531 - RNA, 89 nt, synthetic construct
  misc_feature 1..89: note = engineered ribonucleic acid scaffold (ERS) sequence
  source 1..89: mol_type = other RNA
gctggcgcttctatctgattgctctgagcgccatcaccagcgactatgtcgtagtgggtaaagctccctcttcggagggagcatcagag

SEQ ID NO: 13532 - RNA, 91 nt, synthetic construct
  misc_feature 1..91: note = engineered ribonucleic acid scaffold (ERS) sequence
  source 1..91: mol_type = other RNA
tatggcgcttctatatctgattactctgagcgccatcaccagcgactatgtcgtagtgggtaaagctccctcttcggagggagcatcagag

SEQ ID NO: 13533 - RNA, 90 nt, synthetic construct
  misc_feature 1..90: note = engineered ribonucleic acid scaffold (ERS) sequence
  source 1..90: mol_type = other RNA
tatggcgcttctaatctgattactctgagcgccatcaccagcgactatgtcgtagtgggtaaagctccctcttcggagggagcatcagag

SEQ ID NO: 13534 - RNA, 88 nt, synthetic construct
  misc_feature 1..88: note = engineered ribonucleic acid scaffold (ERS) sequence
  source 1..88: mol_type = other RNA
tatggcgcttctactgattactctgagcgccatcaccagcgactatgtcgtagtgggtaaagctccctcttcggagggagcatcagag

SEQ ID NO: 13535 - RNA, 89 nt, synthetic construct
  misc_feature 1..89: note = engineered ribonucleic acid scaffold (ERS) sequence
  source 1..89: mol_type = other RNA
tatggcgcttctaactgattactctgagcgccatcaccagcgactatgtcgtagtgggtaaagctccctcttcggagggagcatcagag

SEQ ID NO: 13536 - RNA, 89 nt, synthetic construct
  misc_feature 1..89: note = engineered ribonucleic acid scaffold (ERS) sequence
  source 1..89: mol_type = other RNA
tatggcgcttctacctgattactctgagcgccatcaccagcgactatgtcgtagtgggtaaagctccctcttcggagggagcatcagag

SEQ ID NO: 13537 - RNA, 89 nt, synthetic construct
  misc_feature 1..89: note = engineered ribonucleic acid scaffold (ERS) sequence
  source 1..89: mol_type = other RNA
tatggcgcttctagctgattactctgagcgccatcaccagcgactatgtcgtagtgggtaaagctccctcttcggagggagcatcagag

SEQ ID NO: 13538 - RNA, 91 nt, synthetic construct
  misc_feature 1..91: note = engineered ribonucleic acid scaffold (ERS) sequence
  source 1..91: mol_type = other RNA
tatggcgcttctattactgattactctgagcgccatcaccagcgactatgtcgtagtgggtaaagctccctcttcggagggagcatcagag

SEQ ID NO: 13539 - RNA, 89 nt, synthetic construct
  misc_feature 1..89: note = engineered ribonucleic acid scaffold (ERS) sequence
  source 1..89: mol_type = other RNA
tatggcgcttctatatgattactctgagcgccatcaccagcgactatgtcgtagtgggtaaagctccctcttcggagggagcatcagag

SEQ ID NO: 13540 - RNA, 89 nt, synthetic construct
  misc_feature 1..89: note = engineered ribonucleic acid scaffold (ERS) sequence
  source 1..89: mol_type = other RNA
tatggcgcttctatgtgattactctgagcgccatcaccagcgactatgtcgtagtgggtaaagctccctcttcggagggagcatcagag

SEQ ID NO: 13541 - RNA, 89 nt, synthetic construct
  misc_feature 1..89: note = engineered ribonucleic acid scaffold (ERS) sequence
  source 1..89: mol_type = other RNA
tatggcgcttctatttgattactctgagcgccatcaccagcgactatgtcgtagtgggtaaagctccctcttcggagggagcatcagag

SEQ ID NO: 13542 - RNA, 90 nt, synthetic construct
  misc_feature 1..90: note = engineered ribonucleic acid scaffold (ERS) sequence
  source 1..90: mol_type = other RNA
tatggcgcttctatcttgattactctgagcgccatcaccagcgactatgtcgtagtgggtaaagctccctcttcggagggagcatcagag

SEQ ID NO: 13543 - RNA, 89 nt, synthetic construct
  misc_feature 1..89: note = engineered ribonucleic acid scaffold (ERS) sequence
  source 1..89: mol_type = other RNA
tatggcgcttctatcagattactctgagcgccatcaccagcgactatgtcgtagtgggtaaagctccctcttcggagggagcatcagag

SEQ ID NO: 13544 - RNA, 89 nt, synthetic construct
  misc_feature 1..89: note = engineered ribonucleic acid scaffold (ERS) sequence
  source 1..89: mol_type = other RNA
tatggcgcttctatcggattactctgagcgccatcaccagcgactatgtcgtagtgggtaaagctccctcttcggagggagcatcagag

SEQ ID NO: 13545 - RNA, 90 nt, synthetic construct
  misc_feature 1..90: note = engineered ribonucleic acid scaffold (ERS) sequence
  source 1..90: mol_type = other RNA
tatggcgcttctatctgaattactctgagcgccatcaccagcgactatgtcgtagtgggtaaagctccctcttcggagggagcatcagag

SEQ ID NO: 13546 - RNA, 90 nt, synthetic construct
  misc_feature 1..90: note = engineered ribonucleic acid scaffold (ERS) sequence
  source 1..90: mol_type = other RNA
tatggcgcttctatctgtattactctgagcgccatcaccagcgactatgtcgtagtgggtaaagctccctcttcggagggagcatcagag

SEQ ID NO: 13547 - RNA, 89 nt, synthetic construct
  misc_feature 1..89: note = engineered ribonucleic acid scaffold (ERS) sequence
  source 1..89: mol_type = other RNA
tatggcgcttctatctggttactctgagcgccatcaccagcgactatgtcgtagtgggtaaagctccctcttcggagggagcatcagag

SEQ ID NO: 13548 - RNA, 89 nt, synthetic construct
  misc_feature 1..89: note = engineered ribonucleic acid scaffold (ERS) sequence
  source 1..89: mol_type = other RNA
tatggcgcttctatctgtttactctgagcgccatcaccagcgactatgtcgtagtgggtaaagctccctcttcggagggagcatcagag

SEQ ID NO: 13549 - RNA, 90 nt, synthetic construct
  misc_feature 1..90: note = engineered ribonucleic acid scaffold (ERS) sequence
  source 1..90: mol_type = other RNA
tatggcgcttctatctgatttactctgagcgccatcaccagcgactatgtcgtagtgggtaaagctccctcttcggagggagcatcagag

SEQ ID NO: 13550 - RNA, 89 nt, synthetic construct
  misc_feature 1..89: note = engineered ribonucleic acid scaffold (ERS) sequence
  source 1..89: mol_type = other RNA
tatggcgcttctatctgattgctctgagcgccatcaccagcgactatgtcgtagtgggtaaagctccctcttcggagggagcatcagag

SEQ ID NO: 13551 - RNA, 91 nt, synthetic construct
  misc_feature 1..91: note = engineered ribonucleic acid scaffold (ERS) sequence
  source 1..91: mol_type = other RNA
tctggcgcttctatatctgattactctgagcgccatcaccagcgactatgtcgtagtgggtaaagctccctcttcggagggagcatcagag

SEQ ID NO: 13552 - RNA, 90 nt, synthetic construct
  misc_feature 1..90: note = engineered ribonucleic acid scaffold (ERS) sequence
  source 1..90: mol_type = other RNA
tctggcgcttctaatctgattactctgagcgccatcaccagcgactatgtcgtagtgggtaaagctccctcttcggagggagcatcagag

SEQ ID NO: 13553 - RNA, 88 nt, synthetic construct
  misc_feature 1..88: note = engineered ribonucleic acid scaffold (ERS) sequence
  source 1..88: mol_type = other RNA
tctggcgcttctactgattactctgagcgccatcaccagcgactatgtcgtagtgggtaaagctccctcttcggagggagcatcagag

SEQ ID NO: 13554 - RNA, 89 nt, synthetic construct
  misc_feature 1..89: note = engineered ribonucleic acid scaffold (ERS) sequence
  source 1..89: mol_type = other RNA
tctggcgcttctaactgattactctgagcgccatcaccagcgactatgtcgtagtgggtaaagctccctcttcggagggagcatcagag

SEQ ID NO: 13555 - RNA, 89 nt, synthetic construct
  misc_feature 1..89: note = engineered ribonucleic acid scaffold (ERS) sequence
  source 1..89: mol_type = other RNA
tctggcgcttctacctgattactctgagcgccatcaccagcgactatgtcgtagtgggtaaagctccctcttcggagggagcatcagag

SEQ ID NO: 13556 - RNA, 89 nt, synthetic construct
  misc_feature 1..89: note = engineered ribonucleic acid scaffold (ERS) sequence
  source 1..89: mol_type = other RNA
tctggcgcttctagctgattactctgagcgccatcaccagcgactatgtcgtagtgggtaaagctccctcttcggagggagcatcagag

SEQ ID NO: 13557 - RNA, 91 nt, synthetic construct
  misc_feature 1..91: note = engineered ribonucleic acid scaffold (ERS) sequence
  source 1..91: mol_type = other RNA
tctggcgcttctattactgattactctgagcgccatcaccagcgactatgtcgtagtgggtaaagctccctcttcggagggagcatcagag

SEQ ID NO: 13558 - RNA, 89 nt, synthetic construct
  misc_feature 1..89: note = engineered ribonucleic acid scaffold (ERS) sequence
  source 1..89: mol_type = other RNA
tctggcgcttctatatgattactctgagcgccatcaccagcgactatgtcgtagtgggtaaagctccctcttcggagggagcatcagag

SEQ ID NO: 13559 - RNA, 89 nt, synthetic construct
  misc_feature 1..89: note = engineered ribonucleic acid scaffold (ERS) sequence
  source 1..89: mol_type = other RNA
tctggcgcttctatgtgattactctgagcgccatcaccagcgactatgtcgtagtgggtaaagctccctcttcggagggagcatcagag

SEQ ID NO: 13560 - RNA, 89 nt, synthetic construct
  misc_feature 1..89: note = engineered ribonucleic acid scaffold (ERS) sequence
  source 1..89: mol_type = other RNA
tctggcgcttctatttgattactctgagcgccatcaccagcgactatgtcgtagtgggtaaagctccctcttcggagggagcatcagag

SEQ ID NO: 13561 - RNA, 90 nt, synthetic construct
  misc_feature 1..90: note = engineered ribonucleic acid scaffold (ERS) sequence
  source 1..90: mol_type = other RNA
tctggcgcttctatcttgattactctgagcgccatcaccagcgactatgtcgtagtgggtaaagctccctcttcggagggagcatcagag

SEQ ID NO: 13562 - RNA, 89 nt, synthetic construct
  misc_feature 1..89: note = engineered ribonucleic acid scaffold (ERS) sequence
  source 1..89: mol_type = other RNA
tctggcgcttctatcagattactctgagcgccatcaccagcgactatgtcgtagtgggtaaagctccctcttcggagggagcatcagag

SEQ ID NO: 13563 - RNA, 89 nt, synthetic construct
  misc_feature 1..89: note = engineered ribonucleic acid scaffold (ERS) sequence
  source 1..89: mol_type = other RNA
tctggcgcttctatcggattactctgagcgccatcaccagcgactatgtcgtagtgggtaaagctccctcttcggagggagcatcagag

SEQ ID NO: 13564 - RNA, 90 nt, synthetic construct
  misc_feature 1..90: note = engineered ribonucleic acid scaffold (ERS) sequence
  source 1..90: mol_type = other RNA
tctggcgcttctatctgaattactctgagcgccatcaccagcgactatgtcgtagtgggtaaagctccctcttcggagggagcatcagag

SEQ ID NO: 13565 - RNA, 90 nt, synthetic construct
  misc_feature 1..90: note = engineered ribonucleic acid scaffold (ERS) sequence
  source 1..90: mol_type = other RNA
tctggcgcttctatctgtattactctgagcgccatcaccagcgactatgtcgtagtgggtaaagctccctcttcggagggagcatcagag

SEQ ID NO: 13566 - RNA, 89 nt, synthetic construct
  misc_feature 1..89: note = engineered ribonucleic acid scaffold (ERS) sequence
  source 1..89: mol_type = other RNA
tctggcgcttctatctggttactctgagcgccatcaccagcgactatgtcgtagtgggtaaagctccctcttcggagggagcatcagag

SEQ ID NO: 13567 - RNA, 89 nt, synthetic construct
  misc_feature 1..89: note = engineered ribonucleic acid scaffold (ERS) sequence
  source 1..89: mol_type = other RNA
tctggcgcttctatctgtttactctgagcgccatcaccagcgactatgtcgtagtgggtaaagctccctcttcggagggagcatcagag

SEQ ID NO: 13568 - RNA, 90 nt, synthetic construct
  misc_feature 1..90: note = engineered ribonucleic acid scaffold (ERS) sequence
  source 1..90: mol_type = other RNA
tctggcgcttctatctgatttactctgagcgccatcaccagcgactatgtcgtagtgggtaaagctccctcttcggagggagcatcagag

SEQ ID NO: 13569 - RNA, 89 nt, synthetic construct
  misc_feature 1..89: note = engineered ribonucleic acid scaffold (ERS) sequence
  source 1..89: mol_type = other RNA
tctggcgcttctatctgattgctctgagcgccatcaccagcgactatgtcgtagtgggtaaagctccctcttcggagggagcatcagag

SEQ ID NO: 13570 - RNA, 92 nt, synthetic construct
  misc_feature 1..92: note = engineered ribonucleic acid scaffold (ERS) sequence
  source 1..92: mol_type = other RNA
atctggcgcttctatatctgattactctgagcgccatcaccagcgactatgtcgtagtgggtaaagctccctcttcggagggagcatcagag

SEQ ID NO: 13571 - RNA, 91 nt, synthetic construct
  misc_feature 1..91: note = engineered ribonucleic acid scaffold (ERS) sequence
  source 1..91: mol_type = other RNA
atctggcgcttctaatctgattactctgagcgccatcaccagcgactatgtcgtagtgggtaaagctccctcttcggagggagcatcagag

SEQ ID NO: 13572 - RNA, 89 nt, synthetic construct
  misc_feature 1..89: note = engineered ribonucleic acid scaffold (ERS) sequence
  source 1..89: mol_type = other RNA
atctggcgcttctactgattactctgagcgccatcaccagcgactatgtcgtagtgggtaaagctccctcttcggagggagcatcagag

SEQ ID NO: 13573 - RNA, 90 nt, synthetic construct
  misc_feature 1..90: note = engineered ribonucleic acid scaffold (ERS) sequence
  source 1..90: mol_type = other RNA
atctggcgcttctaactgattactctgagcgccatcaccagcgactatgtcgtagtgggtaaagctccctcttcggagggagcatcagag

SEQ ID NO: 13574 - RNA, 90 nt, synthetic construct
  misc_feature 1..90: note = engineered ribonucleic acid scaffold (ERS) sequence
  source 1..90: mol_type = other RNA
atctggcgcttctacctgattactctgagcgccatcaccagcgactatgtcgtagtgggtaaagctccctcttcggagggagcatcagag

SEQ ID NO: 13575 - RNA, 90 nt, synthetic construct
  misc_feature 1..90: note = engineered ribonucleic acid scaffold (ERS) sequence
  source 1..90: mol_type = other RNA
atctggcgcttctagctgattactctgagcgccatcaccagcgactatgtcgtagtgggtaaagctccctcttcggagggagcatcagag

SEQ ID NO: 13576 - RNA, 92 nt, synthetic construct
  misc_feature 1..92: note = engineered ribonucleic acid scaffold (ERS) sequence
  source 1..92: mol_type = other RNA
atctggcgcttctattactgattactctgagcgccatcaccagcgactatgtcgtagtgggtaaagctccctcttcggagggagcatcagag

SEQ ID NO: 13577 - RNA, 90 nt, synthetic construct
  misc_feature 1..90: note = engineered ribonucleic acid scaffold (ERS) sequence
  source 1..90: mol_type = other RNA
atctggcgcttctatatgattactctgagcgccatcaccagcgactatgtcgtagtgggtaaagctccctcttcggagggagcatcagag

SEQ ID NO: 13578 - RNA, 90 nt, synthetic construct
  misc_feature 1..90: note = engineered ribonucleic acid scaffold (ERS) sequence
  source 1..90: mol_type = other RNA
atctggcgcttctatgtgattactctgagcgccatcaccagcgactatgtcgtagtgggtaaagctccctcttcggagggagcatcagag

SEQ ID NO: 13579 - RNA, 90 nt, synthetic construct
  misc_feature 1..90: note = engineered ribonucleic acid scaffold (ERS) sequence
  source 1..90: mol_type = other RNA
atctggcgcttctatttgattactctgagcgccatcaccagcgactatgtcgtagtgggtaaagctccctcttcggagggagcatcagag

SEQ ID NO: 13580 - RNA, 91 nt, synthetic construct
  misc_feature 1..91: note = engineered ribonucleic acid scaffold (ERS) sequence
  source 1..91: mol_type = other RNA
atctggcgcttctatcttgattactctgagcgccatcaccagcgactatgtcgtagtgggtaaagctccctcttcggagggagcatcagag

SEQ ID NO: 13581 - RNA, 90 nt, synthetic construct
  misc_feature 1..90: note = engineered ribonucleic acid scaffold (ERS) sequence
  source 1..90: mol_type = other RNA
atctggcgcttctatcagattactctgagcgccatcaccagcgactatgtcgtagtgggtaaagctccctcttcggagggagcatcagag

SEQ ID NO: 13582 - RNA, 90 nt, synthetic construct
  misc_feature 1..90: note = engineered ribonucleic acid scaffold (ERS) sequence
  source 1..90: mol_type = other RNA
atctggcgcttctatcggattactctgagcgccatcaccagcgactatgtcgtagtgggtaaagctccctcttcggagggagcatcagag

SEQ ID NO: 13583 - RNA, 91 nt, synthetic construct
  misc_feature 1..91: note = engineered ribonucleic acid scaffold (ERS) sequence
  source 1..91: mol_type = other RNA
atctggcgcttctatctgaattactctgagcgccatcaccagcgactatgtcgtagtgggtaaagctccctcttcggagggagcatcagag

SEQ ID NO: 13584 - RNA, 91 nt, synthetic construct
  misc_feature 1..91: note = engineered ribonucleic acid scaffold (ERS) sequence
  source 1..91: mol_type = other RNA
atctggcgcttctatctgtattactctgagcgccatcaccagcgactatgtcgtagtgggtaaagctccctcttcggagggagcatcagag

SEQ ID NO: 13585 - RNA, 90 nt, synthetic construct
  misc_feature 1..90: note = engineered ribonucleic acid scaffold (ERS) sequence
  source 1..90: mol_type = other RNA
atctggcgcttctatctggttactctgagcgccatcaccagcgactatgtcgtagtgggtaaagctccctcttcggagggagcatcagag

SEQ ID NO: 13586 - RNA, 90 nt, synthetic construct
  misc_feature 1..90: note = engineered ribonucleic acid scaffold (ERS) sequence
  source 1..90: mol_type = other RNA
atctggcgcttctatctgtttactctgagcgccatcaccagcgactatgtcgtagtgggtaaagctccctcttcggagggagcatcagag

SEQ ID NO: 13587 - RNA, 91 nt, synthetic construct
  misc_feature 1..91: note = engineered ribonucleic acid scaffold (ERS) sequence
  source 1..91: mol_type = other RNA
atctggcgcttctatctgatttactctgagcgccatcaccagcgactatgtcgtagtgggtaaagctccctcttcggagggagcatcagag

SEQ ID NO: 13588 - RNA, 90 nt, synthetic construct
  misc_feature 1..90: note = engineered ribonucleic acid scaffold (ERS) sequence
  source 1..90: mol_type = other RNA
atctggcgcttctatctgattgctctgagcgccatcaccagcgactatgtcgtagtgggtaaagctccctcttcggagggagcatcagag

SEQ ID NO: 13589 - RNA, 90 nt, synthetic construct
  misc_feature 1..90: note = engineered ribonucleic acid scaffold (ERS) sequence
  source 1..90: mol_type = other RNA
atggcgcttctatatctgattactctgagcgccatcaccagcgactatgtcgtagtgggtaaagctccctcttcggagggagcatcagag

SEQ ID NO: 13590 - RNA, 89 nt, synthetic construct
  misc_feature 1..89: note = engineered ribonucleic acid scaffold (ERS) sequence
  source 1..89: mol_type = other RNA
atggcgcttctaatctgattactctgagcgccatcaccagcgactatgtcgtagtgggtaaagctccctcttcggagggagcatcagag

SEQ ID NO: 13591 - RNA, 87 nt, synthetic construct
  misc_feature 1..87: note = engineered ribonucleic acid scaffold (ERS) sequence
  source 1..87: mol_type = other RNA
atggcgcttctactgattactctgagcgccatcaccagcgactatgtcgtagtgggtaaagctccctcttcggagggagcatcagag

SEQ ID NO: 13592 - RNA, 88 nt, synthetic construct
  misc_feature 1..88: note = engineered ribonucleic acid scaffold (ERS) sequence
  source 1..88: mol_type = other RNA
atggcgcttctaactgattactctgagcgccatcaccagcgactatgtcgtagtgggtaaagctccctcttcggagggagcatcagag

SEQ ID NO: 13593 - RNA, 88 nt, synthetic construct
  misc_feature 1..88: note = engineered ribonucleic acid scaffold (ERS) sequence
  source 1..88: mol_type = other RNA
atggcgcttctacctgattactctgagcgccatcaccagcgactatgtcgtagtgggtaaagctccctcttcggagggagcatcagag

SEQ ID NO: 13594 - RNA, 88 nt, synthetic construct
  misc_feature 1..88: note = engineered ribonucleic acid scaffold (ERS) sequence
  source 1..88: mol_type = other RNA
atggcgcttctagctgattactctgagcgccatcaccagcgactatgtcgtagtgggtaaagctccctcttcggagggagcatcagag

SEQ ID NO: 13595 - RNA, 90 nt, synthetic construct
  misc_feature 1..90: note = engineered ribonucleic acid scaffold (ERS) sequence
  source 1..90: mol_type = other RNA
atggcgcttctattactgattactctgagcgccatcaccagcgactatgtcgtagtgggtaaagctccctcttcggagggagcatcagag

SEQ ID NO: 13596 - RNA, 88 nt, synthetic construct
  misc_feature 1..88: note = engineered ribonucleic acid scaffold (ERS) sequence
  source 1..88: mol_type = other RNA
atggcgcttctatatgattactctgagcgccatcaccagcgactatgtcgtagtgggtaaagctccctcttcggagggagcatcagag

SEQ ID NO: 13597 - RNA, 88 nt, synthetic construct
  misc_feature 1..88: note = engineered ribonucleic acid scaffold (ERS) sequence
  source 1..88: mol_type = other RNA
atggcgcttctatgtgattactctgagcgccatcaccagcgactatgtcgtagtgggtaaagctccctcttcggagggagcatcagag

SEQ ID NO: 13598 - RNA, 88 nt, synthetic construct
  misc_feature 1..88: note = engineered ribonucleic acid scaffold (ERS) sequence
  source 1..88: mol_type = other RNA
atggcgcttctatttgattactctgagcgccatcaccagcgactatgtcgtagtgggtaaagctccctcttcggagggagcatcagag

SEQ ID NO: 13599 - RNA, 89 nt, synthetic construct
  misc_feature 1..89: note = engineered ribonucleic acid scaffold (ERS) sequence
  source 1..89: mol_type = other RNA
atggcgcttctatcttgattactctgagcgccatcaccagcgactatgtcgtagtgggtaaagctccctcttcggagggagcatcagag

SEQ ID NO: 13600 - RNA, 88 nt, synthetic construct
  misc_feature 1..88: note = engineered ribonucleic acid scaffold (ERS) sequence
  source 1..88: mol_type = other RNA
atggcgcttctatcagattactctgagcgccatcaccagcgactatgtcgtagtgggtaaagctccctcttcggagggagcatcagag

SEQ ID NO: 13601 - RNA, 88 nt, synthetic construct
  misc_feature 1..88: note = engineered ribonucleic acid scaffold (ERS) sequence
  source 1..88: mol_type = other RNA
atggcgcttctatcggattactctgagcgccatcaccagcgactatgtcgtagtgggtaaagctccctcttcggagggagcatcagag

SEQ ID NO: 13602 - RNA, 89 nt, synthetic construct
  misc_feature 1..89: note = engineered ribonucleic acid scaffold (ERS) sequence
  source 1..89: mol_type = other RNA
atggcgcttctatctgaattactctgagcgccatcaccagcgactatgtcgtagtgggtaaagctccctcttcggagggagcatcagag

SEQ ID NO: 13603 - RNA, 89 nt, synthetic construct
  misc_feature 1..89: note = engineered ribonucleic acid scaffold (ERS) sequence
  source 1..89: mol_type = other RNA
atggcgcttctatctgtattactctgagcgccatcaccagcgactatgtcgtagtgggtaaagctccctcttcggagggagcatcagag

SEQ ID NO: 13604 - RNA, 88 nt, synthetic construct
  misc_feature 1..88: note = engineered ribonucleic acid scaffold (ERS) sequence
  source 1..88: mol_type = other RNA
atggcgcttctatctggttactctgagcgccatcaccagcgactatgtcgtagtgggtaaagctccctcttcggagggagcatcagag

SEQ ID NO: 13605 - RNA, 88 nt, synthetic construct
  misc_feature 1..88: note = engineered ribonucleic acid scaffold (ERS) sequence
  source 1..88: mol_type = other RNA
atggcgcttctatctgtttactctgagcgccatcaccagcgactatgtcgtagtgggtaaagctccctcttcggagggagcatcagag

SEQ ID NO: 13606 - RNA, 89 nt, synthetic construct
  misc_feature 1..89: note = engineered ribonucleic acid scaffold (ERS) sequence
  source 1..89: mol_type = other RNA
atggcgcttctatctgatttactctgagcgccatcaccagcgactatgtcgtagtgggtaaagctccctcttcggagggagcatcagag

SEQ ID NO: 13607 - RNA, 89 nt, synthetic construct
  misc_feature 1..89: note = engineered ribonucleic acid scaffold (ERS) sequence
  source 1..89: mol_type = other RNA
aggcgcttctatatctgattactctgagcgccatcaccagcgactatgtcgtagtgggtaaagctccctcttcggagggagcatcagag

SEQ ID NO: 13608 - RNA, 88 nt, synthetic construct
  misc_feature 1..88: note = engineered ribonucleic acid scaffold (ERS) sequence
  source 1..88: mol_type = other RNA
aggcgcttctaatctgattactctgagcgccatcaccagcgactatgtcgtagtgggtaaagctccctcttcggagggagcatcagag

SEQ ID NO: 13609 - RNA, 86 nt, synthetic construct
  misc_feature 1..86: note = engineered ribonucleic acid scaffold (ERS) sequence
  source 1..86: mol_type = other RNA
aggcgcttctactgattactctgagcgccatcaccagcgactatgtcgtagtgggtaaagctccctcttcggagggagcatcagag

SEQ ID NO: 13610 - RNA, 87 nt, synthetic construct
  misc_feature 1..87: note = engineered ribonucleic acid scaffold (ERS) sequence
  source 1..87: mol_type = other RNA
aggcgcttctaactgattactctgagcgccatcaccagcgactatgtcgtagtgggtaaagctccctcttcggagggagcatcagag

SEQ ID NO: 13611 - RNA, 87 nt, synthetic construct
  misc_feature 1..87: note = engineered ribonucleic acid scaffold (ERS) sequence
  source 1..87: mol_type = other RNA
aggcgcttctacctgattactctgagcgccatcaccagcgactatgtcgtagtgggtaaagctccctcttcggagggagcatcagag

SEQ ID NO: 13612 - RNA, 87 nt, synthetic construct
  misc_feature 1..87: note = engineered ribonucleic acid scaffold (ERS) sequence
  source 1..87: mol_type = other RNA
aggcgcttctagctgattactctgagcgccatcaccagcgactatgtcgtagtgggtaaagctccctcttcggagggagcatcagag

SEQ ID NO: 13613 - RNA, 89 nt, synthetic construct
  misc_feature 1..89: note = engineered ribonucleic acid scaffold (ERS) sequence
  source 1..89: mol_type = other RNA
aggcgcttctattactgattactctgagcgccatcaccagcgactatgtcgtagtgggtaaagctccctcttcggagggagcatcagag

SEQ ID NO: 13614 - RNA, 87 nt, synthetic construct
  misc_feature 1..87: note = engineered ribonucleic acid scaffold (ERS) sequence
  source 1..87: mol_type = other RNA
aggcgcttctatatgattactctgagcgccatcaccagcgactatgtcgtagtgggtaaagctccctcttcggagggagcatcagag

SEQ ID NO: 13615 - RNA, 87 nt, synthetic construct
  misc_feature 1..87: note = engineered ribonucleic acid scaffold (ERS) sequence
  source 1..87: mol_type = other RNA
aggcgcttctatgtgattactctgagcgccatcaccagcgactatgtcgtagtgggtaaagctccctcttcggagggagcatcagag

SEQ ID NO: 13616 - RNA, 87 nt, synthetic construct
  misc_feature 1..87: note = engineered ribonucleic acid scaffold (ERS) sequence
  source 1..87: mol_type = other RNA
aggcgcttctatttgattactctgagcgccatcaccagcgactatgtcgtagtgggtaaagctccctcttcggagggagcatcagag

SEQ ID NO: 13617 - RNA, 88 nt, synthetic construct
  misc_feature 1..88: note = engineered ribonucleic acid scaffold (ERS) sequence
  source 1..88: mol_type = other RNA
aggcgcttctatcttgattactctgagcgccatcaccagcgactatgtcgtagtgggtaaagctccctcttcggagggagcatcagag

SEQ ID NO: 13618 - RNA, 87 nt, synthetic construct
  misc_feature 1..87: note = engineered ribonucleic acid scaffold (ERS) sequence
  source 1..87: mol_type = other RNA
aggcgcttctatcagattactctgagcgccatcaccagcgactatgtcgtagtgggtaaagctccctcttcggagggagcatcagag

SEQ ID NO: 13619 - RNA, 87 nt, synthetic construct
  misc_feature 1..87: note = engineered ribonucleic acid scaffold (ERS) sequence
  source 1..87: mol_type = other RNA
aggcgcttctatcggattactctgagcgccatcaccagcgactatgtcgtagtgggtaaagctccctcttcggagggagcatcagag

SEQ ID NO: 13620 - RNA, 88 nt, synthetic construct
  misc_feature 1..88: note = engineered ribonucleic acid scaffold (ERS) sequence
  source 1..88: mol_type = other RNA
aggcgcttctatctgaattactctgagcgccatcaccagcgactatgtcgtagtgggtaaagctccctcttcggagggagcatcagag

SEQ ID NO: 13621 - RNA, 88 nt, synthetic construct
  misc_feature 1..88: note = engineered ribonucleic acid scaffold (ERS) sequence
  source 1..88: mol_type = other RNA
aggcgcttctatctgtattactctgagcgccatcaccagcgactatgtcgtagtgggtaaagctccctcttcggagggagcatcagag

SEQ ID NO: 13622 - RNA, 87 nt, synthetic construct
  misc_feature 1..87: note = engineered ribonucleic acid scaffold (ERS) sequence
  source 1..87: mol_type = other RNA
aggcgcttctatctggttactctgagcgccatcaccagcgactatgtcgtagtgggtaaagctccctcttcggagggagcatcagag

SEQ ID NO: 13623 - RNA, 87 nt, synthetic construct
  misc_feature 1..87: note = engineered ribonucleic acid scaffold (ERS) sequence
  source 1..87: mol_type = other RNA
aggcgcttctatctgtttactctgagcgccatcaccagcgactatgtcgtagtgggtaaagctccctcttcggagggagcatcagag

SEQ ID NO: 13624 - RNA, 88 nt, synthetic construct
  misc_feature 1..88: note = engineered ribonucleic acid scaffold (ERS) sequence
  source 1..88: mol_type = other RNA
aggcgcttctatctgatttactctgagcgccatcaccagcgactatgtcgtagtgggtaaagctccctcttcggagggagcatcagag

SEQ ID NO: 13625 - RNA, 87 nt, synthetic construct
  misc_feature 1..87: note = engineered ribonucleic acid scaffold (ERS) sequence
  source 1..87: mol_type = other RNA
aggcgcttctatctgattgctctgagcgccatcaccagcgactatgtcgtagtgggtaaagctccctcttcggagggagcatcagag

SEQ ID NO: 13626 - RNA, 88 nt, synthetic construct
  misc_feature 1..88: note = engineered ribonucleic acid scaffold (ERS) sequence
  source 1..88: mol_type = other RNA
atggcgcttctatctgattgctctgagcgccatcaccagcgactatgtcgtagtgggtaaagctccctcttcggagggagcatcagag

SEQ ID NO: 13627 - RNA, 90 nt, synthetic construct
  misc_feature 1..90: note = engineered ribonucleic acid scaffold (ERS) sequence
  source 1..90: mol_type = other RNA
atggtgcttctatatctgattactctgagcgccatcaccagcgactatgtcgtagtgggtaaagctccctcttcggagggagcatcagag

SEQ ID NO: 13628 - RNA, 89 nt, synthetic construct
  misc_feature 1..89: note = engineered ribonucleic acid scaffold (ERS) sequence
  source 1..89: mol_type = other RNA
atggtgcttctaatctgattactctgagcgccatcaccagcgactatgtcgtagtgggtaaagctccctcttcggagggagcatcagag

SEQ ID NO: 13629 - RNA, 87 nt, synthetic construct
  misc_feature 1..87: note = engineered ribonucleic acid scaffold (ERS) sequence
  source 1..87: mol_type = other RNA
atggtgcttctactgattactctgagcgccatcaccagcgactatgtcgtagtgggtaaagctccctcttcggagggagcatcagag

SEQ ID NO: 13630 - RNA, 88 nt, synthetic construct
  misc_feature 1..88: note = engineered ribonucleic acid scaffold (ERS) sequence
  source 1..88: mol_type = other RNA
atggtgcttctaactgattactctgagcgccatcaccagcgactatgtcgtagtgggtaaagctccctcttcggagggagcatcagag

SEQ ID NO: 13631 - RNA, 88 nt, synthetic construct
  misc_feature 1..88: note = engineered ribonucleic acid scaffold (ERS) sequence
  source 1..88: mol_type = other RNA
atggtgcttctacctgattactctgagcgccatcaccagcgactatgtcgtagtgggtaaagctccctcttcggagggagcatcagag

SEQ ID NO: 13632 - RNA, 88 nt, synthetic construct
  misc_feature 1..88: note = engineered ribonucleic acid scaffold (ERS) sequence
  source 1..88: mol_type = other RNA
atggtgcttctagctgattactctgagcgccatcaccagcgactatgtcgtagtgggtaaagctccctcttcggagggagcatcagag

SEQ ID NO: 13633 - RNA, 90 nt, synthetic construct
  misc_feature 1..90: note = engineered ribonucleic acid scaffold (ERS) sequence
  source 1..90: mol_type = other RNA
atggtgcttctattactgattactctgagcgccatcaccagcgactatgtcgtagtgggtaaagctccctcttcggagggagcatcagag

SEQ ID NO: 13634 - RNA, 88 nt, synthetic construct
  misc_feature 1..88: note = engineered ribonucleic acid scaffold (ERS) sequence
  source 1..88: mol_type = other RNA
atggtgcttctatatgattactctgagcgccatcaccagcgactatgtcgtagtgggtaaagctccctcttcggagggagcatcagag

SEQ ID NO: 13635 - RNA, 88 nt, synthetic construct
  misc_feature 1..88: note = engineered ribonucleic acid scaffold (ERS) sequence
  source 1..88: mol_type = other RNA
atggtgcttctatgtgattactctgagcgccatcaccagcgactatgtcgtagtgggtaaagctccctcttcggagggagcatcagag

SEQ ID NO: 13636 - RNA, 88 nt, synthetic construct
  misc_feature 1..88: note = engineered ribonucleic acid scaffold (ERS) sequence
  source 1..88: mol_type = other RNA
atggtgcttctatttgattactctgagcgccatcaccagcgactatgtcgtagtgggtaaagctccctcttcggagggagcatcagag

SEQ ID NO: 13637 - RNA, 89 nt, synthetic construct
  misc_feature 1..89: note = engineered ribonucleic acid scaffold (ERS) sequence
  source 1..89: mol_type = other RNA
atggtgcttctatcttgattactctgagcgccatcaccagcgactatgtcgtagtgggtaaagctccctcttcggagggagcatcagag

SEQ ID NO: 13638 - RNA, 88 nt, synthetic construct
  misc_feature 1..88: note = engineered ribonucleic acid scaffold (ERS) sequence
  source 1..88: mol_type = other RNA
atggtgcttctatcagattactctgagcgccatcaccagcgactatgtcgtagtgggtaaagctccctcttcggagggagcatcagag

SEQ ID NO: 13639 - RNA, 88 nt, synthetic construct
  misc_feature 1..88: note = engineered ribonucleic acid scaffold (ERS) sequence
  source 1..88: mol_type = other RNA
atggtgcttctatcggattactctgagcgccatcaccagcgactatgtcgtagtgggtaaagctccctcttcggagggagcatcagag

SEQ ID NO: 13640 - RNA, 89 nt, synthetic construct
  misc_feature 1..89: note = engineered ribonucleic acid scaffold (ERS) sequence
  source 1..89: mol_type = other RNA
atggtgcttctatctgaattactctgagcgccatcaccagcgactatgtcgtagtgggtaaagctccctcttcggagggagcatcagag

SEQ ID NO: 13641 - RNA, 89 nt, synthetic construct
  misc_feature 1..89: note = engineered ribonucleic acid scaffold (ERS) sequence
  source 1..89: mol_type = other RNA
atggtgcttctatctgtattactctgagcgccatcaccagcgactatgtcgtagtgggtaaagctccctcttcggagggagcatcagag

SEQ ID NO: 13642 - RNA, 88 nt, synthetic construct
  misc_feature 1..88: note = engineered ribonucleic acid scaffold (ERS) sequence
  source 1..88: mol_type = other RNA
atggtgcttctatctggttactctgagcgccatcaccagcgactatgtcgtagtgggtaaagctccctcttcggagggagcatcagag

SEQ ID NO: 13643 - RNA, 88 nt, synthetic construct
  misc_feature 1..88: note = engineered ribonucleic acid scaffold (ERS) sequence
  source 1..88: mol_type = other RNA
atggtgcttctatctgtttactctgagcgccatcaccagcgactatgtcgtagtgggtaaagctccctcttcggagggagcatcagag

SEQ ID NO: 13644 - RNA, 89 nt, synthetic construct
  misc_feature 1..89: note = engineered ribonucleic acid scaffold (ERS) sequence
  source 1..89: mol_type = other RNA
atggtgcttctatctgatttactctgagcgccatcaccagcgactatgtcgtagtgggtaaagctccctcttcggagggagcatcagag

SEQ ID NO: 13645 - RNA, 88 nt, synthetic construct
  misc_feature 1..88: note = engineered ribonucleic acid scaffold (ERS) sequence
  source 1..88: mol_type = other RNA
atggtgcttctatctgattgctctgagcgccatcaccagcgactatgtcgtagtgggtaaagctccctcttcggagggagcatcagag

SEQ ID NO: 13646 - RNA, 91 nt, synthetic construct
  misc_feature 1..91: note = engineered ribonucleic acid scaffold (ERS) sequence
  source 1..91: mol_type = other RNA
aatggcgcttctatatctgattactctgagcgccatcaccagcgactatgtcgtagtgggtaaagctccctcttcggagggagcatcagag

SEQ ID NO: 13647 - RNA, 90 nt, synthetic construct
  misc_feature 1..90: note = engineered ribonucleic acid scaffold (ERS) sequence
  source 1..90: mol_type = other RNA
aatggcgcttctaatctgattactctgagcgccatcaccagcgactatgtcgtagtgggtaaagctccctcttcggagggagcatcagag

SEQ ID NO: 13648 - RNA, 88 nt, synthetic construct
  misc_feature 1..88: note = engineered ribonucleic acid scaffold (ERS) sequence
  source 1..88: mol_type = other RNA
aatggcgcttctactgattactctgagcgccatcaccagcgactatgtcgtagtgggtaaagctccctcttcggagggagcatcagag

SEQ ID NO: 13649 - RNA, 89 nt, synthetic construct
  misc_feature 1..89: note = engineered ribonucleic acid scaffold (ERS) sequence
  source 1..89: mol_type = other RNA
aatggcgcttctaactgattactctgagcgccatcaccagcgactatgtcgtagtgggtaaagctccctcttcggagggagcatcagag

SEQ ID NO: 13650 - RNA, 89 nt, synthetic construct
  misc_feature 1..89: note = engineered ribonucleic acid scaffold (ERS) sequence
  source 1..89: mol_type = other RNA
aatggcgcttctacctgattactctgagcgccatcaccagcgactatgtcgtagtgggtaaagctccctcttcggagggagcatcagag

SEQ ID NO: 13651 - RNA, 89 nt, synthetic construct
  misc_feature 1..89: note = engineered ribonucleic acid scaffold (ERS) sequence
  source 1..89: mol_type = other RNA
aatggcgcttctagctgattactctgagcgccatcaccagcgactatgtcgtagtgggtaaagctccctcttcggagggagcatcagag

SEQ ID NO: 13652 - RNA, 91 nt, synthetic construct
  misc_feature 1..91: note = engineered ribonucleic acid scaffold (ERS) sequence
  source 1..91: mol_type = other RNA
aatggcgcttctattactgattactctgagcgccatcaccagcgactatgtcgtagtgggtaaagctccctcttcggagggagcatcagag

SEQ ID NO: 13653 - RNA, 89 nt, synthetic construct
  misc_feature 1..89: note = engineered ribonucleic acid scaffold (ERS) sequence
  source 1..89: mol_type = other RNA
aatggcgcttctatatgattactctgagcgccatcaccagcgactatgtcgtagtgggtaaagctccctcttcggagggagcatcagag

SEQ ID NO: 13654 - RNA, 89 nt, synthetic construct
  misc_feature 1..89: note = engineered ribonucleic acid scaffold (ERS) sequence
  source 1..89: mol_type = other RNA
aatggcgcttctatgtgattactctgagcgccatcaccagcgactatgtcgtagtgggtaaagctccctcttcggagggagcatcagag

SEQ ID NO: 13655 - RNA, 89 nt, synthetic construct
  misc_feature 1..89: note = engineered ribonucleic acid scaffold (ERS) sequence
  source 1..89: mol_type = other RNA
aatggcgcttctatttgattactctgagcgccatcaccagcgactatgtcgtagtgggtaaagctccctcttcggagggagcatcagag

SEQ ID NO: 13656 - RNA, 90 nt, synthetic construct
  misc_feature 1..90: note = engineered ribonucleic acid scaffold (ERS) sequence
  source 1..90: mol_type = other RNA
aatggcgcttctatcttgattactctgagcgccatcaccagcgactatgtcgtagtgggtaaagctccctcttcggagggagcatcagag

SEQ ID NO: 13657 - RNA, 89 nt, synthetic construct
  misc_feature 1..89: note = engineered ribonucleic acid scaffold (ERS) sequence
  source 1..89: mol_type = other RNA
aatggcgcttctatcagattactctgagcgccatcaccagcgactatgtcgtagtgggtaaagctccctcttcggagggagcatcagag

SEQ ID NO: 13658 - RNA, 89 nt, synthetic construct
  misc_feature 1..89: note = engineered ribonucleic acid scaffold (ERS) sequence
  source 1..89: mol_type = other RNA
aatggcgcttctatcggattactctgagcgccatcaccagcgactatgtcgtagtgggtaaagctccctcttcggagggagcatcagag

SEQ ID NO: 13659 - RNA, 90 nt, synthetic construct
  misc_feature 1..90: note = engineered ribonucleic acid scaffold (ERS) sequence
  source 1..90: mol_type = other RNA
aatggcgcttctatctgaattactctgagcgccatcaccagcgactatgtcgtagtgggtaaagctccctcttcggagggagcatcagag

SEQ ID NO: 13660 - RNA, 90 nt, synthetic construct
  misc_feature 1..90: note = engineered ribonucleic acid scaffold (ERS) sequence
  source 1..90: mol_type = other RNA
aatggcgcttctatctgtattactctgagcgccatcaccagcgactatgtcgtagtgggtaaagctccctcttcggagggagcatcagag

SEQ ID NO: 13661 - RNA, 89 nt, synthetic construct
  misc_feature 1..89: note = engineered ribonucleic acid scaffold (ERS) sequence
  source 1..89: mol_type = other RNA
aatggcgcttctatctggttactctgagcgccatcaccagcgactatgtcgtagtgggtaaagctccctcttcggagggagcatcagag

SEQ ID NO: 13662 - RNA, 89 nt, synthetic construct
  misc_feature 1..89: note = engineered ribonucleic acid scaffold (ERS) sequence
  source 1..89: mol_type = other RNA
aatggcgcttctatctgtttactctgagcgccatcaccagcgactatgtcgtagtgggtaaagctccctcttcggagggagcatcagag

SEQ ID NO: 13663 - RNA, 90 nt, synthetic construct
  misc_feature 1..90: note = engineered ribonucleic acid scaffold (ERS) sequence
  source 1..90: mol_type = other RNA
aatggcgcttctatctgatttactctgagcgccatcaccagcgactatgtcgtagtgggtaaagctccctcttcggagggagcatcagag

SEQ ID NO: 13664 - RNA, 89 nt, synthetic construct
  misc_feature 1..89: note = engineered ribonucleic acid scaffold (ERS) sequence
  source 1..89: mol_type = other RNA
aatggcgcttctatctgattgctctgagcgccatcaccagcgactatgtcgtagtgggtaaagctccctcttcggagggagcatcagag

SEQ ID NO: 13665 - RNA, 91 nt, synthetic construct
  misc_feature 1..91: note = engineered ribonucleic acid scaffold (ERS) sequence
  source 1..91: mol_type = other RNA
agtggcgcttctatatctgattactctgagcgccatcaccagcgactatgtcgtagtgggtaaagctccctcttcggagggagcatcagag

SEQ ID NO: 13666 - RNA, 90 nt, synthetic construct
  misc_feature 1..90: note = engineered ribonucleic acid scaffold (ERS) sequence
  source 1..90: mol_type = other RNA
agtggcgcttctaatctgattactctgagcgccatcaccagcgactatgtcgtagtgggtaaagctccctcttcggagggagcatcagag

SEQ ID NO: 13667 - RNA, 88 nt, synthetic construct
  misc_feature 1..88: note = engineered ribonucleic acid scaffold (ERS) sequence
  source 1..88: mol_type = other RNA
agtggcgcttctactgattactctgagcgccatcaccagcgactatgtcgtagtgggtaaagctccctcttcggagggagcatcagag

SEQ ID NO: 13668 - RNA, 89 nt, synthetic construct
  misc_feature 1..89: note = engineered ribonucleic acid scaffold (ERS) sequence
  source 1..89: mol_type = other RNA
agtggcgcttctaactgattactctgagcgccatcaccagcgactatgtcgtagtgggtaaagctccctcttcggagggagcatcagag

SEQ ID NO: 13669 - RNA, 89 nt, synthetic construct
  misc_feature 1..89: note = engineered ribonucleic acid scaffold (ERS) sequence
  source 1..89: mol_type = other RNA
agtggcgcttctacctgattactctgagcgccatcaccagcgactatgtcgtagtgggtaaagctccctcttcggagggagcatcagag

SEQ ID NO: 13670 - RNA, 89 nt, synthetic construct
  misc_feature 1..89: note = engineered ribonucleic acid scaffold (ERS) sequence
  source 1..89: mol_type = other RNA
agtggcgcttctagctgattactctgagcgccatcaccagcgactatgtcgtagtgggtaaagctccctcttcggagggagcatcagag

SEQ ID NO: 13671 - RNA, 91 nt, synthetic construct
  misc_feature 1..91: note = engineered ribonucleic acid scaffold (ERS) sequence
  source 1..91: mol_type = other RNA
agtggcgcttctattactgattactctgagcgccatcaccagcgactatgtcgtagtgggtaaagctccctcttcggagggagcatcagag

SEQ ID NO: 13672 - RNA, 89 nt, synthetic construct
  misc_feature 1..89: note = engineered ribonucleic acid scaffold (ERS) sequence
  source 1..89: mol_type = other RNA
agtggcgcttctatatgattactctgagcgccatcaccagcgactatgtcgtagtgggtaaagctccctcttcggagggagcatcagag

SEQ ID NO: 13673 - RNA, 89 nt, synthetic construct
  misc_feature 1..89: note = engineered ribonucleic acid scaffold (ERS) sequence
  source 1..89: mol_type = other RNA
agtggcgcttctatgtgattactctgagcgccatcaccagcgactatgtcgtagtgggtaaagctccctcttcggagggagcatcagag

SEQ ID NO: 13674 - RNA, 89 nt, synthetic construct
  misc_feature 1..89: note = engineered ribonucleic acid scaffold (ERS) sequence
  source 1..89: mol_type = other RNA
agtggcgcttctatttgattactctgagcgccatcaccagcgactatgtcgtagtgggtaaagctccctcttcggagggagcatcagag

SEQ ID NO: 13675 - RNA, 90 nt, synthetic construct
  misc_feature 1..90: note = engineered ribonucleic acid scaffold (ERS) sequence
  source 1..90: mol_type = other RNA
agtggcgcttctatcttgattactctgagcgccatcaccagcgactatgtcgtagtgggtaaagctccctcttcggagggagcatcagag

SEQ ID NO: 13676 - RNA, 89 nt, synthetic construct
  misc_feature 1..89: note = engineered ribonucleic acid scaffold (ERS) sequence
  source 1..89: mol_type = other RNA
agtggcgcttctatcagattactctgagcgccatcaccagcgactatgtcgtagtgggtaaagctccctcttcggagggagcatcagag

SEQ ID NO: 13677 - RNA, 89 nt, synthetic construct
  misc_feature 1..89: note = engineered ribonucleic acid scaffold (ERS) sequence
  source 1..89: mol_type = other RNA
agtggcgcttctatcggattactctgagcgccatcaccagcgactatgtcgtagtgggtaaagctccctcttcggagggagcatcagag

SEQ ID NO: 13678 - RNA, 90 nt, synthetic construct
  misc_feature 1..90: note = engineered ribonucleic acid scaffold (ERS) sequence
  source 1..90: mol_type = other RNA
agtggcgcttctatctgaattactctgagcgccatcaccagcgactatgtcgtagtgggtaaagctccctcttcggagggagcatcagag

SEQ ID NO: 13679 - RNA, 90 nt, synthetic construct
  misc_feature 1..90: note = engineered ribonucleic acid scaffold (ERS) sequence
  source 1..90: mol_type = other RNA
agtggcgcttctatctgtattactctgagcgccatcaccagcgactatgtcgtagtgggtaaagctccctcttcggagggagcatcagag

SEQ ID NO: 13680 - RNA, 89 nt, synthetic construct
  misc_feature 1..89: note = engineered ribonucleic acid scaffold (ERS) sequence
  source 1..89: mol_type = other RNA
agtggcgcttctatctggttactctgagcgccatcaccagcgactatgtcgtagtgggtaaagctccctcttcggagggagcatcagag

SEQ ID NO: 13681 - RNA, 89 nt, synthetic construct
  misc_feature 1..89: note = engineered ribonucleic acid scaffold (ERS) sequence
  source 1..89: mol_type = other RNA
agtggcgcttctatctgtttactctgagcgccatcaccagcgactatgtcgtagtgggtaaagctccctcttcggagggagcatcagag

SEQ ID NO: 13682 - RNA, 90 nt, synthetic construct
  misc_feature 1..90: note = engineered ribonucleic acid scaffold (ERS) sequence
  source 1..90: mol_type = other RNA
agtggcgcttctatctgatttactctgagcgccatcaccagcgactatgtcgtagtgggtaaagctccctcttcggagggagcatcagag

SEQ ID NO: 13683 - RNA, 89 nt, synthetic construct
  misc_feature 1..89: note = engineered ribonucleic acid scaffold (ERS) sequence
  source 1..89: mol_type = other RNA
agtggcgcttctatctgattgctctgagcgccatcaccagcgactatgtcgtagtgggtaaagctccctcttcggagggagcatcagag

SEQ ID NO: 13684 - RNA, 90 nt, synthetic construct
  misc_feature 1..90: note = engineered ribonucleic acid scaffold (ERS) sequence
  source 1..90: mol_type = other RNA
acggcgcttctatatctgattactctgagcgccatcaccagcgactatgtcgtagtgggtaaagctccctcttcggagggagcatcagag

SEQ ID NO: 13685 - RNA, 89 nt, synthetic construct
  misc_feature 1..89: note = engineered ribonucleic acid scaffold (ERS) sequence
  source 1..89: mol_type = other RNA
acggcgcttctaatctgattactctgagcgccatcaccagcgactatgtcgtagtgggtaaagctccctcttcggagggagcatcagag

SEQ ID NO: 13686 - RNA, 87 nt, synthetic construct
  misc_feature 1..87: note = engineered ribonucleic acid scaffold (ERS) sequence
  source 1..87: mol_type = other RNA
acggcgcttctactgattactctgagcgccatcaccagcgactatgtcgtagtgggtaaagctccctcttcggagggagcatcagag

SEQ ID NO: 13687 - RNA, 88 nt, synthetic construct
  misc_feature 1..88: note = engineered ribonucleic acid scaffold (ERS) sequence
  source 1..88: mol_type = other RNA
acggcgcttctaactgattactctgagcgccatcaccagcgactatgtcgtagtgggtaaagctccctcttcggagggagcatcagag

SEQ ID NO: 13688 - RNA, 88 nt, synthetic construct
  misc_feature 1..88: note = engineered ribonucleic acid scaffold (ERS) sequence
  source 1..88: mol_type = other RNA
acggcgcttctacctgattactctgagcgccatcaccagcgactatgtcgtagtgggtaaagctccctcttcggagggagcatcagag

SEQ ID NO: 13689 - RNA, 88 nt, synthetic construct
  misc_feature 1..88: note = engineered ribonucleic acid scaffold (ERS) sequence
  source 1..88: mol_type = other RNA
acggcgcttctagctgattactctgagcgccatcaccagcgactatgtcgtagtgggtaaagctccctcttcggagggagcatcagag

SEQ ID NO: 13690 - RNA, 90 nt, synthetic construct
  misc_feature 1..90: note = engineered ribonucleic acid scaffold (ERS) sequence
  source 1..90: mol_type = other RNA
acggcgcttctattactgattactctgagcgccatcaccagcgactatgtcgtagtgggtaaagctccctcttcggagggagcatcagag

SEQ ID NO: 13691 - RNA, 88 nt, synthetic construct
  misc_feature 1..88: note = engineered ribonucleic acid scaffold (ERS) sequence
  source 1..88: mol_type = other RNA
acggcgcttctatatgattactctgagcgccatcaccagcgactatgtcgtagtgggtaaagctccctcttcggagggagcatcagag

SEQ ID NO: 13692 - RNA, 88 nt, synthetic construct
  misc_feature 1..88: note = engineered ribonucleic acid scaffold (ERS) sequence
  source 1..88: mol_type = other RNA
acggcgcttctatgtgattactctgagcgccatcaccagcgactatgtcgtagtgggtaaagctccctcttcggagggagcatcagag

SEQ ID NO: 13693 - RNA, 88 nt, synthetic construct
  misc_feature 1..88: note = engineered ribonucleic acid scaffold (ERS) sequence
  source 1..88: mol_type = other RNA
acggcgcttctatttgattactctgagcgccatcaccagcgactatgtcgtagtgggtaaagctccctcttcggagggagcatcagag

SEQ ID NO: 13694 - RNA, 89 nt, synthetic construct
  misc_feature 1..89: note = engineered ribonucleic acid scaffold (ERS) sequence
  source 1..89: mol_type = other RNA
acggcgcttctatcttgattactctgagcgccatcaccagcgactatgtcgtagtgggtaaagctccctcttcggagggagcatcagag

SEQ ID NO: 13695 - RNA, 88 nt, synthetic construct
  misc_feature 1..88: note = engineered ribonucleic acid scaffold (ERS) sequence
  source 1..88: mol_type = other RNA
acggcgcttctatcagattactctgagcgccatcaccagcgactatgtcgtagtgggtaaagctccctcttcggagggagcatcagag

SEQ ID NO: 13696 - RNA, 88 nt, synthetic construct
  misc_feature 1..88: note = engineered ribonucleic acid scaffold (ERS) sequence
  source 1..88: mol_type = other RNA
acggcgcttctatcggattactctgagcgccatcaccagcgactatgtcgtagtgggtaaagctccctcttcggagggagcatcagag

SEQ ID NO: 13697 - RNA, 89 nt, synthetic construct
  misc_feature 1..89: note = engineered ribonucleic acid scaffold (ERS) sequence
  source 1..89: mol_type = other RNA
acggcgcttctatctgaattactctgagcgccatcaccagcgactatgtcgtagtgggtaaagctccctcttcggagggagcatcagag

SEQ ID NO: 13698 - RNA, 89 nt, synthetic construct
  misc_feature 1..89: note = engineered ribonucleic acid scaffold (ERS) sequence
  source 1..89: mol_type = other RNA
acggcgcttctatctgtattactctgagcgccatcaccagcgactatgtcgtagtgggtaaagctccctcttcggagggagcatcagag

SEQ ID NO: 13699 - RNA, 88 nt, synthetic construct
  misc_feature 1..88: note = engineered ribonucleic acid scaffold (ERS) sequence
  source 1..88: mol_type = other RNA
acggcgcttctatctggttactctgagcgccatcaccagcgactatgtcgtagtgggtaaagctccctcttcggagggagcatcagag

SEQ ID NO: 13700 - RNA, 88 nt, synthetic construct
  misc_feature 1..88: note = engineered ribonucleic acid scaffold (ERS) sequence
  source 1..88: mol_type = other RNA
acggcgcttctatctgtttactctgagcgccatcaccagcgactatgtcgtagtgggtaaagctccctcttcggagggagcatcagag

SEQ ID NO: 13701 - RNA, 89 nt, synthetic construct
  misc_feature 1..89: note = engineered ribonucleic acid scaffold (ERS) sequence
  source 1..89: mol_type = other RNA
acggcgcttctatctgatttactctgagcgccatcaccagcgactatgtcgtagtgggtaaagctccctcttcggagggagcatcagag

SEQ ID NO: 13702 - RNA, 88 nt, synthetic construct
  misc_feature 1..88: note = engineered ribonucleic acid scaffold (ERS) sequence
  source 1..88: mol_type = other RNA
acggcgcttctatctgattgctctgagcgccatcaccagcgactatgtcgtagtgggtaaagctccctcttcggagggagcatcagag

SEQ ID NO: 13703 - RNA, 91 nt, synthetic construct
  misc_feature 1..91: note = engineered ribonucleic acid scaffold (ERS) sequence
  source 1..91: mol_type = other RNA
acaggcgcttctatatctgattactctgagcgccatcaccagcgactatgtcgtagtgggtaaagctccctcttcggagggagcatcagag

SEQ ID NO: 13704 - RNA, 90 nt, synthetic construct
  misc_feature 1..90: note = engineered ribonucleic acid scaffold (ERS) sequence
  source 1..90: mol_type = other RNA
acaggcgcttctaatctgattactctgagcgccatcaccagcgactatgtcgtagtgggtaaagctccctcttcggagggagcatcagag

SEQ ID NO: 13705 - RNA, 88 nt, synthetic construct
  misc_feature 1..88: note = engineered ribonucleic acid scaffold (ERS) sequence
  source 1..88: mol_type = other RNA
acaggcgcttctactgattactctgagcgccatcaccagcgactatgtcgtagtgggtaaagctccctcttcggagggagcatcagag

SEQ ID NO: 13706 - RNA, 89 nt, synthetic construct
  misc_feature 1..89: note = engineered ribonucleic acid scaffold (ERS) sequence
  source 1..89: mol_type = other RNA
acaggcgcttctaactgattactctgagcgccatcaccagcgactatgtcgtagtgggtaaagctccctcttcggagggagcatcagag

SEQ ID NO: 13707 - RNA, 89 nt, synthetic construct
  misc_feature 1..89: note = engineered ribonucleic acid scaffold (ERS) sequence
  source 1..89: mol_type = other RNA
acaggcgcttctacctgattactctgagcgccatcaccagcgactatgtcgtagtgggtaaagctccctcttcggagggagcatcagag

SEQ ID NO: 13708 - RNA, 89 nt, synthetic construct
  misc_feature 1..89: note = engineered ribonucleic acid scaffold (ERS) sequence
  source 1..89: mol_type = other RNA
acaggcgcttctagctgattactctgagcgccatcaccagcgactatgtcgtagtgggtaaagctccctcttcggagggagcatcagag

SEQ ID NO: 13709 - RNA, 91 nt, synthetic construct
  misc_feature 1..91: note = engineered ribonucleic acid scaffold (ERS) sequence
  source 1..91: mol_type = other RNA
acaggcgcttctattactgattactctgagcgccatcaccagcgactatgtcgtagtgggtaaagctccctcttcggagggagcatcagag

SEQ ID NO: 13710 - RNA, 89 nt, synthetic construct
  misc_feature 1..89: note = engineered ribonucleic acid scaffold (ERS) sequence
  source 1..89: mol_type = other RNA
acaggcgcttctatatgattactctgagcgccatcaccagcgactatgtcgtagtgggtaaagctccctcttcggagggagcatcagag

SEQ ID NO: 13711 - RNA, 89 nt, synthetic construct
  misc_feature 1..89: note = engineered ribonucleic acid scaffold (ERS) sequence
  source 1..89: mol_type = other RNA
acaggcgcttctatgtgattactctgagcgccatcaccagcgactatgtcgtagtgggtaaagctccctcttcggagggagcatcagag

SEQ ID NO: 13712 - RNA, 89 nt, synthetic construct
  misc_feature 1..89: note = engineered ribonucleic acid scaffold (ERS) sequence
  source 1..89: mol_type = other RNA
acaggcgcttctatttgattactctgagcgccatcaccagcgactatgtcgtagtgggtaaagctccctcttcggagggagcatcagag

SEQ ID NO: 13713 - RNA, 90 nt, synthetic construct
  misc_feature 1..90: note = engineered ribonucleic acid scaffold (ERS) sequence
  source 1..90: mol_type = other RNA
acaggcgcttctatcttgattactctgagcgccatcaccagcgactatgtcgtagtgggtaaagctccctcttcggagggagcatcagag

SEQ ID NO: 13714 - RNA, 89 nt, synthetic construct
  misc_feature 1..89: note = engineered ribonucleic acid scaffold (ERS) sequence
  source 1..89: mol_type = other RNA
acaggcgcttctatcagattactctgagcgccatcaccagcgactatgtcgtagtgggtaaagctccctcttcggagggagcatcagag

SEQ ID NO: 13715 - RNA, 89 nt, synthetic construct
  misc_feature 1..89: note = engineered ribonucleic acid scaffold (ERS) sequence
  source 1..89: mol_type = other RNA
acaggcgcttctatcggattactctgagcgccatcaccagcgactatgtcgtagtgggtaaagctccctcttcggagggagcatcagag

SEQ ID NO: 13716 - RNA, 90 nt, synthetic construct
  misc_feature 1..90: note = engineered ribonucleic acid scaffold (ERS) sequence
  source 1..90: mol_type = other RNA
acaggcgcttctatctgaattactctgagcgccatcaccagcgactatgtcgtagtgggtaaagctccctcttcggagggagcatcagag

SEQ ID NO: 13717 - RNA, 90 nt, synthetic construct
  misc_feature 1..90: note = engineered ribonucleic acid scaffold (ERS) sequence
  source 1..90: mol_type = other RNA
acaggcgcttctatctgtattactctgagcgccatcaccagcgactatgtcgtagtgggtaaagctccctcttcggagggagcatcagag

SEQ ID NO: 13718 - RNA, 89 nt, synthetic construct
  misc_feature 1..89: note = engineered ribonucleic acid scaffold (ERS) sequence
  source 1..89: mol_type = other RNA
acaggcgcttctatctggttactctgagcgccatcaccagcgactatgtcgtagtgggtaaagctccctcttcggagggagcatcagag

SEQ ID NO: 13719 - RNA, 89 nt, synthetic construct
  misc_feature 1..89: note = engineered ribonucleic acid scaffold (ERS) sequence
  source 1..89: mol_type = other RNA
acaggcgcttctatctgtttactctgagcgccatcaccagcgactatgtcgtagtgggtaaagctccctcttcggagggagcatcagag

SEQ ID NO: 13720 - RNA, 90 nt, synthetic construct
  misc_feature 1..90: note = engineered ribonucleic acid scaffold (ERS) sequence
  source 1..90: mol_type = other RNA
acaggcgcttctatctgatttactctgagcgccatcaccagcgactatgtcgtagtgggtaaagctccctcttcggagggagcatcagag

SEQ ID NO: 13721 - RNA, 89 nt, synthetic construct
  misc_feature 1..89: note = engineered ribonucleic acid scaffold (ERS) sequence
  source 1..89: mol_type = other RNA
acaggcgcttctatctgattgctctgagcgccatcaccagcgactatgtcgtagtgggtaaagctccctcttcggagggagcatcagag

SEQ ID NO: 13722 - RNA, 91 nt, synthetic construct
  misc_feature 1..91: note = engineered ribonucleic acid scaffold (ERS) sequence
  source 1..91: mol_type = other RNA
acgggcgcttctatatctgattactctgagcgccatcaccagcgactatgtcgtagtgggtaaagctccctcttcggagggagcatcagag

SEQ ID NO: 13723 - RNA, 90 nt, synthetic construct
  misc_feature 1..90: note = engineered ribonucleic acid scaffold (ERS) sequence
  source 1..90: mol_type = other RNA
acgggcgcttctaatctgattactctgagcgccatcaccagcgactatgtcgtagtgggtaaagctccctcttcggagggagcatcagag

SEQ ID NO: 13724 - RNA, 88 nt, synthetic construct
  misc_feature 1..88: note = engineered ribonucleic acid scaffold (ERS) sequence
  source 1..88: mol_type = other RNA
acgggcgcttctactgattactctgagcgccatcaccagcgactatgtcgtagtgggtaaagctccctcttcggagggagcatcagag

SEQ ID NO: 13725 - RNA, 89 nt, synthetic construct
  misc_feature 1..89: note = engineered ribonucleic acid scaffold (ERS) sequence
  source 1..89: mol_type = other RNA
acgggcgcttctaactgattactctgagcgccatcaccagcgactatgtcgtagtgggtaaagctccctcttcggagggagcatcagag

SEQ ID NO: 13726 - RNA, 89 nt, synthetic construct
  misc_feature 1..89: note = engineered ribonucleic acid scaffold (ERS) sequence
  source 1..89: mol_type = other RNA
acgggcgcttctacctgattactctgagcgccatcaccagcgactatgtcgtagtgggtaaagctccctcttcggagggagcatcagag

SEQ ID NO: 13727 - RNA, 89 nt, synthetic construct
  misc_feature 1..89: note = engineered ribonucleic acid scaffold (ERS) sequence
  source 1..89: mol_type = other RNA
acgggcgcttctagctgattactctgagcgccatcaccagcgactatgtcgtagtgggtaaagctccctcttcggagggagcatcagag

SEQ ID NO: 13728 - RNA, 91 nt, synthetic construct
  misc_feature 1..91: note = engineered ribonucleic acid scaffold (ERS) sequence
  source 1..91: mol_type = other RNA
acgggcgcttctattactgattactctgagcgccatcaccagcgactatgtcgtagtgggtaaagctccctcttcggagggagcatcagag

SEQ ID NO: 13729 - RNA, 89 nt, synthetic construct
  misc_feature 1..89: note = engineered ribonucleic acid scaffold (ERS) sequence
  source 1..89: mol_type = other RNA
acgggcgcttctatatgattactctgagcgccatcaccagcgactatgtcgtagtgggtaaagctccctcttcggagggagcatcagag

SEQ ID NO: 13730 - RNA, 89 nt, synthetic construct
  misc_feature 1..89: note = engineered ribonucleic acid scaffold (ERS) sequence
  source 1..89: mol_type = other RNA
acgggcgcttctatgtgattactctgagcgccatcaccagcgactatgtcgtagtgggtaaagctccctcttcggagggagcatcagag

SEQ ID NO: 13731 - RNA, 89 nt, synthetic construct
  misc_feature 1..89: note = engineered ribonucleic acid scaffold (ERS) sequence
  source 1..89: mol_type = other RNA
acgggcgcttctatttgattactctgagcgccatcaccagcgactatgtcgtagtgggtaaagctccctcttcggagggagcatcagag

SEQ ID NO: 13732 - RNA, 90 nt, synthetic construct
  misc_feature 1..90: note = engineered ribonucleic acid scaffold (ERS) sequence
  source 1..90: mol_type = other RNA
acgggcgcttctatcttgattactctgagcgccatcaccagcgactatgtcgtagtgggtaaagctccctcttcggagggagcatcagag

SEQ ID NO: 13733 - RNA, 89 nt, synthetic construct
  misc_feature 1..89: note = engineered ribonucleic acid scaffold (ERS) sequence
  source 1..89: mol_type = other RNA
acgggcgcttctatcagattactctgagcgccatcaccagcgactatgtcgtagtgggtaaagctccctcttcggagggagcatcagag

SEQ ID NO: 13734 - RNA, 89 nt, synthetic construct
  misc_feature 1..89: note = engineered ribonucleic acid scaffold (ERS) sequence
  source 1..89: mol_type = other RNA
acgggcgcttctatcggattactctgagcgccatcaccagcgactatgtcgtagtgggtaaagctccctcttcggagggagcatcagag

SEQ ID NO: 13735 - RNA, 90 nt, synthetic construct
  misc_feature 1..90: note = engineered ribonucleic acid scaffold (ERS) sequence
  source 1..90: mol_type = other RNA
acgggcgcttctatctgaattactctgagcgccatcaccagcgactatgtcgtagtgggtaaagctccctcttcggagggagcatcagag

SEQ ID NO: 13736 - RNA, 90 nt, synthetic construct
  misc_feature 1..90: note = engineered ribonucleic acid scaffold (ERS) sequence
  source 1..90: mol_type = other RNA
acgggcgcttctatctgtattactctgagcgccatcaccagcgactatgtcgtagtgggtaaagctccctcttcggagggagcatcagag

SEQ ID NO: 13737 - RNA, 89 nt, synthetic construct
  misc_feature 1..89: note = engineered ribonucleic acid scaffold (ERS) sequence
  source 1..89: mol_type = other RNA
acgggcgcttctatctggttactctgagcgccatcaccagcgactatgtcgtagtgggtaaagctccctcttcggagggagcatcagag

SEQ ID NO: 13738 - RNA, 89 nt, synthetic construct
  misc_feature 1..89: note = engineered ribonucleic acid scaffold (ERS) sequence
  source 1..89: mol_type = other RNA
acgggcgcttctatctgtttactctgagcgccatcaccagcgactatgtcgtagtgggtaaagctccctcttcggagggagcatcagag

SEQ ID NO: 13739 - RNA, 90 nt, synthetic construct
  misc_feature 1..90: note = engineered ribonucleic acid scaffold (ERS) sequence
  source 1..90: mol_type = other RNA
acgggcgcttctatctgatttactctgagcgccatcaccagcgactatgtcgtagtgggtaaagctccctcttcggagggagcatcagag

SEQ ID NO: 13740 - RNA, 89 nt, synthetic construct
  misc_feature 1..89: note = engineered ribonucleic acid scaffold (ERS) sequence
  source 1..89: mol_type = other RNA
acgggcgcttctatctgattgctctgagcgccatcaccagcgactatgtcgtagtgggtaaagctccctcttcggagggagcatcagag

SEQ ID NO: 13741 - RNA, 92 nt, synthetic construct
  misc_feature 1..92: note = engineered ribonucleic acid scaffold (ERS) sequence
  source 1..92: mol_type = other RNA
actaggcgcttctatatctgattactctgagcgccatcaccagcgactatgtcgtagtgggtaaagctccctcttcggagggagcatcagag

SEQ ID NO: 13742 - RNA, 91 nt, synthetic construct
  misc_feature 1..91: note = engineered ribonucleic acid scaffold (ERS) sequence
  source 1..91: mol_type = other RNA
actaggcgcttctaatctgattactctgagcgccatcaccagcgactatgtcgtagtgggtaaagctccctcttcggagggagcatcagag

SEQ ID NO: 13743 - RNA, 89 nt, synthetic construct
  misc_feature 1..89: note = engineered ribonucleic acid scaffold (ERS) sequence
  source 1..89: mol_type = other RNA
actaggcgcttctactgattactctgagcgccatcaccagcgactatgtcgtagtgggtaaagctccctcttcggagggagcatcagag

SEQ ID NO: 13744 - RNA, 90 nt, synthetic construct
  misc_feature 1..90: note = engineered ribonucleic acid scaffold (ERS) sequence
  source 1..90: mol_type = other RNA
actaggcgcttctaactgattactctgagcgccatcaccagcgactatgtcgtagtgggtaaagctccctcttcggagggagcatcagag

SEQ ID NO: 13745 - RNA, 90 nt, synthetic construct
  misc_feature 1..90: note = engineered ribonucleic acid scaffold (ERS) sequence
  source 1..90: mol_type = other RNA
actaggcgcttctacctgattactctgagcgccatcaccagcgactatgtcgtagtgggtaaagctccctcttcggagggagcatcagag

SEQ ID NO: 13746 - RNA, 90 nt, synthetic construct
  misc_feature 1..90: note = engineered ribonucleic acid scaffold (ERS) sequence
  source 1..90: mol_type = other RNA
actaggcgcttctagctgattactctgagcgccatcaccagcgactatgtcgtagtgggtaaagctccctcttcggagggagcatcagag

SEQ ID NO: 13747 - RNA, 92 nt, synthetic construct
  misc_feature 1..92: note = engineered ribonucleic acid scaffold (ERS) sequence
  source 1..92: mol_type = other RNA
actaggcgcttctattactgattactctgagcgccatcaccagcgactatgtcgtagtgggtaaagctccctcttcggagggagcatcagag

SEQ ID NO: 13748 - RNA, 90 nt, synthetic construct
  misc_feature 1..90: note = engineered ribonucleic acid scaffold (ERS) sequence
  source 1..90: mol_type = other RNA
actaggcgcttctatatgattactctgagcgccatcaccagcgactatgtcgtagtgggtaaagctccctcttcggagggagcatcagag

SEQ ID NO: 13749 - RNA, 90 nt, synthetic construct
  misc_feature 1..90: note = engineered ribonucleic acid scaffold (ERS) sequence
  source 1..90: mol_type = other RNA
actaggcgcttctatgtgattactctgagcgccatcaccagcgactatgtcgtagtgggtaaagctccctcttcggagggagcatcagag

SEQ ID NO: 13750 - RNA, 90 nt, synthetic construct
  misc_feature 1..90: note = engineered ribonucleic acid scaffold (ERS) sequence
  source 1..90: mol_type = other RNA
actaggcgcttctatttgattactctgagcgccatcaccagcgactatgtcgtagtgggtaaagctccctcttcggagggagcatcagag

SEQ ID NO: 13751 - RNA, 91 nt, synthetic construct
  misc_feature 1..91: note = engineered ribonucleic acid scaffold (ERS) sequence
  source 1..91: mol_type = other RNA
actaggcgcttctatcttgattactctgagcgccatcaccagcgactatgtcgtagtgggtaaagctccctcttcggagggagcatcagag

SEQ ID NO: 13752 - RNA, 90 nt, synthetic construct
  misc_feature 1..90: note = engineered ribonucleic acid scaffold (ERS) sequence
  source 1..90: mol_type = other RNA
actaggcgcttctatcagattactctgagcgccatcaccagcgactatgtcgtagtgggtaaagctccctcttcggagggagcatcagag

SEQ ID NO: 13753 - RNA, 90 nt, synthetic construct
  misc_feature 1..90: note = engineered ribonucleic acid scaffold (ERS) sequence
  source 1..90: mol_type = other RNA
actaggcgcttctatcggattactctgagcgccatcaccagcgactatgtcgtagtgggtaaagctccctcttcggagggagcatcagag

SEQ ID NO: 13754 - RNA, 91 nt, synthetic construct
  misc_feature 1..91: note = engineered ribonucleic acid scaffold (ERS) sequence
  source 1..91: mol_type = other RNA
actaggcgcttctatctgaattactctgagcgccatcaccagcgactatgtcgtagtgggtaaagctccctcttcggagggagcatcagag

SEQ ID NO: 13755 - RNA, 91 nt, synthetic construct
  misc_feature 1..91: note = engineered ribonucleic acid scaffold (ERS) sequence
  source 1..91: mol_type = other RNA
actaggcgcttctatctgtattactctgagcgccatcaccagcgactatgtcgtagtgggtaaagctccctcttcggagggagcatcagag

SEQ ID NO: 13756 - RNA, 90 nt, synthetic construct
  misc_feature 1..90: note = engineered ribonucleic acid scaffold (ERS) sequence
  source 1..90: mol_type = other RNA
actaggcgcttctatctggttactctgagcgccatcaccagcgactatgtcgtagtgggtaaagctccctcttcggagggagcatcagag

SEQ ID NO: 13757 - RNA, 90 nt, synthetic construct
  misc_feature 1..90: note = engineered ribonucleic acid scaffold (ERS) sequence
  source 1..90: mol_type = other RNA
actaggcgcttctatctgtttactctgagcgccatcaccagcgactatgtcgtagtgggtaaagctccctcttcggagggagcatcagag

SEQ ID NO: 13758 - RNA, 91 nt, synthetic construct
  misc_feature 1..91: note = engineered ribonucleic acid scaffold (ERS) sequence
  source 1..91: mol_type = other RNA
actaggcgcttctatctgatttactctgagcgccatcaccagcgactatgtcgtagtgggtaaagctccctcttcggagggagcatcagag

SEQ ID NO: 13759 - RNA, 90 nt, synthetic construct
  misc_feature 1..90: note = engineered ribonucleic acid scaffold (ERS) sequence
  source 1..90: mol_type = other RNA
actaggcgcttctatctgattgctctgagcgccatcaccagcgactatgtcgtagtgggtaaagctccctcttcggagggagcatcagag

SEQ ID NO: 13760 - RNA, 86 nt, synthetic construct
  misc_feature 1..86: note = engineered ribonucleic acid scaffold (ERS) sequence
  source 1..86: mol_type = other RNA
acacacggttctatctgattactctgccgtgttcaccagcgactatgtcgtagtgggtaaactccctcttcggagggagatcagag

SEQ ID NO: 13761 - RNA, 86 nt, synthetic construct
  misc_feature 1..86: note = engineered ribonucleic acid scaffold (ERS) sequence
  source 1..86: mol_type = other RNA
acactggtttctatctgattactctgaccagttcaccagcgactatgtcgtagtgggtaaactccctcttcggagggagatcagag

SEQ ID NO: 13762 - RNA, 86 nt, synthetic construct
  misc_feature 1..86: note = engineered ribonucleic acid scaffold (ERS) sequence
  source 1..86: mol_type = other RNA
acaggccgttctatctgattactctgcggccttcaccagcgactatgtcgtagtgggtaaactccctcttcggagggagatcagag

SEQ ID NO: 13763 - RNA, 86 nt, synthetic construct
  misc_feature 1..86: note = engineered ribonucleic acid scaffold (ERS) sequence
  source 1..86: mol_type = other RNA
acaggtccttctatctgattactctgggaccttcaccagcgactatgtcgtagtgggtaaactccctcttcggagggagatcagag

SEQ ID NO: 13764 - RNA, 86 nt, synthetic construct
  misc_feature 1..86: note = engineered ribonucleic acid scaffold (ERS) sequence
  source 1..86: mol_type = other RNA
accagcaattctatctgattactctgttgctgtcaccagcgactatgtcgtagtgggtaaactccctcttcggagggagatcagag

SEQ ID NO: 13765 - RNA, 86 nt, synthetic construct
  misc_feature 1..86: note = engineered ribonucleic acid scaffold (ERS) sequence
  source 1..86: mol_type = other RNA
accgagacttctatctgattactctgggctcgtcaccagcgactatgtcgtagtgggtaaactccctcttcggagggagatcagag

SEQ ID NO: 13766 - RNA, 86 nt, synthetic construct
  misc_feature 1..86: note = engineered ribonucleic acid scaffold (ERS) sequence
  source 1..86: mol_type = other RNA
acctgtagttctatctgattactctgctacagtcaccagcgactatgtcgtagtgggtaaactccctcttcggagggagatcagag

SEQ ID NO: 13767 - RNA, 86 nt, synthetic construct
  misc_feature 1..86: note = engineered ribonucleic acid scaffold (ERS) sequence
  source 1..86: mol_type = other RNA
acgagcacttctatctgattactctggggctctcaccagcgactatgtcgtagtgggtaaactccctcttcggagggagatcagag

SEQ ID NO: 13768 - RNA, 86 nt, synthetic construct
  misc_feature 1..86: note = engineered ribonucleic acid scaffold (ERS) sequence
  source 1..86: mol_type = other RNA
acgaggtgttctatctgattactctgcacctctcaccagcgactatgtcgtagtgggtaaactccctcttcggagggagatcagag

SEQ ID NO: 13769 - RNA, 86 nt, synthetic construct
  misc_feature 1..86: note = engineered ribonucleic acid scaffold (ERS) sequence
  source 1..86: mol_type = other RNA
acgggactttctatctgattactctgagtccctcaccagcgactatgtcgtagtgggtaaactccctcttcggagggagatcagag

SEQ ID NO: 13770 - RNA, 86 nt, synthetic construct
  misc_feature 1..86: note = engineered ribonucleic acid scaffold (ERS) sequence
  source 1..86: mol_type = other RNA
acgggcaattctatctgattactctgttgccctcaccagcgactatgtcgtagtgggtaaactccctcttcggagggagatcagag

SEQ ID NO: 13771 - RNA, 86 nt, synthetic construct
  misc_feature 1..86: note = engineered ribonucleic acid scaffold (ERS) sequence
  source 1..86: mol_type = other RNA
actgtgcgttctatctgattactctgcgcacatcaccagcgactatgtcgtagtgggtaaactccctcttcggagggagatcagag

SEQ ID NO: 13772 - RNA, 87 nt, synthetic construct
  misc_feature 1..87: note = engineered ribonucleic acid scaffold (ERS) sequence
  source 1..87: mol_type = other RNA
actggcgcttctatctgattactctgggcgccatcaccagcgactatgtcgtagtgggtaaactccctcttcggagggagatcagag

SEQ ID NO: 13773 - RNA, 87 nt, synthetic construct
  misc_feature 1..87: note = engineered ribonucleic acid scaffold (ERS) sequence
  source 1..87: mol_type = other RNA
actggcgcttctatctgattactctgggagccatcaccagcgactatgtcgtagtgggtaaactccctcttcggagggagatcagag

SEQ ID NO: 13774 - RNA, 87 nt, synthetic construct
  misc_feature 1..87: note = engineered ribonucleic acid scaffold (ERS) sequence
  source 1..87: mol_type = other RNA
actggcgcttctatctgattactctgtgagccatcaccagcgactatgtcgtagtgggtaaactccctcttcggagggagatcagag

SEQ ID NO: 13775 - RNA, 88 nt, synthetic construct
  misc_feature 1..88: note = engineered ribonucleic acid scaffold (ERS) sequence
  source 1..88: mol_type = other RNA
actggcgcttctatctgattactctgaggagccatcaccagcgactatgtcgtagtgggtaaactccctcttcggagggagatcagag

SEQ ID NO: 13776 - RNA, 87 nt, synthetic construct
  misc_feature 1..87: note = engineered ribonucleic acid scaffold (ERS) sequence
  source 1..87: mol_type = other RNA
actggcgcttctatctgattactctgatagccatcaccagcgactatgtcgtagtgggtaaactccctcttcggagggagatcagag

SEQ ID NO: 13777 - RNA, 88 nt, synthetic construct
  misc_feature 1..88: note = engineered ribonucleic acid scaffold (ERS) sequence
  source 1..88: mol_type = other RNA
actggcgcttctatctgattactctgagctgccatcaccagcgactatgtcgtagtgggtaaactccctcttcggagggagatcagag

SEQ ID NO: 13778 - RNA, 88 nt, synthetic construct
  misc_feature 1..88: note = engineered ribonucleic acid scaffold (ERS) sequence
  source 1..88: mol_type = other RNA
actggcacttctatctgattactctgagtagccatcaccagcgactatgtcgtagtgggtaaactccctcttcggagggagatcagag

SEQ ID NO: 13779 - RNA, 88 nt, synthetic construct
  misc_feature 1..88: note = engineered ribonucleic acid scaffold (ERS) sequence
  source 1..88: mol_type = other RNA
actggcgcttctatctgattactctgagtagccatcaccagcgactatgtcgtagtgggtaaactccctcttcggagggagatcagag

SEQ ID NO: 13780 - RNA, 87 nt, synthetic construct
  misc_feature 1..87: note = engineered ribonucleic acid scaffold (ERS) sequence
  source 1..87: mol_type = other RNA
actggcgcttctatctgattactctgagcaccatcaccagcgactatgtcgtagtgggtaaactccctcttcggagggagatcagag

SEQ ID NO: 13781 - RNA, 87 nt, synthetic construct
  misc_feature 1..87: note = engineered ribonucleic acid scaffold (ERS) sequence
  source 1..87: mol_type = other RNA
actggcacttctatctgattactctgagcgccatcaccagcgactatgtcgtagtgggtaaactccctcttcggagggagatcagag

SEQ ID NO: 13782 - RNA, 87 nt, synthetic construct
  misc_feature 1..87: note = engineered ribonucleic acid scaffold (ERS) sequence
  source 1..87: mol_type = other RNA
actggcgcttctatctgattactctgagggccatcaccagcgactatgtcgtagtgggtaaactccctcttcggagggagatcagag

SEQ ID NO: 13783 - RNA, 87 nt, synthetic construct
  misc_feature 1..87: note = engineered ribonucleic acid scaffold (ERS) sequence
  source 1..87: mol_type = other RNA
actggcgcttctatctgattactctgagtgccgtcaccagcgactatgtcgtagtgggtaaactccctcttcggagggagatcagag

SEQ ID NO: 13784 - RNA, 87 nt, synthetic construct
  misc_feature 1..87: note = engineered ribonucleic acid scaffold (ERS) sequence
  source 1..87: mol_type = other RNA
actggcacttctatctgattactctgagtgccatcaccagcgactatgtcgtagtgggtaaactccctcttcggagggagatcagag

SEQ ID NO: 13785 - RNA, 87 nt, synthetic construct
  misc_feature 1..87: note = engineered ribonucleic acid scaffold (ERS) sequence
  source 1..87: mol_type = other RNA
actggcgcttctatctgattactctgagaaccatcaccagcgactatgtcgtagtgggtaaactccctcttcggagggagatcagag

SEQ ID NO: 13786 - RNA, 87 nt, synthetic construct
  misc_feature 1..87: note = engineered ribonucleic acid scaffold (ERS) sequence
  source 1..87: mol_type = other RNA
actggcgcttctatctgattactctgagagccgtcaccagcgactatgtcgtagtgggtaaactccctcttcggagggagatcagag

SEQ ID NO: 13787 - RNA, 87 nt, synthetic construct
  misc_feature 1..87: note = engineered ribonucleic acid scaffold (ERS) sequence
  source 1..87: mol_type = other RNA
actggcgcttctatctgattactctgagagccttcaccagcgactatgtcgtagtgggtaaactccctcttcggagggagatcagag

SEQ ID NO: 13788 - RNA, 87 nt, synthetic construct
  misc_feature 1..87: note = engineered ribonucleic acid scaffold (ERS) sequence
  source 1..87: mol_type = other RNA
actggggcttctatctgattactctgagacccatcaccagcgactatgtcgtagtgggtaaactccctcttcggagggagatcagag

SEQ ID NO: 13789 - RNA, 87 nt, synthetic construct
  misc_feature 1..87: note = engineered ribonucleic acid scaffold (ERS) sequence
  source 1..87: mol_type = other RNA
actggtgcttctatctgattactctgagagccatcaccagcgactatgtcgtagtgggtaaactccctcttcggagggagatcagag

SEQ ID NO: 13790 - RNA, 87 nt, synthetic construct
  misc_feature 1..87: note = engineered ribonucleic acid scaffold (ERS) sequence
  source 1..87: mol_type = other RNA
actgggccttctatctgattactctgaggcccatcaccagcgactatgtcgtagtgggtaaactccctcttcggagggagatcagag

SEQ ID NO: 13791 - RNA, 88 nt, synthetic construct
  misc_feature 1..88: note = engineered ribonucleic acid scaffold (ERS) sequence
  source 1..88: mol_type = other RNA
actggcccttctatctgattactctgaggagccatcaccagcgactatgtcgtagtgggtaaactccctcttcggagggagatcagag

SEQ ID NO: 13792 - RNA, 87 nt, synthetic construct
  misc_feature 1..87: note = engineered ribonucleic acid scaffold (ERS) sequence
  source 1..87: mol_type = other RNA
actggcccttctatctgattactctgagggccatcaccagcgactatgtcgtagtgggtaaactccctcttcggagggagatcagag

SEQ ID NO: 13793 - RNA, 87 nt, synthetic construct
  misc_feature 1..87: note = engineered ribonucleic acid scaffold (ERS) sequence
  source 1..87: mol_type = other RNA
actggcccttctatctgattactctgagtgccatcaccagcgactatgtcgtagtgggtaaactccctcttcggagggagatcagag

SEQ ID NO: 13794 - RNA, 87 nt, synthetic construct
  misc_feature 1..87: note = engineered ribonucleic acid scaffold (ERS) sequence
  source 1..87: mol_type = other RNA
actggcccttctatctgattactctgagagccatcaccagcgactatgtcgtagtgggtaaactccctcttcggagggagatcagag

SEQ ID NO: 13795 - RNA, 88 nt, synthetic construct
  misc_feature 1..88: note = engineered ribonucleic acid scaffold (ERS) sequence
  source 1..88: mol_type = other RNA
actggcgcttctatctgattactctgagcagccatcaccagcgactatgtcgtagtgggtaaactccctcttcggagggagatcagag

SEQ ID NO: 13796 - RNA, 87 nt, synthetic construct; identical to SEQ ID NO: 900
  misc_feature 1..87: note = engineered ribonucleic acid scaffold (ERS) sequence
  source 1..87: mol_type = other RNA

SEQ ID NO: 13797 - RNA, 87 nt, synthetic construct
  misc_feature 1..87: note = engineered ribonucleic acid scaffold (ERS) sequence
  source 1..87: mol_type = other RNA
actggcgcttctatctgattactctgagtgccatcaccagcgactatgtcgtagtgggtaaactccctcttcggagggagatcagag

SEQ ID NO: 13798 - RNA, 87 nt, synthetic construct
  misc_feature 1..87: note = engineered ribonucleic acid scaffold (ERS) sequence
  source 1..87: mol_type = other RNA
actggcgcttctatctgattactctgagagccatcaccagcgactatgtcgtagtgggtaaactccctcttcggagggagatcagag

SEQ ID NO: 13799 - RNA, 87 nt, synthetic construct
  misc_feature 1..87: note = engineered ribonucleic acid scaffold (ERS) sequence
  source 1..87: mol_type = other RNA
actggctcttctatctgattactctgagcgccatcaccagcgactatgtcgtagtgggtaaactccctcttcggagggagatcagag

SEQ ID NO: 13800 - RNA, 87 nt, synthetic construct
  misc_feature 1..87: note = engineered ribonucleic acid scaffold (ERS) sequence
  source 1..87: mol_type = other RNA
actggctcttctatctgattactctgagggccatcaccagcgactatgtcgtagtgggtaaactccctcttcggagggagatcagag

SEQ ID NO: 13801 - RNA, 87 nt, synthetic construct
  misc_feature 1..87: note = engineered ribonucleic acid scaffold (ERS) sequence
  source 1..87: mol_type = other RNA
actggctcttctatctgattactctgagtgccatcaccagcgactatgtcgtagtgggtaaactccctcttcggagggagatcagag

SEQ ID NO: 13802 - RNA, 87 nt, synthetic construct
  misc_feature 1..87: note = engineered ribonucleic acid scaffold (ERS) sequence
  source 1..87: mol_type = other RNA
actggctcttctatctgattactctgagagccatcaccagcgactatgtcgtagtgggtaaactccctcttcggagggagatcagag

SEQ ID NO: 13803 - RNA, 87 nt, synthetic construct
  misc_feature 1..87: note = engineered ribonucleic acid scaffold (ERS) sequence
  source 1..87: mol_type = other RNA
actggcggttctatctgattactctgagcgccatcaccagcgactatgtcgtagtgggtaaactccctcttcggagggagatcagag

SEQ ID NO: 13804 - RNA, 87 nt, synthetic construct
  misc_feature 1..87: note = engineered ribonucleic acid scaffold (ERS) sequence
  source 1..87: mol_type = other RNA
actggcggttctatctgattactctgagagccatcaccagcgactatgtcgtagtgggtaaactccctcttcggagggagatcagag

SEQ ID NO: 13805 - RNA, 88 nt, synthetic construct
  misc_feature 1..88: note = engineered ribonucleic acid scaffold (ERS) sequence
  source 1..88: mol_type = other RNA
acacacggttctatctgattactctgccgtgttcaccagcgactatgtcgtagtgggtaaagcgccctcttcggagggagcatcagag

SEQ ID NO: 13806 - RNA, 88 nt, synthetic construct
  misc_feature 1..88: note = engineered ribonucleic acid scaffold (ERS) sequence
  source 1..88: mol_type = other RNA
acactggtttctatctgattactctgaccagttcaccagcgactatgtcgtagtgggtaaagcgccctcttcggagggagcatcagag

SEQ ID NO: 13807 - RNA, 88 nt, synthetic construct
  misc_feature 1..88: note = engineered ribonucleic acid scaffold (ERS) sequence
  source 1..88: mol_type = other RNA
acaggccgttctatctgattactctgcggccttcaccagcgactatgtcgtagtgggtaaagcgccctcttcggagggagcatcagag

SEQ ID NO: 13808 - RNA, 88 nt, synthetic construct
  misc_feature 1..88: note = engineered ribonucleic acid scaffold (ERS) sequence
  source 1..88: mol_type = other RNA
acaggtccttctatctgattactctgggaccttcaccagcgactatgtcgtagtgggtaaagcgccctcttcggagggagcatcagag

SEQ ID NO: 13809 - RNA, 88 nt, synthetic construct
  misc_feature 1..88: note = engineered ribonucleic acid scaffold (ERS) sequence
  source 1..88: mol_type = other RNA
accagcaattctatctgattactctgttgctgtcaccagcgactatgtcgtagtgggtaaagcgccctcttcggagggagcatcagag

SEQ ID NO: 13810 - RNA, 88 nt, synthetic construct
  misc_feature 1..88: note = engineered ribonucleic acid scaffold (ERS) sequence
  source 1..88: mol_type = other RNA
accgagacttctatctgattactctgggctcgtcaccagcgactatgtcgtagtgggtaaagcgccctcttcggagggagcatcagag

SEQ ID NO: 13811 - RNA, 88 nt, synthetic construct
  misc_feature 1..88: note = engineered ribonucleic acid scaffold (ERS) sequence
  source 1..88: mol_type = other RNA
acctgtagttctatctgattactctgctacagtcaccagcgactatgtcgtagtgggtaaagcgccctcttcggagggagcatcagag

SEQ ID NO: 13812 - RNA, 88 nt, synthetic construct
  misc_feature 1..88: note = engineered ribonucleic acid scaffold (ERS) sequence
  source 1..88: mol_type = other RNA
acgagcacttctatctgattactctggggctctcaccagcgactatgtcgtagtgggtaaagcgccctcttcggagggagcatcagag

SEQ ID NO: 13813 - RNA, 88 nt, synthetic construct
  misc_feature 1..88: note = engineered ribonucleic acid scaffold (ERS) sequence
  source 1..88: mol_type = other RNA
acgaggtgttctatctgattactctgcacctctcaccagcgactatgtcgtagtgggtaaagcgccctcttcggagggagcatcagag

SEQ ID NO: 13814 - RNA, 88 nt, synthetic construct
  misc_feature 1..88: note = engineered ribonucleic acid scaffold (ERS) sequence
  source 1..88: mol_type = other RNA
acgggactttctatctgattactctgagtccctcaccagcgactatgtcgtagtgggtaaagcgccctcttcggagggagcatcagag

SEQ ID NO: 13815 - RNA, 88 nt, synthetic construct
  misc_feature 1..88: note = engineered ribonucleic acid scaffold (ERS) sequence
  source 1..88: mol_type = other RNA
acgggcaattctatctgattactctgttgccctcaccagcgactatgtcgtagtgggtaaagcgccctcttcggagggagcatcagag

SEQ ID NO: 13816 - RNA, 88 nt, synthetic construct
  misc_feature 1..88: note = engineered ribonucleic acid scaffold (ERS) sequence
  source 1..88: mol_type = other RNA
actgtgcgttctatctgattactctgcgcacatcaccagcgactatgtcgtagtgggtaaagcgccctcttcggagggagcatcagag

SEQ ID NO: 13817 - RNA, 89 nt, synthetic construct
  misc_feature 1..89: note = engineered ribonucleic acid scaffold (ERS) sequence
  source 1..89: mol_type = other RNA
actggcgcttctatctgattactctgggcgccatcaccagcgactatgtcgtagtgggtaaagcgccctcttcggagggagcatcagag

SEQ ID NO: 13818 - RNA, 89 nt, synthetic construct
  misc_feature 1..89: note = engineered ribonucleic acid scaffold (ERS) sequence
  source 1..89: mol_type = other RNA
actggcgcttctatctgattactctgggagccatcaccagcgactatgtcgtagtgggtaaagcgccctcttcggagggagcatcagag

SEQ ID NO: 13819 - RNA, 89 nt, synthetic construct
  misc_feature 1..89: note = engineered ribonucleic acid scaffold (ERS) sequence
  source 1..89: mol_type = other RNA
actggcgcttctatctgattactctgtgagccatcaccagcgactatgtcgtagtgggtaaagcgccctcttcggagggagcatcagag

SEQ ID NO: 13820 - RNA, 90 nt, synthetic construct
  misc_feature 1..90: note = engineered ribonucleic acid scaffold (ERS) sequence
  source 1..90: mol_type = other RNA
actggcgcttctatctgattactctgaggagccatcaccagcgactatgtcgtagtgggtaaagcgccctcttcggagggagcatcagag

SEQ ID NO: 13821 - RNA, 89 nt, synthetic construct
  misc_feature 1..89: note = engineered ribonucleic acid scaffold (ERS) sequence
  source 1..89: mol_type = other RNA
actggcgcttctatctgattactctgatagccatcaccagcgactatgtcgtagtgggtaaagcgccctcttcggagggagcatcagag

SEQ ID NO: 13822 - RNA, 90 nt, synthetic construct
  misc_feature 1..90: note = engineered ribonucleic acid scaffold (ERS) sequence
  source 1..90: mol_type = other RNA
actggcgcttctatctgattactctgagctgccatcaccagcgactatgtcgtagtgggtaaagcgccctcttcggagggagcatcagag

SEQ ID NO: 13823 - RNA, 90 nt, synthetic construct
  misc_feature 1..90: note = engineered ribonucleic acid scaffold (ERS) sequence
  source 1..90: mol_type = other RNA
actggcacttctatctgattactctgagtagccatcaccagcgactatgtcgtagtgggtaaagcgccctcttcggagggagcatcagag

SEQ ID NO: 13824 - RNA, 90 nt, synthetic construct
  misc_feature 1..90: note = engineered ribonucleic acid scaffold (ERS) sequence
  source 1..90: mol_type = other RNA
actggcgcttctatctgattactctgagtagccatcaccagcgactatgtcgtagtgggtaaagcgccctcttcggagggagcatcagag

SEQ ID NO: 13825 - RNA, 89 nt, synthetic construct
  misc_feature 1..89: note = engineered ribonucleic acid scaffold (ERS) sequence
  source 1..89: mol_type = other RNA
actggcgcttctatctgattactctgagcaccatcaccagcgactatgtcgtagtgggtaaagcgccctcttcggagggagcatcagag

SEQ ID NO: 13826 - RNA, 89 nt, synthetic construct
  misc_feature 1..89: note = engineered ribonucleic acid scaffold (ERS) sequence
  source 1..89: mol_type = other RNA
actggcacttctatctgattactctgagcgccatcaccagcgactatgtcgtagtgggtaaagcgccctcttcggagggagcatcagag

SEQ ID NO: 13827 - RNA, 89 nt, synthetic construct
  misc_feature 1..89: note = engineered ribonucleic acid scaffold (ERS) sequence
  source 1..89: mol_type = other RNA
actggcgcttctatctgattactctgagggccatcaccagcgactatgtcgtagtgggtaaagcgccctcttcggagggagcatcagag

SEQ ID NO: 13828 - RNA, 89 nt, synthetic construct
  misc_feature 1..89: note = engineered ribonucleic acid scaffold (ERS) sequence
  source 1..89: mol_type = other RNA
actggcgcttctatctgattactctgagtgccgtcaccagcgactatgtcgtagtgggtaaagcgccctcttcggagggagcatcagag

SEQ ID NO: 13829 - RNA, 89 nt, synthetic construct
  misc_feature 1..89: note = engineered ribonucleic acid scaffold (ERS) sequence
  source 1..89: mol_type = other RNA
actggcacttctatctgattactctgagtgccatcaccagcgactatgtcgtagtgggtaaagcgccctcttcggagggagcatcagag

SEQ ID NO: 13830 - RNA, 89 nt, synthetic construct
  misc_feature 1..89: note = engineered ribonucleic acid scaffold (ERS) sequence
  source 1..89: mol_type = other RNA
actggcgcttctatctgattactctgagaaccatcaccagcgactatgtcgtagtgggtaaagcgccctcttcggagggagcatcagag

SEQ ID NO: 13831 - RNA, 89 nt, synthetic construct
  misc_feature 1..89: note = engineered ribonucleic acid scaffold (ERS) sequence
  source 1..89: mol_type = other RNA
actggcgcttctatctgattactctgagagccgtcaccagcgactatgtcgtagtgggtaaagcgccctcttcggagggagcatcagag

SEQ ID NO: 13832 - RNA, 89 nt, synthetic construct
  misc_feature 1..89: note = engineered ribonucleic acid scaffold (ERS) sequence
  source 1..89: mol_type = other RNA
actggcgcttctatctgattactctgagagccttcaccagcgactatgtcgtagtgggtaaagcgccctcttcggagggagcatcagag

SEQ ID NO: 13833 - RNA, 89 nt, synthetic construct
  misc_feature 1..89: note = engineered ribonucleic acid scaffold (ERS) sequence
  source 1..89: mol_type = other RNA
actggggcttctatctgattactctgagacccatcaccagcgactatgtcgtagtgggtaaagcgccctcttcggagggagcatcagag

SEQ ID NO: 13834 - RNA, 89 nt, synthetic construct
  misc_feature 1..89: note = engineered ribonucleic acid scaffold (ERS) sequence
  source 1..89: mol_type = other RNA
actggtgcttctatctgattactctgagagccatcaccagcgactatgtcgtagtgggtaaagcgccctcttcggagggagcatcagag

SEQ ID NO: 13835 - RNA, 89 nt, synthetic construct
  misc_feature 1..89: note = engineered ribonucleic acid scaffold (ERS) sequence
  source 1..89: mol_type = other RNA
actgggccttctatctgattactctgaggcccatcaccagcgactatgtcgtagtgggtaaagcgccctcttcggagggagcatcagag

SEQ ID NO: 13836 - RNA, 90 nt, synthetic construct
  misc_feature 1..90: note = engineered ribonucleic acid scaffold (ERS) sequence
  source 1..90: mol_type = other RNA
actggcccttctatctgattactctgaggagccatcaccagcgactatgtcgtagtgggtaaagcgccctcttcggagggagcatcagag

SEQ ID NO: 13837 - RNA, 89 nt, synthetic construct
  misc_feature 1..89: note = engineered ribonucleic acid scaffold (ERS) sequence
  source 1..89: mol_type = other RNA
actggcccttctatctgattactctgagggccatcaccagcgactatgtcgtagtgggtaaagcgccctcttcggagggagcatcagag

SEQ ID NO: 13838 - RNA, 89 nt, synthetic construct
  misc_feature 1..89: note = engineered ribonucleic acid scaffold (ERS) sequence
  source 1..89: mol_type = other RNA
actggcccttctatctgattactctgagtgccatcaccagcgactatgtcgtagtgggtaaagcgccctcttcggagggagcatcagag

SEQ ID NO: 13839 - RNA, 89 nt, synthetic construct
  misc_feature 1..89: note = engineered ribonucleic acid scaffold (ERS) sequence
  source 1..89: mol_type = other RNA
actggcccttctatctgattactctgagagccatcaccagcgactatgtcgtagtgggtaaagcgccctcttcggagggagcatcagag

SEQ ID NO: 13840 - RNA, 90 nt, synthetic construct
  misc_feature 1..90: note = engineered ribonucleic acid scaffold (ERS) sequence
  source 1..90: mol_type = other RNA
actggcgcttctatctgattactctgagcagccatcaccagcgactatgtcgtagtgggtaaagcgccctcttcggagggagcatcagag

SEQ ID NO: 13841 - RNA, 89 nt, synthetic construct; identical to SEQ ID NO: 901
  misc_feature 1..89: note = engineered ribonucleic acid scaffold (ERS) sequence
  source 1..89: mol_type = other RNA

SEQ ID NO: 13842 - RNA, 89 nt, synthetic construct
  misc_feature 1..89: note = engineered ribonucleic acid scaffold (ERS) sequence
  source 1..89: mol_type = other RNA
actggcgcttctatctgattactctgagtgccatcaccagcgactatgtcgtagtgggtaaagcgccctcttcggagggagcatcagag

SEQ ID NO: 13843 - RNA, 89 nt, synthetic construct
  misc_feature 1..89: note = engineered ribonucleic acid scaffold (ERS) sequence
  source 1..89: mol_type = other RNA
actggcgcttctatctgattactctgagagccatcaccagcgactatgtcgtagtgggtaaagcgccctcttcggagggagcatcagag

SEQ ID NO: 13844 - RNA, 89 nt, synthetic construct
  misc_feature 1..89: note = engineered ribonucleic acid scaffold (ERS) sequence
  source 1..89: mol_type = other RNA
actggctcttctatctgattactctgagcgccatcaccagcgactatgtcgtagtgggtaaagcgccctcttcggagggagcatcagag

SEQ ID NO: 13845 - RNA, 89 nt, synthetic construct
  misc_feature 1..89: note = engineered ribonucleic acid scaffold (ERS) sequence
  source 1..89: mol_type = other RNA
actggctcttctatctgattactctgagggccatcaccagcgactatgtcgtagtgggtaaagcgccctcttcggagggagcatcagag

SEQ ID NO: 13846 - RNA, 89 nt, synthetic construct
  misc_feature 1..89: note = engineered ribonucleic acid scaffold (ERS) sequence
  source 1..89: mol_type = other RNA
actggctcttctatctgattactctgagtgccatcaccagcgactatgtcgtagtgggtaaagcgccctcttcggagggagcatcagag

SEQ ID NO: 13847 - RNA, 89 nt, synthetic construct
  misc_feature 1..89: note = engineered ribonucleic acid scaffold (ERS) sequence
  source 1..89: mol_type = other RNA
actggctcttctatctgattactctgagagccatcaccagcgactatgtcgtagtgggtaaagcgccctcttcggagggagcatcagag

SEQ ID NO: 13848 - RNA, 89 nt, synthetic construct
  misc_feature 1..89: note = engineered ribonucleic acid scaffold (ERS) sequence
  source 1..89: mol_type = other RNA
actggcggttctatctgattactctgagcgccatcaccagcgactatgtcgtagtgggtaaagcgccctcttcggagggagcatcagag

SEQ ID NO: 13849 - RNA, 89 nt, synthetic construct
  misc_feature 1..89: note = engineered ribonucleic acid scaffold (ERS) sequence
  source 1..89: mol_type = other RNA
actggcggttctatctgattactctgagagccatcaccagcgactatgtcgtagtgggtaaagcgccctcttcggagggagcatcagag

SEQ ID NO: 13850 - RNA, 98 nt, synthetic construct
  misc_feature 1..98: note = engineered ribonucleic acid scaffold (ERS) sequence
  source 1..98: mol_type = other RNA
acacacggttctatctgattactctgccgtgttcaccagcgactatgtcgtagtgggtaaagcgccttacggacttcggtccgtaaggagcatcagag

SEQ ID NO: 13851 - RNA, 98 nt, synthetic construct
  misc_feature 1..98: note = engineered ribonucleic acid scaffold (ERS) sequence
  source 1..98: mol_type = other RNA
acactggtttctatctgattactctgaccagttcaccagcgactatgtcgtagtgggtaaagcgccttacggacttcggtccgtaaggagcatcagag

SEQ ID NO: 13852 - RNA, 98 nt, synthetic construct
  misc_feature 1..98: note = engineered ribonucleic acid scaffold (ERS) sequence
  source 1..98: mol_type = other RNA
acaggccgttctatctgattactctgcggccttcaccagcgactatgtcgtagtgggtaaagcgccttacggacttcggtccgtaaggagcatcagag

SEQ ID NO: 13853 - RNA, 98 nt, synthetic construct
  misc_feature 1..98: note = engineered ribonucleic acid scaffold (ERS) sequence
  source 1..98: mol_type = other RNA
acaggtccttctatctgattactctgggaccttcaccagcgactatgtcgtagtgggtaaagcgccttacggacttcggtccgtaaggagcatcagag

SEQ ID NO: 13854 - RNA, 98 nt, synthetic construct
  misc_feature 1..98: note = engineered ribonucleic acid scaffold (ERS) sequence
  source 1..98: mol_type = other RNA
accagcaattctatctgattactctgttgctgtcaccagcgactatgtcgtagtgggtaaagcgccttacggacttcggtccgtaaggagcatcagag

SEQ ID NO: 13855 - RNA, 98 nt, synthetic construct
  misc_feature 1..98: note = engineered ribonucleic acid scaffold (ERS) sequence
  source 1..98: mol_type = other RNA
accgagacttctatctgattactctgggctcgtcaccagcgactatgtcgtagtgggtaaagcgccttacggacttcggtccgtaaggagcatcagag

SEQ ID NO: 13856 - RNA, 98 nt, synthetic construct
  misc_feature 1..98: note = engineered ribonucleic acid scaffold (ERS) sequence
  source 1..98: mol_type = other RNA
acctgtagttctatctgattactctgctacagtcaccagcgactatgtcgtagtgggtaaagcgccttacggacttcggtccgtaaggagcatcagag

SEQ ID NO: 13857 - RNA, 98 nt, synthetic construct
  misc_feature 1..98: note = engineered ribonucleic acid scaffold (ERS) sequence
  source 1..98: mol_type = other RNA
acgagcacttctatctgattactctggggctctcaccagcgactatgtcgtagtgggtaaagcgccttacggacttcggtccgtaaggagcatcagag

SEQ ID NO: 13858 - RNA, 98 nt, synthetic construct
  misc_feature 1..98: note = engineered ribonucleic acid scaffold (ERS) sequence
  source 1..98: mol_type = other RNA
acgaggtgttctatctgattactctgcacctctcaccagcgactatgtcgtagtgggtaaagcgccttacggacttcggtccgtaaggagcatcagag

SEQ ID NO: 13859 - RNA, 98 nt, synthetic construct
  misc_feature 1..98: note = engineered ribonucleic acid scaffold (ERS) sequence
  source 1..98: mol_type = other RNA
acgggactttctatctgattactctgagtccctcaccagcgactatgtcgtagtgggtaaagcgccttacggacttcggtccgtaaggagcatcagag

SEQ ID NO: 13860 - RNA, 98 nt, synthetic construct
  misc_feature 1..98: note = engineered ribonucleic acid scaffold (ERS) sequence
  source 1..98: mol_type = other RNA
acgggcaattctatctgattactctgttgccctcaccagcgactatgtcgtagtgggtaaagcgccttacggacttcggtccgtaaggagcatcagag

SEQ ID NO: 13861 - RNA, 98 nt, synthetic construct
  misc_feature 1..98: note = engineered ribonucleic acid scaffold (ERS) sequence
  source 1..98: mol_type = other RNA
actgtgcgttctatctgattactctgcgcacatcaccagcgactatgtcgtagtgggtaaagcgccttacggacttcggtccgtaaggagcatcagag

SEQ ID NO: 13862 - RNA, 99 nt, synthetic construct
  misc_feature 1..99: note = engineered ribonucleic acid scaffold (ERS) sequence
  source 1..99: mol_type = other RNA
actggcgcttctatctgattactctgggcgccatcaccagcgactatgtcgtagtgggtaaagcgccttacggacttcggtccgtaaggagcatcagag

SEQ ID NO: 13863 - RNA, 99 nt, synthetic construct
  misc_feature 1..99: note = engineered ribonucleic acid scaffold (ERS) sequence
  source 1..99: mol_type = other RNA
actggcgcttctatctgattactctgggagccatcaccagcgactatgtcgtagtgggtaaagcgccttacggacttcggtccgtaaggagcatcagag

SEQ ID NO: 13864 - RNA, 99 nt, synthetic construct
  misc_feature 1..99: note = engineered ribonucleic acid scaffold (ERS) sequence
  source 1..99: mol_type = other RNA
actggcgcttctatctgattactctgtgagccatcaccagcgactatgtcgtagtgggtaaagcgccttacggacttcggtccgtaaggagcatcagag

SEQ ID NO: 13865 - RNA, 100 nt, synthetic construct
  misc_feature 1..100: note = engineered ribonucleic acid scaffold (ERS) sequence
  source 1..100: mol_type = other RNA
actggcgcttctatctgattactctgaggagccatcaccagcgactatgtcgtagtgggtaaagcgccttacggacttcggtccgtaaggagcatcagag

SEQ ID NO: 13866 - RNA, 99 nt, synthetic construct
  misc_feature 1..99: note = engineered ribonucleic acid scaffold (ERS) sequence
  source 1..99: mol_type = other RNA
actggcgcttctatctgattactctgatagccatcaccagcgactatgtcgtagtgggtaaagcgccttacggacttcggtccgtaaggagcatcagag

SEQ ID NO: 13867 - RNA, 100 nt, synthetic construct
  misc_feature 1..100: note = engineered ribonucleic acid scaffold (ERS) sequence
  source 1..100: mol_type = other RNA
actggcgcttctatctgattactctgagctgccatcaccagcgactatgtcgtagtgggtaaagcgccttacggacttcggtccgtaaggagcatcagag

SEQ ID NO: 13868 - RNA, 100 nt, synthetic construct
  misc_feature 1..100: note = engineered ribonucleic acid scaffold (ERS) sequence
  source 1..100: mol_type = other RNA
actggcacttctatctgattactctgagtagccatcaccagcgactatgtcgtagtgggtaaagcgccttacggacttcggtccgtaaggagcatcagag

SEQ ID NO: 13869 - RNA, 100 nt, synthetic construct
  misc_feature 1..100: note = engineered ribonucleic acid scaffold (ERS) sequence
  source 1..100: mol_type = other RNA
actggcgcttctatctgattactctgagtagccatcaccagcgactatgtcgtagtgggtaaagcgccttacggacttcggtccgtaaggagcatcagag

SEQ ID NO: 13870 - RNA, 99 nt, synthetic construct
  misc_feature 1..99: note = engineered ribonucleic acid scaffold (ERS) sequence
  source 1..99: mol_type = other RNA
actggcgcttctatctgattactctgagcaccatcaccagcgactatgtcgtagtgggtaaagcgccttacggacttcggtccgtaaggagcatcagag

SEQ ID NO: 13871 - RNA, 99 nt, synthetic construct
  misc_feature 1..99: note = engineered ribonucleic acid scaffold (ERS) sequence
  source 1..99: mol_type = other RNA
actggcacttctatctgattactctgagcgccatcaccagcgactatgtcgtagtgggtaaagcgccttacggacttcggtccgtaaggagcatcagag

SEQ ID NO: 13872 - RNA, 99 nt, synthetic construct
  misc_feature 1..99: note = engineered ribonucleic acid scaffold (ERS) sequence
  source 1..99: mol_type = other RNA
actggcgcttctatctgattactctgagggccatcaccagcgactatgtcgtagtgggtaaagcgccttacggacttcggtccgtaaggagcatcagag

SEQ ID NO: 13873 - RNA, 99 nt, synthetic construct
  misc_feature 1..99: note = engineered ribonucleic acid scaffold (ERS) sequence
  source 1..99: mol_type = other RNA
actggcgcttctatctgattactctgagtgccgtcaccagcgactatgtcgtagtgggtaaagcgccttacggacttcggtccgtaaggagcatcagag

SEQ ID NO: 13874 - RNA, 99 nt, synthetic construct
  misc_feature 1..99: note = engineered ribonucleic acid scaffold (ERS) sequence
  source 1..99: mol_type = other RNA
actggcacttctatctgattactctgagtgccatcaccagcgactatgtcgtagtgggtaaagcgccttacggacttcggtccgtaaggagcatcagag

SEQ ID NO: 13875 - RNA, 99 nt, synthetic construct
  misc_feature 1..99: note = engineered ribonucleic acid scaffold (ERS) sequence
  source 1..99: mol_type = other RNA
actggcgcttctatctgattactctgagaaccatcaccagcgactatgtcgtagtgggtaaagcgccttacggacttcggtccgtaaggagcatcagag

SEQ ID NO: 13876 - RNA, 99 nt, synthetic construct
  misc_feature 1..99: note = engineered ribonucleic acid scaffold (ERS) sequence
  source 1..99: mol_type = other RNA
actggcgcttctatctgattactctgagagccgtcaccagcgactatgtcgtagtgggtaaagcgccttacggacttcggtccgtaaggagcatcagag

SEQ ID NO: 13877 - RNA, 99 nt, synthetic construct
  misc_feature 1..99: note = engineered ribonucleic acid scaffold (ERS) sequence
  source 1..99: mol_type = other RNA
actggcgcttctatctgattactctgagagccttcaccagcgactatgtcgtagtgggtaaagcgccttacggacttcggtccgtaaggagcatcagag

SEQ ID NO: 13878 - RNA, 99 nt, synthetic construct
  misc_feature 1..99: note = engineered ribonucleic acid scaffold (ERS) sequence
  source 1..99: mol_type = other RNA
actggggcttctatctgattactctgagacccatcaccagcgactatgtcgtagtgggtaaagcgccttacggacttcggtccgtaaggagcatcagag

SEQ ID NO: 13879 - RNA, 99 nt, synthetic construct
  misc_feature 1..99: note = engineered ribonucleic acid scaffold (ERS) sequence
  source 1..99: mol_type = other RNA
actggtgcttctatctgattactctgagagccatcaccagcgactatgtcgtagtgggtaaagcgccttacggacttcggtccgtaaggagcatcagag

SEQ ID NO: 13880 - RNA, 99 nt, synthetic construct
  misc_feature 1..99: note = engineered ribonucleic acid scaffold (ERS) sequence
  source 1..99: mol_type = other RNA
actgggccttctatctgattactctgaggcccatcaccagcgactatgtcgtagtgggtaaagcgccttacggacttcggtccgtaaggagcatcagag

SEQ ID NO: 13881 - RNA, 100 nt, synthetic construct
  misc_feature 1..100: note = engineered ribonucleic acid scaffold (ERS) sequence
  source 1..100: mol_type = other RNA
actggcccttctatctgattactctgaggagccatcaccagcgactatgtcgtagtgggtaaagcgccttacggacttcggtccgtaaggagcatcagag

SEQ ID NO: 13882 - RNA, 99 nt, synthetic construct
  misc_feature 1..99: note = engineered ribonucleic acid scaffold (ERS) sequence
  source 1..99: mol_type = other RNA
actggcccttctatctgattactctgagggccatcaccagcgactatgtcgtagtgggtaaagcgccttacggacttcggtccgtaaggagcatcagag

SEQ ID NO: 13883 - RNA, 99 nt, synthetic construct
  misc_feature 1..99: note = engineered ribonucleic acid scaffold (ERS) sequence
  source 1..99: mol_type = other RNA
actggcccttctatctgattactctgagtgccatcaccagcgactatgtcgtagtgggtaaagcgccttacggacttcggtccgtaaggagcatcagag

SEQ ID NO: 13884 - RNA, 99 nt, synthetic construct
  misc_feature 1..99: note = engineered ribonucleic acid scaffold (ERS) sequence
  source 1..99: mol_type = other RNA
actggcccttctatctgattactctgagagccatcaccagcgactatgtcgtagtgggtaaagcgccttacggacttcggtccgtaaggagcatcagag

SEQ ID NO: 13885 - RNA, 100 nt, synthetic construct
  misc_feature 1..100: note = engineered ribonucleic acid scaffold (ERS) sequence
  source 1..100: mol_type = other RNA
actggcgcttctatctgattactctgagcagccatcaccagcgactatgtcgtagtgggtaaagcgccttacggacttcggtccgtaaggagcatcagag

SEQ ID NO: 13886 - RNA, 99 nt, synthetic construct; identical to SEQ ID NO: 881
  misc_feature 1..99: note = engineered ribonucleic acid scaffold (ERS) sequence
  source 1..99: mol_type = other RNA

SEQ ID NO: 13887 - RNA, 99 nt, synthetic construct
  misc_feature 1..99: note = engineered ribonucleic acid scaffold (ERS) sequence
  source 1..99: mol_type = other RNA
actggcgcttctatctgattactctgagtgccatcaccagcgactatgtcgtagtgggtaaagcgccttacggacttcggtccgtaaggagcatcagag

SEQ ID NO: 13888 - RNA, 99 nt, synthetic construct
  misc_feature 1..99: note = engineered ribonucleic acid scaffold (ERS) sequence
  source 1..99: mol_type = other RNA
actggcgcttctatctgattactctgagagccatcaccagcgactatgtcgtagtgggtaaagcgccttacggacttcggtccgtaaggagcatcagag

SEQ ID NO: 13889 - RNA, 99 nt, synthetic construct
  misc_feature 1..99: note = engineered ribonucleic acid scaffold (ERS) sequence
  source 1..99: mol_type = other RNA
actggctcttctatctgattactctgagcgccatcaccagcgactatgtcgtagtgggtaaagcgccttacggacttcggtccgtaaggagcatcagag

SEQ ID NO: 13890 - RNA, 99 nt, synthetic construct
  misc_feature 1..99: note = engineered ribonucleic acid scaffold (ERS) sequence
  source 1..99: mol_type = other RNA
actggctcttctatctgattactctgagggccatcaccagcgactatgtcgtagtgggtaaagcgccttacggacttcggtccgtaaggagcatcagag

SEQ ID NO: 13891 - RNA, 99 nt, synthetic construct
  misc_feature 1..99: note = engineered ribonucleic acid scaffold (ERS) sequence
  source 1..99: mol_type = other RNA
actggctcttctatctgattactctgagtgccatcaccagcgactatgtcgtagtgggtaaagcgccttacggacttcggtccgtaaggagcatcagag

SEQ ID NO: 13892 - RNA, 99 nt, synthetic construct
  misc_feature 1..99: note = engineered ribonucleic acid scaffold (ERS) sequence
  source 1..99: mol_type = other RNA
actggctcttctatctgattactctgagagccatcaccagcgactatgtcgtagtgggtaaagcgccttacggacttcggtccgtaaggagcatcagag

SEQ ID NO: 13893 - RNA, 99 nt, synthetic construct
  misc_feature 1..99: note = engineered ribonucleic acid scaffold (ERS) sequence
  source 1..99: mol_type = other RNA
actggcggttctatctgattactctgagcgccatcaccagcgactatgtcgtagtgggtaaagcgccttacggacttcggtccgtaaggagcatcagag

SEQ ID NO: 13894 - RNA, 99 nt, synthetic construct
  misc_feature 1..99: note = engineered ribonucleic acid scaffold (ERS) sequence
  source 1..99: mol_type = other RNA
actggcggttctatctgattactctgagagccatcaccagcgactatgtcgtagtgggtaaagcgccttacggacttcggtccgtaaggagcatcagag

SEQ ID NO: 13895 - RNA, 98 nt, synthetic construct
  misc_feature 1..98: note = engineered ribonucleic acid scaffold (ERS) sequence
  source 1..98: mol_type = other RNA
acacacggttctatctgattactctgccgtgttcaccagcgactatgtcgtagtgggtaaagcgcttacggaattcgtgtccgtaagaagcatcagag

SEQ ID NO: 13896 - RNA, 98 nt, synthetic construct
  misc_feature 1..98: note = engineered ribonucleic acid scaffold (ERS) sequence
  source 1..98: mol_type = other RNA
acactggtttctatctgattactctgaccagttcaccagcgactatgtcgtagtgggtaaagcgcttacggaattcgtgtccgtaagaagcatcagag

SEQ ID NO: 13897 - RNA, 98 nt, synthetic construct
  misc_feature 1..98: note = engineered ribonucleic acid scaffold (ERS) sequence
  source 1..98: mol_type = other RNA
acaggccgttctatctgattactctgcggccttcaccagcgactatgtcgtagtgggtaaagcgcttacggaattcgtgtccgtaagaagcatcagag

SEQ ID NO: 13898 - RNA, 98 nt, synthetic construct
  misc_feature 1..98: note = engineered ribonucleic acid scaffold (ERS) sequence
  source 1..98: mol_type = other RNA
acaggtccttctatctgattactctgggaccttcaccagcgactatgtcgtagtgggtaaagcgcttacggaattcgtgtccgtaagaagcatcagag

SEQ ID NO: 13899 - RNA, 98 nt, synthetic construct
  misc_feature 1..98: note = engineered ribonucleic acid scaffold (ERS) sequence
  source 1..98: mol_type = other RNA
accagcaattctatctgattactctgttgctgtcaccagcgactatgtcgtagtgggtaaagcgcttacggaattcgtgtccgtaagaagcatcagag

SEQ ID NO: 13900 - RNA, 98 nt, synthetic construct
  misc_feature 1..98: note = engineered ribonucleic acid scaffold (ERS) sequence
  source 1..98: mol_type = other RNA
accgagacttctatctgattactctgggctcgtcaccagcgactatgtcgtagtgggtaaagcgcttacggaattcgtgtccgtaagaagcatcagag

SEQ ID NO: 13901 - RNA, 98 nt, synthetic construct
  misc_feature 1..98: note = engineered ribonucleic acid scaffold (ERS) sequence
  source 1..98: mol_type = other RNA
acctgtagttctatctgattactctgctacagtcaccagcgactatgtcgtagtgggtaaagcgcttacggaattcgtgtccgtaagaagcatcagag

SEQ ID NO: 13902 - RNA, 98 nt, synthetic construct
  misc_feature 1..98: note = engineered ribonucleic acid scaffold (ERS) sequence
  source 1..98: mol_type = other RNA
acgagcacttctatctgattactctggggctctcaccagcgactatgtcgtagtgggtaaagcgcttacggaattcgtgtccgtaagaagcatcagag

SEQ ID NO: 13903 - RNA, 98 nt, synthetic construct
  misc_feature 1..98: note = engineered ribonucleic acid scaffold (ERS) sequence
  source 1..98: mol_type = other RNA
acgaggtgttctatctgattactctgcacctctcaccagcgactatgtcgtagtgggtaaagcgcttacggaattcgtgtccgtaagaagcatcagag

SEQ ID NO: 13904 - RNA, 98 nt, synthetic construct
  misc_feature 1..98: note = engineered ribonucleic acid scaffold (ERS) sequence
  source 1..98: mol_type = other RNA
acgggactttctatctgattactctgagtccctcaccagcgactatgtcgtagtgggtaaagcgcttacggaattcgtgtccgtaagaagcatcagag

SEQ ID NO: 13905 - RNA, 98 nt, synthetic construct
  misc_feature 1..98: note = engineered ribonucleic acid scaffold (ERS) sequence
  source 1..98: mol_type = other RNA
acgggcaattctatctgattactctgttgccctcaccagcgactatgtcgtagtgggtaaagcgcttacggaattcgtgtccgtaagaagcatcagag

SEQ ID NO: 13906 - RNA, 98 nt, synthetic construct
  misc_feature 1..98: note = engineered ribonucleic acid scaffold (ERS) sequence
  source 1..98: mol_type = other RNA
actgtgcgttctatctgattactctgcgcacatcaccagcgactatgtcgtagtgggtaaagcgcttacggaattcgtgtccgtaagaagcatcagag

SEQ ID NO: 13907 - RNA, 99 nt, synthetic construct
  misc_feature 1..99: note = engineered ribonucleic acid scaffold (ERS) sequence
  source 1..99: mol_type = other RNA
actggcgcttctatctgattactctgggcgccatcaccagcgactatgtcgtagtgggtaaagcgcttacggaattcgtgtccgtaagaagcatcagag

SEQ ID NO: 13908 - RNA, 99 nt, synthetic construct
  misc_feature 1..99: note = engineered ribonucleic acid scaffold (ERS) sequence
  source 1..99: mol_type = other RNA
actggcgcttctatctgattactctgggagccatcaccagcgactatgtcgtagtgggtaaagcgcttacggaattcgtgtccgtaagaagcatcagag

SEQ ID NO: 13909 - RNA, 99 nt, synthetic construct
  misc_feature 1..99: note = engineered ribonucleic acid scaffold (ERS) sequence
  source 1..99: mol_type = other RNA
actggcgcttctatctgattactctgtgagccatcaccagcgactatgtcgtagtgggtaaagcgcttacggaattcgtgtccgtaagaagcatcagag

SEQ ID NO: 13910 - RNA, 100 nt, synthetic construct
  misc_feature 1..100: note = engineered ribonucleic acid scaffold (ERS) sequence
  source 1..100: mol_type = other RNA
actggcgcttctatctgattactctgaggagccatcaccagcgactatgtcgtagtgggtaaagcgcttacggaattcgtgtccgtaagaagcatcagag

SEQ ID NO: 13911 - RNA, 99 nt, synthetic construct
  misc_feature 1..99: note = engineered ribonucleic acid scaffold (ERS) sequence
  source 1..99: mol_type = other RNA
actggcgcttctatctgattactctgatagccatcaccagcgactatgtcgtagtgggtaaagcgcttacggaattcgtgtccgtaagaagcatcagag

SEQ ID NO: 13912 - RNA, 100 nt, synthetic construct
  misc_feature 1..100: note = engineered ribonucleic acid scaffold (ERS) sequence
  source 1..100: mol_type = other RNA
actggcgcttctatctgattactctgagctgccatcaccagcgactatgtcgtagtgggtaaagcgcttacggaattcgtgtccgtaagaagcatcagag

SEQ ID NO: 13913 - RNA, 100 nt, synthetic construct
  misc_feature 1..100: note = engineered ribonucleic acid scaffold (ERS) sequence
  source 1..100: mol_type = other RNA
actggcacttctatctgattactctgagtagccatcaccagcgactatgtcgtagtgggtaaagcgcttacggaattcgtgtccgtaagaagcatcagag

SEQ ID NO: 13914 - RNA, 100 nt, synthetic construct
  misc_feature 1..100: note = engineered ribonucleic acid scaffold (ERS) sequence
  source 1..100: mol_type = other RNA
actggcgcttctatctgattactctgagtagccatcaccagcgactatgtcgtagtgggtaaagcgcttacggaattcgtgtccgtaagaagcatcagag

SEQ ID NO: 13915 - RNA, 99 nt, synthetic construct
  misc_feature 1..99: note = engineered ribonucleic acid scaffold (ERS) sequence
  source 1..99: mol_type = other RNA
actggcgcttctatctgattactctgagcaccatcaccagcgactatgtcgtagtgggtaaagcgcttacggaattcgtgtccgtaagaagcatcagag

SEQ ID NO: 13916 - RNA, 99 nt, synthetic construct
  misc_feature 1..99: note = engineered ribonucleic acid scaffold (ERS) sequence
  source 1..99: mol_type = other RNA
actggcacttctatctgattactctgagcgccatcaccagcgactatgtcgtagtgggtaaagcgcttacggaattcgtgtccgtaagaagcatcagag

SEQ ID NO: 13917 - RNA, 99 nt, synthetic construct
  misc_feature 1..99: note = engineered ribonucleic acid scaffold (ERS) sequence
  source 1..99: mol_type = other RNA
actggcgcttctatctgattactctgagggccatcaccagcgactatgtcgtagtgggtaaagcgcttacggaattcgtgtccgtaagaagcatcagag

SEQ ID NO: 13918 - RNA, 99 nt, synthetic construct
  misc_feature 1..99: note = engineered ribonucleic acid scaffold (ERS) sequence
  source 1..99: mol_type = other RNA
actggcgcttctatctgattactctgagtgccgtcaccagcgactatgtcgtagtgggtaaagcgcttacggaattcgtgtccgtaagaagcatcagag

SEQ ID NO: 13919 - RNA, 99 nt, synthetic construct
  misc_feature 1..99: note = engineered ribonucleic acid scaffold (ERS) sequence
  source 1..99: mol_type = other RNA
actggcacttctatctgattactctgagtgccatcaccagcgactatgtcgtagtgggtaaagcgcttacggaattcgtgtccgtaagaagcatcagag

SEQ ID NO: 13920 - RNA, 99 nt, synthetic construct
  misc_feature 1..99: note = engineered ribonucleic acid scaffold (ERS) sequence
  source 1..99: mol_type = other RNA
actggcgcttctatctgattactctgagaaccatcaccagcgactatgtcgtagtgggtaaagcgcttacggaattcgtgtccgtaagaagcatcagag

SEQ ID NO: 13921 - RNA, 99 nt, synthetic construct
  misc_feature 1..99: note = engineered ribonucleic acid scaffold (ERS) sequence
  source 1..99: mol_type = other RNA
actggcgcttctatctgattactctgagagccgtcaccagcgactatgtcgtagtgggtaaagcgcttacggaattcgtgtccgtaagaagcatcagag

SEQ ID NO: 13922 - RNA, 99 nt, synthetic construct
  misc_feature 1..99: note = engineered ribonucleic acid scaffold (ERS) sequence
  source 1..99: mol_type = other RNA
actggcgcttctatctgattactctgagagccttcaccagcgactatgtcgtagtgggtaaagcgcttacggaattcgtgtccgtaagaagcatcagag

SEQ ID NO: 13923 - RNA, 99 nt, synthetic construct
  misc_feature 1..99: note = engineered ribonucleic acid scaffold (ERS) sequence
  source 1..99: mol_type = other RNA
actggggcttctatctgattactctgagacccatcaccagcgactatgtcgtagtgggtaaagcgcttacggaattcgtgtccgtaagaagcatcagag

SEQ ID NO: 13924 - RNA, 99 nt, synthetic construct
  misc_feature 1..99: note = engineered ribonucleic acid scaffold (ERS) sequence
  source 1..99: mol_type = other RNA
actggtgcttctatctgattactctgagagccatcaccagcgactatgtcgtagtgggtaaagcgcttacggaattcgtgtccgtaagaagcatcagag

SEQ ID NO: 13925 - RNA, 99 nt, synthetic construct
  misc_feature 1..99: note = engineered ribonucleic acid scaffold (ERS) sequence
  source 1..99: mol_type = other RNA
actgggccttctatctgattactctgaggcccatcaccagcgactatgtcgtagtgggtaaagcgcttacggaattcgtgtccgtaagaagcatcagag

SEQ ID NO: 13926 - RNA, 100 nt, synthetic construct
  misc_feature 1..100: note = engineered ribonucleic acid scaffold (ERS) sequence
  source 1..100: mol_type = other RNA
actggcccttctatctgattactctgaggagccatcaccagcgactatgtcgtagtgggtaaagcgcttacggaattcgtgtccgtaagaagcatcagag

SEQ ID NO: 13927 - RNA, 99 nt, synthetic construct
  misc_feature 1..99: note = engineered ribonucleic acid scaffold (ERS) sequence
  source 1..99: mol_type = other RNA
actggcccttctatctgattactctgagggccatcaccagcgactatgtcgtagtgggtaaagcgcttacggaattcgtgtccgtaagaagcatcagag

SEQ ID NO: 13928 - RNA, 99 nt, synthetic construct
  misc_feature 1..99: note = engineered ribonucleic acid scaffold (ERS) sequence
  source 1..99: mol_type = other RNA
actggcccttctatctgattactctgagtgccatcaccagcgactatgtcgtagtgggtaaagcgcttacggaattcgtgtccgtaagaagcatcagag

SEQ ID NO: 13929 - RNA, 99 nt, synthetic construct
  misc_feature 1..99: note = engineered ribonucleic acid scaffold (ERS) sequence
  source 1..99: mol_type = other RNA
actggcccttctatctgattactctgagagccatcaccagcgactatgtcgtagtgggtaaagcgcttacggaattcgtgtccgtaagaagcatcagag

SEQ ID NO: 13930 - RNA, 100 nt, synthetic construct
  misc_feature 1..100: note = engineered ribonucleic acid scaffold (ERS) sequence
  source 1..100: mol_type = other RNA
actggcgcttctatctgattactctgagcagccatcaccagcgactatgtcgtagtgggtaaagcgcttacggaattcgtgtccgtaagaagcatcagag

SEQ ID NO: 13931 - RNA, 99 nt, synthetic construct; identical to SEQ ID NO: 879
  misc_feature 1..99: note = engineered ribonucleic acid scaffold (ERS) sequence
  source 1..99: mol_type = other RNA

SEQ ID NO: 13932 - RNA, 99 nt, synthetic construct
  misc_feature 1..99: note = engineered ribonucleic acid scaffold (ERS) sequence
  source 1..99: mol_type = other RNA
actggcgcttctatctgattactctgagtgccatcaccagcgactatgtcgtagtgggtaaagcgcttacggaattcgtgtccgtaagaagcatcagag

SEQ ID NO: 13933 - RNA, 99 nt, synthetic construct
  misc_feature 1..99: note = engineered ribonucleic acid scaffold (ERS) sequence
  source 1..99: mol_type = other RNA
actggcgcttctatctgattactctgagagccatcaccagcgactatgtcgtagtgggtaaagcgcttacggaattcgtgtccgtaagaagcatcagag

SEQ ID NO: 13934 - RNA, 99 nt, synthetic construct
  misc_feature 1..99: note = engineered ribonucleic acid scaffold (ERS) sequence
  source 1..99: mol_type = other RNA
actggctcttctatctgattactctgagcgccatcaccagcgactatgtcgtagtgggtaaagcgcttacggaattcgtgtccgtaagaagcatcagag

SEQ ID NO: 13935 - RNA, 99 nt, synthetic construct
  misc_feature 1..99: note = engineered ribonucleic acid scaffold (ERS) sequence
  source 1..99: mol_type = other RNA
actggctcttctatctgattactctgagggccatcaccagcgactatgtcgtagtgggtaaagcgcttacggaattcgtgtccgtaagaagcatcagag

SEQ ID NO: 13936 - RNA, 99 nt, synthetic construct
  misc_feature 1..99: note = engineered ribonucleic acid scaffold (ERS) sequence
  source 1..99: mol_type = other RNA
actggctcttctatctgattactctgagtgccatcaccagcgactatgtcgtagtgggtaaagcgcttacggaattcgtgtccgtaagaagcatcagag

SEQ ID NO: 13937 - RNA, 99 nt, synthetic construct
  misc_feature 1..99: note = engineered ribonucleic acid scaffold (ERS) sequence
  source 1..99: mol_type = other RNA
actggctcttctatctgattactctgagagccatcaccagcgactatgtcgtagtgggtaaagcgcttacggaattcgtgtccgtaagaagcatcagag

SEQ ID NO: 13938 - RNA, 99 nt, synthetic construct
  misc_feature 1..99: note = engineered ribonucleic acid scaffold (ERS) sequence
  source 1..99: mol_type = other RNA
actggcggttctatctgattactctgagcgccatcaccagcgactatgtcgtagtgggtaaagcgcttacggaattcgtgtccgtaagaagcatcagag

SEQ ID NO: 13939 - RNA, 99 nt, synthetic construct
  misc_feature 1..99: note = engineered ribonucleic acid scaffold (ERS) sequence
  source 1..99: mol_type = other RNA
actggcggttctatctgattactctgagagccatcaccagcgactatgtcgtagtgggtaaagcgcttacggaattcgtgtccgtaagaagcatcagag

SEQ ID NO: 13940 - RNA, 99 nt, synthetic construct
  misc_feature 1..99: note = engineered ribonucleic acid scaffold (ERS) sequence
  source 1..99: mol_type = other RNA
acacacggttctatctgattactctgccgtgttcaccagcgactatgtcgtagtgggtaaagcgcttacggacttcgcggtccgtaagaagcatcagag

SEQ ID NO: 13941 - RNA, 99 nt, synthetic construct
  misc_feature 1..99: note = engineered ribonucleic acid scaffold (ERS) sequence
  source 1..99: mol_type = other RNA
acactggtttctatctgattactctgaccagttcaccagcgactatgtcgtagtgggtaaagcgcttacggacttcgcggtccgtaagaagcatcagag

SEQ ID NO: 13942 - RNA, 99 nt, synthetic construct
  misc_feature 1..99: note = engineered ribonucleic acid scaffold (ERS) sequence
  source 1..99: mol_type = other RNA
acaggccgttctatctgattactctgcggccttcaccagcgactatgtcgtagtgggtaaagcgcttacggacttcgcggtccgtaagaagcatcagag

SEQ ID NO: 13943 - RNA, 99 nt, synthetic construct
  misc_feature 1..99: note = engineered ribonucleic acid scaffold (ERS) sequence
  source 1..99: mol_type = other RNA
acaggtccttctatctgattactctgggaccttcaccagcgactatgtcgtagtgggtaaagcgcttacggacttcgcggtccgtaagaagcatcagag

SEQ ID NO: 13944 - RNA, 99 nt, synthetic construct
  misc_feature 1..99: note = engineered ribonucleic acid scaffold (ERS) sequence
  source 1..99: mol_type = other RNA
accagcaattctatctgattactctgttgctgtcaccagcgactatgtcgtagtgggtaaagcgcttacggacttcgcggtccgtaagaagcatcagag

SEQ ID NO: 13945 - RNA, 99 nt, synthetic construct
  misc_feature 1..99: note = engineered ribonucleic acid scaffold (ERS) sequence
  source 1..99: mol_type = other RNA
accgagacttctatctgattactctgggctcgtcaccagcgactatgtcgtagtgggtaaagcgcttacggacttcgcggtccgtaagaagcatcagag

SEQ ID NO: 13946 - RNA, 99 nt, synthetic construct
  misc_feature 1..99: note = engineered ribonucleic acid scaffold (ERS) sequence
  source 1..99: mol_type = other RNA
acctgtagttctatctgattactctgctacagtcaccagcgactatgtcgtagtgggtaaagcgcttacggacttcgcggtccgtaagaagcatcagag

SEQ ID NO: 13947 - RNA, 99 nt, synthetic construct
  misc_feature 1..99: note = engineered ribonucleic acid scaffold (ERS) sequence
  source 1..99: mol_type = other RNA
acgagcacttctatctgattactctggggctctcaccagcgactatgtcgtagtgggtaaagcgcttacggacttcgcggtccgtaagaagcatcagag

SEQ ID NO: 13948 - RNA, 99 nt, synthetic construct
  misc_feature 1..99: note = engineered ribonucleic acid scaffold (ERS) sequence
  source 1..99: mol_type = other RNA
acgaggtgttctatctgattactctgcacctctcaccagcgactatgtcgtagtgggtaaagcgcttacggacttcgcggtccgtaagaagcatcagag

SEQ ID NO: 13949 - RNA, 99 nt, synthetic construct
  misc_feature 1..99: note = engineered ribonucleic acid scaffold (ERS) sequence
  source 1..99: mol_type = other RNA
acgggactttctatctgattactctgagtccctcaccagcgactatgtcgtagtgggtaaagcgcttacggacttcgcggtccgtaagaagcatcagag

SEQ ID NO: 13950 - RNA, 99 nt, synthetic construct
  misc_feature 1..99: note = engineered ribonucleic acid scaffold (ERS) sequence
  source 1..99: mol_type = other RNA
acgggcaattctatctgattactctgttgccctcaccagcgactatgtcgtagtgggtaaagcgcttacggacttcgcggtccgtaagaagcatcagag

SEQ ID NO: 13951 - RNA, 99 nt, synthetic construct
  misc_feature 1..99: note = engineered ribonucleic acid scaffold (ERS) sequence
  source 1..99: mol_type = other RNA
actgtgcgttctatctgattactctgcgcacatcaccagcgactatgtcgtagtgggtaaagcgcttacggacttcgcggtccgtaagaagcatcagag

SEQ ID NO: 13952 - RNA, 100 nt, synthetic construct
  misc_feature 1..100: note = engineered ribonucleic acid scaffold (ERS) sequence
  source 1..100: mol_type = other RNA
actggcgcttctatctgattactctgggcgccatcaccagcgactatgtcgtagtgggtaaagcgcttacggacttcgcggtccgtaagaagcatcagag

SEQ ID NO: 13953 - RNA, 100 nt, synthetic construct
  misc_feature 1..100: note = engineered ribonucleic acid scaffold (ERS) sequence
  source 1..100: mol_type = other RNA
actggcgcttctatctgattactctgggagccatcaccagcgactatgtcgtagtgggtaaagcgcttacggacttcgcggtccgtaagaagcatcagag

SEQ ID NO: 13954 - RNA, 100 nt, synthetic construct
  misc_feature 1..100: note = engineered ribonucleic acid scaffold (ERS) sequence
  source 1..100: mol_type = other RNA
actggcgcttctatctgattactctgtgagccatcaccagcgactatgtcgtagtgggtaaagcgcttacggacttcgcggtccgtaagaagcatcagag

SEQ ID NO: 13955 - RNA, 101 nt, synthetic construct
  misc_feature 1..101: note = engineered ribonucleic acid scaffold (ERS) sequence
  source 1..101: mol_type = other RNA
actggcgcttctatctgattactctgaggagccatcaccagcgactatgtcgtagtgggtaaagcgcttacggacttcgcggtccgtaagaagcatcagag

SEQ ID NO: 13956 - RNA, 100 nt, synthetic construct
  misc_feature 1..100: note = engineered ribonucleic acid scaffold (ERS) sequence
  source 1..100: mol_type = other RNA
actggcgcttctatctgattactctgatagccatcaccagcgactatgtcgtagtgggtaaagcgcttacggacttcgcggtccgtaagaagcatcagag

SEQ ID NO: 13957 - RNA, 101 nt, synthetic construct
  misc_feature 1..101: note = engineered ribonucleic acid scaffold (ERS) sequence
  source 1..101: mol_type = other RNA
actggcgcttctatctgattactctgagctgccatcaccagcgactatgtcgtagtgggtaaagcgcttacggacttcgcggtccgtaagaagcatcagag

SEQ ID NO: 13958 - RNA, 101 nt, synthetic construct
  misc_feature 1..101: note = engineered ribonucleic acid scaffold (ERS) sequence
  source 1..101: mol_type = other RNA
actggcacttctatctgattactctgagtagccatcaccagcgactatgtcgtagtgggtaaagcgcttacggacttcgcggtccgtaagaagcatcagag

SEQ ID NO: 13959 - RNA, 101 nt, synthetic construct
  misc_feature 1..101: note = engineered ribonucleic acid scaffold (ERS) sequence
  source 1..101: mol_type = other RNA
actggcgcttctatctgattactctgagtagccatcaccagcgactatgtcgtagtgggtaaagcgcttacggacttcgcggtccgtaagaagcatcagag

SEQ ID NO: 13960 - RNA, 100 nt, synthetic construct
  misc_feature 1..100: note = engineered ribonucleic acid scaffold (ERS) sequence
  source 1..100: mol_type = other RNA
actggcgcttctatctgattactctgagcaccatcaccagcgactatgtcgtagtgggtaaagcgcttacggacttcgcggtccgtaagaagcatcagag

SEQ ID NO: 13961 - RNA, 100 nt, synthetic construct
  misc_feature 1..100: note = engineered ribonucleic acid scaffold (ERS) sequence
  source 1..100: mol_type = other RNA
actggcacttctatctgattactctgagcgccatcaccagcgactatgtcgtagtgggtaaagcgcttacggacttcgcggtccgtaagaagcatcagag

SEQ ID NO: 13962 - RNA, 100 nt, synthetic construct
  misc_feature 1..100: note = engineered ribonucleic acid scaffold (ERS) sequence
  source 1..100: mol_type = other RNA
actggcgcttctatctgattactctgagggccatcaccagcgactatgtcgtagtgggtaaagcgcttacggacttcgcggtccgtaagaagcatcagag

SEQ ID NO: 13963 - RNA, 100 nt, synthetic construct
  misc_feature 1..100: note = engineered ribonucleic acid scaffold (ERS) sequence
  source 1..100: mol_type = other RNA
actggcgcttctatctgattactctgagtgccgtcaccagcgactatgtcgtagtgggtaaagcgcttacggacttcgcggtccgtaagaagcatcagag

SEQ ID NO: 13964 - RNA, 100 nt, synthetic construct
  misc_feature 1..100: note = engineered ribonucleic acid scaffold (ERS) sequence
  source 1..100: mol_type = other RNA
actggcacttctatctgattactctgagtgccatcaccagcgactatgtcgtagtgggtaaagcgcttacggacttcgcggtccgtaagaagcatcagag

SEQ ID NO: 13965 - RNA, 100 nt, synthetic construct
  misc_feature 1..100: note = engineered ribonucleic acid scaffold (ERS) sequence
  source 1..100: mol_type = other RNA
actggcgcttctatctgattactctgagaaccatcaccagcgactatgtcgtagtgggtaaagcgcttacggacttcgcggtccgtaagaagcatcagag

SEQ ID NO: 13966 - RNA, 100 nt, synthetic construct
  misc_feature 1..100: note = engineered ribonucleic acid scaffold (ERS) sequence
  source 1..100: mol_type = other RNA
actggcgcttctatctgattactctgagagccgtcaccagcgactatgtcgtagtgggtaaagcgcttacggacttcgcggtccgtaagaagcatcagag

SEQ ID NO: 13967 - RNA, 100 nt, synthetic construct
  misc_feature 1..100: note = engineered ribonucleic acid scaffold (ERS) sequence
  source 1..100: mol_type = other RNA
actggcgcttctatctgattactctgagagccttcaccagcgactatgtcgtagtgggtaaagcgcttacggacttcgcggtccgtaagaagcatcagag

SEQ ID NO: 13968 - RNA, 100 nt, synthetic construct
  misc_feature 1..100: note = engineered ribonucleic acid scaffold (ERS) sequence
  source 1..100: mol_type = other RNA
actggggcttctatctgattactctgagacccatcaccagcgactatgtcgtagtgggtaaagcgcttacggacttcgcggtccgtaagaagcatcagag

SEQ ID NO: 13969 - RNA, 100 nt, synthetic construct
  misc_feature 1..100: note = engineered ribonucleic acid scaffold (ERS) sequence
  source 1..100: mol_type = other RNA
actggtgcttctatctgattactctgagagccatcaccagcgactatgtcgtagtgggtaaagcgcttacggacttcgcggtccgtaagaagcatcagag

SEQ ID NO: 13970 - RNA, 100 nt, synthetic construct
  misc_feature 1..100: note = engineered ribonucleic acid scaffold (ERS) sequence
  source 1..100: mol_type = other RNA
actgggccttctatctgattactctgaggcccatcaccagcgactatgtcgtagtgggtaaagcgcttacggacttcgcggtccgtaagaagcatcagag

SEQ ID NO: 13971 - RNA, 101 nt, synthetic construct
  misc_feature 1..101: note = engineered ribonucleic acid scaffold (ERS) sequence
  source 1..101: mol_type = other RNA
actggcccttctatctgattactctgaggagccatcaccagcgactatgtcgtagtgggtaaagcgcttacggacttcgcggtccgtaagaagcatcagag

SEQ ID NO: 13972 - RNA, 100 nt, synthetic construct
  misc_feature 1..100: note = engineered ribonucleic acid scaffold (ERS) sequence
  source 1..100: mol_type = other RNA
actggcccttctatctgattactctgagggccatcaccagcgactatgtcgtagtgggtaaagcgcttacggacttcgcggtccgtaagaagcatcagag

SEQ ID NO: 13973 - RNA, 100 nt, synthetic construct
  misc_feature 1..100: note = engineered ribonucleic acid scaffold (ERS) sequence
  source 1..100: mol_type = other RNA
actggcccttctatctgattactctgagtgccatcaccagcgactatgtcgtagtgggtaaagcgcttacggacttcgcggtccgtaagaagcatcagag

SEQ ID NO: 13974 - RNA, 100 nt, synthetic construct
  misc_feature 1..100: note = engineered ribonucleic acid scaffold (ERS) sequence
  source 1..100: mol_type = other RNA
actggcccttctatctgattactctgagagccatcaccagcgactatgtcgtagtgggtaaagcgcttacggacttcgcggtccgtaagaagcatcagag

SEQ ID NO: 13975 - RNA, 101 nt, synthetic construct
  misc_feature 1..101: note = engineered ribonucleic acid scaffold (ERS) sequence
  source 1..101: mol_type = other RNA
actggcgcttctatctgattactctgagcagccatcaccagcgactatgtcgtagtgggtaaagcgcttacggacttcgcggtccgtaagaagcatcagag

SEQ ID NO: 13976 - RNA, 100 nt, synthetic construct; identical to SEQ ID NO: 882
  misc_feature 1..100: note = engineered ribonucleic acid scaffold (ERS) sequence
  source 1..100: mol_type = other RNA

SEQ ID NO: 13977 - RNA, 100 nt, synthetic construct
  misc_feature 1..100: note = engineered ribonucleic acid scaffold (ERS) sequence
  source 1..100: mol_type = other RNA
actggcgcttctatctgattactctgagtgccatcaccagcgactatgtcgtagtgggtaaagcgcttacggacttcgcggtccgtaagaagcatcagag

SEQ ID NO: 13978 - RNA, 100 nt, synthetic construct
  misc_feature 1..100: note = engineered ribonucleic acid scaffold (ERS) sequence
  source 1..100: mol_type = other RNA
actggcgcttctatctgattactctgagagccatcaccagcgactatgtcgtagtgggtaaagcgcttacggacttcgcggtccgtaagaagcatcagag

SEQ ID NO: 13979 - RNA, 100 nt, synthetic construct
  misc_feature 1..100: note = engineered ribonucleic acid scaffold (ERS) sequence
  source 1..100: mol_type = other RNA
actggctcttctatctgattactctgagcgccatcaccagcgactatgtcgtagtgggtaaagcgcttacggacttcgcggtccgtaagaagcatcagag

SEQ ID NO: 13980 - RNA, 100 nt, synthetic construct
  misc_feature 1..100: note = engineered ribonucleic acid scaffold (ERS) sequence
  source 1..100: mol_type = other RNA
actggctcttctatctgattactctgagggccatcaccagcgactatgtcgtagtgggtaaagcgcttacggacttcgcggtccgtaagaagcatcagag

SEQ ID NO: 13981 - RNA, 100 nt, synthetic construct
  misc_feature 1..100: note = engineered ribonucleic acid scaffold (ERS) sequence
  source 1..100: mol_type = other RNA
actggctcttctatctgattactctgagtgccatcaccagcgactatgtcgtagtgggtaaagcgcttacggacttcgcggtccgtaagaagcatcagag

SEQ ID NO: 13982 - RNA, 100 nt, synthetic construct
  misc_feature 1..100: note = engineered ribonucleic acid scaffold (ERS) sequence
  source 1..100: mol_type = other RNA
actggctcttctatctgattactctgagagccatcaccagcgactatgtcgtagtgggtaaagcgcttacggacttcgcggtccgtaagaagcatcagag

SEQ ID NO: 13983 - RNA, 100 nt, synthetic construct
  misc_feature 1..100: note = engineered ribonucleic acid scaffold (ERS) sequence
  source 1..100: mol_type = other RNA
actggcggttctatctgattactctgagcgccatcaccagcgactatgtcgtagtgggtaaagcgcttacggacttcgcggtccgtaagaagcatcagag

SEQ ID NO: 13984 - RNA, 100 nt, synthetic construct
  misc_feature 1..100: note = engineered ribonucleic acid scaffold (ERS) sequence
  source 1..100: mol_type = other RNA
actggcggttctatctgattactctgagagccatcaccagcgactatgtcgtagtgggtaaagcgcttacggacttcgcggtccgtaagaagcatcagag

SEQ ID NO: 13985 - RNA, 97 nt, synthetic construct
  misc_feature 1..97: note = engineered ribonucleic acid scaffold (ERS) sequence
  source 1..97: mol_type = other RNA
acacacggttctatctgattactctgccgtgttcaccagcgactatgtcgtagtgggtaaagcgcttacggacttcggtccgtaagaagcatcagag

SEQ ID NO: 13986 - RNA, 97 nt, synthetic construct
  misc_feature 1..97: note = engineered ribonucleic acid scaffold (ERS) sequence
  source 1..97: mol_type = other RNA
acactggtttctatctgattactctgaccagttcaccagcgactatgtcgtagtgggtaaagcgcttacggacttcggtccgtaagaagcatcagag

SEQ ID NO: 13987 - RNA, 97 nt, synthetic construct
  misc_feature 1..97: note = engineered ribonucleic acid scaffold (ERS) sequence
  source 1..97: mol_type = other RNA
acaggccgttctatctgattactctgcggccttcaccagcgactatgtcgtagtgggtaaagcgcttacggacttcggtccgtaagaagcatcagag

SEQ ID NO: 13988 - RNA, 97 nt, synthetic construct
  misc_feature 1..97: note = engineered ribonucleic acid scaffold (ERS) sequence
  source 1..97: mol_type = other RNA
acaggtccttctatctgattactctgggaccttcaccagcgactatgtcgtagtgggtaaagcgcttacggacttcggtccgtaagaagcatcagag

SEQ ID NO: 13989 - RNA, 97 nt, synthetic construct
  misc_feature 1..97: note = engineered ribonucleic acid scaffold (ERS) sequence
  source 1..97: mol_type = other RNA
accagcaattctatctgattactctgttgctgtcaccagcgactatgtcgtagtgggtaaagcgcttacggacttcggtccgtaagaagcatcagag

SEQ ID NO: 13990 - RNA, 97 nt, synthetic construct
  misc_feature 1..97: note = engineered ribonucleic acid scaffold (ERS) sequence
  source 1..97: mol_type = other RNA
accgagacttctatctgattactctgggctcgtcaccagcgactatgtcgtagtgggtaaagcgcttacggacttcggtccgtaagaagcatcagag

SEQ ID NO: 13991 - RNA, 97 nt, synthetic construct
  misc_feature 1..97: note = engineered ribonucleic acid scaffold (ERS) sequence
  source 1..97: mol_type = other RNA
acctgtagttctatctgattactctgctacagtcaccagcgactatgtcgtagtgggtaaagcgcttacggacttcggtccgtaagaagcatcagag

SEQ ID NO: 13992 - RNA, 97 nt, synthetic construct
  misc_feature 1..97: note = engineered ribonucleic acid scaffold (ERS) sequence
  source 1..97: mol_type = other RNA
acgagcacttctatctgattactctggggctctcaccagcgactatgtcgtagtgggtaaagcgcttacggacttcggtccgtaagaagcatcagag

SEQ ID NO: 13993 - RNA, 97 nt, synthetic construct
  misc_feature 1..97: note = engineered ribonucleic acid scaffold (ERS) sequence
  source 1..97: mol_type = other RNA
acgaggtgttctatctgattactctgcacctctcaccagcgactatgtcgtagtgggtaaagcgcttacggacttcggtccgtaagaagcatcagag

SEQ ID NO: 13994 - RNA, 97 nt, synthetic construct
  misc_feature 1..97: note = engineered ribonucleic acid scaffold (ERS) sequence
  source 1..97: mol_type = other RNA
acgggactttctatctgattactctgagtccctcaccagcgactatgtcgtagtgggtaaagcgcttacggacttcggtccgtaagaagcatcagag

SEQ ID NO: 13995 - RNA, 97 nt, synthetic construct
  misc_feature 1..97: note = engineered ribonucleic acid scaffold (ERS) sequence
  source 1..97: mol_type = other RNA
acgggcaattctatctgattactctgttgccctcaccagcgactatgtcgtagtgggtaaagcgcttacggacttcggtccgtaagaagcatcagag

SEQ ID NO: 13996 - RNA, 97 nt, synthetic construct
  misc_feature 1..97: note = engineered ribonucleic acid scaffold (ERS) sequence
  source 1..97: mol_type = other RNA
actgtgcgttctatctgattactctgcgcacatcaccagcgactatgtcgtagtgggtaaagcgcttacggacttcggtccgtaagaagcatcagag

SEQ ID NO: 13997 - RNA, 98 nt, synthetic construct
  misc_feature 1..98: note = engineered ribonucleic acid scaffold (ERS) sequence
  source 1..98: mol_type = other RNA
actggcgcttctatctgattactctgggcgccatcaccagcgactatgtcgtagtgggtaaagcgcttacggacttcggtccgtaagaagcatcagag

SEQ ID NO: 13998 - RNA, 98 nt, synthetic construct
  misc_feature 1..98: note = engineered ribonucleic acid scaffold (ERS) sequence
  source 1..98: mol_type = other RNA
actggcgcttctatctgattactctgggagccatcaccagcgactatgtcgtagtgggtaaagcgcttacggacttcggtccgtaagaagcatcagag

SEQ ID NO: 13999 - RNA, 98 nt, synthetic construct
  misc_feature 1..98: note = engineered ribonucleic acid scaffold (ERS) sequence
  source 1..98: mol_type = other RNA
actggcgcttctatctgattactctgtgagccatcaccagcgactatgtcgtagtgggtaaagcgcttacggacttcggtccgtaagaagcatcagag

SEQ ID NO: 14000 - RNA, 99 nt, synthetic construct
  misc_feature 1..99: note = engineered ribonucleic acid scaffold (ERS) sequence
  source 1..99: mol_type = other RNA
actggcgcttctatctgattactctgaggagccatcaccagcgactatgtcgtagtgggtaaagcgcttacggacttcggtccgtaagaagcatcagag

SEQ ID NO: 14001 - RNA, 98 nt, synthetic construct
  misc_feature 1..98: note = engineered ribonucleic acid scaffold (ERS) sequence
  source 1..98: mol_type = other RNA
actggcgcttctatctgattactctgatagccatcaccagcgactatgtcgtagtgggtaaagcgcttacggacttcggtccgtaagaagcatcagag

SEQ ID NO: 14002 - RNA, 99 nt, synthetic construct
  misc_feature 1..99: note = engineered ribonucleic acid scaffold (ERS) sequence
  source 1..99: mol_type = other RNA
actggcgcttctatctgattactctgagctgccatcaccagcgactatgtcgtagtgggtaaagcgcttacggacttcggtccgtaagaagcatcagag

SEQ ID NO: 14003 - RNA, 99 nt, synthetic construct
  misc_feature 1..99: note = engineered ribonucleic acid scaffold (ERS) sequence
  source 1..99: mol_type = other RNA
actggcacttctatctgattactctgagtagccatcaccagcgactatgtcgtagtgggtaaagcgcttacggacttcggtccgtaagaagcatcagag

SEQ ID NO: 14004 - RNA, 99 nt, synthetic construct
  misc_feature 1..99: note = engineered ribonucleic acid scaffold (ERS) sequence
  source 1..99: mol_type = other RNA
actggcgcttctatctgattactctgagtagccatcaccagcgactatgtcgtagtgggtaaagcgcttacggacttcggtccgtaagaagcatcagag

SEQ ID NO: 14005 - RNA, 98 nt, synthetic construct
  misc_feature 1..98: note = engineered ribonucleic acid scaffold (ERS) sequence
  source 1..98: mol_type = other RNA
actggcgcttctatctgattactctgagcaccatcaccagcgactatgtcgtagtgggtaaagcgcttacggacttcggtccgtaagaagcatcagag

SEQ ID NO: 14006 - RNA, 98 nt, synthetic construct
  misc_feature 1..98: note = engineered ribonucleic acid scaffold (ERS) sequence
  source 1..98: mol_type = other RNA
actggcacttctatctgattactctgagcgccatcaccagcgactatgtcgtagtgggtaaagcgcttacggacttcggtccgtaagaagcatcagag

SEQ ID NO: 14007 - RNA, 98 nt, synthetic construct
  misc_feature 1..98: note = engineered ribonucleic acid scaffold (ERS) sequence
  source 1..98: mol_type = other RNA
actggcgcttctatctgattactctgagggccatcaccagcgactatgtcgtagtgggtaaagcgcttacggacttcggtccgtaagaagcatcagag

SEQ ID NO: 14008 - RNA, 98 nt, synthetic construct
  misc_feature 1..98: note = engineered ribonucleic acid scaffold (ERS) sequence
  source 1..98: mol_type = other RNA
actggcgcttctatctgattactctgagtgccgtcaccagcgactatgtcgtagtgggtaaagcgcttacggacttcggtccgtaagaagcatcagag

SEQ ID NO: 14009 - RNA, 98 nt, synthetic construct
  misc_feature 1..98: note = engineered ribonucleic acid scaffold (ERS) sequence
  source 1..98: mol_type = other RNA
actggcacttctatctgattactctgagtgccatcaccagcgactatgtcgtagtgggtaaagcgcttacggacttcggtccgtaagaagcatcagag

SEQ ID NO: 14010 - RNA, 98 nt, synthetic construct
  misc_feature 1..98: note = engineered ribonucleic acid scaffold (ERS) sequence
  source 1..98: mol_type = other RNA
actggcgcttctatctgattactctgagaaccatcaccagcgactatgtcgtagtgggtaaagcgcttacggacttcggtccgtaagaagcatcagag

SEQ ID NO: 14011 - RNA, 98 nt, synthetic construct
  misc_feature 1..98: note = engineered ribonucleic acid scaffold (ERS) sequence
  source 1..98: mol_type = other RNA
actggcgcttctatctgattactctgagagccgtcaccagcgactatgtcgtagtgggtaaagcgcttacggacttcggtccgtaagaagcatcagag

SEQ ID NO: 14012 - RNA, 98 nt, synthetic construct
  misc_feature 1..98: note = engineered ribonucleic acid scaffold (ERS) sequence
  source 1..98: mol_type = other RNA
actggcgcttctatctgattactctgagagccttcaccagcgactatgtcgtagtgggtaaagcgcttacggacttcggtccgtaagaagcatcagag

SEQ ID NO: 14013 - RNA, 98 nt, synthetic construct
  misc_feature 1..98: note = engineered ribonucleic acid scaffold (ERS) sequence
  source 1..98: mol_type = other RNA
actggggcttctatctgattactctgagacccatcaccagcgactatgtcgtagtgggtaaagcgcttacggacttcggtccgtaagaagcatcagag

SEQ ID NO: 14014 - RNA, 98 nt, synthetic construct
  misc_feature 1..98: note = engineered ribonucleic acid scaffold (ERS) sequence
  source 1..98: mol_type = other RNA
actggtgcttctatctgattactctgagagccatcaccagcgactatgtcgtagtgggtaaagcgcttacggacttcggtccgtaagaagcatcagag

SEQ ID NO: 14015 - RNA, 98 nt, synthetic construct
  misc_feature 1..98: note = engineered ribonucleic acid scaffold (ERS) sequence
  source 1..98: mol_type = other RNA
actgggccttctatctgattactctgaggcccatcaccagcgactatgtcgtagtgggtaaagcgcttacggacttcggtccgtaagaagcatcagag

SEQ ID NO: 14016 - RNA, 99 nt, synthetic construct
  misc_feature 1..99: note = engineered ribonucleic acid scaffold (ERS) sequence
  source 1..99: mol_type = other RNA
actggcccttctatctgattactctgaggagccatcaccagcgactatgtcgtagtgggtaaagcgcttacggacttcggtccgtaagaagcatcagag

SEQ ID NO: 14017 - RNA, 98 nt, synthetic construct
  misc_feature 1..98: note = engineered ribonucleic acid scaffold (ERS) sequence
  source 1..98: mol_type = other RNA
actggcccttctatctgattactctgagggccatcaccagcgactatgtcgtagtgggtaaagcgcttacggacttcggtccgtaagaagcatcagag

SEQ ID NO: 14018 - RNA, 98 nt, synthetic construct
  misc_feature 1..98: note = engineered ribonucleic acid scaffold (ERS) sequence
  source 1..98: mol_type = other RNA
actggcccttctatctgattactctgagtgccatcaccagcgactatgtcgtagtgggtaaagcgcttacggacttcggtccgtaagaagcatcagag

SEQ ID NO: 14019 - RNA, 98 nt, synthetic construct
  misc_feature 1..98: note = engineered ribonucleic acid scaffold (ERS) sequence
  source 1..98: mol_type = other RNA
actggcccttctatctgattactctgagagccatcaccagcgactatgtcgtagtgggtaaagcgcttacggacttcggtccgtaagaagcatcagag

SEQ ID NO: 14020 - RNA, 99 nt, synthetic construct
  misc_feature 1..99: note = engineered ribonucleic acid scaffold (ERS) sequence
  source 1..99: mol_type = other RNA
actggcgcttctatctgattactctgagcagccatcaccagcgactatgtcgtagtgggtaaagcgcttacggacttcggtccgtaagaagcatcagag

SEQ ID NO: 14021 - RNA, 98 nt, synthetic construct; identical to SEQ ID NO: 878
  misc_feature 1..98: note = engineered ribonucleic acid scaffold (ERS) sequence
  source 1..98: mol_type = other RNA

SEQ ID NO: 14022 - RNA, 98 nt, synthetic construct
  misc_feature 1..98: note = engineered ribonucleic acid scaffold (ERS) sequence
  source 1..98: mol_type = other RNA
actggcgcttctatctgattactctgagtgccatcaccagcgactatgtcgtagtgggtaaagcgcttacggacttcggtccgtaagaagcatcagag

SEQ ID NO: 14023 - RNA, 98 nt, synthetic construct
  misc_feature 1..98: note = engineered ribonucleic acid scaffold (ERS) sequence
  source 1..98: mol_type = other RNA
actggcgcttctatctgattactctgagagccatcaccagcgactatgtcgtagtgggtaaagcgcttacggacttcggtccgtaagaagcatcagag

SEQ ID NO: 14024 - RNA, 98 nt, synthetic construct
  misc_feature 1..98: note = engineered ribonucleic acid scaffold (ERS) sequence
  source 1..98: mol_type = other RNA
actggctcttctatctgattactctgagcgccatcaccagcgactatgtcgtagtgggtaaagcgcttacggacttcggtccgtaagaagcatcagag

SEQ ID NO: 14025 - RNA, 98 nt, synthetic construct
  misc_feature 1..98: note = engineered ribonucleic acid scaffold (ERS) sequence
  source 1..98: mol_type = other RNA
actggctcttctatctgattactctgagggccatcaccagcgactatgtcgtagtgggtaaagcgcttacggacttcggtccgtaagaagcatcagag

SEQ ID NO: 14026 - RNA, 98 nt, synthetic construct
  misc_feature 1..98: note = engineered ribonucleic acid scaffold (ERS) sequence
  source 1..98: mol_type = other RNA
actggctcttctatctgattactctgagtgccatcaccagcgactatgtcgtagtgggtaaagcgcttacggacttcggtccgtaagaagcatcagag

SEQ ID NO: 14027 - RNA, 98 nt, synthetic construct
  misc_feature 1..98: note = engineered ribonucleic acid scaffold (ERS) sequence
  source 1..98: mol_type = other RNA
actggctcttctatctgattactctgagagccatcaccagcgactatgtcgtagtgggtaaagcgcttacggacttcggtccgtaagaagcatcagag

SEQ ID NO: 14028 - RNA, 98 nt, synthetic construct
  misc_feature 1..98: note = engineered ribonucleic acid scaffold (ERS) sequence
  source 1..98: mol_type = other RNA
actggcggttctatctgattactctgagcgccatcaccagcgactatgtcgtagtgggtaaagcgcttacggacttcggtccgtaagaagcatcagag

SEQ ID NO: 14029 - RNA, 98 nt, synthetic construct
  misc_feature 1..98: note = engineered ribonucleic acid scaffold (ERS) sequence
  source 1..98: mol_type = other RNA
actggcggttctatctgattactctgagagccatcaccagcgactatgtcgtagtgggtaaagcgcttacggacttcggtccgtaagaagcatcagag

SEQ ID NO: 14030 - RNA, 97 nt, synthetic construct
  misc_feature 1..97: note = engineered ribonucleic acid scaffold (ERS) sequence
  source 1..97: mol_type = other RNA
acacacggttctatctgattactctgccgtgttcaccagcgactatgtcgtagtgggtaaagcgcttacggacttcggtccgtaagtcgcatcagag

SEQ ID NO: 14031 - RNA, 97 nt, synthetic construct
  misc_feature 1..97: note = engineered ribonucleic acid scaffold (ERS) sequence
  source 1..97: mol_type = other RNA
acactggtttctatctgattactctgaccagttcaccagcgactatgtcgtagtgggtaaagcgcttacggacttcggtccgtaagtcgcatcagag

SEQ ID NO: 14032 - RNA, 97 nt, synthetic construct
  misc_feature 1..97: note = engineered ribonucleic acid scaffold (ERS) sequence
  source 1..97: mol_type = other RNA
acaggccgttctatctgattactctgcggccttcaccagcgactatgtcgtagtgggtaaagcgcttacggacttcggtccgtaagtcgcatcagag

SEQ ID NO: 14033 - RNA, 97 nt, synthetic construct
  misc_feature 1..97: note = engineered ribonucleic acid scaffold (ERS) sequence
  source 1..97: mol_type = other RNA
acaggtccttctatctgattactctgggaccttcaccagcgactatgtcgtagtgggtaaagcgcttacggacttcggtccgtaagtcgcatcagag

SEQ ID NO: 14034 - RNA, 97 nt, synthetic construct
  misc_feature 1..97: note = engineered ribonucleic acid scaffold (ERS) sequence
  source 1..97: mol_type = other RNA
accagcaattctatctgattactctgttgctgtcaccagcgactatgtcgtagtgggtaaagcgcttacggacttcggtccgtaagtcgcatcagag

SEQ ID NO: 14035 - RNA, 97 nt, synthetic construct
  misc_feature 1..97: note = engineered ribonucleic acid scaffold (ERS) sequence
  source 1..97: mol_type = other RNA
accgagacttctatctgattactctgggctcgtcaccagcgactatgtcgtagtgggtaaagcgcttacggacttcggtccgtaagtcgcatcagag

SEQ ID NO: 14036 - RNA, 97 nt, synthetic construct
  misc_feature 1..97: note = engineered ribonucleic acid scaffold (ERS) sequence
  source 1..97: mol_type = other RNA
acctgtagttctatctgattactctgctacagtcaccagcgactatgtcgtagtgggtaaagcgcttacggacttcggtccgtaagtcgcatcagag

SEQ ID NO: 14037 - RNA, 97 nt, synthetic construct
  misc_feature 1..97: note = engineered ribonucleic acid scaffold (ERS) sequence
  source 1..97: mol_type = other RNA
acgagcacttctatctgattactctggggctctcaccagcgactatgtcgtagtgggtaaagcgcttacggacttcggtccgtaagtcgcatcagag

SEQ ID NO: 14038 - RNA, 97 nt, synthetic construct
  misc_feature 1..97: note = engineered ribonucleic acid scaffold (ERS) sequence
  source 1..97: mol_type = other RNA
acgaggtgttctatctgattactctgcacctctcaccagcgactatgtcgtagtgggtaaagcgcttacggacttcggtccgtaagtcgcatcagag

SEQ ID NO: 14039 - RNA, 97 nt, synthetic construct
  misc_feature 1..97: note = engineered ribonucleic acid scaffold (ERS) sequence
  source 1..97: mol_type = other RNA
acgggactttctatctgattactctgagtccctcaccagcgactatgtcgtagtgggtaaagcgcttacggacttcggtccgtaagtcgcatcagag

SEQ ID NO: 14040 - RNA, 97 nt, synthetic construct
  misc_feature 1..97: note = engineered ribonucleic acid scaffold (ERS) sequence
  source 1..97: mol_type = other RNA
acgggcaattctatctgattactctgttgccctcaccagcgactatgtcgtagtgggtaaagcgcttacggacttcggtccgtaagtcgcatcagag

SEQ ID NO: 14041 - RNA, 97 nt, synthetic construct
  misc_feature 1..97: note = engineered ribonucleic acid scaffold (ERS) sequence
  source 1..97: mol_type = other RNA
actgtgcgttctatctgattactctgcgcacatcaccagcgactatgtcgtagtgggtaaagcgcttacggacttcggtccgtaagtcgcatcagag

SEQ ID NO: 14042 - RNA, 98 nt, synthetic construct
  misc_feature 1..98: note = engineered ribonucleic acid scaffold (ERS) sequence
  source 1..98: mol_type = other RNA
actggcgcttctatctgattactctgggcgccatcaccagcgactatgtcgtagtgggtaaagcgcttacggacttcggtccgtaagtcgcatcagag

SEQ ID NO: 14043 - RNA, 98 nt, synthetic construct
  misc_feature 1..98: note = engineered ribonucleic acid scaffold (ERS) sequence
  source 1..98: mol_type = other RNA
actggcgcttctatctgattactctgggagccatcaccagcgactatgtcgtagtgggtaaagcgcttacggacttcggtccgtaagtcgcatcagag

SEQ ID NO: 14044 - RNA, 98 nt, synthetic construct
  misc_feature 1..98: note = engineered ribonucleic acid scaffold (ERS) sequence
  source 1..98: mol_type = other RNA
actggcgcttctatctgattactctgtgagccatcaccagcgactatgtcgtagtgggtaaagcgcttacggacttcggtccgtaagtcgcatcagag

SEQ ID NO: 14045 - RNA, 99 nt, synthetic construct
  misc_feature 1..99: note = engineered ribonucleic acid scaffold (ERS) sequence
  source 1..99: mol_type = other RNA
actggcgcttctatctgattactctgaggagccatcaccagcgactatgtcgtagtgggtaaagcgcttacggacttcggtccgtaagtcgcatcagag

SEQ ID NO: 14046 - RNA, 98 nt, synthetic construct
  misc_feature 1..98: note = engineered ribonucleic acid scaffold (ERS) sequence
  source 1..98: mol_type = other RNA
actggcgcttctatctgattactctgatagccatcaccagcgactatgtcgtagtgggtaaagcgcttacggacttcggtccgtaagtcgcatcagag

SEQ ID NO: 14047 - RNA, 99 nt, synthetic construct
  misc_feature 1..99: note = engineered ribonucleic acid scaffold (ERS) sequence
  source 1..99: mol_type = other RNA
actggcgcttctatctgattactctgagctgccatcaccagcgactatgtcgtagtgggtaaagcgcttacggacttcggtccgtaagtcgcatcagag

SEQ ID NO: 14048 - RNA, 99 nt, synthetic construct
  misc_feature 1..99: note = engineered ribonucleic acid scaffold (ERS) sequence
  source 1..99: mol_type = other RNA
actggcacttctatctgattactctgagtagccatcaccagcgactatgtcgtagtgggtaaagcgcttacggacttcggtccgtaagtcgcatcagag

SEQ ID NO: 14049 - RNA, 99 nt, synthetic construct
  misc_feature 1..99: note = engineered ribonucleic acid scaffold (ERS) sequence
  source 1..99: mol_type = other RNA
actggcgcttctatctgattactctgagtagccatcaccagcgactatgtcgtagtgggtaaagcgcttacggacttcggtccgtaagtcgcatcagag

SEQ ID NO: 14050 - RNA, 98 nt, synthetic construct
  misc_feature 1..98: note = engineered ribonucleic acid scaffold (ERS) sequence
  source 1..98: mol_type = other RNA
actggcgcttctatctgattactctgagcaccatcaccagcgactatgtcgtagtgggtaaagcgcttacggacttcggtccgtaagtcgcatcagag

SEQ ID NO: 14051 - RNA, 98 nt, synthetic construct
  misc_feature 1..98: note = engineered ribonucleic acid scaffold (ERS) sequence
  source 1..98: mol_type = other RNA
actggcacttctatctgattactctgagcgccatcaccagcgactatgtcgtagtgggtaaagcgcttacggacttcggtccgtaagtcgcatcagag

SEQ ID NO: 14052 - RNA, 98 nt, synthetic construct
  misc_feature 1..98: note = engineered ribonucleic acid scaffold (ERS) sequence
  source 1..98: mol_type = other RNA
actggcgcttctatctgattactctgagggccatcaccagcgactatgtcgtagtgggtaaagcgcttacggacttcggtccgtaagtcgcatcagag

SEQ ID NO: 14053 - RNA, 98 nt, synthetic construct
  misc_feature 1..98: note = engineered ribonucleic acid scaffold (ERS) sequence
  source 1..98: mol_type = other RNA
actggcgcttctatctgattactctgagtgccgtcaccagcgactatgtcgtagtgggtaaagcgcttacggacttcggtccgtaagtcgcatcagag

SEQ ID NO: 14054 - RNA, 98 nt, synthetic construct
  misc_feature 1..98: note = engineered ribonucleic acid scaffold (ERS) sequence
  source 1..98: mol_type = other RNA
actggcacttctatctgattactctgagtgccatcaccagcgactatgtcgtagtgggtaaagcgcttacggacttcggtccgtaagtcgcatcagag

SEQ ID NO: 14055 - RNA, 98 nt, synthetic construct
  misc_feature 1..98: note = engineered ribonucleic acid scaffold (ERS) sequence
  source 1..98: mol_type = other RNA
actggcgcttctatctgattactctgagaaccatcaccagcgactatgtcgtagtgggtaaagcgcttacggacttcggtccgtaagtcgcatcagag

SEQ ID NO: 14056 - RNA, 98 nt, synthetic construct
  misc_feature 1..98: note = engineered ribonucleic acid scaffold (ERS) sequence
  source 1..98: mol_type = other RNA
actggcgcttctatctgattactctgagagccgtcaccagcgactatgtcgtagtgggtaaagcgcttacggacttcggtccgtaagtcgcatcagag

SEQ ID NO: 14057 - RNA, 98 nt, synthetic construct
  misc_feature 1..98: note = engineered ribonucleic acid scaffold (ERS) sequence
  source 1..98: mol_type = other RNA
actggcgcttctatctgattactctgagagccttcaccagcgactatgtcgtagtgggtaaagcgcttacggacttcggtccgtaagtcgcatcagag

SEQ ID NO: 14058 - RNA, 98 nt, synthetic construct
  misc_feature 1..98: note = engineered ribonucleic acid scaffold (ERS) sequence
  source 1..98: mol_type = other RNA
actggggcttctatctgattactctgagacccatcaccagcgactatgtcgtagtgggtaaagcgcttacggacttcggtccgtaagtcgcatcagag

SEQ ID NO: 14059 - RNA, 98 nt, synthetic construct
  misc_feature 1..98: note = engineered ribonucleic acid scaffold (ERS) sequence
  source 1..98: mol_type = other RNA
actggtgcttctatctgattactctgagagccatcaccagcgactatgtcgtagtgggtaaagcgcttacggacttcggtccgtaagtcgcatcagag

SEQ ID NO: 14060 - RNA, 98 nt, synthetic construct
  misc_feature 1..98: note = engineered ribonucleic acid scaffold (ERS) sequence
  source 1..98: mol_type = other RNA
actgggccttctatctgattactctgaggcccatcaccagcgactatgtcgtagtgggtaaagcgcttacggacttcggtccgtaagtcgcatcagag

SEQ ID NO: 14061 - RNA, 99 nt, synthetic construct
  misc_feature 1..99: note = engineered ribonucleic acid scaffold (ERS) sequence
  source 1..99: mol_type = other RNA
actggcccttctatctgattactctgaggagccatcaccagcgactatgtcgtagtgggtaaagcgcttacggacttcggtccgtaagtcgcatcagag

SEQ ID NO: 14062 - RNA, 98 nt, synthetic construct
  misc_feature 1..98: note = engineered ribonucleic acid scaffold (ERS) sequence
  source 1..98: mol_type = other RNA
actggcccttctatctgattactctgagggccatcaccagcgactatgtcgtagtgggtaaagcgcttacggacttcggtccgtaagtcgcatcagag

SEQ ID NO: 14063 - RNA, 98 nt, synthetic construct
  misc_feature 1..98: note = engineered ribonucleic acid scaffold (ERS) sequence
  source 1..98: mol_type = other RNA
actggcccttctatctgattactctgagtgccatcaccagcgactatgtcgtagtgggtaaagcgcttacggacttcggtccgtaagtcgcatcagag

SEQ ID NO: 14064 - RNA, 98 nt, synthetic construct
  misc_feature 1..98: note = engineered ribonucleic acid scaffold (ERS) sequence
  source 1..98: mol_type = other RNA
actggcccttctatctgattactctgagagccatcaccagcgactatgtcgtagtgggtaaagcgcttacggacttcggtccgtaagtcgcatcagag

SEQ ID NO: 14065 - RNA, 99 nt, synthetic construct
  misc_feature 1..99: note = engineered ribonucleic acid scaffold (ERS) sequence
  source 1..99: mol_type = other RNA
actggcgcttctatctgattactctgagcagccatcaccagcgactatgtcgtagtgggtaaagcgcttacggacttcggtccgtaagtcgcatcagag

SEQ ID NO: 14066 - RNA, 98 nt, synthetic construct; identical to SEQ ID NO: 883
  misc_feature 1..98: note = engineered ribonucleic acid scaffold (ERS) sequence
  source 1..98: mol_type = other RNA

SEQ ID NO: 14067 - RNA, 98 nt, synthetic construct
  misc_feature 1..98: note = engineered ribonucleic acid scaffold (ERS) sequence
  source 1..98: mol_type = other RNA
actggcgcttctatctgattactctgagtgccatcaccagcgactatgtcgtagtgggtaaagcgcttacggacttcggtccgtaagtcgcatcagag

SEQ ID NO: 14068 - RNA, 98 nt, synthetic construct
  misc_feature 1..98: note = engineered ribonucleic acid scaffold (ERS) sequence
  source 1..98: mol_type = other RNA
actggcgcttctatctgattactctgagagccatcaccagcgactatgtcgtagtgggtaaagcgcttacggacttcggtccgtaagtcgcatcagag

SEQ ID NO: 14069 - RNA, 98 nt, synthetic construct
  misc_feature 1..98: note = engineered ribonucleic acid scaffold (ERS) sequence
  source 1..98: mol_type = other RNA
actggctcttctatctgattactctgagcgccatcaccagcgactatgtcgtagtgggtaaagcgcttacggacttcggtccgtaagtcgcatcagag

SEQ ID NO: 14070 - RNA, 98 nt, synthetic construct
  misc_feature 1..98: note = engineered ribonucleic acid scaffold (ERS) sequence
  source 1..98: mol_type = other RNA
actggctcttctatctgattactctgagggccatcaccagcgactatgtcgtagtgggtaaagcgcttacggacttcggtccgtaagtcgcatcagag

SEQ ID NO: 14071 - RNA, 98 nt, synthetic construct
  misc_feature 1..98: note = engineered ribonucleic acid scaffold (ERS) sequence
  source 1..98: mol_type = other RNA
actggctcttctatctgattactctgagtgccatcaccagcgactatgtcgtagtgggtaaagcgcttacggacttcggtccgtaagtcgcatcagag

SEQ ID NO: 14072 - RNA, 98 nt, synthetic construct
  misc_feature 1..98: note = engineered ribonucleic acid scaffold (ERS) sequence
  source 1..98: mol_type = other RNA
actggctcttctatctgattactctgagagccatcaccagcgactatgtcgtagtgggtaaagcgcttacggacttcggtccgtaagtcgcatcagag

SEQ ID NO: 14073 - RNA, 98 nt, synthetic construct
  misc_feature 1..98: note = engineered ribonucleic acid scaffold (ERS) sequence
  source 1..98: mol_type = other RNA
actggcggttctatctgattactctgagcgccatcaccagcgactatgtcgtagtgggtaaagcgcttacggacttcggtccgtaagtcgcatcagag

SEQ ID NO: 14074 - RNA, 98 nt, synthetic construct
  misc_feature 1..98: note = engineered ribonucleic acid scaffold (ERS) sequence
  source 1..98: mol_type = other RNA
actggcggttctatctgattactctgagagccatcaccagcgactatgtcgtagtgggtaaagcgcttacggacttcggtccgtaagtcgcatcagag

SEQ ID NO: 14075 - RNA, 97 nt, synthetic construct
  misc_feature 1..97: note = engineered ribonucleic acid scaffold (ERS) sequence
  source 1..97: mol_type = other RNA
acacacggttctatctgattactctgccgtgttcaccagcgactatgtcgtagtgggtaaagcgcttacggagttcgatccgtaagaagcatcagag

SEQ ID NO: 14076 - RNA, 97 nt, synthetic construct
  misc_feature 1..97: note = engineered ribonucleic acid scaffold (ERS) sequence
  source 1..97: mol_type = other RNA
acactggtttctatctgattactctgaccagttcaccagcgactatgtcgtagtgggtaaagcgcttacggagttcgatccgtaagaagcatcagag

SEQ ID NO: 14077 - RNA, 97 nt, synthetic construct
  misc_feature 1..97: note = engineered ribonucleic acid scaffold (ERS) sequence
  source 1..97: mol_type = other RNA
acaggccgttctatctgattactctgcggccttcaccagcgactatgtcgtagtgggtaaagcgcttacggagttcgatccgtaagaagcatcagag

SEQ ID NO: 14078 - RNA, 97 nt, synthetic construct
  misc_feature 1..97: note = engineered ribonucleic acid scaffold (ERS) sequence
  source 1..97: mol_type = other RNA
acaggtccttctatctgattactctgggaccttcaccagcgactatgtcgtagtgggtaaagcgcttacggagttcgatccgtaagaagcatcagag

SEQ ID NO: 14079 - RNA, 97 nt, synthetic construct
  misc_feature 1..97: note = engineered ribonucleic acid scaffold (ERS) sequence
  source 1..97: mol_type = other RNA
accagcaattctatctgattactctgttgctgtcaccagcgactatgtcgtagtgggtaaagcgcttacggagttcgatccgtaagaagcatcagag

SEQ ID NO: 14080 - RNA, 97 nt, synthetic construct
  misc_feature 1..97: note = engineered ribonucleic acid scaffold (ERS) sequence
  source 1..97: mol_type = other RNA
accgagacttctatctgattactctgggctcgtcaccagcgactatgtcgtagtgggtaaagcgcttacggagttcgatccgtaagaagcatcagag

SEQ ID NO: 14081 - RNA, 97 nt, synthetic construct
  misc_feature 1..97: note = engineered ribonucleic acid scaffold (ERS) sequence
  source 1..97: mol_type = other RNA
acctgtagttctatctgattactctgctacagtcaccagcgactatgtcgtagtgggtaaagcgcttacggagttcgatccgtaagaagcatcagag

SEQ ID NO: 14082 - RNA, 97 nt, synthetic construct
  misc_feature 1..97: note = engineered ribonucleic acid scaffold (ERS) sequence
  source 1..97: mol_type = other RNA
acgagcacttctatctgattactctggggctctcaccagcgactatgtcgtagtgggtaaagcgcttacggagttcgatccgtaagaagcatcagag

SEQ ID NO: 14083 - RNA, 97 nt, synthetic construct
  misc_feature 1..97: note = engineered ribonucleic acid scaffold (ERS) sequence
  source 1..97: mol_type = other RNA
acgaggtgttctatctgattactctgcacctctcaccagcgactatgtcgtagtgggtaaagcgcttacggagttcgatccgtaagaagcatcagag

SEQ ID NO: 14084 - RNA, 97 nt, synthetic construct
  misc_feature 1..97: note = engineered ribonucleic acid scaffold (ERS) sequence
  source 1..97: mol_type = other RNA
acgggactttctatctgattactctgagtccctcaccagcgactatgtcgtagtgggtaaagcgcttacggagttcgatccgtaagaagcatcagag

SEQ ID NO: 14085 - RNA, 97 nt, synthetic construct
  misc_feature 1..97: note = engineered ribonucleic acid scaffold (ERS) sequence
  source 1..97: mol_type = other RNA
acgggcaattctatctgattactctgttgccctcaccagcgactatgtcgtagtgggtaaagcgcttacggagttcgatccgtaagaagcatcagag

SEQ ID NO: 14086 - RNA, 97 nt, synthetic construct
  misc_feature 1..97: note = engineered ribonucleic acid scaffold (ERS) sequence
  source 1..97: mol_type = other RNA
actgtgcgttctatctgattactctgcgcacatcaccagcgactatgtcgtagtgggtaaagcgcttacggagttcgatccgtaagaagcatcagag

SEQ ID NO: 14087 - RNA, 98 nt, synthetic construct
  misc_feature 1..98: note = engineered ribonucleic acid scaffold (ERS) sequence
  source 1..98: mol_type = other RNA
actggcgcttctatctgattactctgggcgccatcaccagcgactatgtcgtagtgggtaaagcgcttacggagttcgatccgtaagaagcatcagag

SEQ ID NO: 14088 - RNA, 98 nt, synthetic construct
  misc_feature 1..98: note = engineered ribonucleic acid scaffold (ERS) sequence
  source 1..98: mol_type = other RNA
actggcgcttctatctgattactctgggagccatcaccagcgactatgtcgtagtgggtaaagcgcttacggagttcgatccgtaagaagcatcagag

SEQ ID NO: 14089 - RNA, 98 nt, synthetic construct
  misc_feature 1..98: note = engineered ribonucleic acid scaffold (ERS) sequence
  source 1..98: mol_type = other RNA
actggcgcttctatctgattactctgtgagccatcaccagcgactatgtcgtagtgggtaaagcgcttacggagttcgatccgtaagaagcatcagag

SEQ ID NO: 14090 - RNA, 99 nt, synthetic construct
  misc_feature 1..99: note = engineered ribonucleic acid scaffold (ERS) sequence
  source 1..99: mol_type = other RNA
actggcgcttctatctgattactctgaggagccatcaccagcgactatgtcgtagtgggtaaagcgcttacggagttcgatccgtaagaagcatcagag

SEQ ID NO: 14091 - RNA, 98 nt, synthetic construct
  misc_feature 1..98: note = engineered ribonucleic acid scaffold (ERS) sequence
  source 1..98: mol_type = other RNA
actggcgcttctatctgattactctgatagccatcaccagcgactatgtcgtagtgggtaaagcgcttacggagttcgatccgtaagaagcatcagag

SEQ ID NO: 14092 - RNA, 99 nt, synthetic construct
  misc_feature 1..99: note = engineered ribonucleic acid scaffold (ERS) sequence
  source 1..99: mol_type = other RNA
actggcgcttctatctgattactctgagctgccatcaccagcgactatgtcgtagtgggtaaagcgcttacggagttcgatccgtaagaagcatcagag

SEQ ID NO: 14093 - RNA, 99 nt, synthetic construct
  misc_feature 1..99: note = engineered ribonucleic acid scaffold (ERS) sequence
  source 1..99: mol_type = other RNA
actggcacttctatctgattactctgagtagccatcaccagcgactatgtcgtagtgggtaaagcgcttacggagttcgatccgtaagaagcatcagag

SEQ ID NO: 14094 - RNA, 99 nt, synthetic construct
  misc_feature 1..99: note = engineered ribonucleic acid scaffold (ERS) sequence
  source 1..99: mol_type = other RNA
actggcgcttctatctgattactctgagtagccatcaccagcgactatgtcgtagtgggtaaagcgcttacggagttcgatccgtaagaagcatcagag

SEQ ID NO: 14095 - RNA, 98 nt, synthetic construct
  misc_feature 1..98: note = engineered ribonucleic acid scaffold (ERS) sequence
  source 1..98: mol_type = other RNA
actggcgcttctatctgattactctgagcaccatcaccagcgactatgtcgtagtgggtaaagcgcttacggagttcgatccgtaagaagcatcagag

SEQ ID NO: 14096 - RNA, 98 nt, synthetic construct
  misc_feature 1..98: note = engineered ribonucleic acid scaffold (ERS) sequence
  source 1..98: mol_type = other RNA
actggcacttctatctgattactctgagcgccatcaccagcgactatgtcgtagtgggtaaagcgcttacggagttcgatccgtaagaagcatcagag

SEQ ID NO: 14097 - RNA, 98 nt, synthetic construct
  misc_feature 1..98: note = engineered ribonucleic acid scaffold (ERS) sequence
  source 1..98: mol_type = other RNA
actggcgcttctatctgattactctgagggccatcaccagcgactatgtcgtagtgggtaaagcgcttacggagttcgatccgtaagaagcatcagag

SEQ ID NO: 14098 - RNA, 98 nt, synthetic construct
  misc_feature 1..98: note = engineered ribonucleic acid scaffold (ERS) sequence
  source 1..98: mol_type = other RNA
actggcgcttctatctgattactctgagtgccgtcaccagcgactatgtcgtagtgggtaaagcgcttacggagttcgatccgtaagaagcatcagag

SEQ ID NO: 14099 - RNA, 98 nt, synthetic construct
  misc_feature 1..98: note = engineered ribonucleic acid scaffold (ERS) sequence
  source 1..98: mol_type = other RNA
actggcacttctatctgattactctgagtgccatcaccagcgactatgtcgtagtgggtaaagcgcttacggagttcgatccgtaagaagcatcagag

SEQ ID NO: 14100 - RNA, 98 nt, synthetic construct
  misc_feature 1..98: note = engineered ribonucleic acid scaffold (ERS) sequence
  source 1..98: mol_type = other RNA
actggcgcttctatctgattactctgagaaccatcaccagcgactatgtcgtagtgggtaaagcgcttacggagttcgatccgtaagaagcatcagag

SEQ ID NO: 14101 - RNA, 98 nt, synthetic construct
  misc_feature 1..98: note = engineered ribonucleic acid scaffold (ERS) sequence
  source 1..98: mol_type = other RNA
actggcgcttctatctgattactctgagagccgtcaccagcgactatgtcgtagtgggtaaagcgcttacggagttcgatccgtaagaagcatcagag

SEQ ID NO: 14102 - RNA, 98 nt, synthetic construct
  misc_feature 1..98: note = engineered ribonucleic acid scaffold (ERS) sequence
  source 1..98: mol_type = other RNA
actggcgcttctatctgattactctgagagccttcaccagcgactatgtcgtagtgggtaaagcgcttacggagttcgatccgtaagaagcatcagag

SEQ ID NO: 14103 - RNA, 98 nt, synthetic construct
  misc_feature 1..98: note = engineered ribonucleic acid scaffold (ERS) sequence
  source 1..98: mol_type = other RNA
actggggcttctatctgattactctgagacccatcaccagcgactatgtcgtagtgggtaaagcgcttacggagttcgatccgtaagaagcatcagag

SEQ ID NO: 14104 - RNA, 98 nt, synthetic construct
  misc_feature 1..98: note = engineered ribonucleic acid scaffold (ERS) sequence
  source 1..98: mol_type = other RNA
actggtgcttctatctgattactctgagagccatcaccagcgactatgtcgtagtgggtaaagcgcttacggagttcgatccgtaagaagcatcagag

SEQ ID NO: 14105 - RNA, 98 nt, synthetic construct
  misc_feature 1..98: note = engineered ribonucleic acid scaffold (ERS) sequence
  source 1..98: mol_type = other RNA
actgggccttctatctgattactctgaggcccatcaccagcgactatgtcgtagtgggtaaagcgcttacggagttcgatccgtaagaagcatcagag

SEQ ID NO: 14106 - RNA, 99 nt, synthetic construct
  misc_feature 1..99: note = engineered ribonucleic acid scaffold (ERS) sequence
  source 1..99: mol_type = other RNA
actggcccttctatctgattactctgaggagccatcaccagcgactatgtcgtagtgggtaaagcgcttacggagttcgatccgtaagaagcatcagag

SEQ ID NO: 14107 - RNA, 98 nt, synthetic construct
  misc_feature 1..98: note = engineered ribonucleic acid scaffold (ERS) sequence
  source 1..98: mol_type = other RNA
actggcccttctatctgattactctgagggccatcaccagcgactatgtcgtagtgggtaaagcgcttacggagttcgatccgtaagaagcatcagag

SEQ ID NO: 14108 - RNA, 98 nt, synthetic construct
  misc_feature 1..98: note = engineered ribonucleic acid scaffold (ERS) sequence
  source 1..98: mol_type = other RNA
actggcccttctatctgattactctgagtgccatcaccagcgactatgtcgtagtgggtaaagcgcttacggagttcgatccgtaagaagcatcagag

SEQ ID NO: 14109 - RNA, 98 nt, synthetic construct
  misc_feature 1..98: note = engineered ribonucleic acid scaffold (ERS) sequence
  source 1..98: mol_type = other RNA
actggcccttctatctgattactctgagagccatcaccagcgactatgtcgtagtgggtaaagcgcttacggagttcgatccgtaagaagcatcagag

SEQ ID NO: 14110 - RNA, 99 nt, synthetic construct
  misc_feature 1..99: note = engineered ribonucleic acid scaffold (ERS) sequence
  source 1..99: mol_type = other RNA
actggcgcttctatctgattactctgagcagccatcaccagcgactatgtcgtagtgggtaaagcgcttacggagttcgatccgtaagaagcatcagag

SEQ ID NO: 14111 - RNA, 98 nt, synthetic construct; identical to SEQ ID NO: 884
  misc_feature 1..98: note = engineered ribonucleic acid scaffold (ERS) sequence
  source 1..98: mol_type = other RNA

SEQ ID NO: 14112 - RNA, 98 nt, synthetic construct
  misc_feature 1..98: note = engineered ribonucleic acid scaffold (ERS) sequence
  source 1..98: mol_type = other RNA
actggcgcttctatctgattactctgagtgccatcaccagcgactatgtcgtagtgggtaaagcgcttacggagttcgatccgtaagaagcatcagag

SEQ ID NO: 14113 - RNA, 98 nt, synthetic construct
  misc_feature 1..98: note = engineered ribonucleic acid scaffold (ERS) sequence
  source 1..98: mol_type = other RNA
actggcgcttctatctgattactctgagagccatcaccagcgactatgtcgtagtgggtaaagcgcttacggagttcgatccgtaagaagcatcagag

SEQ ID NO: 14114 - RNA, 98 nt, synthetic construct
  misc_feature 1..98: note = engineered ribonucleic acid scaffold (ERS) sequence
  source 1..98: mol_type = other RNA
actggctcttctatctgattactctgagcgccatcaccagcgactatgtcgtagtgggtaaagcgcttacggagttcgatccgtaagaagcatcagag

SEQ ID NO: 14115 - RNA, 98 nt, synthetic construct
  misc_feature 1..98: note = engineered ribonucleic acid scaffold (ERS) sequence
  source 1..98: mol_type = other RNA
actggctcttctatctgattactctgagggccatcaccagcgactatgtcgtagtgggtaaagcgcttacggagttcgatccgtaagaagcatcagag

SEQ ID NO: 14116 - RNA, 98 nt, synthetic construct
  misc_feature 1..98: note = engineered ribonucleic acid scaffold (ERS) sequence
  source 1..98: mol_type = other RNA
actggctcttctatctgattactctgagtgccatcaccagcgactatgtcgtagtgggtaaagcgcttacggagttcgatccgtaagaagcatcagag

SEQ ID NO: 14117 - RNA, 98 nt, synthetic construct
  misc_feature 1..98: note = engineered ribonucleic acid scaffold (ERS) sequence
  source 1..98: mol_type = other RNA
actggctcttctatctgattactctgagagccatcaccagcgactatgtcgtagtgggtaaagcgcttacggagttcgatccgtaagaagcatcagag

SEQ ID NO: 14118 - RNA, 98 nt, synthetic construct
  misc_feature 1..98: note = engineered ribonucleic acid scaffold (ERS) sequence
  source 1..98: mol_type = other RNA
actggcggttctatctgattactctgagcgccatcaccagcgactatgtcgtagtgggtaaagcgcttacggagttcgatccgtaagaagcatcagag

SEQ ID NO: 14119 - RNA, 98 nt, synthetic construct
  misc_feature 1..98: note = engineered ribonucleic acid scaffold (ERS) sequence
  source 1..98: mol_type = other RNA
actggcggttctatctgattactctgagagccatcaccagcgactatgtcgtagtgggtaaagcgcttacggagttcgatccgtaagaagcatcagag

SEQ ID NO: 14120 - RNA, 97 nt, synthetic construct
  misc_feature 1..97: note = engineered ribonucleic acid scaffold (ERS) sequence
  source 1..97: mol_type = other RNA
acacacggttctatctgattactctgccgtgttcaccagcgactatgtcgtagtgggtaaagcgctttcggacttcggtccggaagaagcatcagag

SEQ ID NO: 14121 - RNA, 97 nt, synthetic construct
  misc_feature 1..97: note = engineered ribonucleic acid scaffold (ERS) sequence
  source 1..97: mol_type = other RNA
acactggtttctatctgattactctgaccagttcaccagcgactatgtcgtagtgggtaaagcgctttcggacttcggtccggaagaagcatcagag

SEQ ID NO: 14122 - RNA, 97 nt, synthetic construct
  misc_feature 1..97: note = engineered ribonucleic acid scaffold (ERS) sequence
  source 1..97: mol_type = other RNA
acaggccgttctatctgattactctgcggccttcaccagcgactatgtcgtagtgggtaaagcgctttcggacttcggtccggaagaagcatcagag

SEQ ID NO: 14123 - RNA, 97 nt, synthetic construct
  misc_feature 1..97: note = engineered ribonucleic acid scaffold (ERS) sequence
  source 1..97: mol_type = other RNA
acaggtccttctatctgattactctgggaccttcaccagcgactatgtcgtagtgggtaaagcgctttcggacttcggtccggaagaagcatcagag

SEQ ID NO: 14124 - RNA, 97 nt, synthetic construct
  misc_feature 1..97: note = engineered ribonucleic acid scaffold (ERS) sequence
  source 1..97: mol_type = other RNA
accagcaattctatctgattactctgttgctgtcaccagcgactatgtcgtagtgggtaaagcgctttcggacttcggtccggaagaagcatcagag

SEQ ID NO: 14125 - RNA, 97 nt, synthetic construct
  misc_feature 1..97: note = engineered ribonucleic acid scaffold (ERS) sequence
  source 1..97: mol_type = other RNA
accgagacttctatctgattactctgggctcgtcaccagcgactatgtcgtagtgggtaaagcgctttcggacttcggtccggaagaagcatcagag

SEQ ID NO: 14126 - RNA, 97 nt, synthetic construct
  misc_feature 1..97: note = engineered ribonucleic acid scaffold (ERS) sequence
  source 1..97: mol_type = other RNA
acctgtagttctatctgattactctgctacagtcaccagcgactatgtcgtagtgggtaaagcgctttcggacttcggtccggaagaagcatcagag

SEQ ID NO: 14127 - RNA, 97 nt, synthetic construct
  misc_feature 1..97: note = engineered ribonucleic acid scaffold (ERS) sequence
  source 1..97: mol_type = other RNA
acgagcacttctatctgattactctggggctctcaccagcgactatgtcgtagtgggtaaagcgctttcggacttcggtccggaagaagcatcagag

SEQ ID NO: 14128 - RNA, 97 nt, synthetic construct
  misc_feature 1..97: note = engineered ribonucleic acid scaffold (ERS) sequence
  source 1..97: mol_type = other RNA
acgaggtgttctatctgattactctgcacctctcaccagcgactatgtcgtagtgggtaaagcgctttcggacttcggtccggaagaagcatcagag

SEQ ID NO: 14129 - RNA, 97 nt, synthetic construct
  misc_feature 1..97: note = engineered ribonucleic acid scaffold (ERS) sequence
  source 1..97: mol_type = other RNA
acgggactttctatctgattactctgagtccctcaccagcgactatgtcgtagtgggtaaagcgctttcggacttcggtccggaagaagcatcagag

SEQ ID NO: 14130 - RNA, 97 nt, synthetic construct
  misc_feature 1..97: note = engineered ribonucleic acid scaffold (ERS) sequence
  source 1..97: mol_type = other RNA
acgggcaattctatctgattactctgttgccctcaccagcgactatgtcgtagtgggtaaagcgctttcggacttcggtccggaagaagcatcagag

SEQ ID NO: 14131 - RNA, 97 nt, synthetic construct
  misc_feature 1..97: note = engineered ribonucleic acid scaffold (ERS) sequence
  source 1..97: mol_type = other RNA
actgtgcgttctatctgattactctgcgcacatcaccagcgactatgtcgtagtgggtaaagcgctttcggacttcggtccggaagaagcatcagag

SEQ ID NO: 14132 - RNA, 98 nt, synthetic construct
  misc_feature 1..98: note = engineered ribonucleic acid scaffold (ERS) sequence
  source 1..98: mol_type = other RNA
actggcgcttctatctgattactctgggcgccatcaccagcgactatgtcgtagtgggtaaagcgctttcggacttcggtccggaagaagcatcagag

SEQ ID NO: 14133 - RNA, 98 nt, synthetic construct
  misc_feature 1..98: note = engineered ribonucleic acid scaffold (ERS) sequence
  source 1..98: mol_type = other RNA
actggcgcttctatctgattactctgggagccatcaccagcgactatgtcgtagtgggtaaagcgctttcggacttcggtccggaagaagcatcagag

SEQ ID NO: 14134 - RNA, 98 nt, synthetic construct
  misc_feature 1..98: note = engineered ribonucleic acid scaffold (ERS) sequence
  source 1..98: mol_type = other RNA
actggcgcttctatctgattactctgtgagccatcaccagcgactatgtcgtagtgggtaaagcgctttcggacttcggtccggaagaagcatcagag

SEQ ID NO: 14135 - RNA, 99 nt, synthetic construct
  misc_feature 1..99: note = engineered ribonucleic acid scaffold (ERS) sequence
  source 1..99: mol_type = other RNA
actggcgcttctatctgattactctgaggagccatcaccagcgactatgtcgtagtgggtaaagcgctttcggacttcggtccggaagaagcatcagag

SEQ ID NO: 14136 - RNA, 98 nt, synthetic construct
  misc_feature 1..98: note = engineered ribonucleic acid scaffold (ERS) sequence
  source 1..98: mol_type = other RNA
actggcgcttctatctgattactctgatagccatcaccagcgactatgtcgtagtgggtaaagcgctttcggacttcggtccggaagaagcatcagag

SEQ ID NO: 14137 - RNA, 99 nt, synthetic construct
  misc_feature 1..99: note = engineered ribonucleic acid scaffold (ERS) sequence
  source 1..99: mol_type = other RNA
actggcgcttctatctgattactctgagctgccatcaccagcgactatgtcgtagtgggtaaagcgctttcggacttcggtccggaagaagcatcagag

SEQ ID NO: 14138 - RNA, 99 nt, synthetic construct
  misc_feature 1..99: note = engineered ribonucleic acid scaffold (ERS) sequence
  source 1..99: mol_type = other RNA
actggcacttctatctgattactctgagtagccatcaccagcgactatgtcgtagtgggtaaagcgctttcggacttcggtccggaagaagcatcagag

SEQ ID NO: 14139 - RNA, 99 nt, synthetic construct
  misc_feature 1..99: note = engineered ribonucleic acid scaffold (ERS) sequence
  source 1..99: mol_type = other RNA
actggcgcttctatctgattactctgagtagccatcaccagcgactatgtcgtagtgggtaaagcgctttcggacttcggtccggaagaagcatcagag

SEQ ID NO: 14140 - RNA, 98 nt, synthetic construct
  misc_feature 1..98: note = engineered ribonucleic acid scaffold (ERS) sequence
  source 1..98: mol_type = other RNA
actggcgcttctatctgattactctgagcaccatcaccagcgactatgtcgtagtgggtaaagcgctttcggacttcggtccggaagaagcatcagag

SEQ ID NO: 14141 - RNA, 98 nt, synthetic construct
  misc_feature 1..98: note = engineered ribonucleic acid scaffold (ERS) sequence
  source 1..98: mol_type = other RNA
actggcacttctatctgattactctgagcgccatcaccagcgactatgtcgtagtgggtaaagcgctttcggacttcggtccggaagaagcatcagag

SEQ ID NO: 14142 - RNA, 98 nt, synthetic construct
  misc_feature 1..98: note = engineered ribonucleic acid scaffold (ERS) sequence
  source 1..98: mol_type = other RNA
actggcgcttctatctgattactctgagggccatcaccagcgactatgtcgtagtgggtaaagcgctttcggacttcggtccggaagaagcatcagag

SEQ ID NO: 14143 - RNA, 98 nt, synthetic construct
  misc_feature 1..98: note = engineered ribonucleic acid scaffold (ERS) sequence
  source 1..98: mol_type = other RNA
actggcgcttctatctgattactctgagtgccgtcaccagcgactatgtcgtagtgggtaaagcgctttcggacttcggtccggaagaagcatcagag

SEQ ID NO: 14144 - RNA, 98 nt, synthetic construct
  misc_feature 1..98: note = engineered ribonucleic acid scaffold (ERS) sequence
  source 1..98: mol_type = other RNA
actggcacttctatctgattactctgagtgccatcaccagcgactatgtcgtagtgggtaaagcgctttcggacttcggtccggaagaagcatcagag

SEQ ID NO: 14145 - RNA, 98 nt, synthetic construct
  misc_feature 1..98: note = engineered ribonucleic acid scaffold (ERS) sequence
  source 1..98: mol_type = other RNA
actggcgcttctatctgattactctgagaaccatcaccagcgactatgtcgtagtgggtaaagcgctttcggacttcggtccggaagaagcatcagag

SEQ ID NO: 14146 - RNA, 98 nt, synthetic construct
  misc_feature 1..98: note = engineered ribonucleic acid scaffold (ERS) sequence
  source 1..98: mol_type = other RNA
actggcgcttctatctgattactctgagagccgtcaccagcgactatgtcgtagtgggtaaagcgctttcggacttcggtccggaagaagcatcagag

SEQ ID NO: 14147 - RNA, 98 nt, synthetic construct
  misc_feature 1..98: note = engineered ribonucleic acid scaffold (ERS) sequence
  source 1..98: mol_type = other RNA
actggcgcttctatctgattactctgagagccttcaccagcgactatgtcgtagtgggtaaagcgctttcggacttcggtccggaagaagcatcagag

SEQ ID NO: 14148 - RNA, 98 nt, synthetic construct
  misc_feature 1..98: note = engineered ribonucleic acid scaffold (ERS) sequence
  source 1..98: mol_type = other RNA
actggggcttctatctgattactctgagacccatcaccagcgactatgtcgtagtgggtaaagcgctttcggacttcggtccggaagaagcatcagag

SEQ ID NO: 14149 - RNA, 98 nt, synthetic construct
  misc_feature 1..98: note = engineered ribonucleic acid scaffold (ERS) sequence
  source 1..98: mol_type = other RNA
actggtgcttctatctgattactctgagagccatcaccagcgactatgtcgtagtgggtaaagcgctttcggacttcggtccggaagaagcatcagag

SEQ ID NO: 14150 - RNA, 98 nt, synthetic construct
  misc_feature 1..98: note = engineered ribonucleic acid scaffold (ERS) sequence
  source 1..98: mol_type = other RNA
actgggccttctatctgattactctgaggcccatcaccagcgactatgtcgtagtgggtaaagcgctttcggacttcggtccggaagaagcatcagag

SEQ ID NO: 14151 - RNA, 99 nt, synthetic construct
  misc_feature 1..99: note = engineered ribonucleic acid scaffold (ERS) sequence
  source 1..99: mol_type = other RNA
actggcccttctatctgattactctgaggagccatcaccagcgactatgtcgtagtgggtaaagcgctttcggacttcggtccggaagaagcatcagag

SEQ ID NO: 14152 - RNA, 98 nt, synthetic construct
  misc_feature 1..98: note = engineered ribonucleic acid scaffold (ERS) sequence
  source 1..98: mol_type = other RNA
actggcccttctatctgattactctgagggccatcaccagcgactatgtcgtagtgggtaaagcgctttcggacttcggtccggaagaagcatcagag

SEQ ID NO: 14153 - RNA, 98 nt, synthetic construct
  misc_feature 1..98: note = engineered ribonucleic acid scaffold (ERS) sequence
  source 1..98: mol_type = other RNA
actggcccttctatctgattactctgagtgccatcaccagcgactatgtcgtagtgggtaaagcgctttcggacttcggtccggaagaagcatcagag

SEQ ID NO: 14154 - RNA, 98 nt, synthetic construct
  misc_feature 1..98: note = engineered ribonucleic acid scaffold (ERS) sequence
  source 1..98: mol_type = other RNA
actggcccttctatctgattactctgagagccatcaccagcgactatgtcgtagtgggtaaagcgctttcggacttcggtccggaagaagcatcagag

SEQ ID NO: 14155 - RNA, 99 nt, synthetic construct
  misc_feature 1..99: note = engineered ribonucleic acid scaffold (ERS) sequence
  source 1..99: mol_type = other RNA
actggcgcttctatctgattactctgagcagccatcaccagcgactatgtcgtagtgggtaaagcgctttcggacttcggtccggaagaagcatcagag

SEQ ID NO: 14156 - RNA, 98 nt, synthetic construct; identical to SEQ ID NO: 880
  misc_feature 1..98: note = engineered ribonucleic acid scaffold (ERS) sequence
  source 1..98: mol_type = other RNA

SEQ ID NO: 14157 - RNA, 98 nt, synthetic construct
  misc_feature 1..98: note = engineered ribonucleic acid scaffold (ERS) sequence
  source 1..98: mol_type = other RNA
actggcgcttctatctgattactctgagtgccatcaccagcgactatgtcgtagtgggtaaagcgctttcggacttcggtccggaagaagcatcagag

SEQ ID NO: 14158 - RNA, 98 nt, synthetic construct
  misc_feature 1..98: note = engineered ribonucleic acid scaffold (ERS) sequence
  source 1..98: mol_type = other RNA
actggcgcttctatctgattactctgagagccatcaccagcgactatgtcgtagtgggtaaagcgctttcggacttcggtccggaagaagcatcagag

SEQ ID NO: 14159 - RNA, 98 nt, synthetic construct
  misc_feature 1..98: note = engineered ribonucleic acid scaffold (ERS) sequence
  source 1..98: mol_type = other RNA
actggctcttctatctgattactctgagcgccatcaccagcgactatgtcgtagtgggtaaagcgctttcggacttcggtccggaagaagcatcagag

SEQ ID NO: 14160 - RNA, 98 nt, synthetic construct
  misc_feature 1..98: note = engineered ribonucleic acid scaffold (ERS) sequence
  source 1..98: mol_type = other RNA
actggctcttctatctgattactctgagggccatcaccagcgactatgtcgtagtgggtaaagcgctttcggacttcggtccggaagaagcatcagag

SEQ ID NO: 14161 - RNA, 98 nt, synthetic construct
  misc_feature 1..98: note = engineered ribonucleic acid scaffold (ERS) sequence
  source 1..98: mol_type = other RNA
actggctcttctatctgattactctgagtgccatcaccagcgactatgtcgtagtgggtaaagcgctttcggacttcggtccggaagaagcatcagag

SEQ ID NO: 14162 - RNA, 98 nt, synthetic construct
  misc_feature 1..98: note = engineered ribonucleic acid scaffold (ERS) sequence
  source 1..98: mol_type = other RNA
actggctcttctatctgattactctgagagccatcaccagcgactatgtcgtagtgggtaaagcgctttcggacttcggtccggaagaagcatcagag

SEQ ID NO: 14163 - RNA, 98 nt, synthetic construct
  misc_feature 1..98: note = engineered ribonucleic acid scaffold (ERS) sequence
  source 1..98: mol_type = other RNA
actggcggttctatctgattactctgagcgccatcaccagcgactatgtcgtagtgggtaaagcgctttcggacttcggtccggaagaagcatcagag

SEQ ID NO: 14164 - RNA, 98 nt, synthetic construct
  misc_feature 1..98: note = engineered ribonucleic acid scaffold (ERS) sequence
  source 1..98: mol_type = other RNA
actggcggttctatctgattactctgagagccatcaccagcgactatgtcgtagtgggtaaagcgctttcggacttcggtccggaagaagcatcagag

SEQ ID NO: 14165 - RNA, 101 nt, synthetic construct
  misc_feature 1..101: note = engineered ribonucleic acid scaffold (ERS) sequence
  source 1..101: mol_type = other RNA
acacacggttctatctgattactctgccgtgttcaccagcgactatgtcgtagtgggtaaagcggcagatctgagcctccgagctctctgccgcatcagag

SEQ ID NO: 14166 - RNA, 101 nt, synthetic construct
  misc_feature 1..101: note = engineered ribonucleic acid scaffold (ERS) sequence
  source 1..101: mol_type = other RNA
acactggtttctatctgattactctgaccagttcaccagcgactatgtcgtagtgggtaaagcggcagatctgagcctccgagctctctgccgcatcagag

SEQ ID NO: 14167 - RNA, 101 nt, synthetic construct
  misc_feature 1..101: note = engineered ribonucleic acid scaffold (ERS) sequence
  source 1..101: mol_type = other RNA
acaggccgttctatctgattactctgcggccttcaccagcgactatgtcgtagtgggtaaagcggcagatctgagcctccgagctctctgccgcatcagag

SEQ ID NO: 14168 - RNA, 101 nt, synthetic construct
  misc_feature 1..101: note = engineered ribonucleic acid scaffold (ERS) sequence
  source 1..101: mol_type = other RNA
acaggtccttctatctgattactctgggaccttcaccagcgactatgtcgtagtgggtaaagcggcagatctgagcctccgagctctctgccgcatcagag

SEQ ID NO: 14169 - RNA, 101 nt, synthetic construct
  misc_feature 1..101: note = engineered ribonucleic acid scaffold (ERS) sequence
  source 1..101: mol_type = other RNA
accagcaattctatctgattactctgttgctgtcaccagcgactatgtcgtagtgggtaaagcggcagatctgagcctccgagctctctgccgcatcagag

SEQ ID NO: 14170 - RNA, 101 nt, synthetic construct
  misc_feature 1..101: note = engineered ribonucleic acid scaffold (ERS) sequence
  source 1..101: mol_type = other RNA
accgagacttctatctgattactctgggctcgtcaccagcgactatgtcgtagtgggtaaagcggcagatctgagcctccgagctctctgccgcatcagag

SEQ ID NO: 14171 - RNA, 101 nt, synthetic construct
  misc_feature 1..101: note = engineered ribonucleic acid scaffold (ERS) sequence
  source 1..101: mol_type = other RNA
acctgtagttctatctgattactctgctacagtcaccagcgactatgtcgtagtgggtaaagcggcagatctgagcctccgagctctctgccgcatcagag

SEQ ID NO: 14172 - RNA, 101 nt, synthetic construct
  misc_feature 1..101: note = engineered ribonucleic acid scaffold (ERS) sequence
  source 1..101: mol_type = other RNA
acgagcacttctatctgattactctggggctctcaccagcgactatgtcgtagtgggtaaagcggcagatctgagcctccgagctctctgccgcatcagag

SEQ ID NO: 14173 - RNA, 101 nt, synthetic construct
  misc_feature 1..101: note = engineered ribonucleic acid scaffold (ERS) sequence
  source 1..101: mol_type = other RNA
acgaggtgttctatctgattactctgcacctctcaccagcgactatgtcgtagtgggtaaagcggcagatctgagcctccgagctctctgccgcatcagag

SEQ ID NO: 14174 - RNA, 101 nt, synthetic construct
  misc_feature 1..101: note = engineered ribonucleic acid scaffold (ERS) sequence
  source 1..101: mol_type = other RNA
acgggactttctatctgattactctgagtccctcaccagcgactatgtcgtagtgggtaaagcggcagatctgagcctccgagctctctgccgcatcagag

SEQ ID NO: 14175 - RNA, 101 nt, synthetic construct
  misc_feature 1..101: note = engineered ribonucleic acid scaffold (ERS) sequence
  source 1..101: mol_type = other RNA
acgggcaattctatctgattactctgttgccctcaccagcgactatgtcgtagtgggtaaagcggcagatctgagcctccgagctctctgccgcatcagag

SEQ ID NO: 14176 - RNA, 101 nt, synthetic construct
  misc_feature 1..101: note = engineered ribonucleic acid scaffold (ERS) sequence
  source 1..101: mol_type = other RNA
actgtgcgttctatctgattactctgcgcacatcaccagcgactatgtcgtagtgggtaaagcggcagatctgagcctccgagctctctgccgcatcagag

SEQ ID NO: 14177 - RNA, 102 nt, synthetic construct
  misc_feature 1..102: note = engineered ribonucleic acid scaffold (ERS) sequence
  source 1..102: mol_type = other RNA
actggcgcttctatctgattactctgggcgccatcaccagcgactatgtcgtagtgggtaaagcggcagatctgagcctccgagctctctgccgcatcagag

SEQ ID NO: 14178 - RNA, 102 nt, synthetic construct
  misc_feature 1..102: note = engineered ribonucleic acid scaffold (ERS) sequence
  source 1..102: mol_type = other RNA
actggcgcttctatctgattactctgggagccatcaccagcgactatgtcgtagtgggtaaagcggcagatctgagcctccgagctctctgccgcatcagag

SEQ ID NO: 14179 - RNA, 102 nt, synthetic construct
  misc_feature 1..102: note = engineered ribonucleic acid scaffold (ERS) sequence
  source 1..102: mol_type = other RNA
actggcgcttctatctgattactctgtgagccatcaccagcgactatgtcgtagtgggtaaagcggcagatctgagcctccgagctctctgccgcatcagag

SEQ ID NO: 14180 - RNA, 103 nt, synthetic construct
  misc_feature 1..103: note = engineered ribonucleic acid scaffold (ERS) sequence
  source 1..103: mol_type = other RNA
actggcgcttctatctgattactctgaggagccatcaccagcgactatgtcgtagtgggtaaagcggcagatctgagcctccgagctctctgccgcatcagag

SEQ ID NO: 14181 - RNA, 102 nt, synthetic construct
  misc_feature 1..102: note = engineered ribonucleic acid scaffold (ERS) sequence
  source 1..102: mol_type = other RNA
actggcgcttctatctgattactctgatagccatcaccagcgactatgtcgtagtgggtaaagcggcagatctgagcctccgagctctctgccgcatcagag

SEQ ID NO: 14182 - RNA, 103 nt, synthetic construct
  misc_feature 1..103: note = engineered ribonucleic acid scaffold (ERS) sequence
  source 1..103: mol_type = other RNA
actggcgcttctatctgattactctgagctgccatcaccagcgactatgtcgtagtgggtaaagcggcagatctgagcctccgagctctctgccgcatcagag

SEQ ID NO: 14183 - RNA, 103 nt, synthetic construct
  misc_feature 1..103: note = engineered ribonucleic acid scaffold (ERS) sequence
  source 1..103: mol_type = other RNA
actggcacttctatctgattactctgagtagccatcaccagcgactatgtcgtagtgggtaaagcggcagatctgagcctccgagctctctgccgcatcagag

SEQ ID NO: 14184 - RNA, 103 nt, synthetic construct
  misc_feature 1..103: note = engineered ribonucleic acid scaffold (ERS) sequence
  source 1..103: mol_type = other RNA
actggcgcttctatctgattactctgagtagccatcaccagcgactatgtcgtagtgggtaaagcggcagatctgagcctccgagctctctgccgcatcagag

SEQ ID NO: 14185 - RNA, 102 nt, synthetic construct
  misc_feature 1..102: note = engineered ribonucleic acid scaffold (ERS) sequence
  source 1..102: mol_type = other RNA
actggcgcttctatctgattactctgagcaccatcaccagcgactatgtcgtagtgggtaaagcggcagatctgagcctccgagctctctgccgcatcagag

SEQ ID NO: 14186 - RNA, 102 nt, synthetic construct
  misc_feature 1..102: note = engineered ribonucleic acid scaffold (ERS) sequence
  source 1..102: mol_type = other RNA
actggcacttctatctgattactctgagcgccatcaccagcgactatgtcgtagtgggtaaagcggcagatctgagcctccgagctctctgccgcatcagag

SEQ ID NO: 14187 - RNA, 102 nt, synthetic construct
  misc_feature 1..102: note = engineered ribonucleic acid scaffold (ERS) sequence
  source 1..102: mol_type = other RNA
actggcgcttctatctgattactctgagggccatcaccagcgactatgtcgtagtgggtaaagcggcagatctgagcctccgagctctctgccgcatcagag

SEQ ID NO: 14188 - RNA, 102 nt, synthetic construct
  misc_feature 1..102: note = engineered ribonucleic acid scaffold (ERS) sequence
  source 1..102: mol_type = other RNA
actggcgcttctatctgattactctgagtgccgtcaccagcgactatgtcgtagtgggtaaagcggcagatctgagcctccgagctctctgccgcatcagag

SEQ ID NO: 14189 - RNA, 102 nt, synthetic construct
  misc_feature 1..102: note = engineered ribonucleic acid scaffold (ERS) sequence
  source 1..102: mol_type = other RNA
actggcacttctatctgattactctgagtgccatcaccagcgactatgtcgtagtgggtaaagcggcagatctgagcctccgagctctctgccgcatcagag

SEQ ID NO: 14190 - RNA, 102 nt, synthetic construct
  misc_feature 1..102: note = engineered ribonucleic acid scaffold (ERS) sequence
  source 1..102: mol_type = other RNA
actggcgcttctatctgattactctgagaaccatcaccagcgactatgtcgtagtgggtaaagcggcagatctgagcctccgagctctctgccgcatcagag

SEQ ID NO: 14191 - RNA, 102 nt, synthetic construct
  misc_feature 1..102: note = engineered ribonucleic acid scaffold (ERS) sequence
  source 1..102: mol_type = other RNA
actggcgcttctatctgattactctgagagccgtcaccagcgactatgtcgtagtgggtaaagcggcagatctgagcctccgagctctctgccgcatcagag

SEQ ID NO: 14192 - RNA, 102 nt, synthetic construct
  misc_feature 1..102: note = engineered ribonucleic acid scaffold (ERS) sequence
  source 1..102: mol_type = other RNA
actggcgcttctatctgattactctgagagccttcaccagcgactatgtcgtagtgggtaaagcggcagatctgagcctccgagctctctgccgcatcagag

SEQ ID NO: 14193 - RNA, 102 nt, synthetic construct
  misc_feature 1..102: note = engineered ribonucleic acid scaffold (ERS) sequence
  source 1..102: mol_type = other RNA
actggggcttctatctgattactctgagacccatcaccagcgactatgtcgtagtgggtaaagcggcagatctgagcctccgagctctctgccgcatcagag

SEQ ID NO: 14194 - RNA, 102 nt, synthetic construct
  misc_feature 1..102: note = engineered ribonucleic acid scaffold (ERS) sequence
  source 1..102: mol_type = other RNA
actggtgcttctatctgattactctgagagccatcaccagcgactatgtcgtagtgggtaaagcggcagatctgagcctccgagctctctgccgcatcagag

SEQ ID NO: 14195 - RNA, 102 nt, synthetic construct
  misc_feature 1..102: note = engineered ribonucleic acid scaffold (ERS) sequence
  source 1..102: mol_type = other RNA
actgggccttctatctgattactctgaggcccatcaccagcgactatgtcgtagtgggtaaagcggcagatctgagcctccgagctctctgccgcatcagag

SEQ ID NO: 14196 - RNA, 103 nt, synthetic construct
  misc_feature 1..103: note = engineered ribonucleic acid scaffold (ERS) sequence
  source 1..103: mol_type = other RNA
actggcccttctatctgattactctgaggagccatcaccagcgactatgtcgtagtgggtaaagcggcagatctgagcctccgagctctctgccgcatcagag

SEQ ID NO: 14197 - RNA, 102 nt, synthetic construct
  misc_feature 1..102: note = engineered ribonucleic acid scaffold (ERS) sequence
  source 1..102: mol_type = other RNA
actggcccttctatctgattactctgagggccatcaccagcgactatgtcgtagtgggtaaagcggcagatctgagcctccgagctctctgccgcatcagag

SEQ ID NO: 14198 - RNA, 102 nt, synthetic construct
  misc_feature 1..102: note = engineered ribonucleic acid scaffold (ERS) sequence
  source 1..102: mol_type = other RNA
actggcccttctatctgattactctgagtgccatcaccagcgactatgtcgtagtgggtaaagcggcagatctgagcctccgagctctctgccgcatcagag

SEQ ID NO: 14199 - RNA, 102 nt, synthetic construct
  misc_feature 1..102: note = engineered ribonucleic acid scaffold (ERS) sequence
  source 1..102: mol_type = other RNA
actggcccttctatctgattactctgagagccatcaccagcgactatgtcgtagtgggtaaagcggcagatctgagcctccgagctctctgccgcatcagag

SEQ ID NO: 14200 - RNA, 103 nt, synthetic construct
  misc_feature 1..103: note = engineered ribonucleic acid scaffold (ERS) sequence
  source 1..103: mol_type = other RNA
actggcgcttctatctgattactctgagcagccatcaccagcgactatgtcgtagtgggtaaagcggcagatctgagcctccgagctctctgccgcatcagag

SEQ ID NO: 14201 - RNA, 102 nt, synthetic construct; identical to SEQ ID NO: 875
  misc_feature 1..102: note = engineered ribonucleic acid scaffold (ERS) sequence
  source 1..102: mol_type = other RNA

SEQ ID NO: 14202 - RNA, 102 nt, synthetic construct
  misc_feature 1..102: note = engineered ribonucleic acid scaffold (ERS) sequence
  source 1..102: mol_type = other RNA
actggcgcttctatctgattactctgagtgccatcaccagcgactatgtcgtagtgggtaaagcggcagatctgagcctccgagctctctgccgcatcagag

SEQ ID NO: 14203 - RNA, 102 nt, synthetic construct
  misc_feature 1..102: note = engineered ribonucleic acid scaffold (ERS) sequence
  source 1..102: mol_type = other RNA
actggcgcttctatctgattactctgagagccatcaccagcgactatgtcgtagtgggtaaagcggcagatctgagcctccgagctctctgccgcatcagag

SEQ ID NO: 14204 - RNA, 102 nt, synthetic construct
  misc_feature 1..102: note = engineered ribonucleic acid scaffold (ERS) sequence
  source 1..102: mol_type = other RNA
actggctcttctatctgattactctgagcgccatcaccagcgactatgtcgtagtgggtaaagcggcagatctgagcctccgagctctctgccgcatcagag

SEQ ID NO: 14205 - RNA, 102 nt, synthetic construct
  misc_feature 1..102: note = engineered ribonucleic acid scaffold (ERS) sequence
  source 1..102: mol_type = other RNA
actggctcttctatctgattactctgagggccatcaccagcgactatgtcgtagtgggtaaagcggcagatctgagcctccgagctctctgccgcatcagag

SEQ ID NO: 14206 - RNA, 102 nt, synthetic construct
  misc_feature 1..102: note = engineered ribonucleic acid scaffold (ERS) sequence
  source 1..102: mol_type = other RNA
actggctcttctatctgattactctgagtgccatcaccagcgactatgtcgtagtgggtaaagcggcagatctgagcctccgagctctctgccgcatcagag

SEQ ID NO: 14207 - RNA, 102 nt, synthetic construct
  misc_feature 1..102: note = engineered ribonucleic acid scaffold (ERS) sequence
  source 1..102: mol_type = other RNA
actggctcttctatctgattactctgagagccatcaccagcgactatgtcgtagtgggtaaagcggcagatctgagcctccgagctctctgccgcatcagag

SEQ ID NO: 14208 - RNA, 102 nt, synthetic construct
  misc_feature 1..102: note = engineered ribonucleic acid scaffold (ERS) sequence
  source 1..102: mol_type = other RNA
actggcggttctatctgattactctgagcgccatcaccagcgactatgtcgtagtgggtaaagcggcagatctgagcctccgagctctctgccgcatcagag

SEQ ID NO: 14209 - RNA, 102 nt, synthetic construct
  misc_feature 1..102: note = engineered ribonucleic acid scaffold (ERS) sequence
  source 1..102: mol_type = other RNA
actggcggttctatctgattactctgagagccatcaccagcgactatgtcgtagtgggtaaagcggcagatctgagcctccgagctctctgccgcatcagag

SEQ ID NO: 14210 - RNA, 97 nt, synthetic construct
  misc_feature 1..97: note = engineered ribonucleic acid scaffold (ERS) sequence
  source 1..97: mol_type = other RNA
acacacggttctatctgattactctgccgtgttcaccagcgactatgtcgtagtgggtaaagcggttacggacttcggtccgtaagacgcatcagag

SEQ ID NO: 14211 - RNA, 97 nt, synthetic construct
  misc_feature 1..97: note = engineered ribonucleic acid scaffold (ERS) sequence
  source 1..97: mol_type = other RNA
acactggtttctatctgattactctgaccagttcaccagcgactatgtcgtagtgggtaaagcggttacggacttcggtccgtaagacgcatcagag

SEQ ID NO: 14212 - RNA, 97 nt, synthetic construct
  misc_feature 1..97: note = engineered ribonucleic acid scaffold (ERS) sequence
  source 1..97: mol_type = other RNA
acaggccgttctatctgattactctgcggccttcaccagcgactatgtcgtagtgggtaaagcggttacggacttcggtccgtaagacgcatcagag

SEQ ID NO: 14213 - RNA, 97 nt, synthetic construct
  misc_feature 1..97: note = engineered ribonucleic acid scaffold (ERS) sequence
  source 1..97: mol_type = other RNA
acaggtccttctatctgattactctgggaccttcaccagcgactatgtcgtagtgggtaaagcggttacggacttcggtccgtaagacgcatcagag

SEQ ID NO: 14214 - RNA, 97 nt, synthetic construct
  misc_feature 1..97: note = engineered ribonucleic acid scaffold (ERS) sequence
  source 1..97: mol_type = other RNA
accagcaattctatctgattactctgttgctgtcaccagcgactatgtcgtagtgggtaaagcggttacggacttcggtccgtaagacgcatcagag

SEQ ID NO: 14215 - RNA, 97 nt, synthetic construct
  misc_feature 1..97: note = engineered ribonucleic acid scaffold (ERS) sequence
  source 1..97: mol_type = other RNA
accgagacttctatctgattactctgggctcgtcaccagcgactatgtcgtagtgggtaaagcggttacggacttcggtccgtaagacgcatcagag

SEQ ID NO: 14216 - RNA, 97 nt, synthetic construct
  misc_feature 1..97: note = engineered ribonucleic acid scaffold (ERS) sequence
  source 1..97: mol_type = other RNA
acctgtagttctatctgattactctgctacagtcaccagcgactatgtcgtagtgggtaaagcggttacggacttcggtccgtaagacgcatcagag

SEQ ID NO: 14217 - RNA, 97 nt, synthetic construct
  misc_feature 1..97: note = engineered ribonucleic acid scaffold (ERS) sequence
  source 1..97: mol_type = other RNA
acgagcacttctatctgattactctggggctctcaccagcgactatgtcgtagtgggtaaagcggttacggacttcggtccgtaagacgcatcagag

SEQ ID NO: 14218 - RNA, 97 nt, synthetic construct
  misc_feature 1..97: note = engineered ribonucleic acid scaffold (ERS) sequence
  source 1..97: mol_type = other RNA
acgaggtgttctatctgattactctgcacctctcaccagcgactatgtcgtagtgggtaaagcggttacggacttcggtccgtaagacgcatcagag

SEQ ID NO: 14219 - RNA, 97 nt, synthetic construct
  misc_feature 1..97: note = engineered ribonucleic acid scaffold (ERS) sequence
  source 1..97: mol_type = other RNA
acgggactttctatctgattactctgagtccctcaccagcgactatgtcgtagtgggtaaagcggttacggacttcggtccgtaagacgcatcagag

SEQ ID NO: 14220 - RNA, 97 nt, synthetic construct
  misc_feature 1..97: note = engineered ribonucleic acid scaffold (ERS) sequence
  source 1..97: mol_type = other RNA
acgggcaattctatctgattactctgttgccctcaccagcgactatgtcgtagtgggtaaagcggttacggacttcggtccgtaagacgcatcagag

SEQ ID NO: 14221 - RNA, 97 nt, synthetic construct
  misc_feature 1..97: note = engineered ribonucleic acid scaffold (ERS) sequence
  source 1..97: mol_type = other RNA
actgtgcgttctatctgattactctgcgcacatcaccagcgactatgtcgtagtgggtaaagcggttacggacttcggtccgtaagacgcatcagag

SEQ ID NO: 14222 - RNA, 98 nt, synthetic construct
  misc_feature 1..98: note = engineered ribonucleic acid scaffold (ERS) sequence
  source 1..98: mol_type = other RNA
actggcgcttctatctgattactctgggcgccatcaccagcgactatgtcgtagtgggtaaagcggttacggacttcggtccgtaagacgcatcagag

SEQ ID NO: 14223 - RNA, 98 nt, synthetic construct
  misc_feature 1..98: note = engineered ribonucleic acid scaffold (ERS) sequence
  source 1..98: mol_type = other RNA
actggcgcttctatctgattactctgggagccatcaccagcgactatgtcgtagtgggtaaagcggttacggacttcggtccgtaagacgcatcagag

SEQ ID NO: 14224 - RNA, 98 nt, synthetic construct
  misc_feature 1..98: note = engineered ribonucleic acid scaffold (ERS) sequence
  source 1..98: mol_type = other RNA
actggcgcttctatctgattactctgtgagccatcaccagcgactatgtcgtagtgggtaaagcggttacggacttcggtccgtaagacgcatcagag

SEQ ID NO: 14225 - RNA, 99 nt, synthetic construct
  misc_feature 1..99: note = engineered ribonucleic acid scaffold (ERS) sequence
  source 1..99: mol_type = other RNA
actggcgcttctatctgattactctgaggagccatcaccagcgactatgtcgtagtgggtaaagcggttacggacttcggtccgtaagacgcatcagag

SEQ ID NO: 14226 - RNA, 98 nt, synthetic construct
  misc_feature 1..98: note = engineered ribonucleic acid scaffold (ERS) sequence
  source 1..98: mol_type = other RNA
actggcgcttctatctgattactctgatagccatcaccagcgactatgtcgtagtgggtaaagcggttacggacttcggtccgtaagacgcatcagag

SEQ ID NO: 14227 - RNA, 99 nt, synthetic construct
  misc_feature 1..99: note = engineered ribonucleic acid scaffold (ERS) sequence
  source 1..99: mol_type = other RNA
actggcgcttctatctgattactctgagctgccatcaccagcgactatgtcgtagtgggtaaagcggttacggacttcggtccgtaagacgcatcagag

SEQ ID NO: 14228 - RNA, 99 nt, synthetic construct
  misc_feature 1..99: note = engineered ribonucleic acid scaffold (ERS) sequence
  source 1..99: mol_type = other RNA
actggcacttctatctgattactctgagtagccatcaccagcgactatgtcgtagtgggtaaagcggttacggacttcggtccgtaagacgcatcagag

SEQ ID NO: 14229 - RNA, 99 nt, synthetic construct
  misc_feature 1..99: note = engineered ribonucleic acid scaffold (ERS) sequence
  source 1..99: mol_type = other RNA
actggcgcttctatctgattactctgagtagccatcaccagcgactatgtcgtagtgggtaaagcggttacggacttcggtccgtaagacgcatcagag

SEQ ID NO: 14230 - RNA, 98 nt, synthetic construct
  misc_feature 1..98: note = engineered ribonucleic acid scaffold (ERS) sequence
  source 1..98: mol_type = other RNA
actggcgcttctatctgattactctgagcaccatcaccagcgactatgtcgtagtgggtaaagcggttacggacttcggtccgtaagacgcatcagag

SEQ ID NO: 14231 - RNA, 98 nt, synthetic construct
  misc_feature 1..98: note = engineered ribonucleic acid scaffold (ERS) sequence
  source 1..98: mol_type = other RNA
actggcacttctatctgattactctgagcgccatcaccagcgactatgtcgtagtgggtaaagcggttacggacttcggtccgtaagacgcatcagag

SEQ ID NO: 14232 - RNA, 98 nt, synthetic construct
  misc_feature 1..98: note = engineered ribonucleic acid scaffold (ERS) sequence
  source 1..98: mol_type = other RNA
actggcgcttctatctgattactctgagggccatcaccagcgactatgtcgtagtgggtaaagcggttacggacttcggtccgtaagacgcatcagag

SEQ ID NO: 14233 - RNA, 98 nt, synthetic construct
  misc_feature 1..98: note = engineered ribonucleic acid scaffold (ERS) sequence
  source 1..98: mol_type = other RNA
actggcgcttctatctgattactctgagtgccgtcaccagcgactatgtcgtagtgggtaaagcggttacggacttcggtccgtaagacgcatcagag

SEQ ID NO: 14234 - RNA, 98 nt, synthetic construct
  misc_feature 1..98: note = engineered ribonucleic acid scaffold (ERS) sequence
  source 1..98: mol_type = other RNA
actggcacttctatctgattactctgagtgccatcaccagcgactatgtcgtagtgggtaaagcggttacggacttcggtccgtaagacgcatcagag

SEQ ID NO: 14235 - RNA, 98 nt, synthetic construct
  misc_feature 1..98: note = engineered ribonucleic acid scaffold (ERS) sequence
  source 1..98: mol_type = other RNA
actggcgcttctatctgattactctgagaaccatcaccagcgactatgtcgtagtgggtaaagcggttacggacttcggtccgtaagacgcatcagag

SEQ ID NO: 14236 - RNA, 98 nt, synthetic construct
  misc_feature 1..98: note = engineered ribonucleic acid scaffold (ERS) sequence
  source 1..98: mol_type = other RNA
actggcgcttctatctgattactctgagagccgtcaccagcgactatgtcgtagtgggtaaagcggttacggacttcggtccgtaagacgcatcagag

SEQ ID NO: 14237 - RNA, 98 nt, synthetic construct
  misc_feature 1..98: note = engineered ribonucleic acid scaffold (ERS) sequence
  source 1..98: mol_type = other RNA
actggcgcttctatctgattactctgagagccttcaccagcgactatgtcgtagtgggtaaagcggttacggacttcggtccgtaagacgcatcagag

SEQ ID NO: 14238 - RNA, 98 nt, synthetic construct
  misc_feature 1..98: note = engineered ribonucleic acid scaffold (ERS) sequence
  source 1..98: mol_type = other RNA
actggggcttctatctgattactctgagacccatcaccagcgactatgtcgtagtgggtaaagcggttacggacttcggtccgtaagacgcatcagag

SEQ ID NO: 14239 - RNA, 98 nt, synthetic construct
  misc_feature 1..98: note = engineered ribonucleic acid scaffold (ERS) sequence
  source 1..98: mol_type = other RNA
actggtgcttctatctgattactctgagagccatcaccagcgactatgtcgtagtgggtaaagcggttacggacttcggtccgtaagacgcatcagag

SEQ ID NO: 14240 - RNA, 98 nt, synthetic construct
  misc_feature 1..98: note = engineered ribonucleic acid scaffold (ERS) sequence
  source 1..98: mol_type = other RNA
actgggccttctatctgattactctgaggcccatcaccagcgactatgtcgtagtgggtaaagcggttacggacttcggtccgtaagacgcatcagag

SEQ ID NO: 14241 - RNA, 99 nt, synthetic construct
  misc_feature 1..99: note = engineered ribonucleic acid scaffold (ERS) sequence
  source 1..99: mol_type = other RNA
actggcccttctatctgattactctgaggagccatcaccagcgactatgtcgtagtgggtaaagcggttacggacttcggtccgtaagacgcatcagag

SEQ ID NO: 14242 - RNA, 98 nt, synthetic construct
  misc_feature 1..98: note = engineered ribonucleic acid scaffold (ERS) sequence
  source 1..98: mol_type = other RNA
actggcccttctatctgattactctgagggccatcaccagcgactatgtcgtagtgggtaaagcggttacggacttcggtccgtaagacgcatcagag

SEQ ID NO: 14243 - RNA, 98 nt, synthetic construct
  misc_feature 1..98: note = engineered ribonucleic acid scaffold (ERS) sequence
  source 1..98: mol_type = other RNA
actggcccttctatctgattactctgagtgccatcaccagcgactatgtcgtagtgggtaaagcggttacggacttcggtccgtaagacgcatcagag

SEQ ID NO: 14244 - RNA, 98 nt, synthetic construct
  misc_feature 1..98: note = engineered ribonucleic acid scaffold (ERS) sequence
  source 1..98: mol_type = other RNA
actggcccttctatctgattactctgagagccatcaccagcgactatgtcgtagtgggtaaagcggttacggacttcggtccgtaagacgcatcagag

SEQ ID NO: 14245 - RNA, 99 nt, synthetic construct
  misc_feature 1..99: note = engineered ribonucleic acid scaffold (ERS) sequence
  source 1..99: mol_type = other RNA
actggcgcttctatctgattactctgagcagccatcaccagcgactatgtcgtagtgggtaaagcggttacggacttcggtccgtaagacgcatcagag

SEQ ID NO: 14246 - RNA, 98 nt, synthetic construct; identical to SEQ ID NO: 885
  misc_feature 1..98: note = engineered ribonucleic acid scaffold (ERS) sequence
  source 1..98: mol_type = other RNA

SEQ ID NO: 14247 - RNA, 98 nt, synthetic construct
  misc_feature 1..98: note = engineered ribonucleic acid scaffold (ERS) sequence
  source 1..98: mol_type = other RNA
actggcgcttctatctgattactctgagtgccatcaccagcgactatgtcgtagtgggtaaagcggttacggacttcggtccgtaagacgcatcagag

SEQ ID NO: 14248 - RNA, 98 nt, synthetic construct
  misc_feature 1..98: note = engineered ribonucleic acid scaffold (ERS) sequence
  source 1..98: mol_type = other RNA
actggcgcttctatctgattactctgagagccatcaccagcgactatgtcgtagtgggtaaagcggttacggacttcggtccgtaagacgcatcagag

SEQ ID NO: 14249 - RNA, 98 nt, synthetic construct
  misc_feature 1..98: note = engineered ribonucleic acid scaffold (ERS) sequence
  source 1..98: mol_type = other RNA
actggctcttctatctgattactctgagcgccatcaccagcgactatgtcgtagtgggtaaagcggttacggacttcggtccgtaagacgcatcagag

SEQ ID NO: 14250 - RNA, 98 nt, synthetic construct
  misc_feature 1..98: note = engineered ribonucleic acid scaffold (ERS) sequence
  source 1..98: mol_type = other RNA
actggctcttctatctgattactctgagggccatcaccagcgactatgtcgtagtgggtaaagcggttacggacttcggtccgtaagacgcatcagag

SEQ ID NO: 14251 - RNA, 98 nt, synthetic construct
  misc_feature 1..98: note = engineered ribonucleic acid scaffold (ERS) sequence
  source 1..98: mol_type = other RNA
actggctcttctatctgattactctgagtgccatcaccagcgactatgtcgtagtgggtaaagcggttacggacttcggtccgtaagacgcatcagag

SEQ ID NO: 14252 - RNA, 98 nt, synthetic construct
  misc_feature 1..98: note = engineered ribonucleic acid scaffold (ERS) sequence
  source 1..98: mol_type = other RNA
actggctcttctatctgattactctgagagccatcaccagcgactatgtcgtagtgggtaaagcggttacggacttcggtccgtaagacgcatcagag

SEQ ID NO: 14253 - RNA, 98 nt, synthetic construct
  misc_feature 1..98: note = engineered ribonucleic acid scaffold (ERS) sequence
  source 1..98: mol_type = other RNA
actggcggttctatctgattactctgagcgccatcaccagcgactatgtcgtagtgggtaaagcggttacggacttcggtccgtaagacgcatcagag

SEQ ID NO: 14254 - RNA, 98 nt, synthetic construct
  misc_feature 1..98: note = engineered ribonucleic acid scaffold (ERS) sequence
  source 1..98: mol_type = other RNA
actggcggttctatctgattactctgagagccatcaccagcgactatgtcgtagtgggtaaagcggttacggacttcggtccgtaagacgcatcagag

SEQ ID NO: 14255 - RNA, 74 nt, synthetic construct
  misc_feature 1..74: note = engineered ribonucleic acid scaffold (ERS) sequence
  source 1..74: mol_type = other RNA
acacacggttctatctgattactctgccgtgttcaccagcgactatgtcgtagtgggtaaagctagcatcagag

SEQ ID NO: 14256 - RNA, 74 nt, synthetic construct
  misc_feature 1..74: note = engineered ribonucleic acid scaffold (ERS) sequence
  source 1..74: mol_type = other RNA
acactggtttctatctgattactctgaccagttcaccagcgactatgtcgtagtgggtaaagctagcatcagag

SEQ ID NO: 14257 - RNA, 74 nt, synthetic construct
  misc_feature 1..74: note = engineered ribonucleic acid scaffold (ERS) sequence
  source 1..74: mol_type = other RNA
acaggccgttctatctgattactctgcggccttcaccagcgactatgtcgtagtgggtaaagctagcatcagag

SEQ ID NO: 14258 - RNA, 74 nt, synthetic construct
  misc_feature 1..74: note = engineered ribonucleic acid scaffold (ERS) sequence
  source 1..74: mol_type = other RNA
acaggtccttctatctgattactctgggaccttcaccagcgactatgtcgtagtgggtaaagctagcatcagag

SEQ ID NO: 14259 - RNA, 74 nt, synthetic construct
  misc_feature 1..74: note = engineered ribonucleic acid scaffold (ERS) sequence
  source 1..74: mol_type = other RNA
accagcaattctatctgattactctgttgctgtcaccagcgactatgtcgtagtgggtaaagctagcatcagag

SEQ ID NO: 14260 - RNA, 74 nt, synthetic construct
  misc_feature 1..74: note = engineered ribonucleic acid scaffold (ERS) sequence
  source 1..74: mol_type = other RNA
accgagacttctatctgattactctgggctcgtcaccagcgactatgtcgtagtgggtaaagctagcatcagag

SEQ ID NO: 14261 - RNA, 74 nt, synthetic construct
  misc_feature 1..74: note = engineered ribonucleic acid scaffold (ERS) sequence
  source 1..74: mol_type = other RNA
acctgtagttctatctgattactctgctacagtcaccagcgactatgtcgtagtgggtaaagctagcatcagag

SEQ ID NO: 14262 - RNA, 74 nt, synthetic construct
  misc_feature 1..74: note = engineered ribonucleic acid scaffold (ERS) sequence
  source 1..74: mol_type = other RNA
acgagcacttctatctgattactctggggctctcaccagcgactatgtcgtagtgggtaaagctagcatcagag

SEQ ID NO: 14263 - RNA, 74 nt, synthetic construct
  misc_feature 1..74: note = engineered ribonucleic acid scaffold (ERS) sequence
  source 1..74: mol_type = other RNA
acgaggtgttctatctgattactctgcacctctcaccagcgactatgtcgtagtgggtaaagctagcatcagag

SEQ ID NO: 14264 - RNA, 74 nt, synthetic construct
  misc_feature 1..74: note = engineered ribonucleic acid scaffold (ERS) sequence
  source 1..74: mol_type = other RNA
acgggactttctatctgattactctgagtccctcaccagcgactatgtcgtagtgggtaaagctagcatcagag

SEQ ID NO: 14265 - RNA, 74 nt, synthetic construct
  misc_feature 1..74: note = engineered ribonucleic acid scaffold (ERS) sequence
  source 1..74: mol_type = other RNA
acgggcaattctatctgattactctgttgccctcaccagcgactatgtcgtagtgggtaaagctagcatcagag

SEQ ID NO: 14266 - RNA, 74 nt, synthetic construct
  misc_feature 1..74: note = engineered ribonucleic acid scaffold (ERS) sequence
  source 1..74: mol_type = other RNA
actgtgcgttctatctgattactctgcgcacatcaccagcgactatgtcgtagtgggtaaagctagcatcagag

SEQ ID NO: 14267 - RNA, 75 nt, synthetic construct
  misc_feature 1..75: note = engineered ribonucleic acid scaffold (ERS) sequence
  source 1..75: mol_type = other RNA
actggcgcttctatctgattactctgggcgccatcaccagcgactatgtcgtagtgggtaaagctagcatcagag

SEQ ID NO: 14268 - RNA, 75 nt, synthetic construct
  misc_feature 1..75: note = engineered ribonucleic acid scaffold (ERS) sequence
  source 1..75: mol_type = other RNA
actggcgcttctatctgattactctgggagccatcaccagcgactatgtcgtagtgggtaaagctagcatcagag

SEQ ID NO: 14269 - RNA, 75 nt, synthetic construct
  misc_feature 1..75: note = engineered ribonucleic acid scaffold (ERS) sequence
  source 1..75: mol_type = other RNA
actggcgcttctatctgattactctgtgagccatcaccagcgactatgtcgtagtgggtaaagctagcatcagag

SEQ ID NO: 14270 - RNA, 76 nt, synthetic construct
  misc_feature 1..76: note = engineered ribonucleic acid scaffold (ERS) sequence
  source 1..76: mol_type = other RNA
actggcgcttctatctgattactctgaggagccatcaccagcgactatgtcgtagtgggtaaagctagcatcagag

SEQ ID NO: 14271 - RNA, 75 nt, synthetic construct
  misc_feature 1..75: note = engineered ribonucleic acid scaffold (ERS) sequence
  source 1..75: mol_type = other RNA
actggcgcttctatctgattactctgatagccatcaccagcgactatgtcgtagtgggtaaagctagcatcagag

SEQ ID NO: 14272 - RNA, 76 nt, synthetic construct
  misc_feature 1..76: note = engineered ribonucleic acid scaffold (ERS) sequence
  source 1..76: mol_type = other RNA
actggcgcttctatctgattactctgagctgccatcaccagcgactatgtcgtagtgggtaaagctagcatcagag

SEQ ID NO: 14273 - RNA, 76 nt, synthetic construct
  misc_feature 1..76: note = engineered ribonucleic acid scaffold (ERS) sequence
  source 1..76: mol_type = other RNA
actggcacttctatctgattactctgagtagccatcaccagcgactatgtcgtagtgggtaaagctagcatcagag

SEQ ID NO: 14274 - RNA, 76 nt, synthetic construct
  misc_feature 1..76: note = engineered ribonucleic acid scaffold (ERS) sequence
  source 1..76: mol_type = other RNA
actggcgcttctatctgattactctgagtagccatcaccagcgactatgtcgtagtgggtaaagctagcatcagag

SEQ ID NO: 14275 - RNA, 75 nt, synthetic construct
  misc_feature 1..75: note = engineered ribonucleic acid scaffold (ERS) sequence
  source 1..75: mol_type = other RNA
actggcgcttctatctgattactctgagcaccatcaccagcgactatgtcgtagtgggtaaagctagcatcagag

SEQ ID NO: 14276 - RNA, 75 nt, synthetic construct
  misc_feature 1..75: note = engineered ribonucleic acid scaffold (ERS) sequence
  source 1..75: mol_type = other RNA
actggcacttctatctgattactctgagcgccatcaccagcgactatgtcgtagtgggtaaagctagcatcagag

SEQ ID NO: 14277 - RNA, 75 nt, synthetic construct
  misc_feature 1..75: note = engineered ribonucleic acid scaffold (ERS) sequence
  source 1..75: mol_type = other RNA
actggcgcttctatctgattactctgagggccatcaccagcgactatgtcgtagtgggtaaagctagcatcagag

SEQ ID NO: 14278 - RNA, 75 nt, synthetic construct
  misc_feature 1..75: note = engineered ribonucleic acid scaffold (ERS) sequence
  source 1..75: mol_type = other RNA
actggcgcttctatctgattactctgagtgccgtcaccagcgactatgtcgtagtgggtaaagctagcatcagag

SEQ ID NO: 14279 - RNA, 75 nt, synthetic construct
  misc_feature 1..75: note = engineered ribonucleic acid scaffold (ERS) sequence
  source 1..75: mol_type = other RNA
actggcacttctatctgattactctgagtgccatcaccagcgactatgtcgtagtgggtaaagctagcatcagag

SEQ ID NO: 14280 - RNA, 75 nt, synthetic construct
  misc_feature 1..75: note = engineered ribonucleic acid scaffold (ERS) sequence
  source 1..75: mol_type = other RNA
actggcgcttctatctgattactctgagaaccatcaccagcgactatgtcgtagtgggtaaagctagcatcagag

SEQ ID NO: 14281 - RNA, 75 nt, synthetic construct
  misc_feature 1..75: note = engineered ribonucleic acid scaffold (ERS) sequence
  source 1..75: mol_type = other RNA
actggcgcttctatctgattactctgagagccgtcaccagcgactatgtcgtagtgggtaaagctagcatcagag

SEQ ID NO: 14282 - RNA, 75 nt, synthetic construct
  misc_feature 1..75: note = engineered ribonucleic acid scaffold (ERS) sequence
  source 1..75: mol_type = other RNA
actggcgcttctatctgattactctgagagccttcaccagcgactatgtcgtagtgggtaaagctagcatcagag

SEQ ID NO: 14283 - RNA, 75 nt, synthetic construct
  misc_feature 1..75: note = engineered ribonucleic acid scaffold (ERS) sequence
  source 1..75: mol_type = other RNA
actggggcttctatctgattactctgagacccatcaccagcgactatgtcgtagtgggtaaagctagcatcagag

SEQ ID NO: 14284 - RNA, 75 nt, synthetic construct
  misc_feature 1..75: note = engineered ribonucleic acid scaffold (ERS) sequence
  source 1..75: mol_type = other RNA
actggtgcttctatctgattactctgagagccatcaccagcgactatgtcgtagtgggtaaagctagcatcagag

SEQ ID NO: 14285 - RNA, 75 nt, synthetic construct
  misc_feature 1..75: note = engineered ribonucleic acid scaffold (ERS) sequence
  source 1..75: mol_type = other RNA
actgggccttctatctgattactctgaggcccatcaccagcgactatgtcgtagtgggtaaagctagcatcagag

SEQ ID NO: 14286 - RNA, 76 nt, synthetic construct
  misc_feature 1..76: note = engineered ribonucleic acid scaffold (ERS) sequence
  source 1..76: mol_type = other RNA
actggcccttctatctgattactctgaggagccatcaccagcgactatgtcgtagtgggtaaagctagcatcagag

SEQ ID NO: 14287 - RNA, 75 nt, synthetic construct
  misc_feature 1..75: note = engineered ribonucleic acid scaffold (ERS) sequence
  source 1..75: mol_type = other RNA
actggcccttctatctgattactctgagggccatcaccagcgactatgtcgtagtgggtaaagctagcatcagag

SEQ ID NO: 14288 - RNA, 75 nt, synthetic construct
  misc_feature 1..75: note = engineered ribonucleic acid scaffold (ERS) sequence
  source 1..75: mol_type = other RNA
actggcccttctatctgattactctgagtgccatcaccagcgactatgtcgtagtgggtaaagctagcatcagag

SEQ ID NO: 14289 - RNA, 75 nt, synthetic construct
  misc_feature 1..75: note = engineered ribonucleic acid scaffold (ERS) sequence
  source 1..75: mol_type = other RNA
actggcccttctatctgattactctgagagccatcaccagcgactatgtcgtagtgggtaaagctagcatcagag

SEQ ID NO: 14290 - RNA, 76 nt, synthetic construct
  misc_feature 1..76: note = engineered ribonucleic acid scaffold (ERS) sequence
  source 1..76: mol_type = other RNA
actggcgcttctatctgattactctgagcagccatcaccagcgactatgtcgtagtgggtaaagctagcatcagag

SEQ ID NO: 14291 - RNA, 75 nt, synthetic construct; identical to SEQ ID NO: 899
  misc_feature 1..75: note = engineered ribonucleic acid scaffold (ERS) sequence
  source 1..75: mol_type = other RNA

SEQ ID NO: 14292 - RNA, 75 nt, synthetic construct
  misc_feature 1..75: note = engineered ribonucleic acid scaffold (ERS) sequence
  source 1..75: mol_type = other RNA
actggcgcttctatctgattactctgagtgccatcaccagcgactatgtcgtagtgggtaaagctagcatcagag

SEQ ID NO: 14293 - RNA, 75 nt, synthetic construct
  misc_feature 1..75: note = engineered ribonucleic acid scaffold (ERS) sequence
  source 1..75: mol_type = other RNA
actggcgcttctatctgattactctgagagccatcaccagcgactatgtcgtagtgggtaaagctagcatcagag

SEQ ID NO: 14294 - RNA, 75 nt, synthetic construct
  misc_feature 1..75: note = engineered ribonucleic acid scaffold (ERS) sequence
  source 1..75: mol_type = other RNA
actggctcttctatctgattactctgagcgccatcaccagcgactatgtcgtagtgggtaaagctagcatcagag

SEQ ID NO: 14295 - RNA, 75 nt, synthetic construct
  misc_feature 1..75: note = engineered ribonucleic acid scaffold (ERS) sequence
  source 1..75: mol_type = other RNA
actggctcttctatctgattactctgagggccatcaccagcgactatgtcgtagtgggtaaagctagcatcagag

SEQ ID NO: 14296 - RNA, 75 nt, synthetic construct
  misc_feature 1..75: note = engineered ribonucleic acid scaffold (ERS) sequence
  source 1..75: mol_type = other RNA
actggctcttctatctgattactctgagtgccatcaccagcgactatgtcgtagtgggtaaagctagcatcagag

SEQ ID NO: 14297 - RNA, 75 nt, synthetic construct
  misc_feature 1..75: note = engineered ribonucleic acid scaffold (ERS) sequence
  source 1..75: mol_type = other RNA
actggctcttctatctgattactctgagagccatcaccagcgactatgtcgtagtgggtaaagctagcatcagag

SEQ ID NO: 14298 - RNA, 75 nt, synthetic construct
  misc_feature 1..75: note = engineered ribonucleic acid scaffold (ERS) sequence
  source 1..75: mol_type = other RNA
actggcggttctatctgattactctgagcgccatcaccagcgactatgtcgtagtgggtaaagctagcatcagag

SEQ ID NO: 14299 - RNA, 75 nt, synthetic construct
  misc_feature 1..75: note = engineered ribonucleic acid scaffold (ERS) sequence
  source 1..75: mol_type = other RNA
actggcggttctatctgattactctgagagccatcaccagcgactatgtcgtagtgggtaaagctagcatcagag

SEQ ID NO: 14300 - RNA, 88 nt, synthetic construct
  misc_feature 1..88: note = engineered ribonucleic acid scaffold (ERS) sequence
  source 1..88: mol_type = other RNA
acacacggttctatctgattactctgccgtgttcaccagcgactatgtcgtagtgggtaaagctccctattcggatggagcatcagag

SEQ ID NO: 14301 - RNA, 88 nt, synthetic construct
  misc_feature 1..88: note = engineered ribonucleic acid scaffold (ERS) sequence
  source 1..88: mol_type = other RNA
acactggtttctatctgattactctgaccagttcaccagcgactatgtcgtagtgggtaaagctccctattcggatggagcatcagag

SEQ ID NO: 14302 - RNA, 88 nt, synthetic construct
  misc_feature 1..88: note = engineered ribonucleic acid scaffold (ERS) sequence
  source 1..88: mol_type = other RNA
acaggccgttctatctgattactctgcggccttcaccagcgactatgtcgtagtgggtaaagctccctattcggatggagcatcagag

SEQ ID NO: 14303 - RNA, 88 nt, synthetic construct
  misc_feature 1..88: note = engineered ribonucleic acid scaffold (ERS) sequence
  source 1..88: mol_type = other RNA
acaggtccttctatctgattactctgggaccttcaccagcgactatgtcgtagtgggtaaagctccctattcggatggagcatcagag

SEQ ID NO: 14304 - RNA, 88 nt, synthetic construct
  misc_feature 1..88: note = engineered ribonucleic acid scaffold (ERS) sequence
  source 1..88: mol_type = other RNA
accagcaattctatctgattactctgttgctgtcaccagcgactatgtcgtagtgggtaaagctccctattcggatggagcatcagag

SEQ ID NO: 14305 - RNA, 88 nt, synthetic construct
  misc_feature 1..88: note = engineered ribonucleic acid scaffold (ERS) sequence
  source 1..88: mol_type = other RNA
accgagacttctatctgattactctgggctcgtcaccagcgactatgtcgtagtgggtaaagctccctattcggatggagcatcagag

SEQ ID NO: 14306 - RNA, 88 nt, synthetic construct
  misc_feature 1..88: note = engineered ribonucleic acid scaffold (ERS) sequence
  source 1..88: mol_type = other RNA
acctgtagttctatctgattactctgctacagtcaccagcgactatgtcgtagtgggtaaagctccctattcggatggagcatcagag

SEQ ID NO: 14307 - RNA, 88 nt, synthetic construct
  misc_feature 1..88: note = engineered ribonucleic acid scaffold (ERS) sequence
  source 1..88: mol_type = other RNA
acgagcacttctatctgattactctggggctctcaccagcgactatgtcgtagtgggtaaagctccctattcggatggagcatcagag

SEQ ID NO: 14308 - RNA, 88 nt, synthetic construct
  misc_feature 1..88: note = engineered ribonucleic acid scaffold (ERS) sequence
  source 1..88: mol_type = other RNA
acgaggtgttctatctgattactctgcacctctcaccagcgactatgtcgtagtgggtaaagctccctattcggatggagcatcagag

SEQ ID NO: 14309 - RNA, 88 nt, synthetic construct
  misc_feature 1..88: note = engineered ribonucleic acid scaffold (ERS) sequence
  source 1..88: mol_type = other RNA
acgggactttctatctgattactctgagtccctcaccagcgactatgtcgtagtgggtaaagctccctattcggatggagcatcagag

SEQ ID NO: 14310 - RNA, 88 nt, synthetic construct
  misc_feature 1..88: note = engineered ribonucleic acid scaffold (ERS) sequence
  source 1..88: mol_type = other RNA
acgggcaattctatctgattactctgttgccctcaccagcgactatgtcgtagtgggtaaagctccctattcggatggagcatcagag

SEQ ID NO: 14311 - RNA, 88 nt, synthetic construct
  misc_feature 1..88: note = engineered ribonucleic acid scaffold (ERS) sequence
  source 1..88: mol_type = other RNA
actgtgcgttctatctgattactctgcgcacatcaccagcgactatgtcgtagtgggtaaagctccctattcggatggagcatcagag

SEQ ID NO: 14312 - RNA, 89 nt, synthetic construct
  misc_feature 1..89: note = engineered ribonucleic acid scaffold (ERS) sequence
  source 1..89: mol_type = other RNA
actggcgcttctatctgattactctgggcgccatcaccagcgactatgtcgtagtgggtaaagctccctattcggatggagcatcagag

SEQ ID NO: 14313 - RNA, 89 nt, synthetic construct
  misc_feature 1..89: note = engineered ribonucleic acid scaffold (ERS) sequence
  source 1..89: mol_type = other RNA
actggcgcttctatctgattactctgggagccatcaccagcgactatgtcgtagtgggtaaagctccctattcggatggagcatcagag

SEQ ID NO: 14314 - RNA, 89 nt, synthetic construct
  misc_feature 1..89: note = engineered ribonucleic acid scaffold (ERS) sequence
  source 1..89: mol_type = other RNA
actggcgcttctatctgattactctgtgagccatcaccagcgactatgtcgtagtgggtaaagctccctattcggatggagcatcagag

SEQ ID NO: 14315 - RNA, 90 nt, synthetic construct
  misc_feature 1..90: note = engineered ribonucleic acid scaffold (ERS) sequence
  source 1..90: mol_type = other RNA
actggcgcttctatctgattactctgaggagccatcaccagcgactatgtcgtagtgggtaaagctccctattcggatggagcatcagag

SEQ ID NO: 14316 - RNA, 89 nt, synthetic construct
  misc_feature 1..89: note = engineered ribonucleic acid scaffold (ERS) sequence
  source 1..89: mol_type = other RNA
actggcgcttctatctgattactctgatagccatcaccagcgactatgtcgtagtgggtaaagctccctattcggatggagcatcagag

SEQ ID NO: 14317 - RNA, 90 nt, synthetic construct
  misc_feature 1..90: note = engineered ribonucleic acid scaffold (ERS) sequence
  source 1..90: mol_type = other RNA
actggcgcttctatctgattactctgagctgccatcaccagcgactatgtcgtagtgggtaaagctccctattcggatggagcatcagag

SEQ ID NO: 14318 - RNA, 90 nt, synthetic construct
  misc_feature 1..90: note = engineered ribonucleic acid scaffold (ERS) sequence
  source 1..90: mol_type = other RNA
actggcacttctatctgattactctgagtagccatcaccagcgactatgtcgtagtgggtaaagctccctattcggatggagcatcagag

SEQ ID NO: 14319 - RNA, 90 nt, synthetic construct
  misc_feature 1..90: note = engineered ribonucleic acid scaffold (ERS) sequence
  source 1..90: mol_type = other RNA
actggcgcttctatctgattactctgagtagccatcaccagcgactatgtcgtagtgggtaaagctccctattcggatggagcatcagag

SEQ ID NO: 14320 - RNA, 89 nt, synthetic construct
  misc_feature 1..89: note = engineered ribonucleic acid scaffold (ERS) sequence
  source 1..89: mol_type = other RNA
actggcgcttctatctgattactctgagcaccatcaccagcgactatgtcgtagtgggtaaagctccctattcggatggagcatcagag

SEQ ID NO: 14321 - RNA, 89 nt, synthetic construct
  misc_feature 1..89: note = engineered ribonucleic acid scaffold (ERS) sequence
  source 1..89: mol_type = other RNA
actggcacttctatctgattactctgagcgccatcaccagcgactatgtcgtagtgggtaaagctccctattcggatggagcatcagag

SEQ ID NO: 14322 - RNA, 89 nt, synthetic construct
  misc_feature 1..89: note = engineered ribonucleic acid scaffold (ERS) sequence
  source 1..89: mol_type = other RNA
actggcgcttctatctgattactctgagggccatcaccagcgactatgtcgtagtgggtaaagctccctattcggatggagcatcagag

SEQ ID NO: 14323 - RNA, 89 nt, synthetic construct
  misc_feature 1..89: note = engineered ribonucleic acid scaffold (ERS) sequence
  source 1..89: mol_type = other RNA
actggcgcttctatctgattactctgagtgccgtcaccagcgactatgtcgtagtgggtaaagctccctattcggatggagcatcagag

SEQ ID NO: 14324 - RNA, 89 nt, synthetic construct
  misc_feature 1..89: note = engineered ribonucleic acid scaffold (ERS) sequence
  source 1..89: mol_type = other RNA
actggcacttctatctgattactctgagtgccatcaccagcgactatgtcgtagtgggtaaagctccctattcggatggagcatcagag

SEQ ID NO: 14325 - RNA, 89 nt, synthetic construct
  misc_feature 1..89: note = engineered ribonucleic acid scaffold (ERS) sequence
  source 1..89: mol_type = other RNA
actggcgcttctatctgattactctgagaaccatcaccagcgactatgtcgtagtgggtaaagctccctattcggatggagcatcagag

SEQ ID NO: 14326 - RNA, 89 nt, synthetic construct
  misc_feature 1..89: note = engineered ribonucleic acid scaffold (ERS) sequence
  source 1..89: mol_type = other RNA
actggcgcttctatctgattactctgagagccgtcaccagcgactatgtcgtagtgggtaaagctccctattcggatggagcatcagag

SEQ ID NO: 14327 - RNA, 89 nt, synthetic construct
  misc_feature 1..89: note = engineered ribonucleic acid scaffold (ERS) sequence
  source 1..89: mol_type = other RNA
actggcgcttctatctgattactctgagagccttcaccagcgactatgtcgtagtgggtaaagctccctattcggatggagcatcagag

SEQ ID NO: 14328 - RNA, 89 nt, synthetic construct
  misc_feature 1..89: note = engineered ribonucleic acid scaffold (ERS) sequence
  source 1..89: mol_type = other RNA
actggggcttctatctgattactctgagacccatcaccagcgactatgtcgtagtgggtaaagctccctattcggatggagcatcagag

SEQ ID NO: 14329 - RNA, 89 nt, synthetic construct
  misc_feature 1..89: note = engineered ribonucleic acid scaffold (ERS) sequence
  source 1..89: mol_type = other RNA
actggtgcttctatctgattactctgagagccatcaccagcgactatgtcgtagtgggtaaagctccctattcggatggagcatcagag

SEQ ID NO: 14330 - RNA, 89 nt, synthetic construct
  misc_feature 1..89: note = engineered ribonucleic acid scaffold (ERS) sequence
  source 1..89: mol_type = other RNA
actgggccttctatctgattactctgaggcccatcaccagcgactatgtcgtagtgggtaaagctccctattcggatggagcatcagag

SEQ ID NO: 14331 - RNA, 90 nt, synthetic construct
  misc_feature 1..90: note = engineered ribonucleic acid scaffold (ERS) sequence
  source 1..90: mol_type = other RNA
actggcccttctatctgattactctgaggagccatcaccagcgactatgtcgtagtgggtaaagctccctattcggatggagcatcagag

SEQ ID NO: 14332 - RNA, 89 nt, synthetic construct
  misc_feature 1..89: note = engineered ribonucleic acid scaffold (ERS) sequence
  source 1..89: mol_type = other RNA
actggcccttctatctgattactctgagggccatcaccagcgactatgtcgtagtgggtaaagctccctattcggatggagcatcagag

SEQ ID NO: 14333 - RNA, 89 nt, synthetic construct
  misc_feature 1..89: note = engineered ribonucleic acid scaffold (ERS) sequence
  source 1..89: mol_type = other RNA
actggcccttctatctgattactctgagtgccatcaccagcgactatgtcgtagtgggtaaagctccctattcggatggagcatcagag

SEQ ID NO: 14334 - RNA, 89 nt, synthetic construct
  misc_feature 1..89: note = engineered ribonucleic acid scaffold (ERS) sequence
  source 1..89: mol_type = other RNA
actggcccttctatctgattactctgagagccatcaccagcgactatgtcgtagtgggtaaagctccctattcggatggagcatcagag

SEQ ID NO: 14335 - RNA, 90 nt, synthetic construct
  misc_feature 1..90: note = engineered ribonucleic acid scaffold (ERS) sequence
  source 1..90: mol_type = other RNA
actggcgcttctatctgattactctgagcagccatcaccagcgactatgtcgtagtgggtaaagctccctattcggatggagcatcagag

SEQ ID NO: 14336 - RNA, 89 nt, synthetic construct; identical to SEQ ID NO: 889
  misc_feature 1..89: note = engineered ribonucleic acid scaffold (ERS) sequence
  source 1..89: mol_type = other RNA

SEQ ID NO: 14337 - RNA, 89 nt, synthetic construct
  misc_feature 1..89: note = engineered ribonucleic acid scaffold (ERS) sequence
  source 1..89: mol_type = other RNA
actggcgcttctatctgattactctgagtgccatcaccagcgactatgtcgtagtgggtaaagctccctattcggatggagcatcagag

SEQ ID NO: 14338 - RNA, 89 nt, synthetic construct
  misc_feature 1..89: note = engineered ribonucleic acid scaffold (ERS) sequence
  source 1..89: mol_type = other RNA
actggcgcttctatctgattactctgagagccatcaccagcgactatgtcgtagtgggtaaagctccctattcggatggagcatcagag

SEQ ID NO: 14339 - RNA, 89 nt, synthetic construct
  misc_feature 1..89: note = engineered ribonucleic acid scaffold (ERS) sequence
  source 1..89: mol_type = other RNA
actggctcttctatctgattactctgagcgccatcaccagcgactatgtcgtagtgggtaaagctccctattcggatggagcatcagag

SEQ ID NO: 14340 - RNA, 89 nt, synthetic construct
  misc_feature 1..89: note = engineered ribonucleic acid scaffold (ERS) sequence
  source 1..89: mol_type = other RNA
actggctcttctatctgattactctgagggccatcaccagcgactatgtcgtagtgggtaaagctccctattcggatggagcatcagag

SEQ ID NO: 14341 - RNA, 89 nt, synthetic construct
  misc_feature 1..89: note = engineered ribonucleic acid scaffold (ERS) sequence
  source 1..89: mol_type = other RNA
actggctcttctatctgattactctgagtgccatcaccagcgactatgtcgtagtgggtaaagctccctattcggatggagcatcagag

SEQ ID NO: 14342 - RNA, 89 nt, synthetic construct
  misc_feature 1..89: note = engineered ribonucleic acid scaffold (ERS) sequence
  source 1..89: mol_type = other RNA
actggctcttctatctgattactctgagagccatcaccagcgactatgtcgtagtgggtaaagctccctattcggatggagcatcagag

SEQ ID NO: 14343 - RNA, 89 nt, synthetic construct
  misc_feature 1..89: note = engineered ribonucleic acid scaffold (ERS) sequence
  source 1..89: mol_type = other RNA
actggcggttctatctgattactctgagcgccatcaccagcgactatgtcgtagtgggtaaagctccctattcggatggagcatcagag

SEQ ID NO: 14344 - RNA, 89 nt, synthetic construct
  misc_feature 1..89: note = engineered ribonucleic acid scaffold (ERS) sequence
  source 1..89: mol_type = other RNA
actggcggttctatctgattactctgagagccatcaccagcgactatgtcgtagtgggtaaagctccctattcggatggagcatcagag

SEQ ID NO: 14345 - RNA, 94 nt, synthetic construct
  misc_feature 1..94: note = engineered ribonucleic acid scaffold (ERS) sequence
  source 1..94: mol_type = other RNA
acacacggttctatctgattactctgccgtgttcaccagcgactatgtcgtagtgggtaaagctccctcacagggatgtgagggagcatcagag

SEQ ID NO: 14346 - RNA, 94 nt, synthetic construct
  misc_feature 1..94: note = engineered ribonucleic acid scaffold (ERS) sequence
  source 1..94: mol_type = other RNA
acactggtttctatctgattactctgaccagttcaccagcgactatgtcgtagtgggtaaagctccctcacagggatgtgagggagcatcagag

SEQ ID NO: 14347 - RNA, 94 nt, synthetic construct
  misc_feature 1..94: note = engineered ribonucleic acid scaffold (ERS) sequence
  source 1..94: mol_type = other RNA
acaggccgttctatctgattactctgcggccttcaccagcgactatgtcgtagtgggtaaagctccctcacagggatgtgagggagcatcagag

SEQ ID NO: 14348 - RNA, 94 nt, synthetic construct
  misc_feature 1..94: note = engineered ribonucleic acid scaffold (ERS) sequence
  source 1..94: mol_type = other RNA
acaggtccttctatctgattactctgggaccttcaccagcgactatgtcgtagtgggtaaagctccctcacagggatgtgagggagcatcagag

SEQ ID NO: 14349 - RNA, 94 nt, synthetic construct
  misc_feature 1..94: note = engineered ribonucleic acid scaffold (ERS) sequence
  source 1..94: mol_type = other RNA
accagcaattctatctgattactctgttgctgtcaccagcgactatgtcgtagtgggtaaagctccctcacagggatgtgagggagcatcagag

SEQ ID NO: 14350 - RNA, 94 nt, synthetic construct
  misc_feature 1..94: note = engineered ribonucleic acid scaffold (ERS) sequence
  source 1..94: mol_type = other RNA
accgagacttctatctgattactctgggctcgtcaccagcgactatgtcgtagtgggtaaagctccctcacagggatgtgagggagcatcagag

SEQ ID NO: 14351 - RNA, 94 nt, synthetic construct
  misc_feature 1..94: note = engineered ribonucleic acid scaffold (ERS) sequence
  source 1..94: mol_type = other RNA
acctgtagttctatctgattactctgctacagtcaccagcgactatgtcgtagtgggtaaagctccctcacagggatgtgagggagcatcagag

SEQ ID NO: 14352 - RNA, 94 nt, synthetic construct
  misc_feature 1..94: note = engineered ribonucleic acid scaffold (ERS) sequence
  source 1..94: mol_type = other RNA
acgagcacttctatctgattactctggggctctcaccagcgactatgtcgtagtgggtaaagctccctcacagggatgtgagggagcatcagag

SEQ ID NO: 14353 - RNA, 94 nt, synthetic construct
  misc_feature 1..94: note = engineered ribonucleic acid scaffold (ERS) sequence
  source 1..94: mol_type = other RNA
acgaggtgttctatctgattactctgcacctctcaccagcgactatgtcgtagtgggtaaagctccctcacagggatgtgagggagcatcagag

SEQ ID NO: 14354 - RNA, 94 nt, synthetic construct
  misc_feature 1..94: note = engineered ribonucleic acid scaffold (ERS) sequence
  source 1..94: mol_type = other RNA
acgggactttctatctgattactctgagtccctcaccagcgactatgtcgtagtgggtaaagctccctcacagggatgtgagggagcatcagag

SEQ ID NO: 14355 - RNA, 94 nt, synthetic construct
  misc_feature 1..94: note = engineered ribonucleic acid scaffold (ERS) sequence
  source 1..94: mol_type = other RNA
acgggcaattctatctgattactctgttgccctcaccagcgactatgtcgtagtgggtaaagctccctcacagggatgtgagggagcatcagag

SEQ ID NO: 14356 - RNA, 94 nt, synthetic construct
  misc_feature 1..94: note = engineered ribonucleic acid scaffold (ERS) sequence
  source 1..94: mol_type = other RNA
actgtgcgttctatctgattactctgcgcacatcaccagcgactatgtcgtagtgggtaaagctccctcacagggatgtgagggagcatcagag

SEQ ID NO: 14357 - RNA, 95 nt, synthetic construct
  misc_feature 1..95: note = engineered ribonucleic acid scaffold (ERS) sequence
  source 1..95: mol_type = other RNA
actggcgcttctatctgattactctgggcgccatcaccagcgactatgtcgtagtgggtaaagctccctcacagggatgtgagggagcatcagag

SEQ ID NO: 14358 - RNA, 95 nt, synthetic construct
  misc_feature 1..95: note = engineered ribonucleic acid scaffold (ERS) sequence
  source 1..95: mol_type = other RNA
actggcgcttctatctgattactctgggagccatcaccagcgactatgtcgtagtgggtaaagctccctcacagggatgtgagggagcatcagag

SEQ ID NO: 14359 - RNA, 95 nt, synthetic construct
  misc_feature 1..95: note = engineered ribonucleic acid scaffold (ERS) sequence
  source 1..95: mol_type = other RNA
actggcgcttctatctgattactctgtgagccatcaccagcgactatgtcgtagtgggtaaagctccctcacagggatgtgagggagcatcagag

SEQ ID NO: 14360 - RNA, 96 nt, synthetic construct
  misc_feature 1..96: note = engineered ribonucleic acid scaffold (ERS) sequence
  source 1..96: mol_type = other RNA
actggcgcttctatctgattactctgaggagccatcaccagcgactatgtcgtagtgggtaaagctccctcacagggatgtgagggagcatcagag

SEQ ID NO: 14361 - RNA, 95 nt, synthetic construct
  misc_feature 1..95: note = engineered ribonucleic acid scaffold (ERS) sequence
  source 1..95: mol_type = other RNA
actggcgcttctatctgattactctgatagccatcaccagcgactatgtcgtagtgggtaaagctccctcacagggatgtgagggagcatcagag

SEQ ID NO: 14362 - RNA, 96 nt, synthetic construct
  misc_feature 1..96: note = engineered ribonucleic acid scaffold (ERS) sequence
  source 1..96: mol_type = other RNA
actggcgcttctatctgattactctgagctgccatcaccagcgactatgtcgtagtgggtaaagctccctcacagggatgtgagggagcatcagag

SEQ ID NO: 14363 - RNA, 96 nt, synthetic construct
  misc_feature 1..96: note = engineered ribonucleic acid scaffold (ERS) sequence
  source 1..96: mol_type = other RNA
actggcacttctatctgattactctgagtagccatcaccagcgactatgtcgtagtgggtaaagctccctcacagggatgtgagggagcatcagag

SEQ ID NO: 14364 - RNA, 96 nt, synthetic construct
  misc_feature 1..96: note = engineered ribonucleic acid scaffold (ERS) sequence
  source 1..96: mol_type = other RNA
actggcgcttctatctgattactctgagtagccatcaccagcgactatgtcgtagtgggtaaagctccctcacagggatgtgagggagcatcagag

SEQ ID NO: 14365 - RNA, 95 nt, synthetic construct
  misc_feature 1..95: note = engineered ribonucleic acid scaffold (ERS) sequence
  source 1..95: mol_type = other RNA
actggcgcttctatctgattactctgagcaccatcaccagcgactatgtcgtagtgggtaaagctccctcacagggatgtgagggagcatcagag

SEQ ID NO: 14366 - RNA, 95 nt, synthetic construct
  misc_feature 1..95: note = engineered ribonucleic acid scaffold (ERS) sequence
  source 1..95: mol_type = other RNA
actggcacttctatctgattactctgagcgccatcaccagcgactatgtcgtagtgggtaaagctccctcacagggatgtgagggagcatcagag

SEQ ID NO: 14367 - RNA, 95 nt, synthetic construct
  misc_feature 1..95: note = engineered ribonucleic acid scaffold (ERS) sequence
  source 1..95: mol_type = other RNA
actggcgcttctatctgattactctgagggccatcaccagcgactatgtcgtagtgggtaaagctccctcacagggatgtgagggagcatcagag

SEQ ID NO: 14368 - RNA, 95 nt, synthetic construct
  misc_feature 1..95: note = engineered ribonucleic acid scaffold (ERS) sequence
  source 1..95: mol_type = other RNA
actggcgcttctatctgattactctgagtgccgtcaccagcgactatgtcgtagtgggtaaagctccctcacagggatgtgagggagcatcagag

SEQ ID NO: 14369 - RNA, 95 nt, synthetic construct
  misc_feature 1..95: note = engineered ribonucleic acid scaffold (ERS) sequence
  source 1..95: mol_type = other RNA
actggcacttctatctgattactctgagtgccatcaccagcgactatgtcgtagtgggtaaagctccctcacagggatgtgagggagcatcagag

SEQ ID NO: 14370 - RNA, 95 nt, synthetic construct
  misc_feature 1..95: note = engineered ribonucleic acid scaffold (ERS) sequence
  source 1..95: mol_type = other RNA
actggcgcttctatctgattactctgagaaccatcaccagcgactatgtcgtagtgggtaaagctccctcacagggatgtgagggagcatcagag

SEQ ID NO: 14371 - RNA, 95 nt, synthetic construct
  misc_feature 1..95: note = engineered ribonucleic acid scaffold (ERS) sequence
  source 1..95: mol_type = other RNA
actggcgcttctatctgattactctgagagccgtcaccagcgactatgtcgtagtgggtaaagctccctcacagggatgtgagggagcatcagag

SEQ ID NO: 14372 - RNA, 95 nt, synthetic construct
  misc_feature 1..95: note = engineered ribonucleic acid scaffold (ERS) sequence
  source 1..95: mol_type = other RNA
actggcgcttctatctgattactctgagagccttcaccagcgactatgtcgtagtgggtaaagctccctcacagggatgtgagggagcatcagag

SEQ ID NO: 14373 - RNA, 95 nt, synthetic construct
  misc_feature 1..95: note = engineered ribonucleic acid scaffold (ERS) sequence
  source 1..95: mol_type = other RNA
actggggcttctatctgattactctgagacccatcaccagcgactatgtcgtagtgggtaaagctccctcacagggatgtgagggagcatcagag

SEQ ID NO: 14374 - RNA, 95 nt, synthetic construct
  misc_feature 1..95: note = engineered ribonucleic acid scaffold (ERS) sequence
  source 1..95: mol_type = other RNA
actggtgcttctatctgattactctgagagccatcaccagcgactatgtcgtagtgggtaaagctccctcacagggatgtgagggagcatcagag

SEQ ID NO: 14375 - RNA, 95 nt, synthetic construct
  misc_feature 1..95: note = engineered ribonucleic acid scaffold (ERS) sequence
  source 1..95: mol_type = other RNA
actgggccttctatctgattactctgaggcccatcaccagcgactatgtcgtagtgggtaaagctccctcacagggatgtgagggagcatcagag

SEQ ID NO: 14376 - RNA, 96 nt, synthetic construct
  misc_feature 1..96: note = engineered ribonucleic acid scaffold (ERS) sequence
  source 1..96: mol_type = other RNA
actggcccttctatctgattactctgaggagccatcaccagcgactatgtcgtagtgggtaaagctccctcacagggatgtgagggagcatcagag

SEQ ID NO: 14377 - RNA, 95 nt, synthetic construct
  misc_feature 1..95: note = engineered ribonucleic acid scaffold (ERS) sequence
  source 1..95: mol_type = other RNA
actggcccttctatctgattactctgagggccatcaccagcgactatgtcgtagtgggtaaagctccctcacagggatgtgagggagcatcagag

SEQ ID NO: 14378 - RNA, 95 nt, synthetic construct
  misc_feature 1..95: note = engineered ribonucleic acid scaffold (ERS) sequence
  source 1..95: mol_type = other RNA
actggcccttctatctgattactctgagtgccatcaccagcgactatgtcgtagtgggtaaagctccctcacagggatgtgagggagcatcagag

SEQ ID NO: 14379 - RNA, 95 nt, synthetic construct
  misc_feature 1..95: note = engineered ribonucleic acid scaffold (ERS) sequence
  source 1..95: mol_type = other RNA
actggcccttctatctgattactctgagagccatcaccagcgactatgtcgtagtgggtaaagctccctcacagggatgtgagggagcatcagag

SEQ ID NO: 14380 - RNA, 96 nt, synthetic construct
  misc_feature 1..96: note = engineered ribonucleic acid scaffold (ERS) sequence
  source 1..96: mol_type = other RNA
actggcgcttctatctgattactctgagcagccatcaccagcgactatgtcgtagtgggtaaagctccctcacagggatgtgagggagcatcagag

SEQ ID NO: 14381 - RNA, 95 nt, synthetic construct; identical to SEQ ID NO: 876
  misc_feature 1..95: note = engineered ribonucleic acid scaffold (ERS) sequence
  source 1..95: mol_type = other RNA

SEQ ID NO: 14382 - RNA, 95 nt, synthetic construct
  misc_feature 1..95: note = engineered ribonucleic acid scaffold (ERS) sequence
  source 1..95: mol_type = other RNA
actggcgcttctatctgattactctgagtgccatcaccagcgactatgtcgtagtgggtaaagctccctcacagggatgtgagggagcatcagag

SEQ ID NO: 14383 - RNA, 95 nt, synthetic construct
  misc_feature 1..95: note = engineered ribonucleic acid scaffold (ERS) sequence
  source 1..95: mol_type = other RNA
actggcgcttctatctgattactctgagagccatcaccagcgactatgtcgtagtgggtaaagctccctcacagggatgtgagggagcatcagag

SEQ ID NO: 14384 - RNA, 95 nt, synthetic construct
  misc_feature 1..95: note = engineered ribonucleic acid scaffold (ERS) sequence
  source 1..95: mol_type = other RNA
actggctcttctatctgattactctgagcgccatcaccagcgactatgtcgtagtgggtaaagctccctcacagggatgtgagggagcatcagag

SEQ ID NO: 14385 - RNA, 95 nt, synthetic construct
  misc_feature 1..95: note = engineered ribonucleic acid scaffold (ERS) sequence
  source 1..95: mol_type = other RNA
actggctcttctatctgattactctgagggccatcaccagcgactatgtcgtagtgggtaaagctccctcacagggatgtgagggagcatcagag

SEQ ID NO: 14386 - RNA, 95 nt, synthetic construct
  misc_feature 1..95: note = engineered ribonucleic acid scaffold (ERS) sequence
  source 1..95: mol_type = other RNA
actggctcttctatctgattactctgagtgccatcaccagcgactatgtcgtagtgggtaaagctccctcacagggatgtgagggagcatcagag

SEQ ID NO: 14387 - RNA, 95 nt, synthetic construct
  misc_feature 1..95: note = engineered ribonucleic acid scaffold (ERS) sequence
  source 1..95: mol_type = other RNA
actggctcttctatctgattactctgagagccatcaccagcgactatgtcgtagtgggtaaagctccctcacagggatgtgagggagcatcagag

SEQ ID NO: 14388 - RNA, 95 nt, synthetic construct
  misc_feature 1..95: note = engineered ribonucleic acid scaffold (ERS) sequence
  source 1..95: mol_type = other RNA
actggcggttctatctgattactctgagcgccatcaccagcgactatgtcgtagtgggtaaagctccctcacagggatgtgagggagcatcagag

SEQ ID NO: 14389 - RNA, 95 nt, synthetic construct
  misc_feature 1..95: note = engineered ribonucleic acid scaffold (ERS) sequence
  source 1..95: mol_type = other RNA
actggcggttctatctgattactctgagagccatcaccagcgactatgtcgtagtgggtaaagctccctcacagggatgtgagggagcatcagag

SEQ ID NO: 14390 - RNA, 93 nt, synthetic construct
  misc_feature 1..93: note = engineered ribonucleic acid scaffold (ERS) sequence
  source 1..93: mol_type = other RNA
acacacggttctatctgattactctgccgtgttcaccagcgactatgtcgtagtgggtaaagctccctcagctgcagtgagggagcatcagag

SEQ ID NO: 14391 - RNA, 93 nt, synthetic construct
  misc_feature 1..93: note = engineered ribonucleic acid scaffold (ERS) sequence
  source 1..93: mol_type = other RNA
acactggtttctatctgattactctgaccagttcaccagcgactatgtcgtagtgggtaaagctccctcagctgcagtgagggagcatcagag

SEQ ID NO: 14392 - RNA, 93 nt, synthetic construct
  misc_feature 1..93: note = engineered ribonucleic acid scaffold (ERS) sequence
  source 1..93: mol_type = other RNA
acaggccgttctatctgattactctgcggccttcaccagcgactatgtcgtagtgggtaaagctccctcagctgcagtgagggagcatcagag

SEQ ID NO: 14393 - RNA, 93 nt, synthetic construct
  misc_feature 1..93: note = engineered ribonucleic acid scaffold (ERS) sequence
  source 1..93: mol_type = other RNA
acaggtccttctatctgattactctgggaccttcaccagcgactatgtcgtagtgggtaaagctccctcagctgcagtgagggagcatcagag

SEQ ID NO: 14394 - RNA, 93 nt, synthetic construct
  misc_feature 1..93: note = engineered ribonucleic acid scaffold (ERS) sequence
  source 1..93: mol_type = other RNA
accagcaattctatctgattactctgttgctgtcaccagcgactatgtcgtagtgggtaaagctccctcagctgcagtgagggagcatcagag

SEQ ID NO: 14395 - RNA, 93 nt, synthetic construct
  misc_feature 1..93: note = engineered ribonucleic acid scaffold (ERS) sequence
  source 1..93: mol_type = other RNA
accgagacttctatctgattactctgggctcgtcaccagcgactatgtcgtagtgggtaaagctccctcagctgcagtgagggagcatcagag

SEQ ID NO: 14396 - RNA, 93 nt, synthetic construct
  misc_feature 1..93: note = engineered ribonucleic acid scaffold (ERS) sequence
  source 1..93: mol_type = other RNA
acctgtagttctatctgattactctgctacagtcaccagcgactatgtcgtagtgggtaaagctccctcagctgcagtgagggagcatcagag

SEQ ID NO: 14397 - RNA, 93 nt, synthetic construct
  misc_feature 1..93: note = engineered ribonucleic acid scaffold (ERS) sequence
  source 1..93: mol_type = other RNA
acgagcacttctatctgattactctggggctctcaccagcgactatgtcgtagtgggtaaagctccctcagctgcagtgagggagcatcagag

SEQ ID NO: 14398 - RNA, 93 nt, synthetic construct
  misc_feature 1..93: note = engineered ribonucleic acid scaffold (ERS) sequence
  source 1..93: mol_type = other RNA
acgaggtgttctatctgattactctgcacctctcaccagcgactatgtcgtagtgggtaaagctccctcagctgcagtgagggagcatcagag

SEQ ID NO: 14399 - RNA, 93 nt, synthetic construct
  misc_feature 1..93: note = engineered ribonucleic acid scaffold (ERS) sequence
  source 1..93: mol_type = other RNA
acgggactttctatctgattactctgagtccctcaccagcgactatgtcgtagtgggtaaagctccctcagctgcagtgagggagcatcagag

SEQ ID NO: 14400 - RNA, 93 nt, synthetic construct
  misc_feature 1..93: note = engineered ribonucleic acid scaffold (ERS) sequence
  source 1..93: mol_type = other RNA
acgggcaattctatctgattactctgttgccctcaccagcgactatgtcgtagtgggtaaagctccctcagctgcagtgagggagcatcagag

SEQ ID NO: 14401 - RNA, 93 nt, synthetic construct
  misc_feature 1..93: note = engineered ribonucleic acid scaffold (ERS) sequence
  source 1..93: mol_type = other RNA
actgtgcgttctatctgattactctgcgcacatcaccagcgactatgtcgtagtgggtaaagctccctcagctgcagtgagggagcatcagag

SEQ ID NO: 14402 - RNA, 94 nt, synthetic construct
  misc_feature 1..94: note = engineered ribonucleic acid scaffold (ERS) sequence
  source 1..94: mol_type = other RNA
actggcgcttctatctgattactctgggcgccatcaccagcgactatgtcgtagtgggtaaagctccctcagctgcagtgagggagcatcagag

SEQ ID NO: 14403 - RNA, 94 nt, synthetic construct
  misc_feature 1..94: note = engineered ribonucleic acid scaffold (ERS) sequence
  source 1..94: mol_type = other RNA
actggcgcttctatctgattactctgggagccatcaccagcgactatgtcgtagtgggtaaagctccctcagctgcagtgagggagcatcagag

SEQ ID NO: 14404 - RNA, 94 nt, synthetic construct
  misc_feature 1..94: note = engineered ribonucleic acid scaffold (ERS) sequence
  source 1..94: mol_type = other RNA
actggcgcttctatctgattactctgtgagccatcaccagcgactatgtcgtagtgggtaaagctccctcagctgcagtgagggagcatcagag

SEQ ID NO: 14405 - RNA, 95 nt, synthetic construct
  misc_feature 1..95: note = engineered ribonucleic acid scaffold (ERS) sequence
  source 1..95: mol_type = other RNA
actggcgcttctatctgattactctgaggagccatcaccagcgactatgtcgtagtgggtaaagctccctcagctgcagtgagggagcatcagag

SEQ ID NO: 14406 - RNA, 94 nt, synthetic construct
  misc_feature 1..94: note = engineered ribonucleic acid scaffold (ERS) sequence
  source 1..94: mol_type = other RNA
actggcgcttctatctgattactctgatagccatcaccagcgactatgtcgtagtgggtaaagctccctcagctgcagtgagggagcatcagag

SEQ ID NO: 14407 - RNA, 95 nt, synthetic construct
  misc_feature 1..95: note = engineered ribonucleic acid scaffold (ERS) sequence
  source 1..95: mol_type = other RNA
actggcgcttctatctgattactctgagctgccatcaccagcgactatgtcgtagtgggtaaagctccctcagctgcagtgagggagcatcagag

SEQ ID NO: 14408 - RNA, 95 nt, synthetic construct
  misc_feature 1..95: note = engineered ribonucleic acid scaffold (ERS) sequence
  source 1..95: mol_type = other RNA
actggcacttctatctgattactctgagtagccatcaccagcgactatgtcgtagtgggtaaagctccctcagctgcagtgagggagcatcagag

SEQ ID NO: 14409 - RNA, 95 nt, synthetic construct
  misc_feature 1..95: note = engineered ribonucleic acid scaffold (ERS) sequence
  source 1..95: mol_type = other RNA
actggcgcttctatctgattactctgagtagccatcaccagcgactatgtcgtagtgggtaaagctccctcagctgcagtgagggagcatcagag

SEQ ID NO: 14410 - RNA, 94 nt, synthetic construct
  misc_feature 1..94: note = engineered ribonucleic acid scaffold (ERS) sequence
  source 1..94: mol_type = other RNA
actggcgcttctatctgattactctgagcaccatcaccagcgactatgtcgtagtgggtaaagctccctcagctgcagtgagggagcatcagag

SEQ ID NO: 14411 - RNA, 94 nt, synthetic construct
  misc_feature 1..94: note = engineered ribonucleic acid scaffold (ERS) sequence
  source 1..94: mol_type = other RNA
actggcacttctatctgattactctgagcgccatcaccagcgactatgtcgtagtgggtaaagctccctcagctgcagtgagggagcatcagag

SEQ ID NO: 14412 - RNA, 94 nt, synthetic construct
  misc_feature 1..94: note = engineered ribonucleic acid scaffold (ERS) sequence
  source 1..94: mol_type = other RNA
actggcgcttctatctgattactctgagggccatcaccagcgactatgtcgtagtgggtaaagctccctcagctgcagtgagggagcatcagag

SEQ ID NO: 14413 - RNA, 94 nt, synthetic construct
  misc_feature 1..94: note = engineered ribonucleic acid scaffold (ERS) sequence
  source 1..94: mol_type = other RNA
actggcgcttctatctgattactctgagtgccgtcaccagcgactatgtcgtagtgggtaaagctccctcagctgcagtgagggagcatcagag

SEQ ID NO: 14414 - RNA, 94 nt, synthetic construct
  misc_feature 1..94: note = engineered ribonucleic acid scaffold (ERS) sequence
  source 1..94: mol_type = other RNA
actggcacttctatctgattactctgagtgccatcaccagcgactatgtcgtagtgggtaaagctccctcagctgcagtgagggagcatcagag

SEQ ID NO: 14415 - RNA, 94 nt, synthetic construct
  misc_feature 1..94: note = engineered ribonucleic acid scaffold (ERS) sequence
  source 1..94: mol_type = other RNA
actggcgcttctatctgattactctgagaaccatcaccagcgactatgtcgtagtgggtaaagctccctcagctgcagtgagggagcatcagag

SEQ ID NO: 14416 - RNA, 94 nt, synthetic construct
  misc_feature 1..94: note = engineered ribonucleic acid scaffold (ERS) sequence
  source 1..94: mol_type = other RNA
actggcgcttctatctgattactctgagagccgtcaccagcgactatgtcgtagtgggtaaagctccctcagctgcagtgagggagcatcagag

SEQ ID NO: 14417 - RNA, 94 nt, synthetic construct
  misc_feature 1..94: note = engineered ribonucleic acid scaffold (ERS) sequence
  source 1..94: mol_type = other RNA
actggcgcttctatctgattactctgagagccttcaccagcgactatgtcgtagtgggtaaagctccctcagctgcagtgagggagcatcagag

SEQ ID NO: 14418 - RNA, 94 nt, synthetic construct
  misc_feature 1..94: note = engineered ribonucleic acid scaffold (ERS) sequence
  source 1..94: mol_type = other RNA
actggggcttctatctgattactctgagacccatcaccagcgactatgtcgtagtgggtaaagctccctcagctgcagtgagggagcatcagag

SEQ ID NO: 14419 - RNA, 94 nt, synthetic construct
  misc_feature 1..94: note = engineered ribonucleic acid scaffold (ERS) sequence
  source 1..94: mol_type = other RNA
actggtgcttctatctgattactctgagagccatcaccagcgactatgtcgtagtgggtaaagctccctcagctgcagtgagggagcatcagag

SEQ ID NO: 14420 - RNA, 94 nt, synthetic construct
  misc_feature 1..94: note = engineered ribonucleic acid scaffold (ERS) sequence
  source 1..94: mol_type = other RNA
actgggccttctatctgattactctgaggcccatcaccagcgactatgtcgtagtgggtaaagctccctcagctgcagtgagggagcatcagag

SEQ ID NO: 14421 - RNA, 95 nt, synthetic construct
  misc_feature 1..95: note = engineered ribonucleic acid scaffold (ERS) sequence
  source 1..95: mol_type = other RNA
actggcccttctatctgattactctgaggagccatcaccagcgactatgtcgtagtgggtaaagctccctcagctgcagtgagggagcatcagag

SEQ ID NO: 14422 - RNA, 94 nt, synthetic construct
  misc_feature 1..94: note = engineered ribonucleic acid scaffold (ERS) sequence
  source 1..94: mol_type = other RNA
actggcccttctatctgattactctgagggccatcaccagcgactatgtcgtagtgggtaaagctccctcagctgcagtgagggagcatcagag

SEQ ID NO: 14423 - RNA, 94 nt, synthetic construct
  misc_feature 1..94: note = engineered ribonucleic acid scaffold (ERS) sequence
  source 1..94: mol_type = other RNA
actggcccttctatctgattactctgagtgccatcaccagcgactatgtcgtagtgggtaaagctccctcagctgcagtgagggagcatcagag

SEQ ID NO: 14424 - RNA, 94 nt, synthetic construct
  misc_feature 1..94: note = engineered ribonucleic acid scaffold (ERS) sequence
  source 1..94: mol_type = other RNA
actggcccttctatctgattactctgagagccatcaccagcgactatgtcgtagtgggtaaagctccctcagctgcagtgagggagcatcagag

SEQ ID NO: 14425 - RNA, 95 nt, synthetic construct
  misc_feature 1..95: note = engineered ribonucleic acid scaffold (ERS) sequence
  source 1..95: mol_type = other RNA
actggcgcttctatctgattactctgagcagccatcaccagcgactatgtcgtagtgggtaaagctccctcagctgcagtgagggagcatcagag

SEQ ID NO: 14426 - RNA, 94 nt, synthetic construct; identical to SEQ ID NO: 877
  misc_feature 1..94: note = engineered ribonucleic acid scaffold (ERS) sequence
  source 1..94: mol_type = other RNA

SEQ ID NO: 14427 - RNA, 94 nt, synthetic construct
  misc_feature 1..94: note = engineered ribonucleic acid scaffold (ERS) sequence
  source 1..94: mol_type = other RNA
actggcgcttctatctgattactctgagtgccatcaccagcgactatgtcgtagtgggtaaagctccctcagctgcagtgagggagcatcagag

SEQ ID NO: 14428 - RNA, 94 nt, synthetic construct
  misc_feature 1..94: note = engineered ribonucleic acid scaffold (ERS) sequence
  source 1..94: mol_type = other RNA
actggcgcttctatctgattactctgagagccatcaccagcgactatgtcgtagtgggtaaagctccctcagctgcagtgagggagcatcagag

SEQ ID NO: 14429 - RNA, 94 nt, synthetic construct
  misc_feature 1..94: note = engineered ribonucleic acid scaffold (ERS) sequence
  source 1..94: mol_type = other RNA
actggctcttctatctgattactctgagcgccatcaccagcgactatgtcgtagtgggtaaagctccctcagctgcagtgagggagcatcagag

SEQ ID NO: 14430 - RNA, 94 nt, synthetic construct
  misc_feature 1..94: note = engineered ribonucleic acid scaffold (ERS) sequence
  source 1..94: mol_type = other RNA
actggctcttctatctgattactctgagggccatcaccagcgactatgtcgtagtgggtaaagctccctcagctgcagtgagggagcatcagag

SEQ ID NO: 14431 - RNA, 94 nt, synthetic construct
  misc_feature 1..94: note = engineered ribonucleic acid scaffold (ERS) sequence
  source 1..94: mol_type = other RNA
actggctcttctatctgattactctgagtgccatcaccagcgactatgtcgtagtgggtaaagctccctcagctgcagtgagggagcatcagag

SEQ ID NO: 14432 - RNA, 94 nt, synthetic construct
  misc_feature 1..94: note = engineered ribonucleic acid scaffold (ERS) sequence
  source 1..94: mol_type = other RNA
actggctcttctatctgattactctgagagccatcaccagcgactatgtcgtagtgggtaaagctccctcagctgcagtgagggagcatcagag

SEQ ID NO: 14433 - RNA, 94 nt, synthetic construct
  misc_feature 1..94: note = engineered ribonucleic acid scaffold (ERS) sequence
  source 1..94: mol_type = other RNA
actggcggttctatctgattactctgagcgccatcaccagcgactatgtcgtagtgggtaaagctccctcagctgcagtgagggagcatcagag

SEQ ID NO: 14434 - RNA, 94 nt, synthetic construct
  misc_feature 1..94: note = engineered ribonucleic acid scaffold (ERS) sequence
  source 1..94: mol_type = other RNA
actggcggttctatctgattactctgagagccatcaccagcgactatgtcgtagtgggtaaagctccctcagctgcagtgagggagcatcagag

SEQ ID NO: 14435 - RNA, 88 nt, synthetic construct
  misc_feature 1..88: note = engineered ribonucleic acid scaffold (ERS) sequence
  source 1..88: mol_type = other RNA
acacacggttctatctgattactctgccgtgttcaccagcgactatgtcgtagtgggtaaagctccctcataggagggagcatcagag

SEQ ID NO: 14436 - RNA, 88 nt, synthetic construct
  misc_feature 1..88: note = engineered ribonucleic acid scaffold (ERS) sequence
  source 1..88: mol_type = other RNA
acactggtttctatctgattactctgaccagttcaccagcgactatgtcgtagtgggtaaagctccctcataggagggagcatcagag

SEQ ID NO: 14437 - RNA, 88 nt, synthetic construct
  misc_feature 1..88: note = engineered ribonucleic acid scaffold (ERS) sequence
  source 1..88: mol_type = other RNA
acaggccgttctatctgattactctgcggccttcaccagcgactatgtcgtagtgggtaaagctccctcataggagggagcatcagag

SEQ ID NO: 14438 - RNA, 88 nt, synthetic construct
  misc_feature 1..88: note = engineered ribonucleic acid scaffold (ERS) sequence
  source 1..88: mol_type = other RNA
acaggtccttctatctgattactctgggaccttcaccagcgactatgtcgtagtgggtaaagctccctcataggagggagcatcagag

SEQ ID NO: 14439 - RNA, 88 nt, synthetic construct
  misc_feature 1..88: note = engineered ribonucleic acid scaffold (ERS) sequence
  source 1..88: mol_type = other RNA
accagcaattctatctgattactctgttgctgtcaccagcgactatgtcgtagtgggtaaagctccctcataggagggagcatcagag

SEQ ID NO: 14440 - RNA, 88 nt, synthetic construct
  misc_feature 1..88: note = engineered ribonucleic acid scaffold (ERS) sequence
  source 1..88: mol_type = other RNA
accgagacttctatctgattactctgggctcgtcaccagcgactatgtcgtagtgggtaaagctccctcataggagggagcatcagag

SEQ ID NO: 14441 - RNA, 88 nt, synthetic construct
  misc_feature 1..88: note = engineered ribonucleic acid scaffold (ERS) sequence
  source 1..88: mol_type = other RNA
acctgtagttctatctgattactctgctacagtcaccagcgactatgtcgtagtgggtaaagctccctcataggagggagcatcagag

SEQ ID NO: 14442 - RNA, 88 nt, synthetic construct
  misc_feature 1..88: note = engineered ribonucleic acid scaffold (ERS) sequence
  source 1..88: mol_type = other RNA
acgagcacttctatctgattactctggggctctcaccagcgactatgtcgtagtgggtaaagctccctcataggagggagcatcagag

SEQ ID NO: 14443 - RNA, 88 nt, synthetic construct
  misc_feature 1..88: note = engineered ribonucleic acid scaffold (ERS) sequence
  source 1..88: mol_type = other RNA
acgaggtgttctatctgattactctgcacctctcaccagcgactatgtcgtagtgggtaaagctccctcataggagggagcatcagag

SEQ ID NO: 14444 - RNA, 88 nt, synthetic construct
  misc_feature 1..88: note = engineered ribonucleic acid scaffold (ERS) sequence
  source 1..88: mol_type = other RNA
acgggactttctatctgattactctgagtccctcaccagcgactatgtcgtagtgggtaaagctccctcataggagggagcatcagag

SEQ ID NO: 14445 - RNA, 88 nt, synthetic construct
  misc_feature 1..88: note = engineered ribonucleic acid scaffold (ERS) sequence
  source 1..88: mol_type = other RNA
acgggcaattctatctgattactctgttgccctcaccagcgactatgtcgtagtgggtaaagctccctcataggagggagcatcagag

SEQ ID NO: 14446 - RNA, 88 nt, synthetic construct
  misc_feature 1..88: note = engineered ribonucleic acid scaffold (ERS) sequence
  source 1..88: mol_type = other RNA
actgtgcgttctatctgattactctgcgcacatcaccagcgactatgtcgtagtgggtaaagctccctcataggagggagcatcagag

SEQ ID NO: 14447 - RNA, 89 nt, synthetic construct
  misc_feature 1..89: note = engineered ribonucleic acid scaffold (ERS) sequence
  source 1..89: mol_type = other RNA
actggcgcttctatctgattactctgggcgccatcaccagcgactatgtcgtagtgggtaaagctccctcataggagggagcatcagag

SEQ ID NO: 14448 - RNA, 89 nt, synthetic construct
  misc_feature 1..89: note = engineered ribonucleic acid scaffold (ERS) sequence
  source 1..89: mol_type = other RNA
actggcgcttctatctgattactctgggagccatcaccagcgactatgtcgtagtgggtaaagctccctcataggagggagcatcagag

SEQ ID NO: 14449 - RNA, 89 nt, synthetic construct
  misc_feature 1..89: note = engineered ribonucleic acid scaffold (ERS) sequence
  source 1..89: mol_type = other RNA
actggcgcttctatctgattactctgtgagccatcaccagcgactatgtcgtagtgggtaaagctccctcataggagggagcatcagag

SEQ ID NO: 14450 - RNA, 90 nt, synthetic construct
  misc_feature 1..90: note = engineered ribonucleic acid scaffold (ERS) sequence
  source 1..90: mol_type = other RNA
actggcgcttctatctgattactctgaggagccatcaccagcgactatgtcgtagtgggtaaagctccctcataggagggagcatcagag

SEQ ID NO: 14451 - RNA, 89 nt, synthetic construct
  misc_feature 1..89: note = engineered ribonucleic acid scaffold (ERS) sequence
  source 1..89: mol_type = other RNA
actggcgcttctatctgattactctgatagccatcaccagcgactatgtcgtagtgggtaaagctccctcataggagggagcatcagag

SEQ ID NO: 14452 - RNA, 90 nt, synthetic construct
  misc_feature 1..90: note = engineered ribonucleic acid scaffold (ERS) sequence
  source 1..90: mol_type = other RNA
actggcgcttctatctgattactctgagctgccatcaccagcgactatgtcgtagtgggtaaagctccctcataggagggagcatcagag

SEQ ID NO: 14453 - RNA, 90 nt, synthetic construct
  misc_feature 1..90: note = engineered ribonucleic acid scaffold (ERS) sequence
  source 1..90: mol_type = other RNA
actggcacttctatctgattactctgagtagccatcaccagcgactatgtcgtagtgggtaaagctccctcataggagggagcatcagag

SEQ ID NO: 14454 - RNA, 90 nt, synthetic construct
  misc_feature 1..90: note = engineered ribonucleic acid scaffold (ERS) sequence
  source 1..90: mol_type = other RNA
actggcgcttctatctgattactctgagtagccatcaccagcgactatgtcgtagtgggtaaagctccctcataggagggagcatcagag

SEQ ID NO: 14455 - RNA, 89 nt, synthetic construct
  misc_feature 1..89: note = engineered ribonucleic acid scaffold (ERS) sequence
  source 1..89: mol_type = other RNA
actggcgcttctatctgattactctgagcaccatcaccagcgactatgtcgtagtgggtaaagctccctcataggagggagcatcagag

SEQ ID NO: 14456 - RNA, 89 nt, synthetic construct
  misc_feature 1..89: note = engineered ribonucleic acid scaffold (ERS) sequence
  source 1..89: mol_type = other RNA
actggcacttctatctgattactctgagcgccatcaccagcgactatgtcgtagtgggtaaagctccctcataggagggagcatcagag

SEQ ID NO: 14457 - RNA, 89 nt, synthetic construct
  misc_feature 1..89: note = engineered ribonucleic acid scaffold (ERS) sequence
  source 1..89: mol_type = other RNA
actggcgcttctatctgattactctgagggccatcaccagcgactatgtcgtagtgggtaaagctccctcataggagggagcatcagag

SEQ ID NO: 14458 - RNA, 89 nt, synthetic construct
  misc_feature 1..89: note = engineered ribonucleic acid scaffold (ERS) sequence
  source 1..89: mol_type = other RNA
actggcgcttctatctgattactctgagtgccgtcaccagcgactatgtcgtagtgggtaaagctccctcataggagggagcatcagag

SEQ ID NO: 14459 - RNA, 89 nt, synthetic construct
  misc_feature 1..89: note = engineered ribonucleic acid scaffold (ERS) sequence
  source 1..89: mol_type = other RNA
actggcacttctatctgattactctgagtgccatcaccagcgactatgtcgtagtgggtaaagctccctcataggagggagcatcagag

SEQ ID NO: 14460 - RNA, 89 nt, synthetic construct
  misc_feature 1..89: note = engineered ribonucleic acid scaffold (ERS) sequence
  source 1..89: mol_type = other RNA
actggcgcttctatctgattactctgagaaccatcaccagcgactatgtcgtagtgggtaaagctccctcataggagggagcatcagag

SEQ ID NO: 14461 - RNA, 89 nt, synthetic construct
  misc_feature 1..89: note = engineered ribonucleic acid scaffold (ERS) sequence
  source 1..89: mol_type = other RNA
actggcgcttctatctgattactctgagagccgtcaccagcgactatgtcgtagtgggtaaagctccctcataggagggagcatcagag

SEQ ID NO: 14462 - RNA, 89 nt, synthetic construct
  misc_feature 1..89: note = engineered ribonucleic acid scaffold (ERS) sequence
  source 1..89: mol_type = other RNA
actggcgcttctatctgattactctgagagccttcaccagcgactatgtcgtagtgggtaaagctccctcataggagggagcatcagag

SEQ ID NO: 14463 - RNA, 89 nt, synthetic construct
  misc_feature 1..89: note = engineered ribonucleic acid scaffold (ERS) sequence
  source 1..89: mol_type = other RNA
actggggcttctatctgattactctgagacccatcaccagcgactatgtcgtagtgggtaaagctccctcataggagggagcatcagag

SEQ ID NO: 14464 - RNA, 89 nt, synthetic construct
  misc_feature 1..89: note = engineered ribonucleic acid scaffold (ERS) sequence
  source 1..89: mol_type = other RNA
actggtgcttctatctgattactctgagagccatcaccagcgactatgtcgtagtgggtaaagctccctcataggagggagcatcagag

SEQ ID NO: 14465 - RNA, 89 nt, synthetic construct
  misc_feature 1..89: note = engineered ribonucleic acid scaffold (ERS) sequence
  source 1..89: mol_type = other RNA
actgggccttctatctgattactctgaggcccatcaccagcgactatgtcgtagtgggtaaagctccctcataggagggagcatcagag

SEQ ID NO: 14466 - RNA, 90 nt, synthetic construct
  misc_feature 1..90: note = engineered ribonucleic acid scaffold (ERS) sequence
  source 1..90: mol_type = other RNA
actggcccttctatctgattactctgaggagccatcaccagcgactatgtcgtagtgggtaaagctccctcataggagggagcatcagag

SEQ ID NO: 14467 - RNA, 89 nt, synthetic construct
  misc_feature 1..89: note = engineered ribonucleic acid scaffold (ERS) sequence
  source 1..89: mol_type = other RNA
actggcccttctatctgattactctgagggccatcaccagcgactatgtcgtagtgggtaaagctccctcataggagggagcatcagag

SEQ ID NO: 14468 - RNA, 89 nt, synthetic construct
  misc_feature 1..89: note = engineered ribonucleic acid scaffold (ERS) sequence
  source 1..89: mol_type = other RNA
actggcccttctatctgattactctgagtgccatcaccagcgactatgtcgtagtgggtaaagctccctcataggagggagcatcagag

SEQ ID NO: 14469 - RNA, 89 nt, synthetic construct
  misc_feature 1..89: note = engineered ribonucleic acid scaffold (ERS) sequence
  source 1..89: mol_type = other RNA
actggcccttctatctgattactctgagagccatcaccagcgactatgtcgtagtgggtaaagctccctcataggagggagcatcagag

SEQ ID NO: 14470 - RNA, 90 nt, synthetic construct
  misc_feature 1..90: note = engineered ribonucleic acid scaffold (ERS) sequence
  source 1..90: mol_type = other RNA
actggcgcttctatctgattactctgagcagccatcaccagcgactatgtcgtagtgggtaaagctccctcataggagggagcatcagag

SEQ ID NO: 14471 - RNA, 89 nt, synthetic construct; identical to SEQ ID NO: 891
  misc_feature 1..89: note = engineered ribonucleic acid scaffold (ERS) sequence
  source 1..89: mol_type = other RNA

SEQ ID NO: 14472 - RNA, 89 nt, synthetic construct
  misc_feature 1..89: note = engineered ribonucleic acid scaffold (ERS) sequence
  source 1..89: mol_type = other RNA
actggcgcttctatctgattactctgagtgccatcaccagcgactatgtcgtagtgggtaaagctccctcataggagggagcatcagag

SEQ ID NO: 14473 - RNA, 89 nt, synthetic construct
  misc_feature 1..89: note = engineered ribonucleic acid scaffold (ERS) sequence
  source 1..89: mol_type = other RNA
actggcgcttctatctgattactctgagagccatcaccagcgactatgtcgtagtgggtaaagctccctcataggagggagcatcagag

SEQ ID NO: 14474 - RNA, 89 nt, synthetic construct
  misc_feature 1..89: note = engineered ribonucleic acid scaffold (ERS) sequence
  source 1..89: mol_type = other RNA
actggctcttctatctgattactctgagcgccatcaccagcgactatgtcgtagtgggtaaagctccctcataggagggagcatcagag

SEQ ID NO: 14475 - RNA, 89 nt, synthetic construct
  misc_feature 1..89: note = engineered ribonucleic acid scaffold (ERS) sequence
  source 1..89: mol_type = other RNA
actggctcttctatctgattactctgagggccatcaccagcgactatgtcgtagtgggtaaagctccctcataggagggagcatcagag

SEQ ID NO: 14476 - RNA, 89 nt, synthetic construct
  misc_feature 1..89: note = engineered ribonucleic acid scaffold (ERS) sequence
  source 1..89: mol_type = other RNA
actggctcttctatctgattactctgagtgccatcaccagcgactatgtcgtagtgggtaaagctccctcataggagggagcatcagag

SEQ ID NO: 14477 - RNA, 89 nt, synthetic construct
  misc_feature 1..89: note = engineered ribonucleic acid scaffold (ERS) sequence
  source 1..89: mol_type = other RNA
actggctcttctatctgattactctgagagccatcaccagcgactatgtcgtagtgggtaaagctccctcataggagggagcatcagag

SEQ ID NO: 14478 - RNA, 89 nt, synthetic construct
  misc_feature 1..89: note = engineered ribonucleic acid scaffold (ERS) sequence
  source 1..89: mol_type = other RNA
actggcggttctatctgattactctgagcgccatcaccagcgactatgtcgtagtgggtaaagctccctcataggagggagcatcagag

SEQ ID NO: 14479 - RNA, 89 nt, synthetic construct
  misc_feature 1..89: note = engineered ribonucleic acid scaffold (ERS) sequence
  source 1..89: mol_type = other RNA
actggcggttctatctgattactctgagagccatcaccagcgactatgtcgtagtgggtaaagctccctcataggagggagcatcagag

SEQ ID NO: 14480 - RNA, 89 nt, synthetic construct
  misc_feature 1..89: note = engineered ribonucleic acid scaffold (ERS) sequence
  source 1..89: mol_type = other RNA
acacacggttctatctgattactctgccgtgttcaccagcgactatgtcgtagtgggtaaagctccctcttcaggagggagcatcagag

SEQ ID NO: 14481 - RNA, 89 nt, synthetic construct
  misc_feature 1..89: note = engineered ribonucleic acid scaffold (ERS) sequence
  source 1..89: mol_type = other RNA
acactggtttctatctgattactctgaccagttcaccagcgactatgtcgtagtgggtaaagctccctcttcaggagggagcatcagag

SEQ ID NO: 14482 - RNA, 89 nt, synthetic construct
  misc_feature 1..89: note = engineered ribonucleic acid scaffold (ERS) sequence
  source 1..89: mol_type = other RNA
acaggccgttctatctgattactctgcggccttcaccagcgactatgtcgtagtgggtaaagctccctcttcaggagggagcatcagag

SEQ ID NO: 14483 - RNA, 89 nt, synthetic construct
  misc_feature 1..89: note = engineered ribonucleic acid scaffold (ERS) sequence
  source 1..89: mol_type = other RNA
acaggtccttctatctgattactctgggaccttcaccagcgactatgtcgtagtgggtaaagctccctcttcaggagggagcatcagag

SEQ ID NO: 14484 - RNA, 89 nt, synthetic construct
  misc_feature 1..89: note = engineered ribonucleic acid scaffold (ERS) sequence
  source 1..89: mol_type = other RNA
accagcaattctatctgattactctgttgctgtcaccagcgactatgtcgtagtgggtaaagctccctcttcaggagggagcatcagag

SEQ ID NO: 14485 - RNA, 89 nt, synthetic construct
  misc_feature 1..89: note = engineered ribonucleic acid scaffold (ERS) sequence
  source 1..89: mol_type = other RNA
accgagacttctatctgattactctgggctcgtcaccagcgactatgtcgtagtgggtaaagctccctcttcaggagggagcatcagag

SEQ ID NO: 14486 - RNA, 89 nt, synthetic construct
  misc_feature 1..89: note = engineered ribonucleic acid scaffold (ERS) sequence
  source 1..89: mol_type = other RNA
acctgtagttctatctgattactctgctacagtcaccagcgactatgtcgtagtgggtaaagctccctcttcaggagggagcatcagag

SEQ ID NO: 14487 - RNA, 89 nt, synthetic construct
  misc_feature 1..89: note = engineered ribonucleic acid scaffold (ERS) sequence
  source 1..89: mol_type = other RNA
acgagcacttctatctgattactctggggctctcaccagcgactatgtcgtagtgggtaaagctccctcttcaggagggagcatcagag

SEQ ID NO: 14488 - RNA, 89 nt, synthetic construct
  misc_feature 1..89: note = engineered ribonucleic acid scaffold (ERS) sequence
  source 1..89: mol_type = other RNA
acgaggtgttctatctgattactctgcacctctcaccagcgactatgtcgtagtgggtaaagctccctcttcaggagggagcatcagag

SEQ ID NO: 14489 - RNA, 89 nt, synthetic construct
  misc_feature 1..89: note = engineered ribonucleic acid scaffold (ERS) sequence
  source 1..89: mol_type = other RNA
acgggactttctatctgattactctgagtccctcaccagcgactatgtcgtagtgggtaaagctccctcttcaggagggagcatcagag

SEQ ID NO: 14490 - RNA, 89 nt, synthetic construct
  misc_feature 1..89: note = engineered ribonucleic acid scaffold (ERS) sequence
  source 1..89: mol_type = other RNA
acgggcaattctatctgattactctgttgccctcaccagcgactatgtcgtagtgggtaaagctccctcttcaggagggagcatcagag

SEQ ID NO: 14491 - RNA, 89 nt, synthetic construct
  misc_feature 1..89: note = engineered ribonucleic acid scaffold (ERS) sequence
  source 1..89: mol_type = other RNA
actgtgcgttctatctgattactctgcgcacatcaccagcgactatgtcgtagtgggtaaagctccctcttcaggagggagcatcagag

SEQ ID NO: 14492 - RNA, 90 nt, synthetic construct
  misc_feature 1..90: note = engineered ribonucleic acid scaffold (ERS) sequence
  source 1..90: mol_type = other RNA
actggcgcttctatctgattactctgggcgccatcaccagcgactatgtcgtagtgggtaaagctccctcttcaggagggagcatcagag

SEQ ID NO: 14493 - RNA, 90 nt, synthetic construct
  misc_feature 1..90: note = engineered ribonucleic acid scaffold (ERS) sequence
  source 1..90: mol_type = other RNA
actggcgcttctatctgattactctgggagccatcaccagcgactatgtcgtagtgggtaaagctccctcttcaggagggagcatcagag

SEQ ID NO: 14494 - RNA, 90 nt, synthetic construct
  misc_feature 1..90: note = engineered ribonucleic acid scaffold (ERS) sequence
  source 1..90: mol_type = other RNA
actggcgcttctatctgattactctgtgagccatcaccagcgactatgtcgtagtgggtaaagctccctcttcaggagggagcatcagag

SEQ ID NO: 14495 - RNA, 91 nt, synthetic construct
  misc_feature 1..91: note = engineered ribonucleic acid scaffold (ERS) sequence
  source 1..91: mol_type = other RNA
actggcgcttctatctgattactctgaggagccatcaccagcgactatgtcgtagtgggtaaagctccctcttcaggagggagcatcagag

SEQ ID NO: 14496 - RNA, 90 nt, synthetic construct
  misc_feature 1..90: note = engineered ribonucleic acid scaffold (ERS) sequence
  source 1..90: mol_type = other RNA
actggcgcttctatctgattactctgatagccatcaccagcgactatgtcgtagtgggtaaagctccctcttcaggagggagcatcagag

SEQ ID NO: 14497 - RNA, 91 nt, synthetic construct
  misc_feature 1..91: note = engineered ribonucleic acid scaffold (ERS) sequence
  source 1..91: mol_type = other RNA
actggcgcttctatctgattactctgagctgccatcaccagcgactatgtcgtagtgggtaaagctccctcttcaggagggagcatcagag

SEQ ID NO: 14498 - RNA, 91 nt, synthetic construct
  misc_feature 1..91: note = engineered ribonucleic acid scaffold (ERS) sequence
  source 1..91: mol_type = other RNA
actggcacttctatctgattactctgagtagccatcaccagcgactatgtcgtagtgggtaaagctccctcttcaggagggagcatcagag

SEQ ID NO: 14499 - RNA, 91 nt, synthetic construct
  misc_feature 1..91: note = engineered ribonucleic acid scaffold (ERS) sequence
  source 1..91: mol_type = other RNA
actggcgcttctatctgattactctgagtagccatcaccagcgactatgtcgtagtgggtaaagctccctcttcaggagggagcatcagag

SEQ ID NO: 14500 - RNA, 90 nt, synthetic construct
  misc_feature 1..90: note = engineered ribonucleic acid scaffold (ERS) sequence
  source 1..90: mol_type = other RNA
actggcgcttctatctgattactctgagcaccatcaccagcgactatgtcgtagtgggtaaagctccctcttcaggagggagcatcagag

SEQ ID NO: 14501 - RNA, 90 nt, synthetic construct
  misc_feature 1..90: note = engineered ribonucleic acid scaffold (ERS) sequence
  source 1..90: mol_type = other RNA
actggcacttctatctgattactctgagcgccatcaccagcgactatgtcgtagtgggtaaagctccctcttcaggagggagcatcagag

SEQ ID NO: 14502 - RNA, 90 nt, synthetic construct
  misc_feature 1..90: note = engineered ribonucleic acid scaffold (ERS) sequence
  source 1..90: mol_type = other RNA
actggcgcttctatctgattactctgagggccatcaccagcgactatgtcgtagtgggtaaagctccctcttcaggagggagcatcagag

SEQ ID NO: 14503 - RNA, 90 nt, synthetic construct
  misc_feature 1..90: note = engineered ribonucleic acid scaffold (ERS) sequence
  source 1..90: mol_type = other RNA
actggcgcttctatctgattactctgagtgccgtcaccagcgactatgtcgtagtgggtaaagctccctcttcaggagggagcatcagag

SEQ ID NO: 14504 - RNA, 90 nt, synthetic construct
  misc_feature 1..90: note = engineered ribonucleic acid scaffold (ERS) sequence
  source 1..90: mol_type = other RNA
actggcacttctatctgattactctgagtgccatcaccagcgactatgtcgtagtgggtaaagctccctcttcaggagggagcatcagag

SEQ ID NO: 14505 - RNA, 90 nt, synthetic construct
  misc_feature 1..90: note = engineered ribonucleic acid scaffold (ERS) sequence
  source 1..90: mol_type = other RNA
actggcgcttctatctgattactctgagaaccatcaccagcgactatgtcgtagtgggtaaagctccctcttcaggagggagcatcagag

SEQ ID NO: 14506 - RNA, 90 nt, synthetic construct
  misc_feature 1..90: note = engineered ribonucleic acid scaffold (ERS) sequence
  source 1..90: mol_type = other RNA
actggcgcttctatctgattactctgagagccgtcaccagcgactatgtcgtagtgggtaaagctccctcttcaggagggagcatcagag

SEQ ID NO: 14507 - RNA, 90 nt, synthetic construct
  misc_feature 1..90: note = engineered ribonucleic acid scaffold (ERS) sequence
  source 1..90: mol_type = other RNA
actggcgcttctatctgattactctgagagccttcaccagcgactatgtcgtagtgggtaaagctccctcttcaggagggagcatcagag

SEQ ID NO: 14508 - RNA, 90 nt, synthetic construct
  misc_feature 1..90: note = engineered ribonucleic acid scaffold (ERS) sequence
  source 1..90: mol_type = other RNA
actggggcttctatctgattactctgagacccatcaccagcgactatgtcgtagtgggtaaagctccctcttcaggagggagcatcagag

SEQ ID NO: 14509 - RNA, 90 nt, synthetic construct
  misc_feature 1..90: note = engineered ribonucleic acid scaffold (ERS) sequence
  source 1..90: mol_type = other RNA
actggtgcttctatctgattactctgagagccatcaccagcgactatgtcgtagtgggtaaagctccctcttcaggagggagcatcagag

SEQ ID NO: 14510 - RNA, 90 nt, synthetic construct; identical to SEQ ID NO: 172
  misc_feature 1..90: note = engineered ribonucleic acid scaffold (ERS) sequence
  source 1..90: mol_type = other RNA

SEQ ID NO: 14511 - RNA, 91 nt, synthetic construct
  misc_feature 1..91: note = engineered ribonucleic acid scaffold (ERS) sequence
  source 1..91: mol_type = other RNA
actggcccttctatctgattactctgaggagccatcaccagcgactatgtcgtagtgggtaaagctccctcttcaggagggagcatcagag

SEQ ID NO: 14512 - RNA, 90 nt, synthetic construct
  misc_feature 1..90: note = engineered ribonucleic acid scaffold (ERS) sequence
  source 1..90: mol_type = other RNA
actggcccttctatctgattactctgagggccatcaccagcgactatgtcgtagtgggtaaagctccctcttcaggagggagcatcagag

SEQ ID NO: 14513 - RNA, 90 nt, synthetic construct
  misc_feature 1..90: note = engineered ribonucleic acid scaffold (ERS) sequence
  source 1..90: mol_type = other RNA
actggcccttctatctgattactctgagtgccatcaccagcgactatgtcgtagtgggtaaagctccctcttcaggagggagcatcagag

SEQ ID NO: 14514 - RNA, 90 nt, synthetic construct
  misc_feature 1..90: note = engineered ribonucleic acid scaffold (ERS) sequence
  source 1..90: mol_type = other RNA
actggcccttctatctgattactctgagagccatcaccagcgactatgtcgtagtgggtaaagctccctcttcaggagggagcatcagag

SEQ ID NO: 14515 - RNA, 91 nt, synthetic construct
  misc_feature 1..91: note = engineered ribonucleic acid scaffold (ERS) sequence
  source 1..91: mol_type = other RNA
actggcgcttctatctgattactctgagcagccatcaccagcgactatgtcgtagtgggtaaagctccctcttcaggagggagcatcagag

SEQ ID NO: 14516 - RNA, 90 nt, synthetic construct; identical to SEQ ID NO: 906
  misc_feature 1..90: note = engineered ribonucleic acid scaffold (ERS) sequence
  source 1..90: mol_type = other RNA

SEQ ID NO: 14517 - RNA, 90 nt, synthetic construct
  misc_feature 1..90: note = engineered ribonucleic acid scaffold (ERS) sequence
  source 1..90: mol_type = other RNA
actggcgcttctatctgattactctgagtgccatcaccagcgactatgtcgtagtgggtaaagctccctcttcaggagggagcatcagag

SEQ ID NO: 14518 - RNA, 90 nt, synthetic construct
  misc_feature 1..90: note = engineered ribonucleic acid scaffold (ERS) sequence
  source 1..90: mol_type = other RNA
actggcgcttctatctgattactctgagagccatcaccagcgactatgtcgtagtgggtaaagctccctcttcaggagggagcatcagag

SEQ ID NO: 14519 - RNA, 90 nt, synthetic construct
  misc_feature 1..90: note = engineered ribonucleic acid scaffold (ERS) sequence
  source 1..90: mol_type = other RNA
actggctcttctatctgattactctgagcgccatcaccagcgactatgtcgtagtgggtaaagctccctcttcaggagggagcatcagag

SEQ ID NO: 14520 - RNA, 90 nt, synthetic construct
  misc_feature 1..90: note = engineered ribonucleic acid scaffold (ERS) sequence
  source 1..90: mol_type = other RNA
actggctcttctatctgattactctgagggccatcaccagcgactatgtcgtagtgggtaaagctccctcttcaggagggagcatcagag

SEQ ID NO: 14521 - RNA, 90 nt, synthetic construct
  misc_feature 1..90: note = engineered ribonucleic acid scaffold (ERS) sequence
  source 1..90: mol_type = other RNA
actggctcttctatctgattactctgagtgccatcaccagcgactatgtcgtagtgggtaaagctccctcttcaggagggagcatcagag

SEQ ID NO: 14522 - RNA, 90 nt, synthetic construct
  misc_feature 1..90: note = engineered ribonucleic acid scaffold (ERS) sequence
  source 1..90: mol_type = other RNA
actggctcttctatctgattactctgagagccatcaccagcgactatgtcgtagtgggtaaagctccctcttcaggagggagcatcagag

SEQ ID NO: 14523 - RNA, 90 nt, synthetic construct
  misc_feature 1..90: note = engineered ribonucleic acid scaffold (ERS) sequence
  source 1..90: mol_type = other RNA
actggcggttctatctgattactctgagcgccatcaccagcgactatgtcgtagtgggtaaagctccctcttcaggagggagcatcagag

SEQ ID NO: 14524 - RNA, 90 nt, synthetic construct
  misc_feature 1..90: note = engineered ribonucleic acid scaffold (ERS) sequence
  source 1..90: mol_type = other RNA
actggcggttctatctgattactctgagagccatcaccagcgactatgtcgtagtgggtaaagctccctcttcaggagggagcatcagag

SEQ ID NO: 14525 - RNA, 88 nt, synthetic construct
  misc_feature 1..88: note = engineered ribonucleic acid scaffold (ERS) sequence
  source 1..88: mol_type = other RNA
acacacggttctatctgattactctgccgtgttcaccagcgactatgtcgtagtgggtaaagctccctcttcggagagtgcatcagag

SEQ ID NO: 14526 - RNA, 88 nt, synthetic construct
  misc_feature 1..88: note = engineered ribonucleic acid scaffold (ERS) sequence
  source 1..88: mol_type = other RNA
acactggtttctatctgattactctgaccagttcaccagcgactatgtcgtagtgggtaaagctccctcttcggagagtgcatcagag

SEQ ID NO: 14527 - RNA, 88 nt, synthetic construct
  misc_feature 1..88: note = engineered ribonucleic acid scaffold (ERS) sequence
  source 1..88: mol_type = other RNA
acaggccgttctatctgattactctgcggccttcaccagcgactatgtcgtagtgggtaaagctccctcttcggagagtgcatcagag

SEQ ID NO: 14528 - RNA, 88 nt, synthetic construct
  misc_feature 1..88: note = engineered ribonucleic acid scaffold (ERS) sequence
  source 1..88: mol_type = other RNA
acaggtccttctatctgattactctgggaccttcaccagcgactatgtcgtagtgggtaaagctccctcttcggagagtgcatcagag

SEQ ID NO: 14529 - RNA, 88 nt, synthetic construct
  misc_feature 1..88: note = engineered ribonucleic acid scaffold (ERS) sequence
  source 1..88: mol_type = other RNA
accagcaattctatctgattactctgttgctgtcaccagcgactatgtcgtagtgggtaaagctccctcttcggagagtgcatcagag

SEQ ID NO: 14530 - RNA, 88 nt, synthetic construct
  misc_feature 1..88: note = engineered ribonucleic acid scaffold (ERS) sequence
  source 1..88: mol_type = other RNA
accgagacttctatctgattactctgggctcgtcaccagcgactatgtcgtagtgggtaaagctccctcttcggagagtgcatcagag

SEQ ID NO: 14531 - RNA, 88 nt, synthetic construct
  misc_feature 1..88: note = engineered ribonucleic acid scaffold (ERS) sequence
  source 1..88: mol_type = other RNA
acctgtagttctatctgattactctgctacagtcaccagcgactatgtcgtagtgggtaaagctccctcttcggagagtgcatcagag

SEQ ID NO: 14532 - RNA, 88 nt, synthetic construct
  misc_feature 1..88: note = engineered ribonucleic acid scaffold (ERS) sequence
  source 1..88: mol_type = other RNA
acgagcacttctatctgattactctggggctctcaccagcgactatgtcgtagtgggtaaagctccctcttcggagagtgcatcagag

SEQ ID NO: 14533 - RNA, 88 nt, synthetic construct
  misc_feature 1..88: note = engineered ribonucleic acid scaffold (ERS) sequence
  source 1..88: mol_type = other RNA
acgaggtgttctatctgattactctgcacctctcaccagcgactatgtcgtagtgggtaaagctccctcttcggagagtgcatcagag

SEQ ID NO: 14534 - RNA, 88 nt, synthetic construct
  misc_feature 1..88: note = engineered ribonucleic acid scaffold (ERS) sequence
  source 1..88: mol_type = other RNA
acgggactttctatctgattactctgagtccctcaccagcgactatgtcgtagtgggtaaagctccctcttcggagagtgcatcagag

SEQ ID NO: 14535 - RNA, 88 nt, synthetic construct
  misc_feature 1..88: note = engineered ribonucleic acid scaffold (ERS) sequence
  source 1..88: mol_type = other RNA
acgggcaattctatctgattactctgttgccctcaccagcgactatgtcgtagtgggtaaagctccctcttcggagagtgcatcagag

SEQ ID NO: 14536 - RNA, 88 nt, synthetic construct
  misc_feature 1..88: note = engineered ribonucleic acid scaffold (ERS) sequence
  source 1..88: mol_type = other RNA
actgtgcgttctatctgattactctgcgcacatcaccagcgactatgtcgtagtgggtaaagctccctcttcggagagtgcatcagag

SEQ ID NO: 14537 - RNA, 89 nt, synthetic construct
  misc_feature 1..89: note = engineered ribonucleic acid scaffold (ERS) sequence
  source 1..89: mol_type = other RNA
actggcgcttctatctgattactctgggcgccatcaccagcgactatgtcgtagtgggtaaagctccctcttcggagagtgcatcagag

SEQ ID NO: 14538 - RNA, 89 nt, synthetic construct
  misc_feature 1..89: note = engineered ribonucleic acid scaffold (ERS) sequence
  source 1..89: mol_type = other RNA
actggcgcttctatctgattactctgggagccatcaccagcgactatgtcgtagtgggtaaagctccctcttcggagagtgcatcagag

SEQ ID NO: 14539 - RNA, 89 nt, synthetic construct
  misc_feature 1..89: note = engineered ribonucleic acid scaffold (ERS) sequence
  source 1..89: mol_type = other RNA
actggcgcttctatctgattactctgtgagccatcaccagcgactatgtcgtagtgggtaaagctccctcttcggagagtgcatcagag

SEQ ID NO: 14540 - RNA, 90 nt, synthetic construct
  misc_feature 1..90: note = engineered ribonucleic acid scaffold (ERS) sequence
  source 1..90: mol_type = other RNA
actggcgcttctatctgattactctgaggagccatcaccagcgactatgtcgtagtgggtaaagctccctcttcggagagtgcatcagag

SEQ ID NO: 14541 - RNA, 89 nt, synthetic construct
  misc_feature 1..89: note = engineered ribonucleic acid scaffold (ERS) sequence
  source 1..89: mol_type = other RNA
actggcgcttctatctgattactctgatagccatcaccagcgactatgtcgtagtgggtaaagctccctcttcggagagtgcatcagag

SEQ ID NO: 14542 - RNA, 90 nt, synthetic construct
  misc_feature 1..90: note = engineered ribonucleic acid scaffold (ERS) sequence
  source 1..90: mol_type = other RNA
actggcgcttctatctgattactctgagctgccatcaccagcgactatgtcgtagtgggtaaagctccctcttcggagagtgcatcagag

SEQ ID NO: 14543 - RNA, 90 nt, synthetic construct
  misc_feature 1..90: note = engineered ribonucleic acid scaffold (ERS) sequence
  source 1..90: mol_type = other RNA
actggcacttctatctgattactctgagtagccatcaccagcgactatgtcgtagtgggtaaagctccctcttcggagagtgcatcagag

SEQ ID NO: 14544 - RNA, 90 nt, synthetic construct
  misc_feature 1..90: note = engineered ribonucleic acid scaffold (ERS) sequence
  source 1..90: mol_type = other RNA
actggcgcttctatctgattactctgagtagccatcaccagcgactatgtcgtagtgggtaaagctccctcttcggagagtgcatcagag

SEQ ID NO: 14545 - RNA, 89 nt, synthetic construct
  misc_feature 1..89: note = engineered ribonucleic acid scaffold (ERS) sequence
  source 1..89: mol_type = other RNA
actggcgcttctatctgattactctgagcaccatcaccagcgactatgtcgtagtgggtaaagctccctcttcggagagtgcatcagag

SEQ ID NO: 14546 - RNA, 89 nt, synthetic construct
  misc_feature 1..89: note = engineered ribonucleic acid scaffold (ERS) sequence
  source 1..89: mol_type = other RNA
actggcacttctatctgattactctgagcgccatcaccagcgactatgtcgtagtgggtaaagctccctcttcggagagtgcatcagag

SEQ ID NO: 14547 - RNA, 89 nt, synthetic construct
  misc_feature 1..89: note = engineered ribonucleic acid scaffold (ERS) sequence
  source 1..89: mol_type = other RNA
actggcgcttctatctgattactctgagggccatcaccagcgactatgtcgtagtgggtaaagctccctcttcggagagtgcatcagag

SEQ ID NO: 14548 - RNA, 89 nt, synthetic construct
  misc_feature 1..89: note = engineered ribonucleic acid scaffold (ERS) sequence
  source 1..89: mol_type = other RNA
actggcgcttctatctgattactctgagtgccgtcaccagcgactatgtcgtagtgggtaaagctccctcttcggagagtgcatcagag

SEQ ID NO: 14549 - RNA, 89 nt, synthetic construct
  misc_feature 1..89: note = engineered ribonucleic acid scaffold (ERS) sequence
  source 1..89: mol_type = other RNA
actggcacttctatctgattactctgagtgccatcaccagcgactatgtcgtagtgggtaaagctccctcttcggagagtgcatcagag

SEQ ID NO: 14550 - RNA, 89 nt, synthetic construct
  misc_feature 1..89: note = engineered ribonucleic acid scaffold (ERS) sequence
  source 1..89: mol_type = other RNA
actggcgcttctatctgattactctgagaaccatcaccagcgactatgtcgtagtgggtaaagctccctcttcggagagtgcatcagag

SEQ ID NO: 14551 - RNA, 89 nt, synthetic construct
  misc_feature 1..89: note = engineered ribonucleic acid scaffold (ERS) sequence
  source 1..89: mol_type = other RNA
actggcgcttctatctgattactctgagagccgtcaccagcgactatgtcgtagtgggtaaagctccctcttcggagagtgcatcagag

SEQ ID NO: 14552 - RNA, 89 nt, synthetic construct
  misc_feature 1..89: note = engineered ribonucleic acid scaffold (ERS) sequence
  source 1..89: mol_type = other RNA
actggcgcttctatctgattactctgagagccttcaccagcgactatgtcgtagtgggtaaagctccctcttcggagagtgcatcagag

SEQ ID NO: 14553 - RNA, 89 nt, synthetic construct
  misc_feature 1..89: note = engineered ribonucleic acid scaffold (ERS) sequence
  source 1..89: mol_type = other RNA
actggggcttctatctgattactctgagacccatcaccagcgactatgtcgtagtgggtaaagctccctcttcggagagtgcatcagag

SEQ ID NO: 14554 - RNA, 89 nt, synthetic construct
  misc_feature 1..89: note = engineered ribonucleic acid scaffold (ERS) sequence
  source 1..89: mol_type = other RNA
actggtgcttctatctgattactctgagagccatcaccagcgactatgtcgtagtgggtaaagctccctcttcggagagtgcatcagag

SEQ ID NO: 14555 - RNA, 89 nt, synthetic construct
  misc_feature 1..89: note = engineered ribonucleic acid scaffold (ERS) sequence
  source 1..89: mol_type = other RNA
actgggccttctatctgattactctgaggcccatcaccagcgactatgtcgtagtgggtaaagctccctcttcggagagtgcatcagag

SEQ ID NO: 14556 - RNA, 90 nt, synthetic construct
  misc_feature 1..90: note = engineered ribonucleic acid scaffold (ERS) sequence
  source 1..90: mol_type = other RNA
actggcccttctatctgattactctgaggagccatcaccagcgactatgtcgtagtgggtaaagctccctcttcggagagtgcatcagag

SEQ ID NO: 14557 - RNA, 89 nt, synthetic construct
  misc_feature 1..89: note = engineered ribonucleic acid scaffold (ERS) sequence
  source 1..89: mol_type = other RNA
actggcccttctatctgattactctgagggccatcaccagcgactatgtcgtagtgggtaaagctccctcttcggagagtgcatcagag

SEQ ID NO: 14558 - RNA, 89 nt, synthetic construct
  misc_feature 1..89: note = engineered ribonucleic acid scaffold (ERS) sequence
  source 1..89: mol_type = other RNA
actggcccttctatctgattactctgagtgccatcaccagcgactatgtcgtagtgggtaaagctccctcttcggagagtgcatcagag

SEQ ID NO: 14559 - RNA, 89 nt, synthetic construct
  misc_feature 1..89: note = engineered ribonucleic acid scaffold (ERS) sequence
  source 1..89: mol_type = other RNA
actggcccttctatctgattactctgagagccatcaccagcgactatgtcgtagtgggtaaagctccctcttcggagagtgcatcagag

SEQ ID NO: 14560 - RNA, 90 nt, synthetic construct
  misc_feature 1..90: note = engineered ribonucleic acid scaffold (ERS) sequence
  source 1..90: mol_type = other RNA
actggcgcttctatctgattactctgagcagccatcaccagcgactatgtcgtagtgggtaaagctccctcttcggagagtgcatcagag

SEQ ID NO: 14561 - RNA, 89 nt, synthetic construct; identical to SEQ ID NO: 888
  misc_feature 1..89: note = engineered ribonucleic acid scaffold (ERS) sequence
  source 1..89: mol_type = other RNA

SEQ ID NO: 14562 - RNA, 89 nt, synthetic construct
  misc_feature 1..89: note = engineered ribonucleic acid scaffold (ERS) sequence
  source 1..89: mol_type = other RNA
actggcgcttctatctgattactctgagtgccatcaccagcgactatgtcgtagtgggtaaagctccctcttcggagagtgcatcagag

SEQ ID NO: 14563 - RNA, 89 nt, synthetic construct
  misc_feature 1..89: note = engineered ribonucleic acid scaffold (ERS) sequence
  source 1..89: mol_type = other RNA
actggcgcttctatctgattactctgagagccatcaccagcgactatgtcgtagtgggtaaagctccctcttcggagagtgcatcagag

SEQ ID NO: 14564 - RNA, 89 nt, synthetic construct
  misc_feature 1..89: note = engineered ribonucleic acid scaffold (ERS) sequence
  source 1..89: mol_type = other RNA
actggctcttctatctgattactctgagcgccatcaccagcgactatgtcgtagtgggtaaagctccctcttcggagagtgcatcagag

SEQ ID NO: 14565 - RNA, 89 nt, synthetic construct
  misc_feature 1..89: note = engineered ribonucleic acid scaffold (ERS) sequence
  source 1..89: mol_type = other RNA
actggctcttctatctgattactctgagggccatcaccagcgactatgtcgtagtgggtaaagctccctcttcggagagtgcatcagag

SEQ ID NO: 14566 - RNA, 89 nt, synthetic construct
  misc_feature 1..89: note = engineered ribonucleic acid scaffold (ERS) sequence
  source 1..89: mol_type = other RNA
actggctcttctatctgattactctgagtgccatcaccagcgactatgtcgtagtgggtaaagctccctcttcggagagtgcatcagag

SEQ ID NO: 14567 - RNA, 89 nt, synthetic construct
  misc_feature 1..89: note = engineered ribonucleic acid scaffold (ERS) sequence
  source 1..89: mol_type = other RNA
actggctcttctatctgattactctgagagccatcaccagcgactatgtcgtagtgggtaaagctccctcttcggagagtgcatcagag

SEQ ID NO: 14568 - RNA, 89 nt, synthetic construct
  misc_feature 1..89: note = engineered ribonucleic acid scaffold (ERS) sequence
  source 1..89: mol_type = other RNA
actggcggttctatctgattactctgagcgccatcaccagcgactatgtcgtagtgggtaaagctccctcttcggagagtgcatcagag

SEQ ID NO: 14569 - RNA, 89 nt, synthetic construct
  misc_feature 1..89: note = engineered ribonucleic acid scaffold (ERS) sequence
  source 1..89: mol_type = other RNA
actggcggttctatctgattactctgagagccatcaccagcgactatgtcgtagtgggtaaagctccctcttcggagagtgcatcagag

SEQ ID NO: 14570 - RNA, 88 nt, synthetic construct
  misc_feature 1..88: note = engineered ribonucleic acid scaffold (ERS) sequence
  source 1..88: mol_type = other RNA
acacacggttctatctgattactctgccgtgttcaccagcgactatgtcgtagtgggtaaagctccctcttcggaggaggcatcagag

SEQ ID NO: 14571 - RNA, 88 nt, synthetic construct
  misc_feature 1..88: note = engineered ribonucleic acid scaffold (ERS) sequence
  source 1..88: mol_type = other RNA
acactggtttctatctgattactctgaccagttcaccagcgactatgtcgtagtgggtaaagctccctcttcggaggaggcatcagag

SEQ ID NO: 14572 - RNA, 88 nt, synthetic construct
  misc_feature 1..88: note = engineered ribonucleic acid scaffold (ERS) sequence
  source 1..88: mol_type = other RNA
acaggccgttctatctgattactctgcggccttcaccagcgactatgtcgtagtgggtaaagctccctcttcggaggaggcatcagag

SEQ ID NO: 14573 - RNA, 88 nt, synthetic construct
  misc_feature 1..88: note = engineered ribonucleic acid scaffold (ERS) sequence
  source 1..88: mol_type = other RNA
acaggtccttctatctgattactctgggaccttcaccagcgactatgtcgtagtgggtaaagctccctcttcggaggaggcatcagag

SEQ ID NO: 14574 - RNA, 88 nt, synthetic construct
  misc_feature 1..88: note = engineered ribonucleic acid scaffold (ERS) sequence
  source 1..88: mol_type = other RNA
accagcaattctatctgattactctgttgctgtcaccagcgactatgtcgtagtgggtaaagctccctcttcggaggaggcatcagag

SEQ ID NO: 14575 - RNA, 88 nt, synthetic construct
  misc_feature 1..88: note = engineered ribonucleic acid scaffold (ERS) sequence
  source 1..88: mol_type = other RNA
accgagacttctatctgattactctgggctcgtcaccagcgactatgtcgtagtgggtaaagctccctcttcggaggaggcatcagag

SEQ ID NO: 14576 - RNA, 88 nt, synthetic construct
  misc_feature 1..88: note = engineered ribonucleic acid scaffold (ERS) sequence
  source 1..88: mol_type = other RNA
acctgtagttctatctgattactctgctacagtcaccagcgactatgtcgtagtgggtaaagctccctcttcggaggaggcatcagag

SEQ ID NO: 14577 - RNA, 88 nt, synthetic construct
  misc_feature 1..88: note = engineered ribonucleic acid scaffold (ERS) sequence
  source 1..88: mol_type = other RNA
acgagcacttctatctgattactctggggctctcaccagcgactatgtcgtagtgggtaaagctccctcttcggaggaggcatcagag

SEQ ID NO: 14578 - RNA, 88 nt, synthetic construct
  misc_feature 1..88: note = engineered ribonucleic acid scaffold (ERS) sequence
  source 1..88: mol_type = other RNA
acgaggtgttctatctgattactctgcacctctcaccagcgactatgtcgtagtgggtaaagctccctcttcggaggaggcatcagag

SEQ ID NO: 14579 - RNA, 88 nt, synthetic construct
  misc_feature 1..88: note = engineered ribonucleic acid scaffold (ERS) sequence
  source 1..88: mol_type = other RNA
acgggactttctatctgattactctgagtccctcaccagcgactatgtcgtagtgggtaaagctccctcttcggaggaggcatcagag

SEQ ID NO: 14580 - RNA, 88 nt, synthetic construct
  misc_feature 1..88: note = engineered ribonucleic acid scaffold (ERS) sequence
  source 1..88: mol_type = other RNA
acgggcaattctatctgattactctgttgccctcaccagcgactatgtcgtagtgggtaaagctccctcttcggaggaggcatcagag

SEQ ID NO: 14581 - RNA, 88 nt, synthetic construct
  misc_feature 1..88: note = engineered ribonucleic acid scaffold (ERS) sequence
  source 1..88: mol_type = other RNA
actgtgcgttctatctgattactctgcgcacatcaccagcgactatgtcgtagtgggtaaagctccctcttcggaggaggcatcagag

SEQ ID NO: 14582 - RNA, 89 nt, synthetic construct
  misc_feature 1..89: note = engineered ribonucleic acid scaffold (ERS) sequence
  source 1..89: mol_type = other RNA
actggcgcttctatctgattactctgggcgccatcaccagcgactatgtcgtagtgggtaaagctccctcttcggaggaggcatcagag

SEQ ID NO: 14583 - RNA, 89 nt, synthetic construct
  misc_feature 1..89: note = engineered ribonucleic acid scaffold (ERS) sequence
  source 1..89: mol_type = other RNA
actggcgcttctatctgattactctgggagccatcaccagcgactatgtcgtagtgggtaaagctccctcttcggaggaggcatcagag

SEQ ID NO: 14584 - RNA, 89 nt, synthetic construct
  misc_feature 1..89: note = engineered ribonucleic acid scaffold (ERS) sequence
  source 1..89: mol_type = other RNA
actggcgcttctatctgattactctgtgagccatcaccagcgactatgtcgtagtgggtaaagctccctcttcggaggaggcatcagag

SEQ ID NO: 14585 - RNA, 90 nt, synthetic construct
  misc_feature 1..90: note = engineered ribonucleic acid scaffold (ERS) sequence
  source 1..90: mol_type = other RNA
actggcgcttctatctgattactctgaggagccatcaccagcgactatgtcgtagtgggtaaagctccctcttcggaggaggcatcagag

SEQ ID NO: 14586 - RNA, 89 nt, synthetic construct
  misc_feature 1..89: note = engineered ribonucleic acid scaffold (ERS) sequence
  source 1..89: mol_type = other RNA
actggcgcttctatctgattactctgatagccatcaccagcgactatgtcgtagtgggtaaagctccctcttcggaggaggcatcagag

SEQ ID NO: 14587 - RNA, 90 nt, synthetic construct
  misc_feature 1..90: note = engineered ribonucleic acid scaffold (ERS) sequence
  source 1..90: mol_type = other RNA
actggcgcttctatctgattactctgagctgccatcaccagcgactatgtcgtagtgggtaaagctccctcttcggaggaggcatcagag

SEQ ID NO: 14588 - RNA, 90 nt, synthetic construct
  misc_feature 1..90: note = engineered ribonucleic acid scaffold (ERS) sequence
  source 1..90: mol_type = other RNA
actggcacttctatctgattactctgagtagccatcaccagcgactatgtcgtagtgggtaaagctccctcttcggaggaggcatcagag

SEQ ID NO: 14589 - RNA, 90 nt, synthetic construct
  misc_feature 1..90: note = engineered ribonucleic acid scaffold (ERS) sequence
  source 1..90: mol_type = other RNA
actggcgcttctatctgattactctgagtagccatcaccagcgactatgtcgtagtgggtaaagctccctcttcggaggaggcatcagag

SEQ ID NO: 14590 - RNA, 89 nt, synthetic construct
  misc_feature 1..89: note = engineered ribonucleic acid scaffold (ERS) sequence
  source 1..89: mol_type = other RNA
actggcgcttctatctgattactctgagcaccatcaccagcgactatgtcgtagtgggtaaagctccctcttcggaggaggcatcagag

SEQ ID NO: 14591 - RNA, 89 nt, synthetic construct
  misc_feature 1..89: note = engineered ribonucleic acid scaffold (ERS) sequence
  source 1..89: mol_type = other RNA
actggcacttctatctgattactctgagcgccatcaccagcgactatgtcgtagtgggtaaagctccctcttcggaggaggcatcagag

SEQ ID NO: 14592 - RNA, 89 nt, synthetic construct
  misc_feature 1..89: note = engineered ribonucleic acid scaffold (ERS) sequence
  source 1..89: mol_type = other RNA
actggcgcttctatctgattactctgagggccatcaccagcgactatgtcgtagtgggtaaagctccctcttcggaggaggcatcagag

SEQ ID NO: 14593 - RNA, 89 nt, synthetic construct
  misc_feature 1..89: note = engineered ribonucleic acid scaffold (ERS) sequence
  source 1..89: mol_type = other RNA
actggcgcttctatctgattactctgagtgccgtcaccagcgactatgtcgtagtgggtaaagctccctcttcggaggaggcatcagag

SEQ ID NO: 14594 - RNA, 89 nt, synthetic construct
  misc_feature 1..89: note = engineered ribonucleic acid scaffold (ERS) sequence
  source 1..89: mol_type = other RNA
actggcacttctatctgattactctgagtgccatcaccagcgactatgtcgtagtgggtaaagctccctcttcggaggaggcatcagag

SEQ ID NO: 14595 - RNA, 89 nt, synthetic construct
  misc_feature 1..89: note = engineered ribonucleic acid scaffold (ERS) sequence
  source 1..89: mol_type = other RNA
actggcgcttctatctgattactctgagaaccatcaccagcgactatgtcgtagtgggtaaagctccctcttcggaggaggcatcagag

SEQ ID NO: 14596 - RNA, 89 nt, synthetic construct
  misc_feature 1..89: note = engineered ribonucleic acid scaffold (ERS) sequence
  source 1..89: mol_type = other RNA
actggcgcttctatctgattactctgagagccgtcaccagcgactatgtcgtagtgggtaaagctccctcttcggaggaggcatcagag

SEQ ID NO: 14597 - RNA, 89 nt, synthetic construct
  misc_feature 1..89: note = engineered ribonucleic acid scaffold (ERS) sequence
  source 1..89: mol_type = other RNA
actggcgcttctatctgattactctgagagccttcaccagcgactatgtcgtagtgggtaaagctccctcttcggaggaggcatcagag

SEQ ID NO: 14598 - RNA, 89 nt, synthetic construct
  misc_feature 1..89: note = engineered ribonucleic acid scaffold (ERS) sequence
  source 1..89: mol_type = other RNA
actggggcttctatctgattactctgagacccatcaccagcgactatgtcgtagtgggtaaagctccctcttcggaggaggcatcagag

SEQ ID NO: 14599 - RNA, 89 nt, synthetic construct
  misc_feature 1..89: note = engineered ribonucleic acid scaffold (ERS) sequence
  source 1..89: mol_type = other RNA
actggtgcttctatctgattactctgagagccatcaccagcgactatgtcgtagtgggtaaagctccctcttcggaggaggcatcagag

SEQ ID NO: 14600 - RNA, 89 nt, synthetic construct
  misc_feature 1..89: note = engineered ribonucleic acid scaffold (ERS) sequence
  source 1..89: mol_type = other RNA
actgggccttctatctgattactctgaggcccatcaccagcgactatgtcgtagtgggtaaagctccctcttcggaggaggcatcagag

SEQ ID NO: 14601 - RNA, 90 nt, synthetic construct
  misc_feature 1..90: note = engineered ribonucleic acid scaffold (ERS) sequence
  source 1..90: mol_type = other RNA
actggcccttctatctgattactctgaggagccatcaccagcgactatgtcgtagtgggtaaagctccctcttcggaggaggcatcagag

SEQ ID NO: 14602 - RNA, 89 nt, synthetic construct
  misc_feature 1..89: note = engineered ribonucleic acid scaffold (ERS) sequence
  source 1..89: mol_type = other RNA
actggcccttctatctgattactctgagggccatcaccagcgactatgtcgtagtgggtaaagctccctcttcggaggaggcatcagag

SEQ ID NO: 14603 - RNA, 89 nt, synthetic construct
  misc_feature 1..89: note = engineered ribonucleic acid scaffold (ERS) sequence
  source 1..89: mol_type = other RNA
actggcccttctatctgattactctgagtgccatcaccagcgactatgtcgtagtgggtaaagctccctcttcggaggaggcatcagag

SEQ ID NO: 14604 - RNA, 89 nt, synthetic construct
  misc_feature 1..89: note = engineered ribonucleic acid scaffold (ERS) sequence
  source 1..89: mol_type = other RNA
actggcccttctatctgattactctgagagccatcaccagcgactatgtcgtagtgggtaaagctccctcttcggaggaggcatcagag

SEQ ID NO: 14605 - RNA, 90 nt, synthetic construct
  misc_feature 1..90: note = engineered ribonucleic acid scaffold (ERS) sequence
  source 1..90: mol_type = other RNA
actggcgcttctatctgattactctgagcagccatcaccagcgactatgtcgtagtgggtaaagctccctcttcggaggaggcatcagag

SEQ ID NO: 14606 - RNA, 89 nt, synthetic construct; identical to SEQ ID NO: 887
  misc_feature 1..89: note = engineered ribonucleic acid scaffold (ERS) sequence
  source 1..89: mol_type = other RNA

SEQ ID NO: 14607 - RNA, 89 nt, synthetic construct
  misc_feature 1..89: note = engineered ribonucleic acid scaffold (ERS) sequence
  source 1..89: mol_type = other RNA
actggcgcttctatctgattactctgagtgccatcaccagcgactatgtcgtagtgggtaaagctccctcttcggaggaggcatcagag

SEQ ID NO: 14608 - RNA, 89 nt, synthetic construct
  misc_feature 1..89: note = engineered ribonucleic acid scaffold (ERS) sequence
  source 1..89: mol_type = other RNA
actggcgcttctatctgattactctgagagccatcaccagcgactatgtcgtagtgggtaaagctccctcttcggaggaggcatcagag

SEQ ID NO: 14609 - RNA, 89 nt, synthetic construct
  misc_feature 1..89: note = engineered ribonucleic acid scaffold (ERS) sequence
  source 1..89: mol_type = other RNA
actggctcttctatctgattactctgagcgccatcaccagcgactatgtcgtagtgggtaaagctccctcttcggaggaggcatcagag

SEQ ID NO: 14610 - RNA, 89 nt, synthetic construct
  misc_feature 1..89: note = engineered ribonucleic acid scaffold (ERS) sequence
  source 1..89: mol_type = other RNA
actggctcttctatctgattactctgagggccatcaccagcgactatgtcgtagtgggtaaagctccctcttcggaggaggcatcagag

SEQ ID NO: 14611 - RNA, 89 nt, synthetic construct
  misc_feature 1..89: note = engineered ribonucleic acid scaffold (ERS) sequence
  source 1..89: mol_type = other RNA
actggctcttctatctgattactctgagtgccatcaccagcgactatgtcgtagtgggtaaagctccctcttcggaggaggcatcagag

SEQ ID NO: 14612 - RNA, 89 nt, synthetic construct
  misc_feature 1..89: note = engineered ribonucleic acid scaffold (ERS) sequence
  source 1..89: mol_type = other RNA
actggctcttctatctgattactctgagagccatcaccagcgactatgtcgtagtgggtaaagctccctcttcggaggaggcatcagag

SEQ ID NO: 14613 - RNA, 89 nt, synthetic construct
  misc_feature 1..89: note = engineered ribonucleic acid scaffold (ERS) sequence
  source 1..89: mol_type = other RNA
actggcggttctatctgattactctgagcgccatcaccagcgactatgtcgtagtgggtaaagctccctcttcggaggaggcatcagag

SEQ ID NO: 14614 - RNA, 89 nt, synthetic construct
  misc_feature 1..89: note = engineered ribonucleic acid scaffold (ERS) sequence
  source 1..89: mol_type = other RNA
actggcggttctatctgattactctgagagccatcaccagcgactatgtcgtagtgggtaaagctccctcttcggaggaggcatcagag

SEQ ID NO: 14615 - RNA, 90 nt, synthetic construct
  misc_feature 1..90: note = engineered ribonucleic acid scaffold (ERS) sequence
  source 1..90: mol_type = other RNA
acacacggttctatctgattactctgccgtgttcaccagcgactatgtcgtagtgggtaaagctccctcttcggagggaacgcatcagag

SEQ ID NO: 14616 - RNA, 90 nt, synthetic construct
  misc_feature 1..90: note = engineered ribonucleic acid scaffold (ERS) sequence
  source 1..90: mol_type = other RNA
acactggtttctatctgattactctgaccagttcaccagcgactatgtcgtagtgggtaaagctccctcttcggagggaacgcatcagag

SEQ ID NO: 14617 - RNA, 90 nt, synthetic construct
  misc_feature 1..90: note = engineered ribonucleic acid scaffold (ERS) sequence
  source 1..90: mol_type = other RNA
acaggccgttctatctgattactctgcggccttcaccagcgactatgtcgtagtgggtaaagctccctcttcggagggaacgcatcagag

SEQ ID NO: 14618 - RNA, 90 nt, synthetic construct
  misc_feature 1..90: note = engineered ribonucleic acid scaffold (ERS) sequence
  source 1..90: mol_type = other RNA
acaggtccttctatctgattactctgggaccttcaccagcgactatgtcgtagtgggtaaagctccctcttcggagggaacgcatcagag

SEQ ID NO: 14619 - RNA, 90 nt, synthetic construct
  misc_feature 1..90: note = engineered ribonucleic acid scaffold (ERS) sequence
  source 1..90: mol_type = other RNA
accagcaattctatctgattactctgttgctgtcaccagcgactatgtcgtagtgggtaaagctccctcttcggagggaacgcatcagag

SEQ ID NO: 14620 - RNA, 90 nt, synthetic construct
  misc_feature 1..90: note = engineered ribonucleic acid scaffold (ERS) sequence
  source 1..90: mol_type = other RNA
accgagacttctatctgattactctgggctcgtcaccagcgactatgtcgtagtgggtaaagctccctcttcggagggaacgcatcagag

SEQ ID NO: 14621 - RNA, 90 nt, synthetic construct
  misc_feature 1..90: note = engineered ribonucleic acid scaffold (ERS) sequence
  source 1..90: mol_type = other RNA
acctgtagttctatctgattactctgctacagtcaccagcgactatgtcgtagtgggtaaagctccctcttcggagggaacgcatcagag

SEQ ID NO: 14622 - RNA, 90 nt, synthetic construct
  misc_feature 1..90: note = engineered ribonucleic acid scaffold (ERS) sequence
  source 1..90: mol_type = other RNA
acgagcacttctatctgattactctggggctctcaccagcgactatgtcgtagtgggtaaagctccctcttcggagggaacgcatcagag

SEQ ID NO: 14623 - RNA, 90 nt, synthetic construct
  misc_feature 1..90: note = engineered ribonucleic acid scaffold (ERS) sequence
  source 1..90: mol_type = other RNA
acgaggtgttctatctgattactctgcacctctcaccagcgactatgtcgtagtgggtaaagctccctcttcggagggaacgcatcagag

SEQ ID NO: 14624 - RNA, 90 nt, synthetic construct
  misc_feature 1..90: note = engineered ribonucleic acid scaffold (ERS) sequence
  source 1..90: mol_type = other RNA
acgggactttctatctgattactctgagtccctcaccagcgactatgtcgtagtgggtaaagctccctcttcggagggaacgcatcagag

SEQ ID NO: 14625 - RNA, 90 nt, synthetic construct
  misc_feature 1..90: note = engineered ribonucleic acid scaffold (ERS) sequence
  source 1..90: mol_type = other RNA
acgggcaattctatctgattactctgttgccctcaccagcgactatgtcgtagtgggtaaagctccctcttcggagggaacgcatcagag

SEQ ID NO: 14626 - RNA, 90 nt, synthetic construct
  misc_feature 1..90: note = engineered ribonucleic acid scaffold (ERS) sequence
  source 1..90: mol_type = other RNA
actgtgcgttctatctgattactctgcgcacatcaccagcgactatgtcgtagtgggtaaagctccctcttcggagggaacgcatcagag

SEQ ID NO: 14627 - RNA, 91 nt, synthetic construct
  misc_feature 1..91: note = engineered ribonucleic acid scaffold (ERS) sequence
  source 1..91: mol_type = other RNA
actggcgcttctatctgattactctgggcgccatcaccagcgactatgtcgtagtgggtaaagctccctcttcggagggaacgcatcagag

SEQ ID NO: 14628 - RNA, 91 nt, synthetic construct
  misc_feature 1..91: note = engineered ribonucleic acid scaffold (ERS) sequence
  source 1..91: mol_type = other RNA
actggcgcttctatctgattactctgggagccatcaccagcgactatgtcgtagtgggtaaagctccctcttcggagggaacgcatcagag

SEQ ID NO: 14629 - RNA, 91 nt, synthetic construct
  misc_feature 1..91: note = engineered ribonucleic acid scaffold (ERS) sequence
  source 1..91: mol_type = other RNA
actggcgcttctatctgattactctgtgagccatcaccagcgactatgtcgtagtgggtaaagctccctcttcggagggaacgcatcagag

SEQ ID NO: 14630 - RNA, 92 nt, synthetic construct
  misc_feature 1..92: note = engineered ribonucleic acid scaffold (ERS) sequence
  source 1..92: mol_type = other RNA
actggcgcttctatctgattactctgaggagccatcaccagcgactatgtcgtagtgggtaaagctccctcttcggagggaacgcatcagag

SEQ ID NO: 14631 - RNA, 91 nt, synthetic construct
  misc_feature 1..91: note = engineered ribonucleic acid scaffold (ERS) sequence
  source 1..91: mol_type = other RNA
actggcgcttctatctgattactctgatagccatcaccagcgactatgtcgtagtgggtaaagctccctcttcggagggaacgcatcagag

SEQ ID NO: 14632 - RNA, 92 nt, synthetic construct
  misc_feature 1..92: note = engineered ribonucleic acid scaffold (ERS) sequence
  source 1..92: mol_type = other RNA
actggcgcttctatctgattactctgagctgccatcaccagcgactatgtcgtagtgggtaaagctccctcttcggagggaacgcatcagag

SEQ ID NO: 14633 - RNA, 92 nt, synthetic construct
  misc_feature 1..92: note = engineered ribonucleic acid scaffold (ERS) sequence
  source 1..92: mol_type = other RNA
actggcacttctatctgattactctgagtagccatcaccagcgactatgtcgtagtgggtaaagctccctcttcggagggaacgcatcagag

SEQ ID NO: 14634 - RNA, 92 nt, synthetic construct
  misc_feature 1..92: note = engineered ribonucleic acid scaffold (ERS) sequence
  source 1..92: mol_type = other RNA
actggcgcttctatctgattactctgagtagccatcaccagcgactatgtcgtagtgggtaaagctccctcttcggagggaacgcatcagag

SEQ ID NO: 14635 - RNA, 91 nt, synthetic construct
  misc_feature 1..91: note = engineered ribonucleic acid scaffold (ERS) sequence
  source 1..91: mol_type = other RNA
actggcgcttctatctgattactctgagcaccatcaccagcgactatgtcgtagtgggtaaagctccctcttcggagggaacgcatcagag

SEQ ID NO: 14636 - RNA, 91 nt, synthetic construct
  misc_feature 1..91: note = engineered ribonucleic acid scaffold (ERS) sequence
  source 1..91: mol_type = other RNA
actggcacttctatctgattactctgagcgccatcaccagcgactatgtcgtagtgggtaaagctccctcttcggagggaacgcatcagag

SEQ ID NO: 14637 - RNA, 91 nt, synthetic construct
  misc_feature 1..91: note = engineered ribonucleic acid scaffold (ERS) sequence
  source 1..91: mol_type = other RNA
actggcgcttctatctgattactctgagggccatcaccagcgactatgtcgtagtgggtaaagctccctcttcggagggaacgcatcagag

SEQ ID NO: 14638 - RNA, 91 nt, synthetic construct
  misc_feature 1..91: note = engineered ribonucleic acid scaffold (ERS) sequence
  source 1..91: mol_type = other RNA
actggcgcttctatctgattactctgagtgccgtcaccagcgactatgtcgtagtgggtaaagctccctcttcggagggaacgcatcagag

SEQ ID NO: 14639 - RNA, 91 nt, synthetic construct
  misc_feature 1..91: note = engineered ribonucleic acid scaffold (ERS) sequence
  source 1..91: mol_type = other RNA
actggcacttctatctgattactctgagtgccatcaccagcgactatgtcgtagtgggtaaagctccctcttcggagggaacgcatcagag

SEQ ID NO: 14640 - RNA, 91 nt, synthetic construct
  misc_feature 1..91: note = engineered ribonucleic acid scaffold (ERS) sequence
  source 1..91: mol_type = other RNA
actggcgcttctatctgattactctgagaaccatcaccagcgactatgtcgtagtgggtaaagctccctcttcggagggaacgcatcagag

SEQ ID NO: 14641 - RNA, 91 nt, synthetic construct
  misc_feature 1..91: note = engineered ribonucleic acid scaffold (ERS) sequence
  source 1..91: mol_type = other RNA
actggcgcttctatctgattactctgagagccgtcaccagcgactatgtcgtagtgggtaaagctccctcttcggagggaacgcatcagag

SEQ ID NO: 14642 - RNA, 91 nt, synthetic construct
  misc_feature 1..91: note = engineered ribonucleic acid scaffold (ERS) sequence
  source 1..91: mol_type = other RNA
actggcgcttctatctgattactctgagagccttcaccagcgactatgtcgtagtgggtaaagctccctcttcggagggaacgcatcagag

SEQ ID NO: 14643 - RNA, 91 nt, synthetic construct
  misc_feature 1..91: note = engineered ribonucleic acid scaffold (ERS) sequence
  source 1..91: mol_type = other RNA
actggggcttctatctgattactctgagacccatcaccagcgactatgtcgtagtgggtaaagctccctcttcggagggaacgcatcagag

SEQ ID NO: 14644 - RNA, 91 nt, synthetic construct
  misc_feature 1..91: note = engineered ribonucleic acid scaffold (ERS) sequence
  source 1..91: mol_type = other RNA
actggtgcttctatctgattactctgagagccatcaccagcgactatgtcgtagtgggtaaagctccctcttcggagggaacgcatcagag

SEQ ID NO: 14645 - RNA, 91 nt, synthetic construct
  misc_feature 1..91: note = engineered ribonucleic acid scaffold (ERS) sequence
  source 1..91: mol_type = other RNA
actgggccttctatctgattactctgaggcccatcaccagcgactatgtcgtagtgggtaaagctccctcttcggagggaacgcatcagag

SEQ ID NO: 14646 - RNA, 92 nt, synthetic construct
  misc_feature 1..92: note = engineered ribonucleic acid scaffold (ERS) sequence
  source 1..92: mol_type = other RNA
actggcccttctatctgattactctgaggagccatcaccagcgactatgtcgtagtgggtaaagctccctcttcggagggaacgcatcagag

SEQ ID NO: 14647 - RNA, 91 nt, synthetic construct
  misc_feature 1..91: note = engineered ribonucleic acid scaffold (ERS) sequence
  source 1..91: mol_type = other RNA
actggcccttctatctgattactctgagggccatcaccagcgactatgtcgtagtgggtaaagctccctcttcggagggaacgcatcagag

SEQ ID NO: 14648 - RNA, 91 nt, synthetic construct
  misc_feature 1..91: note = engineered ribonucleic acid scaffold (ERS) sequence
  source 1..91: mol_type = other RNA
actggcccttctatctgattactctgagtgccatcaccagcgactatgtcgtagtgggtaaagctccctcttcggagggaacgcatcagag

SEQ ID NO: 14649 - RNA, 91 nt, synthetic construct
  misc_feature 1..91: note = engineered ribonucleic acid scaffold (ERS) sequence
  source 1..91: mol_type = other RNA
actggcccttctatctgattactctgagagccatcaccagcgactatgtcgtagtgggtaaagctccctcttcggagggaacgcatcagag

SEQ ID NO: 14650 - RNA, 92 nt, synthetic construct
  misc_feature 1..92: note = engineered ribonucleic acid scaffold (ERS) sequence
  source 1..92: mol_type = other RNA
actggcgcttctatctgattactctgagcagccatcaccagcgactatgtcgtagtgggtaaagctccctcttcggagggaacgcatcagag

SEQ ID NO: 14651 - RNA, 91 nt, synthetic construct; identical to SEQ ID NO: 890
  misc_feature 1..91: note = engineered ribonucleic acid scaffold (ERS) sequence
  source 1..91: mol_type = other RNA

SEQ ID NO: 14652 - RNA, 91 nt, synthetic construct
  misc_feature 1..91: note = engineered ribonucleic acid scaffold (ERS) sequence
  source 1..91: mol_type = other RNA
actggcgcttctatctgattactctgagtgccatcaccagcgactatgtcgtagtgggtaaagctccctcttcggagggaacgcatcagag

SEQ ID NO: 14653 - RNA, 91 nt, synthetic construct
  misc_feature 1..91: note = engineered ribonucleic acid scaffold (ERS) sequence
  source 1..91: mol_type = other RNA
actggcgcttctatctgattactctgagagccatcaccagcgactatgtcgtagtgggtaaagctccctcttcggagggaacgcatcagag

SEQ ID NO: 14654 - RNA, 91 nt, synthetic construct
  misc_feature 1..91: note = engineered ribonucleic acid scaffold (ERS) sequence
  source 1..91: mol_type = other RNA
actggctcttctatctgattactctgagcgccatcaccagcgactatgtcgtagtgggtaaagctccctcttcggagggaacgcatcagag

SEQ ID NO: 14655 - RNA, 91 nt, synthetic construct
  misc_feature 1..91: note = engineered ribonucleic acid scaffold (ERS) sequence
  source 1..91: mol_type = other RNA
actggctcttctatctgattactctgagggccatcaccagcgactatgtcgtagtgggtaaagctccctcttcggagggaacgcatcagag

SEQ ID NO: 14656 - RNA, 91 nt, synthetic construct
  misc_feature 1..91: note = engineered ribonucleic acid scaffold (ERS) sequence
  source 1..91: mol_type = other RNA
actggctcttctatctgattactctgagtgccatcaccagcgactatgtcgtagtgggtaaagctccctcttcggagggaacgcatcagag

SEQ ID NO: 14657 - RNA, 91 nt, synthetic construct
  misc_feature 1..91: note = engineered ribonucleic acid scaffold (ERS) sequence
  source 1..91: mol_type = other RNA
actggctcttctatctgattactctgagagccatcaccagcgactatgtcgtagtgggtaaagctccctcttcggagggaacgcatcagag

SEQ ID NO: 14658 - RNA, 91 nt, synthetic construct
  misc_feature 1..91: note = engineered ribonucleic acid scaffold (ERS) sequence
  source 1..91: mol_type = other RNA
actggcggttctatctgattactctgagcgccatcaccagcgactatgtcgtagtgggtaaagctccctcttcggagggaacgcatcagag

SEQ ID NO: 14659 - RNA, 91 nt, synthetic construct
  misc_feature 1..91: note = engineered ribonucleic acid scaffold (ERS) sequence
  source 1..91: mol_type = other RNA
actggcggttctatctgattactctgagagccatcaccagcgactatgtcgtagtgggtaaagctccctcttcggagggaacgcatcagag

SEQ ID NO: 14660 - RNA, 89 nt, synthetic construct; identical to SEQ ID NO: 827
  misc_feature 1..89: note = engineered ribonucleic acid scaffold (ERS) sequence
  source 1..89: mol_type = other RNA

SEQ ID NO: 14661 - RNA, 89 nt, synthetic construct; identical to SEQ ID NO: 820
  misc_feature 1..89: note = engineered ribonucleic acid scaffold (ERS) sequence
  source 1..89: mol_type = other RNA

SEQ ID NO: 14662 - RNA, 89 nt, synthetic construct; identical to SEQ ID NO: 798
  misc_feature 1..89: note = engineered ribonucleic acid scaffold (ERS) sequence
  source 1..89: mol_type = other RNA

SEQ ID NO: 14663 - RNA, 90 nt, synthetic construct; identical to SEQ ID NO: 821
  misc_feature 1..90: note = engineered ribonucleic acid scaffold (ERS) sequence
  source 1..90: mol_type = other RNA

SEQ ID NO: 14664 - RNA, 89 nt, synthetic construct; identical to SEQ ID NO: 822
  misc_feature 1..89: note = engineered ribonucleic acid scaffold (ERS) sequence
  source 1..89: mol_type = other RNA

SEQ ID NO: 14665 - RNA, 90 nt, synthetic construct; identical to SEQ ID NO: 806
  misc_feature 1..90: note = engineered ribonucleic acid scaffold (ERS) sequence
  source 1..90: mol_type = other RNA

SEQ ID NO: 14666 - RNA, 90 nt, synthetic construct; identical to SEQ ID NO: 810
  misc_feature 1..90: note = engineered ribonucleic acid scaffold (ERS) sequence
  source 1..90: mol_type = other RNA

SEQ ID NO: 14667 - RNA, 90 nt, synthetic construct; identical to SEQ ID NO: 797
  misc_feature 1..90: note = engineered ribonucleic acid scaffold (ERS) sequence
  source 1..90: mol_type = other RNA

SEQ ID NO: 14668 - RNA, 89 nt, synthetic construct; identical to SEQ ID NO: 807
  misc_feature 1..89: note = engineered ribonucleic acid scaffold (ERS) sequence
  source 1..89: mol_type = other RNA

SEQ ID NO: 14669 - RNA, 89 nt, synthetic construct; identical to SEQ ID NO: 809
  misc_feature 1..89: note = engineered ribonucleic acid scaffold (ERS) sequence
  source 1..89: mol_type = other RNA

SEQ ID NO: 14670 - RNA, 89 nt, synthetic construct; identical to SEQ ID NO: 799
  misc_feature 1..89: note = engineered ribonucleic acid scaffold (ERS) sequence
  source 1..89: mol_type = other RNA

SEQ ID NO: 14671 - RNA, 89 nt, synthetic construct; identical to SEQ ID NO: 808
  misc_feature 1..89: note = engineered ribonucleic acid scaffold (ERS) sequence
  source 1..89: mol_type = other RNA

SEQ ID NO: 14672 - RNA, 89 nt, synthetic construct; identical to SEQ ID NO: 811
  misc_feature 1..89: note = engineered ribonucleic acid scaffold (ERS) sequence
  source 1..89: mol_type = other RNA

SEQ ID NO: 14673 - RNA, 89 nt, synthetic construct; identical to SEQ ID NO: 825
  misc_feature 1..89: note = engineered ribonucleic acid scaffold (ERS) sequence
  source 1..89: mol_type = other RNA

SEQ ID NO: 14674 - RNA, 89 nt, synthetic construct; identical to SEQ ID NO: 826
  misc_feature 1..89: note = engineered ribonucleic acid scaffold (ERS) sequence
  source 1..89: mol_type = other RNA

SEQ ID NO: 14675 - RNA, 89 nt, synthetic construct; identical to SEQ ID NO: 800
  misc_feature 1..89: note = engineered ribonucleic acid scaffold (ERS) sequence
  source 1..89: mol_type = other RNA

SEQ ID NO: 14676 - RNA, 89 nt, synthetic construct; identical to SEQ ID NO: 801
  misc_feature 1..89: note = engineered ribonucleic acid scaffold (ERS) sequence
  source 1..89: mol_type = other RNA

SEQ ID NO: 14677 - RNA, 89 nt, synthetic construct; identical to SEQ ID NO: 818
  misc_feature 1..89: note = engineered ribonucleic acid scaffold (ERS) sequence
  source 1..89: mol_type = other RNA

SEQ ID NO: 14678 - RNA, 89 nt, synthetic construct; identical to SEQ ID NO: 163
  misc_feature 1..89: note = engineered ribonucleic acid scaffold (ERS) sequence
  source 1..89: mol_type = other RNA

SEQ ID NO: 14679 - RNA, 90 nt, synthetic construct; identical to SEQ ID NO: 812
  misc_feature 1..90: note = engineered ribonucleic acid scaffold (ERS) sequence
  source 1..90: mol_type = other RNA

SEQ ID NO: 14680 - RNA, 89 nt, synthetic construct; identical to SEQ ID NO: 803
  misc_feature 1..89: note = engineered ribonucleic acid scaffold (ERS) sequence
  source 1..89: mol_type = other RNA

SEQ ID NO: 14681 - RNA, 89 nt, synthetic construct; identical to SEQ ID NO: 804
  misc_feature 1..89: note = engineered ribonucleic acid scaffold (ERS) sequence
  source 1..89: mol_type = other RNA

SEQ ID NO: 14682 - RNA, 89 nt, synthetic construct; identical to SEQ ID NO: 817
  misc_feature 1..89: note = engineered ribonucleic acid scaffold (ERS) sequence
  source 1..89: mol_type = other RNA

SEQ ID NO: 14683 - RNA, 90 nt, synthetic construct; identical to SEQ ID NO: 796
  misc_feature 1..90: note = engineered ribonucleic acid scaffold (ERS) sequence
  source 1..90: mol_type = other RNA

SEQ ID NO: 14684 - RNA, 89 nt, synthetic construct; identical to SEQ ID NO: 156
  misc_feature 1..89: note = engineered ribonucleic acid scaffold (ERS) sequence
  source 1..89: mol_type = other RNA

SEQ ID NO: 14685 - RNA, 89 nt, synthetic construct; identical to SEQ ID NO: 795
  misc_feature 1..89: note = engineered ribonucleic acid scaffold (ERS) sequence
  source 1..89: mol_type = other RNA

SEQ ID NO: 14686 - RNA, 89 nt, synthetic construct; identical to SEQ ID NO: 55
  misc_feature 1..89: note = engineered ribonucleic acid scaffold (ERS) sequence
  source 1..89: mol_type = other RNA

SEQ ID NO: 14687 - RNA, 89 nt, synthetic construct; identical to SEQ ID NO: 802
  misc_feature 1..89: note = engineered ribonucleic acid scaffold (ERS) sequence
  source 1..89: mol_type = other RNA

SEQ ID NO: 14688 - RNA, 89 nt, synthetic construct; identical to SEQ ID NO: 805
  misc_feature 1..89: note = engineered ribonucleic acid scaffold (ERS) sequence
  source 1..89: mol_type = other RNA

SEQ ID NO: 14689 - RNA, 89 nt, synthetic construct; identical to SEQ ID NO: 813
  misc_feature 1..89: note = engineered ribonucleic acid scaffold (ERS) sequence
  source 1..89: mol_type = other RNA

SEQ ID NO: 14690 - RNA, 89 nt, synthetic construct; identical to SEQ ID NO: 792
  misc_feature 1..89: note = engineered ribonucleic acid scaffold (ERS) sequence
  source 1..89: mol_type = other RNA

SEQ ID NO: 14691 - RNA, 89 nt, synthetic construct; identical to SEQ ID NO: 815
  misc_feature 1..89: note = engineered ribonucleic acid scaffold (ERS) sequence
  source 1..89: mol_type = other RNA

SEQ ID NO: 14692 - RNA, 89 nt, synthetic construct; identical to SEQ ID NO: 819
  misc_feature 1..89: note = engineered ribonucleic acid scaffold (ERS) sequence
  source 1..89: mol_type = other RNA

SEQ ID NO: 14693 - RNA, 88 nt, synthetic construct
  misc_feature 1..88: note = engineered ribonucleic acid scaffold (ERS) sequence
  source 1..88: mol_type = other RNA
acacacggttctatctgattactctgccgtgttcaccagcgactatgtcgtagtgggtaaagctccctggaaacagggagcatcagag

SEQ ID NO: 14694 - RNA, 88 nt, synthetic construct
  misc_feature 1..88: note = engineered ribonucleic acid scaffold (ERS) sequence
  source 1..88: mol_type = other RNA
acactggtttctatctgattactctgaccagttcaccagcgactatgtcgtagtgggtaaagctccctggaaacagggagcatcagag

SEQ ID NO: 14695 - RNA, 88 nt, synthetic construct
  misc_feature 1..88: note = engineered ribonucleic acid scaffold (ERS) sequence
  source 1..88: mol_type = other RNA
acaggccgttctatctgattactctgcggccttcaccagcgactatgtcgtagtgggtaaagctccctggaaacagggagcatcagag

SEQ ID NO: 14696 - RNA, 88 nt, synthetic construct
  misc_feature 1..88: note = engineered ribonucleic acid scaffold (ERS) sequence
  source 1..88: mol_type = other RNA
acaggtccttctatctgattactctgggaccttcaccagcgactatgtcgtagtgggtaaagctccctggaaacagggagcatcagag

SEQ ID NO: 14697 - RNA, 88 nt, synthetic construct
  misc_feature 1..88: note = engineered ribonucleic acid scaffold (ERS) sequence
  source 1..88: mol_type = other RNA
accagcaattctatctgattactctgttgctgtcaccagcgactatgtcgtagtgggtaaagctccctggaaacagggagcatcagag

SEQ ID NO: 14698 - RNA, 88 nt, synthetic construct
  misc_feature 1..88: note = engineered ribonucleic acid scaffold (ERS) sequence
  source 1..88: mol_type = other RNA
accgagacttctatctgattactctgggctcgtcaccagcgactatgtcgtagtgggtaaagctccctggaaacagggagcatcagag

SEQ ID NO: 14699 - RNA, 88 nt, synthetic construct
  misc_feature 1..88: note = engineered ribonucleic acid scaffold (ERS) sequence
  source 1..88: mol_type = other RNA
acctgtagttctatctgattactctgctacagtcaccagcgactatgtcgtagtgggtaaagctccctggaaacagggagcatcagag

SEQ ID NO: 14700 - RNA, 88 nt, synthetic construct
  misc_feature 1..88: note = engineered ribonucleic acid scaffold (ERS) sequence
  source 1..88: mol_type = other RNA
acgagcacttctatctgattactctggggctctcaccagcgactatgtcgtagtgggtaaagctccctggaaacagggagcatcagag

SEQ ID NO: 14701 - RNA, 88 nt, synthetic construct
  misc_feature 1..88: note = engineered ribonucleic acid scaffold (ERS) sequence
  source 1..88: mol_type = other RNA
acgaggtgttctatctgattactctgcacctctcaccagcgactatgtcgtagtgggtaaagctccctggaaacagggagcatcagag

SEQ ID NO: 14702 - RNA, 88 nt, synthetic construct
  misc_feature 1..88: note = engineered ribonucleic acid scaffold (ERS) sequence
  source 1..88: mol_type = other RNA
acgggactttctatctgattactctgagtccctcaccagcgactatgtcgtagtgggtaaagctccctggaaacagggagcatcagag

SEQ ID NO: 14703 - RNA, 88 nt, synthetic construct
  misc_feature 1..88: note = engineered ribonucleic acid scaffold (ERS) sequence
  source 1..88: mol_type = other RNA
acgggcaattctatctgattactctgttgccctcaccagcgactatgtcgtagtgggtaaagctccctggaaacagggagcatcagag

SEQ ID NO: 14704 - RNA, 88 nt, synthetic construct
  misc_feature 1..88: note = engineered ribonucleic acid scaffold (ERS) sequence
  source 1..88: mol_type = other RNA
actgtgcgttctatctgattactctgcgcacatcaccagcgactatgtcgtagtgggtaaagctccctggaaacagggagcatcagag

SEQ ID NO: 14705 - RNA, 89 nt, synthetic construct
  misc_feature 1..89: note = engineered ribonucleic acid scaffold (ERS) sequence
  source 1..89: mol_type = other RNA
actggcgcttctatctgattactctgggcgccatcaccagcgactatgtcgtagtgggtaaagctccctggaaacagggagcatcagag

SEQ ID NO: 14706 - RNA, 89 nt, synthetic construct
  misc_feature 1..89: note = engineered ribonucleic acid scaffold (ERS) sequence
  source 1..89: mol_type = other RNA
actggcgcttctatctgattactctgggagccatcaccagcgactatgtcgtagtgggtaaagctccctggaaacagggagcatcagag

SEQ ID NO: 14707 - RNA, 89 nt, synthetic construct
  misc_feature 1..89: note = engineered ribonucleic acid scaffold (ERS) sequence
  source 1..89: mol_type = other RNA
actggcgcttctatctgattactctgtgagccatcaccagcgactatgtcgtagtgggtaaagctccctggaaacagggagcatcagag

SEQ ID NO: 14708 - RNA, 90 nt, synthetic construct
  misc_feature 1..90: note = engineered ribonucleic acid scaffold (ERS) sequence
  source 1..90: mol_type = other RNA
actggcgcttctatctgattactctgaggagccatcaccagcgactatgtcgtagtgggtaaagctccctggaaacagggagcatcagag

SEQ ID NO: 14709 - RNA, 89 nt, synthetic construct
  misc_feature 1..89: note = engineered ribonucleic acid scaffold (ERS) sequence
  source 1..89: mol_type = other RNA
actggcgcttctatctgattactctgatagccatcaccagcgactatgtcgtagtgggtaaagctccctggaaacagggagcatcagag

SEQ ID NO: 14710 - RNA, 90 nt, synthetic construct
  misc_feature 1..90: note = engineered ribonucleic acid scaffold (ERS) sequence
  source 1..90: mol_type = other RNA
actggcgcttctatctgattactctgagctgccatcaccagcgactatgtcgtagtgggtaaagctccctggaaacagggagcatcagag

SEQ ID NO: 14711 - RNA, 90 nt, synthetic construct
  misc_feature 1..90: note = engineered ribonucleic acid scaffold (ERS) sequence
  source 1..90: mol_type = other RNA
actggcacttctatctgattactctgagtagccatcaccagcgactatgtcgtagtgggtaaagctccctggaaacagggagcatcagag

SEQ ID NO: 14712 - RNA, 90 nt, synthetic construct
  misc_feature 1..90: note = engineered ribonucleic acid scaffold (ERS) sequence
  source 1..90: mol_type = other RNA
actggcgcttctatctgattactctgagtagccatcaccagcgactatgtcgtagtgggtaaagctccctggaaacagggagcatcagag

SEQ ID NO: 14713 - RNA, 89 nt, synthetic construct
  misc_feature 1..89: note = engineered ribonucleic acid scaffold (ERS) sequence
  source 1..89: mol_type = other RNA
actggcgcttctatctgattactctgagcaccatcaccagcgactatgtcgtagtgggtaaagctccctggaaacagggagcatcagag

SEQ ID NO: 14714 - RNA, 89 nt, synthetic construct
  misc_feature 1..89: note = engineered ribonucleic acid scaffold (ERS) sequence
  source 1..89: mol_type = other RNA
actggcacttctatctgattactctgagcgccatcaccagcgactatgtcgtagtgggtaaagctccctggaaacagggagcatcagag

SEQ ID NO: 14715 - RNA, 89 nt, synthetic construct
  misc_feature 1..89: note = engineered ribonucleic acid scaffold (ERS) sequence
  source 1..89: mol_type = other RNA
actggcgcttctatctgattactctgagggccatcaccagcgactatgtcgtagtgggtaaagctccctggaaacagggagcatcagag

SEQ ID NO: 14716 - RNA, 89 nt, synthetic construct
  misc_feature 1..89: note = engineered ribonucleic acid scaffold (ERS) sequence
  source 1..89: mol_type = other RNA
actggcgcttctatctgattactctgagtgccgtcaccagcgactatgtcgtagtgggtaaagctccctggaaacagggagcatcagag

SEQ ID NO: 14717 - RNA, 89 nt, synthetic construct
  misc_feature 1..89: note = engineered ribonucleic acid scaffold (ERS) sequence
  source 1..89: mol_type = other RNA
actggcacttctatctgattactctgagtgccatcaccagcgactatgtcgtagtgggtaaagctccctggaaacagggagcatcagag

SEQ ID NO: 14718 - RNA, 89 nt, synthetic construct
  misc_feature 1..89: note = engineered ribonucleic acid scaffold (ERS) sequence
  source 1..89: mol_type = other RNA
actggcgcttctatctgattactctgagaaccatcaccagcgactatgtcgtagtgggtaaagctccctggaaacagggagcatcagag

SEQ ID NO: 14719 - RNA, 89 nt, synthetic construct
  misc_feature 1..89: note = engineered ribonucleic acid scaffold (ERS) sequence
  source 1..89: mol_type = other RNA
actggcgcttctatctgattactctgagagccgtcaccagcgactatgtcgtagtgggtaaagctccctggaaacagggagcatcagag

SEQ ID NO: 14720 - RNA, 89 nt, synthetic construct
  misc_feature 1..89: note = engineered ribonucleic acid scaffold (ERS) sequence
  source 1..89: mol_type = other RNA
actggcgcttctatctgattactctgagagccttcaccagcgactatgtcgtagtgggtaaagctccctggaaacagggagcatcagag

SEQ ID NO: 14721 - RNA, 89 nt, synthetic construct
  misc_feature 1..89: note = engineered ribonucleic acid scaffold (ERS) sequence
  source 1..89: mol_type = other RNA
actggggcttctatctgattactctgagacccatcaccagcgactatgtcgtagtgggtaaagctccctggaaacagggagcatcagag

SEQ ID NO: 14722 - RNA, 89 nt, synthetic construct
  misc_feature 1..89: note = engineered ribonucleic acid scaffold (ERS) sequence
  source 1..89: mol_type = other RNA
actggtgcttctatctgattactctgagagccatcaccagcgactatgtcgtagtgggtaaagctccctggaaacagggagcatcagag

SEQ ID NO: 14723 - RNA, 89 nt, synthetic construct; identical to SEQ ID NO: 169
  misc_feature 1..89: note = engineered ribonucleic acid scaffold (ERS) sequence
  source 1..89: mol_type = other RNA

SEQ ID NO: 14724 - RNA, 90 nt, synthetic construct
  misc_feature 1..90: note = engineered ribonucleic acid scaffold (ERS) sequence
  source 1..90: mol_type = other RNA
actggcccttctatctgattactctgaggagccatcaccagcgactatgtcgtagtgggtaaagctccctggaaacagggagcatcagag

SEQ ID NO: 14725 - RNA, 89 nt, synthetic construct
  misc_feature 1..89: note = engineered ribonucleic acid scaffold (ERS) sequence
  source 1..89: mol_type = other RNA
actggcccttctatctgattactctgagggccatcaccagcgactatgtcgtagtgggtaaagctccctggaaacagggagcatcagag

SEQ ID NO: 14726 - RNA, 89 nt, synthetic construct
  misc_feature 1..89: note = engineered ribonucleic acid scaffold (ERS) sequence
  source 1..89: mol_type = other RNA
actggcccttctatctgattactctgagtgccatcaccagcgactatgtcgtagtgggtaaagctccctggaaacagggagcatcagag

SEQ ID NO: 14727 - RNA, 89 nt, synthetic construct
  misc_feature 1..89: note = engineered ribonucleic acid scaffold (ERS) sequence
  source 1..89: mol_type = other RNA
actggcccttctatctgattactctgagagccatcaccagcgactatgtcgtagtgggtaaagctccctggaaacagggagcatcagag

SEQ ID NO: 14728 - RNA, 90 nt, synthetic construct
  misc_feature 1..90: note = engineered ribonucleic acid scaffold (ERS) sequence
  source 1..90: mol_type = other RNA
actggcgcttctatctgattactctgagcagccatcaccagcgactatgtcgtagtgggtaaagctccctggaaacagggagcatcagag

SEQ ID NO: 14729 - RNA, 89 nt, synthetic construct; identical to SEQ ID NO: 907
  misc_feature 1..89: note = engineered ribonucleic acid scaffold (ERS) sequence
  source 1..89: mol_type = other RNA

SEQ ID NO: 14730 - RNA, 89 nt, synthetic construct
  misc_feature 1..89: note = engineered ribonucleic acid scaffold (ERS) sequence
  source 1..89: mol_type = other RNA
actggcgcttctatctgattactctgagtgccatcaccagcgactatgtcgtagtgggtaaagctccctggaaacagggagcatcagag

SEQ ID NO: 14731 - RNA, 89 nt, synthetic construct
  misc_feature 1..89: note = engineered ribonucleic acid scaffold (ERS) sequence
  source 1..89: mol_type = other RNA
actggcgcttctatctgattactctgagagccatcaccagcgactatgtcgtagtgggtaaagctccctggaaacagggagcatcagag

SEQ ID NO: 14732 - RNA, 89 nt, synthetic construct
  misc_feature 1..89: note = engineered ribonucleic acid scaffold (ERS) sequence
  source 1..89: mol_type = other RNA
actggctcttctatctgattactctgagcgccatcaccagcgactatgtcgtagtgggtaaagctccctggaaacagggagcatcagag

SEQ ID NO: 14733 - RNA, 89 nt, synthetic construct
  misc_feature 1..89: note = engineered ribonucleic acid scaffold (ERS) sequence
  source 1..89: mol_type = other RNA
actggctcttctatctgattactctgagggccatcaccagcgactatgtcgtagtgggtaaagctccctggaaacagggagcatcagag

SEQ ID NO: 14734 - RNA, 89 nt, synthetic construct
  misc_feature 1..89: note = engineered ribonucleic acid scaffold (ERS) sequence
  source 1..89: mol_type = other RNA
actggctcttctatctgattactctgagtgccatcaccagcgactatgtcgtagtgggtaaagctccctggaaacagggagcatcagag

SEQ ID NO: 14735 - RNA, 89 nt, synthetic construct
  misc_feature 1..89: note = engineered ribonucleic acid scaffold (ERS) sequence
  source 1..89: mol_type = other RNA
actggctcttctatctgattactctgagagccatcaccagcgactatgtcgtagtgggtaaagctccctggaaacagggagcatcagag

SEQ ID NO: 14736 - RNA, 89 nt, synthetic construct
  misc_feature 1..89: note = engineered ribonucleic acid scaffold (ERS) sequence
  source 1..89: mol_type = other RNA
actggcggttctatctgattactctgagcgccatcaccagcgactatgtcgtagtgggtaaagctccctggaaacagggagcatcagag

SEQ ID NO: 14737 - RNA, 89 nt, synthetic construct
  misc_feature 1..89: note = engineered ribonucleic acid scaffold (ERS) sequence
  source 1..89: mol_type = other RNA
actggcggttctatctgattactctgagagccatcaccagcgactatgtcgtagtgggtaaagctccctggaaacagggagcatcagag

SEQ ID NO: 14738 - RNA, 84 nt, synthetic construct
  misc_feature 1..84: note = engineered ribonucleic acid scaffold (ERS) sequence
  source 1..84: mol_type = other RNA
acacacggttctatctgattactctgccgtgttcaccagcgactatgtcgtagtgggtaaagctcccttcggggagcatcagag

SEQ ID NO: 14739 - RNA, 84 nt, synthetic construct
  misc_feature 1..84: note = engineered ribonucleic acid scaffold (ERS) sequence
  source 1..84: mol_type = other RNA
acactggtttctatctgattactctgaccagttcaccagcgactatgtcgtagtgggtaaagctcccttcggggagcatcagag

SEQ ID NO: 14740 - RNA, 84 nt, synthetic construct
  misc_feature 1..84: note = engineered ribonucleic acid scaffold (ERS) sequence
  source 1..84: mol_type = other RNA
acaggccgttctatctgattactctgcggccttcaccagcgactatgtcgtagtgggtaaagctcccttcggggagcatcagag

SEQ ID NO: 14741 - RNA, 84 nt, synthetic construct
  misc_feature 1..84: note = engineered ribonucleic acid scaffold (ERS) sequence
  source 1..84: mol_type = other RNA
acaggtccttctatctgattactctgggaccttcaccagcgactatgtcgtagtgggtaaagctcccttcggggagcatcagag

SEQ ID NO: 14742 - RNA, 84 nt, synthetic construct
  misc_feature 1..84: note = engineered ribonucleic acid scaffold (ERS) sequence
  source 1..84: mol_type = other RNA
accagcaattctatctgattactctgttgctgtcaccagcgactatgtcgtagtgggtaaagctcccttcggggagcatcagag

SEQ ID NO: 14743 - RNA, 84 nt, synthetic construct
  misc_feature 1..84: note = engineered ribonucleic acid scaffold (ERS) sequence
  source 1..84: mol_type = other RNA
accgagacttctatctgattactctgggctcgtcaccagcgactatgtcgtagtgggtaaagctcccttcggggagcatcagag

SEQ ID NO: 14744 - RNA, 84 nt, synthetic construct
  misc_feature 1..84: note = engineered ribonucleic acid scaffold (ERS) sequence
  source 1..84: mol_type = other RNA
acctgtagttctatctgattactctgctacagtcaccagcgactatgtcgtagtgggtaaagctcccttcggggagcatcagag

SEQ ID NO: 14745 - RNA, 84 nt, synthetic construct
  misc_feature 1..84: note = engineered ribonucleic acid scaffold (ERS) sequence
  source 1..84: mol_type = other RNA
acgagcacttctatctgattactctggggctctcaccagcgactatgtcgtagtgggtaaagctcccttcggggagcatcagag

SEQ ID NO: 14746 - RNA, 84 nt, synthetic construct
  misc_feature 1..84: note = engineered ribonucleic acid scaffold (ERS) sequence
  source 1..84: mol_type = other RNA
acgaggtgttctatctgattactctgcacctctcaccagcgactatgtcgtagtgggtaaagctcccttcggggagcatcagag

SEQ ID NO: 14747 - RNA, 84 nt, synthetic construct
  misc_feature 1..84: note = engineered ribonucleic acid scaffold (ERS) sequence
  source 1..84: mol_type = other RNA
acgggactttctatctgattactctgagtccctcaccagcgactatgtcgtagtgggtaaagctcccttcggggagcatcagag

SEQ ID NO: 14748 - RNA, 84 nt, synthetic construct
  misc_feature 1..84: note = engineered ribonucleic acid scaffold (ERS) sequence
  source 1..84: mol_type = other RNA
acgggcaattctatctgattactctgttgccctcaccagcgactatgtcgtagtgggtaaagctcccttcggggagcatcagag

SEQ ID NO: 14749 - RNA, 84 nt, synthetic construct
  misc_feature 1..84: note = engineered ribonucleic acid scaffold (ERS) sequence
  source 1..84: mol_type = other RNA
actgtgcgttctatctgattactctgcgcacatcaccagcgactatgtcgtagtgggtaaagctcccttcggggagcatcagag

SEQ ID NO: 14750 - RNA, 85 nt, synthetic construct
  misc_feature 1..85: note = engineered ribonucleic acid scaffold (ERS) sequence
  source 1..85: mol_type = other RNA
actggcgcttctatctgattactctgggcgccatcaccagcgactatgtcgtagtgggtaaagctcccttcggggagcatcagag

SEQ ID NO: 14751 - RNA, 85 nt, synthetic construct
  misc_feature 1..85: note = engineered ribonucleic acid scaffold (ERS) sequence
  source 1..85: mol_type = other RNA
actggcgcttctatctgattactctgggagccatcaccagcgactatgtcgtagtgggtaaagctcccttcggggagcatcagag

SEQ ID NO: 14752 - RNA, 85 nt, synthetic construct
  misc_feature 1..85: note = engineered ribonucleic acid scaffold (ERS) sequence
  source 1..85: mol_type = other RNA
actggcgcttctatctgattactctgtgagccatcaccagcgactatgtcgtagtgggtaaagctcccttcggggagcatcagag

SEQ ID NO: 14753 - RNA, 86 nt, synthetic construct
  misc_feature 1..86: note = engineered ribonucleic acid scaffold (ERS) sequence
  source 1..86: mol_type = other RNA
actggcgcttctatctgattactctgaggagccatcaccagcgactatgtcgtagtgggtaaagctcccttcggggagcatcagag

SEQ ID NO: 14754 - RNA, 85 nt, synthetic construct
  misc_feature 1..85: note = engineered ribonucleic acid scaffold (ERS) sequence
  source 1..85: mol_type = other RNA
actggcgcttctatctgattactctgatagccatcaccagcgactatgtcgtagtgggtaaagctcccttcggggagcatcagag

SEQ ID NO: 14755 - RNA, 86 nt, synthetic construct
  misc_feature 1..86: note = engineered ribonucleic acid scaffold (ERS) sequence
  source 1..86: mol_type = other RNA
actggcgcttctatctgattactctgagctgccatcaccagcgactatgtcgtagtgggtaaagctcccttcggggagcatcagag

SEQ ID NO: 14756 - RNA, 86 nt, synthetic construct
  misc_feature 1..86: note = engineered ribonucleic acid scaffold (ERS) sequence
  source 1..86: mol_type = other RNA
actggcacttctatctgattactctgagtagccatcaccagcgactatgtcgtagtgggtaaagctcccttcggggagcatcagag

SEQ ID NO: 14757 - RNA, 86 nt, synthetic construct
  misc_feature 1..86: note = engineered ribonucleic acid scaffold (ERS) sequence
  source 1..86: mol_type = other RNA
actggcgcttctatctgattactctgagtagccatcaccagcgactatgtcgtagtgggtaaagctcccttcggggagcatcagag

SEQ ID NO: 14758 - RNA, 85 nt, synthetic construct
  misc_feature 1..85: note = engineered ribonucleic acid scaffold (ERS) sequence
  source 1..85: mol_type = other RNA
actggcgcttctatctgattactctgagcaccatcaccagcgactatgtcgtagtgggtaaagctcccttcggggagcatcagag

SEQ ID NO: 14759 - RNA, 85 nt, synthetic construct
  misc_feature 1..85: note = engineered ribonucleic acid scaffold (ERS) sequence
  source 1..85: mol_type = other RNA
actggcacttctatctgattactctgagcgccatcaccagcgactatgtcgtagtgggtaaagctcccttcggggagcatcagag

SEQ ID NO: 14760 - RNA, 85 nt, synthetic construct
  misc_feature 1..85: note = engineered ribonucleic acid scaffold (ERS) sequence
  source 1..85: mol_type = other RNA
actggcgcttctatctgattactctgagggccatcaccagcgactatgtcgtagtgggtaaagctcccttcggggagcatcagag

SEQ ID NO: 14761 - RNA, 85 nt, synthetic construct
  misc_feature 1..85: note = engineered ribonucleic acid scaffold (ERS) sequence
  source 1..85: mol_type = other RNA
actggcgcttctatctgattactctgagtgccgtcaccagcgactatgtcgtagtgggtaaagctcccttcggggagcatcagag

SEQ ID NO: 14762 - RNA, 85 nt, synthetic construct
  misc_feature 1..85: note = engineered ribonucleic acid scaffold (ERS) sequence
  source 1..85: mol_type = other RNA
actggcacttctatctgattactctgagtgccatcaccagcgactatgtcgtagtgggtaaagctcccttcggggagcatcagag

SEQ ID NO: 14763 - RNA, 85 nt, synthetic construct
  misc_feature 1..85: note = engineered ribonucleic acid scaffold (ERS) sequence
  source 1..85: mol_type = other RNA
actggcgcttctatctgattactctgagaaccatcaccagcgactatgtcgtagtgggtaaagctcccttcggggagcatcagag

SEQ ID NO: 14764 - RNA, 85 nt, synthetic construct
  misc_feature 1..85: note = engineered ribonucleic acid scaffold (ERS) sequence
  source 1..85: mol_type = other RNA
actggcgcttctatctgattactctgagagccgtcaccagcgactatgtcgtagtgggtaaagctcccttcggggagcatcagag

SEQ ID NO: 14765 - RNA, 85 nt, synthetic construct
  misc_feature 1..85: note = engineered ribonucleic acid scaffold (ERS) sequence
  source 1..85: mol_type = other RNA
actggcgcttctatctgattactctgagagccttcaccagcgactatgtcgtagtgggtaaagctcccttcggggagcatcagag

SEQ ID NO: 14766 - RNA, 85 nt, synthetic construct
  misc_feature 1..85: note = engineered ribonucleic acid scaffold (ERS) sequence
  source 1..85: mol_type = other RNA
actggggcttctatctgattactctgagacccatcaccagcgactatgtcgtagtgggtaaagctcccttcggggagcatcagag

SEQ ID NO: 14767 - RNA, 85 nt, synthetic construct
  misc_feature 1..85: note = engineered ribonucleic acid scaffold (ERS) sequence
  source 1..85: mol_type = other RNA
actggtgcttctatctgattactctgagagccatcaccagcgactatgtcgtagtgggtaaagctcccttcggggagcatcagag

SEQ ID NO: 14768 - RNA, 85 nt, synthetic construct
  misc_feature 1..85: note = engineered ribonucleic acid scaffold (ERS) sequence
  source 1..85: mol_type = other RNA
actgggccttctatctgattactctgaggcccatcaccagcgactatgtcgtagtgggtaaagctcccttcggggagcatcagag

SEQ ID NO: 14769 - RNA, 86 nt, synthetic construct
  misc_feature 1..86: note = engineered ribonucleic acid scaffold (ERS) sequence
  source 1..86: mol_type = other RNA
actggcccttctatctgattactctgaggagccatcaccagcgactatgtcgtagtgggtaaagctcccttcggggagcatcagag

SEQ ID NO: 14770 - RNA, 85 nt, synthetic construct
  misc_feature 1..85: note = engineered ribonucleic acid scaffold (ERS) sequence
  source 1..85: mol_type = other RNA
actggcccttctatctgattactctgagggccatcaccagcgactatgtcgtagtgggtaaagctcccttcggggagcatcagag

SEQ ID NO: 14771 - RNA, 85 nt, synthetic construct
  misc_feature 1..85: note = engineered ribonucleic acid scaffold (ERS) sequence
  source 1..85: mol_type = other RNA
actggcccttctatctgattactctgagtgccatcaccagcgactatgtcgtagtgggtaaagctcccttcggggagcatcagag

SEQ ID NO: 14772 - RNA, 85 nt, synthetic construct
  misc_feature 1..85: note = engineered ribonucleic acid scaffold (ERS) sequence
  source 1..85: mol_type = other RNA
actggcccttctatctgattactctgagagccatcaccagcgactatgtcgtagtgggtaaagctcccttcggggagcatcagag

SEQ ID NO: 14773 - RNA, 86 nt, synthetic construct
  misc_feature 1..86: note = engineered ribonucleic acid scaffold (ERS) sequence
  source 1..86: mol_type = other RNA
actggcgcttctatctgattactctgagcagccatcaccagcgactatgtcgtagtgggtaaagctcccttcggggagcatcagag

SEQ ID NO: 14774 - RNA, 85 nt, synthetic construct; identical to SEQ ID NO: 895
  misc_feature 1..85: note = engineered ribonucleic acid scaffold (ERS) sequence
  source 1..85: mol_type = other RNA

SEQ ID NO: 14775 - RNA, 85 nt, synthetic construct
  misc_feature 1..85: note = engineered ribonucleic acid scaffold (ERS) sequence
  source 1..85: mol_type = other RNA
actggcgcttctatctgattactctgagtgccatcaccagcgactatgtcgtagtgggtaaagctcccttcggggagcatcagag

SEQ ID NO: 14776 - RNA, 85 nt, synthetic construct
  misc_feature 1..85: note = engineered ribonucleic acid scaffold (ERS) sequence
  source 1..85: mol_type = other RNA
actggcgcttctatctgattactctgagagccatcaccagcgactatgtcgtagtgggtaaagctcccttcggggagcatcagag

SEQ ID NO: 14777 - RNA, 85 nt, synthetic construct
  misc_feature 1..85: note = engineered ribonucleic acid scaffold (ERS) sequence
  source 1..85: mol_type = other RNA
actggctcttctatctgattactctgagcgccatcaccagcgactatgtcgtagtgggtaaagctcccttcggggagcatcagag

SEQ ID NO: 14778 - RNA, 85 nt, synthetic construct
  misc_feature 1..85: note = engineered ribonucleic acid scaffold (ERS) sequence
  source 1..85: mol_type = other RNA
actggctcttctatctgattactctgagggccatcaccagcgactatgtcgtagtgggtaaagctcccttcggggagcatcagag

SEQ ID NO: 14779 - RNA, 85 nt, synthetic construct
  misc_feature 1..85: note = engineered ribonucleic acid scaffold (ERS) sequence
  source 1..85: mol_type = other RNA
actggctcttctatctgattactctgagtgccatcaccagcgactatgtcgtagtgggtaaagctcccttcggggagcatcagag

SEQ ID NO: 14780 - RNA, 85 nt, synthetic construct
  misc_feature 1..85: note = engineered ribonucleic acid scaffold (ERS) sequence
  source 1..85: mol_type = other RNA
actggctcttctatctgattactctgagagccatcaccagcgactatgtcgtagtgggtaaagctcccttcggggagcatcagag

SEQ ID NO: 14781 - RNA, 85 nt, synthetic construct
  misc_feature 1..85: note = engineered ribonucleic acid scaffold (ERS) sequence
  source 1..85: mol_type = other RNA
actggcggttctatctgattactctgagcgccatcaccagcgactatgtcgtagtgggtaaagctcccttcggggagcatcagag

SEQ ID NO: 14782 - RNA, 85 nt, synthetic construct
  misc_feature 1..85: note = engineered ribonucleic acid scaffold (ERS) sequence
  source 1..85: mol_type = other RNA
actggcggttctatctgattactctgagagccatcaccagcgactatgtcgtagtgggtaaagctcccttcggggagcatcagag

SEQ ID NO: 14783 - RNA, 84 nt, synthetic construct
  misc_feature 1..84: note = engineered ribonucleic acid scaffold (ERS) sequence
  source 1..84: mol_type = other RNA
acacacggttctatctgattactctgccgtgttcaccagcgactatgtcgtagtgggtaaagctccgttcgcggagcatcagag

SEQ ID NO: 14784 - RNA, 84 nt, synthetic construct
  misc_feature 1..84: note = engineered ribonucleic acid scaffold (ERS) sequence
  source 1..84: mol_type = other RNA
acactggtttctatctgattactctgaccagttcaccagcgactatgtcgtagtgggtaaagctccgttcgcggagcatcagag

SEQ ID NO: 14785 - RNA, 84 nt, synthetic construct
  misc_feature 1..84: note = engineered ribonucleic acid scaffold (ERS) sequence
  source 1..84: mol_type = other RNA
acaggccgttctatctgattactctgcggccttcaccagcgactatgtcgtagtgggtaaagctccgttcgcggagcatcagag

SEQ ID NO: 14786 - RNA, 84 nt, synthetic construct
  misc_feature 1..84: note = engineered ribonucleic acid scaffold (ERS) sequence
  source 1..84: mol_type = other RNA
acaggtccttctatctgattactctgggaccttcaccagcgactatgtcgtagtgggtaaagctccgttcgcggagcatcagag

SEQ ID NO: 14787 - RNA, 84 nt, synthetic construct
  misc_feature 1..84: note = engineered ribonucleic acid scaffold (ERS) sequence
  source 1..84: mol_type = other RNA
accagcaattctatctgattactctgttgctgtcaccagcgactatgtcgtagtgggtaaagctccgttcgcggagcatcagag

SEQ ID NO: 14788 - RNA, 84 nt, synthetic construct
  misc_feature 1..84: note = engineered ribonucleic acid scaffold (ERS) sequence
  source 1..84: mol_type = other RNA
accgagacttctatctgattactctgggctcgtcaccagcgactatgtcgtagtgggtaaagctccgttcgcggagcatcagag

SEQ ID NO: 14789 - RNA, 84 nt, synthetic construct
  misc_feature 1..84: note = engineered ribonucleic acid scaffold (ERS) sequence
  source 1..84: mol_type = other RNA
acctgtagttctatctgattactctgctacagtcaccagcgactatgtcgtagtgggtaaagctccgttcgcggagcatcagag

SEQ ID NO: 14790 - RNA, 84 nt, synthetic construct
  misc_feature 1..84: note = engineered ribonucleic acid scaffold (ERS) sequence
  source 1..84: mol_type = other RNA
acgagcacttctatctgattactctggggctctcaccagcgactatgtcgtagtgggtaaagctccgttcgcggagcatcagag

SEQ ID NO: 14791 - RNA, 84 nt, synthetic construct
  misc_feature 1..84: note = engineered ribonucleic acid scaffold (ERS) sequence
  source 1..84: mol_type = other RNA
acgaggtgttctatctgattactctgcacctctcaccagcgactatgtcgtagtgggtaaagctccgttcgcggagcatcagag

SEQ ID NO: 14792 - RNA, 84 nt, synthetic construct
  misc_feature 1..84: note = engineered ribonucleic acid scaffold (ERS) sequence
  source 1..84: mol_type = other RNA
acgggactttctatctgattactctgagtccctcaccagcgactatgtcgtagtgggtaaagctccgttcgcggagcatcagag

SEQ ID NO: 14793 - RNA, 84 nt, synthetic construct
  misc_feature 1..84: note = engineered ribonucleic acid scaffold (ERS) sequence
  source 1..84: mol_type = other RNA
acgggcaattctatctgattactctgttgccctcaccagcgactatgtcgtagtgggtaaagctccgttcgcggagcatcagag

SEQ ID NO: 14794 - RNA, 84 nt, synthetic construct
  misc_feature 1..84: note = engineered ribonucleic acid scaffold (ERS) sequence
  source 1..84: mol_type = other RNA
actgtgcgttctatctgattactctgcgcacatcaccagcgactatgtcgtagtgggtaaagctccgttcgcggagcatcagag

SEQ ID NO: 14795 - RNA, 85 nt, synthetic construct
  misc_feature 1..85: note = engineered ribonucleic acid scaffold (ERS) sequence
  source 1..85: mol_type = other RNA
actggcgcttctatctgattactctgggcgccatcaccagcgactatgtcgtagtgggtaaagctccgttcgcggagcatcagag

SEQ ID NO: 14796 - RNA, 85 nt, synthetic construct
  misc_feature 1..85: note = engineered ribonucleic acid scaffold (ERS) sequence
  source 1..85: mol_type = other RNA
actggcgcttctatctgattactctgggagccatcaccagcgactatgtcgtagtgggtaaagctccgttcgcggagcatcagag

SEQ ID NO: 14797 - RNA, 85 nt, synthetic construct
  misc_feature 1..85: note = engineered ribonucleic acid scaffold (ERS) sequence
  source 1..85: mol_type = other RNA
actggcgcttctatctgattactctgtgagccatcaccagcgactatgtcgtagtgggtaaagctccgttcgcggagcatcagag

SEQ ID NO: 14798 - RNA, 86 nt, synthetic construct
  misc_feature 1..86: note = engineered ribonucleic acid scaffold (ERS) sequence
  source 1..86: mol_type = other RNA
actggcgcttctatctgattactctgaggagccatcaccagcgactatgtcgtagtgggtaaagctccgttcgcggagcatcagag

SEQ ID NO: 14799 - RNA, 85 nt, synthetic construct
  misc_feature 1..85: note = engineered ribonucleic acid scaffold (ERS) sequence
  source 1..85: mol_type = other RNA
actggcgcttctatctgattactctgatagccatcaccagcgactatgtcgtagtgggtaaagctccgttcgcggagcatcagag

SEQ ID NO: 14800 - RNA, 86 nt, synthetic construct
  misc_feature 1..86: note = engineered ribonucleic acid scaffold (ERS) sequence
  source 1..86: mol_type = other RNA
actggcgcttctatctgattactctgagctgccatcaccagcgactatgtcgtagtgggtaaagctccgttcgcggagcatcagag

SEQ ID NO: 14801 - RNA, 86 nt, synthetic construct
  misc_feature 1..86: note = engineered ribonucleic acid scaffold (ERS) sequence
  source 1..86: mol_type = other RNA
actggcacttctatctgattactctgagtagccatcaccagcgactatgtcgtagtgggtaaagctccgttcgcggagcatcagag

SEQ ID NO: 14802 - RNA, 86 nt, synthetic construct
  misc_feature 1..86: note = engineered ribonucleic acid scaffold (ERS) sequence
  source 1..86: mol_type = other RNA
actggcgcttctatctgattactctgagtagccatcaccagcgactatgtcgtagtgggtaaagctccgttcgcggagcatcagag

SEQ ID NO: 14803 - RNA, 85 nt, synthetic construct
  misc_feature 1..85: note = engineered ribonucleic acid scaffold (ERS) sequence
  source 1..85: mol_type = other RNA
actggcgcttctatctgattactctgagcaccatcaccagcgactatgtcgtagtgggtaaagctccgttcgcggagcatcagag

SEQ ID NO: 14804 - RNA, 85 nt, synthetic construct
  misc_feature 1..85: note = engineered ribonucleic acid scaffold (ERS) sequence
  source 1..85: mol_type = other RNA
actggcacttctatctgattactctgagcgccatcaccagcgactatgtcgtagtgggtaaagctccgttcgcggagcatcagag

SEQ ID NO: 14805 - RNA, 85 nt, synthetic construct
  misc_feature 1..85: note = engineered ribonucleic acid scaffold (ERS) sequence
  source 1..85: mol_type = other RNA
actggcgcttctatctgattactctgagggccatcaccagcgactatgtcgtagtgggtaaagctccgttcgcggagcatcagag

SEQ ID NO: 14806 - RNA, 85 nt, synthetic construct
  misc_feature 1..85: note = engineered ribonucleic acid scaffold (ERS) sequence
  source 1..85: mol_type = other RNA
actggcgcttctatctgattactctgagtgccgtcaccagcgactatgtcgtagtgggtaaagctccgttcgcggagcatcagag

SEQ ID NO: 14807 - RNA, 85 nt, synthetic construct
  misc_feature 1..85: note = engineered ribonucleic acid scaffold (ERS) sequence
  source 1..85: mol_type = other RNA
actggcacttctatctgattactctgagtgccatcaccagcgactatgtcgtagtgggtaaagctccgttcgcggagcatcagag

SEQ ID NO: 14808 - RNA, 85 nt, synthetic construct
  misc_feature 1..85: note = engineered ribonucleic acid scaffold (ERS) sequence
  source 1..85: mol_type = other RNA
actggcgcttctatctgattactctgagaaccatcaccagcgactatgtcgtagtgggtaaagctccgttcgcggagcatcagag

SEQ ID NO: 14809 - RNA, 85 nt, synthetic construct
  misc_feature 1..85: note = engineered ribonucleic acid scaffold (ERS) sequence
  source 1..85: mol_type = other RNA
actggcgcttctatctgattactctgagagccgtcaccagcgactatgtcgtagtgggtaaagctccgttcgcggagcatcagag

SEQ ID NO: 14810 - RNA, 85 nt, synthetic construct
  misc_feature 1..85: note = engineered ribonucleic acid scaffold (ERS) sequence
  source 1..85: mol_type = other RNA
actggcgcttctatctgattactctgagagccttcaccagcgactatgtcgtagtgggtaaagctccgttcgcggagcatcagag

SEQ ID NO: 14811 - RNA, 85 nt, synthetic construct
  misc_feature 1..85: note = engineered ribonucleic acid scaffold (ERS) sequence
  source 1..85: mol_type = other RNA
actggggcttctatctgattactctgagacccatcaccagcgactatgtcgtagtgggtaaagctccgttcgcggagcatcagag

SEQ ID NO: 14812 - RNA, 85 nt, synthetic construct
  misc_feature 1..85: note = engineered ribonucleic acid scaffold (ERS) sequence
  source 1..85: mol_type = other RNA
actggtgcttctatctgattactctgagagccatcaccagcgactatgtcgtagtgggtaaagctccgttcgcggagcatcagag

SEQ ID NO: 14813 - RNA, 85 nt, synthetic construct
  misc_feature 1..85: note = engineered ribonucleic acid scaffold (ERS) sequence
  source 1..85: mol_type = other RNA
actgggccttctatctgattactctgaggcccatcaccagcgactatgtcgtagtgggtaaagctccgttcgcggagcatcagag

SEQ ID NO: 14814 - RNA, 86 nt, synthetic construct
  misc_feature 1..86: note = engineered ribonucleic acid scaffold (ERS) sequence
  source 1..86: mol_type = other RNA
actggcccttctatctgattactctgaggagccatcaccagcgactatgtcgtagtgggtaaagctccgttcgcggagcatcagag

SEQ ID NO: 14815 - RNA, 85 nt, synthetic construct
  misc_feature 1..85: note = engineered ribonucleic acid scaffold (ERS) sequence
  source 1..85: mol_type = other RNA
actggcccttctatctgattactctgagggccatcaccagcgactatgtcgtagtgggtaaagctccgttcgcggagcatcagag

SEQ ID NO: 14816 - RNA, 85 nt, synthetic construct
  misc_feature 1..85: note = engineered ribonucleic acid scaffold (ERS) sequence
  source 1..85: mol_type = other RNA
actggcccttctatctgattactctgagtgccatcaccagcgactatgtcgtagtgggtaaagctccgttcgcggagcatcagag

SEQ ID NO: 14817 - RNA, 85 nt, synthetic construct
  misc_feature 1..85: note = engineered ribonucleic acid scaffold (ERS) sequence
  source 1..85: mol_type = other RNA
actggcccttctatctgattactctgagagccatcaccagcgactatgtcgtagtgggtaaagctccgttcgcggagcatcagag

SEQ ID NO: 14818 - RNA, 86 nt, synthetic construct
  misc_feature 1..86: note = engineered ribonucleic acid scaffold (ERS) sequence
  source 1..86: mol_type = other RNA
actggcgcttctatctgattactctgagcagccatcaccagcgactatgtcgtagtgggtaaagctccgttcgcggagcatcagag

SEQ ID NO: 14819 - RNA, 85 nt, synthetic construct; identical to SEQ ID NO: 896
  misc_feature 1..85: note = engineered ribonucleic acid scaffold (ERS) sequence
  source 1..85: mol_type = other RNA

SEQ ID NO: 14820 - RNA, 85 nt, synthetic construct
  misc_feature 1..85: note = engineered ribonucleic acid scaffold (ERS) sequence
  source 1..85: mol_type = other RNA
actggcgcttctatctgattactctgagtgccatcaccagcgactatgtcgtagtgggtaaagctccgttcgcggagcatcagag

SEQ ID NO: 14821 - RNA, 85 nt, synthetic construct
  misc_feature 1..85: note = engineered ribonucleic acid scaffold (ERS) sequence
  source 1..85: mol_type = other RNA
actggcgcttctatctgattactctgagagccatcaccagcgactatgtcgtagtgggtaaagctccgttcgcggagcatcagag

SEQ ID NO: 14822 - RNA, 85 nt, synthetic construct
  misc_feature 1..85: note = engineered ribonucleic acid scaffold (ERS) sequence
  source 1..85: mol_type = other RNA
actggctcttctatctgattactctgagcgccatcaccagcgactatgtcgtagtgggtaaagctccgttcgcggagcatcagag

SEQ ID NO: 14823 - RNA, 85 nt, synthetic construct
  misc_feature 1..85: note = engineered ribonucleic acid scaffold (ERS) sequence
  source 1..85: mol_type = other RNA
actggctcttctatctgattactctgagggccatcaccagcgactatgtcgtagtgggtaaagctccgttcgcggagcatcagag

SEQ ID NO: 14824 - RNA, 85 nt, synthetic construct
  misc_feature 1..85: note = engineered ribonucleic acid scaffold (ERS) sequence
  source 1..85: mol_type = other RNA
actggctcttctatctgattactctgagtgccatcaccagcgactatgtcgtagtgggtaaagctccgttcgcggagcatcagag

SEQ ID NO: 14825 - RNA, 85 nt, synthetic construct
  misc_feature 1..85: note = engineered ribonucleic acid scaffold (ERS) sequence
  source 1..85: mol_type = other RNA
actggctcttctatctgattactctgagagccatcaccagcgactatgtcgtagtgggtaaagctccgttcgcggagcatcagag

SEQ ID NO: 14826 - RNA, 85 nt, synthetic construct
  misc_feature 1..85: note = engineered ribonucleic acid scaffold (ERS) sequence
  source 1..85: mol_type = other RNA
actggcggttctatctgattactctgagcgccatcaccagcgactatgtcgtagtgggtaaagctccgttcgcggagcatcagag

SEQ ID NO: 14827 - RNA, 85 nt, synthetic construct
  misc_feature 1..85: note = engineered ribonucleic acid scaffold (ERS) sequence
  source 1..85: mol_type = other RNA
actggcggttctatctgattactctgagagccatcaccagcgactatgtcgtagtgggtaaagctccgttcgcggagcatcagag

SEQ ID NO: 14828 - RNA, 86 nt, synthetic construct
  misc_feature 1..86: note = engineered ribonucleic acid scaffold (ERS) sequence
  source 1..86: mol_type = other RNA
acacacggttctatctgattactctgccgtgttcaccagcgactatgtcgtagtgggtaaagctcctcttcggaggagcatcagag

SEQ ID NO: 14829 - RNA, 86 nt, synthetic construct
  misc_feature 1..86: note = engineered ribonucleic acid scaffold (ERS) sequence
  source 1..86: mol_type = other RNA
acactggtttctatctgattactctgaccagttcaccagcgactatgtcgtagtgggtaaagctcctcttcggaggagcatcagag

SEQ ID NO: 14830 - RNA, 86 nt, synthetic construct
  misc_feature 1..86: note = engineered ribonucleic acid scaffold (ERS) sequence
  source 1..86: mol_type = other RNA
acaggccgttctatctgattactctgcggccttcaccagcgactatgtcgtagtgggtaaagctcctcttcggaggagcatcagag

SEQ ID NO: 14831 - RNA, 86 nt, synthetic construct
  misc_feature 1..86: note = engineered ribonucleic acid scaffold (ERS) sequence
  source 1..86: mol_type = other RNA
acaggtccttctatctgattactctgggaccttcaccagcgactatgtcgtagtgggtaaagctcctcttcggaggagcatcagag

SEQ ID NO: 14832 - RNA, 86 nt, synthetic construct
  misc_feature 1..86: note = engineered ribonucleic acid scaffold (ERS) sequence
  source 1..86: mol_type = other RNA
accagcaattctatctgattactctgttgctgtcaccagcgactatgtcgtagtgggtaaagctcctcttcggaggagcatcagag

SEQ ID NO: 14833 - RNA, 86 nt, synthetic construct
  misc_feature 1..86: note = engineered ribonucleic acid scaffold (ERS) sequence
  source 1..86: mol_type = other RNA
accgagacttctatctgattactctgggctcgtcaccagcgactatgtcgtagtgggtaaagctcctcttcggaggagcatcagag

SEQ ID NO: 14834 - RNA, 86 nt, synthetic construct
  misc_feature 1..86: note = engineered ribonucleic acid scaffold (ERS) sequence
  source 1..86: mol_type = other RNA
acctgtagttctatctgattactctgctacagtcaccagcgactatgtcgtagtgggtaaagctcctcttcggaggagcatcagag

SEQ ID NO: 14835 - RNA, 86 nt, synthetic construct
  misc_feature 1..86: note = engineered ribonucleic acid scaffold (ERS) sequence
  source 1..86: mol_type = other RNA
acgagcacttctatctgattactctggggctctcaccagcgactatgtcgtagtgggtaaagctcctcttcggaggagcatcagag

SEQ ID NO: 14836 - RNA, 86 nt, synthetic construct
  misc_feature 1..86: note = engineered ribonucleic acid scaffold (ERS) sequence
  source 1..86: mol_type = other RNA
acgaggtgttctatctgattactctgcacctctcaccagcgactatgtcgtagtgggtaaagctcctcttcggaggagcatcagag

SEQ ID NO: 14837 - RNA, 86 nt, synthetic construct
  misc_feature 1..86: note = engineered ribonucleic acid scaffold (ERS) sequence
  source 1..86: mol_type = other RNA
acgggactttctatctgattactctgagtccctcaccagcgactatgtcgtagtgggtaaagctcctcttcggaggagcatcagag

SEQ ID NO: 14838 - RNA, 86 nt, synthetic construct
  misc_feature 1..86: note = engineered ribonucleic acid scaffold (ERS) sequence
  source 1..86: mol_type = other RNA
acgggcaattctatctgattactctgttgccctcaccagcgactatgtcgtagtgggtaaagctcctcttcggaggagcatcagag

SEQ ID NO: 14839 - RNA, 86 nt, synthetic construct
  misc_feature 1..86: note = engineered ribonucleic acid scaffold (ERS) sequence
  source 1..86: mol_type = other RNA
actgtgcgttctatctgattactctgcgcacatcaccagcgactatgtcgtagtgggtaaagctcctcttcggaggagcatcagag

SEQ ID NO: 14840 - RNA, 87 nt, synthetic construct
  misc_feature 1..87: note = engineered ribonucleic acid scaffold (ERS) sequence
  source 1..87: mol_type = other RNA
actggcgcttctatctgattactctgggcgccatcaccagcgactatgtcgtagtgggtaaagctcctcttcggaggagcatcagag

SEQ ID NO: 14841 - RNA, 87 nt, synthetic construct
  misc_feature 1..87: note = engineered ribonucleic acid scaffold (ERS) sequence
  source 1..87: mol_type = other RNA
actggcgcttctatctgattactctgggagccatcaccagcgactatgtcgtagtgggtaaagctcctcttcggaggagcatcagag

SEQ ID NO: 14842 - RNA, 87 nt, synthetic construct
  misc_feature 1..87: note = engineered ribonucleic acid scaffold (ERS) sequence
  source 1..87: mol_type = other RNA
actggcgcttctatctgattactctgtgagccatcaccagcgactatgtcgtagtgggtaaagctcctcttcggaggagcatcagag

SEQ ID NO: 14843 - RNA, 88 nt, synthetic construct
  misc_feature 1..88: note = engineered ribonucleic acid scaffold (ERS) sequence
  source 1..88: mol_type = other RNA
actggcgcttctatctgattactctgaggagccatcaccagcgactatgtcgtagtgggtaaagctcctcttcggaggagcatcagag

SEQ ID NO: 14844 - RNA, 87 nt, synthetic construct
  misc_feature 1..87: note = engineered ribonucleic acid scaffold (ERS) sequence
  source 1..87: mol_type = other RNA
actggcgcttctatctgattactctgatagccatcaccagcgactatgtcgtagtgggtaaagctcctcttcggaggagcatcagag

SEQ ID NO: 14845 - RNA, 88 nt, synthetic construct
  misc_feature 1..88: note = engineered ribonucleic acid scaffold (ERS) sequence
  source 1..88: mol_type = other RNA
actggcgcttctatctgattactctgagctgccatcaccagcgactatgtcgtagtgggtaaagctcctcttcggaggagcatcagag

SEQ ID NO: 14846 - RNA, 88 nt, synthetic construct
  misc_feature 1..88: note = engineered ribonucleic acid scaffold (ERS) sequence
  source 1..88: mol_type = other RNA
actggcacttctatctgattactctgagtagccatcaccagcgactatgtcgtagtgggtaaagctcctcttcggaggagcatcagag

SEQ ID NO: 14847 - RNA, 88 nt, synthetic construct
  misc_feature 1..88: note = engineered ribonucleic acid scaffold (ERS) sequence
  source 1..88: mol_type = other RNA
actggcgcttctatctgattactctgagtagccatcaccagcgactatgtcgtagtgggtaaagctcctcttcggaggagcatcagag

SEQ ID NO: 14848 - RNA, 87 nt, synthetic construct
  misc_feature 1..87: note = engineered ribonucleic acid scaffold (ERS) sequence
  source 1..87: mol_type = other RNA
actggcgcttctatctgattactctgagcaccatcaccagcgactatgtcgtagtgggtaaagctcctcttcggaggagcatcagag

SEQ ID NO: 14849 - RNA, 87 nt, synthetic construct
  misc_feature 1..87: note = engineered ribonucleic acid scaffold (ERS) sequence
  source 1..87: mol_type = other RNA
actggcacttctatctgattactctgagcgccatcaccagcgactatgtcgtagtgggtaaagctcctcttcggaggagcatcagag

SEQ ID NO: 14850 - RNA, 87 nt, synthetic construct
  misc_feature 1..87: note = engineered ribonucleic acid scaffold (ERS) sequence
  source 1..87: mol_type = other RNA
actggcgcttctatctgattactctgagggccatcaccagcgactatgtcgtagtgggtaaagctcctcttcggaggagcatcagag

SEQ ID NO: 14851 - RNA, 87 nt, synthetic construct
  misc_feature 1..87: note = engineered ribonucleic acid scaffold (ERS) sequence
  source 1..87: mol_type = other RNA
actggcgcttctatctgattactctgagtgccgtcaccagcgactatgtcgtagtgggtaaagctcctcttcggaggagcatcagag

SEQ ID NO: 14852 - RNA, 87 nt, synthetic construct
  misc_feature 1..87: note = engineered ribonucleic acid scaffold (ERS) sequence
  source 1..87: mol_type = other RNA
actggcacttctatctgattactctgagtgccatcaccagcgactatgtcgtagtgggtaaagctcctcttcggaggagcatcagag

SEQ ID NO: 14853 - RNA, 87 nt, synthetic construct
  misc_feature 1..87: note = engineered ribonucleic acid scaffold (ERS) sequence
  source 1..87: mol_type = other RNA
actggcgcttctatctgattactctgagaaccatcaccagcgactatgtcgtagtgggtaaagctcctcttcggaggagcatcagag

SEQ ID NO: 14854 - RNA, 87 nt, synthetic construct
  misc_feature 1..87: note = engineered ribonucleic acid scaffold (ERS) sequence
  source 1..87: mol_type = other RNA
actggcgcttctatctgattactctgagagccgtcaccagcgactatgtcgtagtgggtaaagctcctcttcggaggagcatcagag

SEQ ID NO: 14855 - RNA, 87 nt, synthetic construct
  misc_feature 1..87: note = engineered ribonucleic acid scaffold (ERS) sequence
  source 1..87: mol_type = other RNA
actggcgcttctatctgattactctgagagccttcaccagcgactatgtcgtagtgggtaaagctcctcttcggaggagcatcagag

SEQ ID NO: 14856 - RNA, 87 nt, synthetic construct
  misc_feature 1..87: note = engineered ribonucleic acid scaffold (ERS) sequence
  source 1..87: mol_type = other RNA
actggggcttctatctgattactctgagacccatcaccagcgactatgtcgtagtgggtaaagctcctcttcggaggagcatcagag

SEQ ID NO: 14857 - RNA, 87 nt, synthetic construct
  misc_feature 1..87: note = engineered ribonucleic acid scaffold (ERS) sequence
  source 1..87: mol_type = other RNA
actggtgcttctatctgattactctgagagccatcaccagcgactatgtcgtagtgggtaaagctcctcttcggaggagcatcagag

SEQ ID NO: 14858 - RNA, 87 nt, synthetic construct
  misc_feature 1..87: note = engineered ribonucleic acid scaffold (ERS) sequence
  source 1..87: mol_type = other RNA
actgggccttctatctgattactctgaggcccatcaccagcgactatgtcgtagtgggtaaagctcctcttcggaggagcatcagag

SEQ ID NO: 14859 - RNA, 88 nt, synthetic construct
  misc_feature 1..88: note = engineered ribonucleic acid scaffold (ERS) sequence
  source 1..88: mol_type = other RNA
actggcccttctatctgattactctgaggagccatcaccagcgactatgtcgtagtgggtaaagctcctcttcggaggagcatcagag

SEQ ID NO: 14860 - RNA, 87 nt, synthetic construct
  misc_feature 1..87: note = engineered ribonucleic acid scaffold (ERS) sequence
  source 1..87: mol_type = other RNA
actggcccttctatctgattactctgagggccatcaccagcgactatgtcgtagtgggtaaagctcctcttcggaggagcatcagag

SEQ ID NO: 14861 - RNA, 87 nt, synthetic construct
  misc_feature 1..87: note = engineered ribonucleic acid scaffold (ERS) sequence
  source 1..87: mol_type = other RNA
actggcccttctatctgattactctgagtgccatcaccagcgactatgtcgtagtgggtaaagctcctcttcggaggagcatcagag

SEQ ID NO: 14862 - RNA, 87 nt, synthetic construct
  misc_feature 1..87: note = engineered ribonucleic acid scaffold (ERS) sequence
  source 1..87: mol_type = other RNA
actggcccttctatctgattactctgagagccatcaccagcgactatgtcgtagtgggtaaagctcctcttcggaggagcatcagag

SEQ ID NO: 14863 - RNA, 88 nt, synthetic construct
  misc_feature 1..88: note = engineered ribonucleic acid scaffold (ERS) sequence
  source 1..88: mol_type = other RNA
actggcgcttctatctgattactctgagcagccatcaccagcgactatgtcgtagtgggtaaagctcctcttcggaggagcatcagag

SEQ ID NO: 14864 - RNA, 87 nt, synthetic construct; identical to SEQ ID NO: 893
  misc_feature 1..87: note = engineered ribonucleic acid scaffold (ERS) sequence
  source 1..87: mol_type = other RNA

SEQ ID NO: 14865 - RNA, 87 nt, synthetic construct
  misc_feature 1..87: note = engineered ribonucleic acid scaffold (ERS) sequence
  source 1..87: mol_type = other RNA
actggcgcttctatctgattactctgagtgccatcaccagcgactatgtcgtagtgggtaaagctcctcttcggaggagcatcagag

SEQ ID NO: 14866 - RNA, 87 nt, synthetic construct
  misc_feature 1..87: note = engineered ribonucleic acid scaffold (ERS) sequence
  source 1..87: mol_type = other RNA
actggcgcttctatctgattactctgagagccatcaccagcgactatgtcgtagtgggtaaagctcctcttcggaggagcatcagag

SEQ ID NO: 14867 - RNA, 87 nt, synthetic construct
  misc_feature 1..87: note = engineered ribonucleic acid scaffold (ERS) sequence
  source 1..87: mol_type = other RNA
actggctcttctatctgattactctgagcgccatcaccagcgactatgtcgtagtgggtaaagctcctcttcggaggagcatcagag

SEQ ID NO: 14868 - RNA, 87 nt, synthetic construct
  misc_feature 1..87: note = engineered ribonucleic acid scaffold (ERS) sequence
  source 1..87: mol_type = other RNA
actggctcttctatctgattactctgagggccatcaccagcgactatgtcgtagtgggtaaagctcctcttcggaggagcatcagag

SEQ ID NO: 14869 - RNA, 87 nt, synthetic construct
  misc_feature 1..87: note = engineered ribonucleic acid scaffold (ERS) sequence
  source 1..87: mol_type = other RNA
actggctcttctatctgattactctgagtgccatcaccagcgactatgtcgtagtgggtaaagctcctcttcggaggagcatcagag

SEQ ID NO: 14870 - RNA, 87 nt, synthetic construct
  misc_feature 1..87: note = engineered ribonucleic acid scaffold (ERS) sequence
  source 1..87: mol_type = other RNA
actggctcttctatctgattactctgagagccatcaccagcgactatgtcgtagtgggtaaagctcctcttcggaggagcatcagag

SEQ ID NO: 14871 - RNA, 87 nt, synthetic construct
  misc_feature 1..87: note = engineered ribonucleic acid scaffold (ERS) sequence
  source 1..87: mol_type = other RNA
actggcggttctatctgattactctgagcgccatcaccagcgactatgtcgtagtgggtaaagctcctcttcggaggagcatcagag

SEQ ID NO: 14872 - RNA, 87 nt, synthetic construct
  misc_feature 1..87: note = engineered ribonucleic acid scaffold (ERS) sequence
  source 1..87: mol_type = other RNA
actggcggttctatctgattactctgagagccatcaccagcgactatgtcgtagtgggtaaagctcctcttcggaggagcatcagag

SEQ ID NO: 14873 - RNA, 84 nt, synthetic construct
  misc_feature 1..84: note = engineered ribonucleic acid scaffold (ERS) sequence
  source 1..84: mol_type = other RNA
acacacggttctatctgattactctgccgtgttcaccagcgactatgtcgtagtgggtaaagctctcttcggagagcatcagag

SEQ ID NO: 14874 - RNA, 84 nt, synthetic construct
  misc_feature 1..84: note = engineered ribonucleic acid scaffold (ERS) sequence
  source 1..84: mol_type = other RNA
acactggtttctatctgattactctgaccagttcaccagcgactatgtcgtagtgggtaaagctctcttcggagagcatcagag

SEQ ID NO: 14875 - RNA, 84 nt, synthetic construct
  misc_feature 1..84: note = engineered ribonucleic acid scaffold (ERS) sequence
  source 1..84: mol_type = other RNA
acaggccgttctatctgattactctgcggccttcaccagcgactatgtcgtagtgggtaaagctctcttcggagagcatcagag

SEQ ID NO: 14876 - RNA, 84 nt, synthetic construct
  misc_feature 1..84: note = engineered ribonucleic acid scaffold (ERS) sequence
  source 1..84: mol_type = other RNA
acaggtccttctatctgattactctgggaccttcaccagcgactatgtcgtagtgggtaaagctctcttcggagagcatcagag

SEQ ID NO: 14877 - RNA, 84 nt, synthetic construct
  misc_feature 1..84: note = engineered ribonucleic acid scaffold (ERS) sequence
  source 1..84: mol_type = other RNA
accagcaattctatctgattactctgttgctgtcaccagcgactatgtcgtagtgggtaaagctctcttcggagagcatcagag

SEQ ID NO: 14878 - RNA, 84 nt, synthetic construct
  misc_feature 1..84: note = engineered ribonucleic acid scaffold (ERS) sequence
  source 1..84: mol_type = other RNA
accgagacttctatctgattactctgggctcgtcaccagcgactatgtcgtagtgggtaaagctctcttcggagagcatcagag

SEQ ID NO: 14879 - RNA, 84 nt, synthetic construct
  misc_feature 1..84: note = engineered ribonucleic acid scaffold (ERS) sequence
  source 1..84: mol_type = other RNA
acctgtagttctatctgattactctgctacagtcaccagcgactatgtcgtagtgggtaaagctctcttcggagagcatcagag

SEQ ID NO: 14880 - RNA, 84 nt, synthetic construct
  misc_feature 1..84: note = engineered ribonucleic acid scaffold (ERS) sequence
  source 1..84: mol_type = other RNA
acgagcacttctatctgattactctggggctctcaccagcgactatgtcgtagtgggtaaagctctcttcggagagcatcagag

SEQ ID NO: 14881 - RNA, 84 nt, synthetic construct
  misc_feature 1..84: note = engineered ribonucleic acid scaffold (ERS) sequence
  source 1..84: mol_type = other RNA
acgaggtgttctatctgattactctgcacctctcaccagcgactatgtcgtagtgggtaaagctctcttcggagagcatcagag

SEQ ID NO: 14882 - RNA, 84 nt, synthetic construct
  misc_feature 1..84: note = engineered ribonucleic acid scaffold (ERS) sequence
  source 1..84: mol_type = other RNA
acgggactttctatctgattactctgagtccctcaccagcgactatgtcgtagtgggtaaagctctcttcggagagcatcagag

SEQ ID NO: 14883 - RNA, 84 nt, synthetic construct
  misc_feature 1..84: note = engineered ribonucleic acid scaffold (ERS) sequence
  source 1..84: mol_type = other RNA
acgggcaattctatctgattactctgttgccctcaccagcgactatgtcgtagtgggtaaagctctcttcggagagcatcagag

SEQ ID NO: 14884 - RNA, 84 nt, synthetic construct
  misc_feature 1..84: note = engineered ribonucleic acid scaffold (ERS) sequence
  source 1..84: mol_type = other RNA
actgtgcgttctatctgattactctgcgcacatcaccagcgactatgtcgtagtgggtaaagctctcttcggagagcatcagag

SEQ ID NO: 14885 - RNA, 85 nt, synthetic construct
  misc_feature 1..85: note = engineered ribonucleic acid scaffold (ERS) sequence
  source 1..85: mol_type = other RNA
actggcgcttctatctgattactctgggcgccatcaccagcgactatgtcgtagtgggtaaagctctcttcggagagcatcagag

SEQ ID NO: 14886 - RNA, 85 nt, synthetic construct
  misc_feature 1..85: note = engineered ribonucleic acid scaffold (ERS) sequence
  source 1..85: mol_type = other RNA
actggcgcttctatctgattactctgggagccatcaccagcgactatgtcgtagtgggtaaagctctcttcggagagcatcagag

SEQ ID NO: 14887 - RNA, 85 nt, synthetic construct
  misc_feature 1..85: note = engineered ribonucleic acid scaffold (ERS) sequence
  source 1..85: mol_type = other RNA
actggcgcttctatctgattactctgtgagccatcaccagcgactatgtcgtagtgggtaaagctctcttcggagagcatcagag

SEQ ID NO: 14888 - RNA, 86 nt, synthetic construct
  misc_feature 1..86: note = engineered ribonucleic acid scaffold (ERS) sequence
  source 1..86: mol_type = other RNA
actggcgcttctatctgattactctgaggagccatcaccagcgactatgtcgtagtgggtaaagctctcttcggagagcatcagag

SEQ ID NO: 14889 - RNA, 85 nt, synthetic construct
  misc_feature 1..85: note = engineered ribonucleic acid scaffold (ERS) sequence
  source 1..85: mol_type = other RNA
actggcgcttctatctgattactctgatagccatcaccagcgactatgtcgtagtgggtaaagctctcttcggagagcatcagag

SEQ ID NO: 14890 - RNA, 86 nt, synthetic construct
  misc_feature 1..86: note = engineered ribonucleic acid scaffold (ERS) sequence
  source 1..86: mol_type = other RNA
actggcgcttctatctgattactctgagctgccatcaccagcgactatgtcgtagtgggtaaagctctcttcggagagcatcagag

SEQ ID NO: 14891 - RNA, 86 nt, synthetic construct
  misc_feature 1..86: note = engineered ribonucleic acid scaffold (ERS) sequence
  source 1..86: mol_type = other RNA
actggcacttctatctgattactctgagtagccatcaccagcgactatgtcgtagtgggtaaagctctcttcggagagcatcagag

SEQ ID NO: 14892 - RNA, 86 nt, synthetic construct
  misc_feature 1..86: note = engineered ribonucleic acid scaffold (ERS) sequence
  source 1..86: mol_type = other RNA
actggcgcttctatctgattactctgagtagccatcaccagcgactatgtcgtagtgggtaaagctctcttcggagagcatcagag

SEQ ID NO: 14893 - RNA, 85 nt, synthetic construct
  misc_feature 1..85: note = engineered ribonucleic acid scaffold (ERS) sequence
  source 1..85: mol_type = other RNA
actggcgcttctatctgattactctgagcaccatcaccagcgactatgtcgtagtgggtaaagctctcttcggagagcatcagag

SEQ ID NO: 14894 - RNA, 85 nt, synthetic construct
  misc_feature 1..85: note = engineered ribonucleic acid scaffold (ERS) sequence
  source 1..85: mol_type = other RNA
actggcacttctatctgattactctgagcgccatcaccagcgactatgtcgtagtgggtaaagctctcttcggagagcatcagag

SEQ ID NO: 14895 - RNA, 85 nt, synthetic construct
  misc_feature 1..85: note = engineered ribonucleic acid scaffold (ERS) sequence
  source 1..85: mol_type = other RNA
actggcgcttctatctgattactctgagggccatcaccagcgactatgtcgtagtgggtaaagctctcttcggagagcatcagag

SEQ ID NO: 14896 - RNA, 85 nt, synthetic construct
  misc_feature 1..85: note = engineered ribonucleic acid scaffold (ERS) sequence
  source 1..85: mol_type = other RNA
actggcgcttctatctgattactctgagtgccgtcaccagcgactatgtcgtagtgggtaaagctctcttcggagagcatcagag

SEQ ID NO: 14897 - RNA, 85 nt, synthetic construct
  misc_feature 1..85: note = engineered ribonucleic acid scaffold (ERS) sequence
  source 1..85: mol_type = other RNA
actggcacttctatctgattactctgagtgccatcaccagcgactatgtcgtagtgggtaaagctctcttcggagagcatcagag

SEQ ID NO: 14898 - RNA, 85 nt, synthetic construct
  misc_feature 1..85: note = engineered ribonucleic acid scaffold (ERS) sequence
  source 1..85: mol_type = other RNA
actggcgcttctatctgattactctgagaaccatcaccagcgactatgtcgtagtgggtaaagctctcttcggagagcatcagag

SEQ ID NO: 14899 - RNA, 85 nt, synthetic construct
  misc_feature 1..85: note = engineered ribonucleic acid scaffold (ERS) sequence
  source 1..85: mol_type = other RNA
actggcgcttctatctgattactctgagagccgtcaccagcgactatgtcgtagtgggtaaagctctcttcggagagcatcagag

SEQ ID NO: 14900 - RNA, 85 nt, synthetic construct
  misc_feature 1..85: note = engineered ribonucleic acid scaffold (ERS) sequence
  source 1..85: mol_type = other RNA
actggcgcttctatctgattactctgagagccttcaccagcgactatgtcgtagtgggtaaagctctcttcggagagcatcagag

SEQ ID NO: 14901 - RNA, 85 nt, synthetic construct
  misc_feature 1..85: note = engineered ribonucleic acid scaffold (ERS) sequence
  source 1..85: mol_type = other RNA
actggggcttctatctgattactctgagacccatcaccagcgactatgtcgtagtgggtaaagctctcttcggagagcatcagag

SEQ ID NO: 14902 - RNA, 85 nt, synthetic construct
  misc_feature 1..85: note = engineered ribonucleic acid scaffold (ERS) sequence
  source 1..85: mol_type = other RNA
actggtgcttctatctgattactctgagagccatcaccagcgactatgtcgtagtgggtaaagctctcttcggagagcatcagag

SEQ ID NO: 14903 - RNA, 85 nt, synthetic construct
  misc_feature 1..85: note = engineered ribonucleic acid scaffold (ERS) sequence
  source 1..85: mol_type = other RNA
actgggccttctatctgattactctgaggcccatcaccagcgactatgtcgtagtgggtaaagctctcttcggagagcatcagag

SEQ ID NO: 14904 - RNA, 86 nt, synthetic construct
  misc_feature 1..86: note = engineered ribonucleic acid scaffold (ERS) sequence
  source 1..86: mol_type = other RNA
actggcccttctatctgattactctgaggagccatcaccagcgactatgtcgtagtgggtaaagctctcttcggagagcatcagag

SEQ ID NO: 14905 - RNA, 85 nt, synthetic construct
  misc_feature 1..85: note = engineered ribonucleic acid scaffold (ERS) sequence
  source 1..85: mol_type = other RNA
actggcccttctatctgattactctgagggccatcaccagcgactatgtcgtagtgggtaaagctctcttcggagagcatcagag

SEQ ID NO: 14906 - RNA, 85 nt, synthetic construct
  misc_feature 1..85: note = engineered ribonucleic acid scaffold (ERS) sequence
  source 1..85: mol_type = other RNA
actggcccttctatctgattactctgagtgccatcaccagcgactatgtcgtagtgggtaaagctctcttcggagagcatcagag

SEQ ID NO: 14907 - RNA, 85 nt, synthetic construct
  misc_feature 1..85: note = engineered ribonucleic acid scaffold (ERS) sequence
  source 1..85: mol_type = other RNA
actggcccttctatctgattactctgagagccatcaccagcgactatgtcgtagtgggtaaagctctcttcggagagcatcagag

SEQ ID NO: 14908 - RNA, 86 nt, synthetic construct
  misc_feature 1..86: note = engineered ribonucleic acid scaffold (ERS) sequence
  source 1..86: mol_type = other RNA
actggcgcttctatctgattactctgagcagccatcaccagcgactatgtcgtagtgggtaaagctctcttcggagagcatcagag

SEQ ID NO: 14909 - RNA, 85 nt, synthetic construct; identical to SEQ ID NO: 894
  misc_feature 1..85: note = engineered ribonucleic acid scaffold (ERS) sequence
  source 1..85: mol_type = other RNA

SEQ ID NO: 14910 - RNA, 85 nt, synthetic construct
  misc_feature 1..85: note = engineered ribonucleic acid scaffold (ERS) sequence
  source 1..85: mol_type = other RNA
actggcgcttctatctgattactctgagtgccatcaccagcgactatgtcgtagtgggtaaagctctcttcggagagcatcagag

SEQ ID NO: 14911 - RNA, 85 nt, synthetic construct
  misc_feature 1..85: note = engineered ribonucleic acid scaffold (ERS) sequence
  source 1..85: mol_type = other RNA
actggcgcttctatctgattactctgagagccatcaccagcgactatgtcgtagtgggtaaagctctcttcggagagcatcagag

SEQ ID NO: 14912 - RNA, 85 nt, synthetic construct
  misc_feature 1..85: note = engineered ribonucleic acid scaffold (ERS) sequence
  source 1..85: mol_type = other RNA
actggctcttctatctgattactctgagcgccatcaccagcgactatgtcgtagtgggtaaagctctcttcggagagcatcagag

SEQ ID NO: 14913 - RNA, 85 nt, synthetic construct
  misc_feature 1..85: note = engineered ribonucleic acid scaffold (ERS) sequence
  source 1..85: mol_type = other RNA
actggctcttctatctgattactctgagggccatcaccagcgactatgtcgtagtgggtaaagctctcttcggagagcatcagag

SEQ ID NO: 14914 - RNA, 85 nt, synthetic construct
  misc_feature 1..85: note = engineered ribonucleic acid scaffold (ERS) sequence
  source 1..85: mol_type = other RNA
actggctcttctatctgattactctgagtgccatcaccagcgactatgtcgtagtgggtaaagctctcttcggagagcatcagag

SEQ ID NO: 14915 - RNA, 85 nt, synthetic construct
  misc_feature 1..85: note = engineered ribonucleic acid scaffold (ERS) sequence
  source 1..85: mol_type = other RNA
actggctcttctatctgattactctgagagccatcaccagcgactatgtcgtagtgggtaaagctctcttcggagagcatcagag

SEQ ID NO: 14916 - RNA, 85 nt, synthetic construct
  misc_feature 1..85: note = engineered ribonucleic acid scaffold (ERS) sequence
  source 1..85: mol_type = other RNA
actggcggttctatctgattactctgagcgccatcaccagcgactatgtcgtagtgggtaaagctctcttcggagagcatcagag

SEQ ID NO: 14917 - RNA, 85 nt, synthetic construct
  misc_feature 1..85: note = engineered ribonucleic acid scaffold (ERS) sequence
  source 1..85: mol_type = other RNA
actggcggttctatctgattactctgagagccatcaccagcgactatgtcgtagtgggtaaagctctcttcggagagcatcagag

SEQ ID NO: 14918 - RNA, 76 nt, synthetic construct
  misc_feature 1..76: note = engineered ribonucleic acid scaffold (ERS) sequence
  source 1..76: mol_type = other RNA
acacacggttctatctgattactctgccgtgttcaccagcgactatgtcgtagtgggtaaagctgcagcatcagag

SEQ ID NO: 14919 - RNA, 76 nt, synthetic construct
  misc_feature 1..76: note = engineered ribonucleic acid scaffold (ERS) sequence
  source 1..76: mol_type = other RNA
acactggtttctatctgattactctgaccagttcaccagcgactatgtcgtagtgggtaaagctgcagcatcagag

SEQ ID NO: 14920 - RNA, 76 nt, synthetic construct
  misc_feature 1..76: note = engineered ribonucleic acid scaffold (ERS) sequence
  source 1..76: mol_type = other RNA
acaggccgttctatctgattactctgcggccttcaccagcgactatgtcgtagtgggtaaagctgcagcatcagag

SEQ ID NO: 14921 - RNA, 76 nt, synthetic construct
  misc_feature 1..76: note = engineered ribonucleic acid scaffold (ERS) sequence
  source 1..76: mol_type = other RNA
acaggtccttctatctgattactctgggaccttcaccagcgactatgtcgtagtgggtaaagctgcagcatcagag

SEQ ID NO: 14922 - RNA, 76 nt, synthetic construct
  misc_feature 1..76: note = engineered ribonucleic acid scaffold (ERS) sequence
  source 1..76: mol_type = other RNA
accagcaattctatctgattactctgttgctgtcaccagcgactatgtcgtagtgggtaaagctgcagcatcagag

SEQ ID NO: 14923 - RNA, 76 nt, synthetic construct
  misc_feature 1..76: note = engineered ribonucleic acid scaffold (ERS) sequence
  source 1..76: mol_type = other RNA
accgagacttctatctgattactctgggctcgtcaccagcgactatgtcgtagtgggtaaagctgcagcatcagag

SEQ ID NO: 14924 - RNA, 76 nt, synthetic construct
  misc_feature 1..76: note = engineered ribonucleic acid scaffold (ERS) sequence
  source 1..76: mol_type = other RNA
acctgtagttctatctgattactctgctacagtcaccagcgactatgtcgtagtgggtaaagctgcagcatcagag

SEQ ID NO: 14925 - RNA, 76 nt, synthetic construct
  misc_feature 1..76: note = engineered ribonucleic acid scaffold (ERS) sequence
  source 1..76: mol_type = other RNA
acgagcacttctatctgattactctggggctctcaccagcgactatgtcgtagtgggtaaagctgcagcatcagag

SEQ ID NO: 14926 - RNA, 76 nt, synthetic construct
  misc_feature 1..76: note = engineered ribonucleic acid scaffold (ERS) sequence
  source 1..76: mol_type = other RNA
acgaggtgttctatctgattactctgcacctctcaccagcgactatgtcgtagtgggtaaagctgcagcatcagag

SEQ ID NO: 14927 - RNA, 76 nt, synthetic construct
  misc_feature 1..76: note = engineered ribonucleic acid scaffold (ERS) sequence
  source 1..76: mol_type = other RNA
acgggactttctatctgattactctgagtccctcaccagcgactatgtcgtagtgggtaaagctgcagcatcagag

SEQ ID NO: 14928 - RNA, 76 nt, synthetic construct
  misc_feature 1..76: note = engineered ribonucleic acid scaffold (ERS) sequence
  source 1..76: mol_type = other RNA
acgggcaattctatctgattactctgttgccctcaccagcgactatgtcgtagtgggtaaagctgcagcatcagag

SEQ ID NO: 14929 - RNA, 76 nt, synthetic construct
  misc_feature 1..76: note = engineered ribonucleic acid scaffold (ERS) sequence
  source 1..76: mol_type = other RNA
actgtgcgttctatctgattactctgcgcacatcaccagcgactatgtcgtagtgggtaaagctgcagcatcagag

SEQ ID NO: 14930 - RNA, 77 nt, synthetic construct
  misc_feature 1..77: note = engineered ribonucleic acid scaffold (ERS) sequence
  source 1..77: mol_type = other RNA
actggcgcttctatctgattactctgggcgccatcaccagcgactatgtcgtagtgggtaaagctgcagcatcagag

SEQ ID NO: 14931 - RNA, 77 nt, synthetic construct
  misc_feature 1..77: note = engineered ribonucleic acid scaffold (ERS) sequence
  source 1..77: mol_type = other RNA
actggcgcttctatctgattactctgggagccatcaccagcgactatgtcgtagtgggtaaagctgcagcatcagag

SEQ ID NO: 14932 - RNA, 77 nt, synthetic construct
  misc_feature 1..77: note = engineered ribonucleic acid scaffold (ERS) sequence
  source 1..77: mol_type = other RNA
actggcgcttctatctgattactctgtgagccatcaccagcgactatgtcgtagtgggtaaagctgcagcatcagag

SEQ ID NO: 14933 - RNA, 78 nt, synthetic construct
  misc_feature 1..78: note = engineered ribonucleic acid scaffold (ERS) sequence
  source 1..78: mol_type = other RNA
actggcgcttctatctgattactctgaggagccatcaccagcgactatgtcgtagtgggtaaagctgcagcatcagag

SEQ ID NO: 14934 - RNA, 77 nt, synthetic construct
  misc_feature 1..77: note = engineered ribonucleic acid scaffold (ERS) sequence
  source 1..77: mol_type = other RNA
actggcgcttctatctgattactctgatagccatcaccagcgactatgtcgtagtgggtaaagctgcagcatcagag

SEQ ID NO: 14935 - RNA, 78 nt, synthetic construct
  misc_feature 1..78: note = engineered ribonucleic acid scaffold (ERS) sequence
  source 1..78: mol_type = other RNA
actggcgcttctatctgattactctgagctgccatcaccagcgactatgtcgtagtgggtaaagctgcagcatcagag

SEQ ID NO: 14936 - RNA, 78 nt, synthetic construct
  misc_feature 1..78: note = engineered ribonucleic acid scaffold (ERS) sequence
  source 1..78: mol_type = other RNA
actggcacttctatctgattactctgagtagccatcaccagcgactatgtcgtagtgggtaaagctgcagcatcagag

SEQ ID NO: 14937 - RNA, 78 nt, synthetic construct
  misc_feature 1..78: note = engineered ribonucleic acid scaffold (ERS) sequence
  source 1..78: mol_type = other RNA
actggcgcttctatctgattactctgagtagccatcaccagcgactatgtcgtagtgggtaaagctgcagcatcagag

SEQ ID NO: 14938 - RNA, 77 nt, synthetic construct
  misc_feature 1..77: note = engineered ribonucleic acid scaffold (ERS) sequence
  source 1..77: mol_type = other RNA
actggcgcttctatctgattactctgagcaccatcaccagcgactatgtcgtagtgggtaaagctgcagcatcagag

SEQ ID NO: 14939 - RNA, 77 nt, synthetic construct
  misc_feature 1..77: note = engineered ribonucleic acid scaffold (ERS) sequence
  source 1..77: mol_type = other RNA
actggcacttctatctgattactctgagcgccatcaccagcgactatgtcgtagtgggtaaagctgcagcatcagag

SEQ ID NO: 14940 - RNA, 77 nt, synthetic construct
  misc_feature 1..77: note = engineered ribonucleic acid scaffold (ERS) sequence
  source 1..77: mol_type = other RNA
actggcgcttctatctgattactctgagggccatcaccagcgactatgtcgtagtgggtaaagctgcagcatcagag

SEQ ID NO: 14941 - RNA, 77 nt, synthetic construct
  misc_feature 1..77: note = engineered ribonucleic acid scaffold (ERS) sequence
  source 1..77: mol_type = other RNA
actggcgcttctatctgattactctgagtgccgtcaccagcgactatgtcgtagtgggtaaagctgcagcatcagag

SEQ ID NO: 14942 - RNA, 77 nt, synthetic construct
  misc_feature 1..77: note = engineered ribonucleic acid scaffold (ERS) sequence
  source 1..77: mol_type = other RNA
actggcacttctatctgattactctgagtgccatcaccagcgactatgtcgtagtgggtaaagctgcagcatcagag

SEQ ID NO: 14943 - RNA, 77 nt, synthetic construct
  misc_feature 1..77: note = engineered ribonucleic acid scaffold (ERS) sequence
  source 1..77: mol_type = other RNA
actggcgcttctatctgattactctgagaaccatcaccagcgactatgtcgtagtgggtaaagctgcagcatcagag

SEQ ID NO: 14944 - RNA, 77 nt, synthetic construct
  misc_feature 1..77: note = engineered ribonucleic acid scaffold (ERS) sequence
  source 1..77: mol_type = other RNA
actggcgcttctatctgattactctgagagccgtcaccagcgactatgtcgtagtgggtaaagctgcagcatcagag

SEQ ID NO: 14945 - RNA, 77 nt, synthetic construct
  misc_feature 1..77: note = engineered ribonucleic acid scaffold (ERS) sequence
  source 1..77: mol_type = other RNA
actggcgcttctatctgattactctgagagccttcaccagcgactatgtcgtagtgggtaaagctgcagcatcagag

SEQ ID NO: 14946 - RNA, 77 nt, synthetic construct
  misc_feature 1..77: note = engineered ribonucleic acid scaffold (ERS) sequence
  source 1..77: mol_type = other RNA
actggggcttctatctgattactctgagacccatcaccagcgactatgtcgtagtgggtaaagctgcagcatcagag

SEQ ID NO: 14947 - RNA, 77 nt, synthetic construct
  misc_feature 1..77: note = engineered ribonucleic acid scaffold (ERS) sequence
  source 1..77: mol_type = other RNA
actggtgcttctatctgattactctgagagccatcaccagcgactatgtcgtagtgggtaaagctgcagcatcagag

SEQ ID NO: 14948 - RNA, 77 nt, synthetic construct
  misc_feature 1..77: note = engineered ribonucleic acid scaffold (ERS) sequence
  source 1..77: mol_type = other RNA
actgggccttctatctgattactctgaggcccatcaccagcgactatgtcgtagtgggtaaagctgcagcatcagag

SEQ ID NO: 14949 - RNA, 78 nt, synthetic construct
  misc_feature 1..78: note = engineered ribonucleic acid scaffold (ERS) sequence
  source 1..78: mol_type = other RNA
actggcccttctatctgattactctgaggagccatcaccagcgactatgtcgtagtgggtaaagctgcagcatcagag

SEQ ID NO: 14950 - RNA, 77 nt, synthetic construct
  misc_feature 1..77: note = engineered ribonucleic acid scaffold (ERS) sequence
  source 1..77: mol_type = other RNA
actggcccttctatctgattactctgagggccatcaccagcgactatgtcgtagtgggtaaagctgcagcatcagag

SEQ ID NO: 14951 - RNA, 77 nt, synthetic construct
  misc_feature 1..77: note = engineered ribonucleic acid scaffold (ERS) sequence
  source 1..77: mol_type = other RNA
actggcccttctatctgattactctgagtgccatcaccagcgactatgtcgtagtgggtaaagctgcagcatcagag

SEQ ID NO: 14952 - RNA, 77 nt, synthetic construct
  misc_feature 1..77: note = engineered ribonucleic acid scaffold (ERS) sequence
  source 1..77: mol_type = other RNA
actggcccttctatctgattactctgagagccatcaccagcgactatgtcgtagtgggtaaagctgcagcatcagag

SEQ ID NO: 14953 - RNA, 78 nt, synthetic construct
  misc_feature 1..78: note = engineered ribonucleic acid scaffold (ERS) sequence
  source 1..78: mol_type = other RNA
actggcgcttctatctgattactctgagcagccatcaccagcgactatgtcgtagtgggtaaagctgcagcatcagag

SEQ ID NO: 14954 - RNA, 77 nt, synthetic construct; identical to SEQ ID NO: 898
  misc_feature 1..77: note = engineered ribonucleic acid scaffold (ERS) sequence
  source 1..77: mol_type = other RNA

SEQ ID NO: 14955 - RNA, 77 nt, synthetic construct
  misc_feature 1..77: note = engineered ribonucleic acid scaffold (ERS) sequence
  source 1..77: mol_type = other RNA
actggcgcttctatctgattactctgagtgccatcaccagcgactatgtcgtagtgggtaaagctgcagcatcagag

SEQ ID NO: 14956 - RNA, 77 nt, synthetic construct
  misc_feature 1..77: note = engineered ribonucleic acid scaffold (ERS) sequence
  source 1..77: mol_type = other RNA
actggcgcttctatctgattactctgagagccatcaccagcgactatgtcgtagtgggtaaagctgcagcatcagag

SEQ ID NO: 14957 - RNA, 77 nt, synthetic construct
  misc_feature 1..77: note = engineered ribonucleic acid scaffold (ERS) sequence
  source 1..77: mol_type = other RNA
actggctcttctatctgattactctgagcgccatcaccagcgactatgtcgtagtgggtaaagctgcagcatcagag

SEQ ID NO: 14958 - RNA, 77 nt, synthetic construct
  misc_feature 1..77: note = engineered ribonucleic acid scaffold (ERS) sequence
  source 1..77: mol_type = other RNA
actggctcttctatctgattactctgagggccatcaccagcgactatgtcgtagtgggtaaagctgcagcatcagag

SEQ ID NO: 14959 - RNA, 77 nt, synthetic construct
  misc_feature 1..77: note = engineered ribonucleic acid scaffold (ERS) sequence
  source 1..77: mol_type = other RNA
actggctcttctatctgattactctgagtgccatcaccagcgactatgtcgtagtgggtaaagctgcagcatcagag

SEQ ID NO: 14960 - RNA, 77 nt, synthetic construct
  misc_feature 1..77: note = engineered ribonucleic acid scaffold (ERS) sequence
  source 1..77: mol_type = other RNA
actggctcttctatctgattactctgagagccatcaccagcgactatgtcgtagtgggtaaagctgcagcatcagag

SEQ ID NO: 14961 - RNA, 77 nt, synthetic construct
  misc_feature 1..77: note = engineered ribonucleic acid scaffold (ERS) sequence
  source 1..77: mol_type = other RNA
actggcggttctatctgattactctgagcgccatcaccagcgactatgtcgtagtgggtaaagctgcagcatcagag

SEQ ID NO: 14962 - RNA, 77 nt, synthetic construct
  misc_feature 1..77: note = engineered ribonucleic acid scaffold (ERS) sequence
  source 1..77: mol_type = other RNA
actggcggttctatctgattactctgagagccatcaccagcgactatgtcgtagtgggtaaagctgcagcatcagag

SEQ ID NO: 14963 - RNA, 82 nt, synthetic construct
  misc_feature 1..82: note = engineered ribonucleic acid scaffold (ERS) sequence
  source 1..82: mol_type = other RNA
acacacggttctatctgattactctgccgtgttcaccagcgactatgtcgtagtgggtaaagctgcttcggcagcatcagag

SEQ ID NO: 14964 - RNA, 82 nt, synthetic construct
  misc_feature 1..82: note = engineered ribonucleic acid scaffold (ERS) sequence
  source 1..82: mol_type = other RNA
acactggtttctatctgattactctgaccagttcaccagcgactatgtcgtagtgggtaaagctgcttcggcagcatcagag

SEQ ID NO: 14965 - RNA, 82 nt, synthetic construct
  misc_feature 1..82: note = engineered ribonucleic acid scaffold (ERS) sequence
  source 1..82: mol_type = other RNA
acaggccgttctatctgattactctgcggccttcaccagcgactatgtcgtagtgggtaaagctgcttcggcagcatcagag

SEQ ID NO: 14966 - RNA, 82 nt, synthetic construct
  misc_feature 1..82: note = engineered ribonucleic acid scaffold (ERS) sequence
  source 1..82: mol_type = other RNA
acaggtccttctatctgattactctgggaccttcaccagcgactatgtcgtagtgggtaaagctgcttcggcagcatcagag

SEQ ID NO: 14967 - RNA, 82 nt, synthetic construct
  misc_feature 1..82: note = engineered ribonucleic acid scaffold (ERS) sequence
  source 1..82: mol_type = other RNA
accagcaattctatctgattactctgttgctgtcaccagcgactatgtcgtagtgggtaaagctgcttcggcagcatcagag

SEQ ID NO: 14968 - RNA, 82 nt, synthetic construct
  misc_feature 1..82: note = engineered ribonucleic acid scaffold (ERS) sequence
  source 1..82: mol_type = other RNA
accgagacttctatctgattactctgggctcgtcaccagcgactatgtcgtagtgggtaaagctgcttcggcagcatcagag

SEQ ID NO: 14969 - RNA, 82 nt, synthetic construct
  misc_feature 1..82: note = engineered ribonucleic acid scaffold (ERS) sequence
  source 1..82: mol_type = other RNA
acctgtagttctatctgattactctgctacagtcaccagcgactatgtcgtagtgggtaaagctgcttcggcagcatcagag

SEQ ID NO: 14970 - RNA, 82 nt, synthetic construct
  misc_feature 1..82: note = engineered ribonucleic acid scaffold (ERS) sequence
  source 1..82: mol_type = other RNA
acgagcacttctatctgattactctggggctctcaccagcgactatgtcgtagtgggtaaagctgcttcggcagcatcagag

SEQ ID NO: 14971 - RNA, 82 nt, synthetic construct
  misc_feature 1..82: note = engineered ribonucleic acid scaffold (ERS) sequence
  source 1..82: mol_type = other RNA
acgaggtgttctatctgattactctgcacctctcaccagcgactatgtcgtagtgggtaaagctgcttcggcagcatcagag

SEQ ID NO: 14972 - RNA, 82 nt, synthetic construct
  misc_feature 1..82: note = engineered ribonucleic acid scaffold (ERS) sequence
  source 1..82: mol_type = other RNA
acgggactttctatctgattactctgagtccctcaccagcgactatgtcgtagtgggtaaagctgcttcggcagcatcagag

SEQ ID NO: 14973 - RNA, 82 nt, synthetic construct
  misc_feature 1..82: note = engineered ribonucleic acid scaffold (ERS) sequence
  source 1..82: mol_type = other RNA
acgggcaattctatctgattactctgttgccctcaccagcgactatgtcgtagtgggtaaagctgcttcggcagcatcagag

SEQ ID NO: 14974 - RNA, 82 nt, synthetic construct
  misc_feature 1..82: note = engineered ribonucleic acid scaffold (ERS) sequence
  source 1..82: mol_type = other RNA
actgtgcgttctatctgattactctgcgcacatcaccagcgactatgtcgtagtgggtaaagctgcttcggcagcatcagag

SEQ ID NO: 14975 - RNA, 83 nt, synthetic construct
  misc_feature 1..83: note = engineered ribonucleic acid scaffold (ERS) sequence
  source 1..83: mol_type = other RNA
actggcgcttctatctgattactctgggcgccatcaccagcgactatgtcgtagtgggtaaagctgcttcggcagcatcagag

SEQ ID NO: 14976 - RNA, 83 nt, synthetic construct
  misc_feature 1..83: note = engineered ribonucleic acid scaffold (ERS) sequence
  source 1..83: mol_type = other RNA
actggcgcttctatctgattactctgggagccatcaccagcgactatgtcgtagtgggtaaagctgcttcggcagcatcagag

SEQ ID NO: 14977 - RNA, 83 nt, synthetic construct
  misc_feature 1..83: note = engineered ribonucleic acid scaffold (ERS) sequence
  source 1..83: mol_type = other RNA
actggcgcttctatctgattactctgtgagccatcaccagcgactatgtcgtagtgggtaaagctgcttcggcagcatcagag

SEQ ID NO: 14978 - RNA, 84 nt, synthetic construct
  misc_feature 1..84: note = engineered ribonucleic acid scaffold (ERS) sequence
  source 1..84: mol_type = other RNA
actggcgcttctatctgattactctgaggagccatcaccagcgactatgtcgtagtgggtaaagctgcttcggcagcatcagag

SEQ ID NO: 14979 - RNA, 83 nt, synthetic construct
  misc_feature 1..83: note = engineered ribonucleic acid scaffold (ERS) sequence
  source 1..83: mol_type = other RNA
actggcgcttctatctgattactctgatagccatcaccagcgactatgtcgtagtgggtaaagctgcttcggcagcatcagag

SEQ ID NO: 14980 - RNA, 84 nt, synthetic construct
  misc_feature 1..84: note = engineered ribonucleic acid scaffold (ERS) sequence
  source 1..84: mol_type = other RNA
actggcgcttctatctgattactctgagctgccatcaccagcgactatgtcgtagtgggtaaagctgcttcggcagcatcagag

SEQ ID NO: 14981 - RNA, 84 nt, synthetic construct
  misc_feature 1..84: note = engineered ribonucleic acid scaffold (ERS) sequence
  source 1..84: mol_type = other RNA
actggcacttctatctgattactctgagtagccatcaccagcgactatgtcgtagtgggtaaagctgcttcggcagcatcagag

SEQ ID NO: 14982 - RNA, 84 nt, synthetic construct
  misc_feature 1..84: note = engineered ribonucleic acid scaffold (ERS) sequence
  source 1..84: mol_type = other RNA
actggcgcttctatctgattactctgagtagccatcaccagcgactatgtcgtagtgggtaaagctgcttcggcagcatcagag

SEQ ID NO: 14983 - RNA, 83 nt, synthetic construct
  misc_feature 1..83: note = engineered ribonucleic acid scaffold (ERS) sequence
  source 1..83: mol_type = other RNA
actggcgcttctatctgattactctgagcaccatcaccagcgactatgtcgtagtgggtaaagctgcttcggcagcatcagag

SEQ ID NO: 14984 - RNA, 83 nt, synthetic construct
  misc_feature 1..83: note = engineered ribonucleic acid scaffold (ERS) sequence
  source 1..83: mol_type = other RNA
actggcacttctatctgattactctgagcgccatcaccagcgactatgtcgtagtgggtaaagctgcttcggcagcatcagag

SEQ ID NO: 14985 - RNA, 83 nt, synthetic construct
  misc_feature 1..83: note = engineered ribonucleic acid scaffold (ERS) sequence
  source 1..83: mol_type = other RNA
actggcgcttctatctgattactctgagggccatcaccagcgactatgtcgtagtgggtaaagctgcttcggcagcatcagag

SEQ ID NO: 14986 - RNA, 83 nt, synthetic construct
  misc_feature 1..83: note = engineered ribonucleic acid scaffold (ERS) sequence
  source 1..83: mol_type = other RNA
actggcgcttctatctgattactctgagtgccgtcaccagcgactatgtcgtagtgggtaaagctgcttcggcagcatcagag

SEQ ID NO: 14987 - RNA, 83 nt, synthetic construct
  misc_feature 1..83: note = engineered ribonucleic acid scaffold (ERS) sequence
  source 1..83: mol_type = other RNA
actggcacttctatctgattactctgagtgccatcaccagcgactatgtcgtagtgggtaaagctgcttcggcagcatcagag

SEQ ID NO: 14988 - RNA, 83 nt, synthetic construct
  misc_feature 1..83: note = engineered ribonucleic acid scaffold (ERS) sequence
  source 1..83: mol_type = other RNA
actggcgcttctatctgattactctgagaaccatcaccagcgactatgtcgtagtgggtaaagctgcttcggcagcatcagag

SEQ ID NO: 14989 - RNA, 83 nt, synthetic construct
  misc_feature 1..83: note = engineered ribonucleic acid scaffold (ERS) sequence
  source 1..83: mol_type = other RNA
actggcgcttctatctgattactctgagagccgtcaccagcgactatgtcgtagtgggtaaagctgcttcggcagcatcagag

SEQ ID NO: 14990 - RNA, 83 nt, synthetic construct
  misc_feature 1..83: note = engineered ribonucleic acid scaffold (ERS) sequence
  source 1..83: mol_type = other RNA
actggcgcttctatctgattactctgagagccttcaccagcgactatgtcgtagtgggtaaagctgcttcggcagcatcagag

SEQ ID NO: 14991 - RNA, 83 nt, synthetic construct
  misc_feature 1..83: note = engineered ribonucleic acid scaffold (ERS) sequence
  source 1..83: mol_type = other RNA
actggggcttctatctgattactctgagacccatcaccagcgactatgtcgtagtgggtaaagctgcttcggcagcatcagag

SEQ ID NO: 14992 - RNA, 83 nt, synthetic construct
  misc_feature 1..83: note = engineered ribonucleic acid scaffold (ERS) sequence
  source 1..83: mol_type = other RNA
actggtgcttctatctgattactctgagagccatcaccagcgactatgtcgtagtgggtaaagctgcttcggcagcatcagag

SEQ ID NO: 14993 - RNA, 83 nt, synthetic construct
  misc_feature 1..83: note = engineered ribonucleic acid scaffold (ERS) sequence
  source 1..83: mol_type = other RNA
actgggccttctatctgattactctgaggcccatcaccagcgactatgtcgtagtgggtaaagctgcttcggcagcatcagag

SEQ ID NO: 14994 - RNA, 84 nt, synthetic construct
  misc_feature 1..84: note = engineered ribonucleic acid scaffold (ERS) sequence
  source 1..84: mol_type = other RNA
actggcccttctatctgattactctgaggagccatcaccagcgactatgtcgtagtgggtaaagctgcttcggcagcatcagag

SEQ ID NO: 14995 - RNA, 83 nt, synthetic construct
  misc_feature 1..83: note = engineered ribonucleic acid scaffold (ERS) sequence
  source 1..83: mol_type = other RNA
actggcccttctatctgattactctgagggccatcaccagcgactatgtcgtagtgggtaaagctgcttcggcagcatcagag

SEQ ID NO: 14996 - RNA, 83 nt, synthetic construct
  misc_feature 1..83: note = engineered ribonucleic acid scaffold (ERS) sequence
  source 1..83: mol_type = other RNA
actggcccttctatctgattactctgagtgccatcaccagcgactatgtcgtagtgggtaaagctgcttcggcagcatcagag

SEQ ID NO: 14997 - RNA, 83 nt, synthetic construct
  misc_feature 1..83: note = engineered ribonucleic acid scaffold (ERS) sequence
  source 1..83: mol_type = other RNA
actggcccttctatctgattactctgagagccatcaccagcgactatgtcgtagtgggtaaagctgcttcggcagcatcagag

SEQ ID NO: 14998 - RNA, 84 nt, synthetic construct
  misc_feature 1..84: note = engineered ribonucleic acid scaffold (ERS) sequence
  source 1..84: mol_type = other RNA
actggcgcttctatctgattactctgagcagccatcaccagcgactatgtcgtagtgggtaaagctgcttcggcagcatcagag

SEQ ID NO: 14999 - RNA, 83 nt, synthetic construct; identical to SEQ ID NO: 897
  misc_feature 1..83: note = engineered ribonucleic acid scaffold (ERS) sequence
  source 1..83: mol_type = other RNA

SEQ ID NO: 15000 - RNA, 83 nt, synthetic construct
  misc_feature 1..83: note = engineered ribonucleic acid scaffold (ERS) sequence
  source 1..83: mol_type = other RNA
actggcgcttctatctgattactctgagtgccatcaccagcgactatgtcgtagtgggtaaagctgcttcggcagcatcagag

SEQ ID NO: 15001 - RNA, 83 nt, synthetic construct
  misc_feature 1..83: note = engineered ribonucleic acid scaffold (ERS) sequence
  source 1..83: mol_type = other RNA
actggcgcttctatctgattactctgagagccatcaccagcgactatgtcgtagtgggtaaagctgcttcggcagcatcagag

SEQ ID NO: 15002 - RNA, 83 nt, synthetic construct
  misc_feature 1..83: note = engineered ribonucleic acid scaffold (ERS) sequence
  source 1..83: mol_type = other RNA
actggctcttctatctgattactctgagcgccatcaccagcgactatgtcgtagtgggtaaagctgcttcggcagcatcagag

SEQ ID NO: 15003 - RNA, 83 nt, synthetic construct
  misc_feature 1..83: note = engineered ribonucleic acid scaffold (ERS) sequence
  source 1..83: mol_type = other RNA
actggctcttctatctgattactctgagggccatcaccagcgactatgtcgtagtgggtaaagctgcttcggcagcatcagag

SEQ ID NO: 15004 - RNA, 83 nt, synthetic construct
  misc_feature 1..83: note = engineered ribonucleic acid scaffold (ERS) sequence
  source 1..83: mol_type = other RNA
actggctcttctatctgattactctgagtgccatcaccagcgactatgtcgtagtgggtaaagctgcttcggcagcatcagag

SEQ ID NO: 15005 - RNA, 83 nt, synthetic construct
  misc_feature 1..83: note = engineered ribonucleic acid scaffold (ERS) sequence
  source 1..83: mol_type = other RNA
actggctcttctatctgattactctgagagccatcaccagcgactatgtcgtagtgggtaaagctgcttcggcagcatcagag

SEQ ID NO: 15006 - RNA, 83 nt, synthetic construct
  misc_feature 1..83: note = engineered ribonucleic acid scaffold (ERS) sequence
  source 1..83: mol_type = other RNA
actggcggttctatctgattactctgagcgccatcaccagcgactatgtcgtagtgggtaaagctgcttcggcagcatcagag

SEQ ID NO: 15007 - RNA, 83 nt, synthetic construct
  misc_feature 1..83: note = engineered ribonucleic acid scaffold (ERS) sequence
  source 1..83: mol_type = other RNA
actggcggttctatctgattactctgagagccatcaccagcgactatgtcgtagtgggtaaagctgcttcggcagcatcagag

SEQ ID NO: 15008 - RNA, 88 nt, synthetic construct
  misc_feature 1..88: note = engineered ribonucleic acid scaffold (ERS) sequence
  source 1..88: mol_type = other RNA
acacacggttctatctgattactctgccgtgttcaccagcgactatgtcgtagtgggtaaaggtccctcttcggagggaacatcagag

SEQ ID NO: 15009 - RNA, 88 nt, synthetic construct
  misc_feature 1..88: note = engineered ribonucleic acid scaffold (ERS) sequence
  source 1..88: mol_type = other RNA
acactggtttctatctgattactctgaccagttcaccagcgactatgtcgtagtgggtaaaggtccctcttcggagggaacatcagag

SEQ ID NO: 15010 - RNA, 88 nt, synthetic construct
  misc_feature 1..88: note = engineered ribonucleic acid scaffold (ERS) sequence
  source 1..88: mol_type = other RNA
acaggccgttctatctgattactctgcggccttcaccagcgactatgtcgtagtgggtaaaggtccctcttcggagggaacatcagag

SEQ ID NO: 15011 - RNA, 88 nt, synthetic construct
  misc_feature 1..88: note = engineered ribonucleic acid scaffold (ERS) sequence
  source 1..88: mol_type = other RNA
acaggtccttctatctgattactctgggaccttcaccagcgactatgtcgtagtgggtaaaggtccctcttcggagggaacatcagag

SEQ ID NO: 15012 - RNA, 88 nt, synthetic construct
  misc_feature 1..88: note = engineered ribonucleic acid scaffold (ERS) sequence
  source 1..88: mol_type = other RNA
accagcaattctatctgattactctgttgctgtcaccagcgactatgtcgtagtgggtaaaggtccctcttcggagggaacatcagag

SEQ ID NO: 15013 - RNA, 88 nt, synthetic construct
  misc_feature 1..88: note = engineered ribonucleic acid scaffold (ERS) sequence
  source 1..88: mol_type = other RNA
accgagacttctatctgattactctgggctcgtcaccagcgactatgtcgtagtgggtaaaggtccctcttcggagggaacatcagag

SEQ ID NO: 15014 - RNA, 88 nt, synthetic construct
  misc_feature 1..88: note = engineered ribonucleic acid scaffold (ERS) sequence
  source 1..88: mol_type = other RNA
acctgtagttctatctgattactctgctacagtcaccagcgactatgtcgtagtgggtaaaggtccctcttcggagggaacatcagag

SEQ ID NO: 15015 - RNA, 88 nt, synthetic construct
  misc_feature 1..88: note = engineered ribonucleic acid scaffold (ERS) sequence
  source 1..88: mol_type = other RNA
acgagcacttctatctgattactctggggctctcaccagcgactatgtcgtagtgggtaaaggtccctcttcggagggaacatcagag

SEQ ID NO: 15016 - RNA, 88 nt, synthetic construct
  misc_feature 1..88: note = engineered ribonucleic acid scaffold (ERS) sequence
  source 1..88: mol_type = other RNA
acgaggtgttctatctgattactctgcacctctcaccagcgactatgtcgtagtgggtaaaggtccctcttcggagggaacatcagag

SEQ ID NO: 15017 - RNA, 88 nt, synthetic construct
  misc_feature 1..88: note = engineered ribonucleic acid scaffold (ERS) sequence
  source 1..88: mol_type = other RNA
acgggactttctatctgattactctgagtccctcaccagcgactatgtcgtagtgggtaaaggtccctcttcggagggaacatcagag

SEQ ID NO: 15018 - RNA, 88 nt, synthetic construct
  misc_feature 1..88: note = engineered ribonucleic acid scaffold (ERS) sequence
  source 1..88: mol_type = other RNA
acgggcaattctatctgattactctgttgccctcaccagcgactatgtcgtagtgggtaaaggtccctcttcggagggaacatcagag

SEQ ID NO: 15019 - RNA, 88 nt, synthetic construct
  misc_feature 1..88: note = engineered ribonucleic acid scaffold (ERS) sequence
  source 1..88: mol_type = other RNA
actgtgcgttctatctgattactctgcgcacatcaccagcgactatgtcgtagtgggtaaaggtccctcttcggagggaacatcagag

SEQ ID NO: 15020 - RNA, 89 nt, synthetic construct
  misc_feature 1..89: note = engineered ribonucleic acid scaffold (ERS) sequence
  source 1..89: mol_type = other RNA
actggcgcttctatctgattactctgggcgccatcaccagcgactatgtcgtagtgggtaaaggtccctcttcggagggaacatcagag

SEQ ID NO: 15021 - RNA, 89 nt, synthetic construct
  misc_feature 1..89: note = engineered ribonucleic acid scaffold (ERS) sequence
  source 1..89: mol_type = other RNA
actggcgcttctatctgattactctgggagccatcaccagcgactatgtcgtagtgggtaaaggtccctcttcggagggaacatcagag

SEQ ID NO: 15022 - RNA, 89 nt, synthetic construct
  misc_feature 1..89: note = engineered ribonucleic acid scaffold (ERS) sequence
  source 1..89: mol_type = other RNA
actggcgcttctatctgattactctgtgagccatcaccagcgactatgtcgtagtgggtaaaggtccctcttcggagggaacatcagag

SEQ ID NO: 15023 - RNA, 90 nt, synthetic construct
  misc_feature 1..90: note = engineered ribonucleic acid scaffold (ERS) sequence
  source 1..90: mol_type = other RNA
actggcgcttctatctgattactctgaggagccatcaccagcgactatgtcgtagtgggtaaaggtccctcttcggagggaacatcagag

SEQ ID NO: 15024 - RNA, 89 nt, synthetic construct
  misc_feature 1..89: note = engineered ribonucleic acid scaffold (ERS) sequence
  source 1..89: mol_type = other RNA
actggcgcttctatctgattactctgatagccatcaccagcgactatgtcgtagtgggtaaaggtccctcttcggagggaacatcagag

SEQ ID NO: 15025 - RNA, 90 nt, synthetic construct
  misc_feature 1..90: note = engineered ribonucleic acid scaffold (ERS) sequence
  source 1..90: mol_type = other RNA
actggcgcttctatctgattactctgagctgccatcaccagcgactatgtcgtagtgggtaaaggtccctcttcggagggaacatcagag

SEQ ID NO: 15026 - RNA, 90 nt, synthetic construct
  misc_feature 1..90: note = engineered ribonucleic acid scaffold (ERS) sequence
  source 1..90: mol_type = other RNA
actggcacttctatctgattactctgagtagccatcaccagcgactatgtcgtagtgggtaaaggtccctcttcggagggaacatcagag

SEQ ID NO: 15027 - RNA, 90 nt, synthetic construct
  misc_feature 1..90: note = engineered ribonucleic acid scaffold (ERS) sequence
  source 1..90: mol_type = other RNA
actggcgcttctatctgattactctgagtagccatcaccagcgactatgtcgtagtgggtaaaggtccctcttcggagggaacatcagag

SEQ ID NO: 15028 - RNA, 89 nt, synthetic construct
  misc_feature 1..89: note = engineered ribonucleic acid scaffold (ERS) sequence
  source 1..89: mol_type = other RNA
actggcgcttctatctgattactctgagcaccatcaccagcgactatgtcgtagtgggtaaaggtccctcttcggagggaacatcagag

SEQ ID NO: 15029 - RNA, 89 nt, synthetic construct
  misc_feature 1..89: note = engineered ribonucleic acid scaffold (ERS) sequence
  source 1..89: mol_type = other RNA
actggcacttctatctgattactctgagcgccatcaccagcgactatgtcgtagtgggtaaaggtccctcttcggagggaacatcagag

SEQ ID NO: 15030 - RNA, 89 nt, synthetic construct
  misc_feature 1..89: note = engineered ribonucleic acid scaffold (ERS) sequence
  source 1..89: mol_type = other RNA
actggcgcttctatctgattactctgagggccatcaccagcgactatgtcgtagtgggtaaaggtccctcttcggagggaacatcagag

SEQ ID NO: 15031 - RNA, 89 nt, synthetic construct
  misc_feature 1..89: note = engineered ribonucleic acid scaffold (ERS) sequence
  source 1..89: mol_type = other RNA
actggcgcttctatctgattactctgagtgccgtcaccagcgactatgtcgtagtgggtaaaggtccctcttcggagggaacatcagag

SEQ ID NO: 15032 - RNA, 89 nt, synthetic construct
  misc_feature 1..89: note = engineered ribonucleic acid scaffold (ERS) sequence
  source 1..89: mol_type = other RNA
actggcacttctatctgattactctgagtgccatcaccagcgactatgtcgtagtgggtaaaggtccctcttcggagggaacatcagag

SEQ ID NO: 15033 - RNA, 89 nt, synthetic construct
  misc_feature 1..89: note = engineered ribonucleic acid scaffold (ERS) sequence
  source 1..89: mol_type = other RNA
actggcgcttctatctgattactctgagaaccatcaccagcgactatgtcgtagtgggtaaaggtccctcttcggagggaacatcagag

SEQ ID NO: 15034 - RNA, 89 nt, synthetic construct
  misc_feature 1..89: note = engineered ribonucleic acid scaffold (ERS) sequence
  source 1..89: mol_type = other RNA
actggcgcttctatctgattactctgagagccgtcaccagcgactatgtcgtagtgggtaaaggtccctcttcggagggaacatcagag

SEQ ID NO: 15035 - RNA, 89 nt, synthetic construct
  misc_feature 1..89: note = engineered ribonucleic acid scaffold (ERS) sequence
  source 1..89: mol_type = other RNA
actggcgcttctatctgattactctgagagccttcaccagcgactatgtcgtagtgggtaaaggtccctcttcggagggaacatcagag

SEQ ID NO: 15036 - RNA, 89 nt, synthetic construct
  misc_feature 1..89: note = engineered ribonucleic acid scaffold (ERS) sequence
  source 1..89: mol_type = other RNA
actggggcttctatctgattactctgagacccatcaccagcgactatgtcgtagtgggtaaaggtccctcttcggagggaacatcagag

SEQ ID NO: 15037 - RNA, 89 nt, synthetic construct
  misc_feature 1..89: note = engineered ribonucleic acid scaffold (ERS) sequence
  source 1..89: mol_type = other RNA
actggtgcttctatctgattactctgagagccatcaccagcgactatgtcgtagtgggtaaaggtccctcttcggagggaacatcagag

SEQ ID NO: 15038 - RNA, 89 nt, synthetic construct
  misc_feature 1..89: note = engineered ribonucleic acid scaffold (ERS) sequence
  source 1..89: mol_type = other RNA
actgggccttctatctgattactctgaggcccatcaccagcgactatgtcgtagtgggtaaaggtccctcttcggagggaacatcagag

SEQ ID NO: 15039 - RNA, 90 nt, synthetic construct
  misc_feature 1..90: note = engineered ribonucleic acid scaffold (ERS) sequence
  source 1..90: mol_type = other RNA
actggcccttctatctgattactctgaggagccatcaccagcgactatgtcgtagtgggtaaaggtccctcttcggagggaacatcagag

SEQ ID NO: 15040 - RNA, 89 nt, synthetic construct
  misc_feature 1..89: note = engineered ribonucleic acid scaffold (ERS) sequence
  source 1..89: mol_type = other RNA
actggcccttctatctgattactctgagggccatcaccagcgactatgtcgtagtgggtaaaggtccctcttcggagggaacatcagag

SEQ ID NO: 15041 - RNA, 89 nt, synthetic construct
  misc_feature 1..89: note = engineered ribonucleic acid scaffold (ERS) sequence
  source 1..89: mol_type = other RNA
actggcccttctatctgattactctgagtgccatcaccagcgactatgtcgtagtgggtaaaggtccctcttcggagggaacatcagag

SEQ ID NO: 15042 - RNA, 89 nt, synthetic construct
  misc_feature 1..89: note = engineered ribonucleic acid scaffold (ERS) sequence
  source 1..89: mol_type = other RNA
actggcccttctatctgattactctgagagccatcaccagcgactatgtcgtagtgggtaaaggtccctcttcggagggaacatcagag

SEQ ID NO: 15043 - RNA, 90 nt, synthetic construct
  misc_feature 1..90: note = engineered ribonucleic acid scaffold (ERS) sequence
  source 1..90: mol_type = other RNA
actggcgcttctatctgattactctgagcagccatcaccagcgactatgtcgtagtgggtaaaggtccctcttcggagggaacatcagag

SEQ ID NO: 15044 - RNA, 89 nt, synthetic construct; identical to SEQ ID NO: 902
  misc_feature 1..89: note = engineered ribonucleic acid scaffold (ERS) sequence
  source 1..89: mol_type = other RNA

SEQ ID NO: 15045 - RNA, 89 nt, synthetic construct
  misc_feature 1..89: note = engineered ribonucleic acid scaffold (ERS) sequence
  source 1..89: mol_type = other RNA
actggcgcttctatctgattactctgagtgccatcaccagcgactatgtcgtagtgggtaaaggtccctcttcggagggaacatcagag

SEQ ID NO: 15046 - RNA, 89 nt, synthetic construct
  misc_feature 1..89: note = engineered ribonucleic acid scaffold (ERS) sequence
  source 1..89: mol_type = other RNA
actggcgcttctatctgattactctgagagccatcaccagcgactatgtcgtagtgggtaaaggtccctcttcggagggaacatcagag

SEQ ID NO: 15047 - RNA, 89 nt, synthetic construct
  misc_feature 1..89: note = engineered ribonucleic acid scaffold (ERS) sequence
  source 1..89: mol_type = other RNA
actggctcttctatctgattactctgagcgccatcaccagcgactatgtcgtagtgggtaaaggtccctcttcggagggaacatcagag

SEQ ID NO: 15048 - RNA, 89 nt, synthetic construct
  misc_feature 1..89: note = engineered ribonucleic acid scaffold (ERS) sequence
  source 1..89: mol_type = other RNA
actggctcttctatctgattactctgagggccatcaccagcgactatgtcgtagtgggtaaaggtccctcttcggagggaacatcagag

SEQ ID NO: 15049 - RNA, 89 nt, synthetic construct
  misc_feature 1..89: note = engineered ribonucleic acid scaffold (ERS) sequence
  source 1..89: mol_type = other RNA
actggctcttctatctgattactctgagtgccatcaccagcgactatgtcgtagtgggtaaaggtccctcttcggagggaacatcagag

SEQ ID NO: 15050 - RNA, 89 nt, synthetic construct
  misc_feature 1..89: note = engineered ribonucleic acid scaffold (ERS) sequence
  source 1..89: mol_type = other RNA
actggctcttctatctgattactctgagagccatcaccagcgactatgtcgtagtgggtaaaggtccctcttcggagggaacatcagag

SEQ ID NO: 15051 - RNA, 89 nt, synthetic construct
  misc_feature 1..89: note = engineered ribonucleic acid scaffold (ERS) sequence
  source 1..89: mol_type = other RNA
actggcggttctatctgattactctgagcgccatcaccagcgactatgtcgtagtgggtaaaggtccctcttcggagggaacatcagag

SEQ ID NO: 15052 - RNA, 89 nt, synthetic construct
  misc_feature 1..89: note = engineered ribonucleic acid scaffold (ERS) sequence
  source 1..89: mol_type = other RNA
actggcggttctatctgattactctgagagccatcaccagcgactatgtcgtagtgggtaaaggtccctcttcggagggaacatcagag

SEQ ID NO: 15053 - RNA, 92 nt, synthetic construct
  misc_feature 1..92: note = engineered ribonucleic acid scaffold (ERS) sequence
  source 1..92: mol_type = other RNA
acacacggttctatctgattactctgccgtgttcaccagcgactatgtcgtagtgggtaaaggtgacggtcttcggaccgtcaccatcagag

SEQ ID NO: 15054 - RNA, 92 nt, synthetic construct
  misc_feature 1..92: note = engineered ribonucleic acid scaffold (ERS) sequence
  source 1..92: mol_type = other RNA
acactggtttctatctgattactctgaccagttcaccagcgactatgtcgtagtgggtaaaggtgacggtcttcggaccgtcaccatcagag

SEQ ID NO: 15055 - RNA, 92 nt, synthetic construct
  misc_feature 1..92: note = engineered ribonucleic acid scaffold (ERS) sequence
  source 1..92: mol_type = other RNA
acaggccgttctatctgattactctgcggccttcaccagcgactatgtcgtagtgggtaaaggtgacggtcttcggaccgtcaccatcagag

SEQ ID NO: 15056 - RNA, 92 nt, synthetic construct
  misc_feature 1..92: note = engineered ribonucleic acid scaffold (ERS) sequence
  source 1..92: mol_type = other RNA
acaggtccttctatctgattactctgggaccttcaccagcgactatgtcgtagtgggtaaaggtgacggtcttcggaccgtcaccatcagag

SEQ ID NO: 15057 - RNA, 92 nt, synthetic construct
  misc_feature 1..92: note = engineered ribonucleic acid scaffold (ERS) sequence
  source 1..92: mol_type = other RNA
accagcaattctatctgattactctgttgctgtcaccagcgactatgtcgtagtgggtaaaggtgacggtcttcggaccgtcaccatcagag

SEQ ID NO: 15058 - RNA, 92 nt, synthetic construct
  misc_feature 1..92: note = engineered ribonucleic acid scaffold (ERS) sequence
  source 1..92: mol_type = other RNA
accgagacttctatctgattactctgggctcgtcaccagcgactatgtcgtagtgggtaaaggtgacggtcttcggaccgtcaccatcagag

SEQ ID NO: 15059 - RNA, 92 nt, synthetic construct
  misc_feature 1..92: note = engineered ribonucleic acid scaffold (ERS) sequence
  source 1..92: mol_type = other RNA
acctgtagttctatctgattactctgctacagtcaccagcgactatgtcgtagtgggtaaaggtgacggtcttcggaccgtcaccatcagag

SEQ ID NO: 15060 - RNA, 92 nt, synthetic construct
  misc_feature 1..92: note = engineered ribonucleic acid scaffold (ERS) sequence
  source 1..92: mol_type = other RNA
acgagcacttctatctgattactctggggctctcaccagcgactatgtcgtagtgggtaaaggtgacggtcttcggaccgtcaccatcagag

SEQ ID NO: 15061 - RNA, 92 nt, synthetic construct
  misc_feature 1..92: note = engineered ribonucleic acid scaffold (ERS) sequence
  source 1..92: mol_type = other RNA
acgaggtgttctatctgattactctgcacctctcaccagcgactatgtcgtagtgggtaaaggtgacggtcttcggaccgtcaccatcagag

SEQ ID NO: 15062 - RNA, 92 nt, synthetic construct
  misc_feature 1..92: note = engineered ribonucleic acid scaffold (ERS) sequence
  source 1..92: mol_type = other RNA
acgggactttctatctgattactctgagtccctcaccagcgactatgtcgtagtgggtaaaggtgacggtcttcggaccgtcaccatcagag

SEQ ID NO: 15063 - RNA, 92 nt, synthetic construct
  misc_feature 1..92: note = engineered ribonucleic acid scaffold (ERS) sequence
  source 1..92: mol_type = other RNA
acgggcaattctatctgattactctgttgccctcaccagcgactatgtcgtagtgggtaaaggtgacggtcttcggaccgtcaccatcagag

SEQ ID NO: 15064 - RNA, 92 nt, synthetic construct
  misc_feature 1..92: note = engineered ribonucleic acid scaffold (ERS) sequence
  source 1..92: mol_type = other RNA
actgtgcgttctatctgattactctgcgcacatcaccagcgactatgtcgtagtgggtaaaggtgacggtcttcggaccgtcaccatcagag

SEQ ID NO: 15065 - RNA, 93 nt, synthetic construct
  misc_feature 1..93: note = engineered ribonucleic acid scaffold (ERS) sequence
  source 1..93: mol_type = other RNA
actggcgcttctatctgattactctgggcgccatcaccagcgactatgtcgtagtgggtaaaggtgacggtcttcggaccgtcaccatcagag

SEQ ID NO: 15066 - RNA, 93 nt, synthetic construct
  misc_feature 1..93: note = engineered ribonucleic acid scaffold (ERS) sequence
  source 1..93: mol_type = other RNA
actggcgcttctatctgattactctgggagccatcaccagcgactatgtcgtagtgggtaaaggtgacggtcttcggaccgtcaccatcagag

SEQ ID NO: 15067 - RNA, 93 nt, synthetic construct
  misc_feature 1..93: note = engineered ribonucleic acid scaffold (ERS) sequence
  source 1..93: mol_type = other RNA
actggcgcttctatctgattactctgtgagccatcaccagcgactatgtcgtagtgggtaaaggtgacggtcttcggaccgtcaccatcagag

SEQ ID NO: 15068 - RNA, 94 nt, synthetic construct
  misc_feature 1..94: note = engineered ribonucleic acid scaffold (ERS) sequence
  source 1..94: mol_type = other RNA
actggcgcttctatctgattactctgaggagccatcaccagcgactatgtcgtagtgggtaaaggtgacggtcttcggaccgtcaccatcagag

SEQ ID NO: 15069 - RNA, 93 nt, synthetic construct
  misc_feature 1..93: note = engineered ribonucleic acid scaffold (ERS) sequence
  source 1..93: mol_type = other RNA
actggcgcttctatctgattactctgatagccatcaccagcgactatgtcgtagtgggtaaaggtgacggtcttcggaccgtcaccatcagag

SEQ ID NO: 15070 - RNA, 94 nt, synthetic construct
  misc_feature 1..94: note = engineered ribonucleic acid scaffold (ERS) sequence
  source 1..94: mol_type = other RNA
actggcgcttctatctgattactctgagctgccatcaccagcgactatgtcgtagtgggtaaaggtgacggtcttcggaccgtcaccatcagag

SEQ ID NO: 15071 - RNA, 94 nt, synthetic construct
  misc_feature 1..94: note = engineered ribonucleic acid scaffold (ERS) sequence
  source 1..94: mol_type = other RNA
actggcacttctatctgattactctgagtagccatcaccagcgactatgtcgtagtgggtaaaggtgacggtcttcggaccgtcaccatcagag

SEQ ID NO: 15072 - RNA, 94 nt, synthetic construct
  misc_feature 1..94: note = engineered ribonucleic acid scaffold (ERS) sequence
  source 1..94: mol_type = other RNA
actggcgcttctatctgattactctgagtagccatcaccagcgactatgtcgtagtgggtaaaggtgacggtcttcggaccgtcaccatcagag

SEQ ID NO: 15073 - RNA, 93 nt, synthetic construct
  misc_feature 1..93: note = engineered ribonucleic acid scaffold (ERS) sequence
  source 1..93: mol_type = other RNA
actggcgcttctatctgattactctgagcaccatcaccagcgactatgtcgtagtgggtaaaggtgacggtcttcggaccgtcaccatcagag

SEQ ID NO: 15074 - RNA, 93 nt, synthetic construct
  misc_feature 1..93: note = engineered ribonucleic acid scaffold (ERS) sequence
  source 1..93: mol_type = other RNA
actggcacttctatctgattactctgagcgccatcaccagcgactatgtcgtagtgggtaaaggtgacggtcttcggaccgtcaccatcagag

SEQ ID NO: 15075 - RNA, 93 nt, synthetic construct
  misc_feature 1..93: note = engineered ribonucleic acid scaffold (ERS) sequence
  source 1..93: mol_type = other RNA
actggcgcttctatctgattactctgagggccatcaccagcgactatgtcgtagtgggtaaaggtgacggtcttcggaccgtcaccatcagag

SEQ ID NO: 15076 - RNA, 93 nt, synthetic construct
  misc_feature 1..93: note = engineered ribonucleic acid scaffold (ERS) sequence
  source 1..93: mol_type = other RNA
actggcgcttctatctgattactctgagtgccgtcaccagcgactatgtcgtagtgggtaaaggtgacggtcttcggaccgtcaccatcagag

SEQ ID NO: 15077 - RNA, 93 nt, synthetic construct
  misc_feature 1..93: note = engineered ribonucleic acid scaffold (ERS) sequence
  source 1..93: mol_type = other RNA
actggcacttctatctgattactctgagtgccatcaccagcgactatgtcgtagtgggtaaaggtgacggtcttcggaccgtcaccatcagag

SEQ ID NO: 15078 - RNA, 93 nt, synthetic construct
  misc_feature 1..93: note = engineered ribonucleic acid scaffold (ERS) sequence
  source 1..93: mol_type = other RNA
actggcgcttctatctgattactctgagaaccatcaccagcgactatgtcgtagtgggtaaaggtgacggtcttcggaccgtcaccatcagag

SEQ ID NO: 15079 - RNA, 93 nt, synthetic construct
  misc_feature 1..93: note = engineered ribonucleic acid scaffold (ERS) sequence
  source 1..93: mol_type = other RNA
actggcgcttctatctgattactctgagagccgtcaccagcgactatgtcgtagtgggtaaaggtgacggtcttcggaccgtcaccatcagag

SEQ ID NO: 15080 - RNA, 93 nt, synthetic construct
  misc_feature 1..93: note = engineered ribonucleic acid scaffold (ERS) sequence
  source 1..93: mol_type = other RNA
actggcgcttctatctgattactctgagagccttcaccagcgactatgtcgtagtgggtaaaggtgacggtcttcggaccgtcaccatcagag

SEQ ID NO: 15081 - RNA, 93 nt, synthetic construct
  misc_feature 1..93: note = engineered ribonucleic acid scaffold (ERS) sequence
  source 1..93: mol_type = other RNA
actggggcttctatctgattactctgagacccatcaccagcgactatgtcgtagtgggtaaaggtgacggtcttcggaccgtcaccatcagag

SEQ ID NO: 15082 - RNA, 93 nt, synthetic construct
  misc_feature 1..93: note = engineered ribonucleic acid scaffold (ERS) sequence
  source 1..93: mol_type = other RNA
actggtgcttctatctgattactctgagagccatcaccagcgactatgtcgtagtgggtaaaggtgacggtcttcggaccgtcaccatcagag

SEQ ID NO: 15083 - RNA, 93 nt, synthetic construct
  misc_feature 1..93: note = engineered ribonucleic acid scaffold (ERS) sequence
  source 1..93: mol_type = other RNA
actgggccttctatctgattactctgaggcccatcaccagcgactatgtcgtagtgggtaaaggtgacggtcttcggaccgtcaccatcagag

SEQ ID NO: 15084 - RNA, 94 nt, synthetic construct
  misc_feature 1..94: note = engineered ribonucleic acid scaffold (ERS) sequence
  source 1..94: mol_type = other RNA
actggcccttctatctgattactctgaggagccatcaccagcgactatgtcgtagtgggtaaaggtgacggtcttcggaccgtcaccatcagag

SEQ ID NO: 15085 - RNA, 93 nt, synthetic construct
  misc_feature 1..93: note = engineered ribonucleic acid scaffold (ERS) sequence
  source 1..93: mol_type = other RNA
actggcccttctatctgattactctgagggccatcaccagcgactatgtcgtagtgggtaaaggtgacggtcttcggaccgtcaccatcagag

SEQ ID NO: 15086 - RNA, 93 nt, synthetic construct
  misc_feature 1..93: note = engineered ribonucleic acid scaffold (ERS) sequence
  source 1..93: mol_type = other RNA
actggcccttctatctgattactctgagtgccatcaccagcgactatgtcgtagtgggtaaaggtgacggtcttcggaccgtcaccatcagag

SEQ ID NO: 15087 - RNA, 93 nt, synthetic construct
  misc_feature 1..93: note = engineered ribonucleic acid scaffold (ERS) sequence
  source 1..93: mol_type = other RNA
actggcccttctatctgattactctgagagccatcaccagcgactatgtcgtagtgggtaaaggtgacggtcttcggaccgtcaccatcagag

SEQ ID NO: 15088 - RNA, 94 nt, synthetic construct
  misc_feature 1..94: note = engineered ribonucleic acid scaffold (ERS) sequence
  source 1..94: mol_type = other RNA
actggcgcttctatctgattactctgagcagccatcaccagcgactatgtcgtagtgggtaaaggtgacggtcttcggaccgtcaccatcagag

SEQ ID NO: 15089 - RNA, 93 nt, synthetic construct; identical to SEQ ID NO: 870
  misc_feature 1..93: note = engineered ribonucleic acid scaffold (ERS) sequence
  source 1..93: mol_type = other RNA

SEQ ID NO: 15090 - RNA, 93 nt, synthetic construct
  misc_feature 1..93: note = engineered ribonucleic acid scaffold (ERS) sequence
  source 1..93: mol_type = other RNA
actggcgcttctatctgattactctgagtgccatcaccagcgactatgtcgtagtgggtaaaggtgacggtcttcggaccgtcaccatcagag

SEQ ID NO: 15091 - RNA, 93 nt, synthetic construct
  misc_feature 1..93: note = engineered ribonucleic acid scaffold (ERS) sequence
  source 1..93: mol_type = other RNA
actggcgcttctatctgattactctgagagccatcaccagcgactatgtcgtagtgggtaaaggtgacggtcttcggaccgtcaccatcagag

SEQ ID NO: 15092 - RNA, 93 nt, synthetic construct
  misc_feature 1..93: note = engineered ribonucleic acid scaffold (ERS) sequence
  source 1..93: mol_type = other RNA
actggctcttctatctgattactctgagcgccatcaccagcgactatgtcgtagtgggtaaaggtgacggtcttcggaccgtcaccatcagag

SEQ ID NO: 15093 - RNA, 93 nt, synthetic construct
  misc_feature 1..93: note = engineered ribonucleic acid scaffold (ERS) sequence
  source 1..93: mol_type = other RNA
actggctcttctatctgattactctgagggccatcaccagcgactatgtcgtagtgggtaaaggtgacggtcttcggaccgtcaccatcagag

SEQ ID NO: 15094 - RNA, 93 nt, synthetic construct
  misc_feature 1..93: note = engineered ribonucleic acid scaffold (ERS) sequence
  source 1..93: mol_type = other RNA
actggctcttctatctgattactctgagtgccatcaccagcgactatgtcgtagtgggtaaaggtgacggtcttcggaccgtcaccatcagag

SEQ ID NO: 15095 - RNA, 93 nt, synthetic construct
  misc_feature 1..93: note = engineered ribonucleic acid scaffold (ERS) sequence
  source 1..93: mol_type = other RNA
actggctcttctatctgattactctgagagccatcaccagcgactatgtcgtagtgggtaaaggtgacggtcttcggaccgtcaccatcagag

SEQ ID NO: 15096 - RNA, 93 nt, synthetic construct
  misc_feature 1..93: note = engineered ribonucleic acid scaffold (ERS) sequence
  source 1..93: mol_type = other RNA
actggcggttctatctgattactctgagcgccatcaccagcgactatgtcgtagtgggtaaaggtgacggtcttcggaccgtcaccatcagag

SEQ ID NO: 15097 - RNA, 93 nt, synthetic construct
  misc_feature 1..93: note = engineered ribonucleic acid scaffold (ERS) sequence
  source 1..93: mol_type = other RNA
actggcggttctatctgattactctgagagccatcaccagcgactatgtcgtagtgggtaaaggtgacggtcttcggaccgtcaccatcagag

SEQ ID NO: 15098 - RNA, 90 nt, synthetic construct
  misc_feature 1..90: note = engineered ribonucleic acid scaffold (ERS) sequence
  source 1..90: mol_type = other RNA
acacacggttctatctgattactctgccgtgttcaccagcgactatgtcgtagtgggtaaagtctccctcttcggagggaggcatcagag

SEQ ID NO: 15099 - RNA, 90 nt, synthetic construct
  misc_feature 1..90: note = engineered ribonucleic acid scaffold (ERS) sequence
  source 1..90: mol_type = other RNA
acactggtttctatctgattactctgaccagttcaccagcgactatgtcgtagtgggtaaagtctccctcttcggagggaggcatcagag

SEQ ID NO: 15100 - RNA, 90 nt, synthetic construct
  misc_feature 1..90: note = engineered ribonucleic acid scaffold (ERS) sequence
  source 1..90: mol_type = other RNA
acaggccgttctatctgattactctgcggccttcaccagcgactatgtcgtagtgggtaaagtctccctcttcggagggaggcatcagag

SEQ ID NO: 15101 - RNA, 90 nt, synthetic construct
  misc_feature 1..90: note = engineered ribonucleic acid scaffold (ERS) sequence
  source 1..90: mol_type = other RNA
acaggtccttctatctgattactctgggaccttcaccagcgactatgtcgtagtgggtaaagtctccctcttcggagggaggcatcagag

SEQ ID NO: 15102 - RNA, 90 nt, synthetic construct
  misc_feature 1..90: note = engineered ribonucleic acid scaffold (ERS) sequence
  source 1..90: mol_type = other RNA
accagcaattctatctgattactctgttgctgtcaccagcgactatgtcgtagtgggtaaagtctccctcttcggagggaggcatcagag

SEQ ID NO: 15103 - RNA, 90 nt, synthetic construct
  misc_feature 1..90: note = engineered ribonucleic acid scaffold (ERS) sequence
  source 1..90: mol_type = other RNA
accgagacttctatctgattactctgggctcgtcaccagcgactatgtcgtagtgggtaaagtctccctcttcggagggaggcatcagag

SEQ ID NO: 15104 - RNA, 90 nt, synthetic construct
  misc_feature 1..90: note = engineered ribonucleic acid scaffold (ERS) sequence
  source 1..90: mol_type = other RNA
acctgtagttctatctgattactctgctacagtcaccagcgactatgtcgtagtgggtaaagtctccctcttcggagggaggcatcagag

SEQ ID NO: 15105 - RNA, 90 nt, synthetic construct
  misc_feature 1..90: note = engineered ribonucleic acid scaffold (ERS) sequence
  source 1..90: mol_type = other RNA
acgagcacttctatctgattactctggggctctcaccagcgactatgtcgtagtgggtaaagtctccctcttcggagggaggcatcagag

SEQ ID NO: 15106 - RNA, 90 nt, synthetic construct
  misc_feature 1..90: note = engineered ribonucleic acid scaffold (ERS) sequence
  source 1..90: mol_type = other RNA
acgaggtgttctatctgattactctgcacctctcaccagcgactatgtcgtagtgggtaaagtctccctcttcggagggaggcatcagag

SEQ ID NO: 15107 - RNA, 90 nt, synthetic construct
  misc_feature 1..90: note = engineered ribonucleic acid scaffold (ERS) sequence
  source 1..90: mol_type = other RNA
acgggactttctatctgattactctgagtccctcaccagcgactatgtcgtagtgggtaaagtctccctcttcggagggaggcatcagag

SEQ ID NO: 15108 - RNA, 90 nt, synthetic construct
  misc_feature 1..90: note = engineered ribonucleic acid scaffold (ERS) sequence
  source 1..90: mol_type = other RNA
acgggcaattctatctgattactctgttgccctcaccagcgactatgtcgtagtgggtaaagtctccctcttcggagggaggcatcagag

SEQ ID NO: 15109 - RNA, 90 nt, synthetic construct
  misc_feature 1..90: note = engineered ribonucleic acid scaffold (ERS) sequence
  source 1..90: mol_type = other RNA
actgtgcgttctatctgattactctgcgcacatcaccagcgactatgtcgtagtgggtaaagtctccctcttcggagggaggcatcagag

SEQ ID NO: 15110 - RNA, 91 nt, synthetic construct
  misc_feature 1..91: note = engineered ribonucleic acid scaffold (ERS) sequence
  source 1..91: mol_type = other RNA
actggcgcttctatctgattactctgggcgccatcaccagcgactatgtcgtagtgggtaaagtctccctcttcggagggaggcatcagag

SEQ ID NO: 15111 - RNA, 91 nt, synthetic construct
  misc_feature 1..91: note = engineered ribonucleic acid scaffold (ERS) sequence
  source 1..91: mol_type = other RNA
actggcgcttctatctgattactctgggagccatcaccagcgactatgtcgtagtgggtaaagtctccctcttcggagggaggcatcagag

SEQ ID NO: 15112 - RNA, 91 nt, synthetic construct
  misc_feature 1..91: note = engineered ribonucleic acid scaffold (ERS) sequence
  source 1..91: mol_type = other RNA
actggcgcttctatctgattactctgtgagccatcaccagcgactatgtcgtagtgggtaaagtctccctcttcggagggaggcatcagag

SEQ ID NO: 15113 - RNA, 92 nt, synthetic construct
  misc_feature 1..92: note = engineered ribonucleic acid scaffold (ERS) sequence
  source 1..92: mol_type = other RNA
actggcgcttctatctgattactctgaggagccatcaccagcgactatgtcgtagtgggtaaagtctccctcttcggagggaggcatcagag

SEQ ID NO: 15114 - RNA, 91 nt, synthetic construct
  misc_feature 1..91: note = engineered ribonucleic acid scaffold (ERS) sequence
  source 1..91: mol_type = other RNA
actggcgcttctatctgattactctgatagccatcaccagcgactatgtcgtagtgggtaaagtctccctcttcggagggaggcatcagag

SEQ ID NO: 15115 - RNA, 92 nt, synthetic construct
  misc_feature 1..92: note = engineered ribonucleic acid scaffold (ERS) sequence
  source 1..92: mol_type = other RNA
actggcgcttctatctgattactctgagctgccatcaccagcgactatgtcgtagtgggtaaagtctccctcttcggagggaggcatcagag

SEQ ID NO: 15116 - RNA, 92 nt, synthetic construct
  misc_feature 1..92: note = engineered ribonucleic acid scaffold (ERS) sequence
  source 1..92: mol_type = other RNA
actggcacttctatctgattactctgagtagccatcaccagcgactatgtcgtagtgggtaaagtctccctcttcggagggaggcatcagag

SEQ ID NO: 15117 - RNA, 92 nt, synthetic construct
  misc_feature 1..92: note = engineered ribonucleic acid scaffold (ERS) sequence
  source 1..92: mol_type = other RNA
actggcgcttctatctgattactctgagtagccatcaccagcgactatgtcgtagtgggtaaagtctccctcttcggagggaggcatcagag

SEQ ID NO: 15118 - RNA, 91 nt, synthetic construct
  misc_feature 1..91: note = engineered ribonucleic acid scaffold (ERS) sequence
  source 1..91: mol_type = other RNA
actggcgcttctatctgattactctgagcaccatcaccagcgactatgtcgtagtgggtaaagtctccctcttcggagggaggcatcagag

SEQ ID NO: 15119 - RNA, 91 nt, synthetic construct
  misc_feature 1..91: note = engineered ribonucleic acid scaffold (ERS) sequence
  source 1..91: mol_type = other RNA
actggcacttctatctgattactctgagcgccatcaccagcgactatgtcgtagtgggtaaagtctccctcttcggagggaggcatcagag

SEQ ID NO: 15120 - RNA, 91 nt, synthetic construct
  misc_feature 1..91: note = engineered ribonucleic acid scaffold (ERS) sequence
  source 1..91: mol_type = other RNA
actggcgcttctatctgattactctgagggccatcaccagcgactatgtcgtagtgggtaaagtctccctcttcggagggaggcatcagag

SEQ ID NO: 15121 - RNA, 91 nt, synthetic construct
  misc_feature 1..91: note = engineered ribonucleic acid scaffold (ERS) sequence
  source 1..91: mol_type = other RNA
actggcgcttctatctgattactctgagtgccgtcaccagcgactatgtcgtagtgggtaaagtctccctcttcggagggaggcatcagag

SEQ ID NO: 15122 - RNA, 91 nt, synthetic construct
  misc_feature 1..91: note = engineered ribonucleic acid scaffold (ERS) sequence
  source 1..91: mol_type = other RNA
actggcacttctatctgattactctgagtgccatcaccagcgactatgtcgtagtgggtaaagtctccctcttcggagggaggcatcagag

SEQ ID NO: 15123 - RNA, 91 nt, synthetic construct
  misc_feature 1..91: note = engineered ribonucleic acid scaffold (ERS) sequence
  source 1..91: mol_type = other RNA
actggcgcttctatctgattactctgagaaccatcaccagcgactatgtcgtagtgggtaaagtctccctcttcggagggaggcatcagag

SEQ ID NO: 15124 - RNA, 91 nt, synthetic construct
  misc_feature 1..91: note = engineered ribonucleic acid scaffold (ERS) sequence
  source 1..91: mol_type = other RNA
actggcgcttctatctgattactctgagagccgtcaccagcgactatgtcgtagtgggtaaagtctccctcttcggagggaggcatcagag

SEQ ID NO: 15125 - RNA, 91 nt, synthetic construct
  misc_feature 1..91: note = engineered ribonucleic acid scaffold (ERS) sequence
  source 1..91: mol_type = other RNA
actggcgcttctatctgattactctgagagccttcaccagcgactatgtcgtagtgggtaaagtctccctcttcggagggaggcatcagag

SEQ ID NO: 15126 - RNA, 91 nt, synthetic construct
  misc_feature 1..91: note = engineered ribonucleic acid scaffold (ERS) sequence
  source 1..91: mol_type = other RNA
actggggcttctatctgattactctgagacccatcaccagcgactatgtcgtagtgggtaaagtctccctcttcggagggaggcatcagag

SEQ ID NO: 15127 - RNA, 91 nt, synthetic construct
  misc_feature 1..91: note = engineered ribonucleic acid scaffold (ERS) sequence
  source 1..91: mol_type = other RNA
actggtgcttctatctgattactctgagagccatcaccagcgactatgtcgtagtgggtaaagtctccctcttcggagggaggcatcagag

SEQ ID NO: 15128 - RNA, 91 nt, synthetic construct
  misc_feature 1..91: note = engineered ribonucleic acid scaffold (ERS) sequence
  source 1..91: mol_type = other RNA
actgggccttctatctgattactctgaggcccatcaccagcgactatgtcgtagtgggtaaagtctccctcttcggagggaggcatcagag

SEQ ID NO: 15129 - RNA, 92 nt, synthetic construct
  misc_feature 1..92: note = engineered ribonucleic acid scaffold (ERS) sequence
  source 1..92: mol_type = other RNA
actggcccttctatctgattactctgaggagccatcaccagcgactatgtcgtagtgggtaaagtctccctcttcggagggaggcatcagag

SEQ ID NO: 15130 - RNA, 91 nt, synthetic construct
  misc_feature 1..91: note = engineered ribonucleic acid scaffold (ERS) sequence
  source 1..91: mol_type = other RNA
actggcccttctatctgattactctgagggccatcaccagcgactatgtcgtagtgggtaaagtctccctcttcggagggaggcatcagag

SEQ ID NO: 15131 - RNA, 91 nt, synthetic construct
  misc_feature 1..91: note = engineered ribonucleic acid scaffold (ERS) sequence
  source 1..91: mol_type = other RNA
actggcccttctatctgattactctgagtgccatcaccagcgactatgtcgtagtgggtaaagtctccctcttcggagggaggcatcagag

SEQ ID NO: 15132 - RNA, 91 nt, synthetic construct
  misc_feature 1..91: note = engineered ribonucleic acid scaffold (ERS) sequence
  source 1..91: mol_type = other RNA
actggcccttctatctgattactctgagagccatcaccagcgactatgtcgtagtgggtaaagtctccctcttcggagggaggcatcagag

SEQ ID NO: 15133 - RNA, 92 nt, synthetic construct
  misc_feature 1..92: note = engineered ribonucleic acid scaffold (ERS) sequence
  source 1..92: mol_type = other RNA
actggcgcttctatctgattactctgagcagccatcaccagcgactatgtcgtagtgggtaaagtctccctcttcggagggaggcatcagag

SEQ ID NO: 15134 - RNA, 91 nt, synthetic construct; identical to SEQ ID NO: 892
  misc_feature 1..91: note = engineered ribonucleic acid scaffold (ERS) sequence
  source 1..91: mol_type = other RNA

SEQ ID NO: 15135 - RNA, 91 nt, synthetic construct
  misc_feature 1..91: note = engineered ribonucleic acid scaffold (ERS) sequence
  source 1..91: mol_type = other RNA
actggcgcttctatctgattactctgagtgccatcaccagcgactatgtcgtagtgggtaaagtctccctcttcggagggaggcatcagag

SEQ ID NO: 15136 - RNA, 91 nt, synthetic construct
  misc_feature 1..91: note = engineered ribonucleic acid scaffold (ERS) sequence
  source 1..91: mol_type = other RNA
actggcgcttctatctgattactctgagagccatcaccagcgactatgtcgtagtgggtaaagtctccctcttcggagggaggcatcagag

SEQ ID NO: 15137 - RNA, 91 nt, synthetic construct
  misc_feature 1..91: note = engineered ribonucleic acid scaffold (ERS) sequence
  source 1..91: mol_type = other RNA
actggctcttctatctgattactctgagcgccatcaccagcgactatgtcgtagtgggtaaagtctccctcttcggagggaggcatcagag

SEQ ID NO: 15138 - RNA, 91 nt, synthetic construct
  misc_feature 1..91: note = engineered ribonucleic acid scaffold (ERS) sequence
  source 1..91: mol_type = other RNA
actggctcttctatctgattactctgagggccatcaccagcgactatgtcgtagtgggtaaagtctccctcttcggagggaggcatcagag

SEQ ID NO: 15139 - RNA, 91 nt, synthetic construct
  misc_feature 1..91: note = engineered ribonucleic acid scaffold (ERS) sequence
  source 1..91: mol_type = other RNA
actggctcttctatctgattactctgagtgccatcaccagcgactatgtcgtagtgggtaaagtctccctcttcggagggaggcatcagag

SEQ ID NO: 15140 - RNA, 91 nt, synthetic construct
  misc_feature 1..91: note = engineered ribonucleic acid scaffold (ERS) sequence
  source 1..91: mol_type = other RNA
actggctcttctatctgattactctgagagccatcaccagcgactatgtcgtagtgggtaaagtctccctcttcggagggaggcatcagag

SEQ ID NO: 15141 - RNA, 91 nt, synthetic construct
  misc_feature 1..91: note = engineered ribonucleic acid scaffold (ERS) sequence
  source 1..91: mol_type = other RNA
actggcggttctatctgattactctgagcgccatcaccagcgactatgtcgtagtgggtaaagtctccctcttcggagggaggcatcagag

SEQ ID NO: 15142 - RNA, 91 nt, synthetic construct
  misc_feature 1..91: note = engineered ribonucleic acid scaffold (ERS) sequence
  source 1..91: mol_type = other RNA
actggcggttctatctgattactctgagagccatcaccagcgactatgtcgtagtgggtaaagtctccctcttcggagggaggcatcagag

SEQ ID NO: 15143 - RNA, 92 nt, synthetic construct
  misc_feature 1..92: note = engineered ribonucleic acid scaffold (ERS) sequence
  source 1..92: mol_type = other RNA
acacacggttctatctgattactctgccgtgttcaccagcgactatgtcgtagtgggtaaagtgcgcccgcttcggcgggcgcacatcagag

SEQ ID NO: 15144 - RNA, 92 nt, synthetic construct
  misc_feature 1..92: note = engineered ribonucleic acid scaffold (ERS) sequence
  source 1..92: mol_type = other RNA
acactggtttctatctgattactctgaccagttcaccagcgactatgtcgtagtgggtaaagtgcgcccgcttcggcgggcgcacatcagag

SEQ ID NO: 15145 - RNA, 92 nt, synthetic construct
  misc_feature 1..92: note = engineered ribonucleic acid scaffold (ERS) sequence
  source 1..92: mol_type = other RNA
acaggccgttctatctgattactctgcggccttcaccagcgactatgtcgtagtgggtaaagtgcgcccgcttcggcgggcgcacatcagag

SEQ ID NO: 15146 - RNA, 92 nt, synthetic construct
  misc_feature 1..92: note = engineered ribonucleic acid scaffold (ERS) sequence
  source 1..92: mol_type = other RNA
acaggtccttctatctgattactctgggaccttcaccagcgactatgtcgtagtgggtaaagtgcgcccgcttcggcgggcgcacatcagag

SEQ ID NO: 15147 - RNA, 92 nt, synthetic construct
  misc_feature 1..92: note = engineered ribonucleic acid scaffold (ERS) sequence
  source 1..92: mol_type = other RNA
accagcaattctatctgattactctgttgctgtcaccagcgactatgtcgtagtgggtaaagtgcgcccgcttcggcgggcgcacatcagag

SEQ ID NO: 15148 - RNA, 92 nt, synthetic construct
  misc_feature 1..92: note = engineered ribonucleic acid scaffold (ERS) sequence
  source 1..92: mol_type = other RNA
accgagacttctatctgattactctgggctcgtcaccagcgactatgtcgtagtgggtaaagtgcgcccgcttcggcgggcgcacatcagag

SEQ ID NO: 15149 - RNA, 92 nt, synthetic construct
  misc_feature 1..92: note = engineered ribonucleic acid scaffold (ERS) sequence
  source 1..92: mol_type = other RNA
acctgtagttctatctgattactctgctacagtcaccagcgactatgtcgtagtgggtaaagtgcgcccgcttcggcgggcgcacatcagag

SEQ ID NO: 15150 - RNA, 92 nt, synthetic construct
  misc_feature 1..92: note = engineered ribonucleic acid scaffold (ERS) sequence
  source 1..92: mol_type = other RNA
acgagcacttctatctgattactctggggctctcaccagcgactatgtcgtagtgggtaaagtgcgcccgcttcggcgggcgcacatcagag

SEQ ID NO: 15151 - RNA, 92 nt, synthetic construct
  misc_feature 1..92: note = engineered ribonucleic acid scaffold (ERS) sequence
  source 1..92: mol_type = other RNA
acgaggtgttctatctgattactctgcacctctcaccagcgactatgtcgtagtgggtaaagtgcgcccgcttcggcgggcgcacatcagag

SEQ ID NO: 15152 - RNA, 92 nt, synthetic construct
  misc_feature 1..92: note = engineered ribonucleic acid scaffold (ERS) sequence
  source 1..92: mol_type = other RNA
acgggactttctatctgattactctgagtccctcaccagcgactatgtcgtagtgggtaaagtgcgcccgcttcggcgggcgcacatcagag

SEQ ID NO: 15153 - RNA, 92 nt, synthetic construct
  misc_feature 1..92: note = engineered ribonucleic acid scaffold (ERS) sequence
  source 1..92: mol_type = other RNA
acgggcaattctatctgattactctgttgccctcaccagcgactatgtcgtagtgggtaaagtgcgcccgcttcggcgggcgcacatcagag

SEQ ID NO: 15154 - RNA, 92 nt, synthetic construct
  misc_feature 1..92: note = engineered ribonucleic acid scaffold (ERS) sequence
  source 1..92: mol_type = other RNA
actgtgcgttctatctgattactctgcgcacatcaccagcgactatgtcgtagtgggtaaagtgcgcccgcttcggcgggcgcacatcagag

SEQ ID NO: 15155 - RNA, 93 nt, synthetic construct
  misc_feature 1..93: note = engineered ribonucleic acid scaffold (ERS) sequence
  source 1..93: mol_type = other RNA
actggcgcttctatctgattactctgggcgccatcaccagcgactatgtcgtagtgggtaaagtgcgcccgcttcggcgggcgcacatcagag

SEQ ID NO: 15156 - RNA, 93 nt, synthetic construct
  misc_feature 1..93: note = engineered ribonucleic acid scaffold (ERS) sequence
  source 1..93: mol_type = other RNA
actggcgcttctatctgattactctgggagccatcaccagcgactatgtcgtagtgggtaaagtgcgcccgcttcggcgggcgcacatcagag

SEQ ID NO: 15157 - RNA, 93 nt, synthetic construct
  misc_feature 1..93: note = engineered ribonucleic acid scaffold (ERS) sequence
  source 1..93: mol_type = other RNA
actggcgcttctatctgattactctgtgagccatcaccagcgactatgtcgtagtgggtaaagtgcgcccgcttcggcgggcgcacatcagag

SEQ ID NO: 15158 - RNA, 94 nt, synthetic construct
  misc_feature 1..94: note = engineered ribonucleic acid scaffold (ERS) sequence
  source 1..94: mol_type = other RNA
actggcgcttctatctgattactctgaggagccatcaccagcgactatgtcgtagtgggtaaagtgcgcccgcttcggcgggcgcacatcagag

SEQ ID NO: 15159 - RNA, 93 nt, synthetic construct
  misc_feature 1..93: note = engineered ribonucleic acid scaffold (ERS) sequence
  source 1..93: mol_type = other RNA
actggcgcttctatctgattactctgatagccatcaccagcgactatgtcgtagtgggtaaagtgcgcccgcttcggcgggcgcacatcagag

SEQ ID NO: 15160 - RNA, 94 nt, synthetic construct
  misc_feature 1..94: note = engineered ribonucleic acid scaffold (ERS) sequence
  source 1..94: mol_type = other RNA
actggcgcttctatctgattactctgagctgccatcaccagcgactatgtcgtagtgggtaaagtgcgcccgcttcggcgggcgcacatcagag

SEQ ID NO: 15161 - RNA, 94 nt, synthetic construct
  misc_feature 1..94: note = engineered ribonucleic acid scaffold (ERS) sequence
  source 1..94: mol_type = other RNA
actggcacttctatctgattactctgagtagccatcaccagcgactatgtcgtagtgggtaaagtgcgcccgcttcggcgggcgcacatcagag

SEQ ID NO: 15162 - RNA, 94 nt, synthetic construct
  misc_feature 1..94: note = engineered ribonucleic acid scaffold (ERS) sequence
  source 1..94: mol_type = other RNA
actggcgcttctatctgattactctgagtagccatcaccagcgactatgtcgtagtgggtaaagtgcgcccgcttcggcgggcgcacatcagag

SEQ ID NO: 15163 - RNA, 93 nt, synthetic construct
  misc_feature 1..93: note = engineered ribonucleic acid scaffold (ERS) sequence
  source 1..93: mol_type = other RNA
actggcgcttctatctgattactctgagcaccatcaccagcgactatgtcgtagtgggtaaagtgcgcccgcttcggcgggcgcacatcagag

SEQ ID NO: 15164 - RNA, 93 nt, synthetic construct
  misc_feature 1..93: note = engineered ribonucleic acid scaffold (ERS) sequence
  source 1..93: mol_type = other RNA
actggcacttctatctgattactctgagcgccatcaccagcgactatgtcgtagtgggtaaagtgcgcccgcttcggcgggcgcacatcagag

SEQ ID NO: 15165 - RNA, 93 nt, synthetic construct
  misc_feature 1..93: note = engineered ribonucleic acid scaffold (ERS) sequence
  source 1..93: mol_type = other RNA
actggcgcttctatctgattactctgagggccatcaccagcgactatgtcgtagtgggtaaagtgcgcccgcttcggcgggcgcacatcagag

SEQ ID NO: 15166 - RNA, 93 nt, synthetic construct
  misc_feature 1..93: note = engineered ribonucleic acid scaffold (ERS) sequence
  source 1..93: mol_type = other RNA
actggcgcttctatctgattactctgagtgccgtcaccagcgactatgtcgtagtgggtaaagtgcgcccgcttcggcgggcgcacatcagag

SEQ ID NO: 15167 - RNA, 93 nt, synthetic construct
  misc_feature 1..93: note = engineered ribonucleic acid scaffold (ERS) sequence
  source 1..93: mol_type = other RNA
actggcacttctatctgattactctgagtgccatcaccagcgactatgtcgtagtgggtaaagtgcgcccgcttcggcgggcgcacatcagag

SEQ ID NO: 15168 - RNA, 93 nt, synthetic construct
  misc_feature 1..93: note = engineered ribonucleic acid scaffold (ERS) sequence
  source 1..93: mol_type = other RNA
actggcgcttctatctgattactctgagaaccatcaccagcgactatgtcgtagtgggtaaagtgcgcccgcttcggcgggcgcacatcagag

SEQ ID NO: 15169 - RNA, 93 nt, synthetic construct
  misc_feature 1..93: note = engineered ribonucleic acid scaffold (ERS) sequence
  source 1..93: mol_type = other RNA
actggcgcttctatctgattactctgagagccgtcaccagcgactatgtcgtagtgggtaaagtgcgcccgcttcggcgggcgcacatcagag

SEQ ID NO: 15170 - RNA, 93 nt, synthetic construct
  misc_feature 1..93: note = engineered ribonucleic acid scaffold (ERS) sequence
  source 1..93: mol_type = other RNA
actggcgcttctatctgattactctgagagccttcaccagcgactatgtcgtagtgggtaaagtgcgcccgcttcggcgggcgcacatcagag

SEQ ID NO: 15171 - RNA, 93 nt, synthetic construct
  misc_feature 1..93: note = engineered ribonucleic acid scaffold (ERS) sequence
  source 1..93: mol_type = other RNA
actggggcttctatctgattactctgagacccatcaccagcgactatgtcgtagtgggtaaagtgcgcccgcttcggcgggcgcacatcagag

SEQ ID NO: 15172 - RNA, 93 nt, synthetic construct
  misc_feature 1..93: note = engineered ribonucleic acid scaffold (ERS) sequence
  source 1..93: mol_type = other RNA
actggtgcttctatctgattactctgagagccatcaccagcgactatgtcgtagtgggtaaagtgcgcccgcttcggcgggcgcacatcagag

SEQ ID NO: 15173 - RNA, 93 nt, synthetic construct
  misc_feature 1..93: note = engineered ribonucleic acid scaffold (ERS) sequence
  source 1..93: mol_type = other RNA
actgggccttctatctgattactctgaggcccatcaccagcgactatgtcgtagtgggtaaagtgcgcccgcttcggcgggcgcacatcagag

SEQ ID NO: 15174 - RNA, 94 nt, synthetic construct
  misc_feature 1..94: note = engineered ribonucleic acid scaffold (ERS) sequence
  source 1..94: mol_type = other RNA
actggcccttctatctgattactctgaggagccatcaccagcgactatgtcgtagtgggtaaagtgcgcccgcttcggcgggcgcacatcagag

SEQ ID NO: 15175 - RNA, 93 nt, synthetic construct
  misc_feature 1..93: note = engineered ribonucleic acid scaffold (ERS) sequence
  source 1..93: mol_type = other RNA
actggcccttctatctgattactctgagggccatcaccagcgactatgtcgtagtgggtaaagtgcgcccgcttcggcgggcgcacatcagag

SEQ ID NO: 15176 - RNA, 93 nt, synthetic construct
  misc_feature 1..93: note = engineered ribonucleic acid scaffold (ERS) sequence
  source 1..93: mol_type = other RNA
actggcccttctatctgattactctgagtgccatcaccagcgactatgtcgtagtgggtaaagtgcgcccgcttcggcgggcgcacatcagag

SEQ ID NO: 15177 - RNA, 93 nt, synthetic construct
  misc_feature 1..93: note = engineered ribonucleic acid scaffold (ERS) sequence
  source 1..93: mol_type = other RNA
actggcccttctatctgattactctgagagccatcaccagcgactatgtcgtagtgggtaaagtgcgcccgcttcggcgggcgcacatcagag

SEQ ID NO: 15178 - RNA, 94 nt, synthetic construct
  misc_feature 1..94: note = engineered ribonucleic acid scaffold (ERS) sequence
  source 1..94: mol_type = other RNA
actggcgcttctatctgattactctgagcagccatcaccagcgactatgtcgtagtgggtaaagtgcgcccgcttcggcgggcgcacatcagag

SEQ ID NO: 15179 - RNA, 93 nt, synthetic construct; identical to SEQ ID NO: 872
  misc_feature 1..93: note = engineered ribonucleic acid scaffold (ERS) sequence
  source 1..93: mol_type = other RNA

SEQ ID NO: 15180 - RNA, 93 nt, synthetic construct
  misc_feature 1..93: note = engineered ribonucleic acid scaffold (ERS) sequence
  source 1..93: mol_type = other RNA
actggcgcttctatctgattactctgagtgccatcaccagcgactatgtcgtagtgggtaaagtgcgcccgcttcggcgggcgcacatcagag

SEQ ID NO: 15181 - RNA, 93 nt, synthetic construct
  misc_feature 1..93: note = engineered ribonucleic acid scaffold (ERS) sequence
  source 1..93: mol_type = other RNA
actggcgcttctatctgattactctgagagccatcaccagcgactatgtcgtagtgggtaaagtgcgcccgcttcggcgggcgcacatcagag

SEQ ID NO: 15182 - RNA, 93 nt, synthetic construct
  misc_feature 1..93: note = engineered ribonucleic acid scaffold (ERS) sequence
  source 1..93: mol_type = other RNA
actggctcttctatctgattactctgagcgccatcaccagcgactatgtcgtagtgggtaaagtgcgcccgcttcggcgggcgcacatcagag

SEQ ID NO: 15183 - RNA, 93 nt, synthetic construct
  misc_feature 1..93: note = engineered ribonucleic acid scaffold (ERS) sequence
  source 1..93: mol_type = other RNA
actggctcttctatctgattactctgagggccatcaccagcgactatgtcgtagtgggtaaagtgcgcccgcttcggcgggcgcacatcagag

SEQ ID NO: 15184 - RNA, 93 nt, synthetic construct
  misc_feature 1..93: note = engineered ribonucleic acid scaffold (ERS) sequence
  source 1..93: mol_type = other RNA
actggctcttctatctgattactctgagtgccatcaccagcgactatgtcgtagtgggtaaagtgcgcccgcttcggcgggcgcacatcagag

SEQ ID NO: 15185 - RNA, 93 nt, synthetic construct
  misc_feature 1..93: note = engineered ribonucleic acid scaffold (ERS) sequence
  source 1..93: mol_type = other RNA
actggctcttctatctgattactctgagagccatcaccagcgactatgtcgtagtgggtaaagtgcgcccgcttcggcgggcgcacatcagag

SEQ ID NO: 15186 - RNA, 93 nt, synthetic construct
  misc_feature 1..93: note = engineered ribonucleic acid scaffold (ERS) sequence
  source 1..93: mol_type = other RNA
actggcggttctatctgattactctgagcgccatcaccagcgactatgtcgtagtgggtaaagtgcgcccgcttcggcgggcgcacatcagag

SEQ ID NO: 15187 - RNA, 93 nt, synthetic construct
  misc_feature 1..93: note = engineered ribonucleic acid scaffold (ERS) sequence
  source 1..93: mol_type = other RNA
actggcggttctatctgattactctgagagccatcaccagcgactatgtcgtagtgggtaaagtgcgcccgcttcggcgggcgcacatcagag

SEQ ID NO: 15188 - RNA, 92 nt, synthetic construct
  misc_feature 1..92: note = engineered ribonucleic acid scaffold (ERS) sequence
  source 1..92: mol_type = other RNA
acacacggttctatctgattactctgccgtgttcaccagcgactatgtcgtagtgggtaaataatgaaaacttcggttttcattaatcagag

SEQ ID NO: 15189 - RNA, 92 nt, synthetic construct
  misc_feature 1..92: note = engineered ribonucleic acid scaffold (ERS) sequence
  source 1..92: mol_type = other RNA
acactggtttctatctgattactctgaccagttcaccagcgactatgtcgtagtgggtaaataatgaaaacttcggttttcattaatcagag

SEQ ID NO: 15190 - RNA, 92 nt, synthetic construct
  misc_feature 1..92: note = engineered ribonucleic acid scaffold (ERS) sequence
  source 1..92: mol_type = other RNA
acaggccgttctatctgattactctgcggccttcaccagcgactatgtcgtagtgggtaaataatgaaaacttcggttttcattaatcagag

SEQ ID NO: 15191 - RNA, 92 nt, synthetic construct
  misc_feature 1..92: note = engineered ribonucleic acid scaffold (ERS) sequence
  source 1..92: mol_type = other RNA
acaggtccttctatctgattactctgggaccttcaccagcgactatgtcgtagtgggtaaataatgaaaacttcggttttcattaatcagag

SEQ ID NO: 15192 - RNA, 92 nt, synthetic construct
  misc_feature 1..92: note = engineered ribonucleic acid scaffold (ERS) sequence
  source 1..92: mol_type = other RNA
accagcaattctatctgattactctgttgctgtcaccagcgactatgtcgtagtgggtaaataatgaaaacttcggttttcattaatcagag

SEQ ID NO: 15193 - RNA, 92 nt, synthetic construct
  misc_feature 1..92: note = engineered ribonucleic acid scaffold (ERS) sequence
  source 1..92: mol_type = other RNA
accgagacttctatctgattactctgggctcgtcaccagcgactatgtcgtagtgggtaaataatgaaaacttcggttttcattaatcagag

SEQ ID NO: 15194 - RNA, 92 nt, synthetic construct
  misc_feature 1..92: note = engineered ribonucleic acid scaffold (ERS) sequence
  source 1..92: mol_type = other RNA
acctgtagttctatctgattactctgctacagtcaccagcgactatgtcgtagtgggtaaataatgaaaacttcggttttcattaatcagag

SEQ ID NO: 15195 - RNA, 92 nt, synthetic construct
  misc_feature 1..92: note = engineered ribonucleic acid scaffold (ERS) sequence
  source 1..92: mol_type = other RNA
acgagcacttctatctgattactctggggctctcaccagcgactatgtcgtagtgggtaaataatgaaaacttcggttttcattaatcagag

SEQ ID NO: 15196 - RNA, 92 nt, synthetic construct
  misc_feature 1..92: note = engineered ribonucleic acid scaffold (ERS) sequence
  source 1..92: mol_type = other RNA
acgaggtgttctatctgattactctgcacctctcaccagcgactatgtcgtagtgggtaaataatgaaaacttcggttttcattaatcagag

SEQ ID NO: 15197 - RNA, 92 nt, synthetic construct
  misc_feature 1..92: note = engineered ribonucleic acid scaffold (ERS) sequence
  source 1..92: mol_type = other RNA
acgggactttctatctgattactctgagtccctcaccagcgactatgtcgtagtgggtaaataatgaaaacttcggttttcattaatcagag

SEQ ID NO: 15198 - RNA, 92 nt, synthetic construct
  misc_feature 1..92: note = engineered ribonucleic acid scaffold (ERS) sequence
  source 1..92: mol_type = other RNA
acgggcaattctatctgattactctgttgccctcaccagcgactatgtcgtagtgggtaaataatgaaaacttcggttttcattaatcagag

SEQ ID NO: 15199 - RNA, 92 nt, synthetic construct
  misc_feature 1..92: note = engineered ribonucleic acid scaffold (ERS) sequence
  source 1..92: mol_type = other RNA
actgtgcgttctatctgattactctgcgcacatcaccagcgactatgtcgtagtgggtaaataatgaaaacttcggttttcattaatcagag

SEQ ID NO: 15200 - RNA, 93 nt, synthetic construct
  misc_feature 1..93: note = engineered ribonucleic acid scaffold (ERS) sequence
  source 1..93: mol_type = other RNA
actggcgcttctatctgattactctgggcgccatcaccagcgactatgtcgtagtgggtaaataatgaaaacttcggttttcattaatcagag

SEQ ID NO: 15201 - RNA, 93 nt, synthetic construct
  misc_feature 1..93: note = engineered ribonucleic acid scaffold (ERS) sequence
  source 1..93: mol_type = other RNA
actggcgcttctatctgattactctgggagccatcaccagcgactatgtcgtagtgggtaaataatgaaaacttcggttttcattaatcagag

SEQ ID NO: 15202 - RNA, 93 nt, synthetic construct
  misc_feature 1..93: note = engineered ribonucleic acid scaffold (ERS) sequence
  source 1..93: mol_type = other RNA
actggcgcttctatctgattactctgtgagccatcaccagcgactatgtcgtagtgggtaaataatgaaaacttcggttttcattaatcagag

SEQ ID NO: 15203 - RNA, 94 nt, synthetic construct
  misc_feature 1..94: note = engineered ribonucleic acid scaffold (ERS) sequence
  source 1..94: mol_type = other RNA
actggcgcttctatctgattactctgaggagccatcaccagcgactatgtcgtagtgggtaaataatgaaaacttcggttttcattaatcagag

SEQ ID NO: 15204 - RNA, 93 nt, synthetic construct
  misc_feature 1..93: note = engineered ribonucleic acid scaffold (ERS) sequence
  source 1..93: mol_type = other RNA
actggcgcttctatctgattactctgatagccatcaccagcgactatgtcgtagtgggtaaataatgaaaacttcggttttcattaatcagag

SEQ ID NO: 15205 - RNA, 94 nt, synthetic construct
  misc_feature 1..94: note = engineered ribonucleic acid scaffold (ERS) sequence
  source 1..94: mol_type = other RNA
actggcgcttctatctgattactctgagctgccatcaccagcgactatgtcgtagtgggtaaataatgaaaacttcggttttcattaatcagag

SEQ ID NO: 15206 - RNA, 94 nt, synthetic construct
  misc_feature 1..94: note = engineered ribonucleic acid scaffold (ERS) sequence
  source 1..94: mol_type = other RNA
actggcacttctatctgattactctgagtagccatcaccagcgactatgtcgtagtgggtaaataatgaaaacttcggttttcattaatcagag

SEQ ID NO: 15207 - RNA, 94 nt, synthetic construct
  misc_feature 1..94: note = engineered ribonucleic acid scaffold (ERS) sequence
  source 1..94: mol_type = other RNA
actggcgcttctatctgattactctgagtagccatcaccagcgactatgtcgtagtgggtaaataatgaaaacttcggttttcattaatcagag

SEQ ID NO: 15208 - RNA, 93 nt, synthetic construct
  misc_feature 1..93: note = engineered ribonucleic acid scaffold (ERS) sequence
  source 1..93: mol_type = other RNA
actggcgcttctatctgattactctgagcaccatcaccagcgactatgtcgtagtgggtaaataatgaaaacttcggttttcattaatcagag

SEQ ID NO: 15209 - RNA, 93 nt, synthetic construct
  misc_feature 1..93: note = engineered ribonucleic acid scaffold (ERS) sequence
  source 1..93: mol_type = other RNA
actggcacttctatctgattactctgagcgccatcaccagcgactatgtcgtagtgggtaaataatgaaaacttcggttttcattaatcagag

SEQ ID NO: 15210 - RNA, 93 nt, synthetic construct
  misc_feature 1..93: note = engineered ribonucleic acid scaffold (ERS) sequence
  source 1..93: mol_type = other RNA
actggcgcttctatctgattactctgagggccatcaccagcgactatgtcgtagtgggtaaataatgaaaacttcggttttcattaatcagag

SEQ ID NO: 15211 - RNA, 93 nt, synthetic construct
  misc_feature 1..93: note = engineered ribonucleic acid scaffold (ERS) sequence
  source 1..93: mol_type = other RNA
actggcgcttctatctgattactctgagtgccgtcaccagcgactatgtcgtagtgggtaaataatgaaaacttcggttttcattaatcagag

SEQ ID NO: 15212 - RNA, 93 nt, synthetic construct
  misc_feature 1..93: note = engineered ribonucleic acid scaffold (ERS) sequence
  source 1..93: mol_type = other RNA
actggcacttctatctgattactctgagtgccatcaccagcgactatgtcgtagtgggtaaataatgaaaacttcggttttcattaatcagag

SEQ ID NO: 15213 - RNA, 93 nt, synthetic construct
  misc_feature 1..93: note = engineered ribonucleic acid scaffold (ERS) sequence
  source 1..93: mol_type = other RNA
actggcgcttctatctgattactctgagaaccatcaccagcgactatgtcgtagtgggtaaataatgaaaacttcggttttcattaatcagag

SEQ ID NO: 15214 - RNA, 93 nt, synthetic construct
  misc_feature 1..93: note = engineered ribonucleic acid scaffold (ERS) sequence
  source 1..93: mol_type = other RNA
actggcgcttctatctgattactctgagagccgtcaccagcgactatgtcgtagtgggtaaataatgaaaacttcggttttcattaatcagag

SEQ ID NO: 15215 - RNA, 93 nt, synthetic construct
  misc_feature 1..93: note = engineered ribonucleic acid scaffold (ERS) sequence
  source 1..93: mol_type = other RNA
actggcgcttctatctgattactctgagagccttcaccagcgactatgtcgtagtgggtaaataatgaaaacttcggttttcattaatcagag

SEQ ID NO: 15216 - RNA, 93 nt, synthetic construct
  misc_feature 1..93: note = engineered ribonucleic acid scaffold (ERS) sequence
  source 1..93: mol_type = other RNA
actggggcttctatctgattactctgagacccatcaccagcgactatgtcgtagtgggtaaataatgaaaacttcggttttcattaatcagag

SEQ ID NO: 15217 - RNA, 93 nt, synthetic construct
  misc_feature 1..93: note = engineered ribonucleic acid scaffold (ERS) sequence
  source 1..93: mol_type = other RNA
actggtgcttctatctgattactctgagagccatcaccagcgactatgtcgtagtgggtaaataatgaaaacttcggttttcattaatcagag

SEQ ID NO: 15218 - RNA, 93 nt, synthetic construct
  misc_feature 1..93: note = engineered ribonucleic acid scaffold (ERS) sequence
  source 1..93: mol_type = other RNA
actgggccttctatctgattactctgaggcccatcaccagcgactatgtcgtagtgggtaaataatgaaaacttcggttttcattaatcagag

SEQ ID NO: 15219 - RNA, 94 nt, synthetic construct
  misc_feature 1..94: note = engineered ribonucleic acid scaffold (ERS) sequence
  source 1..94: mol_type = other RNA
actggcccttctatctgattactctgaggagccatcaccagcgactatgtcgtagtgggtaaataatgaaaacttcggttttcattaatcagag

SEQ ID NO: 15220 - RNA, 93 nt, synthetic construct
  misc_feature 1..93: note = engineered ribonucleic acid scaffold (ERS) sequence
  source 1..93: mol_type = other RNA
actggcccttctatctgattactctgagggccatcaccagcgactatgtcgtagtgggtaaataatgaaaacttcggttttcattaatcagag

SEQ ID NO: 15221 - RNA, 93 nt, synthetic construct
  misc_feature 1..93: note = engineered ribonucleic acid scaffold (ERS) sequence
  source 1..93: mol_type = other RNA
actggcccttctatctgattactctgagtgccatcaccagcgactatgtcgtagtgggtaaataatgaaaacttcggttttcattaatcagag

SEQ ID NO: 15222 - RNA, 93 nt, synthetic construct
  misc_feature 1..93: note = engineered ribonucleic acid scaffold (ERS) sequence
  source 1..93: mol_type = other RNA
actggcccttctatctgattactctgagagccatcaccagcgactatgtcgtagtgggtaaataatgaaaacttcggttttcattaatcagag

SEQ ID NO: 15223 - RNA, 94 nt, synthetic construct
  misc_feature 1..94: note = engineered ribonucleic acid scaffold (ERS) sequence
  source 1..94: mol_type = other RNA
actggcgcttctatctgattactctgagcagccatcaccagcgactatgtcgtagtgggtaaataatgaaaacttcggttttcattaatcagag

SEQ ID NO: 15224 - RNA, 93 nt, synthetic construct; identical to SEQ ID NO: 873
  misc_feature 1..93: note = engineered ribonucleic acid scaffold (ERS) sequence
  source 1..93: mol_type = other RNA

SEQ ID NO: 15225 - RNA, 93 nt, synthetic construct
  misc_feature 1..93: note = engineered ribonucleic acid scaffold (ERS) sequence
  source 1..93: mol_type = other RNA
actggcgcttctatctgattactctgagtgccatcaccagcgactatgtcgtagtgggtaaataatgaaaacttcggttttcattaatcagag

SEQ ID NO: 15226 - RNA, 93 nt, synthetic construct
  misc_feature 1..93: note = engineered ribonucleic acid scaffold (ERS) sequence
  source 1..93: mol_type = other RNA
actggcgcttctatctgattactctgagagccatcaccagcgactatgtcgtagtgggtaaataatgaaaacttcggttttcattaatcagag

SEQ ID NO: 15227 - RNA, 93 nt, synthetic construct
  misc_feature 1..93: note = engineered ribonucleic acid scaffold (ERS) sequence
  source 1..93: mol_type = other RNA
actggctcttctatctgattactctgagcgccatcaccagcgactatgtcgtagtgggtaaataatgaaaacttcggttttcattaatcagag

SEQ ID NO: 15228 - RNA, 93 nt, synthetic construct
  misc_feature 1..93: note = engineered ribonucleic acid scaffold (ERS) sequence
  source 1..93: mol_type = other RNA
actggctcttctatctgattactctgagggccatcaccagcgactatgtcgtagtgggtaaataatgaaaacttcggttttcattaatcagag

SEQ ID NO: 15229 - RNA, 93 nt, synthetic construct
  misc_feature 1..93: note = engineered ribonucleic acid scaffold (ERS) sequence
  source 1..93: mol_type = other RNA
actggctcttctatctgattactctgagtgccatcaccagcgactatgtcgtagtgggtaaataatgaaaacttcggttttcattaatcagag

SEQ ID NO: 15230 - RNA, 93 nt, synthetic construct
  misc_feature 1..93: note = engineered ribonucleic acid scaffold (ERS) sequence
  source 1..93: mol_type = other RNA
actggctcttctatctgattactctgagagccatcaccagcgactatgtcgtagtgggtaaataatgaaaacttcggttttcattaatcagag

SEQ ID NO: 15231 - RNA, 93 nt, synthetic construct
  misc_feature 1..93: note = engineered ribonucleic acid scaffold (ERS) sequence
  source 1..93: mol_type = other RNA
actggcggttctatctgattactctgagcgccatcaccagcgactatgtcgtagtgggtaaataatgaaaacttcggttttcattaatcagag

SEQ ID NO: 15232 - RNA, 93 nt, synthetic construct
  misc_feature 1..93: note = engineered ribonucleic acid scaffold (ERS) sequence
  source 1..93: mol_type = other RNA
actggcggttctatctgattactctgagagccatcaccagcgactatgtcgtagtgggtaaataatgaaaacttcggttttcattaatcagag

SEQ ID NO: 15233 - RNA, 92 nt, synthetic construct
  misc_feature 1..92: note = engineered ribonucleic acid scaffold (ERS) sequence
  source 1..92: mol_type = other RNA
acacacggttctatctgattactctgccgtgttcaccagcgactatgtcgtagtgggtaaatcgtaagaacttcggttcttacgaatcagag

SEQ ID NO: 15234 - RNA, 92 nt, synthetic construct
  misc_feature 1..92: note = engineered ribonucleic acid scaffold (ERS) sequence
  source 1..92: mol_type = other RNA
acactggtttctatctgattactctgaccagttcaccagcgactatgtcgtagtgggtaaatcgtaagaacttcggttcttacgaatcagag

SEQ ID NO: 15235 - RNA, 92 nt, synthetic construct
  misc_feature 1..92: note = engineered ribonucleic acid scaffold (ERS) sequence
  source 1..92: mol_type = other RNA
acaggccgttctatctgattactctgcggccttcaccagcgactatgtcgtagtgggtaaatcgtaagaacttcggttcttacgaatcagag

SEQ ID NO: 15236 - RNA, 92 nt, synthetic construct
  misc_feature 1..92: note = engineered ribonucleic acid scaffold (ERS) sequence
  source 1..92: mol_type = other RNA
acaggtccttctatctgattactctgggaccttcaccagcgactatgtcgtagtgggtaaatcgtaagaacttcggttcttacgaatcagag

SEQ ID NO: 15237 - RNA, 92 nt, synthetic construct
  misc_feature 1..92: note = engineered ribonucleic acid scaffold (ERS) sequence
  source 1..92: mol_type = other RNA
accagcaattctatctgattactctgttgctgtcaccagcgactatgtcgtagtgggtaaatcgtaagaacttcggttcttacgaatcagag

SEQ ID NO: 15238 - RNA, 92 nt, synthetic construct
  misc_feature 1..92: note = engineered ribonucleic acid scaffold (ERS) sequence
  source 1..92: mol_type = other RNA
accgagacttctatctgattactctgggctcgtcaccagcgactatgtcgtagtgggtaaatcgtaagaacttcggttcttacgaatcagag

SEQ ID NO: 15239 - RNA, 92 nt, synthetic construct
  misc_feature 1..92: note = engineered ribonucleic acid scaffold (ERS) sequence
  source 1..92: mol_type = other RNA
acctgtagttctatctgattactctgctacagtcaccagcgactatgtcgtagtgggtaaatcgtaagaacttcggttcttacgaatcagag

SEQ ID NO: 15240 - RNA, 92 nt, synthetic construct
  misc_feature 1..92: note = engineered ribonucleic acid scaffold (ERS) sequence
  source 1..92: mol_type = other RNA
acgagcacttctatctgattactctggggctctcaccagcgactatgtcgtagtgggtaaatcgtaagaacttcggttcttacgaatcagag

SEQ ID NO: 15241 - RNA, 92 nt, synthetic construct
  misc_feature 1..92: note = engineered ribonucleic acid scaffold (ERS) sequence
  source 1..92: mol_type = other RNA
acgaggtgttctatctgattactctgcacctctcaccagcgactatgtcgtagtgggtaaatcgtaagaacttcggttcttacgaatcagag

SEQ ID NO: 15242 - RNA, 92 nt, synthetic construct
  misc_feature 1..92: note = engineered ribonucleic acid scaffold (ERS) sequence
  source 1..92: mol_type = other RNA
acgggactttctatctgattactctgagtccctcaccagcgactatgtcgtagtgggtaaatcgtaagaacttcggttcttacgaatcagag

SEQ ID NO: 15243 - RNA, 92 nt, synthetic construct
  misc_feature 1..92: note = engineered ribonucleic acid scaffold (ERS) sequence
  source 1..92: mol_type = other RNA
acgggcaattctatctgattactctgttgccctcaccagcgactatgtcgtagtgggtaaatcgtaagaacttcggttcttacgaatcagag

SEQ ID NO: 15244 - RNA, 92 nt, synthetic construct
  misc_feature 1..92: note = engineered ribonucleic acid scaffold (ERS) sequence
  source 1..92: mol_type = other RNA
actgtgcgttctatctgattactctgcgcacatcaccagcgactatgtcgtagtgggtaaatcgtaagaacttcggttcttacgaatcagag

SEQ ID NO: 15245 - RNA, 93 nt, synthetic construct
  misc_feature 1..93: note = engineered ribonucleic acid scaffold (ERS) sequence
  source 1..93: mol_type = other RNA
actggcgcttctatctgattactctgggcgccatcaccagcgactatgtcgtagtgggtaaatcgtaagaacttcggttcttacgaatcagag

SEQ ID NO: 15246 - RNA, 93 nt, synthetic construct
  misc_feature 1..93: note = engineered ribonucleic acid scaffold (ERS) sequence
  source 1..93: mol_type = other RNA
actggcgcttctatctgattactctgggagccatcaccagcgactatgtcgtagtgggtaaatcgtaagaacttcggttcttacgaatcagag

SEQ ID NO: 15247 - RNA, 93 nt, synthetic construct
  misc_feature 1..93: note = engineered ribonucleic acid scaffold (ERS) sequence
  source 1..93: mol_type = other RNA
actggcgcttctatctgattactctgtgagccatcaccagcgactatgtcgtagtgggtaaatcgtaagaacttcggttcttacgaatcagag

SEQ ID NO: 15248 - RNA, 94 nt, synthetic construct
  misc_feature 1..94: note = engineered ribonucleic acid scaffold (ERS) sequence
  source 1..94: mol_type = other RNA
actggcgcttctatctgattactctgaggagccatcaccagcgactatgtcgtagtgggtaaatcgtaagaacttcggttcttacgaatcagag

SEQ ID NO: 15249 - RNA, 93 nt, synthetic construct
  misc_feature 1..93: note = engineered ribonucleic acid scaffold (ERS) sequence
  source 1..93: mol_type = other RNA
actggcgcttctatctgattactctgatagccatcaccagcgactatgtcgtagtgggtaaatcgtaagaacttcggttcttacgaatcagag

SEQ ID NO: 15250 - RNA, 94 nt, synthetic construct
  misc_feature 1..94: note = engineered ribonucleic acid scaffold (ERS) sequence
  source 1..94: mol_type = other RNA
actggcgcttctatctgattactctgagctgccatcaccagcgactatgtcgtagtgggtaaatcgtaagaacttcggttcttacgaatcagag

SEQ ID NO: 15251 - RNA, 94 nt, synthetic construct
  misc_feature 1..94: note = engineered ribonucleic acid scaffold (ERS) sequence
  source 1..94: mol_type = other RNA
actggcacttctatctgattactctgagtagccatcaccagcgactatgtcgtagtgggtaaatcgtaagaacttcggttcttacgaatcagag

SEQ ID NO: 15252 - RNA, 94 nt, synthetic construct
  misc_feature 1..94: note = engineered ribonucleic acid scaffold (ERS) sequence
  source 1..94: mol_type = other RNA
actggcgcttctatctgattactctgagtagccatcaccagcgactatgtcgtagtgggtaaatcgtaagaacttcggttcttacgaatcagag

SEQ ID NO: 15253 - RNA, 93 nt, synthetic construct
  misc_feature 1..93: note = engineered ribonucleic acid scaffold (ERS) sequence
  source 1..93: mol_type = other RNA
actggcgcttctatctgattactctgagcaccatcaccagcgactatgtcgtagtgggtaaatcgtaagaacttcggttcttacgaatcagag

SEQ ID NO: 15254 - RNA, 93 nt, synthetic construct
  misc_feature 1..93: note = engineered ribonucleic acid scaffold (ERS) sequence
  source 1..93: mol_type = other RNA
actggcacttctatctgattactctgagcgccatcaccagcgactatgtcgtagtgggtaaatcgtaagaacttcggttcttacgaatcagag

SEQ ID NO: 15255 - RNA, 93 nt, synthetic construct
  misc_feature 1..93: note = engineered ribonucleic acid scaffold (ERS) sequence
  source 1..93: mol_type = other RNA
actggcgcttctatctgattactctgagggccatcaccagcgactatgtcgtagtgggtaaatcgtaagaacttcggttcttacgaatcagag

SEQ ID NO: 15256 - RNA, 93 nt, synthetic construct
  misc_feature 1..93: note = engineered ribonucleic acid scaffold (ERS) sequence
  source 1..93: mol_type = other RNA
actggcgcttctatctgattactctgagtgccgtcaccagcgactatgtcgtagtgggtaaatcgtaagaacttcggttcttacgaatcagag

SEQ ID NO: 15257 - RNA, 93 nt, synthetic construct
  misc_feature 1..93: note = engineered ribonucleic acid scaffold (ERS) sequence
  source 1..93: mol_type = other RNA
actggcacttctatctgattactctgagtgccatcaccagcgactatgtcgtagtgggtaaatcgtaagaacttcggttcttacgaatcagag

SEQ ID NO: 15258 - RNA, 93 nt, synthetic construct
  misc_feature 1..93: note = engineered ribonucleic acid scaffold (ERS) sequence
  source 1..93: mol_type = other RNA
actggcgcttctatctgattactctgagaaccatcaccagcgactatgtcgtagtgggtaaatcgtaagaacttcggttcttacgaatcagag

SEQ ID NO: 15259 - RNA, 93 nt, synthetic construct
  misc_feature 1..93: note = engineered ribonucleic acid scaffold (ERS) sequence
  source 1..93: mol_type = other RNA
actggcgcttctatctgattactctgagagccgtcaccagcgactatgtcgtagtgggtaaatcgtaagaacttcggttcttacgaatcagag

SEQ ID NO: 15260 - RNA, 93 nt, synthetic construct
  misc_feature 1..93: note = engineered ribonucleic acid scaffold (ERS) sequence
  source 1..93: mol_type = other RNA
actggcgcttctatctgattactctgagagccttcaccagcgactatgtcgtagtgggtaaatcgtaagaacttcggttcttacgaatcagag

SEQ ID NO: 15261 - RNA, 93 nt, synthetic construct
  misc_feature 1..93: note = engineered ribonucleic acid scaffold (ERS) sequence
  source 1..93: mol_type = other RNA
actggggcttctatctgattactctgagacccatcaccagcgactatgtcgtagtgggtaaatcgtaagaacttcggttcttacgaatcagag

SEQ ID NO: 15262 - RNA, 93 nt, synthetic construct
  misc_feature 1..93: note = engineered ribonucleic acid scaffold (ERS) sequence
  source 1..93: mol_type = other RNA
actggtgcttctatctgattactctgagagccatcaccagcgactatgtcgtagtgggtaaatcgtaagaacttcggttcttacgaatcagag

SEQ ID NO: 15263 - RNA, 93 nt, synthetic construct
  misc_feature 1..93: note = engineered ribonucleic acid scaffold (ERS) sequence
  source 1..93: mol_type = other RNA
actgggccttctatctgattactctgaggcccatcaccagcgactatgtcgtagtgggtaaatcgtaagaacttcggttcttacgaatcagag

SEQ ID NO: 15264 - RNA, 94 nt, synthetic construct
  misc_feature 1..94: note = engineered ribonucleic acid scaffold (ERS) sequence
  source 1..94: mol_type = other RNA
actggcccttctatctgattactctgaggagccatcaccagcgactatgtcgtagtgggtaaatcgtaagaacttcggttcttacgaatcagag

SEQ ID NO: 15265 - RNA, 93 nt, synthetic construct
  misc_feature 1..93: note = engineered ribonucleic acid scaffold (ERS) sequence
  source 1..93: mol_type = other RNA
actggcccttctatctgattactctgagggccatcaccagcgactatgtcgtagtgggtaaatcgtaagaacttcggttcttacgaatcagag

SEQ ID NO: 15266 - RNA, 93 nt, synthetic construct
  misc_feature 1..93: note = engineered ribonucleic acid scaffold (ERS) sequence
  source 1..93: mol_type = other RNA
actggcccttctatctgattactctgagtgccatcaccagcgactatgtcgtagtgggtaaatcgtaagaacttcggttcttacgaatcagag

SEQ ID NO: 15267 - RNA, 93 nt, synthetic construct
  misc_feature 1..93: note = engineered ribonucleic acid scaffold (ERS) sequence
  source 1..93: mol_type = other RNA
actggcccttctatctgattactctgagagccatcaccagcgactatgtcgtagtgggtaaatcgtaagaacttcggttcttacgaatcagag

SEQ ID NO: 15268 - RNA, 94 nt, synthetic construct
  misc_feature 1..94: note = engineered ribonucleic acid scaffold (ERS) sequence
  source 1..94: mol_type = other RNA
actggcgcttctatctgattactctgagcagccatcaccagcgactatgtcgtagtgggtaaatcgtaagaacttcggttcttacgaatcagag

SEQ ID NO: 15269 - RNA, 93 nt, synthetic construct; identical to SEQ ID NO: 871
  misc_feature 1..93: note = engineered ribonucleic acid scaffold (ERS) sequence
  source 1..93: mol_type = other RNA

SEQ ID NO: 15270 - RNA, 93 nt, synthetic construct
  misc_feature 1..93: note = engineered ribonucleic acid scaffold (ERS) sequence
  source 1..93: mol_type = other RNA
actggcgcttctatctgattactctgagtgccatcaccagcgactatgtcgtagtgggtaaatcgtaagaacttcggttcttacgaatcagag

SEQ ID NO: 15271 - RNA, 93 nt, synthetic construct
  misc_feature 1..93: note = engineered ribonucleic acid scaffold (ERS) sequence
  source 1..93: mol_type = other RNA
actggcgcttctatctgattactctgagagccatcaccagcgactatgtcgtagtgggtaaatcgtaagaacttcggttcttacgaatcagag

SEQ ID NO: 15272 - RNA, 93 nt, synthetic construct
  misc_feature 1..93: note = engineered ribonucleic acid scaffold (ERS) sequence
  source 1..93: mol_type = other RNA
actggctcttctatctgattactctgagcgccatcaccagcgactatgtcgtagtgggtaaatcgtaagaacttcggttcttacgaatcagag

SEQ ID NO: 15273 - RNA, 93 nt, synthetic construct
  misc_feature 1..93: note = engineered ribonucleic acid scaffold (ERS) sequence
  source 1..93: mol_type = other RNA
actggctcttctatctgattactctgagggccatcaccagcgactatgtcgtagtgggtaaatcgtaagaacttcggttcttacgaatcagag

SEQ ID NO: 15274 - RNA, 93 nt, synthetic construct
  misc_feature 1..93: note = engineered ribonucleic acid scaffold (ERS) sequence
  source 1..93: mol_type = other RNA
actggctcttctatctgattactctgagtgccatcaccagcgactatgtcgtagtgggtaaatcgtaagaacttcggttcttacgaatcagag

SEQ ID NO: 15275 - RNA, 93 nt, synthetic construct
  misc_feature 1..93: note = engineered ribonucleic acid scaffold (ERS) sequence
  source 1..93: mol_type = other RNA
actggctcttctatctgattactctgagagccatcaccagcgactatgtcgtagtgggtaaatcgtaagaacttcggttcttacgaatcagag

SEQ ID NO: 15276 - RNA, 93 nt, synthetic construct
  misc_feature 1..93: note = engineered ribonucleic acid scaffold (ERS) sequence
  source 1..93: mol_type = other RNA
actggcggttctatctgattactctgagcgccatcaccagcgactatgtcgtagtgggtaaatcgtaagaacttcggttcttacgaatcagag

SEQ ID NO: 15277 - RNA, 93 nt, synthetic construct
  misc_feature 1..93: note = engineered ribonucleic acid scaffold (ERS) sequence
  source 1..93: mol_type = other RNA
actggcggttctatctgattactctgagagccatcaccagcgactatgtcgtagtgggtaaatcgtaagaacttcggttcttacgaatcagag

SEQ ID NO: 15278 - RNA, 92 nt, synthetic construct
  misc_feature 1..92: note = engineered ribonucleic acid scaffold (ERS) sequence
  source 1..92: mol_type = other RNA
acacacggttctatctgattactctgccgtgttcaccagcgactatgtcgtagtgggtaaatggaagatgcttcggcatcttccaatcagag

SEQ ID NO: 15279 - RNA, 92 nt, synthetic construct
  misc_feature 1..92: note = engineered ribonucleic acid scaffold (ERS) sequence
  source 1..92: mol_type = other RNA
acactggtttctatctgattactctgaccagttcaccagcgactatgtcgtagtgggtaaatggaagatgcttcggcatcttccaatcagag

SEQ ID NO: 15280 - RNA, 92 nt, synthetic construct
  misc_feature 1..92: note = engineered ribonucleic acid scaffold (ERS) sequence
  source 1..92: mol_type = other RNA
acaggccgttctatctgattactctgcggccttcaccagcgactatgtcgtagtgggtaaatggaagatgcttcggcatcttccaatcagag

SEQ ID NO: 15281 - RNA, 92 nt, synthetic construct
  misc_feature 1..92: note = engineered ribonucleic acid scaffold (ERS) sequence
  source 1..92: mol_type = other RNA
acaggtccttctatctgattactctgggaccttcaccagcgactatgtcgtagtgggtaaatggaagatgcttcggcatcttccaatcagag

SEQ ID NO: 15282 - RNA, 92 nt, synthetic construct
  misc_feature 1..92: note = engineered ribonucleic acid scaffold (ERS) sequence
  source 1..92: mol_type = other RNA
accagcaattctatctgattactctgttgctgtcaccagcgactatgtcgtagtgggtaaatggaagatgcttcggcatcttccaatcagag

SEQ ID NO: 15283 - RNA, 92 nt, synthetic construct
  misc_feature 1..92: note = engineered ribonucleic acid scaffold (ERS) sequence
  source 1..92: mol_type = other RNA
accgagacttctatctgattactctgggctcgtcaccagcgactatgtcgtagtgggtaaatggaagatgcttcggcatcttccaatcagag

SEQ ID NO: 15284 - RNA, 92 nt, synthetic construct
  misc_feature 1..92: note = engineered ribonucleic acid scaffold (ERS) sequence
  source 1..92: mol_type = other RNA
acctgtagttctatctgattactctgctacagtcaccagcgactatgtcgtagtgggtaaatggaagatgcttcggcatcttccaatcagag

SEQ ID NO: 15285 - RNA, 92 nt, synthetic construct
  misc_feature 1..92: note = engineered ribonucleic acid scaffold (ERS) sequence
  source 1..92: mol_type = other RNA
acgagcacttctatctgattactctggggctctcaccagcgactatgtcgtagtgggtaaatggaagatgcttcggcatcttccaatcagag

SEQ ID NO: 15286 - RNA, 92 nt, synthetic construct
  misc_feature 1..92: note = engineered ribonucleic acid scaffold (ERS) sequence
  source 1..92: mol_type = other RNA
acgaggtgttctatctgattactctgcacctctcaccagcgactatgtcgtagtgggtaaatggaagatgcttcggcatcttccaatcagag

SEQ ID NO: 15287 - RNA, 92 nt, synthetic construct
  misc_feature 1..92: note = engineered ribonucleic acid scaffold (ERS) sequence
  source 1..92: mol_type = other RNA
acgggactttctatctgattactctgagtccctcaccagcgactatgtcgtagtgggtaaatggaagatgcttcggcatcttccaatcagag

SEQ ID NO: 15288 - RNA, 92 nt, synthetic construct
  misc_feature 1..92: note = engineered ribonucleic acid scaffold (ERS) sequence
  source 1..92: mol_type = other RNA
acgggcaattctatctgattactctgttgccctcaccagcgactatgtcgtagtgggtaaatggaagatgcttcggcatcttccaatcagag

SEQ ID NO: 15289 - RNA, 92 nt, synthetic construct
  misc_feature 1..92: note = engineered ribonucleic acid scaffold (ERS) sequence
  source 1..92: mol_type = other RNA
actgtgcgttctatctgattactctgcgcacatcaccagcgactatgtcgtagtgggtaaatggaagatgcttcggcatcttccaatcagag

SEQ ID NO: 15290 - RNA, 93 nt, synthetic construct
  misc_feature 1..93: note = engineered ribonucleic acid scaffold (ERS) sequence
  source 1..93: mol_type = other RNA
actggcgcttctatctgattactctgggcgccatcaccagcgactatgtcgtagtgggtaaatggaagatgcttcggcatcttccaatcagag

SEQ ID NO: 15291 - RNA, 93 nt, synthetic construct
  misc_feature 1..93: note = engineered ribonucleic acid scaffold (ERS) sequence
  source 1..93: mol_type = other RNA
actggcgcttctatctgattactctgggagccatcaccagcgactatgtcgtagtgggtaaatggaagatgcttcggcatcttccaatcagag

SEQ ID NO: 15292 - RNA, 93 nt, synthetic construct
  misc_feature 1..93: note = engineered ribonucleic acid scaffold (ERS) sequence
  source 1..93: mol_type = other RNA
actggcgcttctatctgattactctgtgagccatcaccagcgactatgtcgtagtgggtaaatggaagatgcttcggcatcttccaatcagag

SEQ ID NO: 15293 - RNA, 94 nt, synthetic construct
  misc_feature 1..94: note = engineered ribonucleic acid scaffold (ERS) sequence
  source 1..94: mol_type = other RNA
actggcgcttctatctgattactctgaggagccatcaccagcgactatgtcgtagtgggtaaatggaagatgcttcggcatcttccaatcagag

SEQ ID NO: 15294 - RNA, 93 nt, synthetic construct
  misc_feature 1..93: note = engineered ribonucleic acid scaffold (ERS) sequence
  source 1..93: mol_type = other RNA
actggcgcttctatctgattactctgatagccatcaccagcgactatgtcgtagtgggtaaatggaagatgcttcggcatcttccaatcagag

SEQ ID NO: 15295 - RNA, 94 nt, synthetic construct
  misc_feature 1..94: note = engineered ribonucleic acid scaffold (ERS) sequence
  source 1..94: mol_type = other RNA
actggcgcttctatctgattactctgagctgccatcaccagcgactatgtcgtagtgggtaaatggaagatgcttcggcatcttccaatcagag

SEQ ID NO: 15296 - RNA, 94 nt, synthetic construct
  misc_feature 1..94: note = engineered ribonucleic acid scaffold (ERS) sequence
  source 1..94: mol_type = other RNA
actggcacttctatctgattactctgagtagccatcaccagcgactatgtcgtagtgggtaaatggaagatgcttcggcatcttccaatcagag

SEQ ID NO: 15297 - RNA, 94 nt, synthetic construct
  misc_feature 1..94: note = engineered ribonucleic acid scaffold (ERS) sequence
  source 1..94: mol_type = other RNA
actggcgcttctatctgattactctgagtagccatcaccagcgactatgtcgtagtgggtaaatggaagatgcttcggcatcttccaatcagag

SEQ ID NO: 15298 - RNA, 93 nt, synthetic construct
  misc_feature 1..93: note = engineered ribonucleic acid scaffold (ERS) sequence
  source 1..93: mol_type = other RNA
actggcgcttctatctgattactctgagcaccatcaccagcgactatgtcgtagtgggtaaatggaagatgcttcggcatcttccaatcagag

SEQ ID NO: 15299 - RNA, 93 nt, synthetic construct
  misc_feature 1..93: note = engineered ribonucleic acid scaffold (ERS) sequence
  source 1..93: mol_type = other RNA
actggcacttctatctgattactctgagcgccatcaccagcgactatgtcgtagtgggtaaatggaagatgcttcggcatcttccaatcagag

SEQ ID NO: 15300 - RNA, 93 nt, synthetic construct
  misc_feature 1..93: note = engineered ribonucleic acid scaffold (ERS) sequence
  source 1..93: mol_type = other RNA
actggcgcttctatctgattactctgagggccatcaccagcgactatgtcgtagtgggtaaatggaagatgcttcggcatcttccaatcagag

SEQ ID NO: 15301 - RNA, 93 nt, synthetic construct
  misc_feature 1..93: note = engineered ribonucleic acid scaffold (ERS) sequence
  source 1..93: mol_type = other RNA
actggcgcttctatctgattactctgagtgccgtcaccagcgactatgtcgtagtgggtaaatggaagatgcttcggcatcttccaatcagag

SEQ ID NO: 15302 - RNA, 93 nt, synthetic construct
  misc_feature 1..93: note = engineered ribonucleic acid scaffold (ERS) sequence
  source 1..93: mol_type = other RNA
actggcacttctatctgattactctgagtgccatcaccagcgactatgtcgtagtgggtaaatggaagatgcttcggcatcttccaatcagag

SEQ ID NO: 15303 - RNA, 93 nt, synthetic construct
  misc_feature 1..93: note = engineered ribonucleic acid scaffold (ERS) sequence
  source 1..93: mol_type = other RNA
actggcgcttctatctgattactctgagaaccatcaccagcgactatgtcgtagtgggtaaatggaagatgcttcggcatcttccaatcagag

SEQ ID NO: 15304 - RNA, 93 nt, synthetic construct
  misc_feature 1..93: note = engineered ribonucleic acid scaffold (ERS) sequence
  source 1..93: mol_type = other RNA
actggcgcttctatctgattactctgagagccgtcaccagcgactatgtcgtagtgggtaaatggaagatgcttcggcatcttccaatcagag

SEQ ID NO: 15305 - RNA, 93 nt, synthetic construct
  misc_feature 1..93: note = engineered ribonucleic acid scaffold (ERS) sequence
  source 1..93: mol_type = other RNA
actggcgcttctatctgattactctgagagccttcaccagcgactatgtcgtagtgggtaaatggaagatgcttcggcatcttccaatcagag

SEQ ID NO: 15306 - RNA, 93 nt, synthetic construct
  misc_feature 1..93: note = engineered ribonucleic acid scaffold (ERS) sequence
  source 1..93: mol_type = other RNA
actggggcttctatctgattactctgagacccatcaccagcgactatgtcgtagtgggtaaatggaagatgcttcggcatcttccaatcagag

SEQ ID NO: 15307 - RNA, 93 nt, synthetic construct
  misc_feature 1..93: note = engineered ribonucleic acid scaffold (ERS) sequence
  source 1..93: mol_type = other RNA
actggtgcttctatctgattactctgagagccatcaccagcgactatgtcgtagtgggtaaatggaagatgcttcggcatcttccaatcagag

SEQ ID NO: 15308 - RNA, 93 nt, synthetic construct
  misc_feature 1..93: note = engineered ribonucleic acid scaffold (ERS) sequence
  source 1..93: mol_type = other RNA
actgggccttctatctgattactctgaggcccatcaccagcgactatgtcgtagtgggtaaatggaagatgcttcggcatcttccaatcagag

SEQ ID NO: 15309 - RNA, 94 nt, synthetic construct
  misc_feature 1..94: note = engineered ribonucleic acid scaffold (ERS) sequence
  source 1..94: mol_type = other RNA
actggcccttctatctgattactctgaggagccatcaccagcgactatgtcgtagtgggtaaatggaagatgcttcggcatcttccaatcagag

SEQ ID NO: 15310 - RNA, 93 nt, synthetic construct
  misc_feature 1..93: note = engineered ribonucleic acid scaffold (ERS) sequence
  source 1..93: mol_type = other RNA
actggcccttctatctgattactctgagggccatcaccagcgactatgtcgtagtgggtaaatggaagatgcttcggcatcttccaatcagag

SEQ ID NO: 15311 - RNA, 93 nt, synthetic construct
  misc_feature 1..93: note = engineered ribonucleic acid scaffold (ERS) sequence
  source 1..93: mol_type = other RNA
actggcccttctatctgattactctgagtgccatcaccagcgactatgtcgtagtgggtaaatggaagatgcttcggcatcttccaatcagag

SEQ ID NO: 15312 - RNA, 93 nt, synthetic construct
  misc_feature 1..93: note = engineered ribonucleic acid scaffold (ERS) sequence
  source 1..93: mol_type = other RNA
actggcccttctatctgattactctgagagccatcaccagcgactatgtcgtagtgggtaaatggaagatgcttcggcatcttccaatcagag

SEQ ID NO: 15313 - RNA, 94 nt, synthetic construct
  misc_feature 1..94: note = engineered ribonucleic acid scaffold (ERS) sequence
  source 1..94: mol_type = other RNA
actggcgcttctatctgattactctgagcagccatcaccagcgactatgtcgtagtgggtaaatggaagatgcttcggcatcttccaatcagag

SEQ ID NO: 15314 - RNA, 93 nt, synthetic construct; identical to SEQ ID NO: 874
  misc_feature 1..93: note = engineered ribonucleic acid scaffold (ERS) sequence
  source 1..93: mol_type = other RNA

SEQ ID NO: 15315 - RNA, 93 nt, synthetic construct
  misc_feature 1..93: note = engineered ribonucleic acid scaffold (ERS) sequence
  source 1..93: mol_type = other RNA
actggcgcttctatctgattactctgagtgccatcaccagcgactatgtcgtagtgggtaaatggaagatgcttcggcatcttccaatcagag

SEQ ID NO: 15316 - RNA, 93 nt, synthetic construct
  misc_feature 1..93: note = engineered ribonucleic acid scaffold (ERS) sequence
  source 1..93: mol_type = other RNA
actggcgcttctatctgattactctgagagccatcaccagcgactatgtcgtagtgggtaaatggaagatgcttcggcatcttccaatcagag

SEQ ID NO: 15317 - RNA, 93 nt, synthetic construct
  misc_feature 1..93: note = engineered ribonucleic acid scaffold (ERS) sequence
  source 1..93: mol_type = other RNA
actggctcttctatctgattactctgagcgccatcaccagcgactatgtcgtagtgggtaaatggaagatgcttcggcatcttccaatcagag

SEQ ID NO: 15318 - RNA, 93 nt, synthetic construct
  misc_feature 1..93: note = engineered ribonucleic acid scaffold (ERS) sequence
  source 1..93: mol_type = other RNA
actggctcttctatctgattactctgagggccatcaccagcgactatgtcgtagtgggtaaatggaagatgcttcggcatcttccaatcagag

SEQ ID NO: 15319 - RNA, 93 nt, synthetic construct
  misc_feature 1..93: note = engineered ribonucleic acid scaffold (ERS) sequence
  source 1..93: mol_type = other RNA
actggctcttctatctgattactctgagtgccatcaccagcgactatgtcgtagtgggtaaatggaagatgcttcggcatcttccaatcagag

SEQ ID NO: 15320 - RNA, 93 nt, synthetic construct
  misc_feature 1..93: note = engineered ribonucleic acid scaffold (ERS) sequence
  source 1..93: mol_type = other RNA
actggctcttctatctgattactctgagagccatcaccagcgactatgtcgtagtgggtaaatggaagatgcttcggcatcttccaatcagag

SEQ ID NO: 15321 - RNA, 93 nt, synthetic construct
  misc_feature 1..93: note = engineered ribonucleic acid scaffold (ERS) sequence
  source 1..93: mol_type = other RNA
actggcggttctatctgattactctgagcgccatcaccagcgactatgtcgtagtgggtaaatggaagatgcttcggcatcttccaatcagag

SEQ ID NO: 15322 - RNA, 93 nt, synthetic construct
  misc_feature 1..93: note = engineered ribonucleic acid scaffold (ERS) sequence
  source 1..93: mol_type = other RNA
actggcggttctatctgattactctgagagccatcaccagcgactatgtcgtagtgggtaaatggaagatgcttcggcatcttccaatcagag

SEQ ID NO: 15323 - RNA, 96 nt, synthetic construct
  misc_feature 1..96: note = engineered ribonucleic acid scaffold (ERS) sequence
  source 1..96: mol_type = other RNA
acacacggttctatctgattactctgccgtgttcaccagcgactatgtcgtagtgggtaaagcccttacggacttcggtccgtaagggcatcagag

SEQ ID NO: 15324 - RNA, 96 nt, synthetic construct
  misc_feature 1..96: note = engineered ribonucleic acid scaffold (ERS) sequence
  source 1..96: mol_type = other RNA
acactggtttctatctgattactctgaccagttcaccagcgactatgtcgtagtgggtaaagcccttacggacttcggtccgtaagggcatcagag

SEQ ID NO: 15325 - RNA, 96 nt, synthetic construct
  misc_feature 1..96: note = engineered ribonucleic acid scaffold (ERS) sequence
  source 1..96: mol_type = other RNA
acaggccgttctatctgattactctgcggccttcaccagcgactatgtcgtagtgggtaaagcccttacggacttcggtccgtaagggcatcagag

SEQ ID NO: 15326 - RNA, 96 nt, synthetic construct
  misc_feature 1..96: note = engineered ribonucleic acid scaffold (ERS) sequence
  source 1..96: mol_type = other RNA
acaggtccttctatctgattactctgggaccttcaccagcgactatgtcgtagtgggtaaagcccttacggacttcggtccgtaagggcatcagag

SEQ ID NO: 15327 - RNA, 96 nt, synthetic construct
  misc_feature 1..96: note = engineered ribonucleic acid scaffold (ERS) sequence
  source 1..96: mol_type = other RNA
accagcaattctatctgattactctgttgctgtcaccagcgactatgtcgtagtgggtaaagcccttacggacttcggtccgtaagggcatcagag

SEQ ID NO: 15328 - RNA, 96 nt, synthetic construct
  misc_feature 1..96: note = engineered ribonucleic acid scaffold (ERS) sequence
  source 1..96: mol_type = other RNA
accgagacttctatctgattactctgggctcgtcaccagcgactatgtcgtagtgggtaaagcccttacggacttcggtccgtaagggcatcagag

SEQ ID NO: 15329 - RNA, 96 nt, synthetic construct
  misc_feature 1..96: note = engineered ribonucleic acid scaffold (ERS) sequence
  source 1..96: mol_type = other RNA
acctgtagttctatctgattactctgctacagtcaccagcgactatgtcgtagtgggtaaagcccttacggacttcggtccgtaagggcatcagag

SEQ ID NO: 15330 - RNA, 96 nt, synthetic construct
  misc_feature 1..96: note = engineered ribonucleic acid scaffold (ERS) sequence
  source 1..96: mol_type = other RNA
acgagcacttctatctgattactctggggctctcaccagcgactatgtcgtagtgggtaaagcccttacggacttcggtccgtaagggcatcagag

SEQ ID NO: 15331 - RNA, 96 nt, synthetic construct
  misc_feature 1..96: note = engineered ribonucleic acid scaffold (ERS) sequence
  source 1..96: mol_type = other RNA
acgaggtgttctatctgattactctgcacctctcaccagcgactatgtcgtagtgggtaaagcccttacggacttcggtccgtaagggcatcagag

SEQ ID NO: 15332 - RNA, 96 nt, synthetic construct
  misc_feature 1..96: note = engineered ribonucleic acid scaffold (ERS) sequence
  source 1..96: mol_type = other RNA
acgggactttctatctgattactctgagtccctcaccagcgactatgtcgtagtgggtaaagcccttacggacttcggtccgtaagggcatcagag

SEQ ID NO: 15333 - RNA, 96 nt, synthetic construct
  misc_feature 1..96: note = engineered ribonucleic acid scaffold (ERS) sequence
  source 1..96: mol_type = other RNA
acgggcaattctatctgattactctgttgccctcaccagcgactatgtcgtagtgggtaaagcccttacggacttcggtccgtaagggcatcagag

SEQ ID NO: 15334 - RNA, 96 nt, synthetic construct
  misc_feature 1..96: note = engineered ribonucleic acid scaffold (ERS) sequence
  source 1..96: mol_type = other RNA
actgtgcgttctatctgattactctgcgcacatcaccagcgactatgtcgtagtgggtaaagcccttacggacttcggtccgtaagggcatcagag

SEQ ID NO: 15335 - RNA, 97 nt, synthetic construct
  misc_feature 1..97: note = engineered ribonucleic acid scaffold (ERS) sequence
  source 1..97: mol_type = other RNA
actggcgcttctatctgattactctgggcgccatcaccagcgactatgtcgtagtgggtaaagcccttacggacttcggtccgtaagggcatcagag

SEQ ID NO: 15336 - RNA, 97 nt, synthetic construct
  misc_feature 1..97: note = engineered ribonucleic acid scaffold (ERS) sequence
  source 1..97: mol_type = other RNA
actggcgcttctatctgattactctgggagccatcaccagcgactatgtcgtagtgggtaaagcccttacggacttcggtccgtaagggcatcagag

SEQ ID NO: 15337 - RNA, 97 nt, synthetic construct
  misc_feature 1..97: note = engineered ribonucleic acid scaffold (ERS) sequence
  source 1..97: mol_type = other RNA
actggcgcttctatctgattactctgtgagccatcaccagcgactatgtcgtagtgggtaaagcccttacggacttcggtccgtaagggcatcagag

SEQ ID NO: 15338 - RNA, 98 nt, synthetic construct
  misc_feature 1..98: note = engineered ribonucleic acid scaffold (ERS) sequence
  source 1..98: mol_type = other RNA
actggcgcttctatctgattactctgaggagccatcaccagcgactatgtcgtagtgggtaaagcccttacggacttcggtccgtaagggcatcagag

SEQ ID NO: 15339 - RNA, 97 nt, synthetic construct
  misc_feature 1..97: note = engineered ribonucleic acid scaffold (ERS) sequence
  source 1..97: mol_type = other RNA
actggcgcttctatctgattactctgatagccatcaccagcgactatgtcgtagtgggtaaagcccttacggacttcggtccgtaagggcatcagag

SEQ ID NO: 15340 - RNA, 98 nt, synthetic construct
  misc_feature 1..98: note = engineered ribonucleic acid scaffold (ERS) sequence
  source 1..98: mol_type = other RNA
actggcgcttctatctgattactctgagctgccatcaccagcgactatgtcgtagtgggtaaagcccttacggacttcggtccgtaagggcatcagag

SEQ ID NO: 15341 - RNA, 98 nt, synthetic construct
  misc_feature 1..98: note = engineered ribonucleic acid scaffold (ERS) sequence
  source 1..98: mol_type = other RNA
actggcacttctatctgattactctgagtagccatcaccagcgactatgtcgtagtgggtaaagcccttacggacttcggtccgtaagggcatcagag

SEQ ID NO: 15342 - RNA, 98 nt, synthetic construct
  misc_feature 1..98: note = engineered ribonucleic acid scaffold (ERS) sequence
  source 1..98: mol_type = other RNA
actggcgcttctatctgattactctgagtagccatcaccagcgactatgtcgtagtgggtaaagcccttacggacttcggtccgtaagggcatcagag

SEQ ID NO: 15343 - RNA, 97 nt, synthetic construct
  misc_feature 1..97: note = engineered ribonucleic acid scaffold (ERS) sequence
  source 1..97: mol_type = other RNA
actggcgcttctatctgattactctgagcaccatcaccagcgactatgtcgtagtgggtaaagcccttacggacttcggtccgtaagggcatcagag

SEQ ID NO: 15344 - RNA, 97 nt, synthetic construct
  misc_feature 1..97: note = engineered ribonucleic acid scaffold (ERS) sequence
  source 1..97: mol_type = other RNA
actggcacttctatctgattactctgagcgccatcaccagcgactatgtcgtagtgggtaaagcccttacggacttcggtccgtaagggcatcagag

SEQ ID NO: 15345 - RNA, 97 nt, synthetic construct
  misc_feature 1..97: note = engineered ribonucleic acid scaffold (ERS) sequence
  source 1..97: mol_type = other RNA
actggcgcttctatctgattactctgagggccatcaccagcgactatgtcgtagtgggtaaagcccttacggacttcggtccgtaagggcatcagag

SEQ ID NO: 15346 - RNA, 97 nt, synthetic construct
  misc_feature 1..97: note = engineered ribonucleic acid scaffold (ERS) sequence
  source 1..97: mol_type = other RNA
actggcgcttctatctgattactctgagtgccgtcaccagcgactatgtcgtagtgggtaaagcccttacggacttcggtccgtaagggcatcagag

SEQ ID NO: 15347 - RNA, 97 nt, synthetic construct
  misc_feature 1..97: note = engineered ribonucleic acid scaffold (ERS) sequence
  source 1..97: mol_type = other RNA
actggcacttctatctgattactctgagtgccatcaccagcgactatgtcgtagtgggtaaagcccttacggacttcggtccgtaagggcatcagag

SEQ ID NO: 15348 - RNA, 97 nt, synthetic construct
  misc_feature 1..97: note = engineered ribonucleic acid scaffold (ERS) sequence
  source 1..97: mol_type = other RNA
actggcgcttctatctgattactctgagaaccatcaccagcgactatgtcgtagtgggtaaagcccttacggacttcggtccgtaagggcatcagag

SEQ ID NO: 15349 - RNA, 97 nt, synthetic construct
  misc_feature 1..97: note = engineered ribonucleic acid scaffold (ERS) sequence
  source 1..97: mol_type = other RNA
actggcgcttctatctgattactctgagagccgtcaccagcgactatgtcgtagtgggtaaagcccttacggacttcggtccgtaagggcatcagag

SEQ ID NO: 15350 - RNA, 97 nt, synthetic construct
  misc_feature 1..97: note = engineered ribonucleic acid scaffold (ERS) sequence
  source 1..97: mol_type = other RNA
actggcgcttctatctgattactctgagagccttcaccagcgactatgtcgtagtgggtaaagcccttacggacttcggtccgtaagggcatcagag

SEQ ID NO: 15351 - RNA, 97 nt, synthetic construct
  misc_feature 1..97: note = engineered ribonucleic acid scaffold (ERS) sequence
  source 1..97: mol_type = other RNA
actggggcttctatctgattactctgagacccatcaccagcgactatgtcgtagtgggtaaagcccttacggacttcggtccgtaagggcatcagag

SEQ ID NO: 15352 - RNA, 97 nt, synthetic construct
  misc_feature 1..97: note = engineered ribonucleic acid scaffold (ERS) sequence
  source 1..97: mol_type = other RNA
actggtgcttctatctgattactctgagagccatcaccagcgactatgtcgtagtgggtaaagcccttacggacttcggtccgtaagggcatcagag

SEQ ID NO: 15353 - RNA, 97 nt, synthetic construct
  misc_feature 1..97: note = engineered ribonucleic acid scaffold (ERS) sequence
  source 1..97: mol_type = other RNA
actgggccttctatctgattactctgaggcccatcaccagcgactatgtcgtagtgggtaaagcccttacggacttcggtccgtaagggcatcagag

SEQ ID NO: 15354 - RNA, 98 nt, synthetic construct
  misc_feature 1..98: note = engineered ribonucleic acid scaffold (ERS) sequence
  source 1..98: mol_type = other RNA
actggcccttctatctgattactctgaggagccatcaccagcgactatgtcgtagtgggtaaagcccttacggacttcggtccgtaagggcatcagag

SEQ ID NO: 15355 - RNA, 97 nt, synthetic construct
  misc_feature 1..97: note = engineered ribonucleic acid scaffold (ERS) sequence
  source 1..97: mol_type = other RNA
actggcccttctatctgattactctgagggccatcaccagcgactatgtcgtagtgggtaaagcccttacggacttcggtccgtaagggcatcagag

SEQ ID NO: 15356 - RNA, 97 nt, synthetic construct
  misc_feature 1..97: note = engineered ribonucleic acid scaffold (ERS) sequence
  source 1..97: mol_type = other RNA
actggcccttctatctgattactctgagtgccatcaccagcgactatgtcgtagtgggtaaagcccttacggacttcggtccgtaagggcatcagag

SEQ ID NO: 15357 - RNA, 97 nt, synthetic construct
  misc_feature 1..97: note = engineered ribonucleic acid scaffold (ERS) sequence
  source 1..97: mol_type = other RNA
actggcccttctatctgattactctgagagccatcaccagcgactatgtcgtagtgggtaaagcccttacggacttcggtccgtaagggcatcagag

SEQ ID NO: 15358 - RNA, 98 nt, synthetic construct
  misc_feature 1..98: note = engineered ribonucleic acid scaffold (ERS) sequence
  source 1..98: mol_type = other RNA
actggcgcttctatctgattactctgagcagccatcaccagcgactatgtcgtagtgggtaaagcccttacggacttcggtccgtaagggcatcagag

SEQ ID NO: 15359 - RNA, 97 nt, synthetic construct; identical to SEQ ID NO: 903
  misc_feature 1..97: note = engineered ribonucleic acid scaffold (ERS) sequence
  source 1..97: mol_type = other RNA

SEQ ID NO: 15360 - RNA, 97 nt, synthetic construct
  misc_feature 1..97: note = engineered ribonucleic acid scaffold (ERS) sequence
  source 1..97: mol_type = other RNA
actggcgcttctatctgattactctgagtgccatcaccagcgactatgtcgtagtgggtaaagcccttacggacttcggtccgtaagggcatcagag

SEQ ID NO: 15361 - RNA, 97 nt, synthetic construct
  misc_feature 1..97: note = engineered ribonucleic acid scaffold (ERS) sequence
  source 1..97: mol_type = other RNA
actggcgcttctatctgattactctgagagccatcaccagcgactatgtcgtagtgggtaaagcccttacggacttcggtccgtaagggcatcagag

SEQ ID NO: 15362 - RNA, 97 nt, synthetic construct
  misc_feature 1..97: note = engineered ribonucleic acid scaffold (ERS) sequence
  source 1..97: mol_type = other RNA
actggctcttctatctgattactctgagcgccatcaccagcgactatgtcgtagtgggtaaagcccttacggacttcggtccgtaagggcatcagag

SEQ ID NO: 15363 - RNA, 97 nt, synthetic construct
  misc_feature 1..97: note = engineered ribonucleic acid scaffold (ERS) sequence
  source 1..97: mol_type = other RNA
actggctcttctatctgattactctgagggccatcaccagcgactatgtcgtagtgggtaaagcccttacggacttcggtccgtaagggcatcagag

SEQ ID NO: 15364 - RNA, 97 nt, synthetic construct
  misc_feature 1..97: note = engineered ribonucleic acid scaffold (ERS) sequence
  source 1..97: mol_type = other RNA
actggctcttctatctgattactctgagtgccatcaccagcgactatgtcgtagtgggtaaagcccttacggacttcggtccgtaagggcatcagag

SEQ ID NO: 15365 - RNA, 97 nt, synthetic construct
  misc_feature 1..97: note = engineered ribonucleic acid scaffold (ERS) sequence
  source 1..97: mol_type = other RNA
actggctcttctatctgattactctgagagccatcaccagcgactatgtcgtagtgggtaaagcccttacggacttcggtccgtaagggcatcagag

SEQ ID NO: 15366 - RNA, 97 nt, synthetic construct
  misc_feature 1..97: note = engineered ribonucleic acid scaffold (ERS) sequence
  source 1..97: mol_type = other RNA
actggcggttctatctgattactctgagcgccatcaccagcgactatgtcgtagtgggtaaagcccttacggacttcggtccgtaagggcatcagag

SEQ ID NO: 15367 - RNA, 97 nt, synthetic construct
  misc_feature 1..97: note = engineered ribonucleic acid scaffold (ERS) sequence
  source 1..97: mol_type = other RNA
actggcggttctatctgattactctgagagccatcaccagcgactatgtcgtagtgggtaaagcccttacggacttcggtccgtaagggcatcagag

SEQ ID NO: 15368 - RNA, 98 nt, synthetic construct
  misc_feature 1..98: note = engineered ribonucleic acid scaffold (ERS) sequence
  source 1..98: mol_type = other RNA
acacacggttctatctgattactctgccgtgttcaccagcgactatgtcgtagtgggtaaagcctcttacggacttcggtccgtaagaggcatcagag

SEQ ID NO: 15369 - RNA, 98 nt, synthetic construct
  misc_feature 1..98: note = engineered ribonucleic acid scaffold (ERS) sequence
  source 1..98: mol_type = other RNA
acactggtttctatctgattactctgaccagttcaccagcgactatgtcgtagtgggtaaagcctcttacggacttcggtccgtaagaggcatcagag

SEQ ID NO: 15370 - RNA, 98 nt, synthetic construct
  misc_feature 1..98: note = engineered ribonucleic acid scaffold (ERS) sequence
  source 1..98: mol_type = other RNA
acaggccgttctatctgattactctgcggccttcaccagcgactatgtcgtagtgggtaaagcctcttacggacttcggtccgtaagaggcatcagag

SEQ ID NO: 15371 - RNA, 98 nt, synthetic construct
  misc_feature 1..98: note = engineered ribonucleic acid scaffold (ERS) sequence
  source 1..98: mol_type = other RNA
acaggtccttctatctgattactctgggaccttcaccagcgactatgtcgtagtgggtaaagcctcttacggacttcggtccgtaagaggcatcagag

SEQ ID NO: 15372 - RNA, 98 nt, synthetic construct
  misc_feature 1..98: note = engineered ribonucleic acid scaffold (ERS) sequence
  source 1..98: mol_type = other RNA
accagcaattctatctgattactctgttgctgtcaccagcgactatgtcgtagtgggtaaagcctcttacggacttcggtccgtaagaggcatcagag

SEQ ID NO: 15373 - RNA, 98 nt, synthetic construct
  misc_feature 1..98: note = engineered ribonucleic acid scaffold (ERS) sequence
  source 1..98: mol_type = other RNA
accgagacttctatctgattactctgggctcgtcaccagcgactatgtcgtagtgggtaaagcctcttacggacttcggtccgtaagaggcatcagag

SEQ ID NO: 15374 - RNA, 98 nt, synthetic construct
  misc_feature 1..98: note = engineered ribonucleic acid scaffold (ERS) sequence
  source 1..98: mol_type = other RNA
acctgtagttctatctgattactctgctacagtcaccagcgactatgtcgtagtgggtaaagcctcttacggacttcggtccgtaagaggcatcagag

SEQ ID NO: 15375 - RNA, 98 nt, synthetic construct
  misc_feature 1..98: note = engineered ribonucleic acid scaffold (ERS) sequence
  source 1..98: mol_type = other RNA
acgagcacttctatctgattactctggggctctcaccagcgactatgtcgtagtgggtaaagcctcttacggacttcggtccgtaagaggcatcagag

SEQ ID NO: 15376 - RNA, 98 nt, synthetic construct
  misc_feature 1..98: note = engineered ribonucleic acid scaffold (ERS) sequence
  source 1..98: mol_type = other RNA
acgaggtgttctatctgattactctgcacctctcaccagcgactatgtcgtagtgggtaaagcctcttacggacttcggtccgtaagaggcatcagag

SEQ ID NO: 15377 - RNA, 98 nt, synthetic construct
  misc_feature 1..98: note = engineered ribonucleic acid scaffold (ERS) sequence
  source 1..98: mol_type = other RNA
acgggactttctatctgattactctgagtccctcaccagcgactatgtcgtagtgggtaaagcctcttacggacttcggtccgtaagaggcatcagag

SEQ ID NO: 15378 - RNA, 98 nt, synthetic construct
  misc_feature 1..98: note = engineered ribonucleic acid scaffold (ERS) sequence
  source 1..98: mol_type = other RNA
acgggcaattctatctgattactctgttgccctcaccagcgactatgtcgtagtgggtaaagcctcttacggacttcggtccgtaagaggcatcagag

SEQ ID NO: 15379 - RNA, 98 nt, synthetic construct
  misc_feature 1..98: note = engineered ribonucleic acid scaffold (ERS) sequence
  source 1..98: mol_type = other RNA
actgtgcgttctatctgattactctgcgcacatcaccagcgactatgtcgtagtgggtaaagcctcttacggacttcggtccgtaagaggcatcagag

SEQ ID NO: 15380 - RNA, 99 nt, synthetic construct
  misc_feature 1..99: note = engineered ribonucleic acid scaffold (ERS) sequence
  source 1..99: mol_type = other RNA
actggcgcttctatctgattactctgggcgccatcaccagcgactatgtcgtagtgggtaaagcctcttacggacttcggtccgtaagaggcatcagag

SEQ ID NO: 15381 - RNA, 99 nt, synthetic construct
  misc_feature 1..99: note = engineered ribonucleic acid scaffold (ERS) sequence
  source 1..99: mol_type = other RNA
actggcgcttctatctgattactctgggagccatcaccagcgactatgtcgtagtgggtaaagcctcttacggacttcggtccgtaagaggcatcagag

SEQ ID NO: 15382 - RNA, 99 nt, synthetic construct
  misc_feature 1..99: note = engineered ribonucleic acid scaffold (ERS) sequence
  source 1..99: mol_type = other RNA
actggcgcttctatctgattactctgtgagccatcaccagcgactatgtcgtagtgggtaaagcctcttacggacttcggtccgtaagaggcatcagag

SEQ ID NO: 15383 - RNA, 100 nt, synthetic construct
  misc_feature 1..100: note = engineered ribonucleic acid scaffold (ERS) sequence
  source 1..100: mol_type = other RNA
actggcgcttctatctgattactctgaggagccatcaccagcgactatgtcgtagtgggtaaagcctcttacggacttcggtccgtaagaggcatcagag

SEQ ID NO: 15384 - RNA, 99 nt, synthetic construct
  misc_feature 1..99: note = engineered ribonucleic acid scaffold (ERS) sequence
  source 1..99: mol_type = other RNA
actggcgcttctatctgattactctgatagccatcaccagcgactatgtcgtagtgggtaaagcctcttacggacttcggtccgtaagaggcatcagag

SEQ ID NO: 15385 - RNA, 100 nt, synthetic construct
  misc_feature 1..100: note = engineered ribonucleic acid scaffold (ERS) sequence
  source 1..100: mol_type = other RNA
actggcgcttctatctgattactctgagctgccatcaccagcgactatgtcgtagtgggtaaagcctcttacggacttcggtccgtaagaggcatcagag

SEQ ID NO: 15386 - RNA, 100 nt, synthetic construct
  misc_feature 1..100: note = engineered ribonucleic acid scaffold (ERS) sequence
  source 1..100: mol_type = other RNA
actggcacttctatctgattactctgagtagccatcaccagcgactatgtcgtagtgggtaaagcctcttacggacttcggtccgtaagaggcatcagag

SEQ ID NO: 15387 - RNA, 100 nt, synthetic construct
  misc_feature 1..100: note = engineered ribonucleic acid scaffold (ERS) sequence
  source 1..100: mol_type = other RNA
actggcgcttctatctgattactctgagtagccatcaccagcgactatgtcgtagtgggtaaagcctcttacggacttcggtccgtaagaggcatcagag

SEQ ID NO: 15388 - RNA, 99 nt, synthetic construct
  misc_feature 1..99: note = engineered ribonucleic acid scaffold (ERS) sequence
  source 1..99: mol_type = other RNA
actggcgcttctatctgattactctgagcaccatcaccagcgactatgtcgtagtgggtaaagcctcttacggacttcggtccgtaagaggcatcagag

SEQ ID NO: 15389 - RNA, 99 nt, synthetic construct
  misc_feature 1..99: note = engineered ribonucleic acid scaffold (ERS) sequence
  source 1..99: mol_type = other RNA
actggcacttctatctgattactctgagcgccatcaccagcgactatgtcgtagtgggtaaagcctcttacggacttcggtccgtaagaggcatcagag

SEQ ID NO: 15390 - RNA, 99 nt, synthetic construct
  misc_feature 1..99: note = engineered ribonucleic acid scaffold (ERS) sequence
  source 1..99: mol_type = other RNA
actggcgcttctatctgattactctgagggccatcaccagcgactatgtcgtagtgggtaaagcctcttacggacttcggtccgtaagaggcatcagag

SEQ ID NO: 15391 - RNA, 99 nt, synthetic construct
  misc_feature 1..99: note = engineered ribonucleic acid scaffold (ERS) sequence
  source 1..99: mol_type = other RNA
actggcgcttctatctgattactctgagtgccgtcaccagcgactatgtcgtagtgggtaaagcctcttacggacttcggtccgtaagaggcatcagag

SEQ ID NO: 15392 - RNA, 99 nt, synthetic construct
  misc_feature 1..99: note = engineered ribonucleic acid scaffold (ERS) sequence
  source 1..99: mol_type = other RNA
actggcacttctatctgattactctgagtgccatcaccagcgactatgtcgtagtgggtaaagcctcttacggacttcggtccgtaagaggcatcagag

SEQ ID NO: 15393 - RNA, 99 nt, synthetic construct
  misc_feature 1..99: note = engineered ribonucleic acid scaffold (ERS) sequence
  source 1..99: mol_type = other RNA
actggcgcttctatctgattactctgagaaccatcaccagcgactatgtcgtagtgggtaaagcctcttacggacttcggtccgtaagaggcatcagag

SEQ ID NO: 15394 - RNA, 99 nt, synthetic construct
  misc_feature 1..99: note = engineered ribonucleic acid scaffold (ERS) sequence
  source 1..99: mol_type = other RNA
actggcgcttctatctgattactctgagagccgtcaccagcgactatgtcgtagtgggtaaagcctcttacggacttcggtccgtaagaggcatcagag

SEQ ID NO: 15395 - RNA, 99 nt, synthetic construct
  misc_feature 1..99: note = engineered ribonucleic acid scaffold (ERS) sequence
  source 1..99: mol_type = other RNA
actggcgcttctatctgattactctgagagccttcaccagcgactatgtcgtagtgggtaaagcctcttacggacttcggtccgtaagaggcatcagag

SEQ ID NO: 15396 - RNA, 99 nt, synthetic construct
  misc_feature 1..99: note = engineered ribonucleic acid scaffold (ERS) sequence
  source 1..99: mol_type = other RNA
actggggcttctatctgattactctgagacccatcaccagcgactatgtcgtagtgggtaaagcctcttacggacttcggtccgtaagaggcatcagag

SEQ ID NO: 15397 - RNA, 99 nt, synthetic construct
  misc_feature 1..99: note = engineered ribonucleic acid scaffold (ERS) sequence
  source 1..99: mol_type = other RNA
actggtgcttctatctgattactctgagagccatcaccagcgactatgtcgtagtgggtaaagcctcttacggacttcggtccgtaagaggcatcagag

SEQ ID NO: 15398 - RNA, 99 nt, synthetic construct
  misc_feature 1..99: note = engineered ribonucleic acid scaffold (ERS) sequence
  source 1..99: mol_type = other RNA
actgggccttctatctgattactctgaggcccatcaccagcgactatgtcgtagtgggtaaagcctcttacggacttcggtccgtaagaggcatcagag

SEQ ID NO: 15399 - RNA, 100 nt, synthetic construct
  misc_feature 1..100: note = engineered ribonucleic acid scaffold (ERS) sequence
  source 1..100: mol_type = other RNA
actggcccttctatctgattactctgaggagccatcaccagcgactatgtcgtagtgggtaaagcctcttacggacttcggtccgtaagaggcatcagag

SEQ ID NO: 15400 - RNA, 99 nt, synthetic construct
  misc_feature 1..99: note = engineered ribonucleic acid scaffold (ERS) sequence
  source 1..99: mol_type = other RNA
actggcccttctatctgattactctgagggccatcaccagcgactatgtcgtagtgggtaaagcctcttacggacttcggtccgtaagaggcatcagag

SEQ ID NO: 15401 - RNA, 99 nt, synthetic construct
  misc_feature 1..99: note = engineered ribonucleic acid scaffold (ERS) sequence
  source 1..99: mol_type = other RNA
actggcccttctatctgattactctgagtgccatcaccagcgactatgtcgtagtgggtaaagcctcttacggacttcggtccgtaagaggcatcagag

SEQ ID NO: 15402 - RNA, 99 nt, synthetic construct
  misc_feature 1..99: note = engineered ribonucleic acid scaffold (ERS) sequence
  source 1..99: mol_type = other RNA
actggcccttctatctgattactctgagagccatcaccagcgactatgtcgtagtgggtaaagcctcttacggacttcggtccgtaagaggcatcagag

SEQ ID NO: 15403 - RNA, 100 nt, synthetic construct
  misc_feature 1..100: note = engineered ribonucleic acid scaffold (ERS) sequence
  source 1..100: mol_type = other RNA
actggcgcttctatctgattactctgagcagccatcaccagcgactatgtcgtagtgggtaaagcctcttacggacttcggtccgtaagaggcatcagag

SEQ ID NO: 15404 - RNA, 99 nt, synthetic construct; identical to SEQ ID NO: 904
  misc_feature 1..99: note = engineered ribonucleic acid scaffold (ERS) sequence
  source 1..99: mol_type = other RNA

SEQ ID NO: 15405 - RNA, 99 nt, synthetic construct
  misc_feature 1..99: note = engineered ribonucleic acid scaffold (ERS) sequence
  source 1..99: mol_type = other RNA
actggcgcttctatctgattactctgagtgccatcaccagcgactatgtcgtagtgggtaaagcctcttacggacttcggtccgtaagaggcatcagag

SEQ ID NO: 15406 - RNA, 99 nt, synthetic construct
  misc_feature 1..99: note = engineered ribonucleic acid scaffold (ERS) sequence
  source 1..99: mol_type = other RNA
actggcgcttctatctgattactctgagagccatcaccagcgactatgtcgtagtgggtaaagcctcttacggacttcggtccgtaagaggcatcagag

SEQ ID NO: 15407 - RNA, 99 nt, synthetic construct
  misc_feature 1..99: note = engineered ribonucleic acid scaffold (ERS) sequence
  source 1..99: mol_type = other RNA
actggctcttctatctgattactctgagcgccatcaccagcgactatgtcgtagtgggtaaagcctcttacggacttcggtccgtaagaggcatcagag

SEQ ID NO: 15408 - RNA, 99 nt, synthetic construct
  misc_feature 1..99: note = engineered ribonucleic acid scaffold (ERS) sequence
  source 1..99: mol_type = other RNA
actggctcttctatctgattactctgagggccatcaccagcgactatgtcgtagtgggtaaagcctcttacggacttcggtccgtaagaggcatcagag

SEQ ID NO: 15409 - RNA, 99 nt, synthetic construct
  misc_feature 1..99: note = engineered ribonucleic acid scaffold (ERS) sequence
  source 1..99: mol_type = other RNA
actggctcttctatctgattactctgagtgccatcaccagcgactatgtcgtagtgggtaaagcctcttacggacttcggtccgtaagaggcatcagag

SEQ ID NO: 15410 - RNA, 99 nt, synthetic construct
  misc_feature 1..99: note = engineered ribonucleic acid scaffold (ERS) sequence
  source 1..99: mol_type = other RNA
actggctcttctatctgattactctgagagccatcaccagcgactatgtcgtagtgggtaaagcctcttacggacttcggtccgtaagaggcatcagag

SEQ ID NO: 15411 - RNA, 99 nt, synthetic construct
  misc_feature 1..99: note = engineered ribonucleic acid scaffold (ERS) sequence
  source 1..99: mol_type = other RNA
actggcggttctatctgattactctgagcgccatcaccagcgactatgtcgtagtgggtaaagcctcttacggacttcggtccgtaagaggcatcagag

SEQ ID NO: 15412 - RNA, 99 nt, synthetic construct
  misc_feature 1..99: note = engineered ribonucleic acid scaffold (ERS) sequence
  source 1..99: mol_type = other RNA
actggcggttctatctgattactctgagagccatcaccagcgactatgtcgtagtgggtaaagcctcttacggacttcggtccgtaagaggcatcagag

SEQ ID NO: 15413 - RNA, 98 nt, synthetic construct
  misc_feature 1..98: note = engineered ribonucleic acid scaffold (ERS) sequence
  source 1..98: mol_type = other RNA
acacacggttctatctgattactctgccgtgttcaccagcgactatgtcgtagtgggtaaagccgcttagggacttcggtccctaagaggcatcagag

SEQ ID NO: 15414 - RNA, 98 nt, synthetic construct
  misc_feature 1..98: note = engineered ribonucleic acid scaffold (ERS) sequence
  source 1..98: mol_type = other RNA
acactggtttctatctgattactctgaccagttcaccagcgactatgtcgtagtgggtaaagccgcttagggacttcggtccctaagaggcatcagag

SEQ ID NO: 15415 - RNA, 98 nt, synthetic construct
  misc_feature 1..98: note = engineered ribonucleic acid scaffold (ERS) sequence
  source 1..98: mol_type = other RNA
acaggccgttctatctgattactctgcggccttcaccagcgactatgtcgtagtgggtaaagccgcttagggacttcggtccctaagaggcatcagag

SEQ ID NO: 15416 - RNA, 98 nt, synthetic construct
  misc_feature 1..98: note = engineered ribonucleic acid scaffold (ERS) sequence
  source 1..98: mol_type = other RNA
acaggtccttctatctgattactctgggaccttcaccagcgactatgtcgtagtgggtaaagccgcttagggacttcggtccctaagaggcatcagag

SEQ ID NO: 15417 - RNA, 98 nt, synthetic construct
  misc_feature 1..98: note = engineered ribonucleic acid scaffold (ERS) sequence
  source 1..98: mol_type = other RNA
accagcaattctatctgattactctgttgctgtcaccagcgactatgtcgtagtgggtaaagccgcttagggacttcggtccctaagaggcatcagag

SEQ ID NO: 15418 - RNA, 98 nt, synthetic construct
  misc_feature 1..98: note = engineered ribonucleic acid scaffold (ERS) sequence
  source 1..98: mol_type = other RNA
accgagacttctatctgattactctgggctcgtcaccagcgactatgtcgtagtgggtaaagccgcttagggacttcggtccctaagaggcatcagag

SEQ ID NO: 15419 - RNA, 98 nt, synthetic construct
  misc_feature 1..98: note = engineered ribonucleic acid scaffold (ERS) sequence
  source 1..98: mol_type = other RNA
acctgtagttctatctgattactctgctacagtcaccagcgactatgtcgtagtgggtaaagccgcttagggacttcggtccctaagaggcatcagag

SEQ ID NO: 15420 - RNA, 98 nt, synthetic construct
  misc_feature 1..98: note = engineered ribonucleic acid scaffold (ERS) sequence
  source 1..98: mol_type = other RNA
acgagcacttctatctgattactctggggctctcaccagcgactatgtcgtagtgggtaaagccgcttagggacttcggtccctaagaggcatcagag

SEQ ID NO: 15421 - RNA, 98 nt, synthetic construct
  misc_feature 1..98: note = engineered ribonucleic acid scaffold (ERS) sequence
  source 1..98: mol_type = other RNA
acgaggtgttctatctgattactctgcacctctcaccagcgactatgtcgtagtgggtaaagccgcttagggacttcggtccctaagaggcatcagag

SEQ ID NO: 15422 - RNA, 98 nt, synthetic construct
  misc_feature 1..98: note = engineered ribonucleic acid scaffold (ERS) sequence
  source 1..98: mol_type = other RNA
acgggactttctatctgattactctgagtccctcaccagcgactatgtcgtagtgggtaaagccgcttagggacttcggtccctaagaggcatcagag

SEQ ID NO: 15423 - RNA, 98 nt, synthetic construct
  misc_feature 1..98: note = engineered ribonucleic acid scaffold (ERS) sequence
  source 1..98: mol_type = other RNA
acgggcaattctatctgattactctgttgccctcaccagcgactatgtcgtagtgggtaaagccgcttagggacttcggtccctaagaggcatcagag

SEQ ID NO: 15424 - RNA, 98 nt, synthetic construct
  misc_feature 1..98: note = engineered ribonucleic acid scaffold (ERS) sequence
  source 1..98: mol_type = other RNA
actgtgcgttctatctgattactctgcgcacatcaccagcgactatgtcgtagtgggtaaagccgcttagggacttcggtccctaagaggcatcagag

SEQ ID NO: 15425 - RNA, 99 nt, synthetic construct
  misc_feature 1..99: note = engineered ribonucleic acid scaffold (ERS) sequence
  source 1..99: mol_type = other RNA
actggcgcttctatctgattactctgggcgccatcaccagcgactatgtcgtagtgggtaaagccgcttagggacttcggtccctaagaggcatcagag

SEQ ID NO: 15426 - RNA, 99 nt, synthetic construct
  misc_feature 1..99: note = engineered ribonucleic acid scaffold (ERS) sequence
  source 1..99: mol_type = other RNA
actggcgcttctatctgattactctgggagccatcaccagcgactatgtcgtagtgggtaaagccgcttagggacttcggtccctaagaggcatcagag

SEQ ID NO: 15427 - RNA, 99 nt, synthetic construct
  misc_feature 1..99: note = engineered ribonucleic acid scaffold (ERS) sequence
  source 1..99: mol_type = other RNA
actggcgcttctatctgattactctgtgagccatcaccagcgactatgtcgtagtgggtaaagccgcttagggacttcggtccctaagaggcatcagag

SEQ ID NO: 15428 - RNA, 100 nt, synthetic construct
  misc_feature 1..100: note = engineered ribonucleic acid scaffold (ERS) sequence
  source 1..100: mol_type = other RNA
actggcgcttctatctgattactctgaggagccatcaccagcgactatgtcgtagtgggtaaagccgcttagggacttcggtccctaagaggcatcagag

SEQ ID NO: 15429 - RNA, 99 nt, synthetic construct
  misc_feature 1..99: note = engineered ribonucleic acid scaffold (ERS) sequence
  source 1..99: mol_type = other RNA
actggcgcttctatctgattactctgatagccatcaccagcgactatgtcgtagtgggtaaagccgcttagggacttcggtccctaagaggcatcagag

SEQ ID NO: 15430 - RNA, 100 nt, synthetic construct
  misc_feature 1..100: note = engineered ribonucleic acid scaffold (ERS) sequence
  source 1..100: mol_type = other RNA
actggcgcttctatctgattactctgagctgccatcaccagcgactatgtcgtagtgggtaaagccgcttagggacttcggtccctaagaggcatcagag

SEQ ID NO: 15431 - RNA, 100 nt, synthetic construct
  misc_feature 1..100: note = engineered ribonucleic acid scaffold (ERS) sequence
  source 1..100: mol_type = other RNA
actggcacttctatctgattactctgagtagccatcaccagcgactatgtcgtagtgggtaaagccgcttagggacttcggtccctaagaggcatcagag

SEQ ID NO: 15432 - RNA, 100 nt, synthetic construct
  misc_feature 1..100: note = engineered ribonucleic acid scaffold (ERS) sequence
  source 1..100: mol_type = other RNA
actggcgcttctatctgattactctgagtagccatcaccagcgactatgtcgtagtgggtaaagccgcttagggacttcggtccctaagaggcatcagag

SEQ ID NO: 15433 - RNA, 99 nt, synthetic construct
  misc_feature 1..99: note = engineered ribonucleic acid scaffold (ERS) sequence
  source 1..99: mol_type = other RNA
actggcgcttctatctgattactctgagcaccatcaccagcgactatgtcgtagtgggtaaagccgcttagggacttcggtccctaagaggcatcagag

SEQ ID NO: 15434 - RNA, 99 nt, synthetic construct
  misc_feature 1..99: note = engineered ribonucleic acid scaffold (ERS) sequence
  source 1..99: mol_type = other RNA
actggcacttctatctgattactctgagcgccatcaccagcgactatgtcgtagtgggtaaagccgcttagggacttcggtccctaagaggcatcagag

SEQ ID NO: 15435 - RNA, 99 nt, synthetic construct
  misc_feature 1..99: note = engineered ribonucleic acid scaffold (ERS) sequence
  source 1..99: mol_type = other RNA
actggcgcttctatctgattactctgagggccatcaccagcgactatgtcgtagtgggtaaagccgcttagggacttcggtccctaagaggcatcagag

SEQ ID NO: 15436 - RNA, 99 nt, synthetic construct
  misc_feature 1..99: note = engineered ribonucleic acid scaffold (ERS) sequence
  source 1..99: mol_type = other RNA
actggcgcttctatctgattactctgagtgccgtcaccagcgactatgtcgtagtgggtaaagccgcttagggacttcggtccctaagaggcatcagag

SEQ ID NO: 15437 - RNA, 99 nt, synthetic construct
  misc_feature 1..99: note = engineered ribonucleic acid scaffold (ERS) sequence
  source 1..99: mol_type = other RNA
actggcacttctatctgattactctgagtgccatcaccagcgactatgtcgtagtgggtaaagccgcttagggacttcggtccctaagaggcatcagag

SEQ ID NO: 15438 - RNA, 99 nt, synthetic construct
  misc_feature 1..99: note = engineered ribonucleic acid scaffold (ERS) sequence
  source 1..99: mol_type = other RNA
actggcgcttctatctgattactctgagaaccatcaccagcgactatgtcgtagtgggtaaagccgcttagggacttcggtccctaagaggcatcagag

SEQ ID NO: 15439 - RNA, 99 nt, synthetic construct
  misc_feature 1..99: note = engineered ribonucleic acid scaffold (ERS) sequence
  source 1..99: mol_type = other RNA
actggcgcttctatctgattactctgagagccgtcaccagcgactatgtcgtagtgggtaaagccgcttagggacttcggtccctaagaggcatcagag

SEQ ID NO: 15440 - RNA, 99 nt, synthetic construct
  misc_feature 1..99: note = engineered ribonucleic acid scaffold (ERS) sequence
  source 1..99: mol_type = other RNA
actggcgcttctatctgattactctgagagccttcaccagcgactatgtcgtagtgggtaaagccgcttagggacttcggtccctaagaggcatcagag

SEQ ID NO: 15441 - RNA, 99 nt, synthetic construct
  misc_feature 1..99: note = engineered ribonucleic acid scaffold (ERS) sequence
  source 1..99: mol_type = other RNA
actggggcttctatctgattactctgagacccatcaccagcgactatgtcgtagtgggtaaagccgcttagggacttcggtccctaagaggcatcagag

SEQ ID NO: 15442 - RNA, 99 nt, synthetic construct
  misc_feature 1..99: note = engineered ribonucleic acid scaffold (ERS) sequence
  source 1..99: mol_type = other RNA
actggtgcttctatctgattactctgagagccatcaccagcgactatgtcgtagtgggtaaagccgcttagggacttcggtccctaagaggcatcagag

SEQ ID NO: 15443 - RNA, 99 nt, synthetic construct; identical to SEQ ID NO: 160
  misc_feature 1..99: note = engineered ribonucleic acid scaffold (ERS) sequence
  source 1..99: mol_type = other RNA

SEQ ID NO: 15444 - RNA, 100 nt, synthetic construct
  misc_feature 1..100: note = engineered ribonucleic acid scaffold (ERS) sequence
  source 1..100: mol_type = other RNA
actggcccttctatctgattactctgaggagccatcaccagcgactatgtcgtagtgggtaaagccgcttagggacttcggtccctaagaggcatcagag

SEQ ID NO: 15445 - RNA, 99 nt, synthetic construct
  misc_feature 1..99: note = engineered ribonucleic acid scaffold (ERS) sequence
  source 1..99: mol_type = other RNA
actggcccttctatctgattactctgagggccatcaccagcgactatgtcgtagtgggtaaagccgcttagggacttcggtccctaagaggcatcagag

SEQ ID NO: 15446 - RNA, 99 nt, synthetic construct
  misc_feature 1..99: note = engineered ribonucleic acid scaffold (ERS) sequence
  source 1..99: mol_type = other RNA
actggcccttctatctgattactctgagtgccatcaccagcgactatgtcgtagtgggtaaagccgcttagggacttcggtccctaagaggcatcagag

SEQ ID NO: 15447 - RNA, 99 nt, synthetic construct
  misc_feature 1..99: note = engineered ribonucleic acid scaffold (ERS) sequence
  source 1..99: mol_type = other RNA
actggcccttctatctgattactctgagagccatcaccagcgactatgtcgtagtgggtaaagccgcttagggacttcggtccctaagaggcatcagag

SEQ ID NO: 15448 - RNA, 100 nt, synthetic construct
  misc_feature 1..100: note = engineered ribonucleic acid scaffold (ERS) sequence
  source 1..100: mol_type = other RNA
actggcgcttctatctgattactctgagcagccatcaccagcgactatgtcgtagtgggtaaagccgcttagggacttcggtccctaagaggcatcagag

SEQ ID NO: 15449 - RNA, 99 nt, synthetic construct; identical to SEQ ID NO: 905
  misc_feature 1..99: note = engineered ribonucleic acid scaffold (ERS) sequence
  source 1..99: mol_type = other RNA

SEQ ID NO: 15450 - RNA, 99 nt, synthetic construct
  misc_feature 1..99: note = engineered ribonucleic acid scaffold (ERS) sequence
  source 1..99: mol_type = other RNA
actggcgcttctatctgattactctgagtgccatcaccagcgactatgtcgtagtgggtaaagccgcttagggacttcggtccctaagaggcatcagag

SEQ ID NO: 15451 - RNA, 99 nt, synthetic construct
  misc_feature 1..99: note = engineered ribonucleic acid scaffold (ERS) sequence
  source 1..99: mol_type = other RNA
actggcgcttctatctgattactctgagagccatcaccagcgactatgtcgtagtgggtaaagccgcttagggacttcggtccctaagaggcatcagag

SEQ ID NO: 15452 - RNA, 99 nt, synthetic construct
  misc_feature 1..99: note = engineered ribonucleic acid scaffold (ERS) sequence
  source 1..99: mol_type = other RNA
actggctcttctatctgattactctgagcgccatcaccagcgactatgtcgtagtgggtaaagccgcttagggacttcggtccctaagaggcatcagag

SEQ ID NO: 15453 - RNA, 99 nt, synthetic construct
  misc_feature 1..99: note = engineered ribonucleic acid scaffold (ERS) sequence
  source 1..99: mol_type = other RNA
actggctcttctatctgattactctgagggccatcaccagcgactatgtcgtagtgggtaaagccgcttagggacttcggtccctaagaggcatcagag

SEQ ID NO: 15454 - RNA, 99 nt, synthetic construct
  misc_feature 1..99: note = engineered ribonucleic acid scaffold (ERS) sequence
  source 1..99: mol_type = other RNA
actggctcttctatctgattactctgagtgccatcaccagcgactatgtcgtagtgggtaaagccgcttagggacttcggtccctaagaggcatcagag

SEQ ID NO: 15455 - RNA, 99 nt, synthetic construct
  misc_feature 1..99: note = engineered ribonucleic acid scaffold (ERS) sequence
  source 1..99: mol_type = other RNA
actggctcttctatctgattactctgagagccatcaccagcgactatgtcgtagtgggtaaagccgcttagggacttcggtccctaagaggcatcagag

SEQ ID NO: 15456 - RNA, 99 nt, synthetic construct
  misc_feature 1..99: note = engineered ribonucleic acid scaffold (ERS) sequence
  source 1..99: mol_type = other RNA
actggcggttctatctgattactctgagcgccatcaccagcgactatgtcgtagtgggtaaagccgcttagggacttcggtccctaagaggcatcagag

SEQ ID NO: 15457 - RNA, 99 nt, synthetic construct
  misc_feature 1..99: note = engineered ribonucleic acid scaffold (ERS) sequence
  source 1..99: mol_type = other RNA
actggcggttctatctgattactctgagagccatcaccagcgactatgtcgtagtgggtaaagccgcttagggacttcggtccctaagaggcatcagag

SEQ ID NO: 15458 - RNA, 86 nt, synthetic construct
  misc_feature 1..86: note = engineered ribonucleic acid scaffold (ERS) sequence
  source 1..86: mol_type = other RNA
actggcgcttctatctgattactctgagcgccaacaccagcgactatgtcgtatgggtaaactccctcttcggagggagatcagag

SEQ ID NO: 15459 - RNA, 86 nt, synthetic construct
  misc_feature 1..86: note = engineered ribonucleic acid scaffold (ERS) sequence
  source 1..86: mol_type = other RNA
actggcgcttctatctgattactctgagcgccagcaccagcgactatgtcgtatgggtaaactccctcttcggagggagatcagag

SEQ ID NO: 15460 - RNA, 86 nt, synthetic construct
  misc_feature 1..86: note = engineered ribonucleic acid scaffold (ERS) sequence
  source 1..86: mol_type = other RNA
actggcgcttctatctgattactctgagcgccatgaccagcgactatgtcgtatggctaaactccctcttcggagggagatcagag

SEQ ID NO: 15461 - RNA, 87 nt, synthetic construct
  misc_feature 1..87: note = engineered ribonucleic acid scaffold (ERS) sequence
  source 1..87: mol_type = other RNA
actggcgcttctatctgattactctgagcgccatgaccagcgactatgtcgtatgggctaaactccctcttcggagggagatcagag

SEQ ID NO: 15462 - RNA, 86 nt, synthetic construct
  misc_feature 1..86: note = engineered ribonucleic acid scaffold (ERS) sequence
  source 1..86: mol_type = other RNA
actggcgcttctatctgattactctgagcgccatgaccagcgactatgtcgtatgggtaaactccctcttcggagggagatcagag

SEQ ID NO: 15463 - RNA, 86 nt, synthetic construct
  misc_feature 1..86: note = engineered ribonucleic acid scaffold (ERS) sequence
  source 1..86: mol_type = other RNA
actggcgcttctatctgattactctgagcgccatccccagcgactatgtcgtatgggtaaactccctcttcggagggagatcagag

SEQ ID NO: 15464 - RNA, 87 nt, synthetic construct
  misc_feature 1..87: note = engineered ribonucleic acid scaffold (ERS) sequence
  source 1..87: mol_type = other RNA
actggcgcttctatctgattactctgagcgccatcgccagcgactatgtcgtatggcgtaaactccctcttcggagggagatcagag

SEQ ID NO: 15465 - RNA, 86 nt, synthetic construct
  misc_feature 1..86: note = engineered ribonucleic acid scaffold (ERS) sequence
  source 1..86: mol_type = other RNA
actggcgcttctatctgattactctgagcgccatcgccagcgactatgtcgtatgggtaaactccctcttcggagggagatcagag

SEQ ID NO: 15466 - RNA, 86 nt, synthetic construct
  misc_feature 1..86: note = engineered ribonucleic acid scaffold (ERS) sequence
  source 1..86: mol_type = other RNA
actggcgcttctatctgattactctgagcgccatctccagcgactatgtcgtatgggtaaactccctcttcggagggagatcagag

SEQ ID NO: 15467 - RNA, 86 nt, synthetic construct
  misc_feature 1..86: note = engineered ribonucleic acid scaffold (ERS) sequence
  source 1..86: mol_type = other RNA
actggcgcttctatctgattactctgagcgccatcacctgcgactatgtcgtaagggtaaactccctcttcggagggagatcagag

SEQ ID NO: 15468 - RNA, 86 nt, synthetic construct
  misc_feature 1..86: note = engineered ribonucleic acid scaffold (ERS) sequence
  source 1..86: mol_type = other RNA
actggcgcttctatctgattactctgagcgccatcaccagagactatgtcttatgggtaaactccctcttcggagggagatcagag

SEQ ID NO: 15469 - RNA, 86 nt, synthetic construct
  misc_feature 1..86: note = engineered ribonucleic acid scaffold (ERS) sequence
  source 1..86: mol_type = other RNA
actggcgcttctatctgattactctgagcgccatcaccagggactatgtcctatgggtaaactccctcttcggagggagatcagag

SEQ ID NO: 15470 - RNA, 87 nt, synthetic construct
  misc_feature 1..87: note = engineered ribonucleic acid scaffold (ERS) sequence
  source 1..87: mol_type = other RNA
actggcgcttctatctgattactctgagcgccatcaccaggcactatgtgctattgggtaaactccctcttcggagggagatcagag

SEQ ID NO: 15471 - RNA, 86 nt, synthetic construct
  misc_feature 1..86: note = engineered ribonucleic acid scaffold (ERS) sequence
  source 1..86: mol_type = other RNA
actggcgcttctatctgattactctgagcgccatcaccagccactatgtggtatgggtaaactccctcttcggagggagatcagag

SEQ ID NO: 15472 - RNA, 86 nt, synthetic construct
  misc_feature 1..86: note = engineered ribonucleic acid scaffold (ERS) sequence
  source 1..86: mol_type = other RNA
actggcgcttctatctgattactctgagcgccatcaccagctactatgtagtatgggtaaactccctcttcggagggagatcagag

SEQ ID NO: 15473 - RNA, 86 nt, synthetic construct
  misc_feature 1..86: note = engineered ribonucleic acid scaffold (ERS) sequence
  source 1..86: mol_type = other RNA
actggcgcttctatctgattactctgagcgccatcaccagcgattatgtcgtatgggtaaactccctcttcggagggagatcagag

SEQ ID NO: 15474 - RNA, 86 nt, synthetic construct
  misc_feature 1..86: note = engineered ribonucleic acid scaffold (ERS) sequence
  source 1..86: mol_type = other RNA
actggcgcttctatctgattactctgagcgccatcaccagcgacgatgtcgtatgggtaaactccctcttcggagggagatcagag

SEQ ID NO: 15475 - RNA, 86 nt, synthetic construct
  misc_feature 1..86: note = engineered ribonucleic acid scaffold (ERS) sequence
  source 1..86: mol_type = other RNA
actggcgcttctatctgattactctgagcgccatcaccagcgactctgtcgtatgggtaaactccctcttcggagggagatcagag

SEQ ID NO: 15476 - RNA, 86 nt, synthetic construct
  misc_feature 1..86: note = engineered ribonucleic acid scaffold (ERS) sequence
  source 1..86: mol_type = other RNA
actggcgcttctatctgattactctgagcgccatcaccagcgactatgtcgtgtgggtaaactccctcttcggagggagatcagag

SEQ ID NO: 15477 - RNA, 87 nt, synthetic construct
  misc_feature 1..87: note = engineered ribonucleic acid scaffold (ERS) sequence
  source 1..87: mol_type = other RNA
actggcgcttctatctgattactctgagcgccatcaccagcgactatgtcgtattgggtaaactccctcttcggagggagatcagag

SEQ ID NO: 15478 - RNA, 87 nt, synthetic construct
  misc_feature 1..87: note = engineered ribonucleic acid scaffold (ERS) sequence
  source 1..87: mol_type = other RNA
actggcgcttctatctgattactctgagcgccatcaccagcgactatgtcgtatggagtaaactccctcttcggagggagatcagag

SEQ ID NO: 15479 - RNA, 87 nt, synthetic construct
  misc_feature 1..87: note = engineered ribonucleic acid scaffold (ERS) sequence
  source 1..87: mol_type = other RNA
actggcgcttctatctgattactctgagcgccatcaccagcgactatgtcgtatggcgtaaactccctcttcggagggagatcagag

SEQ ID NO: 15480 - RNA, 87 nt, synthetic construct
  misc_feature 1..87: note = engineered ribonucleic acid scaffold (ERS) sequence
  source 1..87: mol_type = other RNA
actggcgcttctatctgattactctgagcgccatcaccagcgactatgtcgtatggtgtaaactccctcttcggagggagatcagag

SEQ ID NO: 15481 - RNA, 87 nt, synthetic construct
  misc_feature 1..87: note = engineered ribonucleic acid scaffold (ERS) sequence
  source 1..87: mol_type = other RNA
actggcgcttctatctgattactctgagcgccatcaccagcgactatgtcgtatgggctaaactccctcttcggagggagatcagag

SEQ ID NO: 15482 - RNA, 84 nt, synthetic construct
  misc_feature 1..84: note = engineered ribonucleic acid scaffold (ERS) sequence
  source 1..84: mol_type = other RNA
actggcgcttctatctgattactctgagcgccatcaccagcgactatgtcgtatgggtactccctcttcggagggagatcagag

SEQ ID NO: 15483 - RNA, 86 nt, synthetic construct
  misc_feature 1..86: note = engineered ribonucleic acid scaffold (ERS) sequence
  source 1..86: mol_type = other RNA
actggcgcttctatctgattactctgagcgccatcaccagcgactatgtcgtatgggtgaactccctcttcggagggagatcagag

SEQ ID NO: 15484 - RNA, 86 nt, synthetic construct
  misc_feature 1..86: note = engineered ribonucleic acid scaffold (ERS) sequence
  source 1..86: mol_type = other RNA
actggcgcttctatctgattactctgagcgccatcaccagcgactatgtcgtatgggtagactccctcttcggagggagatcagag

SEQ ID NO: 15485 - RNA, 88 nt, synthetic construct
  misc_feature 1..88: note = engineered ribonucleic acid scaffold (ERS) sequence
  source 1..88: mol_type = other RNA
actggcgcttctatctgattactctgagcgccaacaccagcgactatgtcgtatgggtaaagcgccctcttcggagggagcatcagag

SEQ ID NO: 15486 - RNA, 88 nt, synthetic construct
  misc_feature 1..88: note = engineered ribonucleic acid scaffold (ERS) sequence
  source 1..88: mol_type = other RNA
actggcgcttctatctgattactctgagcgccagcaccagcgactatgtcgtatgggtaaagcgccctcttcggagggagcatcagag

SEQ ID NO: 15487 - RNA, 88 nt, synthetic construct
  misc_feature 1..88: note = engineered ribonucleic acid scaffold (ERS) sequence
  source 1..88: mol_type = other RNA
actggcgcttctatctgattactctgagcgccatgaccagcgactatgtcgtatggctaaagcgccctcttcggagggagcatcagag

SEQ ID NO: 15488 - RNA, 89 nt, synthetic construct
  misc_feature 1..89: note = engineered ribonucleic acid scaffold (ERS) sequence
  source 1..89: mol_type = other RNA
actggcgcttctatctgattactctgagcgccatgaccagcgactatgtcgtatgggctaaagcgccctcttcggagggagcatcagag

SEQ ID NO: 15489 - RNA, 88 nt, synthetic construct
  misc_feature 1..88: note = engineered ribonucleic acid scaffold (ERS) sequence
  source 1..88: mol_type = other RNA
actggcgcttctatctgattactctgagcgccatgaccagcgactatgtcgtatgggtaaagcgccctcttcggagggagcatcagag

SEQ ID NO: 15490 - RNA, 88 nt, synthetic construct
  misc_feature 1..88: note = engineered ribonucleic acid scaffold (ERS) sequence
  source 1..88: mol_type = other RNA
actggcgcttctatctgattactctgagcgccatccccagcgactatgtcgtatgggtaaagcgccctcttcggagggagcatcagag

SEQ ID NO: 15491 - RNA, 89 nt, synthetic construct
  misc_feature 1..89: note = engineered ribonucleic acid scaffold (ERS) sequence
  source 1..89: mol_type = other RNA
actggcgcttctatctgattactctgagcgccatcgccagcgactatgtcgtatggcgtaaagcgccctcttcggagggagcatcagag

SEQ ID NO: 15492 - RNA, 88 nt, synthetic construct
  misc_feature 1..88: note = engineered ribonucleic acid scaffold (ERS) sequence
  source 1..88: mol_type = other RNA
actggcgcttctatctgattactctgagcgccatcgccagcgactatgtcgtatgggtaaagcgccctcttcggagggagcatcagag

SEQ ID NO: 15493 - RNA, 88 nt, synthetic construct
  misc_feature 1..88: note = engineered ribonucleic acid scaffold (ERS) sequence
  source 1..88: mol_type = other RNA
actggcgcttctatctgattactctgagcgccatctccagcgactatgtcgtatgggtaaagcgccctcttcggagggagcatcagag

SEQ ID NO: 15494 - RNA, 88 nt, synthetic construct
  misc_feature 1..88: note = engineered ribonucleic acid scaffold (ERS) sequence
  source 1..88: mol_type = other RNA
actggcgcttctatctgattactctgagcgccatcacctgcgactatgtcgtaagggtaaagcgccctcttcggagggagcatcagag

SEQ ID NO: 15495 - RNA, 88 nt, synthetic construct
  misc_feature 1..88: note = engineered ribonucleic acid scaffold (ERS) sequence
  source 1..88: mol_type = other RNA
actggcgcttctatctgattactctgagcgccatcaccagagactatgtcttatgggtaaagcgccctcttcggagggagcatcagag

SEQ ID NO: 15496 - RNA, 88 nt, synthetic construct
  misc_feature 1..88: note = engineered ribonucleic acid scaffold (ERS) sequence
  source 1..88: mol_type = other RNA
actggcgcttctatctgattactctgagcgccatcaccagggactatgtcctatgggtaaagcgccctcttcggagggagcatcagag

SEQ ID NO: 15497 - RNA, 89 nt, synthetic construct
  misc_feature 1..89: note = engineered ribonucleic acid scaffold (ERS) sequence
  source 1..89: mol_type = other RNA
actggcgcttctatctgattactctgagcgccatcaccaggcactatgtgctattgggtaaagcgccctcttcggagggagcatcagag

SEQ ID NO: 15498 - RNA, 88 nt, synthetic construct
  misc_feature 1..88: note = engineered ribonucleic acid scaffold (ERS) sequence
  source 1..88: mol_type = other RNA
actggcgcttctatctgattactctgagcgccatcaccagccactatgtggtatgggtaaagcgccctcttcggagggagcatcagag

SEQ ID NO: 15499 - RNA, 88 nt, synthetic construct
  misc_feature 1..88: note = engineered ribonucleic acid scaffold (ERS) sequence
  source 1..88: mol_type = other RNA
actggcgcttctatctgattactctgagcgccatcaccagctactatgtagtatgggtaaagcgccctcttcggagggagcatcagag

SEQ ID NO: 15500 - RNA, 88 nt, synthetic construct
  misc_feature 1..88: note = engineered ribonucleic acid scaffold (ERS) sequence
  source 1..88: mol_type = other RNA
actggcgcttctatctgattactctgagcgccatcaccagcgattatgtcgtatgggtaaagcgccctcttcggagggagcatcagag

SEQ ID NO: 15501 - RNA, 88 nt, synthetic construct
  misc_feature 1..88: note = engineered ribonucleic acid scaffold (ERS) sequence
  source 1..88: mol_type = other RNA
actggcgcttctatctgattactctgagcgccatcaccagcgacgatgtcgtatgggtaaagcgccctcttcggagggagcatcagag

SEQ ID NO: 15502 - RNA, 88 nt, synthetic construct
  misc_feature 1..88: note = engineered ribonucleic acid scaffold (ERS) sequence
  source 1..88: mol_type = other RNA
actggcgcttctatctgattactctgagcgccatcaccagcgactctgtcgtatgggtaaagcgccctcttcggagggagcatcagag

SEQ ID NO: 15503 - RNA, 88 nt, synthetic construct
  misc_feature 1..88: note = engineered ribonucleic acid scaffold (ERS) sequence
  source 1..88: mol_type = other RNA
actggcgcttctatctgattactctgagcgccatcaccagcgactatgtcgtgtgggtaaagcgccctcttcggagggagcatcagag

SEQ ID NO: 15504 - RNA, 89 nt, synthetic construct
  misc_feature 1..89: note = engineered ribonucleic acid scaffold (ERS) sequence
  source 1..89: mol_type = other RNA
actggcgcttctatctgattactctgagcgccatcaccagcgactatgtcgtattgggtaaagcgccctcttcggagggagcatcagag

SEQ ID NO: 15505 - RNA, 89 nt, synthetic construct
  misc_feature 1..89: note = engineered ribonucleic acid scaffold (ERS) sequence
  source 1..89: mol_type = other RNA
actggcgcttctatctgattactctgagcgccatcaccagcgactatgtcgtatggagtaaagcgccctcttcggagggagcatcagag

SEQ ID NO: 15506 - RNA, 89 nt, synthetic construct
  misc_feature 1..89: note = engineered ribonucleic acid scaffold (ERS) sequence
  source 1..89: mol_type = other RNA
actggcgcttctatctgattactctgagcgccatcaccagcgactatgtcgtatggcgtaaagcgccctcttcggagggagcatcagag

SEQ ID NO: 15507 - RNA, 89 nt, synthetic construct
  misc_feature 1..89: note = engineered ribonucleic acid scaffold (ERS) sequence
  source 1..89: mol_type = other RNA
actggcgcttctatctgattactctgagcgccatcaccagcgactatgtcgtatggtgtaaagcgccctcttcggagggagcatcagag

SEQ ID NO: 15508 - RNA, 89 nt, synthetic construct
  misc_feature 1..89: note = engineered ribonucleic acid scaffold (ERS) sequence
  source 1..89: mol_type = other RNA
actggcgcttctatctgattactctgagcgccatcaccagcgactatgtcgtatgggctaaagcgccctcttcggagggagcatcagag

SEQ ID NO: 15509 - RNA, 86 nt, synthetic construct
  misc_feature 1..86: note = engineered ribonucleic acid scaffold (ERS) sequence
  source 1..86: mol_type = other RNA
actggcgcttctatctgattactctgagcgccatcaccagcgactatgtcgtatgggtagcgccctcttcggagggagcatcagag

SEQ ID NO: 15510 - RNA, 88 nt, synthetic construct
  misc_feature 1..88: note = engineered ribonucleic acid scaffold (ERS) sequence
  source 1..88: mol_type = other RNA
actggcgcttctatctgattactctgagcgccatcaccagcgactatgtcgtatgggtgaagcgccctcttcggagggagcatcagag

SEQ ID NO: 15511 - RNA, 88 nt, synthetic construct
  misc_feature 1..88: note = engineered ribonucleic acid scaffold (ERS) sequence
  source 1..88: mol_type = other RNA
actggcgcttctatctgattactctgagcgccatcaccagcgactatgtcgtatgggtagagcgccctcttcggagggagcatcagag

SEQ ID NO: 15512 - RNA, 98 nt, synthetic construct
  misc_feature 1..98: note = engineered ribonucleic acid scaffold (ERS) sequence
  source 1..98: mol_type = other RNA
actggcgcttctatctgattactctgagcgccaacaccagcgactatgtcgtatgggtaaagcgccttacggacttcggtccgtaaggagcatcagag

SEQ ID NO: 15513 - RNA, 98 nt, synthetic construct
  misc_feature 1..98: note = engineered ribonucleic acid scaffold (ERS) sequence
  source 1..98: mol_type = other RNA
actggcgcttctatctgattactctgagcgccagcaccagcgactatgtcgtatgggtaaagcgccttacggacttcggtccgtaaggagcatcagag

SEQ ID NO: 15514 - RNA, 98 nt, synthetic construct
  misc_feature 1..98: note = engineered ribonucleic acid scaffold (ERS) sequence
  source 1..98: mol_type = other RNA
actggcgcttctatctgattactctgagcgccatgaccagcgactatgtcgtatggctaaagcgccttacggacttcggtccgtaaggagcatcagag

SEQ ID NO: 15515 - RNA, 99 nt, synthetic construct
  misc_feature 1..99: note = engineered ribonucleic acid scaffold (ERS) sequence
  source 1..99: mol_type = other RNA
actggcgcttctatctgattactctgagcgccatgaccagcgactatgtcgtatgggctaaagcgccttacggacttcggtccgtaaggagcatcagag

SEQ ID NO: 15516 - RNA, 98 nt, synthetic construct
  misc_feature 1..98: note = engineered ribonucleic acid scaffold (ERS) sequence
  source 1..98: mol_type = other RNA
actggcgcttctatctgattactctgagcgccatgaccagcgactatgtcgtatgggtaaagcgccttacggacttcggtccgtaaggagcatcagag

SEQ ID NO: 15517 - RNA, 98 nt, synthetic construct
  misc_feature 1..98: note = engineered ribonucleic acid scaffold (ERS) sequence
  source 1..98: mol_type = other RNA
actggcgcttctatctgattactctgagcgccatccccagcgactatgtcgtatgggtaaagcgccttacggacttcggtccgtaaggagcatcagag

SEQ ID NO: 15518 - RNA, 99 nt, synthetic construct
  misc_feature 1..99: note = engineered ribonucleic acid scaffold (ERS) sequence
  source 1..99: mol_type = other RNA
actggcgcttctatctgattactctgagcgccatcgccagcgactatgtcgtatggcgtaaagcgccttacggacttcggtccgtaaggagcatcagag

SEQ ID NO: 15519 - RNA, 98 nt, synthetic construct
  misc_feature 1..98: note = engineered ribonucleic acid scaffold (ERS) sequence
  source 1..98: mol_type = other RNA
actggcgcttctatctgattactctgagcgccatcgccagcgactatgtcgtatgggtaaagcgccttacggacttcggtccgtaaggagcatcagag

SEQ ID NO: 15520 - RNA, 98 nt, synthetic construct
  misc_feature 1..98: note = engineered ribonucleic acid scaffold (ERS) sequence
  source 1..98: mol_type = other RNA
actggcgcttctatctgattactctgagcgccatctccagcgactatgtcgtatgggtaaagcgccttacggacttcggtccgtaaggagcatcagag

SEQ ID NO: 15521 - RNA, 98 nt, synthetic construct
  misc_feature 1..98: note = engineered ribonucleic acid scaffold (ERS) sequence
  source 1..98: mol_type = other RNA
actggcgcttctatctgattactctgagcgccatcacctgcgactatgtcgtaagggtaaagcgccttacggacttcggtccgtaaggagcatcagag

SEQ ID NO: 15522 - RNA, 98 nt, synthetic construct
  misc_feature 1..98: note = engineered ribonucleic acid scaffold (ERS) sequence
  source 1..98: mol_type = other RNA
actggcgcttctatctgattactctgagcgccatcaccagagactatgtcttatgggtaaagcgccttacggacttcggtccgtaaggagcatcagag

SEQ ID NO: 15523 - RNA, 98 nt, synthetic construct
  misc_feature 1..98: note = engineered ribonucleic acid scaffold (ERS) sequence
  source 1..98: mol_type = other RNA
actggcgcttctatctgattactctgagcgccatcaccagggactatgtcctatgggtaaagcgccttacggacttcggtccgtaaggagcatcagag

SEQ ID NO: 15524 - RNA, 99 nt, synthetic construct
  misc_feature 1..99: note = engineered ribonucleic acid scaffold (ERS) sequence
  source 1..99: mol_type = other RNA
actggcgcttctatctgattactctgagcgccatcaccaggcactatgtgctattgggtaaagcgccttacggacttcggtccgtaaggagcatcagag

SEQ ID NO: 15525 - RNA, 98 nt, synthetic construct
  misc_feature 1..98: note = engineered ribonucleic acid scaffold (ERS) sequence
  source 1..98: mol_type = other RNA
actggcgcttctatctgattactctgagcgccatcaccagccactatgtggtatgggtaaagcgccttacggacttcggtccgtaaggagcatcagag

SEQ ID NO: 15526 - RNA, 98 nt, synthetic construct
  misc_feature 1..98: note = engineered ribonucleic acid scaffold (ERS) sequence
  source 1..98: mol_type = other RNA
actggcgcttctatctgattactctgagcgccatcaccagctactatgtagtatgggtaaagcgccttacggacttcggtccgtaaggagcatcagag

SEQ ID NO: 15527 - RNA, 98 nt, synthetic construct
  misc_feature 1..98: note = engineered ribonucleic acid scaffold (ERS) sequence
  source 1..98: mol_type = other RNA
actggcgcttctatctgattactctgagcgccatcaccagcgattatgtcgtatgggtaaagcgccttacggacttcggtccgtaaggagcatcagag

SEQ ID NO: 15528 - RNA, 98 nt, synthetic construct
  misc_feature 1..98: note = engineered ribonucleic acid scaffold (ERS) sequence
  source 1..98: mol_type = other RNA
actggcgcttctatctgattactctgagcgccatcaccagcgacgatgtcgtatgggtaaagcgccttacggacttcggtccgtaaggagcatcagag

SEQ ID NO: 15529 - RNA, 98 nt, synthetic construct
  misc_feature 1..98: note = engineered ribonucleic acid scaffold (ERS) sequence
  source 1..98: mol_type = other RNA
actggcgcttctatctgattactctgagcgccatcaccagcgactctgtcgtatgggtaaagcgccttacggacttcggtccgtaaggagcatcagag

SEQ ID NO: 15530 - RNA, 98 nt, synthetic construct
  misc_feature 1..98: note = engineered ribonucleic acid scaffold (ERS) sequence
  source 1..98: mol_type = other RNA
actggcgcttctatctgattactctgagcgccatcaccagcgactatgtcgtgtgggtaaagcgccttacggacttcggtccgtaaggagcatcagag

SEQ ID NO: 15531 - RNA, 99 nt, synthetic construct
  misc_feature 1..99: note = engineered ribonucleic acid scaffold (ERS) sequence
  source 1..99: mol_type = other RNA
actggcgcttctatctgattactctgagcgccatcaccagcgactatgtcgtattgggtaaagcgccttacggacttcggtccgtaaggagcatcagag

SEQ ID NO: 15532 - RNA, 99 nt, synthetic construct
  misc_feature 1..99: note = engineered ribonucleic acid scaffold (ERS) sequence
  source 1..99: mol_type = other RNA
actggcgcttctatctgattactctgagcgccatcaccagcgactatgtcgtatggagtaaagcgccttacggacttcggtccgtaaggagcatcagag

SEQ ID NO: 15533 - RNA, 99 nt, synthetic construct
  misc_feature 1..99: note = engineered ribonucleic acid scaffold (ERS) sequence
  source 1..99: mol_type = other RNA
actggcgcttctatctgattactctgagcgccatcaccagcgactatgtcgtatggcgtaaagcgccttacggacttcggtccgtaaggagcatcagag

SEQ ID NO: 15534 - RNA, 99 nt, synthetic construct
  misc_feature 1..99: note = engineered ribonucleic acid scaffold (ERS) sequence
  source 1..99: mol_type = other RNA
actggcgcttctatctgattactctgagcgccatcaccagcgactatgtcgtatggtgtaaagcgccttacggacttcggtccgtaaggagcatcagag

SEQ ID NO: 15535 - RNA, 99 nt, synthetic construct
  misc_feature 1..99: note = engineered ribonucleic acid scaffold (ERS) sequence
  source 1..99: mol_type = other RNA
actggcgcttctatctgattactctgagcgccatcaccagcgactatgtcgtatgggctaaagcgccttacggacttcggtccgtaaggagcatcagag

SEQ ID NO: 15536 - RNA, 96 nt, synthetic construct
  misc_feature 1..96: note = engineered ribonucleic acid scaffold (ERS) sequence
  source 1..96: mol_type = other RNA
actggcgcttctatctgattactctgagcgccatcaccagcgactatgtcgtatgggtagcgccttacggacttcggtccgtaaggagcatcagag

SEQ ID NO: 15537 - RNA, 98 nt, synthetic construct
  misc_feature 1..98: note = engineered ribonucleic acid scaffold (ERS) sequence
  source 1..98: mol_type = other RNA
actggcgcttctatctgattactctgagcgccatcaccagcgactatgtcgtatgggtgaagcgccttacggacttcggtccgtaaggagcatcagag

SEQ ID NO: 15538 - RNA, 98 nt, synthetic construct
  misc_feature 1..98: note = engineered ribonucleic acid scaffold (ERS) sequence
  source 1..98: mol_type = other RNA
actggcgcttctatctgattactctgagcgccatcaccagcgactatgtcgtatgggtagagcgccttacggacttcggtccgtaaggagcatcagag

SEQ ID NO: 15539 - RNA, 98 nt, synthetic construct
  misc_feature 1..98: note = engineered ribonucleic acid scaffold (ERS) sequence
  source 1..98: mol_type = other RNA
actggcgcttctatctgattactctgagcgccaacaccagcgactatgtcgtatgggtaaagcgcttacggaattcgtgtccgtaagaagcatcagag

SEQ ID NO: 15540 - RNA, 98 nt, synthetic construct
  misc_feature 1..98: note = engineered ribonucleic acid scaffold (ERS) sequence
  source 1..98: mol_type = other RNA
actggcgcttctatctgattactctgagcgccagcaccagcgactatgtcgtatgggtaaagcgcttacggaattcgtgtccgtaagaagcatcagag

SEQ ID NO: 15541 - RNA, 98 nt, synthetic construct
  misc_feature 1..98: note = engineered ribonucleic acid scaffold (ERS) sequence
  source 1..98: mol_type = other RNA
actggcgcttctatctgattactctgagcgccatgaccagcgactatgtcgtatggctaaagcgcttacggaattcgtgtccgtaagaagcatcagag

SEQ ID NO: 15542 - RNA, 99 nt, synthetic construct
  misc_feature 1..99: note = engineered ribonucleic acid scaffold (ERS) sequence
  source 1..99: mol_type = other RNA
actggcgcttctatctgattactctgagcgccatgaccagcgactatgtcgtatgggctaaagcgcttacggaattcgtgtccgtaagaagcatcagag

SEQ ID NO: 15543 - RNA, 98 nt, synthetic construct
  misc_feature 1..98: note = engineered ribonucleic acid scaffold (ERS) sequence
  source 1..98: mol_type = other RNA
actggcgcttctatctgattactctgagcgccatgaccagcgactatgtcgtatgggtaaagcgcttacggaattcgtgtccgtaagaagcatcagag

SEQ ID NO: 15544 - RNA, 98 nt, synthetic construct
  misc_feature 1..98: note = engineered ribonucleic acid scaffold (ERS) sequence
  source 1..98: mol_type = other RNA
actggcgcttctatctgattactctgagcgccatccccagcgactatgtcgtatgggtaaagcgcttacggaattcgtgtccgtaagaagcatcagag

SEQ ID NO: 15545 - RNA, 99 nt, synthetic construct
  misc_feature 1..99: note = engineered ribonucleic acid scaffold (ERS) sequence
  source 1..99: mol_type = other RNA
actggcgcttctatctgattactctgagcgccatcgccagcgactatgtcgtatggcgtaaagcgcttacggaattcgtgtccgtaagaagcatcagag

SEQ ID NO: 15546 - RNA, 98 nt, synthetic construct
  misc_feature 1..98: note = engineered ribonucleic acid scaffold (ERS) sequence
  source 1..98: mol_type = other RNA
actggcgcttctatctgattactctgagcgccatcgccagcgactatgtcgtatgggtaaagcgcttacggaattcgtgtccgtaagaagcatcagag

SEQ ID NO: 15547 - RNA, 98 nt, synthetic construct
  misc_feature 1..98: note = engineered ribonucleic acid scaffold (ERS) sequence
  source 1..98: mol_type = other RNA
actggcgcttctatctgattactctgagcgccatctccagcgactatgtcgtatgggtaaagcgcttacggaattcgtgtccgtaagaagcatcagag

SEQ ID NO: 15548 - RNA, 98 nt, synthetic construct
  misc_feature 1..98: note = engineered ribonucleic acid scaffold (ERS) sequence
  source 1..98: mol_type = other RNA
actggcgcttctatctgattactctgagcgccatcacctgcgactatgtcgtaagggtaaagcgcttacggaattcgtgtccgtaagaagcatcagag

SEQ ID NO: 15549 - RNA, 98 nt, synthetic construct
  misc_feature 1..98: note = engineered ribonucleic acid scaffold (ERS) sequence
  source 1..98: mol_type = other RNA
actggcgcttctatctgattactctgagcgccatcaccagagactatgtcttatgggtaaagcgcttacggaattcgtgtccgtaagaagcatcagag

SEQ ID NO: 15550 - RNA, 98 nt, synthetic construct
  misc_feature 1..98: note = engineered ribonucleic acid scaffold (ERS) sequence
  source 1..98: mol_type = other RNA
actggcgcttctatctgattactctgagcgccatcaccagggactatgtcctatgggtaaagcgcttacggaattcgtgtccgtaagaagcatcagag

SEQ ID NO: 15551 - RNA, 99 nt, synthetic construct
  misc_feature 1..99: note = engineered ribonucleic acid scaffold (ERS) sequence
  source 1..99: mol_type = other RNA
actggcgcttctatctgattactctgagcgccatcaccaggcactatgtgctattgggtaaagcgcttacggaattcgtgtccgtaagaagcatcagag

SEQ ID NO: 15552 - RNA, 98 nt, synthetic construct
  misc_feature 1..98: note = engineered ribonucleic acid scaffold (ERS) sequence
  source 1..98: mol_type = other RNA
actggcgcttctatctgattactctgagcgccatcaccagccactatgtggtatgggtaaagcgcttacggaattcgtgtccgtaagaagcatcagag

SEQ ID NO: 15553 - RNA, 98 nt, synthetic construct
  misc_feature 1..98: note = engineered ribonucleic acid scaffold (ERS) sequence
  source 1..98: mol_type = other RNA
actggcgcttctatctgattactctgagcgccatcaccagctactatgtagtatgggtaaagcgcttacggaattcgtgtccgtaagaagcatcagag

SEQ ID NO: 15554 - RNA, 98 nt, synthetic construct
  misc_feature 1..98: note = engineered ribonucleic acid scaffold (ERS) sequence
  source 1..98: mol_type = other RNA
actggcgcttctatctgattactctgagcgccatcaccagcgattatgtcgtatgggtaaagcgcttacggaattcgtgtccgtaagaagcatcagag

SEQ ID NO: 15555 - RNA, 98 nt, synthetic construct
  misc_feature 1..98: note = engineered ribonucleic acid scaffold (ERS) sequence
  source 1..98: mol_type = other RNA
actggcgcttctatctgattactctgagcgccatcaccagcgacgatgtcgtatgggtaaagcgcttacggaattcgtgtccgtaagaagcatcagag

SEQ ID NO: 15556 - RNA, 98 nt, synthetic construct
  misc_feature 1..98: note = engineered ribonucleic acid scaffold (ERS) sequence
  source 1..98: mol_type = other RNA
actggcgcttctatctgattactctgagcgccatcaccagcgactctgtcgtatgggtaaagcgcttacggaattcgtgtccgtaagaagcatcagag

SEQ ID NO: 15557 - RNA, 98 nt, synthetic construct
  misc_feature 1..98: note = engineered ribonucleic acid scaffold (ERS) sequence
  source 1..98: mol_type = other RNA
actggcgcttctatctgattactctgagcgccatcaccagcgactatgtcgtgtgggtaaagcgcttacggaattcgtgtccgtaagaagcatcagag

SEQ ID NO: 15558 - RNA, 99 nt, synthetic construct
  misc_feature 1..99: note = engineered ribonucleic acid scaffold (ERS) sequence
  source 1..99: mol_type = other RNA
actggcgcttctatctgattactctgagcgccatcaccagcgactatgtcgtattgggtaaagcgcttacggaattcgtgtccgtaagaagcatcagag

SEQ ID NO: 15559 - RNA, 99 nt, synthetic construct
  misc_feature 1..99: note = engineered ribonucleic acid scaffold (ERS) sequence
  source 1..99: mol_type = other RNA
actggcgcttctatctgattactctgagcgccatcaccagcgactatgtcgtatggagtaaagcgcttacggaattcgtgtccgtaagaagcatcagag

SEQ ID NO: 15560 - RNA, 99 nt, synthetic construct
  misc_feature 1..99: note = engineered ribonucleic acid scaffold (ERS) sequence
  source 1..99: mol_type = other RNA
actggcgcttctatctgattactctgagcgccatcaccagcgactatgtcgtatggcgtaaagcgcttacggaattcgtgtccgtaagaagcatcagag

SEQ ID NO: 15561 - RNA, 99 nt, synthetic construct
  misc_feature 1..99: note = engineered ribonucleic acid scaffold (ERS) sequence
  source 1..99: mol_type = other RNA
actggcgcttctatctgattactctgagcgccatcaccagcgactatgtcgtatggtgtaaagcgcttacggaattcgtgtccgtaagaagcatcagag

SEQ ID NO: 15562 - RNA, 99 nt, synthetic construct
  misc_feature 1..99: note = engineered ribonucleic acid scaffold (ERS) sequence
  source 1..99: mol_type = other RNA
actggcgcttctatctgattactctgagcgccatcaccagcgactatgtcgtatgggctaaagcgcttacggaattcgtgtccgtaagaagcatcagag

SEQ ID NO: 15563 - RNA, 96 nt, synthetic construct
  misc_feature 1..96: note = engineered ribonucleic acid scaffold (ERS) sequence
  source 1..96: mol_type = other RNA
actggcgcttctatctgattactctgagcgccatcaccagcgactatgtcgtatgggtagcgcttacggaattcgtgtccgtaagaagcatcagag

SEQ ID NO: 15564 - RNA, 98 nt, synthetic construct
  misc_feature 1..98: note = engineered ribonucleic acid scaffold (ERS) sequence
  source 1..98: mol_type = other RNA
actggcgcttctatctgattactctgagcgccatcaccagcgactatgtcgtatgggtgaagcgcttacggaattcgtgtccgtaagaagcatcagag

SEQ ID NO: 15565 - RNA, 98 nt, synthetic construct
  misc_feature 1..98: note = engineered ribonucleic acid scaffold (ERS) sequence
  source 1..98: mol_type = other RNA
actggcgcttctatctgattactctgagcgccatcaccagcgactatgtcgtatgggtagagcgcttacggaattcgtgtccgtaagaagcatcagag

SEQ ID NO: 15566 - RNA, 99 nt, synthetic construct
  misc_feature 1..99: note = engineered ribonucleic acid scaffold (ERS) sequence
  source 1..99: mol_type = other RNA
actggcgcttctatctgattactctgagcgccaacaccagcgactatgtcgtatgggtaaagcgcttacggacttcgcggtccgtaagaagcatcagag

SEQ ID NO: 15567 - RNA, 99 nt, synthetic construct
  misc_feature 1..99: note = engineered ribonucleic acid scaffold (ERS) sequence
  source 1..99: mol_type = other RNA
actggcgcttctatctgattactctgagcgccagcaccagcgactatgtcgtatgggtaaagcgcttacggacttcgcggtccgtaagaagcatcagag

SEQ ID NO: 15568 - RNA, 99 nt, synthetic construct
  misc_feature 1..99: note = engineered ribonucleic acid scaffold (ERS) sequence
  source 1..99: mol_type = other RNA
actggcgcttctatctgattactctgagcgccatgaccagcgactatgtcgtatggctaaagcgcttacggacttcgcggtccgtaagaagcatcagag

SEQ ID NO: 15569 - RNA, 100 nt, synthetic construct
  misc_feature 1..100: note = engineered ribonucleic acid scaffold (ERS) sequence
  source 1..100: mol_type = other RNA
actggcgcttctatctgattactctgagcgccatgaccagcgactatgtcgtatgggctaaagcgcttacggacttcgcggtccgtaagaagcatcagag

SEQ ID NO: 15570 - RNA, 99 nt, synthetic construct
  misc_feature 1..99: note = engineered ribonucleic acid scaffold (ERS) sequence
  source 1..99: mol_type = other RNA
actggcgcttctatctgattactctgagcgccatgaccagcgactatgtcgtatgggtaaagcgcttacggacttcgcggtccgtaagaagcatcagag

SEQ ID NO: 15571 - RNA, 99 nt, synthetic construct
  misc_feature 1..99: note = engineered ribonucleic acid scaffold (ERS) sequence
  source 1..99: mol_type = other RNA
actggcgcttctatctgattactctgagcgccatccccagcgactatgtcgtatgggtaaagcgcttacggacttcgcggtccgtaagaagcatcagag

SEQ ID NO: 15572 - RNA, 100 nt, synthetic construct
  misc_feature 1..100: note = engineered ribonucleic acid scaffold (ERS) sequence
  source 1..100: mol_type = other RNA
actggcgcttctatctgattactctgagcgccatcgccagcgactatgtcgtatggcgtaaagcgcttacggacttcgcggtccgtaagaagcatcagag

SEQ ID NO: 15573 - RNA, 99 nt, synthetic construct
  misc_feature 1..99: note = engineered ribonucleic acid scaffold (ERS) sequence
  source 1..99: mol_type = other RNA
actggcgcttctatctgattactctgagcgccatcgccagcgactatgtcgtatgggtaaagcgcttacggacttcgcggtccgtaagaagcatcagag

SEQ ID NO: 15574 - RNA, 99 nt, synthetic construct
  misc_feature 1..99: note = engineered ribonucleic acid scaffold (ERS) sequence
  source 1..99: mol_type = other RNA
actggcgcttctatctgattactctgagcgccatctccagcgactatgtcgtatgggtaaagcgcttacggacttcgcggtccgtaagaagcatcagag

SEQ ID NO: 15575 - RNA, 99 nt, synthetic construct
  misc_feature 1..99: note = engineered ribonucleic acid scaffold (ERS) sequence
  source 1..99: mol_type = other RNA
actggcgcttctatctgattactctgagcgccatcacctgcgactatgtcgtaagggtaaagcgcttacggacttcgcggtccgtaagaagcatcagag

SEQ ID NO: 15576 - RNA, 99 nt, synthetic construct
  misc_feature 1..99: note = engineered ribonucleic acid scaffold (ERS) sequence
  source 1..99: mol_type = other RNA
actggcgcttctatctgattactctgagcgccatcaccagagactatgtcttatgggtaaagcgcttacggacttcgcggtccgtaagaagcatcagag

SEQ ID NO: 15577 - RNA, 99 nt, synthetic construct
  misc_feature 1..99: note = engineered ribonucleic acid scaffold (ERS) sequence
  source 1..99: mol_type = other RNA
actggcgcttctatctgattactctgagcgccatcaccagggactatgtcctatgggtaaagcgcttacggacttcgcggtccgtaagaagcatcagag

SEQ ID NO: 15578 - RNA, 100 nt, synthetic construct
  misc_feature 1..100: note = engineered ribonucleic acid scaffold (ERS) sequence
  source 1..100: mol_type = other RNA
actggcgcttctatctgattactctgagcgccatcaccaggcactatgtgctattgggtaaagcgcttacggacttcgcggtccgtaagaagcatcagag

SEQ ID NO: 15579 - RNA, 99 nt, synthetic construct
  misc_feature 1..99: note = engineered ribonucleic acid scaffold (ERS) sequence
  source 1..99: mol_type = other RNA
actggcgcttctatctgattactctgagcgccatcaccagccactatgtggtatgggtaaagcgcttacggacttcgcggtccgtaagaagcatcagag

SEQ ID NO: 15580 - RNA, 99 nt, synthetic construct
  misc_feature 1..99: note = engineered ribonucleic acid scaffold (ERS) sequence
  source 1..99: mol_type = other RNA
actggcgcttctatctgattactctgagcgccatcaccagctactatgtagtatgggtaaagcgcttacggacttcgcggtccgtaagaagcatcagag

SEQ ID NO: 15581 - RNA, 99 nt, synthetic construct
  misc_feature 1..99: note = engineered ribonucleic acid scaffold (ERS) sequence
  source 1..99: mol_type = other RNA
actggcgcttctatctgattactctgagcgccatcaccagcgattatgtcgtatgggtaaagcgcttacggacttcgcggtccgtaagaagcatcagag

SEQ ID NO: 15582 - RNA, 99 nt, synthetic construct
  misc_feature 1..99: note = engineered ribonucleic acid scaffold (ERS) sequence
  source 1..99: mol_type = other RNA
actggcgcttctatctgattactctgagcgccatcaccagcgacgatgtcgtatgggtaaagcgcttacggacttcgcggtccgtaagaagcatcagag

SEQ ID NO: 15583 - RNA, 99 nt, synthetic construct
  misc_feature 1..99: note = engineered ribonucleic acid scaffold (ERS) sequence
  source 1..99: mol_type = other RNA
actggcgcttctatctgattactctgagcgccatcaccagcgactctgtcgtatgggtaaagcgcttacggacttcgcggtccgtaagaagcatcagag

SEQ ID NO: 15584 - RNA, 99 nt, synthetic construct
  misc_feature 1..99: note = engineered ribonucleic acid scaffold (ERS) sequence
  source 1..99: mol_type = other RNA
actggcgcttctatctgattactctgagcgccatcaccagcgactatgtcgtgtgggtaaagcgcttacggacttcgcggtccgtaagaagcatcagag

SEQ ID NO: 15585 - RNA, 100 nt, synthetic construct
  misc_feature 1..100: note = engineered ribonucleic acid scaffold (ERS) sequence
  source 1..100: mol_type = other RNA
actggcgcttctatctgattactctgagcgccatcaccagcgactatgtcgtattgggtaaagcgcttacggacttcgcggtccgtaagaagcatcagag

SEQ ID NO: 15586 - RNA, 100 nt, synthetic construct
  misc_feature 1..100: note = engineered ribonucleic acid scaffold (ERS) sequence
  source 1..100: mol_type = other RNA
actggcgcttctatctgattactctgagcgccatcaccagcgactatgtcgtatggagtaaagcgcttacggacttcgcggtccgtaagaagcatcagag

SEQ ID NO: 15587 - RNA, 100 nt, synthetic construct
  misc_feature 1..100: note = engineered ribonucleic acid scaffold (ERS) sequence
  source 1..100: mol_type = other RNA
actggcgcttctatctgattactctgagcgccatcaccagcgactatgtcgtatggcgtaaagcgcttacggacttcgcggtccgtaagaagcatcagag

SEQ ID NO: 15588 - RNA, 100 nt, synthetic construct
  misc_feature 1..100: note = engineered ribonucleic acid scaffold (ERS) sequence
  source 1..100: mol_type = other RNA
actggcgcttctatctgattactctgagcgccatcaccagcgactatgtcgtatggtgtaaagcgcttacggacttcgcggtccgtaagaagcatcagag

SEQ ID NO: 15589 - RNA, 100 nt, synthetic construct
  misc_feature 1..100: note = engineered ribonucleic acid scaffold (ERS) sequence
  source 1..100: mol_type = other RNA
actggcgcttctatctgattactctgagcgccatcaccagcgactatgtcgtatgggctaaagcgcttacggacttcgcggtccgtaagaagcatcagag

SEQ ID NO: 15590 - RNA, 97 nt, synthetic construct
  misc_feature 1..97: note = engineered ribonucleic acid scaffold (ERS) sequence
  source 1..97: mol_type = other RNA
actggcgcttctatctgattactctgagcgccatcaccagcgactatgtcgtatgggtagcgcttacggacttcgcggtccgtaagaagcatcagag

SEQ ID NO: 15591 - RNA, 99 nt, synthetic construct
  misc_feature 1..99: note = engineered ribonucleic acid scaffold (ERS) sequence
  source 1..99: mol_type = other RNA
actggcgcttctatctgattactctgagcgccatcaccagcgactatgtcgtatgggtgaagcgcttacggacttcgcggtccgtaagaagcatcagag

SEQ ID NO: 15592 - RNA, 99 nt, synthetic construct
  misc_feature 1..99: note = engineered ribonucleic acid scaffold (ERS) sequence
  source 1..99: mol_type = other RNA
actggcgcttctatctgattactctgagcgccatcaccagcgactatgtcgtatgggtagagcgcttacggacttcgcggtccgtaagaagcatcagag

SEQ ID NO: 15593 - RNA, 97 nt, synthetic construct
  misc_feature 1..97: note = engineered ribonucleic acid scaffold (ERS) sequence
  source 1..97: mol_type = other RNA
actggcgcttctatctgattactctgagcgccaacaccagcgactatgtcgtatgggtaaagcgcttacggacttcggtccgtaagaagcatcagag

SEQ ID NO: 15594 - RNA, 97 nt, synthetic construct
  misc_feature 1..97: note = engineered ribonucleic acid scaffold (ERS) sequence
  source 1..97: mol_type = other RNA
actggcgcttctatctgattactctgagcgccagcaccagcgactatgtcgtatgggtaaagcgcttacggacttcggtccgtaagaagcatcagag

SEQ ID NO: 15595 - RNA, 97 nt, synthetic construct
  misc_feature 1..97: note = engineered ribonucleic acid scaffold (ERS) sequence
  source 1..97: mol_type = other RNA
actggcgcttctatctgattactctgagcgccatgaccagcgactatgtcgtatggctaaagcgcttacggacttcggtccgtaagaagcatcagag

SEQ ID NO: 15596 - RNA, 98 nt, synthetic construct
  misc_feature 1..98: note = engineered ribonucleic acid scaffold (ERS) sequence
  source 1..98: mol_type = other RNA
actggcgcttctatctgattactctgagcgccatgaccagcgactatgtcgtatgggctaaagcgcttacggacttcggtccgtaagaagcatcagag

SEQ ID NO: 15597 - RNA, 97 nt, synthetic construct
  misc_feature 1..97: note = engineered ribonucleic acid scaffold (ERS) sequence
  source 1..97: mol_type = other RNA
actggcgcttctatctgattactctgagcgccatgaccagcgactatgtcgtatgggtaaagcgcttacggacttcggtccgtaagaagcatcagag

SEQ ID NO: 15598 - RNA, 97 nt, synthetic construct
  misc_feature 1..97: note = engineered ribonucleic acid scaffold (ERS) sequence
  source 1..97: mol_type = other RNA
actggcgcttctatctgattactctgagcgccatccccagcgactatgtcgtatgggtaaagcgcttacggacttcggtccgtaagaagcatcagag

SEQ ID NO: 15599 - RNA, 98 nt, synthetic construct
  misc_feature 1..98: note = engineered ribonucleic acid scaffold (ERS) sequence
  source 1..98: mol_type = other RNA
actggcgcttctatctgattactctgagcgccatcgccagcgactatgtcgtatggcgtaaagcgcttacggacttcggtccgtaagaagcatcagag

SEQ ID NO: 15600 - RNA, 97 nt, synthetic construct
  misc_feature 1..97: note = engineered ribonucleic acid scaffold (ERS) sequence
  source 1..97: mol_type = other RNA
actggcgcttctatctgattactctgagcgccatcgccagcgactatgtcgtatgggtaaagcgcttacggacttcggtccgtaagaagcatcagag

SEQ ID NO: 15601 - RNA, 97 nt, synthetic construct
  misc_feature 1..97: note = engineered ribonucleic acid scaffold (ERS) sequence
  source 1..97: mol_type = other RNA
actggcgcttctatctgattactctgagcgccatctccagcgactatgtcgtatgggtaaagcgcttacggacttcggtccgtaagaagcatcagag

SEQ ID NO: 15602 - RNA, 97 nt, synthetic construct
  misc_feature 1..97: note = engineered ribonucleic acid scaffold (ERS) sequence
  source 1..97: mol_type = other RNA
actggcgcttctatctgattactctgagcgccatcacctgcgactatgtcgtaagggtaaagcgcttacggacttcggtccgtaagaagcatcagag

SEQ ID NO: 15603 - RNA, 97 nt, synthetic construct
  misc_feature 1..97: note = engineered ribonucleic acid scaffold (ERS) sequence
  source 1..97: mol_type = other RNA
actggcgcttctatctgattactctgagcgccatcaccagagactatgtcttatgggtaaagcgcttacggacttcggtccgtaagaagcatcagag

SEQ ID NO: 15604 - RNA, 97 nt, synthetic construct
  misc_feature 1..97: note = engineered ribonucleic acid scaffold (ERS) sequence
  source 1..97: mol_type = other RNA
actggcgcttctatctgattactctgagcgccatcaccagggactatgtcctatgggtaaagcgcttacggacttcggtccgtaagaagcatcagag

SEQ ID NO: 15605 - RNA, 98 nt, synthetic construct
  misc_feature 1..98: note = engineered ribonucleic acid scaffold (ERS) sequence
  source 1..98: mol_type = other RNA
actggcgcttctatctgattactctgagcgccatcaccaggcactatgtgctattgggtaaagcgcttacggacttcggtccgtaagaagcatcagag

SEQ ID NO: 15606 - RNA, 97 nt, synthetic construct
  misc_feature 1..97: note = engineered ribonucleic acid scaffold (ERS) sequence
  source 1..97: mol_type = other RNA
actggcgcttctatctgattactctgagcgccatcaccagccactatgtggtatgggtaaagcgcttacggacttcggtccgtaagaagcatcagag

SEQ ID NO: 15607 - RNA, 97 nt, synthetic construct
  misc_feature 1..97: note = engineered ribonucleic acid scaffold (ERS) sequence
  source 1..97: mol_type = other RNA
actggcgcttctatctgattactctgagcgccatcaccagctactatgtagtatgggtaaagcgcttacggacttcggtccgtaagaagcatcagag

SEQ ID NO: 15608 - RNA, 97 nt, synthetic construct
  misc_feature 1..97: note = engineered ribonucleic acid scaffold (ERS) sequence
  source 1..97: mol_type = other RNA
actggcgcttctatctgattactctgagcgccatcaccagcgattatgtcgtatgggtaaagcgcttacggacttcggtccgtaagaagcatcagag

SEQ ID NO: 15609 - RNA, 97 nt, synthetic construct
  misc_feature 1..97: note = engineered ribonucleic acid scaffold (ERS) sequence
  source 1..97: mol_type = other RNA
actggcgcttctatctgattactctgagcgccatcaccagcgacgatgtcgtatgggtaaagcgcttacggacttcggtccgtaagaagcatcagag

SEQ ID NO: 15610 - RNA, 97 nt, synthetic construct
  misc_feature 1..97: note = engineered ribonucleic acid scaffold (ERS) sequence
  source 1..97: mol_type = other RNA
actggcgcttctatctgattactctgagcgccatcaccagcgactctgtcgtatgggtaaagcgcttacggacttcggtccgtaagaagcatcagag

SEQ ID NO: 15611 - RNA, 97 nt, synthetic construct
  misc_feature 1..97: note = engineered ribonucleic acid scaffold (ERS) sequence
  source 1..97: mol_type = other RNA
actggcgcttctatctgattactctgagcgccatcaccagcgactatgtcgtgtgggtaaagcgcttacggacttcggtccgtaagaagcatcagag

SEQ ID NO: 15612 - RNA, 98 nt, synthetic construct
  misc_feature 1..98: note = engineered ribonucleic acid scaffold (ERS) sequence
  source 1..98: mol_type = other RNA
actggcgcttctatctgattactctgagcgccatcaccagcgactatgtcgtattgggtaaagcgcttacggacttcggtccgtaagaagcatcagag

SEQ ID NO: 15613 - RNA, 98 nt, synthetic construct
  misc_feature 1..98: note = engineered ribonucleic acid scaffold (ERS) sequence
  source 1..98: mol_type = other RNA
actggcgcttctatctgattactctgagcgccatcaccagcgactatgtcgtatggagtaaagcgcttacggacttcggtccgtaagaagcatcagag

SEQ ID NO: 15614 - RNA, 98 nt, synthetic construct
  misc_feature 1..98: note = engineered ribonucleic acid scaffold (ERS) sequence
  source 1..98: mol_type = other RNA
actggcgcttctatctgattactctgagcgccatcaccagcgactatgtcgtatggcgtaaagcgcttacggacttcggtccgtaagaagcatcagag

SEQ ID NO: 15615 - RNA, 98 nt, synthetic construct
  misc_feature 1..98: note = engineered ribonucleic acid scaffold (ERS) sequence
  source 1..98: mol_type = other RNA
actggcgcttctatctgattactctgagcgccatcaccagcgactatgtcgtatggtgtaaagcgcttacggacttcggtccgtaagaagcatcagag

SEQ ID NO: 15616 - RNA, 98 nt, synthetic construct
  misc_feature 1..98: note = engineered ribonucleic acid scaffold (ERS) sequence
  source 1..98: mol_type = other RNA
actggcgcttctatctgattactctgagcgccatcaccagcgactatgtcgtatgggctaaagcgcttacggacttcggtccgtaagaagcatcagag

SEQ ID NO: 15617 - RNA, 95 nt, synthetic construct
  misc_feature 1..95: note = engineered ribonucleic acid scaffold (ERS) sequence
  source 1..95: mol_type = other RNA
actggcgcttctatctgattactctgagcgccatcaccagcgactatgtcgtatgggtagcgcttacggacttcggtccgtaagaagcatcagag

SEQ ID NO: 15618 - RNA, 97 nt, synthetic construct
  misc_feature 1..97: note = engineered ribonucleic acid scaffold (ERS) sequence
  source 1..97: mol_type = other RNA
actggcgcttctatctgattactctgagcgccatcaccagcgactatgtcgtatgggtgaagcgcttacggacttcggtccgtaagaagcatcagag

SEQ ID NO: 15619 - RNA, 97 nt, synthetic construct
  misc_feature 1..97: note = engineered ribonucleic acid scaffold (ERS) sequence
  source 1..97: mol_type = other RNA
actggcgcttctatctgattactctgagcgccatcaccagcgactatgtcgtatgggtagagcgcttacggacttcggtccgtaagaagcatcagag

SEQ ID NO: 15620 - RNA, 97 nt, synthetic construct
  misc_feature 1..97: note = engineered ribonucleic acid scaffold (ERS) sequence
  source 1..97: mol_type = other RNA
actggcgcttctatctgattactctgagcgccaacaccagcgactatgtcgtatgggtaaagcgcttacggacttcggtccgtaagtcgcatcagag

SEQ ID NO: 15621 - RNA, 97 nt, synthetic construct
  misc_feature 1..97: note = engineered ribonucleic acid scaffold (ERS) sequence
  source 1..97: mol_type = other RNA
actggcgcttctatctgattactctgagcgccagcaccagcgactatgtcgtatgggtaaagcgcttacggacttcggtccgtaagtcgcatcagag

SEQ ID NO: 15622 - RNA, 97 nt, synthetic construct
  misc_feature 1..97: note = engineered ribonucleic acid scaffold (ERS) sequence
  source 1..97: mol_type = other RNA
actggcgcttctatctgattactctgagcgccatgaccagcgactatgtcgtatggctaaagcgcttacggacttcggtccgtaagtcgcatcagag

SEQ ID NO: 15623 - RNA, 98 nt, synthetic construct
  misc_feature 1..98: note = engineered ribonucleic acid scaffold (ERS) sequence
  source 1..98: mol_type = other RNA
actggcgcttctatctgattactctgagcgccatgaccagcgactatgtcgtatgggctaaagcgcttacggacttcggtccgtaagtcgcatcagag

SEQ ID NO: 15624 - RNA, 97 nt, synthetic construct
  misc_feature 1..97: note = engineered ribonucleic acid scaffold (ERS) sequence
  source 1..97: mol_type = other RNA
actggcgcttctatctgattactctgagcgccatgaccagcgactatgtcgtatgggtaaagcgcttacggacttcggtccgtaagtcgcatcagag

SEQ ID NO: 15625 - RNA, 97 nt, synthetic construct
  misc_feature 1..97: note = engineered ribonucleic acid scaffold (ERS) sequence
  source 1..97: mol_type = other RNA
actggcgcttctatctgattactctgagcgccatccccagcgactatgtcgtatgggtaaagcgcttacggacttcggtccgtaagtcgcatcagag

SEQ ID NO: 15626 - RNA, 98 nt, synthetic construct
  misc_feature 1..98: note = engineered ribonucleic acid scaffold (ERS) sequence
  source 1..98: mol_type = other RNA
actggcgcttctatctgattactctgagcgccatcgccagcgactatgtcgtatggcgtaaagcgcttacggacttcggtccgtaagtcgcatcagag

SEQ ID NO: 15627 - RNA, 97 nt, synthetic construct
  misc_feature 1..97: note = engineered ribonucleic acid scaffold (ERS) sequence
  source 1..97: mol_type = other RNA
actggcgcttctatctgattactctgagcgccatcgccagcgactatgtcgtatgggtaaagcgcttacggacttcggtccgtaagtcgcatcagag

SEQ ID NO: 15628 - RNA, 97 nt, synthetic construct
  misc_feature 1..97: note = engineered ribonucleic acid scaffold (ERS) sequence
  source 1..97: mol_type = other RNA
actggcgcttctatctgattactctgagcgccatctccagcgactatgtcgtatgggtaaagcgcttacggacttcggtccgtaagtcgcatcagag

SEQ ID NO: 15629 - RNA, 97 nt, synthetic construct
  misc_feature 1..97: note = engineered ribonucleic acid scaffold (ERS) sequence
  source 1..97: mol_type = other RNA
actggcgcttctatctgattactctgagcgccatcacctgcgactatgtcgtaagggtaaagcgcttacggacttcggtccgtaagtcgcatcagag

SEQ ID NO: 15630 - RNA, 97 nt, synthetic construct
  misc_feature 1..97: note = engineered ribonucleic acid scaffold (ERS) sequence
  source 1..97: mol_type = other RNA
actggcgcttctatctgattactctgagcgccatcaccagagactatgtcttatgggtaaagcgcttacggacttcggtccgtaagtcgcatcagag

SEQ ID NO: 15631 - RNA, 97 nt, synthetic construct
  misc_feature 1..97: note = engineered ribonucleic acid scaffold (ERS) sequence
  source 1..97: mol_type = other RNA
actggcgcttctatctgattactctgagcgccatcaccagggactatgtcctatgggtaaagcgcttacggacttcggtccgtaagtcgcatcagag

SEQ ID NO: 15632 - RNA, 98 nt, synthetic construct
  misc_feature 1..98: note = engineered ribonucleic acid scaffold (ERS) sequence
  source 1..98: mol_type = other RNA
actggcgcttctatctgattactctgagcgccatcaccaggcactatgtgctattgggtaaagcgcttacggacttcggtccgtaagtcgcatcagag

SEQ ID NO: 15633 - RNA, 97 nt, synthetic construct
  misc_feature 1..97: note = engineered ribonucleic acid scaffold (ERS) sequence
  source 1..97: mol_type = other RNA
actggcgcttctatctgattactctgagcgccatcaccagccactatgtggtatgggtaaagcgcttacggacttcggtccgtaagtcgcatcagag

SEQ ID NO: 15634 - RNA, 97 nt, synthetic construct
  misc_feature 1..97: note = engineered ribonucleic acid scaffold (ERS) sequence
  source 1..97: mol_type = other RNA
actggcgcttctatctgattactctgagcgccatcaccagctactatgtagtatgggtaaagcgcttacggacttcggtccgtaagtcgcatcagag

SEQ ID NO: 15635 - RNA, 97 nt, synthetic construct
  misc_feature 1..97: note = engineered ribonucleic acid scaffold (ERS) sequence
  source 1..97: mol_type = other RNA
actggcgcttctatctgattactctgagcgccatcaccagcgattatgtcgtatgggtaaagcgcttacggacttcggtccgtaagtcgcatcagag

SEQ ID NO: 15636 - RNA, 97 nt, synthetic construct
  misc_feature 1..97: note = engineered ribonucleic acid scaffold (ERS) sequence
  source 1..97: mol_type = other RNA
actggcgcttctatctgattactctgagcgccatcaccagcgacgatgtcgtatgggtaaagcgcttacggacttcggtccgtaagtcgcatcagag

SEQ ID NO: 15637 - RNA, 97 nt, synthetic construct
  misc_feature 1..97: note = engineered ribonucleic acid scaffold (ERS) sequence
  source 1..97: mol_type = other RNA
actggcgcttctatctgattactctgagcgccatcaccagcgactctgtcgtatgggtaaagcgcttacggacttcggtccgtaagtcgcatcagag

SEQ ID NO: 15638 - RNA, 97 nt, synthetic construct
  misc_feature 1..97: note = engineered ribonucleic acid scaffold (ERS) sequence
  source 1..97: mol_type = other RNA
actggcgcttctatctgattactctgagcgccatcaccagcgactatgtcgtgtgggtaaagcgcttacggacttcggtccgtaagtcgcatcagag

SEQ ID NO: 15639 - RNA, 98 nt, synthetic construct
  misc_feature 1..98: note = engineered ribonucleic acid scaffold (ERS) sequence
  source 1..98: mol_type = other RNA
actggcgcttctatctgattactctgagcgccatcaccagcgactatgtcgtattgggtaaagcgcttacggacttcggtccgtaagtcgcatcagag

SEQ ID NO: 15640 - RNA, 98 nt, synthetic construct
  misc_feature 1..98: note = engineered ribonucleic acid scaffold (ERS) sequence
  source 1..98: mol_type = other RNA
actggcgcttctatctgattactctgagcgccatcaccagcgactatgtcgtatggagtaaagcgcttacggacttcggtccgtaagtcgcatcagag

SEQ ID NO: 15641 - RNA, 98 nt, synthetic construct
  misc_feature 1..98: note = engineered ribonucleic acid scaffold (ERS) sequence
  source 1..98: mol_type = other RNA
actggcgcttctatctgattactctgagcgccatcaccagcgactatgtcgtatggcgtaaagcgcttacggacttcggtccgtaagtcgcatcagag

SEQ ID NO: 15642 - RNA, 98 nt, synthetic construct
  misc_feature 1..98: note = engineered ribonucleic acid scaffold (ERS) sequence
  source 1..98: mol_type = other RNA
actggcgcttctatctgattactctgagcgccatcaccagcgactatgtcgtatggtgtaaagcgcttacggacttcggtccgtaagtcgcatcagag

SEQ ID NO: 15643 - RNA, 98 nt, synthetic construct
  misc_feature 1..98: note = engineered ribonucleic acid scaffold (ERS) sequence
  source 1..98: mol_type = other RNA
actggcgcttctatctgattactctgagcgccatcaccagcgactatgtcgtatgggctaaagcgcttacggacttcggtccgtaagtcgcatcagag

SEQ ID NO: 15644 - RNA, 95 nt, synthetic construct
  misc_feature 1..95: note = engineered ribonucleic acid scaffold (ERS) sequence
  source 1..95: mol_type = other RNA
actggcgcttctatctgattactctgagcgccatcaccagcgactatgtcgtatgggtagcgcttacggacttcggtccgtaagtcgcatcagag

SEQ ID NO: 15645 - RNA, 97 nt, synthetic construct
  misc_feature 1..97: note = engineered ribonucleic acid scaffold (ERS) sequence
  source 1..97: mol_type = other RNA
actggcgcttctatctgattactctgagcgccatcaccagcgactatgtcgtatgggtgaagcgcttacggacttcggtccgtaagtcgcatcagag

SEQ ID NO: 15646 - RNA, 97 nt, synthetic construct
  misc_feature 1..97: note = engineered ribonucleic acid scaffold (ERS) sequence
  source 1..97: mol_type = other RNA
actggcgcttctatctgattactctgagcgccatcaccagcgactatgtcgtatgggtagagcgcttacggacttcggtccgtaagtcgcatcagag

SEQ ID NO: 15647 - RNA, 97 nt, synthetic construct
  misc_feature 1..97: note = engineered ribonucleic acid scaffold (ERS) sequence
  source 1..97: mol_type = other RNA
actggcgcttctatctgattactctgagcgccaacaccagcgactatgtcgtatgggtaaagcgcttacggagttcgatccgtaagaagcatcagag

SEQ ID NO: 15648 - RNA, 97 nt, synthetic construct
  misc_feature 1..97: note = engineered ribonucleic acid scaffold (ERS) sequence
  source 1..97: mol_type = other RNA
actggcgcttctatctgattactctgagcgccagcaccagcgactatgtcgtatgggtaaagcgcttacggagttcgatccgtaagaagcatcagag

SEQ ID NO: 15649 - RNA, 97 nt, synthetic construct
  misc_feature 1..97: note = engineered ribonucleic acid scaffold (ERS) sequence
  source 1..97: mol_type = other RNA
actggcgcttctatctgattactctgagcgccatgaccagcgactatgtcgtatggctaaagcgcttacggagttcgatccgtaagaagcatcagag

SEQ ID NO: 15650 - RNA, 98 nt, synthetic construct
  misc_feature 1..98: note = engineered ribonucleic acid scaffold (ERS) sequence
  source 1..98: mol_type = other RNA
actggcgcttctatctgattactctgagcgccatgaccagcgactatgtcgtatgggctaaagcgcttacggagttcgatccgtaagaagcatcagag

SEQ ID NO: 15651 - RNA, 97 nt, synthetic construct
  misc_feature 1..97: note = engineered ribonucleic acid scaffold (ERS) sequence
  source 1..97: mol_type = other RNA
actggcgcttctatctgattactctgagcgccatgaccagcgactatgtcgtatgggtaaagcgcttacggagttcgatccgtaagaagcatcagag

SEQ ID NO: 15652 - RNA, 97 nt, synthetic construct
  misc_feature 1..97: note = engineered ribonucleic acid scaffold (ERS) sequence
  source 1..97: mol_type = other RNA
actggcgcttctatctgattactctgagcgccatccccagcgactatgtcgtatgggtaaagcgcttacggagttcgatccgtaagaagcatcagag

SEQ ID NO: 15653 - RNA, 98 nt, synthetic construct
  misc_feature 1..98: note = engineered ribonucleic acid scaffold (ERS) sequence
  source 1..98: mol_type = other RNA
actggcgcttctatctgattactctgagcgccatcgccagcgactatgtcgtatggcgtaaagcgcttacggagttcgatccgtaagaagcatcagag

SEQ ID NO: 15654 - RNA, 97 nt, synthetic construct
  misc_feature 1..97: note = engineered ribonucleic acid scaffold (ERS) sequence
  source 1..97: mol_type = other RNA
actggcgcttctatctgattactctgagcgccatcgccagcgactatgtcgtatgggtaaagcgcttacggagttcgatccgtaagaagcatcagag

SEQ ID NO: 15655 - RNA, 97 nt, synthetic construct
  misc_feature 1..97: note = engineered ribonucleic acid scaffold (ERS) sequence
  source 1..97: mol_type = other RNA
actggcgcttctatctgattactctgagcgccatctccagcgactatgtcgtatgggtaaagcgcttacggagttcgatccgtaagaagcatcagag

SEQ ID NO: 15656 - RNA, 97 nt, synthetic construct
  misc_feature 1..97: note = engineered ribonucleic acid scaffold (ERS) sequence
  source 1..97: mol_type = other RNA
actggcgcttctatctgattactctgagcgccatcacctgcgactatgtcgtaagggtaaagcgcttacggagttcgatccgtaagaagcatcagag

SEQ ID NO: 15657 - RNA, 97 nt, synthetic construct
  misc_feature 1..97: note = engineered ribonucleic acid scaffold (ERS) sequence
  source 1..97: mol_type = other RNA
actggcgcttctatctgattactctgagcgccatcaccagagactatgtcttatgggtaaagcgcttacggagttcgatccgtaagaagcatcagag

SEQ ID NO: 15658 - RNA, 97 nt, synthetic construct
  misc_feature 1..97: note = engineered ribonucleic acid scaffold (ERS) sequence
  source 1..97: mol_type = other RNA
actggcgcttctatctgattactctgagcgccatcaccagggactatgtcctatgggtaaagcgcttacggagttcgatccgtaagaagcatcagag

SEQ ID NO: 15659 - RNA, 98 nt, synthetic construct
  misc_feature 1..98: note = engineered ribonucleic acid scaffold (ERS) sequence
  source 1..98: mol_type = other RNA
actggcgcttctatctgattactctgagcgccatcaccaggcactatgtgctattgggtaaagcgcttacggagttcgatccgtaagaagcatcagag

SEQ ID NO: 15660 - RNA, 97 nt, synthetic construct
  misc_feature 1..97: note = engineered ribonucleic acid scaffold (ERS) sequence
  source 1..97: mol_type = other RNA
actggcgcttctatctgattactctgagcgccatcaccagccactatgtggtatgggtaaagcgcttacggagttcgatccgtaagaagcatcagag

SEQ ID NO: 15661 - RNA, 97 nt, synthetic construct
  misc_feature 1..97: note = engineered ribonucleic acid scaffold (ERS) sequence
  source 1..97: mol_type = other RNA
actggcgcttctatctgattactctgagcgccatcaccagctactatgtagtatgggtaaagcgcttacggagttcgatccgtaagaagcatcagag

SEQ ID NO: 15662 - RNA, 97 nt, synthetic construct
  misc_feature 1..97: note = engineered ribonucleic acid scaffold (ERS) sequence
  source 1..97: mol_type = other RNA
actggcgcttctatctgattactctgagcgccatcaccagcgattatgtcgtatgggtaaagcgcttacggagttcgatccgtaagaagcatcagag

SEQ ID NO: 15663 - RNA, 97 nt, synthetic construct
  misc_feature 1..97: note = engineered ribonucleic acid scaffold (ERS) sequence
  source 1..97: mol_type = other RNA
actggcgcttctatctgattactctgagcgccatcaccagcgacgatgtcgtatgggtaaagcgcttacggagttcgatccgtaagaagcatcagag

SEQ ID NO: 15664 - RNA, 97 nt, synthetic construct
  misc_feature 1..97: note = engineered ribonucleic acid scaffold (ERS) sequence
  source 1..97: mol_type = other RNA
actggcgcttctatctgattactctgagcgccatcaccagcgactctgtcgtatgggtaaagcgcttacggagttcgatccgtaagaagcatcagag

SEQ ID NO: 15665 - RNA, 97 nt, synthetic construct
  misc_feature 1..97: note = engineered ribonucleic acid scaffold (ERS) sequence
  source 1..97: mol_type = other RNA
actggcgcttctatctgattactctgagcgccatcaccagcgactatgtcgtgtgggtaaagcgcttacggagttcgatccgtaagaagcatcagag

SEQ ID NO: 15666 - RNA, 98 nt, synthetic construct
  misc_feature 1..98: note = engineered ribonucleic acid scaffold (ERS) sequence
  source 1..98: mol_type = other RNA
actggcgcttctatctgattactctgagcgccatcaccagcgactatgtcgtattgggtaaagcgcttacggagttcgatccgtaagaagcatcagag

SEQ ID NO: 15667 - RNA, 98 nt, synthetic construct
  misc_feature 1..98: note = engineered ribonucleic acid scaffold (ERS) sequence
  source 1..98: mol_type = other RNA
actggcgcttctatctgattactctgagcgccatcaccagcgactatgtcgtatggagtaaagcgcttacggagttcgatccgtaagaagcatcagag

SEQ ID NO: 15668 - RNA, 98 nt, synthetic construct
  misc_feature 1..98: note = engineered ribonucleic acid scaffold (ERS) sequence
  source 1..98: mol_type = other RNA
actggcgcttctatctgattactctgagcgccatcaccagcgactatgtcgtatggcgtaaagcgcttacggagttcgatccgtaagaagcatcagag

SEQ ID NO: 15669 - RNA, 98 nt, synthetic construct
  misc_feature 1..98: note = engineered ribonucleic acid scaffold (ERS) sequence
  source 1..98: mol_type = other RNA
actggcgcttctatctgattactctgagcgccatcaccagcgactatgtcgtatggtgtaaagcgcttacggagttcgatccgtaagaagcatcagag

SEQ ID NO: 15670 - RNA, 98 nt, synthetic construct
  misc_feature 1..98: note = engineered ribonucleic acid scaffold (ERS) sequence
  source 1..98: mol_type = other RNA
actggcgcttctatctgattactctgagcgccatcaccagcgactatgtcgtatgggctaaagcgcttacggagttcgatccgtaagaagcatcagag

SEQ ID NO: 15671 - RNA, 95 nt, synthetic construct
  misc_feature 1..95: note = engineered ribonucleic acid scaffold (ERS) sequence
  source 1..95: mol_type = other RNA
actggcgcttctatctgattactctgagcgccatcaccagcgactatgtcgtatgggtagcgcttacggagttcgatccgtaagaagcatcagag

SEQ ID NO: 15672 - RNA, 97 nt, synthetic construct
  misc_feature 1..97: note = engineered ribonucleic acid scaffold (ERS) sequence
  source 1..97: mol_type = other RNA
actggcgcttctatctgattactctgagcgccatcaccagcgactatgtcgtatgggtgaagcgcttacggagttcgatccgtaagaagcatcagag

SEQ ID NO: 15673 - RNA, 97 nt, synthetic construct
  misc_feature 1..97: note = engineered ribonucleic acid scaffold (ERS) sequence
  source 1..97: mol_type = other RNA
actggcgcttctatctgattactctgagcgccatcaccagcgactatgtcgtatgggtagagcgcttacggagttcgatccgtaagaagcatcagag

SEQ ID NO: 15674 - RNA, 97 nt, synthetic construct
  misc_feature 1..97: note = engineered ribonucleic acid scaffold (ERS) sequence
  source 1..97: mol_type = other RNA
actggcgcttctatctgattactctgagcgccaacaccagcgactatgtcgtatgggtaaagcgctttcggacttcggtccggaagaagcatcagag

SEQ ID NO: 15675 - RNA, 97 nt, synthetic construct
  misc_feature 1..97: note = engineered ribonucleic acid scaffold (ERS) sequence
  source 1..97: mol_type = other RNA
actggcgcttctatctgattactctgagcgccagcaccagcgactatgtcgtatgggtaaagcgctttcggacttcggtccggaagaagcatcagag

SEQ ID NO: 15676 - RNA, 97 nt, synthetic construct
  misc_feature 1..97: note = engineered ribonucleic acid scaffold (ERS) sequence
  source 1..97: mol_type = other RNA
actggcgcttctatctgattactctgagcgccatgaccagcgactatgtcgtatggctaaagcgctttcggacttcggtccggaagaagcatcagag

SEQ ID NO: 15677 - RNA, 98 nt, synthetic construct
  misc_feature 1..98: note = engineered ribonucleic acid scaffold (ERS) sequence
  source 1..98: mol_type = other RNA
actggcgcttctatctgattactctgagcgccatgaccagcgactatgtcgtatgggctaaagcgctttcggacttcggtccggaagaagcatcagag

SEQ ID NO: 15678 - RNA, 97 nt, synthetic construct
  misc_feature 1..97: note = engineered ribonucleic acid scaffold (ERS) sequence
  source 1..97: mol_type = other RNA
actggcgcttctatctgattactctgagcgccatgaccagcgactatgtcgtatgggtaaagcgctttcggacttcggtccggaagaagcatcagag

SEQ ID NO: 15679 - RNA, 97 nt, synthetic construct
  misc_feature 1..97: note = engineered ribonucleic acid scaffold (ERS) sequence
  source 1..97: mol_type = other RNA
actggcgcttctatctgattactctgagcgccatccccagcgactatgtcgtatgggtaaagcgctttcggacttcggtccggaagaagcatcagag

SEQ ID NO: 15680 - RNA, 98 nt, synthetic construct
  misc_feature 1..98: note = engineered ribonucleic acid scaffold (ERS) sequence
  source 1..98: mol_type = other RNA
actggcgcttctatctgattactctgagcgccatcgccagcgactatgtcgtatggcgtaaagcgctttcggacttcggtccggaagaagcatcagag

SEQ ID NO: 15681 - RNA, 97 nt, synthetic construct
  misc_feature 1..97: note = engineered ribonucleic acid scaffold (ERS) sequence
  source 1..97: mol_type = other RNA
actggcgcttctatctgattactctgagcgccatcgccagcgactatgtcgtatgggtaaagcgctttcggacttcggtccggaagaagcatcagag

SEQ ID NO: 15682 - RNA, 97 nt, synthetic construct
  misc_feature 1..97: note = engineered ribonucleic acid scaffold (ERS) sequence
  source 1..97: mol_type = other RNA
actggcgcttctatctgattactctgagcgccatctccagcgactatgtcgtatgggtaaagcgctttcggacttcggtccggaagaagcatcagag

SEQ ID NO: 15683 - RNA, 97 nt, synthetic construct
  misc_feature 1..97: note = engineered ribonucleic acid scaffold (ERS) sequence
  source 1..97: mol_type = other RNA
actggcgcttctatctgattactctgagcgccatcacctgcgactatgtcgtaagggtaaagcgctttcggacttcggtccggaagaagcatcagag

SEQ ID NO: 15684 - RNA, 97 nt, synthetic construct
  misc_feature 1..97: note = engineered ribonucleic acid scaffold (ERS) sequence
  source 1..97: mol_type = other RNA
actggcgcttctatctgattactctgagcgccatcaccagagactatgtcttatgggtaaagcgctttcggacttcggtccggaagaagcatcagag

SEQ ID NO: 15685 - RNA, 97 nt, synthetic construct
  misc_feature 1..97: note = engineered ribonucleic acid scaffold (ERS) sequence
  source 1..97: mol_type = other RNA
actggcgcttctatctgattactctgagcgccatcaccagggactatgtcctatgggtaaagcgctttcggacttcggtccggaagaagcatcagag

SEQ ID NO: 15686 - RNA, 98 nt, synthetic construct
  misc_feature 1..98: note = engineered ribonucleic acid scaffold (ERS) sequence
  source 1..98: mol_type = other RNA
actggcgcttctatctgattactctgagcgccatcaccaggcactatgtgctattgggtaaagcgctttcggacttcggtccggaagaagcatcagag

SEQ ID NO: 15687 - RNA, 97 nt, synthetic construct
  misc_feature 1..97: note = engineered ribonucleic acid scaffold (ERS) sequence
  source 1..97: mol_type = other RNA
actggcgcttctatctgattactctgagcgccatcaccagccactatgtggtatgggtaaagcgctttcggacttcggtccggaagaagcatcagag

SEQ ID NO: 15688 - RNA, 97 nt, synthetic construct
  misc_feature 1..97: note = engineered ribonucleic acid scaffold (ERS) sequence
  source 1..97: mol_type = other RNA
actggcgcttctatctgattactctgagcgccatcaccagctactatgtagtatgggtaaagcgctttcggacttcggtccggaagaagcatcagag

SEQ ID NO: 15689 - RNA, 97 nt, synthetic construct
  misc_feature 1..97: note = engineered ribonucleic acid scaffold (ERS) sequence
  source 1..97: mol_type = other RNA
actggcgcttctatctgattactctgagcgccatcaccagcgattatgtcgtatgggtaaagcgctttcggacttcggtccggaagaagcatcagag

SEQ ID NO: 15690 - RNA, 97 nt, synthetic construct
  misc_feature 1..97: note = engineered ribonucleic acid scaffold (ERS) sequence
  source 1..97: mol_type = other RNA
actggcgcttctatctgattactctgagcgccatcaccagcgacgatgtcgtatgggtaaagcgctttcggacttcggtccggaagaagcatcagag

SEQ ID NO: 15691 - RNA, 97 nt, synthetic construct
  misc_feature 1..97: note = engineered ribonucleic acid scaffold (ERS) sequence
  source 1..97: mol_type = other RNA
actggcgcttctatctgattactctgagcgccatcaccagcgactctgtcgtatgggtaaagcgctttcggacttcggtccggaagaagcatcagag

SEQ ID NO: 15692 - RNA, 97 nt, synthetic construct
  misc_feature 1..97: note = engineered ribonucleic acid scaffold (ERS) sequence
  source 1..97: mol_type = other RNA
actggcgcttctatctgattactctgagcgccatcaccagcgactatgtcgtgtgggtaaagcgctttcggacttcggtccggaagaagcatcagag

SEQ ID NO: 15693 - RNA, 98 nt, synthetic construct
  misc_feature 1..98: note = engineered ribonucleic acid scaffold (ERS) sequence
  source 1..98: mol_type = other RNA
actggcgcttctatctgattactctgagcgccatcaccagcgactatgtcgtattgggtaaagcgctttcggacttcggtccggaagaagcatcagag

SEQ ID NO: 15694 - RNA, 98 nt, synthetic construct
  misc_feature 1..98: note = engineered ribonucleic acid scaffold (ERS) sequence
  source 1..98: mol_type = other RNA
actggcgcttctatctgattactctgagcgccatcaccagcgactatgtcgtatggagtaaagcgctttcggacttcggtccggaagaagcatcagag

SEQ ID NO: 15695 - RNA, 98 nt, synthetic construct
  misc_feature 1..98: note = engineered ribonucleic acid scaffold (ERS) sequence
  source 1..98: mol_type = other RNA
actggcgcttctatctgattactctgagcgccatcaccagcgactatgtcgtatggcgtaaagcgctttcggacttcggtccggaagaagcatcagag

SEQ ID NO: 15696 - RNA, 98 nt, synthetic construct
  misc_feature 1..98: note = engineered ribonucleic acid scaffold (ERS) sequence
  source 1..98: mol_type = other RNA
actggcgcttctatctgattactctgagcgccatcaccagcgactatgtcgtatggtgtaaagcgctttcggacttcggtccggaagaagcatcagag

SEQ ID NO: 15697 - RNA, 98 nt, synthetic construct
  misc_feature 1..98: note = engineered ribonucleic acid scaffold (ERS) sequence
  source 1..98: mol_type = other RNA
actggcgcttctatctgattactctgagcgccatcaccagcgactatgtcgtatgggctaaagcgctttcggacttcggtccggaagaagcatcagag

SEQ ID NO: 15698 - RNA, 95 nt, synthetic construct
  misc_feature 1..95: note = engineered ribonucleic acid scaffold (ERS) sequence
  source 1..95: mol_type = other RNA
actggcgcttctatctgattactctgagcgccatcaccagcgactatgtcgtatgggtagcgctttcggacttcggtccggaagaagcatcagag

SEQ ID NO: 15699 - RNA, 97 nt, synthetic construct
  misc_feature 1..97: note = engineered ribonucleic acid scaffold (ERS) sequence
  source 1..97: mol_type = other RNA
actggcgcttctatctgattactctgagcgccatcaccagcgactatgtcgtatgggtgaagcgctttcggacttcggtccggaagaagcatcagag

SEQ ID NO: 15700 - RNA, 97 nt, synthetic construct
  misc_feature 1..97: note = engineered ribonucleic acid scaffold (ERS) sequence
  source 1..97: mol_type = other RNA
actggcgcttctatctgattactctgagcgccatcaccagcgactatgtcgtatgggtagagcgctttcggacttcggtccggaagaagcatcagag

SEQ ID NO: 15701 - RNA, 101 nt, synthetic construct
  misc_feature 1..101: note = engineered ribonucleic acid scaffold (ERS) sequence
  source 1..101: mol_type = other RNA
actggcgcttctatctgattactctgagcgccaacaccagcgactatgtcgtatgggtaaagcggcagatctgagcctccgagctctctgccgcatcagag

SEQ ID NO: 15702 - RNA, 101 nt, synthetic construct
  misc_feature 1..101: note = engineered ribonucleic acid scaffold (ERS) sequence
  source 1..101: mol_type = other RNA
actggcgcttctatctgattactctgagcgccagcaccagcgactatgtcgtatgggtaaagcggcagatctgagcctccgagctctctgccgcatcagag

SEQ ID NO: 15703 - RNA, 101 nt, synthetic construct
  misc_feature 1..101: note = engineered ribonucleic acid scaffold (ERS) sequence
  source 1..101: mol_type = other RNA
actggcgcttctatctgattactctgagcgccatgaccagcgactatgtcgtatggctaaagcggcagatctgagcctccgagctctctgccgcatcagag

SEQ ID NO: 15704 - RNA, 102 nt, synthetic construct
  misc_feature 1..102: note = engineered ribonucleic acid scaffold (ERS) sequence
  source 1..102: mol_type = other RNA
actggcgcttctatctgattactctgagcgccatgaccagcgactatgtcgtatgggctaaagcggcagatctgagcctccgagctctctgccgcatcagag

SEQ ID NO: 15705 - RNA, 101 nt, synthetic construct
  misc_feature 1..101: note = engineered ribonucleic acid scaffold (ERS) sequence
  source 1..101: mol_type = other RNA
actggcgcttctatctgattactctgagcgccatgaccagcgactatgtcgtatgggtaaagcggcagatctgagcctccgagctctctgccgcatcagag

SEQ ID NO: 15706 - RNA, 101 nt, synthetic construct
  misc_feature 1..101: note = engineered ribonucleic acid scaffold (ERS) sequence
  source 1..101: mol_type = other RNA
actggcgcttctatctgattactctgagcgccatccccagcgactatgtcgtatgggtaaagcggcagatctgagcctccgagctctctgccgcatcagag

SEQ ID NO: 15707 - RNA, 102 nt, synthetic construct
  misc_feature 1..102: note = engineered ribonucleic acid scaffold (ERS) sequence
  source 1..102: mol_type = other RNA
actggcgcttctatctgattactctgagcgccatcgccagcgactatgtcgtatggcgtaaagcggcagatctgagcctccgagctctctgccgcatcagag

SEQ ID NO: 15708 - RNA, 101 nt, synthetic construct
  misc_feature 1..101: note = engineered ribonucleic acid scaffold (ERS) sequence
  source 1..101: mol_type = other RNA
actggcgcttctatctgattactctgagcgccatcgccagcgactatgtcgtatgggtaaagcggcagatctgagcctccgagctctctgccgcatcagag

SEQ ID NO: 15709 - RNA, 101 nt, synthetic construct
  misc_feature 1..101: note = engineered ribonucleic acid scaffold (ERS) sequence
  source 1..101: mol_type = other RNA
actggcgcttctatctgattactctgagcgccatctccagcgactatgtcgtatgggtaaagcggcagatctgagcctccgagctctctgccgcatcagag

SEQ ID NO: 15710 - RNA, 101 nt, synthetic construct
  misc_feature 1..101: note = engineered ribonucleic acid scaffold (ERS) sequence
  source 1..101: mol_type = other RNA
actggcgcttctatctgattactctgagcgccatcacctgcgactatgtcgtaagggtaaagcggcagatctgagcctccgagctctctgccgcatcagag

SEQ ID NO: 15711 - RNA, 101 nt, synthetic construct
  misc_feature 1..101: note = engineered ribonucleic acid scaffold (ERS) sequence
  source 1..101: mol_type = other RNA
actggcgcttctatctgattactctgagcgccatcaccagagactatgtcttatgggtaaagcggcagatctgagcctccgagctctctgccgcatcagag

SEQ ID NO: 15712 - RNA, 101 nt, synthetic construct
  misc_feature 1..101: note = engineered ribonucleic acid scaffold (ERS) sequence
  source 1..101: mol_type = other RNA
actggcgcttctatctgattactctgagcgccatcaccagggactatgtcctatgggtaaagcggcagatctgagcctccgagctctctgccgcatcagag

SEQ ID NO: 15713 - RNA, 102 nt, synthetic construct
  misc_feature 1..102: note = engineered ribonucleic acid scaffold (ERS) sequence
  source 1..102: mol_type = other RNA
actggcgcttctatctgattactctgagcgccatcaccaggcactatgtgctattgggtaaagcggcagatctgagcctccgagctctctgccgcatcagag

SEQ ID NO: 15714 - RNA, 101 nt, synthetic construct
  misc_feature 1..101: note = engineered ribonucleic acid scaffold (ERS) sequence
  source 1..101: mol_type = other RNA
actggcgcttctatctgattactctgagcgccatcaccagccactatgtggtatgggtaaagcggcagatctgagcctccgagctctctgccgcatcagag

SEQ ID NO: 15715 - RNA, 101 nt, synthetic construct
  misc_feature 1..101: note = engineered ribonucleic acid scaffold (ERS) sequence
  source 1..101: mol_type = other RNA
actggcgcttctatctgattactctgagcgccatcaccagctactatgtagtatgggtaaagcggcagatctgagcctccgagctctctgccgcatcagag

SEQ ID NO: 15716 - RNA, 101 nt, synthetic construct
  misc_feature 1..101: note = engineered ribonucleic acid scaffold (ERS) sequence
  source 1..101: mol_type = other RNA
actggcgcttctatctgattactctgagcgccatcaccagcgattatgtcgtatgggtaaagcggcagatctgagcctccgagctctctgccgcatcagag

SEQ ID NO: 15717 - RNA, 101 nt, synthetic construct
  misc_feature 1..101: note = engineered ribonucleic acid scaffold (ERS) sequence
  source 1..101: mol_type = other RNA
actggcgcttctatctgattactctgagcgccatcaccagcgacgatgtcgtatgggtaaagcggcagatctgagcctccgagctctctgccgcatcagag

SEQ ID NO: 15718 - RNA, 101 nt, synthetic construct
  misc_feature 1..101: note = engineered ribonucleic acid scaffold (ERS) sequence
  source 1..101: mol_type = other RNA
actggcgcttctatctgattactctgagcgccatcaccagcgactctgtcgtatgggtaaagcggcagatctgagcctccgagctctctgccgcatcagag

SEQ ID NO: 15719 - RNA, 101 nt, synthetic construct
  misc_feature 1..101: note = engineered ribonucleic acid scaffold (ERS) sequence
  source 1..101: mol_type = other RNA
actggcgcttctatctgattactctgagcgccatcaccagcgactatgtcgtgtgggtaaagcggcagatctgagcctccgagctctctgccgcatcagag

SEQ ID NO: 15720 - RNA, 102 nt, synthetic construct
  misc_feature 1..102: note = engineered ribonucleic acid scaffold (ERS) sequence
  source 1..102: mol_type = other RNA
actggcgcttctatctgattactctgagcgccatcaccagcgactatgtcgtattgggtaaagcggcagatctgagcctccgagctctctgccgcatcagag

SEQ ID NO: 15721 - RNA, 102 nt, synthetic construct
  misc_feature 1..102: note = engineered ribonucleic acid scaffold (ERS) sequence
  source 1..102: mol_type = other RNA
actggcgcttctatctgattactctgagcgccatcaccagcgactatgtcgtatggagtaaagcggcagatctgagcctccgagctctctgccgcatcagag

SEQ ID NO: 15722 - RNA, 102 nt, synthetic construct
  misc_feature 1..102: note = engineered ribonucleic acid scaffold (ERS) sequence
  source 1..102: mol_type = other RNA
actggcgcttctatctgattactctgagcgccatcaccagcgactatgtcgtatggcgtaaagcggcagatctgagcctccgagctctctgccgcatcagag

SEQ ID NO: 15723 - RNA, 102 nt, synthetic construct
  misc_feature 1..102: note = engineered ribonucleic acid scaffold (ERS) sequence
  source 1..102: mol_type = other RNA
actggcgcttctatctgattactctgagcgccatcaccagcgactatgtcgtatggtgtaaagcggcagatctgagcctccgagctctctgccgcatcagag

SEQ ID NO: 15724 - RNA, 102 nt, synthetic construct
  misc_feature 1..102: note = engineered ribonucleic acid scaffold (ERS) sequence
  source 1..102: mol_type = other RNA
actggcgcttctatctgattactctgagcgccatcaccagcgactatgtcgtatgggctaaagcggcagatctgagcctccgagctctctgccgcatcagag

SEQ ID NO: 15725 - RNA, 99 nt, synthetic construct
  misc_feature 1..99: note = engineered ribonucleic acid scaffold (ERS) sequence
  source 1..99: mol_type = other RNA
actggcgcttctatctgattactctgagcgccatcaccagcgactatgtcgtatgggtagcggcagatctgagcctccgagctctctgccgcatcagag

SEQ ID NO: 15726 - RNA, 101 nt, synthetic construct
  misc_feature 1..101: note = engineered ribonucleic acid scaffold (ERS) sequence
  source 1..101: mol_type = other RNA
actggcgcttctatctgattactctgagcgccatcaccagcgactatgtcgtatgggtgaagcggcagatctgagcctccgagctctctgccgcatcagag

SEQ ID NO: 15727 - RNA, 101 nt, synthetic construct
  misc_feature 1..101: note = engineered ribonucleic acid scaffold (ERS) sequence
  source 1..101: mol_type = other RNA
actggcgcttctatctgattactctgagcgccatcaccagcgactatgtcgtatgggtagagcggcagatctgagcctccgagctctctgccgcatcagag

SEQ ID NO: 15728 - RNA, 97 nt, synthetic construct
  misc_feature 1..97: note = engineered ribonucleic acid scaffold (ERS) sequence
  source 1..97: mol_type = other RNA
actggcgcttctatctgattactctgagcgccaacaccagcgactatgtcgtatgggtaaagcggttacggacttcggtccgtaagacgcatcagag

SEQ ID NO: 15729 - RNA, 97 nt, synthetic construct
  misc_feature 1..97: note = engineered ribonucleic acid scaffold (ERS) sequence
  source 1..97: mol_type = other RNA
actggcgcttctatctgattactctgagcgccagcaccagcgactatgtcgtatgggtaaagcggttacggacttcggtccgtaagacgcatcagag

SEQ ID NO: 15730 - RNA, 97 nt, synthetic construct
  misc_feature 1..97: note = engineered ribonucleic acid scaffold (ERS) sequence
  source 1..97: mol_type = other RNA
actggcgcttctatctgattactctgagcgccatgaccagcgactatgtcgtatggctaaagcggttacggacttcggtccgtaagacgcatcagag

SEQ ID NO: 15731 - RNA, 98 nt, synthetic construct
  misc_feature 1..98: note = engineered ribonucleic acid scaffold (ERS) sequence
  source 1..98: mol_type = other RNA
actggcgcttctatctgattactctgagcgccatgaccagcgactatgtcgtatgggctaaagcggttacggacttcggtccgtaagacgcatcagag

SEQ ID NO: 15732 - RNA, 97 nt, synthetic construct
  misc_feature 1..97: note = engineered ribonucleic acid scaffold (ERS) sequence
  source 1..97: mol_type = other RNA
actggcgcttctatctgattactctgagcgccatgaccagcgactatgtcgtatgggtaaagcggttacggacttcggtccgtaagacgcatcagag

SEQ ID NO: 15733 - RNA, 97 nt, synthetic construct
  misc_feature 1..97: note = engineered ribonucleic acid scaffold (ERS) sequence
  source 1..97: mol_type = other RNA
actggcgcttctatctgattactctgagcgccatccccagcgactatgtcgtatgggtaaagcggttacggacttcggtccgtaagacgcatcagag

SEQ ID NO: 15734 - RNA, 98 nt, synthetic construct
  misc_feature 1..98: note = engineered ribonucleic acid scaffold (ERS) sequence
  source 1..98: mol_type = other RNA
actggcgcttctatctgattactctgagcgccatcgccagcgactatgtcgtatggcgtaaagcggttacggacttcggtccgtaagacgcatcagag

SEQ ID NO: 15735 - RNA, 97 nt, synthetic construct
  misc_feature 1..97: note = engineered ribonucleic acid scaffold (ERS) sequence
  source 1..97: mol_type = other RNA
actggcgcttctatctgattactctgagcgccatcgccagcgactatgtcgtatgggtaaagcggttacggacttcggtccgtaagacgcatcagag

SEQ ID NO: 15736 - RNA, 97 nt, synthetic construct
  misc_feature 1..97: note = engineered ribonucleic acid scaffold (ERS) sequence
  source 1..97: mol_type = other RNA
actggcgcttctatctgattactctgagcgccatctccagcgactatgtcgtatgggtaaagcggttacggacttcggtccgtaagacgcatcagag

SEQ ID NO: 15737 - RNA, 97 nt, synthetic construct
  misc_feature 1..97: note = engineered ribonucleic acid scaffold (ERS) sequence
  source 1..97: mol_type = other RNA
actggcgcttctatctgattactctgagcgccatcacctgcgactatgtcgtaagggtaaagcggttacggacttcggtccgtaagacgcatcagag

SEQ ID NO: 15738 - RNA, 97 nt, synthetic construct
  misc_feature 1..97: note = engineered ribonucleic acid scaffold (ERS) sequence
  source 1..97: mol_type = other RNA
actggcgcttctatctgattactctgagcgccatcaccagagactatgtcttatgggtaaagcggttacggacttcggtccgtaagacgcatcagag

SEQ ID NO: 15739 - RNA, 97 nt, synthetic construct
  misc_feature 1..97: note = engineered ribonucleic acid scaffold (ERS) sequence
  source 1..97: mol_type = other RNA
actggcgcttctatctgattactctgagcgccatcaccagggactatgtcctatgggtaaagcggttacggacttcggtccgtaagacgcatcagag

SEQ ID NO: 15740 - RNA, 98 nt, synthetic construct
  misc_feature 1..98: note = engineered ribonucleic acid scaffold (ERS) sequence
  source 1..98: mol_type = other RNA
actggcgcttctatctgattactctgagcgccatcaccaggcactatgtgctattgggtaaagcggttacggacttcggtccgtaagacgcatcagag

SEQ ID NO: 15741 - RNA, 97 nt, synthetic construct
  misc_feature 1..97: note = engineered ribonucleic acid scaffold (ERS) sequence
  source 1..97: mol_type = other RNA
actggcgcttctatctgattactctgagcgccatcaccagccactatgtggtatgggtaaagcggttacggacttcggtccgtaagacgcatcagag

SEQ ID NO: 15742 - RNA, 97 nt, synthetic construct
  misc_feature 1..97: note = engineered ribonucleic acid scaffold (ERS) sequence
  source 1..97: mol_type = other RNA
actggcgcttctatctgattactctgagcgccatcaccagctactatgtagtatgggtaaagcggttacggacttcggtccgtaagacgcatcagag

SEQ ID NO: 15743 - RNA, 97 nt, synthetic construct
  misc_feature 1..97: note = engineered ribonucleic acid scaffold (ERS) sequence
  source 1..97: mol_type = other RNA
actggcgcttctatctgattactctgagcgccatcaccagcgattatgtcgtatgggtaaagcggttacggacttcggtccgtaagacgcatcagag

SEQ ID NO: 15744 - RNA, 97 nt, synthetic construct
  misc_feature 1..97: note = engineered ribonucleic acid scaffold (ERS) sequence
  source 1..97: mol_type = other RNA
actggcgcttctatctgattactctgagcgccatcaccagcgacgatgtcgtatgggtaaagcggttacggacttcggtccgtaagacgcatcagag

SEQ ID NO: 15745 - RNA, 97 nt, synthetic construct
  misc_feature 1..97: note = engineered ribonucleic acid scaffold (ERS) sequence
  source 1..97: mol_type = other RNA
actggcgcttctatctgattactctgagcgccatcaccagcgactctgtcgtatgggtaaagcggttacggacttcggtccgtaagacgcatcagag

SEQ ID NO: 15746 - RNA, 97 nt, synthetic construct
  misc_feature 1..97: note = engineered ribonucleic acid scaffold (ERS) sequence
  source 1..97: mol_type = other RNA
actggcgcttctatctgattactctgagcgccatcaccagcgactatgtcgtgtgggtaaagcggttacggacttcggtccgtaagacgcatcagag

SEQ ID NO: 15747 - RNA, 98 nt, synthetic construct
  misc_feature 1..98: note = engineered ribonucleic acid scaffold (ERS) sequence
  source 1..98: mol_type = other RNA
actggcgcttctatctgattactctgagcgccatcaccagcgactatgtcgtattgggtaaagcggttacggacttcggtccgtaagacgcatcagag

SEQ ID NO: 15748 - RNA, 98 nt, synthetic construct
  misc_feature 1..98: note = engineered ribonucleic acid scaffold (ERS) sequence
  source 1..98: mol_type = other RNA
actggcgcttctatctgattactctgagcgccatcaccagcgactatgtcgtatggagtaaagcggttacggacttcggtccgtaagacgcatcagag

SEQ ID NO: 15749 - RNA, 98 nt, synthetic construct
  misc_feature 1..98: note = engineered ribonucleic acid scaffold (ERS) sequence
  source 1..98: mol_type = other RNA
actggcgcttctatctgattactctgagcgccatcaccagcgactatgtcgtatggcgtaaagcggttacggacttcggtccgtaagacgcatcagag

SEQ ID NO: 15750 - RNA, 98 nt, synthetic construct
  misc_feature 1..98: note = engineered ribonucleic acid scaffold (ERS) sequence
  source 1..98: mol_type = other RNA
actggcgcttctatctgattactctgagcgccatcaccagcgactatgtcgtatggtgtaaagcggttacggacttcggtccgtaagacgcatcagag

SEQ ID NO: 15751 - RNA, 98 nt, synthetic construct
  misc_feature 1..98: note = engineered ribonucleic acid scaffold (ERS) sequence
  source 1..98: mol_type = other RNA
actggcgcttctatctgattactctgagcgccatcaccagcgactatgtcgtatgggctaaagcggttacggacttcggtccgtaagacgcatcagag

SEQ ID NO: 15752 - RNA, 95 nt, synthetic construct
  misc_feature 1..95: note = engineered ribonucleic acid scaffold (ERS) sequence
  source 1..95: mol_type = other RNA
actggcgcttctatctgattactctgagcgccatcaccagcgactatgtcgtatgggtagcggttacggacttcggtccgtaagacgcatcagag

SEQ ID NO: 15753 - RNA, 97 nt, synthetic construct
  misc_feature 1..97: note = engineered ribonucleic acid scaffold (ERS) sequence
  source 1..97: mol_type = other RNA
actggcgcttctatctgattactctgagcgccatcaccagcgactatgtcgtatgggtgaagcggttacggacttcggtccgtaagacgcatcagag

SEQ ID NO: 15754 - RNA, 97 nt, synthetic construct
  misc_feature 1..97: note = engineered ribonucleic acid scaffold (ERS) sequence
  source 1..97: mol_type = other RNA
actggcgcttctatctgattactctgagcgccatcaccagcgactatgtcgtatgggtagagcggttacggacttcggtccgtaagacgcatcagag

SEQ ID NO: 15755 - RNA, 74 nt, synthetic construct
  misc_feature 1..74: note = engineered ribonucleic acid scaffold (ERS) sequence
  source 1..74: mol_type = other RNA
actggcgcttctatctgattactctgagcgccaacaccagcgactatgtcgtatgggtaaagctagcatcagag

SEQ ID NO: 15756 - RNA, 74 nt, synthetic construct
  misc_feature 1..74: note = engineered ribonucleic acid scaffold (ERS) sequence
  source 1..74: mol_type = other RNA
actggcgcttctatctgattactctgagcgccagcaccagcgactatgtcgtatgggtaaagctagcatcagag

SEQ ID NO: 15757 - RNA, 74 nt, synthetic construct
  misc_feature 1..74: note = engineered ribonucleic acid scaffold (ERS) sequence
  source 1..74: mol_type = other RNA
actggcgcttctatctgattactctgagcgccatgaccagcgactatgtcgtatggctaaagctagcatcagag

SEQ ID NO: 15758 - RNA, 75 nt, synthetic construct
  misc_feature 1..75: note = engineered ribonucleic acid scaffold (ERS) sequence
  source 1..75: mol_type = other RNA
actggcgcttctatctgattactctgagcgccatgaccagcgactatgtcgtatgggctaaagctagcatcagag

SEQ ID NO: 15759 - RNA, 74 nt, synthetic construct
  misc_feature 1..74: note = engineered ribonucleic acid scaffold (ERS) sequence
  source 1..74: mol_type = other RNA
actggcgcttctatctgattactctgagcgccatgaccagcgactatgtcgtatgggtaaagctagcatcagag

SEQ ID NO: 15760 - RNA, 74 nt, synthetic construct
  misc_feature 1..74: note = engineered ribonucleic acid scaffold (ERS) sequence
  source 1..74: mol_type = other RNA
actggcgcttctatctgattactctgagcgccatccccagcgactatgtcgtatgggtaaagctagcatcagag

SEQ ID NO: 15761 - RNA, 75 nt, synthetic construct
  misc_feature 1..75: note = engineered ribonucleic acid scaffold (ERS) sequence
  source 1..75: mol_type = other RNA
actggcgcttctatctgattactctgagcgccatcgccagcgactatgtcgtatggcgtaaagctagcatcagag

SEQ ID NO: 15762 - RNA, 74 nt, synthetic construct
  misc_feature 1..74: note = engineered ribonucleic acid scaffold (ERS) sequence
  source 1..74: mol_type = other RNA
actggcgcttctatctgattactctgagcgccatcgccagcgactatgtcgtatgggtaaagctagcatcagag

SEQ ID NO: 15763 - RNA, 74 nt, synthetic construct
  misc_feature 1..74: note = engineered ribonucleic acid scaffold (ERS) sequence
  source 1..74: mol_type = other RNA
actggcgcttctatctgattactctgagcgccatctccagcgactatgtcgtatgggtaaagctagcatcagag

SEQ ID NO: 15764 - RNA, 74 nt, synthetic construct
  misc_feature 1..74: note = engineered ribonucleic acid scaffold (ERS) sequence
  source 1..74: mol_type = other RNA
actggcgcttctatctgattactctgagcgccatcacctgcgactatgtcgtaagggtaaagctagcatcagag

SEQ ID NO: 15765 - RNA, 74 nt, synthetic construct
  misc_feature 1..74: note = engineered ribonucleic acid scaffold (ERS) sequence
  source 1..74: mol_type = other RNA
actggcgcttctatctgattactctgagcgccatcaccagagactatgtcttatgggtaaagctagcatcagag

SEQ ID NO: 15766 - RNA, 74 nt, synthetic construct
  misc_feature 1..74: note = engineered ribonucleic acid scaffold (ERS) sequence
  source 1..74: mol_type = other RNA
actggcgcttctatctgattactctgagcgccatcaccagggactatgtcctatgggtaaagctagcatcagag

SEQ ID NO: 15767 - RNA, 75 nt, synthetic construct
  misc_feature 1..75: note = engineered ribonucleic acid scaffold (ERS) sequence
  source 1..75: mol_type = other RNA
actggcgcttctatctgattactctgagcgccatcaccaggcactatgtgctattgggtaaagctagcatcagag

SEQ ID NO: 15768 - RNA, 74 nt, synthetic construct
  misc_feature 1..74: note = engineered ribonucleic acid scaffold (ERS) sequence
  source 1..74: mol_type = other RNA
actggcgcttctatctgattactctgagcgccatcaccagccactatgtggtatgggtaaagctagcatcagag

SEQ ID NO: 15769 - RNA, 74 nt, synthetic construct
  misc_feature 1..74: note = engineered ribonucleic acid scaffold (ERS) sequence
  source 1..74: mol_type = other RNA
actggcgcttctatctgattactctgagcgccatcaccagctactatgtagtatgggtaaagctagcatcagag

SEQ ID NO: 15770 - RNA, 74 nt, synthetic construct
  misc_feature 1..74: note = engineered ribonucleic acid scaffold (ERS) sequence
  source 1..74: mol_type = other RNA
actggcgcttctatctgattactctgagcgccatcaccagcgattatgtcgtatgggtaaagctagcatcagag

SEQ ID NO: 15771 - RNA, 74 nt, synthetic construct
  misc_feature 1..74: note = engineered ribonucleic acid scaffold (ERS) sequence
  source 1..74: mol_type = other RNA
actggcgcttctatctgattactctgagcgccatcaccagcgacgatgtcgtatgggtaaagctagcatcagag

SEQ ID NO: 15772 - RNA, 74 nt, synthetic construct
  misc_feature 1..74: note = engineered ribonucleic acid scaffold (ERS) sequence
  source 1..74: mol_type = other RNA
actggcgcttctatctgattactctgagcgccatcaccagcgactctgtcgtatgggtaaagctagcatcagag

SEQ ID NO: 15773 - RNA, 74 nt, synthetic construct
  misc_feature 1..74: note = engineered ribonucleic acid scaffold (ERS) sequence
  source 1..74: mol_type = other RNA
actggcgcttctatctgattactctgagcgccatcaccagcgactatgtcgtgtgggtaaagctagcatcagag

SEQ ID NO: 15774 - RNA, 75 nt, synthetic construct
  misc_feature 1..75: note = engineered ribonucleic acid scaffold (ERS) sequence
  source 1..75: mol_type = other RNA
actggcgcttctatctgattactctgagcgccatcaccagcgactatgtcgtattgggtaaagctagcatcagag

SEQ ID NO: 15775 - RNA, 75 nt, synthetic construct
  misc_feature 1..75: note = engineered ribonucleic acid scaffold (ERS) sequence
  source 1..75: mol_type = other RNA
actggcgcttctatctgattactctgagcgccatcaccagcgactatgtcgtatggagtaaagctagcatcagag

SEQ ID NO: 15776 - RNA, 75 nt, synthetic construct
  misc_feature 1..75: note = engineered ribonucleic acid scaffold (ERS) sequence
  source 1..75: mol_type = other RNA
actggcgcttctatctgattactctgagcgccatcaccagcgactatgtcgtatggcgtaaagctagcatcagag

SEQ ID NO: 15777 - RNA, 75 nt, synthetic construct
  misc_feature 1..75: note = engineered ribonucleic acid scaffold (ERS) sequence
  source 1..75: mol_type = other RNA
actggcgcttctatctgattactctgagcgccatcaccagcgactatgtcgtatggtgtaaagctagcatcagag

SEQ ID NO: 15778 - RNA, 75 nt, synthetic construct
  misc_feature 1..75: note = engineered ribonucleic acid scaffold (ERS) sequence
  source 1..75: mol_type = other RNA
actggcgcttctatctgattactctgagcgccatcaccagcgactatgtcgtatgggctaaagctagcatcagag

SEQ ID NO: 15779 - RNA, 72 nt, synthetic construct
  misc_feature 1..72: note = engineered ribonucleic acid scaffold (ERS) sequence
  source 1..72: mol_type = other RNA
actggcgcttctatctgattactctgagcgccatcaccagcgactatgtcgtatgggtagctagcatcagag

SEQ ID NO: 15780 - RNA, 74 nt, synthetic construct
  misc_feature 1..74: note = engineered ribonucleic acid scaffold (ERS) sequence
  source 1..74: mol_type = other RNA
actggcgcttctatctgattactctgagcgccatcaccagcgactatgtcgtatgggtgaagctagcatcagag

SEQ ID NO: 15781 - RNA, 74 nt, synthetic construct
  misc_feature 1..74: note = engineered ribonucleic acid scaffold (ERS) sequence
  source 1..74: mol_type = other RNA
actggcgcttctatctgattactctgagcgccatcaccagcgactatgtcgtatgggtagagctagcatcagag

SEQ ID NO: 15782 - RNA, 88 nt, synthetic construct
  misc_feature 1..88: note = engineered ribonucleic acid scaffold (ERS) sequence
  source 1..88: mol_type = other RNA
actggcgcttctatctgattactctgagcgccaacaccagcgactatgtcgtatgggtaaagctccctattcggatggagcatcagag

SEQ ID NO: 15783 - RNA, 88 nt, synthetic construct
  misc_feature 1..88: note = engineered ribonucleic acid scaffold (ERS) sequence
  source 1..88: mol_type = other RNA
actggcgcttctatctgattactctgagcgccagcaccagcgactatgtcgtatgggtaaagctccctattcggatggagcatcagag

SEQ ID NO: 15784 - RNA, 88 nt, synthetic construct
  misc_feature 1..88: note = engineered ribonucleic acid scaffold (ERS) sequence
  source 1..88: mol_type = other RNA
actggcgcttctatctgattactctgagcgccatgaccagcgactatgtcgtatggctaaagctccctattcggatggagcatcagag

SEQ ID NO: 15785 - RNA, 89 nt, synthetic construct
  misc_feature 1..89: note = engineered ribonucleic acid scaffold (ERS) sequence
  source 1..89: mol_type = other RNA
actggcgcttctatctgattactctgagcgccatgaccagcgactatgtcgtatgggctaaagctccctattcggatggagcatcagag

SEQ ID NO: 15786 - RNA, 88 nt, synthetic construct
  misc_feature 1..88: note = engineered ribonucleic acid scaffold (ERS) sequence
  source 1..88: mol_type = other RNA
actggcgcttctatctgattactctgagcgccatgaccagcgactatgtcgtatgggtaaagctccctattcggatggagcatcagag

SEQ ID NO: 15787 - RNA, 88 nt, synthetic construct
  misc_feature 1..88: note = engineered ribonucleic acid scaffold (ERS) sequence
  source 1..88: mol_type = other RNA
actggcgcttctatctgattactctgagcgccatccccagcgactatgtcgtatgggtaaagctccctattcggatggagcatcagag

SEQ ID NO: 15788 - RNA, 89 nt, synthetic construct
  misc_feature 1..89: note = engineered ribonucleic acid scaffold (ERS) sequence
  source 1..89: mol_type = other RNA
actggcgcttctatctgattactctgagcgccatcgccagcgactatgtcgtatggcgtaaagctccctattcggatggagcatcagag

SEQ ID NO: 15789 - RNA, 88 nt, synthetic construct
  misc_feature 1..88: note = engineered ribonucleic acid scaffold (ERS) sequence
  source 1..88: mol_type = other RNA
actggcgcttctatctgattactctgagcgccatcgccagcgactatgtcgtatgggtaaagctccctattcggatggagcatcagag

SEQ ID NO: 15790 - RNA, 88 nt, synthetic construct
  misc_feature 1..88: note = engineered ribonucleic acid scaffold (ERS) sequence
  source 1..88: mol_type = other RNA
actggcgcttctatctgattactctgagcgccatctccagcgactatgtcgtatgggtaaagctccctattcggatggagcatcagag

SEQ ID NO: 15791 - RNA, 88 nt, synthetic construct
  misc_feature 1..88: note = engineered ribonucleic acid scaffold (ERS) sequence
  source 1..88: mol_type = other RNA
actggcgcttctatctgattactctgagcgccatcacctgcgactatgtcgtaagggtaaagctccctattcggatggagcatcagag

SEQ ID NO: 15792 - RNA, 88 nt, synthetic construct
  misc_feature 1..88: note = engineered ribonucleic acid scaffold (ERS) sequence
  source 1..88: mol_type = other RNA
actggcgcttctatctgattactctgagcgccatcaccagagactatgtcttatgggtaaagctccctattcggatggagcatcagag

SEQ ID NO: 15793 - RNA, 88 nt, synthetic construct
  misc_feature 1..88: note = engineered ribonucleic acid scaffold (ERS) sequence
  source 1..88: mol_type = other RNA
actggcgcttctatctgattactctgagcgccatcaccagggactatgtcctatgggtaaagctccctattcggatggagcatcagag

SEQ ID NO: 15794 - RNA, 89 nt, synthetic construct
  misc_feature 1..89: note = engineered ribonucleic acid scaffold (ERS) sequence
  source 1..89: mol_type = other RNA
actggcgcttctatctgattactctgagcgccatcaccaggcactatgtgctattgggtaaagctccctattcggatggagcatcagag

SEQ ID NO: 15795 - RNA, 88 nt, synthetic construct
  misc_feature 1..88: note = engineered ribonucleic acid scaffold (ERS) sequence
  source 1..88: mol_type = other RNA
actggcgcttctatctgattactctgagcgccatcaccagccactatgtggtatgggtaaagctccctattcggatggagcatcagag

SEQ ID NO: 15796 - RNA, 88 nt, synthetic construct
  misc_feature 1..88: note = engineered ribonucleic acid scaffold (ERS) sequence
  source 1..88: mol_type = other RNA
actggcgcttctatctgattactctgagcgccatcaccagctactatgtagtatgggtaaagctccctattcggatggagcatcagag

SEQ ID NO: 15797 - RNA, 88 nt, synthetic construct
  misc_feature 1..88: note = engineered ribonucleic acid scaffold (ERS) sequence
  source 1..88: mol_type = other RNA
actggcgcttctatctgattactctgagcgccatcaccagcgattatgtcgtatgggtaaagctccctattcggatggagcatcagag

SEQ ID NO: 15798 - RNA, 88 nt, synthetic construct
  misc_feature 1..88: note = engineered ribonucleic acid scaffold (ERS) sequence
  source 1..88: mol_type = other RNA
actggcgcttctatctgattactctgagcgccatcaccagcgacgatgtcgtatgggtaaagctccctattcggatggagcatcagag

SEQ ID NO: 15799 - RNA, 88 nt, synthetic construct
  misc_feature 1..88: note = engineered ribonucleic acid scaffold (ERS) sequence
  source 1..88: mol_type = other RNA
actggcgcttctatctgattactctgagcgccatcaccagcgactctgtcgtatgggtaaagctccctattcggatggagcatcagag

SEQ ID NO: 15800 - RNA, 88 nt, synthetic construct
  misc_feature 1..88: note = engineered ribonucleic acid scaffold (ERS) sequence
  source 1..88: mol_type = other RNA
actggcgcttctatctgattactctgagcgccatcaccagcgactatgtcgtgtgggtaaagctccctattcggatggagcatcagag

SEQ ID NO: 15801 - RNA, 89 nt, synthetic construct
  misc_feature 1..89: note = engineered ribonucleic acid scaffold (ERS) sequence
  source 1..89: mol_type = other RNA
actggcgcttctatctgattactctgagcgccatcaccagcgactatgtcgtattgggtaaagctccctattcggatggagcatcagag

SEQ ID NO: 15802 - RNA, 89 nt, synthetic construct
  misc_feature 1..89: note = engineered ribonucleic acid scaffold (ERS) sequence
  source 1..89: mol_type = other RNA
actggcgcttctatctgattactctgagcgccatcaccagcgactatgtcgtatggagtaaagctccctattcggatggagcatcagag

SEQ ID NO: 15803 - RNA, 89 nt, synthetic construct
  misc_feature 1..89: note = engineered ribonucleic acid scaffold (ERS) sequence
  source 1..89: mol_type = other RNA
actggcgcttctatctgattactctgagcgccatcaccagcgactatgtcgtatggcgtaaagctccctattcggatggagcatcagag

SEQ ID NO: 15804 - RNA, 89 nt, synthetic construct
  misc_feature 1..89: note = engineered ribonucleic acid scaffold (ERS) sequence
  source 1..89: mol_type = other RNA
actggcgcttctatctgattactctgagcgccatcaccagcgactatgtcgtatggtgtaaagctccctattcggatggagcatcagag

SEQ ID NO: 15805 - RNA, 89 nt, synthetic construct
  misc_feature 1..89: note = engineered ribonucleic acid scaffold (ERS) sequence
  source 1..89: mol_type = other RNA
actggcgcttctatctgattactctgagcgccatcaccagcgactatgtcgtatgggctaaagctccctattcggatggagcatcagag

SEQ ID NO: 15806 - RNA, 86 nt, synthetic construct
  misc_feature 1..86: note = engineered ribonucleic acid scaffold (ERS) sequence
  source 1..86: mol_type = other RNA
actggcgcttctatctgattactctgagcgccatcaccagcgactatgtcgtatgggtagctccctattcggatggagcatcagag

SEQ ID NO: 15807 - RNA, 88 nt, synthetic construct
  misc_feature 1..88: note = engineered ribonucleic acid scaffold (ERS) sequence
  source 1..88: mol_type = other RNA
actggcgcttctatctgattactctgagcgccatcaccagcgactatgtcgtatgggtgaagctccctattcggatggagcatcagag

SEQ ID NO: 15808 - RNA, 88 nt, synthetic construct
  misc_feature 1..88: note = engineered ribonucleic acid scaffold (ERS) sequence
  source 1..88: mol_type = other RNA
actggcgcttctatctgattactctgagcgccatcaccagcgactatgtcgtatgggtagagctccctattcggatggagcatcagag

SEQ ID NO: 15809 - RNA, 94 nt, synthetic construct
  misc_feature 1..94: note = engineered ribonucleic acid scaffold (ERS) sequence
  source 1..94: mol_type = other RNA
actggcgcttctatctgattactctgagcgccaacaccagcgactatgtcgtatgggtaaagctccctcacagggatgtgagggagcatcagag

SEQ ID NO: 15810 - RNA, 94 nt, synthetic construct
  misc_feature 1..94: note = engineered ribonucleic acid scaffold (ERS) sequence
  source 1..94: mol_type = other RNA
actggcgcttctatctgattactctgagcgccagcaccagcgactatgtcgtatgggtaaagctccctcacagggatgtgagggagcatcagag

SEQ ID NO: 15811 - RNA, 94 nt, synthetic construct
  misc_feature 1..94: note = engineered ribonucleic acid scaffold (ERS) sequence
  source 1..94: mol_type = other RNA
actggcgcttctatctgattactctgagcgccatgaccagcgactatgtcgtatggctaaagctccctcacagggatgtgagggagcatcagag

SEQ ID NO: 15812 - RNA, 95 nt, synthetic construct
  misc_feature 1..95: note = engineered ribonucleic acid scaffold (ERS) sequence
  source 1..95: mol_type = other RNA
actggcgcttctatctgattactctgagcgccatgaccagcgactatgtcgtatgggctaaagctccctcacagggatgtgagggagcatcagag

SEQ ID NO: 15813 - RNA, 94 nt, synthetic construct
  misc_feature 1..94: note = engineered ribonucleic acid scaffold (ERS) sequence
  source 1..94: mol_type = other RNA
actggcgcttctatctgattactctgagcgccatgaccagcgactatgtcgtatgggtaaagctccctcacagggatgtgagggagcatcagag

SEQ ID NO: 15814 - RNA, 94 nt, synthetic construct
  misc_feature 1..94: note = engineered ribonucleic acid scaffold (ERS) sequence
  source 1..94: mol_type = other RNA
actggcgcttctatctgattactctgagcgccatccccagcgactatgtcgtatgggtaaagctccctcacagggatgtgagggagcatcagag

SEQ ID NO: 15815 - RNA, 95 nt, synthetic construct
  misc_feature 1..95: note = engineered ribonucleic acid scaffold (ERS) sequence
  source 1..95: mol_type = other RNA
actggcgcttctatctgattactctgagcgccatcgccagcgactatgtcgtatggcgtaaagctccctcacagggatgtgagggagcatcagag

SEQ ID NO: 15816 - RNA, 94 nt, synthetic construct
  misc_feature 1..94: note = engineered ribonucleic acid scaffold (ERS) sequence
  source 1..94: mol_type = other RNA
actggcgcttctatctgattactctgagcgccatcgccagcgactatgtcgtatgggtaaagctccctcacagggatgtgagggagcatcagag

SEQ ID NO: 15817 - RNA, 94 nt, synthetic construct
  misc_feature 1..94: note = engineered ribonucleic acid scaffold (ERS) sequence
  source 1..94: mol_type = other RNA
actggcgcttctatctgattactctgagcgccatctccagcgactatgtcgtatgggtaaagctccctcacagggatgtgagggagcatcagag

SEQ ID NO: 15818 - RNA, 94 nt, synthetic construct
  misc_feature 1..94: note = engineered ribonucleic acid scaffold (ERS) sequence
  source 1..94: mol_type = other RNA
actggcgcttctatctgattactctgagcgccatcacctgcgactatgtcgtaagggtaaagctccctcacagggatgtgagggagcatcagag

SEQ ID NO: 15819 - RNA, 94 nt, synthetic construct
  misc_feature 1..94: note = engineered ribonucleic acid scaffold (ERS) sequence
  source 1..94: mol_type = other RNA
actggcgcttctatctgattactctgagcgccatcaccagagactatgtcttatgggtaaagctccctcacagggatgtgagggagcatcagag

SEQ ID NO: 15820 - RNA, 94 nt, synthetic construct
  misc_feature 1..94: note = engineered ribonucleic acid scaffold (ERS) sequence
  source 1..94: mol_type = other RNA
actggcgcttctatctgattactctgagcgccatcaccagggactatgtcctatgggtaaagctccctcacagggatgtgagggagcatcagag

SEQ ID NO: 15821 - RNA, 95 nt, synthetic construct
  misc_feature 1..95: note = engineered ribonucleic acid scaffold (ERS) sequence
  source 1..95: mol_type = other RNA
actggcgcttctatctgattactctgagcgccatcaccaggcactatgtgctattgggtaaagctccctcacagggatgtgagggagcatcagag

SEQ ID NO: 15822 - RNA, 94 nt, synthetic construct
  misc_feature 1..94: note = engineered ribonucleic acid scaffold (ERS) sequence
  source 1..94: mol_type = other RNA
actggcgcttctatctgattactctgagcgccatcaccagccactatgtggtatgggtaaagctccctcacagggatgtgagggagcatcagag

SEQ ID NO: 15823 - RNA, 94 nt, synthetic construct
  misc_feature 1..94: note = engineered ribonucleic acid scaffold (ERS) sequence
  source 1..94: mol_type = other RNA
actggcgcttctatctgattactctgagcgccatcaccagctactatgtagtatgggtaaagctccctcacagggatgtgagggagcatcagag

SEQ ID NO: 15824 - RNA, 94 nt, synthetic construct
  misc_feature 1..94: note = engineered ribonucleic acid scaffold (ERS) sequence
  source 1..94: mol_type = other RNA
actggcgcttctatctgattactctgagcgccatcaccagcgattatgtcgtatgggtaaagctccctcacagggatgtgagggagcatcagag

SEQ ID NO: 15825 - RNA, 94 nt, synthetic construct
  misc_feature 1..94: note = engineered ribonucleic acid scaffold (ERS) sequence
  source 1..94: mol_type = other RNA
actggcgcttctatctgattactctgagcgccatcaccagcgacgatgtcgtatgggtaaagctccctcacagggatgtgagggagcatcagag

SEQ ID NO: 15826 - RNA, 94 nt, synthetic construct
  misc_feature 1..94: note = engineered ribonucleic acid scaffold (ERS) sequence
  source 1..94: mol_type = other RNA
actggcgcttctatctgattactctgagcgccatcaccagcgactctgtcgtatgggtaaagctccctcacagggatgtgagggagcatcagag

SEQ ID NO: 15827 - RNA, 94 nt, synthetic construct
  misc_feature 1..94: note = engineered ribonucleic acid scaffold (ERS) sequence
  source 1..94: mol_type = other RNA
actggcgcttctatctgattactctgagcgccatcaccagcgactatgtcgtgtgggtaaagctccctcacagggatgtgagggagcatcagag

SEQ ID NO: 15828 - RNA, 95 nt, synthetic construct
  misc_feature 1..95: note = engineered ribonucleic acid scaffold (ERS) sequence
  source 1..95: mol_type = other RNA
actggcgcttctatctgattactctgagcgccatcaccagcgactatgtcgtattgggtaaagctccctcacagggatgtgagggagcatcagag

SEQ ID NO: 15829 - RNA, 95 nt, synthetic construct
  misc_feature 1..95: note = engineered ribonucleic acid scaffold (ERS) sequence
  source 1..95: mol_type = other RNA
actggcgcttctatctgattactctgagcgccatcaccagcgactatgtcgtatggagtaaagctccctcacagggatgtgagggagcatcagag

SEQ ID NO: 15830 - RNA, 95 nt, synthetic construct
  misc_feature 1..95: note = engineered ribonucleic acid scaffold (ERS) sequence
  source 1..95: mol_type = other RNA
actggcgcttctatctgattactctgagcgccatcaccagcgactatgtcgtatggcgtaaagctccctcacagggatgtgagggagcatcagag

SEQ ID NO: 15831 - RNA, 95 nt, synthetic construct
  misc_feature 1..95: note = engineered ribonucleic acid scaffold (ERS) sequence
  source 1..95: mol_type = other RNA
actggcgcttctatctgattactctgagcgccatcaccagcgactatgtcgtatggtgtaaagctccctcacagggatgtgagggagcatcagag

SEQ ID NO: 15832 - RNA, 95 nt, synthetic construct
  misc_feature 1..95: note = engineered ribonucleic acid scaffold (ERS) sequence
  source 1..95: mol_type = other RNA
actggcgcttctatctgattactctgagcgccatcaccagcgactatgtcgtatgggctaaagctccctcacagggatgtgagggagcatcagag

SEQ ID NO: 15833 - RNA, 92 nt, synthetic construct
  misc_feature 1..92: note = engineered ribonucleic acid scaffold (ERS) sequence
  source 1..92: mol_type = other RNA
actggcgcttctatctgattactctgagcgccatcaccagcgactatgtcgtatgggtagctccctcacagggatgtgagggagcatcagag

SEQ ID NO: 15834 - RNA, 94 nt, synthetic construct
  misc_feature 1..94: note = engineered ribonucleic acid scaffold (ERS) sequence
  source 1..94: mol_type = other RNA
actggcgcttctatctgattactctgagcgccatcaccagcgactatgtcgtatgggtgaagctccctcacagggatgtgagggagcatcagag

SEQ ID NO: 15835 - RNA, 94 nt, synthetic construct
  misc_feature 1..94: note = engineered ribonucleic acid scaffold (ERS) sequence
  source 1..94: mol_type = other RNA
actggcgcttctatctgattactctgagcgccatcaccagcgactatgtcgtatgggtagagctccctcacagggatgtgagggagcatcagag

SEQ ID NO: 15836 - RNA, 93 nt, synthetic construct
  misc_feature 1..93: note = engineered ribonucleic acid scaffold (ERS) sequence
  source 1..93: mol_type = other RNA
actggcgcttctatctgattactctgagcgccaacaccagcgactatgtcgtatgggtaaagctccctcagctgcagtgagggagcatcagag

SEQ ID NO: 15837 - RNA, 93 nt, synthetic construct
  misc_feature 1..93: note = engineered ribonucleic acid scaffold (ERS) sequence
  source 1..93: mol_type = other RNA
actggcgcttctatctgattactctgagcgccagcaccagcgactatgtcgtatgggtaaagctccctcagctgcagtgagggagcatcagag

SEQ ID NO: 15838 - RNA, 93 nt, synthetic construct
  misc_feature 1..93: note = engineered ribonucleic acid scaffold (ERS) sequence
  source 1..93: mol_type = other RNA
actggcgcttctatctgattactctgagcgccatgaccagcgactatgtcgtatggctaaagctccctcagctgcagtgagggagcatcagag

SEQ ID NO: 15839 - RNA, 94 nt, synthetic construct
  misc_feature 1..94: note = engineered ribonucleic acid scaffold (ERS) sequence
  source 1..94: mol_type = other RNA
actggcgcttctatctgattactctgagcgccatgaccagcgactatgtcgtatgggctaaagctccctcagctgcagtgagggagcatcagag

SEQ ID NO: 15840 - RNA, 93 nt, synthetic construct
  misc_feature 1..93: note = engineered ribonucleic acid scaffold (ERS) sequence
  source 1..93: mol_type = other RNA
actggcgcttctatctgattactctgagcgccatgaccagcgactatgtcgtatgggtaaagctccctcagctgcagtgagggagcatcagag

SEQ ID NO: 15841 - RNA, 93 nt, synthetic construct
  misc_feature 1..93: note = engineered ribonucleic acid scaffold (ERS) sequence
  source 1..93: mol_type = other RNA
actggcgcttctatctgattactctgagcgccatccccagcgactatgtcgtatgggtaaagctccctcagctgcagtgagggagcatcagag

SEQ ID NO: 15842 - RNA, 94 nt, synthetic construct
  misc_feature 1..94: note = engineered ribonucleic acid scaffold (ERS) sequence
  source 1..94: mol_type = other RNA
actggcgcttctatctgattactctgagcgccatcgccagcgactatgtcgtatggcgtaaagctccctcagctgcagtgagggagcatcagag

SEQ ID NO: 15843 - RNA, 93 nt, synthetic construct
  misc_feature 1..93: note = engineered ribonucleic acid scaffold (ERS) sequence
  source 1..93: mol_type = other RNA
actggcgcttctatctgattactctgagcgccatcgccagcgactatgtcgtatgggtaaagctccctcagctgcagtgagggagcatcagag

SEQ ID NO: 15844 - RNA, 93 nt, synthetic construct
  misc_feature 1..93: note = engineered ribonucleic acid scaffold (ERS) sequence
  source 1..93: mol_type = other RNA
actggcgcttctatctgattactctgagcgccatctccagcgactatgtcgtatgggtaaagctccctcagctgcagtgagggagcatcagag

SEQ ID NO: 15845 - RNA, 93 nt, synthetic construct
  misc_feature 1..93: note = engineered ribonucleic acid scaffold (ERS) sequence
  source 1..93: mol_type = other RNA
actggcgcttctatctgattactctgagcgccatcacctgcgactatgtcgtaagggtaaagctccctcagctgcagtgagggagcatcagag

SEQ ID NO: 15846 - RNA, 93 nt, synthetic construct
  misc_feature 1..93: note = engineered ribonucleic acid scaffold (ERS) sequence
  source 1..93: mol_type = other RNA
actggcgcttctatctgattactctgagcgccatcaccagagactatgtcttatgggtaaagctccctcagctgcagtgagggagcatcagag

SEQ ID NO: 15847 - RNA, 93 nt, synthetic construct
  misc_feature 1..93: note = engineered ribonucleic acid scaffold (ERS) sequence
  source 1..93: mol_type = other RNA
actggcgcttctatctgattactctgagcgccatcaccagggactatgtcctatgggtaaagctccctcagctgcagtgagggagcatcagag

SEQ ID NO: 15848 - RNA, 94 nt, synthetic construct
  misc_feature 1..94: note = engineered ribonucleic acid scaffold (ERS) sequence
  source 1..94: mol_type = other RNA
actggcgcttctatctgattactctgagcgccatcaccaggcactatgtgctattgggtaaagctccctcagctgcagtgagggagcatcagag

SEQ ID NO: 15849 - RNA, 93 nt, synthetic construct
  misc_feature 1..93: note = engineered ribonucleic acid scaffold (ERS) sequence
  source 1..93: mol_type = other RNA
actggcgcttctatctgattactctgagcgccatcaccagccactatgtggtatgggtaaagctccctcagctgcagtgagggagcatcagag

SEQ ID NO: 15850 - RNA, 93 nt, synthetic construct
  misc_feature 1..93: note = engineered ribonucleic acid scaffold (ERS) sequence
  source 1..93: mol_type = other RNA
actggcgcttctatctgattactctgagcgccatcaccagctactatgtagtatgggtaaagctccctcagctgcagtgagggagcatcagag

SEQ ID NO: 15851 - RNA, 93 nt, synthetic construct
  misc_feature 1..93: note = engineered ribonucleic acid scaffold (ERS) sequence
  source 1..93: mol_type = other RNA
actggcgcttctatctgattactctgagcgccatcaccagcgattatgtcgtatgggtaaagctccctcagctgcagtgagggagcatcagag

SEQ ID NO: 15852 - RNA, 93 nt, synthetic construct
  misc_feature 1..93: note = engineered ribonucleic acid scaffold (ERS) sequence
  source 1..93: mol_type = other RNA
actggcgcttctatctgattactctgagcgccatcaccagcgacgatgtcgtatgggtaaagctccctcagctgcagtgagggagcatcagag

SEQ ID NO: 15853 - RNA, 93 nt, synthetic construct
  misc_feature 1..93: note = engineered ribonucleic acid scaffold (ERS) sequence
  source 1..93: mol_type = other RNA
actggcgcttctatctgattactctgagcgccatcaccagcgactctgtcgtatgggtaaagctccctcagctgcagtgagggagcatcagag

SEQ ID NO: 15854 - RNA, 93 nt, synthetic construct
  misc_feature 1..93: note = engineered ribonucleic acid scaffold (ERS) sequence
  source 1..93: mol_type = other RNA
actggcgcttctatctgattactctgagcgccatcaccagcgactatgtcgtgtgggtaaagctccctcagctgcagtgagggagcatcagag

SEQ ID NO: 15855 - RNA, 94 nt, synthetic construct
  misc_feature 1..94: note = engineered ribonucleic acid scaffold (ERS) sequence
  source 1..94: mol_type = other RNA
actggcgcttctatctgattactctgagcgccatcaccagcgactatgtcgtattgggtaaagctccctcagctgcagtgagggagcatcagag

SEQ ID NO: 15856 - RNA, 94 nt, synthetic construct
  misc_feature 1..94: note = engineered ribonucleic acid scaffold (ERS) sequence
  source 1..94: mol_type = other RNA
actggcgcttctatctgattactctgagcgccatcaccagcgactatgtcgtatggagtaaagctccctcagctgcagtgagggagcatcagag

SEQ ID NO: 15857 - RNA, 94 nt, synthetic construct
  misc_feature 1..94: note = engineered ribonucleic acid scaffold (ERS) sequence
  source 1..94: mol_type = other RNA
actggcgcttctatctgattactctgagcgccatcaccagcgactatgtcgtatggcgtaaagctccctcagctgcagtgagggagcatcagag

SEQ ID NO: 15858 - RNA, 94 nt, synthetic construct
  misc_feature 1..94: note = engineered ribonucleic acid scaffold (ERS) sequence
  source 1..94: mol_type = other RNA
actggcgcttctatctgattactctgagcgccatcaccagcgactatgtcgtatggtgtaaagctccctcagctgcagtgagggagcatcagag

SEQ ID NO: 15859 - RNA, 94 nt, synthetic construct
  misc_feature 1..94: note = engineered ribonucleic acid scaffold (ERS) sequence
  source 1..94: mol_type = other RNA
actggcgcttctatctgattactctgagcgccatcaccagcgactatgtcgtatgggctaaagctccctcagctgcagtgagggagcatcagag

SEQ ID NO: 15860 - RNA, 91 nt, synthetic construct
  misc_feature 1..91: note = engineered ribonucleic acid scaffold (ERS) sequence
  source 1..91: mol_type = other RNA
actggcgcttctatctgattactctgagcgccatcaccagcgactatgtcgtatgggtagctccctcagctgcagtgagggagcatcagag

SEQ ID NO: 15861 - RNA, 93 nt, synthetic construct
  misc_feature 1..93: note = engineered ribonucleic acid scaffold (ERS) sequence
  source 1..93: mol_type = other RNA
actggcgcttctatctgattactctgagcgccatcaccagcgactatgtcgtatgggtgaagctccctcagctgcagtgagggagcatcagag

SEQ ID NO: 15862 - RNA, 93 nt, synthetic construct
  misc_feature 1..93: note = engineered ribonucleic acid scaffold (ERS) sequence
  source 1..93: mol_type = other RNA
actggcgcttctatctgattactctgagcgccatcaccagcgactatgtcgtatgggtagagctccctcagctgcagtgagggagcatcagag

SEQ ID NO: 15863 - RNA, 88 nt, synthetic construct
  misc_feature 1..88: note = engineered ribonucleic acid scaffold (ERS) sequence
  source 1..88: mol_type = other RNA
actggcgcttctatctgattactctgagcgccaacaccagcgactatgtcgtatgggtaaagctccctcataggagggagcatcagag

SEQ ID NO: 15864 - RNA, 88 nt, synthetic construct
  misc_feature 1..88: note = engineered ribonucleic acid scaffold (ERS) sequence
  source 1..88: mol_type = other RNA
actggcgcttctatctgattactctgagcgccagcaccagcgactatgtcgtatgggtaaagctccctcataggagggagcatcagag

SEQ ID NO: 15865 - RNA, 88 nt, synthetic construct
  misc_feature 1..88: note = engineered ribonucleic acid scaffold (ERS) sequence
  source 1..88: mol_type = other RNA
actggcgcttctatctgattactctgagcgccatgaccagcgactatgtcgtatggctaaagctccctcataggagggagcatcagag

SEQ ID NO: 15866 - RNA, 89 nt, synthetic construct
  misc_feature 1..89: note = engineered ribonucleic acid scaffold (ERS) sequence
  source 1..89: mol_type = other RNA
actggcgcttctatctgattactctgagcgccatgaccagcgactatgtcgtatgggctaaagctccctcataggagggagcatcagag

SEQ ID NO: 15867 - RNA, 88 nt, synthetic construct
  misc_feature 1..88: note = engineered ribonucleic acid scaffold (ERS) sequence
  source 1..88: mol_type = other RNA
actggcgcttctatctgattactctgagcgccatgaccagcgactatgtcgtatgggtaaagctccctcataggagggagcatcagag

SEQ ID NO: 15868 - RNA, 88 nt, synthetic construct
  misc_feature 1..88: note = engineered ribonucleic acid scaffold (ERS) sequence
  source 1..88: mol_type = other RNA
actggcgcttctatctgattactctgagcgccatccccagcgactatgtcgtatgggtaaagctccctcataggagggagcatcagag

SEQ ID NO: 15869 - RNA, 89 nt, synthetic construct
  misc_feature 1..89: note = engineered ribonucleic acid scaffold (ERS) sequence
  source 1..89: mol_type = other RNA
actggcgcttctatctgattactctgagcgccatcgccagcgactatgtcgtatggcgtaaagctccctcataggagggagcatcagag

SEQ ID NO: 15870 - RNA, 88 nt, synthetic construct
  misc_feature 1..88: note = engineered ribonucleic acid scaffold (ERS) sequence
  source 1..88: mol_type = other RNA
actggcgcttctatctgattactctgagcgccatcgccagcgactatgtcgtatgggtaaagctccctcataggagggagcatcagag

SEQ ID NO: 15871 - RNA, 88 nt, synthetic construct
  misc_feature 1..88: note = engineered ribonucleic acid scaffold (ERS) sequence
  source 1..88: mol_type = other RNA
actggcgcttctatctgattactctgagcgccatctccagcgactatgtcgtatgggtaaagctccctcataggagggagcatcagag

SEQ ID NO: 15872 - RNA, 88 nt, synthetic construct
  misc_feature 1..88: note = engineered ribonucleic acid scaffold (ERS) sequence
  source 1..88: mol_type = other RNA
actggcgcttctatctgattactctgagcgccatcacctgcgactatgtcgtaagggtaaagctccctcataggagggagcatcagag

SEQ ID NO: 15873 - RNA, 88 nt, synthetic construct
  misc_feature 1..88: note = engineered ribonucleic acid scaffold (ERS) sequence
  source 1..88: mol_type = other RNA
actggcgcttctatctgattactctgagcgccatcaccagagactatgtcttatgggtaaagctccctcataggagggagcatcagag

SEQ ID NO: 15874 - RNA, 88 nt, synthetic construct
  misc_feature 1..88: note = engineered ribonucleic acid scaffold (ERS) sequence
  source 1..88: mol_type = other RNA
actggcgcttctatctgattactctgagcgccatcaccagggactatgtcctatgggtaaagctccctcataggagggagcatcagag

SEQ ID NO: 15875 - RNA, 89 nt, synthetic construct
  misc_feature 1..89: note = engineered ribonucleic acid scaffold (ERS) sequence
  source 1..89: mol_type = other RNA
actggcgcttctatctgattactctgagcgccatcaccaggcactatgtgctattgggtaaagctccctcataggagggagcatcagag

SEQ ID NO: 15876 - RNA, 88 nt, synthetic construct
  misc_feature 1..88: note = engineered ribonucleic acid scaffold (ERS) sequence
  source 1..88: mol_type = other RNA
actggcgcttctatctgattactctgagcgccatcaccagccactatgtggtatgggtaaagctccctcataggagggagcatcagag

SEQ ID NO: 15877 - RNA, 88 nt, synthetic construct
  misc_feature 1..88: note = engineered ribonucleic acid scaffold (ERS) sequence
  source 1..88: mol_type = other RNA
actggcgcttctatctgattactctgagcgccatcaccagctactatgtagtatgggtaaagctccctcataggagggagcatcagag

SEQ ID NO: 15878 - RNA, 88 nt, synthetic construct
  misc_feature 1..88: note = engineered ribonucleic acid scaffold (ERS) sequence
  source 1..88: mol_type = other RNA
actggcgcttctatctgattactctgagcgccatcaccagcgattatgtcgtatgggtaaagctccctcataggagggagcatcagag

SEQ ID NO: 15879 - RNA, 88 nt, synthetic construct
  misc_feature 1..88: note = engineered ribonucleic acid scaffold (ERS) sequence
  source 1..88: mol_type = other RNA
actggcgcttctatctgattactctgagcgccatcaccagcgacgatgtcgtatgggtaaagctccctcataggagggagcatcagag

SEQ ID NO: 15880 - RNA, 88 nt, synthetic construct
  misc_feature 1..88: note = engineered ribonucleic acid scaffold (ERS) sequence
  source 1..88: mol_type = other RNA
actggcgcttctatctgattactctgagcgccatcaccagcgactctgtcgtatgggtaaagctccctcataggagggagcatcagag

SEQ ID NO: 15881 - RNA, 88 nt, synthetic construct
  misc_feature 1..88: note = engineered ribonucleic acid scaffold (ERS) sequence
  source 1..88: mol_type = other RNA
actggcgcttctatctgattactctgagcgccatcaccagcgactatgtcgtgtgggtaaagctccctcataggagggagcatcagag

SEQ ID NO: 15882 - RNA, 89 nt, synthetic construct
  misc_feature 1..89: note = engineered ribonucleic acid scaffold (ERS) sequence
  source 1..89: mol_type = other RNA
actggcgcttctatctgattactctgagcgccatcaccagcgactatgtcgtattgggtaaagctccctcataggagggagcatcagag

SEQ ID NO: 15883 - RNA, 89 nt, synthetic construct
  misc_feature 1..89: note = engineered ribonucleic acid scaffold (ERS) sequence
  source 1..89: mol_type = other RNA
actggcgcttctatctgattactctgagcgccatcaccagcgactatgtcgtatggagtaaagctccctcataggagggagcatcagag

SEQ ID NO: 15884 - RNA, 89 nt, synthetic construct
  misc_feature 1..89: note = engineered ribonucleic acid scaffold (ERS) sequence
  source 1..89: mol_type = other RNA
actggcgcttctatctgattactctgagcgccatcaccagcgactatgtcgtatggcgtaaagctccctcataggagggagcatcagag

SEQ ID NO: 15885 - RNA, 89 nt, synthetic construct
  misc_feature 1..89: note = engineered ribonucleic acid scaffold (ERS) sequence
  source 1..89: mol_type = other RNA
actggcgcttctatctgattactctgagcgccatcaccagcgactatgtcgtatggtgtaaagctccctcataggagggagcatcagag

SEQ ID NO: 15886 - RNA, 89 nt, synthetic construct
  misc_feature 1..89: note = engineered ribonucleic acid scaffold (ERS) sequence
  source 1..89: mol_type = other RNA
actggcgcttctatctgattactctgagcgccatcaccagcgactatgtcgtatgggctaaagctccctcataggagggagcatcagag

SEQ ID NO: 15887 - RNA, 86 nt, synthetic construct
  misc_feature 1..86: note = engineered ribonucleic acid scaffold (ERS) sequence
  source 1..86: mol_type = other RNA
actggcgcttctatctgattactctgagcgccatcaccagcgactatgtcgtatgggtagctccctcataggagggagcatcagag

SEQ ID NO: 15888 - RNA, 88 nt, synthetic construct
  misc_feature 1..88: note = engineered ribonucleic acid scaffold (ERS) sequence
  source 1..88: mol_type = other RNA
actggcgcttctatctgattactctgagcgccatcaccagcgactatgtcgtatgggtgaagctccctcataggagggagcatcagag

SEQ ID NO: 15889 - RNA, 88 nt, synthetic construct
  misc_feature 1..88: note = engineered ribonucleic acid scaffold (ERS) sequence
  source 1..88: mol_type = other RNA
actggcgcttctatctgattactctgagcgccatcaccagcgactatgtcgtatgggtagagctccctcataggagggagcatcagag

SEQ ID NO: 15890 - RNA, 89 nt, synthetic construct
  misc_feature 1..89: note = engineered ribonucleic acid scaffold (ERS) sequence
  source 1..89: mol_type = other RNA
actggcgcttctatctgattactctgagcgccaacaccagcgactatgtcgtatgggtaaagctccctcttcaggagggagcatcagag

SEQ ID NO: 15891 - RNA, 89 nt, synthetic construct
  misc_feature 1..89: note = engineered ribonucleic acid scaffold (ERS) sequence
  source 1..89: mol_type = other RNA
actggcgcttctatctgattactctgagcgccagcaccagcgactatgtcgtatgggtaaagctccctcttcaggagggagcatcagag

SEQ ID NO: 15892 - RNA, 89 nt, synthetic construct
  misc_feature 1..89: note = engineered ribonucleic acid scaffold (ERS) sequence
  source 1..89: mol_type = other RNA
actggcgcttctatctgattactctgagcgccatgaccagcgactatgtcgtatggctaaagctccctcttcaggagggagcatcagag

SEQ ID NO: 15893 - RNA, 90 nt, synthetic construct
  misc_feature 1..90: note = engineered ribonucleic acid scaffold (ERS) sequence
  source 1..90: mol_type = other RNA
actggcgcttctatctgattactctgagcgccatgaccagcgactatgtcgtatgggctaaagctccctcttcaggagggagcatcagag

SEQ ID NO: 15894 - RNA, 89 nt, synthetic construct
  misc_feature 1..89: note = engineered ribonucleic acid scaffold (ERS) sequence
  source 1..89: mol_type = other RNA
actggcgcttctatctgattactctgagcgccatgaccagcgactatgtcgtatgggtaaagctccctcttcaggagggagcatcagag

SEQ ID NO: 15895 - RNA, 89 nt, synthetic construct
  misc_feature 1..89: note = engineered ribonucleic acid scaffold (ERS) sequence
  source 1..89: mol_type = other RNA
actggcgcttctatctgattactctgagcgccatccccagcgactatgtcgtatgggtaaagctccctcttcaggagggagcatcagag

SEQ ID NO: 15896 - RNA, 90 nt, synthetic construct
  misc_feature 1..90: note = engineered ribonucleic acid scaffold (ERS) sequence
  source 1..90: mol_type = other RNA
actggcgcttctatctgattactctgagcgccatcgccagcgactatgtcgtatggcgtaaagctccctcttcaggagggagcatcagag

SEQ ID NO: 15897 - RNA, 89 nt, synthetic construct
  misc_feature 1..89: note = engineered ribonucleic acid scaffold (ERS) sequence
  source 1..89: mol_type = other RNA
actggcgcttctatctgattactctgagcgccatcgccagcgactatgtcgtatgggtaaagctccctcttcaggagggagcatcagag

SEQ ID NO: 15898 - RNA, 89 nt, synthetic construct
  misc_feature 1..89: note = engineered ribonucleic acid scaffold (ERS) sequence
  source 1..89: mol_type = other RNA
actggcgcttctatctgattactctgagcgccatctccagcgactatgtcgtatgggtaaagctccctcttcaggagggagcatcagag

SEQ ID NO: 15899 - RNA, 89 nt, synthetic construct
  misc_feature 1..89: note = engineered ribonucleic acid scaffold (ERS) sequence
  source 1..89: mol_type = other RNA
actggcgcttctatctgattactctgagcgccatcacctgcgactatgtcgtaagggtaaagctccctcttcaggagggagcatcagag

SEQ ID NO: 15900 - RNA, 89 nt, synthetic construct
  misc_feature 1..89: note = engineered ribonucleic acid scaffold (ERS) sequence
  source 1..89: mol_type = other RNA
actggcgcttctatctgattactctgagcgccatcaccagagactatgtcttatgggtaaagctccctcttcaggagggagcatcagag

SEQ ID NO: 15901 - RNA, 89 nt, synthetic construct
  misc_feature 1..89: note = engineered ribonucleic acid scaffold (ERS) sequence
  source 1..89: mol_type = other RNA
actggcgcttctatctgattactctgagcgccatcaccagggactatgtcctatgggtaaagctccctcttcaggagggagcatcagag

SEQ ID NO: 15902 - RNA, 90 nt, synthetic construct
  misc_feature 1..90: note = engineered ribonucleic acid scaffold (ERS) sequence
  source 1..90: mol_type = other RNA
actggcgcttctatctgattactctgagcgccatcaccaggcactatgtgctattgggtaaagctccctcttcaggagggagcatcagag

SEQ ID NO: 15903 - RNA, 89 nt, synthetic construct
  misc_feature 1..89: note = engineered ribonucleic acid scaffold (ERS) sequence
  source 1..89: mol_type = other RNA
actggcgcttctatctgattactctgagcgccatcaccagccactatgtggtatgggtaaagctccctcttcaggagggagcatcagag

SEQ ID NO: 15904 - RNA, 89 nt, synthetic construct
  misc_feature 1..89: note = engineered ribonucleic acid scaffold (ERS) sequence
  source 1..89: mol_type = other RNA
actggcgcttctatctgattactctgagcgccatcaccagctactatgtagtatgggtaaagctccctcttcaggagggagcatcagag

SEQ ID NO: 15905 - RNA, 89 nt, synthetic construct
  misc_feature 1..89: note = engineered ribonucleic acid scaffold (ERS) sequence
  source 1..89: mol_type = other RNA
actggcgcttctatctgattactctgagcgccatcaccagcgattatgtcgtatgggtaaagctccctcttcaggagggagcatcagag

SEQ ID NO: 15906 - RNA, 89 nt, synthetic construct
  misc_feature 1..89: note = engineered ribonucleic acid scaffold (ERS) sequence
  source 1..89: mol_type = other RNA
actggcgcttctatctgattactctgagcgccatcaccagcgacgatgtcgtatgggtaaagctccctcttcaggagggagcatcagag

SEQ ID NO: 15907 - RNA, 89 nt, synthetic construct
  misc_feature 1..89: note = engineered ribonucleic acid scaffold (ERS) sequence
  source 1..89: mol_type = other RNA
actggcgcttctatctgattactctgagcgccatcaccagcgactctgtcgtatgggtaaagctccctcttcaggagggagcatcagag

SEQ ID NO: 15908 - RNA, 89 nt, synthetic construct
  misc_feature 1..89: note = engineered ribonucleic acid scaffold (ERS) sequence
  source 1..89: mol_type = other RNA
actggcgcttctatctgattactctgagcgccatcaccagcgactatgtcgtgtgggtaaagctccctcttcaggagggagcatcagag

SEQ ID NO: 15909 - RNA, 90 nt, synthetic construct
  misc_feature 1..90: note = engineered ribonucleic acid scaffold (ERS) sequence
  source 1..90: mol_type = other RNA
actggcgcttctatctgattactctgagcgccatcaccagcgactatgtcgtattgggtaaagctccctcttcaggagggagcatcagag

SEQ ID NO: 15910 - RNA, 90 nt, synthetic construct
  misc_feature 1..90: note = engineered ribonucleic acid scaffold (ERS) sequence
  source 1..90: mol_type = other RNA
actggcgcttctatctgattactctgagcgccatcaccagcgactatgtcgtatggagtaaagctccctcttcaggagggagcatcagag

SEQ ID NO: 15911 - RNA, 90 nt, synthetic construct
  misc_feature 1..90: note = engineered ribonucleic acid scaffold (ERS) sequence
  source 1..90: mol_type = other RNA
actggcgcttctatctgattactctgagcgccatcaccagcgactatgtcgtatggcgtaaagctccctcttcaggagggagcatcagag

SEQ ID NO: 15912 - RNA, 90 nt, synthetic construct
  misc_feature 1..90: note = engineered ribonucleic acid scaffold (ERS) sequence
  source 1..90: mol_type = other RNA
actggcgcttctatctgattactctgagcgccatcaccagcgactatgtcgtatggtgtaaagctccctcttcaggagggagcatcagag

SEQ ID NO: 15913 - RNA, 90 nt, synthetic construct
  misc_feature 1..90: note = engineered ribonucleic acid scaffold (ERS) sequence
  source 1..90: mol_type = other RNA
actggcgcttctatctgattactctgagcgccatcaccagcgactatgtcgtatgggctaaagctccctcttcaggagggagcatcagag

SEQ ID NO: 15914 - RNA, 87 nt, synthetic construct
  misc_feature 1..87: note = engineered ribonucleic acid scaffold (ERS) sequence
  source 1..87: mol_type = other RNA
actggcgcttctatctgattactctgagcgccatcaccagcgactatgtcgtatgggtagctccctcttcaggagggagcatcagag

SEQ ID NO: 15915 - RNA, 89 nt, synthetic construct
  misc_feature 1..89: note = engineered ribonucleic acid scaffold (ERS) sequence
  source 1..89: mol_type = other RNA
actggcgcttctatctgattactctgagcgccatcaccagcgactatgtcgtatgggtgaagctccctcttcaggagggagcatcagag

SEQ ID NO: 15916 - RNA, 89 nt, synthetic construct
  misc_feature 1..89: note = engineered ribonucleic acid scaffold (ERS) sequence
  source 1..89: mol_type = other RNA
actggcgcttctatctgattactctgagcgccatcaccagcgactatgtcgtatgggtagagctccctcttcaggagggagcatcagag

SEQ ID NO: 15917 - RNA, 88 nt, synthetic construct
  misc_feature 1..88: note = engineered ribonucleic acid scaffold (ERS) sequence
  source 1..88: mol_type = other RNA
actggcgcttctatctgattactctgagcgccaacaccagcgactatgtcgtatgggtaaagctccctcttcggagagtgcatcagag

SEQ ID NO: 15918 - RNA, 88 nt, synthetic construct
  misc_feature 1..88: note = engineered ribonucleic acid scaffold (ERS) sequence
  source 1..88: mol_type = other RNA
actggcgcttctatctgattactctgagcgccagcaccagcgactatgtcgtatgggtaaagctccctcttcggagagtgcatcagag

SEQ ID NO: 15919 - RNA, 88 nt, synthetic construct
  misc_feature 1..88: note = engineered ribonucleic acid scaffold (ERS) sequence
  source 1..88: mol_type = other RNA
actggcgcttctatctgattactctgagcgccatgaccagcgactatgtcgtatggctaaagctccctcttcggagagtgcatcagag

SEQ ID NO: 15920 - RNA, 89 nt, synthetic construct
  misc_feature 1..89: note = engineered ribonucleic acid scaffold (ERS) sequence
  source 1..89: mol_type = other RNA
actggcgcttctatctgattactctgagcgccatgaccagcgactatgtcgtatgggctaaagctccctcttcggagagtgcatcagag

SEQ ID NO: 15921 - RNA, 88 nt, synthetic construct
  misc_feature 1..88: note = engineered ribonucleic acid scaffold (ERS) sequence
  source 1..88: mol_type = other RNA
actggcgcttctatctgattactctgagcgccatgaccagcgactatgtcgtatgggtaaagctccctcttcggagagtgcatcagag

SEQ ID NO: 15922 - RNA, 88 nt, synthetic construct
  misc_feature 1..88: note = engineered ribonucleic acid scaffold (ERS) sequence
  source 1..88: mol_type = other RNA
actggcgcttctatctgattactctgagcgccatccccagcgactatgtcgtatgggtaaagctccctcttcggagagtgcatcagag

SEQ ID NO: 15923 - RNA, 89 nt, synthetic construct
  misc_feature 1..89: note = engineered ribonucleic acid scaffold (ERS) sequence
  source 1..89: mol_type = other RNA
actggcgcttctatctgattactctgagcgccatcgccagcgactatgtcgtatggcgtaaagctccctcttcggagagtgcatcagag

SEQ ID NO: 15924 - RNA, 88 nt, synthetic construct
  misc_feature 1..88: note = engineered ribonucleic acid scaffold (ERS) sequence
  source 1..88: mol_type = other RNA
actggcgcttctatctgattactctgagcgccatcgccagcgactatgtcgtatgggtaaagctccctcttcggagagtgcatcagag

SEQ ID NO: 15925 - RNA, 88 nt, synthetic construct
  misc_feature 1..88: note = engineered ribonucleic acid scaffold (ERS) sequence
  source 1..88: mol_type = other RNA
actggcgcttctatctgattactctgagcgccatctccagcgactatgtcgtatgggtaaagctccctcttcggagagtgcatcagag

SEQ ID NO: 15926 - RNA, 88 nt, synthetic construct
  misc_feature 1..88: note = engineered ribonucleic acid scaffold (ERS) sequence
  source 1..88: mol_type = other RNA
actggcgcttctatctgattactctgagcgccatcacctgcgactatgtcgtaagggtaaagctccctcttcggagagtgcatcagag

SEQ ID NO: 15927 - RNA, 88 nt, synthetic construct
  misc_feature 1..88: note = engineered ribonucleic acid scaffold (ERS) sequence
  source 1..88: mol_type = other RNA
actggcgcttctatctgattactctgagcgccatcaccagagactatgtcttatgggtaaagctccctcttcggagagtgcatcagag

SEQ ID NO: 15928 - RNA, 88 nt, synthetic construct
  misc_feature 1..88: note = engineered ribonucleic acid scaffold (ERS) sequence
  source 1..88: mol_type = other RNA
actggcgcttctatctgattactctgagcgccatcaccagggactatgtcctatgggtaaagctccctcttcggagagtgcatcagag

SEQ ID NO: 15929 - RNA, 89 nt, synthetic construct
  misc_feature 1..89: note = engineered ribonucleic acid scaffold (ERS) sequence
  source 1..89: mol_type = other RNA
actggcgcttctatctgattactctgagcgccatcaccaggcactatgtgctattgggtaaagctccctcttcggagagtgcatcagag

SEQ ID NO: 15930 - RNA, 88 nt, synthetic construct
  misc_feature 1..88: note = engineered ribonucleic acid scaffold (ERS) sequence
  source 1..88: mol_type = other RNA
actggcgcttctatctgattactctgagcgccatcaccagccactatgtggtatgggtaaagctccctcttcggagagtgcatcagag

SEQ ID NO: 15931 - RNA, 88 nt, synthetic construct
  misc_feature 1..88: note = engineered ribonucleic acid scaffold (ERS) sequence
  source 1..88: mol_type = other RNA
actggcgcttctatctgattactctgagcgccatcaccagctactatgtagtatgggtaaagctccctcttcggagagtgcatcagag

SEQ ID NO: 15932 - RNA, 88 nt, synthetic construct
  misc_feature 1..88: note = engineered ribonucleic acid scaffold (ERS) sequence
  source 1..88: mol_type = other RNA
actggcgcttctatctgattactctgagcgccatcaccagcgattatgtcgtatgggtaaagctccctcttcggagagtgcatcagag

SEQ ID NO: 15933 - RNA, 88 nt, synthetic construct
  misc_feature 1..88: note = engineered ribonucleic acid scaffold (ERS) sequence
  source 1..88: mol_type = other RNA
actggcgcttctatctgattactctgagcgccatcaccagcgacgatgtcgtatgggtaaagctccctcttcggagagtgcatcagag

SEQ ID NO: 15934 - RNA, 88 nt, synthetic construct
  misc_feature 1..88: note = engineered ribonucleic acid scaffold (ERS) sequence
  source 1..88: mol_type = other RNA
actggcgcttctatctgattactctgagcgccatcaccagcgactctgtcgtatgggtaaagctccctcttcggagagtgcatcagag

SEQ ID NO: 15935 - RNA, 88 nt, synthetic construct
  misc_feature 1..88: note = engineered ribonucleic acid scaffold (ERS) sequence
  source 1..88: mol_type = other RNA
actggcgcttctatctgattactctgagcgccatcaccagcgactatgtcgtgtgggtaaagctccctcttcggagagtgcatcagag

SEQ ID NO: 15936 - RNA, 89 nt, synthetic construct
  misc_feature 1..89: note = engineered ribonucleic acid scaffold (ERS) sequence
  source 1..89: mol_type = other RNA
actggcgcttctatctgattactctgagcgccatcaccagcgactatgtcgtattgggtaaagctccctcttcggagagtgcatcagag

SEQ ID NO: 15937 - RNA, 89 nt, synthetic construct
  misc_feature 1..89: note = engineered ribonucleic acid scaffold (ERS) sequence
  source 1..89: mol_type = other RNA
actggcgcttctatctgattactctgagcgccatcaccagcgactatgtcgtatggagtaaagctccctcttcggagagtgcatcagag

SEQ ID NO: 15938 - RNA, 89 nt, synthetic construct
  misc_feature 1..89: note = engineered ribonucleic acid scaffold (ERS) sequence
  source 1..89: mol_type = other RNA
actggcgcttctatctgattactctgagcgccatcaccagcgactatgtcgtatggcgtaaagctccctcttcggagagtgcatcagag

SEQ ID NO: 15939 - RNA, 89 nt, synthetic construct
  misc_feature 1..89: note = engineered ribonucleic acid scaffold (ERS) sequence
  source 1..89: mol_type = other RNA
actggcgcttctatctgattactctgagcgccatcaccagcgactatgtcgtatggtgtaaagctccctcttcggagagtgcatcagag

SEQ ID NO: 15940 - RNA, 89 nt, synthetic construct
  misc_feature 1..89: note = engineered ribonucleic acid scaffold (ERS) sequence
  source 1..89: mol_type = other RNA
actggcgcttctatctgattactctgagcgccatcaccagcgactatgtcgtatgggctaaagctccctcttcggagagtgcatcagag

SEQ ID NO: 15941 - RNA, 86 nt, synthetic construct
  misc_feature 1..86: note = engineered ribonucleic acid scaffold (ERS) sequence
  source 1..86: mol_type = other RNA
actggcgcttctatctgattactctgagcgccatcaccagcgactatgtcgtatgggtagctccctcttcggagagtgcatcagag

SEQ ID NO: 15942 - RNA, 88 nt, synthetic construct
  misc_feature 1..88: note = engineered ribonucleic acid scaffold (ERS) sequence
  source 1..88: mol_type = other RNA
actggcgcttctatctgattactctgagcgccatcaccagcgactatgtcgtatgggtgaagctccctcttcggagagtgcatcagag

SEQ ID NO: 15943 - RNA, 88 nt, synthetic construct
  misc_feature 1..88: note = engineered ribonucleic acid scaffold (ERS) sequence
  source 1..88: mol_type = other RNA
actggcgcttctatctgattactctgagcgccatcaccagcgactatgtcgtatgggtagagctccctcttcggagagtgcatcagag

SEQ ID NO: 15944 - RNA, 88 nt, synthetic construct
  misc_feature 1..88: note = engineered ribonucleic acid scaffold (ERS) sequence
  source 1..88: mol_type = other RNA
actggcgcttctatctgattactctgagcgccaacaccagcgactatgtcgtatgggtaaagctccctcttcggaggaggcatcagag

SEQ ID NO: 15945 - RNA, 88 nt, synthetic construct
  misc_feature 1..88: note = engineered ribonucleic acid scaffold (ERS) sequence
  source 1..88: mol_type = other RNA
actggcgcttctatctgattactctgagcgccagcaccagcgactatgtcgtatgggtaaagctccctcttcggaggaggcatcagag

SEQ ID NO: 15946 - RNA, 88 nt, synthetic construct
  misc_feature 1..88: note = engineered ribonucleic acid scaffold (ERS) sequence
  source 1..88: mol_type = other RNA
actggcgcttctatctgattactctgagcgccatgaccagcgactatgtcgtatggctaaagctccctcttcggaggaggcatcagag

SEQ ID NO: 15947 - RNA, 89 nt, synthetic construct
  misc_feature 1..89: note = engineered ribonucleic acid scaffold (ERS) sequence
  source 1..89: mol_type = other RNA
actggcgcttctatctgattactctgagcgccatgaccagcgactatgtcgtatgggctaaagctccctcttcggaggaggcatcagag

SEQ ID NO: 15948 - RNA, 88 nt, synthetic construct
  misc_feature 1..88: note = engineered ribonucleic acid scaffold (ERS) sequence
  source 1..88: mol_type = other RNA
actggcgcttctatctgattactctgagcgccatgaccagcgactatgtcgtatgggtaaagctccctcttcggaggaggcatcagag

SEQ ID NO: 15949 - RNA, 88 nt, synthetic construct
  misc_feature 1..88: note = engineered ribonucleic acid scaffold (ERS) sequence
  source 1..88: mol_type = other RNA
actggcgcttctatctgattactctgagcgccatccccagcgactatgtcgtatgggtaaagctccctcttcggaggaggcatcagag

SEQ ID NO: 15950 - RNA, 89 nt, synthetic construct
  misc_feature 1..89: note = engineered ribonucleic acid scaffold (ERS) sequence
  source 1..89: mol_type = other RNA
actggcgcttctatctgattactctgagcgccatcgccagcgactatgtcgtatggcgtaaagctccctcttcggaggaggcatcagag

SEQ ID NO: 15951 - RNA, 88 nt, synthetic construct
  misc_feature 1..88: note = engineered ribonucleic acid scaffold (ERS) sequence
  source 1..88: mol_type = other RNA
actggcgcttctatctgattactctgagcgccatcgccagcgactatgtcgtatgggtaaagctccctcttcggaggaggcatcagag

SEQ ID NO: 15952 - RNA, 88 nt, synthetic construct
  misc_feature 1..88: note = engineered ribonucleic acid scaffold (ERS) sequence
  source 1..88: mol_type = other RNA
actggcgcttctatctgattactctgagcgccatctccagcgactatgtcgtatgggtaaagctccctcttcggaggaggcatcagag

SEQ ID NO: 15953 - RNA, 88 nt, synthetic construct
  misc_feature 1..88: note = engineered ribonucleic acid scaffold (ERS) sequence
  source 1..88: mol_type = other RNA
actggcgcttctatctgattactctgagcgccatcacctgcgactatgtcgtaagggtaaagctccctcttcggaggaggcatcagag

SEQ ID NO: 15954 - RNA, 88 nt, synthetic construct
  misc_feature 1..88: note = engineered ribonucleic acid scaffold (ERS) sequence
  source 1..88: mol_type = other RNA
actggcgcttctatctgattactctgagcgccatcaccagagactatgtcttatgggtaaagctccctcttcggaggaggcatcagag

SEQ ID NO: 15955 - RNA, 88 nt, synthetic construct
  misc_feature 1..88: note = engineered ribonucleic acid scaffold (ERS) sequence
  source 1..88: mol_type = other RNA
actggcgcttctatctgattactctgagcgccatcaccagggactatgtcctatgggtaaagctccctcttcggaggaggcatcagag

SEQ ID NO: 15956 - RNA, 89 nt, synthetic construct
  misc_feature 1..89: note = engineered ribonucleic acid scaffold (ERS) sequence
  source 1..89: mol_type = other RNA
actggcgcttctatctgattactctgagcgccatcaccaggcactatgtgctattgggtaaagctccctcttcggaggaggcatcagag

SEQ ID NO: 15957 - RNA, 88 nt, synthetic construct
  misc_feature 1..88: note = engineered ribonucleic acid scaffold (ERS) sequence
  source 1..88: mol_type = other RNA
actggcgcttctatctgattactctgagcgccatcaccagccactatgtggtatgggtaaagctccctcttcggaggaggcatcagag

SEQ ID NO: 15958 - RNA, 88 nt, synthetic construct
  misc_feature 1..88: note = engineered ribonucleic acid scaffold (ERS) sequence
  source 1..88: mol_type = other RNA
actggcgcttctatctgattactctgagcgccatcaccagctactatgtagtatgggtaaagctccctcttcggaggaggcatcagag

SEQ ID NO: 15959 - RNA, 88 nt, synthetic construct
  misc_feature 1..88: note = engineered ribonucleic acid scaffold (ERS) sequence
  source 1..88: mol_type = other RNA
actggcgcttctatctgattactctgagcgccatcaccagcgattatgtcgtatgggtaaagctccctcttcggaggaggcatcagag

SEQ ID NO: 15960 - RNA, 88 nt, synthetic construct
  misc_feature 1..88: note = engineered ribonucleic acid scaffold (ERS) sequence
  source 1..88: mol_type = other RNA
actggcgcttctatctgattactctgagcgccatcaccagcgacgatgtcgtatgggtaaagctccctcttcggaggaggcatcagag

SEQ ID NO: 15961 - RNA, 88 nt, synthetic construct
  misc_feature 1..88: note = engineered ribonucleic acid scaffold (ERS) sequence
  source 1..88: mol_type = other RNA
actggcgcttctatctgattactctgagcgccatcaccagcgactctgtcgtatgggtaaagctccctcttcggaggaggcatcagag

SEQ ID NO: 15962 - RNA, 88 nt, synthetic construct
  misc_feature 1..88: note = engineered ribonucleic acid scaffold (ERS) sequence
  source 1..88: mol_type = other RNA
actggcgcttctatctgattactctgagcgccatcaccagcgactatgtcgtgtgggtaaagctccctcttcggaggaggcatcagag

SEQ ID NO: 15963 - RNA, 89 nt, synthetic construct
  misc_feature 1..89: note = engineered ribonucleic acid scaffold (ERS) sequence
  source 1..89: mol_type = other RNA
actggcgcttctatctgattactctgagcgccatcaccagcgactatgtcgtattgggtaaagctccctcttcggaggaggcatcagag

SEQ ID NO: 15964 - RNA, 89 nt, synthetic construct
  misc_feature 1..89: note = engineered ribonucleic acid scaffold (ERS) sequence
  source 1..89: mol_type = other RNA
actggcgcttctatctgattactctgagcgccatcaccagcgactatgtcgtatggagtaaagctccctcttcggaggaggcatcagag

SEQ ID NO: 15965 - RNA, 89 nt, synthetic construct
  misc_feature 1..89: note = engineered ribonucleic acid scaffold (ERS) sequence
  source 1..89: mol_type = other RNA
actggcgcttctatctgattactctgagcgccatcaccagcgactatgtcgtatggcgtaaagctccctcttcggaggaggcatcagag

SEQ ID NO: 15966 - RNA, 89 nt, synthetic construct
  misc_feature 1..89: note = engineered ribonucleic acid scaffold (ERS) sequence
  source 1..89: mol_type = other RNA
actggcgcttctatctgattactctgagcgccatcaccagcgactatgtcgtatggtgtaaagctccctcttcggaggaggcatcagag

SEQ ID NO: 15967 - RNA, 89 nt, synthetic construct
  misc_feature 1..89: note = engineered ribonucleic acid scaffold (ERS) sequence
  source 1..89: mol_type = other RNA
actggcgcttctatctgattactctgagcgccatcaccagcgactatgtcgtatgggctaaagctccctcttcggaggaggcatcagag

SEQ ID NO: 15968 - RNA, 86 nt, synthetic construct
  misc_feature 1..86: note = engineered ribonucleic acid scaffold (ERS) sequence
  source 1..86: mol_type = other RNA
actggcgcttctatctgattactctgagcgccatcaccagcgactatgtcgtatgggtagctccctcttcggaggaggcatcagag

SEQ ID NO: 15969 - RNA, 88 nt, synthetic construct
  misc_feature 1..88: note = engineered ribonucleic acid scaffold (ERS) sequence
  source 1..88: mol_type = other RNA
actggcgcttctatctgattactctgagcgccatcaccagcgactatgtcgtatgggtgaagctccctcttcggaggaggcatcagag

SEQ ID NO: 15970 - RNA, 88 nt, synthetic construct
  misc_feature 1..88: note = engineered ribonucleic acid scaffold (ERS) sequence
  source 1..88: mol_type = other RNA
actggcgcttctatctgattactctgagcgccatcaccagcgactatgtcgtatgggtagagctccctcttcggaggaggcatcagag

SEQ ID NO: 15971 - RNA, 90 nt, synthetic construct
  misc_feature 1..90: note = engineered ribonucleic acid scaffold (ERS) sequence
  source 1..90: mol_type = other RNA
actggcgcttctatctgattactctgagcgccaacaccagcgactatgtcgtatgggtaaagctccctcttcggagggaacgcatcagag

SEQ ID NO: 15972 - RNA, 90 nt, synthetic construct
  misc_feature 1..90: note = engineered ribonucleic acid scaffold (ERS) sequence
  source 1..90: mol_type = other RNA
actggcgcttctatctgattactctgagcgccagcaccagcgactatgtcgtatgggtaaagctccctcttcggagggaacgcatcagag

SEQ ID NO: 15973 - RNA, 90 nt, synthetic construct
  misc_feature 1..90: note = engineered ribonucleic acid scaffold (ERS) sequence
  source 1..90: mol_type = other RNA
actggcgcttctatctgattactctgagcgccatgaccagcgactatgtcgtatggctaaagctccctcttcggagggaacgcatcagag

SEQ ID NO: 15974 - RNA, 91 nt, synthetic construct
  misc_feature 1..91: note = engineered ribonucleic acid scaffold (ERS) sequence
  source 1..91: mol_type = other RNA
actggcgcttctatctgattactctgagcgccatgaccagcgactatgtcgtatgggctaaagctccctcttcggagggaacgcatcagag

SEQ ID NO: 15975 - RNA, 90 nt, synthetic construct
  misc_feature 1..90: note = engineered ribonucleic acid scaffold (ERS) sequence
  source 1..90: mol_type = other RNA
actggcgcttctatctgattactctgagcgccatgaccagcgactatgtcgtatgggtaaagctccctcttcggagggaacgcatcagag

SEQ ID NO: 15976 - RNA, 90 nt, synthetic construct
  misc_feature 1..90: note = engineered ribonucleic acid scaffold (ERS) sequence
  source 1..90: mol_type = other RNA
actggcgcttctatctgattactctgagcgccatccccagcgactatgtcgtatgggtaaagctccctcttcggagggaacgcatcagag

SEQ ID NO: 15977 - RNA, 91 nt, synthetic construct
  misc_feature 1..91: note = engineered ribonucleic acid scaffold (ERS) sequence
  source 1..91: mol_type = other RNA
actggcgcttctatctgattactctgagcgccatcgccagcgactatgtcgtatggcgtaaagctccctcttcggagggaacgcatcagag

SEQ ID NO: 15978 - RNA, 90 nt, synthetic construct
  misc_feature 1..90: note = engineered ribonucleic acid scaffold (ERS) sequence
  source 1..90: mol_type = other RNA
actggcgcttctatctgattactctgagcgccatcgccagcgactatgtcgtatgggtaaagctccctcttcggagggaacgcatcagag

SEQ ID NO: 15979 - RNA, 90 nt, synthetic construct
  misc_feature 1..90: note = engineered ribonucleic acid scaffold (ERS) sequence
  source 1..90: mol_type = other RNA
actggcgcttctatctgattactctgagcgccatctccagcgactatgtcgtatgggtaaagctccctcttcggagggaacgcatcagag

SEQ ID NO: 15980 - RNA, 90 nt, synthetic construct
  misc_feature 1..90: note = engineered ribonucleic acid scaffold (ERS) sequence
  source 1..90: mol_type = other RNA
actggcgcttctatctgattactctgagcgccatcacctgcgactatgtcgtaagggtaaagctccctcttcggagggaacgcatcagag

SEQ ID NO: 15981 - RNA, 90 nt, synthetic construct
  misc_feature 1..90: note = engineered ribonucleic acid scaffold (ERS) sequence
  source 1..90: mol_type = other RNA
actggcgcttctatctgattactctgagcgccatcaccagagactatgtcttatgggtaaagctccctcttcggagggaacgcatcagag

SEQ ID NO: 15982 - RNA, 90 nt, synthetic construct
  misc_feature 1..90: note = engineered ribonucleic acid scaffold (ERS) sequence
  source 1..90: mol_type = other RNA
actggcgcttctatctgattactctgagcgccatcaccagggactatgtcctatgggtaaagctccctcttcggagggaacgcatcagag

SEQ ID NO: 15983 - RNA, 91 nt, synthetic construct
  misc_feature 1..91: note = engineered ribonucleic acid scaffold (ERS) sequence
  source 1..91: mol_type = other RNA
actggcgcttctatctgattactctgagcgccatcaccaggcactatgtgctattgggtaaagctccctcttcggagggaacgcatcagag

SEQ ID NO: 15984 - RNA, 90 nt, synthetic construct
  misc_feature 1..90: note = engineered ribonucleic acid scaffold (ERS) sequence
  source 1..90: mol_type = other RNA
actggcgcttctatctgattactctgagcgccatcaccagccactatgtggtatgggtaaagctccctcttcggagggaacgcatcagag

SEQ ID NO: 15985 - RNA, 90 nt, synthetic construct
  misc_feature 1..90: note = engineered ribonucleic acid scaffold (ERS) sequence
  source 1..90: mol_type = other RNA
actggcgcttctatctgattactctgagcgccatcaccagctactatgtagtatgggtaaagctccctcttcggagggaacgcatcagag

SEQ ID NO: 15986 - RNA, 90 nt, synthetic construct
  misc_feature 1..90: note = engineered ribonucleic acid scaffold (ERS) sequence
  source 1..90: mol_type = other RNA
actggcgcttctatctgattactctgagcgccatcaccagcgattatgtcgtatgggtaaagctccctcttcggagggaacgcatcagag

SEQ ID NO: 15987 - RNA, 90 nt, synthetic construct
  misc_feature 1..90: note = engineered ribonucleic acid scaffold (ERS) sequence
  source 1..90: mol_type = other RNA
actggcgcttctatctgattactctgagcgccatcaccagcgacgatgtcgtatgggtaaagctccctcttcggagggaacgcatcagag

SEQ ID NO: 15988 - RNA, 90 nt, synthetic construct
  misc_feature 1..90: note = engineered ribonucleic acid scaffold (ERS) sequence
  source 1..90: mol_type = other RNA
actggcgcttctatctgattactctgagcgccatcaccagcgactctgtcgtatgggtaaagctccctcttcggagggaacgcatcagag

SEQ ID NO: 15989 - RNA, 90 nt, synthetic construct
  misc_feature 1..90: note = engineered ribonucleic acid scaffold (ERS) sequence
  source 1..90: mol_type = other RNA
actggcgcttctatctgattactctgagcgccatcaccagcgactatgtcgtgtgggtaaagctccctcttcggagggaacgcatcagag

SEQ ID NO: 15990 - RNA, 91 nt, synthetic construct
  misc_feature 1..91: note = engineered ribonucleic acid scaffold (ERS) sequence
  source 1..91: mol_type = other RNA
actggcgcttctatctgattactctgagcgccatcaccagcgactatgtcgtattgggtaaagctccctcttcggagggaacgcatcagag

SEQ ID NO: 15991 - RNA, 91 nt, synthetic construct
  misc_feature 1..91: note = engineered ribonucleic acid scaffold (ERS) sequence
  source 1..91: mol_type = other RNA
actggcgcttctatctgattactctgagcgccatcaccagcgactatgtcgtatggagtaaagctccctcttcggagggaacgcatcagag

SEQ ID NO: 15992 - RNA, 91 nt, synthetic construct
  misc_feature 1..91: note = engineered ribonucleic acid scaffold (ERS) sequence
  source 1..91: mol_type = other RNA
actggcgcttctatctgattactctgagcgccatcaccagcgactatgtcgtatggcgtaaagctccctcttcggagggaacgcatcagag

SEQ ID NO: 15993 - RNA, 91 nt, synthetic construct
  misc_feature 1..91: note = engineered ribonucleic acid scaffold (ERS) sequence
  source 1..91: mol_type = other RNA
actggcgcttctatctgattactctgagcgccatcaccagcgactatgtcgtatggtgtaaagctccctcttcggagggaacgcatcagag

SEQ ID NO: 15994 - RNA, 91 nt, synthetic construct
  misc_feature 1..91: note = engineered ribonucleic acid scaffold (ERS) sequence
  source 1..91: mol_type = other RNA
actggcgcttctatctgattactctgagcgccatcaccagcgactatgtcgtatgggctaaagctccctcttcggagggaacgcatcagag

SEQ ID NO: 15995 - RNA, 88 nt, synthetic construct
  misc_feature 1..88: note = engineered ribonucleic acid scaffold (ERS) sequence
  source 1..88: mol_type = other RNA
actggcgcttctatctgattactctgagcgccatcaccagcgactatgtcgtatgggtagctccctcttcggagggaacgcatcagag

SEQ ID NO: 15996 - RNA, 90 nt, synthetic construct
  misc_feature 1..90: note = engineered ribonucleic acid scaffold (ERS) sequence
  source 1..90: mol_type = other RNA
actggcgcttctatctgattactctgagcgccatcaccagcgactatgtcgtatgggtgaagctccctcttcggagggaacgcatcagag

SEQ ID NO: 15997 - RNA, 90 nt, synthetic construct
  misc_feature 1..90: note = engineered ribonucleic acid scaffold (ERS) sequence
  source 1..90: mol_type = other RNA
actggcgcttctatctgattactctgagcgccatcaccagcgactatgtcgtatgggtagagctccctcttcggagggaacgcatcagag

SEQ ID NO: 15998 - RNA, 88 nt, synthetic construct; identical to SEQ ID NO: 851
  misc_feature 1..88: note = engineered ribonucleic acid scaffold (ERS) sequence
  source 1..88: mol_type = other RNA

SEQ ID NO: 15999 - RNA, 88 nt, synthetic construct; identical to SEQ ID NO: 862
  misc_feature 1..88: note = engineered ribonucleic acid scaffold (ERS) sequence
  source 1..88: mol_type = other RNA

SEQ ID NO: 16000 - RNA, 88 nt, synthetic construct; identical to SEQ ID NO: 852
  misc_feature 1..88: note = engineered ribonucleic acid scaffold (ERS) sequence
  source 1..88: mol_type = other RNA

SEQ ID NO: 16001 - RNA, 89 nt, synthetic construct; identical to SEQ ID NO: 853
  misc_feature 1..89: note = engineered ribonucleic acid scaffold (ERS) sequence
  source 1..89: mol_type = other RNA

SEQ ID NO: 16002 - RNA, 88 nt, synthetic construct; identical to SEQ ID NO: 863
  misc_feature 1..88: note = engineered ribonucleic acid scaffold (ERS) sequence
  source 1..88: mol_type = other RNA

SEQ ID NO: 16003 - RNA, 88 nt, synthetic construct; identical to SEQ ID NO: 846
  misc_feature 1..88: note = engineered ribonucleic acid scaffold (ERS) sequence
  source 1..88: mol_type = other RNA

SEQ ID NO: 16004 - RNA, 89 nt, synthetic construct; identical to SEQ ID NO: 854
  misc_feature 1..89: note = engineered ribonucleic acid scaffold (ERS) sequence
  source 1..89: mol_type = other RNA

SEQ ID NO: 16005 - RNA, 88 nt, synthetic construct; identical to SEQ ID NO: 864
  misc_feature 1..88: note = engineered ribonucleic acid scaffold (ERS) sequence
  source 1..88: mol_type = other RNA

SEQ ID NO: 16006 - RNA, 88 nt, synthetic construct; identical to SEQ ID NO: 845
  misc_feature 1..88: note = engineered ribonucleic acid scaffold (ERS) sequence
  source 1..88: mol_type = other RNA

SEQ ID NO: 16007 - RNA, 88 nt, synthetic construct; identical to SEQ ID NO: 855
  misc_feature 1..88: note = engineered ribonucleic acid scaffold (ERS) sequence
  source 1..88: mol_type = other RNA

SEQ ID NO: 16008 - RNA, 88 nt, synthetic construct; identical to SEQ ID NO: 856
  misc_feature 1..88: note = engineered ribonucleic acid scaffold (ERS) sequence
  source 1..88: mol_type = other RNA

SEQ ID NO: 16009 - RNA, 88 nt, synthetic construct; identical to SEQ ID NO: 857
  misc_feature 1..88: note = engineered ribonucleic acid scaffold (ERS) sequence
  source 1..88: mol_type = other RNA

SEQ ID NO: 16010 - RNA, 89 nt, synthetic construct; identical to SEQ ID NO: 861
  misc_feature 1..89: note = engineered ribonucleic acid scaffold (ERS) sequence
  source 1..89: mol_type = other RNA

SEQ ID NO: 16011 - RNA, 88 nt, synthetic construct; identical to SEQ ID NO: 858
  misc_feature 1..88: note = engineered ribonucleic acid scaffold (ERS) sequence
  source 1..88: mol_type = other RNA

SEQ ID NO: 16012 - RNA, 88 nt, synthetic construct; identical to SEQ ID NO: 859
  misc_feature 1..88: note = engineered ribonucleic acid scaffold (ERS) sequence
  source 1..88: mol_type = other RNA

SEQ ID NO: 16013 - RNA, 88 nt, synthetic construct; identical to SEQ ID NO: 847
  misc_feature 1..88: note = engineered ribonucleic acid scaffold (ERS) sequence
  source 1..88: mol_type = other RNA

SEQ ID NO: 16014 - RNA, 88 nt, synthetic construct; identical to SEQ ID NO: 839
  misc_feature 1..88: note = engineered ribonucleic acid scaffold (ERS) sequence
  source 1..88: mol_type = other RNA

SEQ ID NO: 16015 - RNA, 88 nt, synthetic construct; identical to SEQ ID NO: 865
  misc_feature 1..88: note = engineered ribonucleic acid scaffold (ERS) sequence
  source 1..88: mol_type = other RNA

SEQ ID NO: 16016 - RNA, 88 nt, synthetic construct; identical to SEQ ID NO: 848
  misc_feature 1..88: note = engineered ribonucleic acid scaffold (ERS) sequence
  source 1..88: mol_type = other RNA

SEQ ID NO: 16017 - RNA, 89 nt, synthetic construct; identical to SEQ ID NO: 841
  misc_feature 1..89: note = engineered ribonucleic acid scaffold (ERS) sequence
  source 1..89: mol_type = other RNA

SEQ ID NO: 16018 - RNA, 89 nt, synthetic construct; identical to SEQ ID NO: 850
  misc_feature 1..89: note = engineered ribonucleic acid scaffold (ERS) sequence
  source 1..89: mol_type = other RNA

SEQ ID NO: 16019 - RNA, 89 nt, synthetic construct; identical to SEQ ID NO: 866
  misc_feature 1..89: note = engineered ribonucleic acid scaffold (ERS) sequence
  source 1..89: mol_type = other RNA

SEQ ID NO: 16020 - RNA, 89 nt, synthetic construct; identical to SEQ ID NO: 849
  misc_feature 1..89: note = engineered ribonucleic acid scaffold (ERS) sequence
  source 1..89: mol_type = other RNA

SEQ ID NO: 16021 - RNA, 89 nt, synthetic construct; identical to SEQ ID NO: 867
  misc_feature 1..89: note = engineered ribonucleic acid scaffold (ERS) sequence
  source 1..89: mol_type = other RNA

SEQ ID NO: 16022 - RNA, 86 nt, synthetic construct; identical to SEQ ID NO: 860
  misc_feature 1..86: note = engineered ribonucleic acid scaffold (ERS) sequence
  source 1..86: mol_type = other RNA

SEQ ID NO: 16023 - RNA, 88 nt, synthetic construct; identical to SEQ ID NO: 868
  misc_feature 1..88: note = engineered ribonucleic acid scaffold (ERS) sequence
  source 1..88: mol_type = other RNA

SEQ ID NO: 16024 - RNA, 88 nt, synthetic construct; identical to SEQ ID NO: 869
  misc_feature 1..88: note = engineered ribonucleic acid scaffold (ERS) sequence
  source 1..88: mol_type = other RNA

SEQ ID NO: 16025 - RNA, 88 nt, synthetic construct
  misc_feature 1..88: note = engineered ribonucleic acid scaffold (ERS) sequence
  source 1..88: mol_type = other RNA
actggcgcttctatctgattactctgagcgccaacaccagcgactatgtcgtatgggtaaagctccctggaaacagggagcatcagag

SEQ ID NO: 16026 - RNA, 88 nt, synthetic construct
  misc_feature 1..88: note = engineered ribonucleic acid scaffold (ERS) sequence
  source 1..88: mol_type = other RNA
actggcgcttctatctgattactctgagcgccagcaccagcgactatgtcgtatgggtaaagctccctggaaacagggagcatcagag

SEQ ID NO: 16027 - RNA, 88 nt, synthetic construct
  misc_feature 1..88: note = engineered ribonucleic acid scaffold (ERS) sequence
  source 1..88: mol_type = other RNA
actggcgcttctatctgattactctgagcgccatgaccagcgactatgtcgtatggctaaagctccctggaaacagggagcatcagag

SEQ ID NO: 16028 - RNA, 89 nt, synthetic construct
  misc_feature 1..89: note = engineered ribonucleic acid scaffold (ERS) sequence
  source 1..89: mol_type = other RNA
actggcgcttctatctgattactctgagcgccatgaccagcgactatgtcgtatgggctaaagctccctggaaacagggagcatcagag

SEQ ID NO: 16029 - RNA, 88 nt, synthetic construct
  misc_feature 1..88: note = engineered ribonucleic acid scaffold (ERS) sequence
  source 1..88: mol_type = other RNA
actggcgcttctatctgattactctgagcgccatgaccagcgactatgtcgtatgggtaaagctccctggaaacagggagcatcagag

SEQ ID NO: 16030 - RNA, 88 nt, synthetic construct
  misc_feature 1..88: note = engineered ribonucleic acid scaffold (ERS) sequence
  source 1..88: mol_type = other RNA
actggcgcttctatctgattactctgagcgccatccccagcgactatgtcgtatgggtaaagctccctggaaacagggagcatcagag

SEQ ID NO: 16031 - RNA, 89 nt, synthetic construct
  misc_feature 1..89: note = engineered ribonucleic acid scaffold (ERS) sequence
  source 1..89: mol_type = other RNA
actggcgcttctatctgattactctgagcgccatcgccagcgactatgtcgtatggcgtaaagctccctggaaacagggagcatcagag

SEQ ID NO: 16032 - RNA, 88 nt, synthetic construct
  misc_feature 1..88: note = engineered ribonucleic acid scaffold (ERS) sequence
  source 1..88: mol_type = other RNA
actggcgcttctatctgattactctgagcgccatcgccagcgactatgtcgtatgggtaaagctccctggaaacagggagcatcagag

SEQ ID NO: 16033 - RNA, 88 nt, synthetic construct
  misc_feature 1..88: note = engineered ribonucleic acid scaffold (ERS) sequence
  source 1..88: mol_type = other RNA
actggcgcttctatctgattactctgagcgccatctccagcgactatgtcgtatgggtaaagctccctggaaacagggagcatcagag

SEQ ID NO: 16034 - RNA, 88 nt, synthetic construct
  misc_feature 1..88: note = engineered ribonucleic acid scaffold (ERS) sequence
  source 1..88: mol_type = other RNA
actggcgcttctatctgattactctgagcgccatcacctgcgactatgtcgtaagggtaaagctccctggaaacagggagcatcagag

SEQ ID NO: 16035 - RNA, 88 nt, synthetic construct
  misc_feature 1..88: note = engineered ribonucleic acid scaffold (ERS) sequence
  source 1..88: mol_type = other RNA
actggcgcttctatctgattactctgagcgccatcaccagagactatgtcttatgggtaaagctccctggaaacagggagcatcagag

SEQ ID NO: 16036 - RNA, 88 nt, synthetic construct
  misc_feature 1..88: note = engineered ribonucleic acid scaffold (ERS) sequence
  source 1..88: mol_type = other RNA
actggcgcttctatctgattactctgagcgccatcaccagggactatgtcctatgggtaaagctccctggaaacagggagcatcagag

SEQ ID NO: 16037 - RNA, 89 nt, synthetic construct
  misc_feature 1..89: note = engineered ribonucleic acid scaffold (ERS) sequence
  source 1..89: mol_type = other RNA
actggcgcttctatctgattactctgagcgccatcaccaggcactatgtgctattgggtaaagctccctggaaacagggagcatcagag

SEQ ID NO: 16038 - RNA, 88 nt, synthetic construct
  misc_feature 1..88: note = engineered ribonucleic acid scaffold (ERS) sequence
  source 1..88: mol_type = other RNA
actggcgcttctatctgattactctgagcgccatcaccagccactatgtggtatgggtaaagctccctggaaacagggagcatcagag

SEQ ID NO: 16039 - RNA, 88 nt, synthetic construct
  misc_feature 1..88: note = engineered ribonucleic acid scaffold (ERS) sequence
  source 1..88: mol_type = other RNA
actggcgcttctatctgattactctgagcgccatcaccagctactatgtagtatgggtaaagctccctggaaacagggagcatcagag

SEQ ID NO: 16040 - RNA, 88 nt, synthetic construct
  misc_feature 1..88: note = engineered ribonucleic acid scaffold (ERS) sequence
  source 1..88: mol_type = other RNA
actggcgcttctatctgattactctgagcgccatcaccagcgattatgtcgtatgggtaaagctccctggaaacagggagcatcagag

SEQ ID NO: 16041 - RNA, 88 nt, synthetic construct
  misc_feature 1..88: note = engineered ribonucleic acid scaffold (ERS) sequence
  source 1..88: mol_type = other RNA
actggcgcttctatctgattactctgagcgccatcaccagcgacgatgtcgtatgggtaaagctccctggaaacagggagcatcagag

SEQ ID NO: 16042 - RNA, 88 nt, synthetic construct
  misc_feature 1..88: note = engineered ribonucleic acid scaffold (ERS) sequence
  source 1..88: mol_type = other RNA
actggcgcttctatctgattactctgagcgccatcaccagcgactctgtcgtatgggtaaagctccctggaaacagggagcatcagag

SEQ ID NO: 16043 - RNA, 88 nt, synthetic construct
  misc_feature 1..88: note = engineered ribonucleic acid scaffold (ERS) sequence
  source 1..88: mol_type = other RNA
actggcgcttctatctgattactctgagcgccatcaccagcgactatgtcgtgtgggtaaagctccctggaaacagggagcatcagag

SEQ ID NO: 16044 - RNA, 89 nt, synthetic construct
  misc_feature 1..89: note = engineered ribonucleic acid scaffold (ERS) sequence
  source 1..89: mol_type = other RNA
actggcgcttctatctgattactctgagcgccatcaccagcgactatgtcgtattgggtaaagctccctggaaacagggagcatcagag

SEQ ID NO: 16045 - RNA, 89 nt, synthetic construct
  misc_feature 1..89: note = engineered ribonucleic acid scaffold (ERS) sequence
  source 1..89: mol_type = other RNA
actggcgcttctatctgattactctgagcgccatcaccagcgactatgtcgtatggagtaaagctccctggaaacagggagcatcagag

SEQ ID NO: 16046 - RNA, 89 nt, synthetic construct
  misc_feature 1..89: note = engineered ribonucleic acid scaffold (ERS) sequence
  source 1..89: mol_type = other RNA
actggcgcttctatctgattactctgagcgccatcaccagcgactatgtcgtatggcgtaaagctccctggaaacagggagcatcagag

SEQ ID NO: 16047 - RNA, 89 nt, synthetic construct
  misc_feature 1..89: note = engineered ribonucleic acid scaffold (ERS) sequence
  source 1..89: mol_type = other RNA
actggcgcttctatctgattactctgagcgccatcaccagcgactatgtcgtatggtgtaaagctccctggaaacagggagcatcagag

SEQ ID NO: 16048 - RNA, 89 nt, synthetic construct
  misc_feature 1..89: note = engineered ribonucleic acid scaffold (ERS) sequence
  source 1..89: mol_type = other RNA
actggcgcttctatctgattactctgagcgccatcaccagcgactatgtcgtatgggctaaagctccctggaaacagggagcatcagag

SEQ ID NO: 16049 - RNA, 86 nt, synthetic construct
  misc_feature 1..86: note = engineered ribonucleic acid scaffold (ERS) sequence
  source 1..86: mol_type = other RNA
actggcgcttctatctgattactctgagcgccatcaccagcgactatgtcgtatgggtagctccctggaaacagggagcatcagag

SEQ ID NO: 16050 - RNA, 88 nt, synthetic construct
  misc_feature 1..88: note = engineered ribonucleic acid scaffold (ERS) sequence
  source 1..88: mol_type = other RNA
actggcgcttctatctgattactctgagcgccatcaccagcgactatgtcgtatgggtgaagctccctggaaacagggagcatcagag

SEQ ID NO: 16051 - RNA, 88 nt, synthetic construct
  misc_feature 1..88: note = engineered ribonucleic acid scaffold (ERS) sequence
  source 1..88: mol_type = other RNA
actggcgcttctatctgattactctgagcgccatcaccagcgactatgtcgtatgggtagagctccctggaaacagggagcatcagag

SEQ ID NO: 16052 - RNA, 84 nt, synthetic construct
  misc_feature 1..84: note = engineered ribonucleic acid scaffold (ERS) sequence
  source 1..84: mol_type = other RNA
actggcgcttctatctgattactctgagcgccaacaccagcgactatgtcgtatgggtaaagctcccttcggggagcatcagag

SEQ ID NO: 16053 - RNA, 84 nt, synthetic construct
  misc_feature 1..84: note = engineered ribonucleic acid scaffold (ERS) sequence
  source 1..84: mol_type = other RNA
actggcgcttctatctgattactctgagcgccagcaccagcgactatgtcgtatgggtaaagctcccttcggggagcatcagag

SEQ ID NO: 16054 - RNA, 84 nt, synthetic construct
  misc_feature 1..84: note = engineered ribonucleic acid scaffold (ERS) sequence
  source 1..84: mol_type = other RNA
actggcgcttctatctgattactctgagcgccatgaccagcgactatgtcgtatggctaaagctcccttcggggagcatcagag

SEQ ID NO: 16055 - RNA, 85 nt, synthetic construct
  misc_feature 1..85: note = engineered ribonucleic acid scaffold (ERS) sequence
  source 1..85: mol_type = other RNA
actggcgcttctatctgattactctgagcgccatgaccagcgactatgtcgtatgggctaaagctcccttcggggagcatcagag

SEQ ID NO: 16056 - RNA, 84 nt, synthetic construct
  misc_feature 1..84: note = engineered ribonucleic acid scaffold (ERS) sequence
  source 1..84: mol_type = other RNA
actggcgcttctatctgattactctgagcgccatgaccagcgactatgtcgtatgggtaaagctcccttcggggagcatcagag

SEQ ID NO: 16057 - RNA, 84 nt, synthetic construct
  misc_feature 1..84: note = engineered ribonucleic acid scaffold (ERS) sequence
  source 1..84: mol_type = other RNA
actggcgcttctatctgattactctgagcgccatccccagcgactatgtcgtatgggtaaagctcccttcggggagcatcagag

SEQ ID NO: 16058 - RNA, 85 nt, synthetic construct
  misc_feature 1..85: note = engineered ribonucleic acid scaffold (ERS) sequence
  source 1..85: mol_type = other RNA
actggcgcttctatctgattactctgagcgccatcgccagcgactatgtcgtatggcgtaaagctcccttcggggagcatcagag

SEQ ID NO: 16059 - RNA, 84 nt, synthetic construct
  misc_feature 1..84: note = engineered ribonucleic acid scaffold (ERS) sequence
  source 1..84: mol_type = other RNA
actggcgcttctatctgattactctgagcgccatcgccagcgactatgtcgtatgggtaaagctcccttcggggagcatcagag

SEQ ID NO: 16060 - RNA, 84 nt, synthetic construct
  misc_feature 1..84: note = engineered ribonucleic acid scaffold (ERS) sequence
  source 1..84: mol_type = other RNA
actggcgcttctatctgattactctgagcgccatctccagcgactatgtcgtatgggtaaagctcccttcggggagcatcagag

SEQ ID NO: 16061 - RNA, 84 nt, synthetic construct
  misc_feature 1..84: note = engineered ribonucleic acid scaffold (ERS) sequence
  source 1..84: mol_type = other RNA
actggcgcttctatctgattactctgagcgccatcacctgcgactatgtcgtaagggtaaagctcccttcggggagcatcagag

SEQ ID NO: 16062 - RNA, 84 nt, synthetic construct
  misc_feature 1..84: note = engineered ribonucleic acid scaffold (ERS) sequence
  source 1..84: mol_type = other RNA
actggcgcttctatctgattactctgagcgccatcaccagagactatgtcttatgggtaaagctcccttcggggagcatcagag

SEQ ID NO: 16063 - RNA, 84 nt, synthetic construct
  misc_feature 1..84: note = engineered ribonucleic acid scaffold (ERS) sequence
  source 1..84: mol_type = other RNA
actggcgcttctatctgattactctgagcgccatcaccagggactatgtcctatgggtaaagctcccttcggggagcatcagag

SEQ ID NO: 16064 - RNA, 85 nt, synthetic construct
  misc_feature 1..85: note = engineered ribonucleic acid scaffold (ERS) sequence
  source 1..85: mol_type = other RNA
actggcgcttctatctgattactctgagcgccatcaccaggcactatgtgctattgggtaaagctcccttcggggagcatcagag

SEQ ID NO: 16065 - RNA, 84 nt, synthetic construct
  misc_feature 1..84: note = engineered ribonucleic acid scaffold (ERS) sequence
  source 1..84: mol_type = other RNA
actggcgcttctatctgattactctgagcgccatcaccagccactatgtggtatgggtaaagctcccttcggggagcatcagag

SEQ ID NO: 16066 - RNA, 84 nt, synthetic construct
  misc_feature 1..84: note = engineered ribonucleic acid scaffold (ERS) sequence
  source 1..84: mol_type = other RNA
actggcgcttctatctgattactctgagcgccatcaccagctactatgtagtatgggtaaagctcccttcggggagcatcagag

SEQ ID NO: 16067 - RNA, 84 nt, synthetic construct
  misc_feature 1..84: note = engineered ribonucleic acid scaffold (ERS) sequence
  source 1..84: mol_type = other RNA
actggcgcttctatctgattactctgagcgccatcaccagcgattatgtcgtatgggtaaagctcccttcggggagcatcagag

SEQ ID NO: 16068 - RNA, 84 nt, synthetic construct
  misc_feature 1..84: note = engineered ribonucleic acid scaffold (ERS) sequence
  source 1..84: mol_type = other RNA
actggcgcttctatctgattactctgagcgccatcaccagcgacgatgtcgtatgggtaaagctcccttcggggagcatcagag

SEQ ID NO: 16069 - RNA, 84 nt, synthetic construct
  misc_feature 1..84: note = engineered ribonucleic acid scaffold (ERS) sequence
  source 1..84: mol_type = other RNA
actggcgcttctatctgattactctgagcgccatcaccagcgactctgtcgtatgggtaaagctcccttcggggagcatcagag

SEQ ID NO: 16070 - RNA, 84 nt, synthetic construct
  misc_feature 1..84: note = engineered ribonucleic acid scaffold (ERS) sequence
  source 1..84: mol_type = other RNA
actggcgcttctatctgattactctgagcgccatcaccagcgactatgtcgtgtgggtaaagctcccttcggggagcatcagag

SEQ ID NO: 16071 - RNA, 85 nt, synthetic construct
  misc_feature 1..85: note = engineered ribonucleic acid scaffold (ERS) sequence
  source 1..85: mol_type = other RNA
actggcgcttctatctgattactctgagcgccatcaccagcgactatgtcgtattgggtaaagctcccttcggggagcatcagag

SEQ ID NO: 16072 - RNA, 85 nt, synthetic construct
  misc_feature 1..85: note = engineered ribonucleic acid scaffold (ERS) sequence
  source 1..85: mol_type = other RNA
actggcgcttctatctgattactctgagcgccatcaccagcgactatgtcgtatggagtaaagctcccttcggggagcatcagag

SEQ ID NO: 16073 - RNA, 85 nt, synthetic construct
  misc_feature 1..85: note = engineered ribonucleic acid scaffold (ERS) sequence
  source 1..85: mol_type = other RNA
actggcgcttctatctgattactctgagcgccatcaccagcgactatgtcgtatggcgtaaagctcccttcggggagcatcagag

SEQ ID NO: 16074 - RNA, 85 nt, synthetic construct
  misc_feature 1..85: note = engineered ribonucleic acid scaffold (ERS) sequence
  source 1..85: mol_type = other RNA
actggcgcttctatctgattactctgagcgccatcaccagcgactatgtcgtatggtgtaaagctcccttcggggagcatcagag

SEQ ID NO: 16075 - RNA, 85 nt, synthetic construct
  misc_feature 1..85: note = engineered ribonucleic acid scaffold (ERS) sequence
  source 1..85: mol_type = other RNA
actggcgcttctatctgattactctgagcgccatcaccagcgactatgtcgtatgggctaaagctcccttcggggagcatcagag

SEQ ID NO: 16076 - RNA, 82 nt, synthetic construct
  misc_feature 1..82: note = engineered ribonucleic acid scaffold (ERS) sequence
  source 1..82: mol_type = other RNA
actggcgcttctatctgattactctgagcgccatcaccagcgactatgtcgtatgggtagctcccttcggggagcatcagag

SEQ ID NO: 16077 - RNA, 84 nt, synthetic construct
  misc_feature 1..84: note = engineered ribonucleic acid scaffold (ERS) sequence
  source 1..84: mol_type = other RNA
actggcgcttctatctgattactctgagcgccatcaccagcgactatgtcgtatgggtgaagctcccttcggggagcatcagag

SEQ ID NO: 16078 - RNA, 84 nt, synthetic construct
  misc_feature 1..84: note = engineered ribonucleic acid scaffold (ERS) sequence
  source 1..84: mol_type = other RNA
actggcgcttctatctgattactctgagcgccatcaccagcgactatgtcgtatgggtagagctcccttcggggagcatcagag

SEQ ID NO: 16079 - RNA, 84 nt, synthetic construct
  misc_feature 1..84: note = engineered ribonucleic acid scaffold (ERS) sequence
  source 1..84: mol_type = other RNA
actggcgcttctatctgattactctgagcgccaacaccagcgactatgtcgtatgggtaaagctccgttcgcggagcatcagag

SEQ ID NO: 16080 - RNA, 84 nt, synthetic construct
  misc_feature 1..84: note = engineered ribonucleic acid scaffold (ERS) sequence
  source 1..84: mol_type = other RNA
actggcgcttctatctgattactctgagcgccagcaccagcgactatgtcgtatgggtaaagctccgttcgcggagcatcagag

SEQ ID NO: 16081 - RNA, 84 nt, synthetic construct
  misc_feature 1..84: note = engineered ribonucleic acid scaffold (ERS) sequence
  source 1..84: mol_type = other RNA
actggcgcttctatctgattactctgagcgccatgaccagcgactatgtcgtatggctaaagctccgttcgcggagcatcagag

SEQ ID NO: 16082 - RNA, 85 nt, synthetic construct
  misc_feature 1..85: note = engineered ribonucleic acid scaffold (ERS) sequence
  source 1..85: mol_type = other RNA
actggcgcttctatctgattactctgagcgccatgaccagcgactatgtcgtatgggctaaagctccgttcgcggagcatcagag

SEQ ID NO: 16083 - RNA, 84 nt, synthetic construct
  misc_feature 1..84: note = engineered ribonucleic acid scaffold (ERS) sequence
  source 1..84: mol_type = other RNA
actggcgcttctatctgattactctgagcgccatgaccagcgactatgtcgtatgggtaaagctccgttcgcggagcatcagag

SEQ ID NO: 16084 - RNA, 84 nt, synthetic construct
  misc_feature 1..84: note = engineered ribonucleic acid scaffold (ERS) sequence
  source 1..84: mol_type = other RNA
actggcgcttctatctgattactctgagcgccatccccagcgactatgtcgtatgggtaaagctccgttcgcggagcatcagag

SEQ ID NO: 16085 - RNA, 85 nt, synthetic construct
  misc_feature 1..85: note = engineered ribonucleic acid scaffold (ERS) sequence
  source 1..85: mol_type = other RNA
actggcgcttctatctgattactctgagcgccatcgccagcgactatgtcgtatggcgtaaagctccgttcgcggagcatcagag

SEQ ID NO: 16086 - RNA, 84 nt, synthetic construct
  misc_feature 1..84: note = engineered ribonucleic acid scaffold (ERS) sequence
  source 1..84: mol_type = other RNA
actggcgcttctatctgattactctgagcgccatcgccagcgactatgtcgtatgggtaaagctccgttcgcggagcatcagag

SEQ ID NO: 16087 - RNA, 84 nt, synthetic construct
  misc_feature 1..84: note = engineered ribonucleic acid scaffold (ERS) sequence
  source 1..84: mol_type = other RNA
actggcgcttctatctgattactctgagcgccatctccagcgactatgtcgtatgggtaaagctccgttcgcggagcatcagag

SEQ ID NO: 16088 - RNA, 84 nt, synthetic construct
  misc_feature 1..84: note = engineered ribonucleic acid scaffold (ERS) sequence
  source 1..84: mol_type = other RNA
actggcgcttctatctgattactctgagcgccatcacctgcgactatgtcgtaagggtaaagctccgttcgcggagcatcagag

SEQ ID NO: 16089 - RNA, 84 nt, synthetic construct
  misc_feature 1..84: note = engineered ribonucleic acid scaffold (ERS) sequence
  source 1..84: mol_type = other RNA
actggcgcttctatctgattactctgagcgccatcaccagagactatgtcttatgggtaaagctccgttcgcggagcatcagag

SEQ ID NO: 16090 - RNA, 84 nt, synthetic construct
  misc_feature 1..84: note = engineered ribonucleic acid scaffold (ERS) sequence
  source 1..84: mol_type = other RNA
actggcgcttctatctgattactctgagcgccatcaccagggactatgtcctatgggtaaagctccgttcgcggagcatcagag

SEQ ID NO: 16091 - RNA, 85 nt, synthetic construct
  misc_feature 1..85: note = engineered ribonucleic acid scaffold (ERS) sequence
  source 1..85: mol_type = other RNA
actggcgcttctatctgattactctgagcgccatcaccaggcactatgtgctattgggtaaagctccgttcgcggagcatcagag

SEQ ID NO: 16092 - RNA, 84 nt, synthetic construct
  misc_feature 1..84: note = engineered ribonucleic acid scaffold (ERS) sequence
  source 1..84: mol_type = other RNA
actggcgcttctatctgattactctgagcgccatcaccagccactatgtggtatgggtaaagctccgttcgcggagcatcagag

SEQ ID NO: 16093 - RNA, 84 nt, synthetic construct
  misc_feature 1..84: note = engineered ribonucleic acid scaffold (ERS) sequence
  source 1..84: mol_type = other RNA
actggcgcttctatctgattactctgagcgccatcaccagctactatgtagtatgggtaaagctccgttcgcggagcatcagag

SEQ ID NO: 16094 - RNA, 84 nt, synthetic construct
  misc_feature 1..84: note = engineered ribonucleic acid scaffold (ERS) sequence
  source 1..84: mol_type = other RNA
actggcgcttctatctgattactctgagcgccatcaccagcgattatgtcgtatgggtaaagctccgttcgcggagcatcagag

SEQ ID NO: 16095 - RNA, 84 nt, synthetic construct
  misc_feature 1..84: note = engineered ribonucleic acid scaffold (ERS) sequence
  source 1..84: mol_type = other RNA
actggcgcttctatctgattactctgagcgccatcaccagcgacgatgtcgtatgggtaaagctccgttcgcggagcatcagag

SEQ ID NO: 16096 - RNA, 84 nt, synthetic construct
  misc_feature 1..84: note = engineered ribonucleic acid scaffold (ERS) sequence
  source 1..84: mol_type = other RNA
actggcgcttctatctgattactctgagcgccatcaccagcgactctgtcgtatgggtaaagctccgttcgcggagcatcagag

SEQ ID NO: 16097 - RNA, 84 nt, synthetic construct
  misc_feature 1..84: note = engineered ribonucleic acid scaffold (ERS) sequence
  source 1..84: mol_type = other RNA
actggcgcttctatctgattactctgagcgccatcaccagcgactatgtcgtgtgggtaaagctccgttcgcggagcatcagag

SEQ ID NO: 16098 - RNA, 85 nt, synthetic construct
  misc_feature 1..85: note = engineered ribonucleic acid scaffold (ERS) sequence
  source 1..85: mol_type = other RNA
actggcgcttctatctgattactctgagcgccatcaccagcgactatgtcgtattgggtaaagctccgttcgcggagcatcagag

SEQ ID NO: 16099 - RNA, 85 nt, synthetic construct
  misc_feature 1..85: note = engineered ribonucleic acid scaffold (ERS) sequence
  source 1..85: mol_type = other RNA
actggcgcttctatctgattactctgagcgccatcaccagcgactatgtcgtatggagtaaagctccgttcgcggagcatcagag

SEQ ID NO: 16100 - RNA, 85 nt, synthetic construct
  misc_feature 1..85: note = engineered ribonucleic acid scaffold (ERS) sequence
  source 1..85: mol_type = other RNA
actggcgcttctatctgattactctgagcgccatcaccagcgactatgtcgtatggcgtaaagctccgttcgcggagcatcagag

SEQ ID NO: 16101 - RNA, 85 nt, synthetic construct
  misc_feature 1..85: note = engineered ribonucleic acid scaffold (ERS) sequence
  source 1..85: mol_type = other RNA
actggcgcttctatctgattactctgagcgccatcaccagcgactatgtcgtatggtgtaaagctccgttcgcggagcatcagag

SEQ ID NO: 16102 - RNA, 85 nt, synthetic construct
  misc_feature 1..85: note = engineered ribonucleic acid scaffold (ERS) sequence
  source 1..85: mol_type = other RNA
actggcgcttctatctgattactctgagcgccatcaccagcgactatgtcgtatgggctaaagctccgttcgcggagcatcagag

SEQ ID NO: 16103 - RNA, 82 nt, synthetic construct
  misc_feature 1..82: note = engineered ribonucleic acid scaffold (ERS) sequence
  source 1..82: mol_type = other RNA
actggcgcttctatctgattactctgagcgccatcaccagcgactatgtcgtatgggtagctccgttcgcggagcatcagag

SEQ ID NO: 16104 - RNA, 84 nt, synthetic construct
  misc_feature 1..84: note = engineered ribonucleic acid scaffold (ERS) sequence
  source 1..84: mol_type = other RNA
actggcgcttctatctgattactctgagcgccatcaccagcgactatgtcgtatgggtgaagctccgttcgcggagcatcagag

SEQ ID NO: 16105 - RNA, 84 nt, synthetic construct
  misc_feature 1..84: note = engineered ribonucleic acid scaffold (ERS) sequence
  source 1..84: mol_type = other RNA
actggcgcttctatctgattactctgagcgccatcaccagcgactatgtcgtatgggtagagctccgttcgcggagcatcagag

SEQ ID NO: 16106 - RNA, 86 nt, synthetic construct
  misc_feature 1..86: note = engineered ribonucleic acid scaffold (ERS) sequence
  source 1..86: mol_type = other RNA
actggcgcttctatctgattactctgagcgccaacaccagcgactatgtcgtatgggtaaagctcctcttcggaggagcatcagag

SEQ ID NO: 16107 - RNA, 86 nt, synthetic construct
  misc_feature 1..86: note = engineered ribonucleic acid scaffold (ERS) sequence
  source 1..86: mol_type = other RNA
actggcgcttctatctgattactctgagcgccagcaccagcgactatgtcgtatgggtaaagctcctcttcggaggagcatcagag

SEQ ID NO: 16108 - RNA, 86 nt, synthetic construct
  misc_feature 1..86: note = engineered ribonucleic acid scaffold (ERS) sequence
  source 1..86: mol_type = other RNA
actggcgcttctatctgattactctgagcgccatgaccagcgactatgtcgtatggctaaagctcctcttcggaggagcatcagag

SEQ ID NO: 16109 - RNA, 87 nt, synthetic construct
  misc_feature 1..87: note = engineered ribonucleic acid scaffold (ERS) sequence
  source 1..87: mol_type = other RNA
actggcgcttctatctgattactctgagcgccatgaccagcgactatgtcgtatgggctaaagctcctcttcggaggagcatcagag

SEQ ID NO: 16110 - RNA, 86 nt, synthetic construct
  misc_feature 1..86: note = engineered ribonucleic acid scaffold (ERS) sequence
  source 1..86: mol_type = other RNA
actggcgcttctatctgattactctgagcgccatgaccagcgactatgtcgtatgggtaaagctcctcttcggaggagcatcagag

SEQ ID NO: 16111 - RNA, 86 nt, synthetic construct
  misc_feature 1..86: note = engineered ribonucleic acid scaffold (ERS) sequence
  source 1..86: mol_type = other RNA
actggcgcttctatctgattactctgagcgccatccccagcgactatgtcgtatgggtaaagctcctcttcggaggagcatcagag

SEQ ID NO: 16112 - RNA, 87 nt, synthetic construct
  misc_feature 1..87: note = engineered ribonucleic acid scaffold (ERS) sequence
  source 1..87: mol_type = other RNA
actggcgcttctatctgattactctgagcgccatcgccagcgactatgtcgtatggcgtaaagctcctcttcggaggagcatcagag

SEQ ID NO: 16113 - RNA, 86 nt, synthetic construct
  misc_feature 1..86: note = engineered ribonucleic acid scaffold (ERS) sequence
  source 1..86: mol_type = other RNA
actggcgcttctatctgattactctgagcgccatcgccagcgactatgtcgtatgggtaaagctcctcttcggaggagcatcagag

SEQ ID NO: 16114 - RNA, 86 nt, synthetic construct
  misc_feature 1..86: note = engineered ribonucleic acid scaffold (ERS) sequence
  source 1..86: mol_type = other RNA
actggcgcttctatctgattactctgagcgccatctccagcgactatgtcgtatgggtaaagctcctcttcggaggagcatcagag

SEQ ID NO: 16115 - RNA, 86 nt, synthetic construct
  misc_feature 1..86: note = engineered ribonucleic acid scaffold (ERS) sequence
  source 1..86: mol_type = other RNA
actggcgcttctatctgattactctgagcgccatcacctgcgactatgtcgtaagggtaaagctcctcttcggaggagcatcagag

SEQ ID NO: 16116 - RNA, 86 nt, synthetic construct
  misc_feature 1..86: note = engineered ribonucleic acid scaffold (ERS) sequence
  source 1..86: mol_type = other RNA
actggcgcttctatctgattactctgagcgccatcaccagagactatgtcttatgggtaaagctcctcttcggaggagcatcagag

SEQ ID NO: 16117 - RNA, 86 nt, synthetic construct
  misc_feature 1..86: note = engineered ribonucleic acid scaffold (ERS) sequence
  source 1..86: mol_type = other RNA
actggcgcttctatctgattactctgagcgccatcaccagggactatgtcctatgggtaaagctcctcttcggaggagcatcagag

SEQ ID NO: 16118 - RNA, 87 nt, synthetic construct
  misc_feature 1..87: note = engineered ribonucleic acid scaffold (ERS) sequence
  source 1..87: mol_type = other RNA
actggcgcttctatctgattactctgagcgccatcaccaggcactatgtgctattgggtaaagctcctcttcggaggagcatcagag

SEQ ID NO: 16119 - RNA, 86 nt, synthetic construct
  misc_feature 1..86: note = engineered ribonucleic acid scaffold (ERS) sequence
  source 1..86: mol_type = other RNA
actggcgcttctatctgattactctgagcgccatcaccagccactatgtggtatgggtaaagctcctcttcggaggagcatcagag

SEQ ID NO: 16120 - RNA, 86 nt, synthetic construct
  misc_feature 1..86: note = engineered ribonucleic acid scaffold (ERS) sequence
  source 1..86: mol_type = other RNA
actggcgcttctatctgattactctgagcgccatcaccagctactatgtagtatgggtaaagctcctcttcggaggagcatcagag

SEQ ID NO: 16121 - RNA, 86 nt, synthetic construct
  misc_feature 1..86: note = engineered ribonucleic acid scaffold (ERS) sequence
  source 1..86: mol_type = other RNA
actggcgcttctatctgattactctgagcgccatcaccagcgattatgtcgtatgggtaaagctcctcttcggaggagcatcagag

SEQ ID NO: 16122 - RNA, 86 nt, synthetic construct
  misc_feature 1..86: note = engineered ribonucleic acid scaffold (ERS) sequence
  source 1..86: mol_type = other RNA
actggcgcttctatctgattactctgagcgccatcaccagcgacgatgtcgtatgggtaaagctcctcttcggaggagcatcagag

SEQ ID NO: 16123 - RNA, 86 nt, synthetic construct
  misc_feature 1..86: note = engineered ribonucleic acid scaffold (ERS) sequence
  source 1..86: mol_type = other RNA
actggcgcttctatctgattactctgagcgccatcaccagcgactctgtcgtatgggtaaagctcctcttcggaggagcatcagag

SEQ ID NO: 16124 - RNA, 86 nt, synthetic construct
  misc_feature 1..86: note = engineered ribonucleic acid scaffold (ERS) sequence
  source 1..86: mol_type = other RNA
actggcgcttctatctgattactctgagcgccatcaccagcgactatgtcgtgtgggtaaagctcctcttcggaggagcatcagag

SEQ ID NO: 16125 - RNA, 87 nt, synthetic construct
  misc_feature 1..87: note = engineered ribonucleic acid scaffold (ERS) sequence
  source 1..87: mol_type = other RNA
actggcgcttctatctgattactctgagcgccatcaccagcgactatgtcgtattgggtaaagctcctcttcggaggagcatcagag

SEQ ID NO: 16126 - RNA, 87 nt, synthetic construct
  misc_feature 1..87: note = engineered ribonucleic acid scaffold (ERS) sequence
  source 1..87: mol_type = other RNA
actggcgcttctatctgattactctgagcgccatcaccagcgactatgtcgtatggagtaaagctcctcttcggaggagcatcagag

SEQ ID NO: 16127 - RNA, 87 nt, synthetic construct
  misc_feature 1..87: note = engineered ribonucleic acid scaffold (ERS) sequence
  source 1..87: mol_type = other RNA
actggcgcttctatctgattactctgagcgccatcaccagcgactatgtcgtatggcgtaaagctcctcttcggaggagcatcagag

SEQ ID NO: 16128 - RNA, 87 nt, synthetic construct
  misc_feature 1..87: note = engineered ribonucleic acid scaffold (ERS) sequence
  source 1..87: mol_type = other RNA
actggcgcttctatctgattactctgagcgccatcaccagcgactatgtcgtatggtgtaaagctcctcttcggaggagcatcagag

SEQ ID NO: 16129 - RNA, 87 nt, synthetic construct
  misc_feature 1..87: note = engineered ribonucleic acid scaffold (ERS) sequence
  source 1..87: mol_type = other RNA
actggcgcttctatctgattactctgagcgccatcaccagcgactatgtcgtatgggctaaagctcctcttcggaggagcatcagag

SEQ ID NO: 16130 - RNA, 84 nt, synthetic construct
  misc_feature 1..84: note = engineered ribonucleic acid scaffold (ERS) sequence
  source 1..84: mol_type = other RNA
actggcgcttctatctgattactctgagcgccatcaccagcgactatgtcgtatgggtagctcctcttcggaggagcatcagag

SEQ ID NO: 16131 - RNA, 86 nt, synthetic construct
  misc_feature 1..86: note = engineered ribonucleic acid scaffold (ERS) sequence
  source 1..86: mol_type = other RNA
actggcgcttctatctgattactctgagcgccatcaccagcgactatgtcgtatgggtgaagctcctcttcggaggagcatcagag

SEQ ID NO: 16132 - RNA, 86 nt, synthetic construct
  misc_feature 1..86: note = engineered ribonucleic acid scaffold (ERS) sequence
  source 1..86: mol_type = other RNA
actggcgcttctatctgattactctgagcgccatcaccagcgactatgtcgtatgggtagagctcctcttcggaggagcatcagag

SEQ ID NO: 16133 - RNA, 84 nt, synthetic construct
  misc_feature 1..84: note = engineered ribonucleic acid scaffold (ERS) sequence
  source 1..84: mol_type = other RNA
actggcgcttctatctgattactctgagcgccaacaccagcgactatgtcgtatgggtaaagctctcttcggagagcatcagag

SEQ ID NO: 16134 - RNA, 84 nt, synthetic construct
  misc_feature 1..84: note = engineered ribonucleic acid scaffold (ERS) sequence
  source 1..84: mol_type = other RNA
actggcgcttctatctgattactctgagcgccagcaccagcgactatgtcgtatgggtaaagctctcttcggagagcatcagag

SEQ ID NO: 16135 - RNA, 84 nt, synthetic construct
  misc_feature 1..84: note = engineered ribonucleic acid scaffold (ERS) sequence
  source 1..84: mol_type = other RNA
actggcgcttctatctgattactctgagcgccatgaccagcgactatgtcgtatggctaaagctctcttcggagagcatcagag

SEQ ID NO: 16136 - RNA, 85 nt, synthetic construct
  misc_feature 1..85: note = engineered ribonucleic acid scaffold (ERS) sequence
  source 1..85: mol_type = other RNA
actggcgcttctatctgattactctgagcgccatgaccagcgactatgtcgtatgggctaaagctctcttcggagagcatcagag

SEQ ID NO: 16137 - RNA, 84 nt, synthetic construct
  misc_feature 1..84: note = engineered ribonucleic acid scaffold (ERS) sequence
  source 1..84: mol_type = other RNA
actggcgcttctatctgattactctgagcgccatgaccagcgactatgtcgtatgggtaaagctctcttcggagagcatcagag

SEQ ID NO: 16138 - RNA, 84 nt, synthetic construct
  misc_feature 1..84: note = engineered ribonucleic acid scaffold (ERS) sequence
  source 1..84: mol_type = other RNA
actggcgcttctatctgattactctgagcgccatccccagcgactatgtcgtatgggtaaagctctcttcggagagcatcagag

SEQ ID NO: 16139 - RNA, 85 nt, synthetic construct
  misc_feature 1..85: note = engineered ribonucleic acid scaffold (ERS) sequence
  source 1..85: mol_type = other RNA
actggcgcttctatctgattactctgagcgccatcgccagcgactatgtcgtatggcgtaaagctctcttcggagagcatcagag

SEQ ID NO: 16140 - RNA, 84 nt, synthetic construct
  misc_feature 1..84: note = engineered ribonucleic acid scaffold (ERS) sequence
  source 1..84: mol_type = other RNA
actggcgcttctatctgattactctgagcgccatcgccagcgactatgtcgtatgggtaaagctctcttcggagagcatcagag

SEQ ID NO: 16141 - RNA, 84 nt, synthetic construct
  misc_feature 1..84: note = engineered ribonucleic acid scaffold (ERS) sequence
  source 1..84: mol_type = other RNA
actggcgcttctatctgattactctgagcgccatctccagcgactatgtcgtatgggtaaagctctcttcggagagcatcagag

SEQ ID NO: 16142 - RNA, 84 nt, synthetic construct
  misc_feature 1..84: note = engineered ribonucleic acid scaffold (ERS) sequence
  source 1..84: mol_type = other RNA
actggcgcttctatctgattactctgagcgccatcacctgcgactatgtcgtaagggtaaagctctcttcggagagcatcagag

SEQ ID NO: 16143 - RNA, 84 nt, synthetic construct
  misc_feature 1..84: note = engineered ribonucleic acid scaffold (ERS) sequence
  source 1..84: mol_type = other RNA
actggcgcttctatctgattactctgagcgccatcaccagagactatgtcttatgggtaaagctctcttcggagagcatcagag

SEQ ID NO: 16144 - RNA, 84 nt, synthetic construct
  misc_feature 1..84: note = engineered ribonucleic acid scaffold (ERS) sequence
  source 1..84: mol_type = other RNA
actggcgcttctatctgattactctgagcgccatcaccagggactatgtcctatgggtaaagctctcttcggagagcatcagag

SEQ ID NO: 16145 - RNA, 85 nt, synthetic construct
  misc_feature 1..85: note = engineered ribonucleic acid scaffold (ERS) sequence
  source 1..85: mol_type = other RNA
actggcgcttctatctgattactctgagcgccatcaccaggcactatgtgctattgggtaaagctctcttcggagagcatcagag

SEQ ID NO: 16146 - RNA, 84 nt, synthetic construct
  misc_feature 1..84: note = engineered ribonucleic acid scaffold (ERS) sequence
  source 1..84: mol_type = other RNA
actggcgcttctatctgattactctgagcgccatcaccagccactatgtggtatgggtaaagctctcttcggagagcatcagag

SEQ ID NO: 16147 - RNA, 84 nt, synthetic construct
  misc_feature 1..84: note = engineered ribonucleic acid scaffold (ERS) sequence
  source 1..84: mol_type = other RNA
actggcgcttctatctgattactctgagcgccatcaccagctactatgtagtatgggtaaagctctcttcggagagcatcagag

SEQ ID NO: 16148 - RNA, 84 nt, synthetic construct
  misc_feature 1..84: note = engineered ribonucleic acid scaffold (ERS) sequence
  source 1..84: mol_type = other RNA
actggcgcttctatctgattactctgagcgccatcaccagcgattatgtcgtatgggtaaagctctcttcggagagcatcagag

SEQ ID NO: 16149 - RNA, 84 nt, synthetic construct
  misc_feature 1..84: note = engineered ribonucleic acid scaffold (ERS) sequence
  source 1..84: mol_type = other RNA
actggcgcttctatctgattactctgagcgccatcaccagcgacgatgtcgtatgggtaaagctctcttcggagagcatcagag

SEQ ID NO: 16150 - RNA, 84 nt, synthetic construct
  misc_feature 1..84: note = engineered ribonucleic acid scaffold (ERS) sequence
  source 1..84: mol_type = other RNA
actggcgcttctatctgattactctgagcgccatcaccagcgactctgtcgtatgggtaaagctctcttcggagagcatcagag

SEQ ID NO: 16151 - RNA, 84 nt, synthetic construct
  misc_feature 1..84: note = engineered ribonucleic acid scaffold (ERS) sequence
  source 1..84: mol_type = other RNA
actggcgcttctatctgattactctgagcgccatcaccagcgactatgtcgtgtgggtaaagctctcttcggagagcatcagag

SEQ ID NO: 16152 - RNA, 85 nt, synthetic construct
  misc_feature 1..85: note = engineered ribonucleic acid scaffold (ERS) sequence
  source 1..85: mol_type = other RNA
actggcgcttctatctgattactctgagcgccatcaccagcgactatgtcgtattgggtaaagctctcttcggagagcatcagag

SEQ ID NO: 16153 - RNA, 85 nt, synthetic construct
  misc_feature 1..85: note = engineered ribonucleic acid scaffold (ERS) sequence
  source 1..85: mol_type = other RNA
actggcgcttctatctgattactctgagcgccatcaccagcgactatgtcgtatggagtaaagctctcttcggagagcatcagag

SEQ ID NO: 16154 - RNA, 85 nt, synthetic construct
  misc_feature 1..85: note = engineered ribonucleic acid scaffold (ERS) sequence
  source 1..85: mol_type = other RNA
actggcgcttctatctgattactctgagcgccatcaccagcgactatgtcgtatggcgtaaagctctcttcggagagcatcagag

SEQ ID NO: 16155 - RNA, 85 nt, synthetic construct
  misc_feature 1..85: note = engineered ribonucleic acid scaffold (ERS) sequence
  source 1..85: mol_type = other RNA
actggcgcttctatctgattactctgagcgccatcaccagcgactatgtcgtatggtgtaaagctctcttcggagagcatcagag

SEQ ID NO: 16156 - RNA, 85 nt, synthetic construct
  misc_feature 1..85: note = engineered ribonucleic acid scaffold (ERS) sequence
  source 1..85: mol_type = other RNA
actggcgcttctatctgattactctgagcgccatcaccagcgactatgtcgtatgggctaaagctctcttcggagagcatcagag

SEQ ID NO: 16157 - RNA, 82 nt, synthetic construct
  misc_feature 1..82: note = engineered ribonucleic acid scaffold (ERS) sequence
  source 1..82: mol_type = other RNA
actggcgcttctatctgattactctgagcgccatcaccagcgactatgtcgtatgggtagctctcttcggagagcatcagag

SEQ ID NO: 16158 - RNA, 84 nt, synthetic construct
  misc_feature 1..84: note = engineered ribonucleic acid scaffold (ERS) sequence
  source 1..84: mol_type = other RNA
actggcgcttctatctgattactctgagcgccatcaccagcgactatgtcgtatgggtgaagctctcttcggagagcatcagag

SEQ ID NO: 16159 - RNA, 84 nt, synthetic construct
  misc_feature 1..84: note = engineered ribonucleic acid scaffold (ERS) sequence
  source 1..84: mol_type = other RNA
actggcgcttctatctgattactctgagcgccatcaccagcgactatgtcgtatgggtagagctctcttcggagagcatcagag

SEQ ID NO: 16160 - RNA, 76 nt, synthetic construct
  misc_feature 1..76: note = engineered ribonucleic acid scaffold (ERS) sequence
  source 1..76: mol_type = other RNA
actggcgcttctatctgattactctgagcgccaacaccagcgactatgtcgtatgggtaaagctgcagcatcagag

SEQ ID NO: 16161 - RNA, 76 nt, synthetic construct
  misc_feature 1..76: note = engineered ribonucleic acid scaffold (ERS) sequence
  source 1..76: mol_type = other RNA
actggcgcttctatctgattactctgagcgccagcaccagcgactatgtcgtatgggtaaagctgcagcatcagag

SEQ ID NO: 16162 - RNA, 76 nt, synthetic construct
  misc_feature 1..76: note = engineered ribonucleic acid scaffold (ERS) sequence
  source 1..76: mol_type = other RNA
actggcgcttctatctgattactctgagcgccatgaccagcgactatgtcgtatggctaaagctgcagcatcagag

SEQ ID NO: 16163 - RNA, 77 nt, synthetic construct
  misc_feature 1..77: note = engineered ribonucleic acid scaffold (ERS) sequence
  source 1..77: mol_type = other RNA
actggcgcttctatctgattactctgagcgccatgaccagcgactatgtcgtatgggctaaagctgcagcatcagag

SEQ ID NO: 16164 - RNA, 76 nt, synthetic construct
  misc_feature 1..76: note = engineered ribonucleic acid scaffold (ERS) sequence
  source 1..76: mol_type = other RNA
actggcgcttctatctgattactctgagcgccatgaccagcgactatgtcgtatgggtaaagctgcagcatcagag

SEQ ID NO: 16165 - RNA, 76 nt, synthetic construct
  misc_feature 1..76: note = engineered ribonucleic acid scaffold (ERS) sequence
  source 1..76: mol_type = other RNA
actggcgcttctatctgattactctgagcgccatccccagcgactatgtcgtatgggtaaagctgcagcatcagag

SEQ ID NO: 16166 - RNA, 77 nt, synthetic construct
  misc_feature 1..77: note = engineered ribonucleic acid scaffold (ERS) sequence
  source 1..77: mol_type = other RNA
actggcgcttctatctgattactctgagcgccatcgccagcgactatgtcgtatggcgtaaagctgcagcatcagag

SEQ ID NO: 16167 - RNA, 76 nt, synthetic construct
  misc_feature 1..76: note = engineered ribonucleic acid scaffold (ERS) sequence
  source 1..76: mol_type = other RNA
actggcgcttctatctgattactctgagcgccatcgccagcgactatgtcgtatgggtaaagctgcagcatcagag

SEQ ID NO: 16168 - RNA, 76 nt, synthetic construct
  misc_feature 1..76: note = engineered ribonucleic acid scaffold (ERS) sequence
  source 1..76: mol_type = other RNA
actggcgcttctatctgattactctgagcgccatctccagcgactatgtcgtatgggtaaagctgcagcatcagag

SEQ ID NO: 16169 - RNA, 76 nt, synthetic construct
  misc_feature 1..76: note = engineered ribonucleic acid scaffold (ERS) sequence
  source 1..76: mol_type = other RNA
actggcgcttctatctgattactctgagcgccatcacctgcgactatgtcgtaagggtaaagctgcagcatcagag

SEQ ID NO: 16170 - RNA, 76 nt, synthetic construct
  misc_feature 1..76: note = engineered ribonucleic acid scaffold (ERS) sequence
  source 1..76: mol_type = other RNA
actggcgcttctatctgattactctgagcgccatcaccagagactatgtcttatgggtaaagctgcagcatcagag

SEQ ID NO: 16171 - RNA, 76 nt, synthetic construct
  misc_feature 1..76: note = engineered ribonucleic acid scaffold (ERS) sequence
  source 1..76: mol_type = other RNA
actggcgcttctatctgattactctgagcgccatcaccagggactatgtcctatgggtaaagctgcagcatcagag

SEQ ID NO: 16172 - RNA, 77 nt, synthetic construct
  misc_feature 1..77: note = engineered ribonucleic acid scaffold (ERS) sequence
  source 1..77: mol_type = other RNA
actggcgcttctatctgattactctgagcgccatcaccaggcactatgtgctattgggtaaagctgcagcatcagag

SEQ ID NO: 16173 - RNA, 76 nt, synthetic construct
  misc_feature 1..76: note = engineered ribonucleic acid scaffold (ERS) sequence
  source 1..76: mol_type = other RNA
actggcgcttctatctgattactctgagcgccatcaccagccactatgtggtatgggtaaagctgcagcatcagag

SEQ ID NO: 16174 - RNA, 76 nt, synthetic construct
  misc_feature 1..76: note = engineered ribonucleic acid scaffold (ERS) sequence
  source 1..76: mol_type = other RNA
actggcgcttctatctgattactctgagcgccatcaccagctactatgtagtatgggtaaagctgcagcatcagag

SEQ ID NO: 16175 - RNA, 76 nt, synthetic construct
  misc_feature 1..76: note = engineered ribonucleic acid scaffold (ERS) sequence
  source 1..76: mol_type = other RNA
actggcgcttctatctgattactctgagcgccatcaccagcgattatgtcgtatgggtaaagctgcagcatcagag

SEQ ID NO: 16176 - RNA, 76 nt, synthetic construct
  misc_feature 1..76: note = engineered ribonucleic acid scaffold (ERS) sequence
  source 1..76: mol_type = other RNA
actggcgcttctatctgattactctgagcgccatcaccagcgacgatgtcgtatgggtaaagctgcagcatcagag

SEQ ID NO: 16177 - RNA, 76 nt, synthetic construct
  misc_feature 1..76: note = engineered ribonucleic acid scaffold (ERS) sequence
  source 1..76: mol_type = other RNA
actggcgcttctatctgattactctgagcgccatcaccagcgactctgtcgtatgggtaaagctgcagcatcagag

SEQ ID NO: 16178 - RNA, 76 nt, synthetic construct
  misc_feature 1..76: note = engineered ribonucleic acid scaffold (ERS) sequence
  source 1..76: mol_type = other RNA
actggcgcttctatctgattactctgagcgccatcaccagcgactatgtcgtgtgggtaaagctgcagcatcagag

SEQ ID NO: 16179 - RNA, 77 nt, synthetic construct
  misc_feature 1..77: note = engineered ribonucleic acid scaffold (ERS) sequence
  source 1..77: mol_type = other RNA
actggcgcttctatctgattactctgagcgccatcaccagcgactatgtcgtattgggtaaagctgcagcatcagag

SEQ ID NO: 16180 - RNA, 77 nt, synthetic construct
  misc_feature 1..77: note = engineered ribonucleic acid scaffold (ERS) sequence
  source 1..77: mol_type = other RNA
actggcgcttctatctgattactctgagcgccatcaccagcgactatgtcgtatggagtaaagctgcagcatcagag

SEQ ID NO: 16181 - RNA, 77 nt, synthetic construct
  misc_feature 1..77: note = engineered ribonucleic acid scaffold (ERS) sequence
  source 1..77: mol_type = other RNA
actggcgcttctatctgattactctgagcgccatcaccagcgactatgtcgtatggcgtaaagctgcagcatcagag

SEQ ID NO: 16182 - RNA, 77 nt, synthetic construct
  misc_feature 1..77: note = engineered ribonucleic acid scaffold (ERS) sequence
  source 1..77: mol_type = other RNA
actggcgcttctatctgattactctgagcgccatcaccagcgactatgtcgtatggtgtaaagctgcagcatcagag

SEQ ID NO: 16183 - RNA, 77 nt, synthetic construct
  misc_feature 1..77: note = engineered ribonucleic acid scaffold (ERS) sequence
  source 1..77: mol_type = other RNA
actggcgcttctatctgattactctgagcgccatcaccagcgactatgtcgtatgggctaaagctgcagcatcagag

SEQ ID NO: 16184 - RNA, 74 nt, synthetic construct
  misc_feature 1..74: note = engineered ribonucleic acid scaffold (ERS) sequence
  source 1..74: mol_type = other RNA
actggcgcttctatctgattactctgagcgccatcaccagcgactatgtcgtatgggtagctgcagcatcagag

SEQ ID NO: 16185 - RNA, 76 nt, synthetic construct
  misc_feature 1..76: note = engineered ribonucleic acid scaffold (ERS) sequence
  source 1..76: mol_type = other RNA
actggcgcttctatctgattactctgagcgccatcaccagcgactatgtcgtatgggtgaagctgcagcatcagag

SEQ ID NO: 16186 - RNA, 76 nt, synthetic construct
  misc_feature 1..76: note = engineered ribonucleic acid scaffold (ERS) sequence
  source 1..76: mol_type = other RNA
actggcgcttctatctgattactctgagcgccatcaccagcgactatgtcgtatgggtagagctgcagcatcagag

SEQ ID NO: 16187 - RNA, 82 nt, synthetic construct
  misc_feature 1..82: note = engineered ribonucleic acid scaffold (ERS) sequence
  source 1..82: mol_type = other RNA
actggcgcttctatctgattactctgagcgccaacaccagcgactatgtcgtatgggtaaagctgcttcggcagcatcagag

SEQ ID NO: 16188 - RNA, 82 nt, synthetic construct
  misc_feature 1..82: note = engineered ribonucleic acid scaffold (ERS) sequence
  source 1..82: mol_type = other RNA
actggcgcttctatctgattactctgagcgccagcaccagcgactatgtcgtatgggtaaagctgcttcggcagcatcagag

SEQ ID NO: 16189 - RNA, 82 nt, synthetic construct
  misc_feature 1..82: note = engineered ribonucleic acid scaffold (ERS) sequence
  source 1..82: mol_type = other RNA
actggcgcttctatctgattactctgagcgccatgaccagcgactatgtcgtatggctaaagctgcttcggcagcatcagag

SEQ ID NO: 16190 - RNA, 83 nt, synthetic construct
  misc_feature 1..83: note = engineered ribonucleic acid scaffold (ERS) sequence
  source 1..83: mol_type = other RNA
actggcgcttctatctgattactctgagcgccatgaccagcgactatgtcgtatgggctaaagctgcttcggcagcatcagag

SEQ ID NO: 16191 - RNA, 82 nt, synthetic construct
  misc_feature 1..82: note = engineered ribonucleic acid scaffold (ERS) sequence
  source 1..82: mol_type = other RNA
actggcgcttctatctgattactctgagcgccatgaccagcgactatgtcgtatgggtaaagctgcttcggcagcatcagag

SEQ ID NO: 16192 - RNA, 82 nt, synthetic construct
  misc_feature 1..82: note = engineered ribonucleic acid scaffold (ERS) sequence
  source 1..82: mol_type = other RNA
actggcgcttctatctgattactctgagcgccatccccagcgactatgtcgtatgggtaaagctgcttcggcagcatcagag

SEQ ID NO: 16193 - RNA, 83 nt, synthetic construct
  misc_feature 1..83: note = engineered ribonucleic acid scaffold (ERS) sequence
  source 1..83: mol_type = other RNA
actggcgcttctatctgattactctgagcgccatcgccagcgactatgtcgtatggcgtaaagctgcttcggcagcatcagag

SEQ ID NO: 16194 - RNA, 82 nt, synthetic construct
  misc_feature 1..82: note = engineered ribonucleic acid scaffold (ERS) sequence
  source 1..82: mol_type = other RNA
actggcgcttctatctgattactctgagcgccatcgccagcgactatgtcgtatgggtaaagctgcttcggcagcatcagag

SEQ ID NO: 16195 - RNA, 82 nt, synthetic construct
  misc_feature 1..82: note = engineered ribonucleic acid scaffold (ERS) sequence
  source 1..82: mol_type = other RNA
actggcgcttctatctgattactctgagcgccatctccagcgactatgtcgtatgggtaaagctgcttcggcagcatcagag

SEQ ID NO: 16196 - RNA, 82 nt, synthetic construct
  misc_feature 1..82: note = engineered ribonucleic acid scaffold (ERS) sequence
  source 1..82: mol_type = other RNA
actggcgcttctatctgattactctgagcgccatcacctgcgactatgtcgtaagggtaaagctgcttcggcagcatcagag

SEQ ID NO: 16197 - RNA, 82 nt, synthetic construct
  misc_feature 1..82: note = engineered ribonucleic acid scaffold (ERS) sequence
  source 1..82: mol_type = other RNA
actggcgcttctatctgattactctgagcgccatcaccagagactatgtcttatgggtaaagctgcttcggcagcatcagag

SEQ ID NO: 16198 - RNA, 82 nt, synthetic construct
  misc_feature 1..82: note = engineered ribonucleic acid scaffold (ERS) sequence
  source 1..82: mol_type = other RNA
actggcgcttctatctgattactctgagcgccatcaccagggactatgtcctatgggtaaagctgcttcggcagcatcagag

SEQ ID NO: 16199 - RNA, 83 nt, synthetic construct
  misc_feature 1..83: note = engineered ribonucleic acid scaffold (ERS) sequence
  source 1..83: mol_type = other RNA
actggcgcttctatctgattactctgagcgccatcaccaggcactatgtgctattgggtaaagctgcttcggcagcatcagag

SEQ ID NO: 16200 - RNA, 82 nt, synthetic construct
  misc_feature 1..82: note = engineered ribonucleic acid scaffold (ERS) sequence
  source 1..82: mol_type = other RNA
actggcgcttctatctgattactctgagcgccatcaccagccactatgtggtatgggtaaagctgcttcggcagcatcagag

SEQ ID NO: 16201 - RNA, 82 nt, synthetic construct
  misc_feature 1..82: note = engineered ribonucleic acid scaffold (ERS) sequence
  source 1..82: mol_type = other RNA
actggcgcttctatctgattactctgagcgccatcaccagctactatgtagtatgggtaaagctgcttcggcagcatcagag

SEQ ID NO: 16202 - RNA, 82 nt, synthetic construct
  misc_feature 1..82: note = engineered ribonucleic acid scaffold (ERS) sequence
  source 1..82: mol_type = other RNA
actggcgcttctatctgattactctgagcgccatcaccagcgattatgtcgtatgggtaaagctgcttcggcagcatcagag

SEQ ID NO: 16203 - RNA, 82 nt, synthetic construct
  misc_feature 1..82: note = engineered ribonucleic acid scaffold (ERS) sequence
  source 1..82: mol_type = other RNA
actggcgcttctatctgattactctgagcgccatcaccagcgacgatgtcgtatgggtaaagctgcttcggcagcatcagag

SEQ ID NO: 16204 - RNA, 82 nt, synthetic construct
  misc_feature 1..82: note = engineered ribonucleic acid scaffold (ERS) sequence
  source 1..82: mol_type = other RNA
actggcgcttctatctgattactctgagcgccatcaccagcgactctgtcgtatgggtaaagctgcttcggcagcatcagag

SEQ ID NO: 16205 - RNA, 82 nt, synthetic construct
  misc_feature 1..82: note = engineered ribonucleic acid scaffold (ERS) sequence
  source 1..82: mol_type = other RNA
actggcgcttctatctgattactctgagcgccatcaccagcgactatgtcgtgtgggtaaagctgcttcggcagcatcagag

SEQ ID NO: 16206 - RNA, 83 nt, synthetic construct
  misc_feature 1..83: note = engineered ribonucleic acid scaffold (ERS) sequence
  source 1..83: mol_type = other RNA
actggcgcttctatctgattactctgagcgccatcaccagcgactatgtcgtattgggtaaagctgcttcggcagcatcagag

SEQ ID NO: 16207 - RNA, 83 nt, synthetic construct
  misc_feature 1..83: note = engineered ribonucleic acid scaffold (ERS) sequence
  source 1..83: mol_type = other RNA
actggcgcttctatctgattactctgagcgccatcaccagcgactatgtcgtatggagtaaagctgcttcggcagcatcagag

SEQ ID NO: 16208 - RNA, 83 nt, synthetic construct
  misc_feature 1..83: note = engineered ribonucleic acid scaffold (ERS) sequence
  source 1..83: mol_type = other RNA
actggcgcttctatctgattactctgagcgccatcaccagcgactatgtcgtatggcgtaaagctgcttcggcagcatcagag

SEQ ID NO: 16209 - RNA, 83 nt, synthetic construct
  misc_feature 1..83: note = engineered ribonucleic acid scaffold (ERS) sequence
  source 1..83: mol_type = other RNA
actggcgcttctatctgattactctgagcgccatcaccagcgactatgtcgtatggtgtaaagctgcttcggcagcatcagag

SEQ ID NO: 16210 - RNA, 83 nt, synthetic construct
  misc_feature 1..83: note = engineered ribonucleic acid scaffold (ERS) sequence
  source 1..83: mol_type = other RNA
actggcgcttctatctgattactctgagcgccatcaccagcgactatgtcgtatgggctaaagctgcttcggcagcatcagag

SEQ ID NO: 16211 - RNA, 80 nt, synthetic construct
  misc_feature 1..80: note = engineered ribonucleic acid scaffold (ERS) sequence
  source 1..80: mol_type = other RNA
actggcgcttctatctgattactctgagcgccatcaccagcgactatgtcgtatgggtagctgcttcggcagcatcagag

SEQ ID NO: 16212 - RNA, 82 nt, synthetic construct
  misc_feature 1..82: note = engineered ribonucleic acid scaffold (ERS) sequence
  source 1..82: mol_type = other RNA
actggcgcttctatctgattactctgagcgccatcaccagcgactatgtcgtatgggtgaagctgcttcggcagcatcagag

SEQ ID NO: 16213 - RNA, 82 nt, synthetic construct
  misc_feature 1..82: note = engineered ribonucleic acid scaffold (ERS) sequence
  source 1..82: mol_type = other RNA
actggcgcttctatctgattactctgagcgccatcaccagcgactatgtcgtatgggtagagctgcttcggcagcatcagag

SEQ ID NO: 16214 - RNA, 88 nt, synthetic construct
  misc_feature 1..88: note = engineered ribonucleic acid scaffold (ERS) sequence
  source 1..88: mol_type = other RNA
actggcgcttctatctgattactctgagcgccaacaccagcgactatgtcgtatgggtaaaggtccctcttcggagggaacatcagag

SEQ ID NO: 16215 - RNA, 88 nt, synthetic construct
  misc_feature 1..88: note = engineered ribonucleic acid scaffold (ERS) sequence
  source 1..88: mol_type = other RNA
actggcgcttctatctgattactctgagcgccagcaccagcgactatgtcgtatgggtaaaggtccctcttcggagggaacatcagag

SEQ ID NO: 16216 - RNA, 88 nt, synthetic construct
  misc_feature 1..88: note = engineered ribonucleic acid scaffold (ERS) sequence
  source 1..88: mol_type = other RNA
actggcgcttctatctgattactctgagcgccatgaccagcgactatgtcgtatggctaaaggtccctcttcggagggaacatcagag

SEQ ID NO: 16217 - RNA, 89 nt, synthetic construct
  misc_feature 1..89: note = engineered ribonucleic acid scaffold (ERS) sequence
  source 1..89: mol_type = other RNA
actggcgcttctatctgattactctgagcgccatgaccagcgactatgtcgtatgggctaaaggtccctcttcggagggaacatcagag

SEQ ID NO: 16218 - RNA, 88 nt, synthetic construct
  misc_feature 1..88: note = engineered ribonucleic acid scaffold (ERS) sequence
  source 1..88: mol_type = other RNA
actggcgcttctatctgattactctgagcgccatgaccagcgactatgtcgtatgggtaaaggtccctcttcggagggaacatcagag

SEQ ID NO: 16219 - RNA, 88 nt, synthetic construct
  misc_feature 1..88: note = engineered ribonucleic acid scaffold (ERS) sequence
  source 1..88: mol_type = other RNA
actggcgcttctatctgattactctgagcgccatccccagcgactatgtcgtatgggtaaaggtccctcttcggagggaacatcagag

SEQ ID NO: 16220 - RNA, 89 nt, synthetic construct
  misc_feature 1..89: note = engineered ribonucleic acid scaffold (ERS) sequence
  source 1..89: mol_type = other RNA
actggcgcttctatctgattactctgagcgccatcgccagcgactatgtcgtatggcgtaaaggtccctcttcggagggaacatcagag

SEQ ID NO: 16221 - RNA, 88 nt, synthetic construct
  misc_feature 1..88: note = engineered ribonucleic acid scaffold (ERS) sequence
  source 1..88: mol_type = other RNA
actggcgcttctatctgattactctgagcgccatcgccagcgactatgtcgtatgggtaaaggtccctcttcggagggaacatcagag

SEQ ID NO: 16222 - RNA, 88 nt, synthetic construct
  misc_feature 1..88: note = engineered ribonucleic acid scaffold (ERS) sequence
  source 1..88: mol_type = other RNA
actggcgcttctatctgattactctgagcgccatctccagcgactatgtcgtatgggtaaaggtccctcttcggagggaacatcagag

SEQ ID NO: 16223 - RNA, 88 nt, synthetic construct
  misc_feature 1..88: note = engineered ribonucleic acid scaffold (ERS) sequence
  source 1..88: mol_type = other RNA
actggcgcttctatctgattactctgagcgccatcacctgcgactatgtcgtaagggtaaaggtccctcttcggagggaacatcagag

SEQ ID NO: 16224 - RNA, 88 nt, synthetic construct
  misc_feature 1..88: note = engineered ribonucleic acid scaffold (ERS) sequence
  source 1..88: mol_type = other RNA
actggcgcttctatctgattactctgagcgccatcaccagagactatgtcttatgggtaaaggtccctcttcggagggaacatcagag

SEQ ID NO: 16225 - RNA, 88 nt, synthetic construct
  misc_feature 1..88: note = engineered ribonucleic acid scaffold (ERS) sequence
  source 1..88: mol_type = other RNA
actggcgcttctatctgattactctgagcgccatcaccagggactatgtcctatgggtaaaggtccctcttcggagggaacatcagag

SEQ ID NO: 16226 - RNA, 89 nt, synthetic construct
  misc_feature 1..89: note = engineered ribonucleic acid scaffold (ERS) sequence
  source 1..89: mol_type = other RNA
actggcgcttctatctgattactctgagcgccatcaccaggcactatgtgctattgggtaaaggtccctcttcggagggaacatcagag

SEQ ID NO: 16227 - RNA, 88 nt, synthetic construct
  misc_feature 1..88: note = engineered ribonucleic acid scaffold (ERS) sequence
  source 1..88: mol_type = other RNA
actggcgcttctatctgattactctgagcgccatcaccagccactatgtggtatgggtaaaggtccctcttcggagggaacatcagag

SEQ ID NO: 16228 - RNA, 88 nt, synthetic construct
  misc_feature 1..88: note = engineered ribonucleic acid scaffold (ERS) sequence
  source 1..88: mol_type = other RNA
actggcgcttctatctgattactctgagcgccatcaccagctactatgtagtatgggtaaaggtccctcttcggagggaacatcagag

SEQ ID NO: 16229 - RNA, 88 nt, synthetic construct
  misc_feature 1..88: note = engineered ribonucleic acid scaffold (ERS) sequence
  source 1..88: mol_type = other RNA
actggcgcttctatctgattactctgagcgccatcaccagcgattatgtcgtatgggtaaaggtccctcttcggagggaacatcagag

SEQ ID NO: 16230 - RNA, 88 nt, synthetic construct
  misc_feature 1..88: note = engineered ribonucleic acid scaffold (ERS) sequence
  source 1..88: mol_type = other RNA
actggcgcttctatctgattactctgagcgccatcaccagcgacgatgtcgtatgggtaaaggtccctcttcggagggaacatcagag

SEQ ID NO: 16231 - RNA, 88 nt, synthetic construct
  misc_feature 1..88: note = engineered ribonucleic acid scaffold (ERS) sequence
  source 1..88: mol_type = other RNA
actggcgcttctatctgattactctgagcgccatcaccagcgactctgtcgtatgggtaaaggtccctcttcggagggaacatcagag

SEQ ID NO: 16232 - RNA, 88 nt, synthetic construct
  misc_feature 1..88: note = engineered ribonucleic acid scaffold (ERS) sequence
  source 1..88: mol_type = other RNA
actggcgcttctatctgattactctgagcgccatcaccagcgactatgtcgtgtgggtaaaggtccctcttcggagggaacatcagag

SEQ ID NO: 16233 - RNA, 89 nt, synthetic construct
  misc_feature 1..89: note = engineered ribonucleic acid scaffold (ERS) sequence
  source 1..89: mol_type = other RNA
actggcgcttctatctgattactctgagcgccatcaccagcgactatgtcgtattgggtaaaggtccctcttcggagggaacatcagag

SEQ ID NO: 16234 - RNA, 89 nt, synthetic construct
  misc_feature 1..89: note = engineered ribonucleic acid scaffold (ERS) sequence
  source 1..89: mol_type = other RNA
actggcgcttctatctgattactctgagcgccatcaccagcgactatgtcgtatggagtaaaggtccctcttcggagggaacatcagag

SEQ ID NO: 16235 - RNA, 89 nt, synthetic construct
  misc_feature 1..89: note = engineered ribonucleic acid scaffold (ERS) sequence
  source 1..89: mol_type = other RNA
actggcgcttctatctgattactctgagcgccatcaccagcgactatgtcgtatggcgtaaaggtccctcttcggagggaacatcagag

SEQ ID NO: 16236 - RNA, 89 nt, synthetic construct
  misc_feature 1..89: note = engineered ribonucleic acid scaffold (ERS) sequence
  source 1..89: mol_type = other RNA
actggcgcttctatctgattactctgagcgccatcaccagcgactatgtcgtatggtgtaaaggtccctcttcggagggaacatcagag

SEQ ID NO: 16237 - RNA, 89 nt, synthetic construct
  misc_feature 1..89: note = engineered ribonucleic acid scaffold (ERS) sequence
  source 1..89: mol_type = other RNA
actggcgcttctatctgattactctgagcgccatcaccagcgactatgtcgtatgggctaaaggtccctcttcggagggaacatcagag

SEQ ID NO: 16238 - RNA, 86 nt, synthetic construct
  misc_feature 1..86: note = engineered ribonucleic acid scaffold (ERS) sequence
  source 1..86: mol_type = other RNA
actggcgcttctatctgattactctgagcgccatcaccagcgactatgtcgtatgggtaggtccctcttcggagggaacatcagag

SEQ ID NO: 16239 - RNA, 88 nt, synthetic construct
  misc_feature 1..88: note = engineered ribonucleic acid scaffold (ERS) sequence
  source 1..88: mol_type = other RNA
actggcgcttctatctgattactctgagcgccatcaccagcgactatgtcgtatgggtgaaggtccctcttcggagggaacatcagag

SEQ ID NO: 16240 - RNA, 88 nt, synthetic construct
  misc_feature 1..88: note = engineered ribonucleic acid scaffold (ERS) sequence
  source 1..88: mol_type = other RNA
actggcgcttctatctgattactctgagcgccatcaccagcgactatgtcgtatgggtagaggtccctcttcggagggaacatcagag

SEQ ID NO: 16241 - RNA, 92 nt, synthetic construct
  misc_feature 1..92: note = engineered ribonucleic acid scaffold (ERS) sequence
  source 1..92: mol_type = other RNA
actggcgcttctatctgattactctgagcgccaacaccagcgactatgtcgtatgggtaaaggtgacggtcttcggaccgtcaccatcagag

SEQ ID NO: 16242 - RNA, 92 nt, synthetic construct
  misc_feature 1..92: note = engineered ribonucleic acid scaffold (ERS) sequence
  source 1..92: mol_type = other RNA
actggcgcttctatctgattactctgagcgccagcaccagcgactatgtcgtatgggtaaaggtgacggtcttcggaccgtcaccatcagag

SEQ ID NO: 16243 - RNA, 92 nt, synthetic construct
  misc_feature 1..92: note = engineered ribonucleic acid scaffold (ERS) sequence
  source 1..92: mol_type = other RNA
actggcgcttctatctgattactctgagcgccatgaccagcgactatgtcgtatggctaaaggtgacggtcttcggaccgtcaccatcagag

SEQ ID NO: 16244 - RNA, 93 nt, synthetic construct
  misc_feature 1..93: note = engineered ribonucleic acid scaffold (ERS) sequence
  source 1..93: mol_type = other RNA
actggcgcttctatctgattactctgagcgccatgaccagcgactatgtcgtatgggctaaaggtgacggtcttcggaccgtcaccatcagag

SEQ ID NO: 16245 - RNA, 92 nt, synthetic construct
  misc_feature 1..92: note = engineered ribonucleic acid scaffold (ERS) sequence
  source 1..92: mol_type = other RNA
actggcgcttctatctgattactctgagcgccatgaccagcgactatgtcgtatgggtaaaggtgacggtcttcggaccgtcaccatcagag

SEQ ID NO: 16246 - RNA, 92 nt, synthetic construct
  misc_feature 1..92: note = engineered ribonucleic acid scaffold (ERS) sequence
  source 1..92: mol_type = other RNA
actggcgcttctatctgattactctgagcgccatccccagcgactatgtcgtatgggtaaaggtgacggtcttcggaccgtcaccatcagag

SEQ ID NO: 16247 - RNA, 93 nt, synthetic construct
  misc_feature 1..93: note = engineered ribonucleic acid scaffold (ERS) sequence
  source 1..93: mol_type = other RNA
actggcgcttctatctgattactctgagcgccatcgccagcgactatgtcgtatggcgtaaaggtgacggtcttcggaccgtcaccatcagag

SEQ ID NO: 16248 - RNA, 92 nt, synthetic construct
  misc_feature 1..92: note = engineered ribonucleic acid scaffold (ERS) sequence
  source 1..92: mol_type = other RNA
actggcgcttctatctgattactctgagcgccatcgccagcgactatgtcgtatgggtaaaggtgacggtcttcggaccgtcaccatcagag

SEQ ID NO: 16249 - RNA, 92 nt, synthetic construct
  misc_feature 1..92: note = engineered ribonucleic acid scaffold (ERS) sequence
  source 1..92: mol_type = other RNA
actggcgcttctatctgattactctgagcgccatctccagcgactatgtcgtatgggtaaaggtgacggtcttcggaccgtcaccatcagag

SEQ ID NO: 16250 - RNA, 92 nt, synthetic construct
  misc_feature 1..92: note = engineered ribonucleic acid scaffold (ERS) sequence
  source 1..92: mol_type = other RNA
actggcgcttctatctgattactctgagcgccatcacctgcgactatgtcgtaagggtaaaggtgacggtcttcggaccgtcaccatcagag

SEQ ID NO: 16251 - RNA, 92 nt, synthetic construct
  misc_feature 1..92: note = engineered ribonucleic acid scaffold (ERS) sequence
  source 1..92: mol_type = other RNA
actggcgcttctatctgattactctgagcgccatcaccagagactatgtcttatgggtaaaggtgacggtcttcggaccgtcaccatcagag

SEQ ID NO: 16252 - RNA, 92 nt, synthetic construct
  misc_feature 1..92: note = engineered ribonucleic acid scaffold (ERS) sequence
  source 1..92: mol_type = other RNA
actggcgcttctatctgattactctgagcgccatcaccagggactatgtcctatgggtaaaggtgacggtcttcggaccgtcaccatcagag

SEQ ID NO: 16253 - RNA, 93 nt, synthetic construct
  misc_feature 1..93: note = engineered ribonucleic acid scaffold (ERS) sequence
  source 1..93: mol_type = other RNA
actggcgcttctatctgattactctgagcgccatcaccaggcactatgtgctattgggtaaaggtgacggtcttcggaccgtcaccatcagag

SEQ ID NO: 16254 - RNA, 92 nt, synthetic construct
  misc_feature 1..92: note = engineered ribonucleic acid scaffold (ERS) sequence
  source 1..92: mol_type = other RNA
actggcgcttctatctgattactctgagcgccatcaccagccactatgtggtatgggtaaaggtgacggtcttcggaccgtcaccatcagag

SEQ ID NO: 16255 - RNA, 92 nt, synthetic construct
  misc_feature 1..92: note = engineered ribonucleic acid scaffold (ERS) sequence
  source 1..92: mol_type = other RNA
actggcgcttctatctgattactctgagcgccatcaccagctactatgtagtatgggtaaaggtgacggtcttcggaccgtcaccatcagag

SEQ ID NO: 16256 - RNA, 92 nt, synthetic construct
  misc_feature 1..92: note = engineered ribonucleic acid scaffold (ERS) sequence
  source 1..92: mol_type = other RNA
actggcgcttctatctgattactctgagcgccatcaccagcgattatgtcgtatgggtaaaggtgacggtcttcggaccgtcaccatcagag

SEQ ID NO: 16257 - RNA, 92 nt, synthetic construct
  misc_feature 1..92: note = engineered ribonucleic acid scaffold (ERS) sequence
  source 1..92: mol_type = other RNA
actggcgcttctatctgattactctgagcgccatcaccagcgacgatgtcgtatgggtaaaggtgacggtcttcggaccgtcaccatcagag

SEQ ID NO: 16258 - RNA, 92 nt, synthetic construct
  misc_feature 1..92: note = engineered ribonucleic acid scaffold (ERS) sequence
  source 1..92: mol_type = other RNA
actggcgcttctatctgattactctgagcgccatcaccagcgactctgtcgtatgggtaaaggtgacggtcttcggaccgtcaccatcagag

SEQ ID NO: 16259 - RNA, 92 nt, synthetic construct
  misc_feature 1..92: note = engineered ribonucleic acid scaffold (ERS) sequence
  source 1..92: mol_type = other RNA
actggcgcttctatctgattactctgagcgccatcaccagcgactatgtcgtgtgggtaaaggtgacggtcttcggaccgtcaccatcagag

SEQ ID NO: 16260 - RNA, 93 nt, synthetic construct
  misc_feature 1..93: note = engineered ribonucleic acid scaffold (ERS) sequence
  source 1..93: mol_type = other RNA
actggcgcttctatctgattactctgagcgccatcaccagcgactatgtcgtattgggtaaaggtgacggtcttcggaccgtcaccatcagag

SEQ ID NO: 16261 - RNA, 93 nt, synthetic construct
  misc_feature 1..93: note = engineered ribonucleic acid scaffold (ERS) sequence
  source 1..93: mol_type = other RNA
actggcgcttctatctgattactctgagcgccatcaccagcgactatgtcgtatggagtaaaggtgacggtcttcggaccgtcaccatcagag

SEQ ID NO: 16262 - RNA, 93 nt, synthetic construct
  misc_feature 1..93: note = engineered ribonucleic acid scaffold (ERS) sequence
  source 1..93: mol_type = other RNA
actggcgcttctatctgattactctgagcgccatcaccagcgactatgtcgtatggcgtaaaggtgacggtcttcggaccgtcaccatcagag

SEQ ID NO: 16263 - RNA, 93 nt, synthetic construct
  misc_feature 1..93: note = engineered ribonucleic acid scaffold (ERS) sequence
  source 1..93: mol_type = other RNA
actggcgcttctatctgattactctgagcgccatcaccagcgactatgtcgtatggtgtaaaggtgacggtcttcggaccgtcaccatcagag

SEQ ID NO: 16264 - RNA, 93 nt, synthetic construct
  misc_feature 1..93: note = engineered ribonucleic acid scaffold (ERS) sequence
  source 1..93: mol_type = other RNA
actggcgcttctatctgattactctgagcgccatcaccagcgactatgtcgtatgggctaaaggtgacggtcttcggaccgtcaccatcagag

SEQ ID NO: 16265 - RNA, 90 nt, synthetic construct
  misc_feature 1..90: note = engineered ribonucleic acid scaffold (ERS) sequence
  source 1..90: mol_type = other RNA
actggcgcttctatctgattactctgagcgccatcaccagcgactatgtcgtatgggtaggtgacggtcttcggaccgtcaccatcagag

SEQ ID NO: 16266 - RNA, 92 nt, synthetic construct
  misc_feature 1..92: note = engineered ribonucleic acid scaffold (ERS) sequence
  source 1..92: mol_type = other RNA
actggcgcttctatctgattactctgagcgccatcaccagcgactatgtcgtatgggtgaaggtgacggtcttcggaccgtcaccatcagag

SEQ ID NO: 16267 - RNA, 92 nt, synthetic construct
  misc_feature 1..92: note = engineered ribonucleic acid scaffold (ERS) sequence
  source 1..92: mol_type = other RNA
actggcgcttctatctgattactctgagcgccatcaccagcgactatgtcgtatgggtagaggtgacggtcttcggaccgtcaccatcagag

SEQ ID NO: 16268 - RNA, 90 nt, synthetic construct
  misc_feature 1..90: note = engineered ribonucleic acid scaffold (ERS) sequence
  source 1..90: mol_type = other RNA
actggcgcttctatctgattactctgagcgccaacaccagcgactatgtcgtatgggtaaagtctccctcttcggagggaggcatcagag

SEQ ID NO: 16269 - RNA, 90 nt, synthetic construct
  misc_feature 1..90: note = engineered ribonucleic acid scaffold (ERS) sequence
  source 1..90: mol_type = other RNA
actggcgcttctatctgattactctgagcgccagcaccagcgactatgtcgtatgggtaaagtctccctcttcggagggaggcatcagag

SEQ ID NO: 16270 - RNA, 90 nt, synthetic construct
  misc_feature 1..90: note = engineered ribonucleic acid scaffold (ERS) sequence
  source 1..90: mol_type = other RNA
actggcgcttctatctgattactctgagcgccatgaccagcgactatgtcgtatggctaaagtctccctcttcggagggaggcatcagag

SEQ ID NO: 16271 - RNA, 91 nt, synthetic construct
  misc_feature 1..91: note = engineered ribonucleic acid scaffold (ERS) sequence
  source 1..91: mol_type = other RNA
actggcgcttctatctgattactctgagcgccatgaccagcgactatgtcgtatgggctaaagtctccctcttcggagggaggcatcagag

SEQ ID NO: 16272 - RNA, 90 nt, synthetic construct
  misc_feature 1..90: note = engineered ribonucleic acid scaffold (ERS) sequence
  source 1..90: mol_type = other RNA
actggcgcttctatctgattactctgagcgccatgaccagcgactatgtcgtatgggtaaagtctccctcttcggagggaggcatcagag

SEQ ID NO: 16273 - RNA, 90 nt, synthetic construct
  misc_feature 1..90: note = engineered ribonucleic acid scaffold (ERS) sequence
  source 1..90: mol_type = other RNA
actggcgcttctatctgattactctgagcgccatccccagcgactatgtcgtatgggtaaagtctccctcttcggagggaggcatcagag

SEQ ID NO: 16274 - RNA, 91 nt, synthetic construct
  misc_feature 1..91: note = engineered ribonucleic acid scaffold (ERS) sequence
  source 1..91: mol_type = other RNA
actggcgcttctatctgattactctgagcgccatcgccagcgactatgtcgtatggcgtaaagtctccctcttcggagggaggcatcagag

SEQ ID NO: 16275 - RNA, 90 nt, synthetic construct
  misc_feature 1..90: note = engineered ribonucleic acid scaffold (ERS) sequence
  source 1..90: mol_type = other RNA
actggcgcttctatctgattactctgagcgccatcgccagcgactatgtcgtatgggtaaagtctccctcttcggagggaggcatcagag

SEQ ID NO: 16276 - RNA, 90 nt, synthetic construct
  misc_feature 1..90: note = engineered ribonucleic acid scaffold (ERS) sequence
  source 1..90: mol_type = other RNA
actggcgcttctatctgattactctgagcgccatctccagcgactatgtcgtatgggtaaagtctccctcttcggagggaggcatcagag

SEQ ID NO: 16277 - RNA, 90 nt, synthetic construct
  misc_feature 1..90: note = engineered ribonucleic acid scaffold (ERS) sequence
  source 1..90: mol_type = other RNA
actggcgcttctatctgattactctgagcgccatcacctgcgactatgtcgtaagggtaaagtctccctcttcggagggaggcatcagag

SEQ ID NO: 16278 - RNA, 90 nt, synthetic construct
  misc_feature 1..90: note = engineered ribonucleic acid scaffold (ERS) sequence
  source 1..90: mol_type = other RNA
actggcgcttctatctgattactctgagcgccatcaccagagactatgtcttatgggtaaagtctccctcttcggagggaggcatcagag

SEQ ID NO: 16279 - RNA, 90 nt, synthetic construct
  misc_feature 1..90: note = engineered ribonucleic acid scaffold (ERS) sequence
  source 1..90: mol_type = other RNA
actggcgcttctatctgattactctgagcgccatcaccagggactatgtcctatgggtaaagtctccctcttcggagggaggcatcagag

SEQ ID NO: 16280 - RNA, 91 nt, synthetic construct
  misc_feature 1..91: note = engineered ribonucleic acid scaffold (ERS) sequence
  source 1..91: mol_type = other RNA
actggcgcttctatctgattactctgagcgccatcaccaggcactatgtgctattgggtaaagtctccctcttcggagggaggcatcagag

SEQ ID NO: 16281 - RNA, 90 nt, synthetic construct
  misc_feature 1..90: note = engineered ribonucleic acid scaffold (ERS) sequence
  source 1..90: mol_type = other RNA
actggcgcttctatctgattactctgagcgccatcaccagccactatgtggtatgggtaaagtctccctcttcggagggaggcatcagag

SEQ ID NO: 16282 - RNA, 90 nt, synthetic construct
  misc_feature 1..90: note = engineered ribonucleic acid scaffold (ERS) sequence
  source 1..90: mol_type = other RNA
actggcgcttctatctgattactctgagcgccatcaccagctactatgtagtatgggtaaagtctccctcttcggagggaggcatcagag

SEQ ID NO: 16283 - RNA, 90 nt, synthetic construct
  misc_feature 1..90: note = engineered ribonucleic acid scaffold (ERS) sequence
  source 1..90: mol_type = other RNA
actggcgcttctatctgattactctgagcgccatcaccagcgattatgtcgtatgggtaaagtctccctcttcggagggaggcatcagag

SEQ ID NO: 16284 - RNA, 90 nt, synthetic construct
  misc_feature 1..90: note = engineered ribonucleic acid scaffold (ERS) sequence
  source 1..90: mol_type = other RNA
actggcgcttctatctgattactctgagcgccatcaccagcgacgatgtcgtatgggtaaagtctccctcttcggagggaggcatcagag

SEQ ID NO: 16285 - RNA, 90 nt, synthetic construct
  misc_feature 1..90: note = engineered ribonucleic acid scaffold (ERS) sequence
  source 1..90: mol_type = other RNA
actggcgcttctatctgattactctgagcgccatcaccagcgactctgtcgtatgggtaaagtctccctcttcggagggaggcatcagag

SEQ ID NO: 16286 - RNA, 90 nt, synthetic construct
  misc_feature 1..90: note = engineered ribonucleic acid scaffold (ERS) sequence
  source 1..90: mol_type = other RNA
actggcgcttctatctgattactctgagcgccatcaccagcgactatgtcgtgtgggtaaagtctccctcttcggagggaggcatcagag

SEQ ID NO: 16287 - RNA, 91 nt, synthetic construct
  misc_feature 1..91: note = engineered ribonucleic acid scaffold (ERS) sequence
  source 1..91: mol_type = other RNA
actggcgcttctatctgattactctgagcgccatcaccagcgactatgtcgtattgggtaaagtctccctcttcggagggaggcatcagag

SEQ ID NO: 16288 - RNA, 91 nt, synthetic construct
  misc_feature 1..91: note = engineered ribonucleic acid scaffold (ERS) sequence
  source 1..91: mol_type = other RNA
actggcgcttctatctgattactctgagcgccatcaccagcgactatgtcgtatggagtaaagtctccctcttcggagggaggcatcagag

SEQ ID NO: 16289 - RNA, 91 nt, synthetic construct
  misc_feature 1..91: note = engineered ribonucleic acid scaffold (ERS) sequence
  source 1..91: mol_type = other RNA
actggcgcttctatctgattactctgagcgccatcaccagcgactatgtcgtatggcgtaaagtctccctcttcggagggaggcatcagag

SEQ ID NO: 16290 - RNA, 91 nt, synthetic construct
  misc_feature 1..91: note = engineered ribonucleic acid scaffold (ERS) sequence
  source 1..91: mol_type = other RNA
actggcgcttctatctgattactctgagcgccatcaccagcgactatgtcgtatggtgtaaagtctccctcttcggagggaggcatcagag

SEQ ID NO: 16291 - RNA, 91 nt, synthetic construct
  misc_feature 1..91: note = engineered ribonucleic acid scaffold (ERS) sequence
  source 1..91: mol_type = other RNA
actggcgcttctatctgattactctgagcgccatcaccagcgactatgtcgtatgggctaaagtctccctcttcggagggaggcatcagag

SEQ ID NO: 16292 - RNA, 88 nt, synthetic construct
  misc_feature 1..88: note = engineered ribonucleic acid scaffold (ERS) sequence
  source 1..88: mol_type = other RNA
actggcgcttctatctgattactctgagcgccatcaccagcgactatgtcgtatgggtagtctccctcttcggagggaggcatcagag

SEQ ID NO: 16293 - RNA, 90 nt, synthetic construct
  misc_feature 1..90: note = engineered ribonucleic acid scaffold (ERS) sequence
  source 1..90: mol_type = other RNA
actggcgcttctatctgattactctgagcgccatcaccagcgactatgtcgtatgggtgaagtctccctcttcggagggaggcatcagag

SEQ ID NO: 16294 - RNA, 90 nt, synthetic construct
  misc_feature 1..90: note = engineered ribonucleic acid scaffold (ERS) sequence
  source 1..90: mol_type = other RNA
actggcgcttctatctgattactctgagcgccatcaccagcgactatgtcgtatgggtagagtctccctcttcggagggaggcatcagag

SEQ ID NO: 16295 - RNA, 92 nt, synthetic construct
  misc_feature 1..92: note = engineered ribonucleic acid scaffold (ERS) sequence
  source 1..92: mol_type = other RNA
actggcgcttctatctgattactctgagcgccaacaccagcgactatgtcgtatgggtaaagtgcgcccgcttcggcgggcgcacatcagag

SEQ ID NO: 16296 - RNA, 92 nt, synthetic construct
  misc_feature 1..92: note = engineered ribonucleic acid scaffold (ERS) sequence
  source 1..92: mol_type = other RNA
actggcgcttctatctgattactctgagcgccagcaccagcgactatgtcgtatgggtaaagtgcgcccgcttcggcgggcgcacatcagag

SEQ ID NO: 16297 - RNA, 92 nt, synthetic construct
  misc_feature 1..92: note = engineered ribonucleic acid scaffold (ERS) sequence
  source 1..92: mol_type = other RNA
actggcgcttctatctgattactctgagcgccatgaccagcgactatgtcgtatggctaaagtgcgcccgcttcggcgggcgcacatcagag

SEQ ID NO: 16298 - RNA, 93 nt, synthetic construct
  misc_feature 1..93: note = engineered ribonucleic acid scaffold (ERS) sequence
  source 1..93: mol_type = other RNA
actggcgcttctatctgattactctgagcgccatgaccagcgactatgtcgtatgggctaaagtgcgcccgcttcggcgggcgcacatcagag

SEQ ID NO: 16299 - RNA, 92 nt, synthetic construct
  misc_feature 1..92: note = engineered ribonucleic acid scaffold (ERS) sequence
  source 1..92: mol_type = other RNA
actggcgcttctatctgattactctgagcgccatgaccagcgactatgtcgtatgggtaaagtgcgcccgcttcggcgggcgcacatcagag

SEQ ID NO: 16300 - RNA, 92 nt, synthetic construct
  misc_feature 1..92: note = engineered ribonucleic acid scaffold (ERS) sequence
  source 1..92: mol_type = other RNA
actggcgcttctatctgattactctgagcgccatccccagcgactatgtcgtatgggtaaagtgcgcccgcttcggcgggcgcacatcagag

SEQ ID NO: 16301 - RNA, 93 nt, synthetic construct
  misc_feature 1..93: note = engineered ribonucleic acid scaffold (ERS) sequence
  source 1..93: mol_type = other RNA
actggcgcttctatctgattactctgagcgccatcgccagcgactatgtcgtatggcgtaaagtgcgcccgcttcggcgggcgcacatcagag

SEQ ID NO: 16302 - RNA, 92 nt, synthetic construct
  misc_feature 1..92: note = engineered ribonucleic acid scaffold (ERS) sequence
  source 1..92: mol_type = other RNA
actggcgcttctatctgattactctgagcgccatcgccagcgactatgtcgtatgggtaaagtgcgcccgcttcggcgggcgcacatcagag

SEQ ID NO: 16303 - RNA, 92 nt, synthetic construct
  misc_feature 1..92: note = engineered ribonucleic acid scaffold (ERS) sequence
  source 1..92: mol_type = other RNA
actggcgcttctatctgattactctgagcgccatctccagcgactatgtcgtatgggtaaagtgcgcccgcttcggcgggcgcacatcagag

SEQ ID NO: 16304 - RNA, 92 nt, synthetic construct
  misc_feature 1..92: note = engineered ribonucleic acid scaffold (ERS) sequence
  source 1..92: mol_type = other RNA
actggcgcttctatctgattactctgagcgccatcacctgcgactatgtcgtaagggtaaagtgcgcccgcttcggcgggcgcacatcagag

SEQ ID NO: 16305 - RNA, 92 nt, synthetic construct
  misc_feature 1..92: note = engineered ribonucleic acid scaffold (ERS) sequence
  source 1..92: mol_type = other RNA
actggcgcttctatctgattactctgagcgccatcaccagagactatgtcttatgggtaaagtgcgcccgcttcggcgggcgcacatcagag

SEQ ID NO: 16306 - RNA, 92 nt, synthetic construct
  misc_feature 1..92: note = engineered ribonucleic acid scaffold (ERS) sequence
  source 1..92: mol_type = other RNA
actggcgcttctatctgattactctgagcgccatcaccagggactatgtcctatgggtaaagtgcgcccgcttcggcgggcgcacatcagag

SEQ ID NO: 16307 - RNA, 93 nt, synthetic construct
  misc_feature 1..93: note = engineered ribonucleic acid scaffold (ERS) sequence
  source 1..93: mol_type = other RNA
actggcgcttctatctgattactctgagcgccatcaccaggcactatgtgctattgggtaaagtgcgcccgcttcggcgggcgcacatcagag

SEQ ID NO: 16308 - RNA, 92 nt, synthetic construct
  misc_feature 1..92: note = engineered ribonucleic acid scaffold (ERS) sequence
  source 1..92: mol_type = other RNA
actggcgcttctatctgattactctgagcgccatcaccagccactatgtggtatgggtaaagtgcgcccgcttcggcgggcgcacatcagag

SEQ ID NO: 16309 - RNA, 92 nt, synthetic construct
  misc_feature 1..92: note = engineered ribonucleic acid scaffold (ERS) sequence
  source 1..92: mol_type = other RNA
actggcgcttctatctgattactctgagcgccatcaccagctactatgtagtatgggtaaagtgcgcccgcttcggcgggcgcacatcagag

SEQ ID NO: 16310 - RNA, 92 nt, synthetic construct
  misc_feature 1..92: note = engineered ribonucleic acid scaffold (ERS) sequence
  source 1..92: mol_type = other RNA
actggcgcttctatctgattactctgagcgccatcaccagcgattatgtcgtatgggtaaagtgcgcccgcttcggcgggcgcacatcagag

SEQ ID NO: 16311 - RNA, 92 nt, synthetic construct
  misc_feature 1..92: note = engineered ribonucleic acid scaffold (ERS) sequence
  source 1..92: mol_type = other RNA
actggcgcttctatctgattactctgagcgccatcaccagcgacgatgtcgtatgggtaaagtgcgcccgcttcggcgggcgcacatcagag

SEQ ID NO: 16312 - RNA, 92 nt, synthetic construct
  misc_feature 1..92: note = engineered ribonucleic acid scaffold (ERS) sequence
  source 1..92: mol_type = other RNA
actggcgcttctatctgattactctgagcgccatcaccagcgactctgtcgtatgggtaaagtgcgcccgcttcggcgggcgcacatcagag

SEQ ID NO: 16313 - RNA, 92 nt, synthetic construct
  misc_feature 1..92: note = engineered ribonucleic acid scaffold (ERS) sequence
  source 1..92: mol_type = other RNA
actggcgcttctatctgattactctgagcgccatcaccagcgactatgtcgtgtgggtaaagtgcgcccgcttcggcgggcgcacatcagag

SEQ ID NO: 16314 - RNA, 93 nt, synthetic construct
  misc_feature 1..93: note = engineered ribonucleic acid scaffold (ERS) sequence
  source 1..93: mol_type = other RNA
actggcgcttctatctgattactctgagcgccatcaccagcgactatgtcgtattgggtaaagtgcgcccgcttcggcgggcgcacatcagag

SEQ ID NO: 16315 - RNA, 93 nt, synthetic construct
  misc_feature 1..93: note = engineered ribonucleic acid scaffold (ERS) sequence
  source 1..93: mol_type = other RNA
actggcgcttctatctgattactctgagcgccatcaccagcgactatgtcgtatggagtaaagtgcgcccgcttcggcgggcgcacatcagag

SEQ ID NO: 16316 - RNA, 93 nt, synthetic construct
  misc_feature 1..93: note = engineered ribonucleic acid scaffold (ERS) sequence
  source 1..93: mol_type = other RNA
actggcgcttctatctgattactctgagcgccatcaccagcgactatgtcgtatggcgtaaagtgcgcccgcttcggcgggcgcacatcagag

SEQ ID NO: 16317 - RNA, 93 nt, synthetic construct
  misc_feature 1..93: note = engineered ribonucleic acid scaffold (ERS) sequence
  source 1..93: mol_type = other RNA
actggcgcttctatctgattactctgagcgccatcaccagcgactatgtcgtatggtgtaaagtgcgcccgcttcggcgggcgcacatcagag

SEQ ID NO: 16318 - RNA, 93 nt, synthetic construct
  misc_feature 1..93: note = engineered ribonucleic acid scaffold (ERS) sequence
  source 1..93: mol_type = other RNA
actggcgcttctatctgattactctgagcgccatcaccagcgactatgtcgtatgggctaaagtgcgcccgcttcggcgggcgcacatcagag

SEQ ID NO: 16319 - RNA, 90 nt, synthetic construct
  misc_feature 1..90: note = engineered ribonucleic acid scaffold (ERS) sequence
  source 1..90: mol_type = other RNA
actggcgcttctatctgattactctgagcgccatcaccagcgactatgtcgtatgggtagtgcgcccgcttcggcgggcgcacatcagag

SEQ ID NO: 16320 - RNA, 92 nt, synthetic construct
  misc_feature 1..92: note = engineered ribonucleic acid scaffold (ERS) sequence
  source 1..92: mol_type = other RNA
actggcgcttctatctgattactctgagcgccatcaccagcgactatgtcgtatgggtgaagtgcgcccgcttcggcgggcgcacatcagag

SEQ ID NO: 16321 - RNA, 92 nt, synthetic construct
  misc_feature 1..92: note = engineered ribonucleic acid scaffold (ERS) sequence
  source 1..92: mol_type = other RNA
actggcgcttctatctgattactctgagcgccatcaccagcgactatgtcgtatgggtagagtgcgcccgcttcggcgggcgcacatcagag

SEQ ID NO: 16322 - RNA, 92 nt, synthetic construct
  misc_feature 1..92: note = engineered ribonucleic acid scaffold (ERS) sequence
  source 1..92: mol_type = other RNA
actggcgcttctatctgattactctgagcgccaacaccagcgactatgtcgtatgggtaaataatgaaaacttcggttttcattaatcagag

SEQ ID NO: 16323 - RNA, 92 nt, synthetic construct
  misc_feature 1..92: note = engineered ribonucleic acid scaffold (ERS) sequence
  source 1..92: mol_type = other RNA
actggcgcttctatctgattactctgagcgccagcaccagcgactatgtcgtatgggtaaataatgaaaacttcggttttcattaatcagag

SEQ ID NO: 16324 - RNA, 92 nt, synthetic construct
  misc_feature 1..92: note = engineered ribonucleic acid scaffold (ERS) sequence
  source 1..92: mol_type = other RNA
actggcgcttctatctgattactctgagcgccatgaccagcgactatgtcgtatggctaaataatgaaaacttcggttttcattaatcagag

SEQ ID NO: 16325 - RNA, 93 nt, synthetic construct
  misc_feature 1..93: note = engineered ribonucleic acid scaffold (ERS) sequence
  source 1..93: mol_type = other RNA
actggcgcttctatctgattactctgagcgccatgaccagcgactatgtcgtatgggctaaataatgaaaacttcggttttcattaatcagag

SEQ ID NO: 16326 - RNA, 92 nt, synthetic construct
  misc_feature 1..92: note = engineered ribonucleic acid scaffold (ERS) sequence
  source 1..92: mol_type = other RNA
actggcgcttctatctgattactctgagcgccatgaccagcgactatgtcgtatgggtaaataatgaaaacttcggttttcattaatcagag

SEQ ID NO: 16327 - RNA, 92 nt, synthetic construct
  misc_feature 1..92: note = engineered ribonucleic acid scaffold (ERS) sequence
  source 1..92: mol_type = other RNA
actggcgcttctatctgattactctgagcgccatccccagcgactatgtcgtatgggtaaataatgaaaacttcggttttcattaatcagag

SEQ ID NO: 16328 - RNA, 93 nt, synthetic construct
  misc_feature 1..93: note = engineered ribonucleic acid scaffold (ERS) sequence
  source 1..93: mol_type = other RNA
actggcgcttctatctgattactctgagcgccatcgccagcgactatgtcgtatggcgtaaataatgaaaacttcggttttcattaatcagag

SEQ ID NO: 16329 - RNA, 92 nt, synthetic construct
  misc_feature 1..92: note = engineered ribonucleic acid scaffold (ERS) sequence
  source 1..92: mol_type = other RNA
actggcgcttctatctgattactctgagcgccatcgccagcgactatgtcgtatgggtaaataatgaaaacttcggttttcattaatcagag

SEQ ID NO: 16330 - RNA, 92 nt, synthetic construct
  misc_feature 1..92: note = engineered ribonucleic acid scaffold (ERS) sequence
  source 1..92: mol_type = other RNA
actggcgcttctatctgattactctgagcgccatctccagcgactatgtcgtatgggtaaataatgaaaacttcggttttcattaatcagag

SEQ ID NO: 16331 - RNA, 92 nt, synthetic construct
  misc_feature 1..92: note = engineered ribonucleic acid scaffold (ERS) sequence
  source 1..92: mol_type = other RNA
actggcgcttctatctgattactctgagcgccatcacctgcgactatgtcgtaagggtaaataatgaaaacttcggttttcattaatcagag

SEQ ID NO: 16332 - RNA, 92 nt, synthetic construct
  misc_feature 1..92: note = engineered ribonucleic acid scaffold (ERS) sequence
  source 1..92: mol_type = other RNA
actggcgcttctatctgattactctgagcgccatcaccagagactatgtcttatgggtaaataatgaaaacttcggttttcattaatcagag

SEQ ID NO: 16333 - RNA, 92 nt, synthetic construct
  misc_feature 1..92: note = engineered ribonucleic acid scaffold (ERS) sequence
  source 1..92: mol_type = other RNA
actggcgcttctatctgattactctgagcgccatcaccagggactatgtcctatgggtaaataatgaaaacttcggttttcattaatcagag

SEQ ID NO: 16334 - RNA, 93 nt, synthetic construct
  misc_feature 1..93: note = engineered ribonucleic acid scaffold (ERS) sequence
  source 1..93: mol_type = other RNA
actggcgcttctatctgattactctgagcgccatcaccaggcactatgtgctattgggtaaataatgaaaacttcggttttcattaatcagag

SEQ ID NO: 16335 - RNA, 92 nt, synthetic construct
  misc_feature 1..92: note = engineered ribonucleic acid scaffold (ERS) sequence
  source 1..92: mol_type = other RNA
actggcgcttctatctgattactctgagcgccatcaccagccactatgtggtatgggtaaataatgaaaacttcggttttcattaatcagag

SEQ ID NO: 16336 - RNA, 92 nt, synthetic construct
  misc_feature 1..92: note = engineered ribonucleic acid scaffold (ERS) sequence
  source 1..92: mol_type = other RNA
actggcgcttctatctgattactctgagcgccatcaccagctactatgtagtatgggtaaataatgaaaacttcggttttcattaatcagag

SEQ ID NO: 16337 - RNA, 92 nt, synthetic construct
  misc_feature 1..92: note = engineered ribonucleic acid scaffold (ERS) sequence
  source 1..92: mol_type = other RNA
actggcgcttctatctgattactctgagcgccatcaccagcgattatgtcgtatgggtaaataatgaaaacttcggttttcattaatcagag

SEQ ID NO: 16338 - RNA, 92 nt, synthetic construct
  misc_feature 1..92: note = engineered ribonucleic acid scaffold (ERS) sequence
  source 1..92: mol_type = other RNA
actggcgcttctatctgattactctgagcgccatcaccagcgacgatgtcgtatgggtaaataatgaaaacttcggttttcattaatcagag

SEQ ID NO: 16339 - RNA, 92 nt, synthetic construct
  misc_feature 1..92: note = engineered ribonucleic acid scaffold (ERS) sequence
  source 1..92: mol_type = other RNA
actggcgcttctatctgattactctgagcgccatcaccagcgactctgtcgtatgggtaaataatgaaaacttcggttttcattaatcagag

SEQ ID NO: 16340 - RNA, 92 nt, synthetic construct
  misc_feature 1..92: note = engineered ribonucleic acid scaffold (ERS) sequence
  source 1..92: mol_type = other RNA
actggcgcttctatctgattactctgagcgccatcaccagcgactatgtcgtgtgggtaaataatgaaaacttcggttttcattaatcagag

SEQ ID NO: 16341 - RNA, 93 nt, synthetic construct
  misc_feature 1..93: note = engineered ribonucleic acid scaffold (ERS) sequence
  source 1..93: mol_type = other RNA
actggcgcttctatctgattactctgagcgccatcaccagcgactatgtcgtattgggtaaataatgaaaacttcggttttcattaatcagag

SEQ ID NO: 16342 - RNA, 93 nt, synthetic construct
  misc_feature 1..93: note = engineered ribonucleic acid scaffold (ERS) sequence
  source 1..93: mol_type = other RNA
actggcgcttctatctgattactctgagcgccatcaccagcgactatgtcgtatggagtaaataatgaaaacttcggttttcattaatcagag

SEQ ID NO: 16343 - RNA, 93 nt, synthetic construct
  misc_feature 1..93: note = engineered ribonucleic acid scaffold (ERS) sequence
  source 1..93: mol_type = other RNA
actggcgcttctatctgattactctgagcgccatcaccagcgactatgtcgtatggcgtaaataatgaaaacttcggttttcattaatcagag

SEQ ID NO: 16344 - RNA, 93 nt, synthetic construct
  misc_feature 1..93: note = engineered ribonucleic acid scaffold (ERS) sequence
  source 1..93: mol_type = other RNA
actggcgcttctatctgattactctgagcgccatcaccagcgactatgtcgtatggtgtaaataatgaaaacttcggttttcattaatcagag

SEQ ID NO: 16345 - RNA, 93 nt, synthetic construct
  misc_feature 1..93: note = engineered ribonucleic acid scaffold (ERS) sequence
  source 1..93: mol_type = other RNA
actggcgcttctatctgattactctgagcgccatcaccagcgactatgtcgtatgggctaaataatgaaaacttcggttttcattaatcagag

SEQ ID NO: 16346 - RNA, 90 nt, synthetic construct
  misc_feature 1..90: note = engineered ribonucleic acid scaffold (ERS) sequence
  source 1..90: mol_type = other RNA
actggcgcttctatctgattactctgagcgccatcaccagcgactatgtcgtatgggtataatgaaaacttcggttttcattaatcagag

SEQ ID NO: 16347 - RNA, 92 nt, synthetic construct
  misc_feature 1..92: note = engineered ribonucleic acid scaffold (ERS) sequence
  source 1..92: mol_type = other RNA
actggcgcttctatctgattactctgagcgccatcaccagcgactatgtcgtatgggtgaataatgaaaacttcggttttcattaatcagag

SEQ ID NO: 16348 - RNA, 92 nt, synthetic construct
  misc_feature 1..92: note = engineered ribonucleic acid scaffold (ERS) sequence
  source 1..92: mol_type = other RNA
actggcgcttctatctgattactctgagcgccatcaccagcgactatgtcgtatgggtagataatgaaaacttcggttttcattaatcagag

SEQ ID NO: 16349 - RNA, 92 nt, synthetic construct
  misc_feature 1..92: note = engineered ribonucleic acid scaffold (ERS) sequence
  source 1..92: mol_type = other RNA
actggcgcttctatctgattactctgagcgccaacaccagcgactatgtcgtatgggtaaatcgtaagaacttcggttcttacgaatcagag

SEQ ID NO: 16350 - RNA, 92 nt, synthetic construct
  misc_feature 1..92: note = engineered ribonucleic acid scaffold (ERS) sequence
  source 1..92: mol_type = other RNA
actggcgcttctatctgattactctgagcgccagcaccagcgactatgtcgtatgggtaaatcgtaagaacttcggttcttacgaatcagag

SEQ ID NO: 16351 - RNA, 92 nt, synthetic construct
  misc_feature 1..92: note = engineered ribonucleic acid scaffold (ERS) sequence
  source 1..92: mol_type = other RNA
actggcgcttctatctgattactctgagcgccatgaccagcgactatgtcgtatggctaaatcgtaagaacttcggttcttacgaatcagag

SEQ ID NO: 16352 - RNA, 93 nt, synthetic construct
  misc_feature 1..93: note = engineered ribonucleic acid scaffold (ERS) sequence
  source 1..93: mol_type = other RNA
actggcgcttctatctgattactctgagcgccatgaccagcgactatgtcgtatgggctaaatcgtaagaacttcggttcttacgaatcagag

SEQ ID NO: 16353 - RNA, 92 nt, synthetic construct
  misc_feature 1..92: note = engineered ribonucleic acid scaffold (ERS) sequence
  source 1..92: mol_type = other RNA
actggcgcttctatctgattactctgagcgccatgaccagcgactatgtcgtatgggtaaatcgtaagaacttcggttcttacgaatcagag

SEQ ID NO: 16354 - RNA, 92 nt, synthetic construct
  misc_feature 1..92: note = engineered ribonucleic acid scaffold (ERS) sequence
  source 1..92: mol_type = other RNA
actggcgcttctatctgattactctgagcgccatccccagcgactatgtcgtatgggtaaatcgtaagaacttcggttcttacgaatcagag

SEQ ID NO: 16355 - RNA, 93 nt, synthetic construct
  misc_feature 1..93: note = engineered ribonucleic acid scaffold (ERS) sequence
  source 1..93: mol_type = other RNA
actggcgcttctatctgattactctgagcgccatcgccagcgactatgtcgtatggcgtaaatcgtaagaacttcggttcttacgaatcagag

SEQ ID NO: 16356 - RNA, 92 nt, synthetic construct
  misc_feature 1..92: note = engineered ribonucleic acid scaffold (ERS) sequence
  source 1..92: mol_type = other RNA
actggcgcttctatctgattactctgagcgccatcgccagcgactatgtcgtatgggtaaatcgtaagaacttcggttcttacgaatcagag

SEQ ID NO: 16357 - RNA, 92 nt, synthetic construct
  misc_feature 1..92: note = engineered ribonucleic acid scaffold (ERS) sequence
  source 1..92: mol_type = other RNA
actggcgcttctatctgattactctgagcgccatctccagcgactatgtcgtatgggtaaatcgtaagaacttcggttcttacgaatcagag

SEQ ID NO: 16358 - RNA, 92 nt, synthetic construct
  misc_feature 1..92: note = engineered ribonucleic acid scaffold (ERS) sequence
  source 1..92: mol_type = other RNA
actggcgcttctatctgattactctgagcgccatcacctgcgactatgtcgtaagggtaaatcgtaagaacttcggttcttacgaatcagag

SEQ ID NO: 16359 - RNA, 92 nt, synthetic construct
  misc_feature 1..92: note = engineered ribonucleic acid scaffold (ERS) sequence
  source 1..92: mol_type = other RNA
actggcgcttctatctgattactctgagcgccatcaccagagactatgtcttatgggtaaatcgtaagaacttcggttcttacgaatcagag

SEQ ID NO: 16360 - RNA, 92 nt, synthetic construct
  misc_feature 1..92: note = engineered ribonucleic acid scaffold (ERS) sequence
  source 1..92: mol_type = other RNA
actggcgcttctatctgattactctgagcgccatcaccagggactatgtcctatgggtaaatcgtaagaacttcggttcttacgaatcagag

SEQ ID NO: 16361 - RNA, 93 nt, synthetic construct
  misc_feature 1..93: note = engineered ribonucleic acid scaffold (ERS) sequence
  source 1..93: mol_type = other RNA
actggcgcttctatctgattactctgagcgccatcaccaggcactatgtgctattgggtaaatcgtaagaacttcggttcttacgaatcagag

SEQ ID NO: 16362 - RNA, 92 nt, synthetic construct
  misc_feature 1..92: note = engineered ribonucleic acid scaffold (ERS) sequence
  source 1..92: mol_type = other RNA
actggcgcttctatctgattactctgagcgccatcaccagccactatgtggtatgggtaaatcgtaagaacttcggttcttacgaatcagag

SEQ ID NO: 16363 - RNA, 92 nt, synthetic construct
  misc_feature 1..92: note = engineered ribonucleic acid scaffold (ERS) sequence
  source 1..92: mol_type = other RNA
actggcgcttctatctgattactctgagcgccatcaccagctactatgtagtatgggtaaatcgtaagaacttcggttcttacgaatcagag

SEQ ID NO: 16364 - RNA, 92 nt, synthetic construct
  misc_feature 1..92: note = engineered ribonucleic acid scaffold (ERS) sequence
  source 1..92: mol_type = other RNA
actggcgcttctatctgattactctgagcgccatcaccagcgattatgtcgtatgggtaaatcgtaagaacttcggttcttacgaatcagag

SEQ ID NO: 16365 - RNA, 92 nt, synthetic construct
  misc_feature 1..92: note = engineered ribonucleic acid scaffold (ERS) sequence
  source 1..92: mol_type = other RNA
actggcgcttctatctgattactctgagcgccatcaccagcgacgatgtcgtatgggtaaatcgtaagaacttcggttcttacgaatcagag

SEQ ID NO: 16366 - RNA, 92 nt, synthetic construct
  misc_feature 1..92: note = engineered ribonucleic acid scaffold (ERS) sequence
  source 1..92: mol_type = other RNA
actggcgcttctatctgattactctgagcgccatcaccagcgactctgtcgtatgggtaaatcgtaagaacttcggttcttacgaatcagag

SEQ ID NO: 16367 - RNA, 92 nt, synthetic construct
  misc_feature 1..92: note = engineered ribonucleic acid scaffold (ERS) sequence
  source 1..92: mol_type = other RNA
actggcgcttctatctgattactctgagcgccatcaccagcgactatgtcgtgtgggtaaatcgtaagaacttcggttcttacgaatcagag

SEQ ID NO: 16368 - RNA, 93 nt, synthetic construct
  misc_feature 1..93: note = engineered ribonucleic acid scaffold (ERS) sequence
  source 1..93: mol_type = other RNA
actggcgcttctatctgattactctgagcgccatcaccagcgactatgtcgtattgggtaaatcgtaagaacttcggttcttacgaatcagag

SEQ ID NO: 16369 - RNA, 93 nt, synthetic construct
  misc_feature 1..93: note = engineered ribonucleic acid scaffold (ERS) sequence
  source 1..93: mol_type = other RNA
actggcgcttctatctgattactctgagcgccatcaccagcgactatgtcgtatggagtaaatcgtaagaacttcggttcttacgaatcagag

SEQ ID NO: 16370 - RNA, 93 nt, synthetic construct
  misc_feature 1..93: note = engineered ribonucleic acid scaffold (ERS) sequence
  source 1..93: mol_type = other RNA
actggcgcttctatctgattactctgagcgccatcaccagcgactatgtcgtatggcgtaaatcgtaagaacttcggttcttacgaatcagag

SEQ ID NO: 16371 - RNA, 93 nt, synthetic construct
  misc_feature 1..93: note = engineered ribonucleic acid scaffold (ERS) sequence
  source 1..93: mol_type = other RNA
actggcgcttctatctgattactctgagcgccatcaccagcgactatgtcgtatggtgtaaatcgtaagaacttcggttcttacgaatcagag

SEQ ID NO: 16372 - RNA, 93 nt, synthetic construct
  misc_feature 1..93: note = engineered ribonucleic acid scaffold (ERS) sequence
  source 1..93: mol_type = other RNA
actggcgcttctatctgattactctgagcgccatcaccagcgactatgtcgtatgggctaaatcgtaagaacttcggttcttacgaatcagag

SEQ ID NO: 16373 - RNA, 90 nt, synthetic construct
  misc_feature 1..90: note = engineered ribonucleic acid scaffold (ERS) sequence
  source 1..90: mol_type = other RNA
actggcgcttctatctgattactctgagcgccatcaccagcgactatgtcgtatgggtatcgtaagaacttcggttcttacgaatcagag

SEQ ID NO: 16374 - RNA, 92 nt, synthetic construct
  misc_feature 1..92: note = engineered ribonucleic acid scaffold (ERS) sequence
  source 1..92: mol_type = other RNA
actggcgcttctatctgattactctgagcgccatcaccagcgactatgtcgtatgggtgaatcgtaagaacttcggttcttacgaatcagag

SEQ ID NO: 16375 - RNA, 92 nt, synthetic construct
  misc_feature 1..92: note = engineered ribonucleic acid scaffold (ERS) sequence
  source 1..92: mol_type = other RNA
actggcgcttctatctgattactctgagcgccatcaccagcgactatgtcgtatgggtagatcgtaagaacttcggttcttacgaatcagag

SEQ ID NO: 16376 - RNA, 92 nt, synthetic construct
  misc_feature 1..92: note = engineered ribonucleic acid scaffold (ERS) sequence
  source 1..92: mol_type = other RNA
actggcgcttctatctgattactctgagcgccaacaccagcgactatgtcgtatgggtaaatggaagatgcttcggcatcttccaatcagag

SEQ ID NO: 16377 - RNA, 92 nt, synthetic construct
  misc_feature 1..92: note = engineered ribonucleic acid scaffold (ERS) sequence
  source 1..92: mol_type = other RNA
actggcgcttctatctgattactctgagcgccagcaccagcgactatgtcgtatgggtaaatggaagatgcttcggcatcttccaatcagag

SEQ ID NO: 16378 - RNA, 92 nt, synthetic construct
  misc_feature 1..92: note = engineered ribonucleic acid scaffold (ERS) sequence
  source 1..92: mol_type = other RNA
actggcgcttctatctgattactctgagcgccatgaccagcgactatgtcgtatggctaaatggaagatgcttcggcatcttccaatcagag

SEQ ID NO: 16379 - RNA, 93 nt, synthetic construct
  misc_feature 1..93: note = engineered ribonucleic acid scaffold (ERS) sequence
  source 1..93: mol_type = other RNA
actggcgcttctatctgattactctgagcgccatgaccagcgactatgtcgtatgggctaaatggaagatgcttcggcatcttccaatcagag

SEQ ID NO: 16380 - RNA, 92 nt, synthetic construct
  misc_feature 1..92: note = engineered ribonucleic acid scaffold (ERS) sequence
  source 1..92: mol_type = other RNA
actggcgcttctatctgattactctgagcgccatgaccagcgactatgtcgtatgggtaaatggaagatgcttcggcatcttccaatcagag

SEQ ID NO: 16381 - RNA, 92 nt, synthetic construct
  misc_feature 1..92: note = engineered ribonucleic acid scaffold (ERS) sequence
  source 1..92: mol_type = other RNA
actggcgcttctatctgattactctgagcgccatccccagcgactatgtcgtatgggtaaatggaagatgcttcggcatcttccaatcagag

SEQ ID NO: 16382 - RNA, 93 nt, synthetic construct
  misc_feature 1..93: note = engineered ribonucleic acid scaffold (ERS) sequence
  source 1..93: mol_type = other RNA
actggcgcttctatctgattactctgagcgccatcgccagcgactatgtcgtatggcgtaaatggaagatgcttcggcatcttccaatcagag

SEQ ID NO: 16383 - RNA, 92 nt, synthetic construct
  misc_feature 1..92: note = engineered ribonucleic acid scaffold (ERS) sequence
  source 1..92: mol_type = other RNA
actggcgcttctatctgattactctgagcgccatcgccagcgactatgtcgtatgggtaaatggaagatgcttcggcatcttccaatcagag

SEQ ID NO: 16384 - RNA, 92 nt, synthetic construct
  misc_feature 1..92: note = engineered ribonucleic acid scaffold (ERS) sequence
  source 1..92: mol_type = other RNA
actggcgcttctatctgattactctgagcgccatctccagcgactatgtcgtatgggtaaatggaagatgcttcggcatcttccaatcagag

SEQ ID NO: 16385 - RNA, 92 nt, synthetic construct
  misc_feature 1..92: note = engineered ribonucleic acid scaffold (ERS) sequence
  source 1..92: mol_type = other RNA
actggcgcttctatctgattactctgagcgccatcacctgcgactatgtcgtaagggtaaatggaagatgcttcggcatcttccaatcagag

SEQ ID NO: 16386 - RNA, 92 nt, synthetic construct
  misc_feature 1..92: note = engineered ribonucleic acid scaffold (ERS) sequence
  source 1..92: mol_type = other RNA
actggcgcttctatctgattactctgagcgccatcaccagagactatgtcttatgggtaaatggaagatgcttcggcatcttccaatcagag

SEQ ID NO: 16387 - RNA, 92 nt, synthetic construct
  misc_feature 1..92: note = engineered ribonucleic acid scaffold (ERS) sequence
  source 1..92: mol_type = other RNA
actggcgcttctatctgattactctgagcgccatcaccagggactatgtcctatgggtaaatggaagatgcttcggcatcttccaatcagag

SEQ ID NO: 16388 - RNA, 93 nt, synthetic construct
  misc_feature 1..93: note = engineered ribonucleic acid scaffold (ERS) sequence
  source 1..93: mol_type = other RNA
actggcgcttctatctgattactctgagcgccatcaccaggcactatgtgctattgggtaaatggaagatgcttcggcatcttccaatcagag

SEQ ID NO: 16389 - RNA, 92 nt, synthetic construct
  misc_feature 1..92: note = engineered ribonucleic acid scaffold (ERS) sequence
  source 1..92: mol_type = other RNA
actggcgcttctatctgattactctgagcgccatcaccagccactatgtggtatgggtaaatggaagatgcttcggcatcttccaatcagag

SEQ ID NO: 16390 - RNA, 92 nt, synthetic construct
  misc_feature 1..92: note = engineered ribonucleic acid scaffold (ERS) sequence
  source 1..92: mol_type = other RNA
actggcgcttctatctgattactctgagcgccatcaccagctactatgtagtatgggtaaatggaagatgcttcggcatcttccaatcagag

SEQ ID NO: 16391 - RNA, 92 nt, synthetic construct
  misc_feature 1..92: note = engineered ribonucleic acid scaffold (ERS) sequence
  source 1..92: mol_type = other RNA
actggcgcttctatctgattactctgagcgccatcaccagcgattatgtcgtatgggtaaatggaagatgcttcggcatcttccaatcagag

SEQ ID NO: 16392 - RNA, 92 nt, synthetic construct
  misc_feature 1..92: note = engineered ribonucleic acid scaffold (ERS) sequence
  source 1..92: mol_type = other RNA
actggcgcttctatctgattactctgagcgccatcaccagcgacgatgtcgtatgggtaaatggaagatgcttcggcatcttccaatcagag

SEQ ID NO: 16393 - RNA, 92 nt, synthetic construct
  misc_feature 1..92: note = engineered ribonucleic acid scaffold (ERS) sequence
  source 1..92: mol_type = other RNA
actggcgcttctatctgattactctgagcgccatcaccagcgactctgtcgtatgggtaaatggaagatgcttcggcatcttccaatcagag

SEQ ID NO: 16394 - RNA, 92 nt, synthetic construct
  misc_feature 1..92: note = engineered ribonucleic acid scaffold (ERS) sequence
  source 1..92: mol_type = other RNA
actggcgcttctatctgattactctgagcgccatcaccagcgactatgtcgtgtgggtaaatggaagatgcttcggcatcttccaatcagag

SEQ ID NO: 16395 - RNA, 93 nt, synthetic construct
  misc_feature 1..93: note = engineered ribonucleic acid scaffold (ERS) sequence
  source 1..93: mol_type = other RNA
actggcgcttctatctgattactctgagcgccatcaccagcgactatgtcgtattgggtaaatggaagatgcttcggcatcttccaatcagag

SEQ ID NO: 16396 - RNA, 93 nt, synthetic construct
  misc_feature 1..93: note = engineered ribonucleic acid scaffold (ERS) sequence
  source 1..93: mol_type = other RNA
actggcgcttctatctgattactctgagcgccatcaccagcgactatgtcgtatggagtaaatggaagatgcttcggcatcttccaatcagag

SEQ ID NO: 16397 - RNA, 93 nt, synthetic construct
  misc_feature 1..93: note = engineered ribonucleic acid scaffold (ERS) sequence
  source 1..93: mol_type = other RNA
actggcgcttctatctgattactctgagcgccatcaccagcgactatgtcgtatggcgtaaatggaagatgcttcggcatcttccaatcagag

SEQ ID NO: 16398 - RNA, 93 nt, synthetic construct
  misc_feature 1..93: note = engineered ribonucleic acid scaffold (ERS) sequence
  source 1..93: mol_type = other RNA
actggcgcttctatctgattactctgagcgccatcaccagcgactatgtcgtatggtgtaaatggaagatgcttcggcatcttccaatcagag

SEQ ID NO: 16399 - RNA, 93 nt, synthetic construct
  misc_feature 1..93: note = engineered ribonucleic acid scaffold (ERS) sequence
  source 1..93: mol_type = other RNA
actggcgcttctatctgattactctgagcgccatcaccagcgactatgtcgtatgggctaaatggaagatgcttcggcatcttccaatcagag

SEQ ID NO: 16400 - RNA, 90 nt, synthetic construct
  misc_feature 1..90: note = engineered ribonucleic acid scaffold (ERS) sequence
  source 1..90: mol_type = other RNA
actggcgcttctatctgattactctgagcgccatcaccagcgactatgtcgtatgggtatggaagatgcttcggcatcttccaatcagag

SEQ ID NO: 16401 - RNA, 92 nt, synthetic construct
  misc_feature 1..92: note = engineered ribonucleic acid scaffold (ERS) sequence
  source 1..92: mol_type = other RNA
actggcgcttctatctgattactctgagcgccatcaccagcgactatgtcgtatgggtgaatggaagatgcttcggcatcttccaatcagag

SEQ ID NO: 16402 - RNA, 92 nt, synthetic construct
  misc_feature 1..92: note = engineered ribonucleic acid scaffold (ERS) sequence
  source 1..92: mol_type = other RNA
actggcgcttctatctgattactctgagcgccatcaccagcgactatgtcgtatgggtagatggaagatgcttcggcatcttccaatcagag

SEQ ID NO: 16403 - RNA, 96 nt, synthetic construct
  misc_feature 1..96: note = engineered ribonucleic acid scaffold (ERS) sequence
  source 1..96: mol_type = other RNA
actggcgcttctatctgattactctgagcgccaacaccagcgactatgtcgtatgggtaaagcccttacggacttcggtccgtaagggcatcagag

SEQ ID NO: 16404 - RNA, 96 nt, synthetic construct
  misc_feature 1..96: note = engineered ribonucleic acid scaffold (ERS) sequence
  source 1..96: mol_type = other RNA
actggcgcttctatctgattactctgagcgccagcaccagcgactatgtcgtatgggtaaagcccttacggacttcggtccgtaagggcatcagag

SEQ ID NO: 16405 - RNA, 96 nt, synthetic construct
  misc_feature 1..96: note = engineered ribonucleic acid scaffold (ERS) sequence
  source 1..96: mol_type = other RNA
actggcgcttctatctgattactctgagcgccatgaccagcgactatgtcgtatggctaaagcccttacggacttcggtccgtaagggcatcagag

SEQ ID NO: 16406 - RNA, 97 nt, synthetic construct
  misc_feature 1..97: note = engineered ribonucleic acid scaffold (ERS) sequence
  source 1..97: mol_type = other RNA
actggcgcttctatctgattactctgagcgccatgaccagcgactatgtcgtatgggctaaagcccttacggacttcggtccgtaagggcatcagag

SEQ ID NO: 16407 - RNA, 96 nt, synthetic construct
  misc_feature 1..96: note = engineered ribonucleic acid scaffold (ERS) sequence
  source 1..96: mol_type = other RNA
actggcgcttctatctgattactctgagcgccatgaccagcgactatgtcgtatgggtaaagcccttacggacttcggtccgtaagggcatcagag

SEQ ID NO: 16408 - RNA, 96 nt, synthetic construct
  misc_feature 1..96: note = engineered ribonucleic acid scaffold (ERS) sequence
  source 1..96: mol_type = other RNA
actggcgcttctatctgattactctgagcgccatccccagcgactatgtcgtatgggtaaagcccttacggacttcggtccgtaagggcatcagag

SEQ ID NO: 16409 - RNA, 97 nt, synthetic construct
  misc_feature 1..97: note = engineered ribonucleic acid scaffold (ERS) sequence
  source 1..97: mol_type = other RNA
actggcgcttctatctgattactctgagcgccatcgccagcgactatgtcgtatggcgtaaagcccttacggacttcggtccgtaagggcatcagag

SEQ ID NO: 16410 - RNA, 96 nt, synthetic construct
  misc_feature 1..96: note = engineered ribonucleic acid scaffold (ERS) sequence
  source 1..96: mol_type = other RNA
actggcgcttctatctgattactctgagcgccatcgccagcgactatgtcgtatgggtaaagcccttacggacttcggtccgtaagggcatcagag

SEQ ID NO: 16411 - RNA, 96 nt, synthetic construct
  misc_feature 1..96: note = engineered ribonucleic acid scaffold (ERS) sequence
  source 1..96: mol_type = other RNA
actggcgcttctatctgattactctgagcgccatctccagcgactatgtcgtatgggtaaagcccttacggacttcggtccgtaagggcatcagag

SEQ ID NO: 16412 - RNA, 96 nt, synthetic construct
  misc_feature 1..96: note = engineered ribonucleic acid scaffold (ERS) sequence
  source 1..96: mol_type = other RNA
actggcgcttctatctgattactctgagcgccatcacctgcgactatgtcgtaagggtaaagcccttacggacttcggtccgtaagggcatcagag

SEQ ID NO: 16413 - RNA, 96 nt, synthetic construct
  misc_feature 1..96: note = engineered ribonucleic acid scaffold (ERS) sequence
  source 1..96: mol_type = other RNA
actggcgcttctatctgattactctgagcgccatcaccagagactatgtcttatgggtaaagcccttacggacttcggtccgtaagggcatcagag

SEQ ID NO: 16414 - RNA, 96 nt, synthetic construct
  misc_feature 1..96: note = engineered ribonucleic acid scaffold (ERS) sequence
  source 1..96: mol_type = other RNA
actggcgcttctatctgattactctgagcgccatcaccagggactatgtcctatgggtaaagcccttacggacttcggtccgtaagggcatcagag

SEQ ID NO: 16415 - RNA, 97 nt, synthetic construct
  misc_feature 1..97: note = engineered ribonucleic acid scaffold (ERS) sequence
  source 1..97: mol_type = other RNA
actggcgcttctatctgattactctgagcgccatcaccaggcactatgtgctattgggtaaagcccttacggacttcggtccgtaagggcatcagag

SEQ ID NO: 16416 - RNA, 96 nt, synthetic construct
  misc_feature 1..96: note = engineered ribonucleic acid scaffold (ERS) sequence
  source 1..96: mol_type = other RNA
actggcgcttctatctgattactctgagcgccatcaccagccactatgtggtatgggtaaagcccttacggacttcggtccgtaagggcatcagag

SEQ ID NO: 16417 - RNA, 96 nt, synthetic construct
  misc_feature 1..96: note = engineered ribonucleic acid scaffold (ERS) sequence
  source 1..96: mol_type = other RNA
actggcgcttctatctgattactctgagcgccatcaccagctactatgtagtatgggtaaagcccttacggacttcggtccgtaagggcatcagag

SEQ ID NO: 16418 - RNA, 96 nt, synthetic construct
  misc_feature 1..96: note = engineered ribonucleic acid scaffold (ERS) sequence
  source 1..96: mol_type = other RNA
actggcgcttctatctgattactctgagcgccatcaccagcgattatgtcgtatgggtaaagcccttacggacttcggtccgtaagggcatcagag

SEQ ID NO: 16419 - RNA, 96 nt, synthetic construct
  misc_feature 1..96: note = engineered ribonucleic acid scaffold (ERS) sequence
  source 1..96: mol_type = other RNA
actggcgcttctatctgattactctgagcgccatcaccagcgacgatgtcgtatgggtaaagcccttacggacttcggtccgtaagggcatcagag

SEQ ID NO: 16420 - RNA, 96 nt, synthetic construct
  misc_feature 1..96: note = engineered ribonucleic acid scaffold (ERS) sequence
  source 1..96: mol_type = other RNA
actggcgcttctatctgattactctgagcgccatcaccagcgactctgtcgtatgggtaaagcccttacggacttcggtccgtaagggcatcagag

SEQ ID NO: 16421 - RNA, 96 nt, synthetic construct
  misc_feature 1..96: note = engineered ribonucleic acid scaffold (ERS) sequence
  source 1..96: mol_type = other RNA
actggcgcttctatctgattactctgagcgccatcaccagcgactatgtcgtgtgggtaaagcccttacggacttcggtccgtaagggcatcagag

SEQ ID NO: 16422 - RNA, 97 nt, synthetic construct
  misc_feature 1..97: note = engineered ribonucleic acid scaffold (ERS) sequence
  source 1..97: mol_type = other RNA
actggcgcttctatctgattactctgagcgccatcaccagcgactatgtcgtattgggtaaagcccttacggacttcggtccgtaagggcatcagag

SEQ ID NO: 16423 - RNA, 97 nt, synthetic construct
  misc_feature 1..97: note = engineered ribonucleic acid scaffold (ERS) sequence
  source 1..97: mol_type = other RNA
actggcgcttctatctgattactctgagcgccatcaccagcgactatgtcgtatggagtaaagcccttacggacttcggtccgtaagggcatcagag

SEQ ID NO: 16424 - RNA, 97 nt, synthetic construct
  misc_feature 1..97: note = engineered ribonucleic acid scaffold (ERS) sequence
  source 1..97: mol_type = other RNA
actggcgcttctatctgattactctgagcgccatcaccagcgactatgtcgtatggcgtaaagcccttacggacttcggtccgtaagggcatcagag

SEQ ID NO: 16425 - RNA, 97 nt, synthetic construct
  misc_feature 1..97: note = engineered ribonucleic acid scaffold (ERS) sequence
  source 1..97: mol_type = other RNA
actggcgcttctatctgattactctgagcgccatcaccagcgactatgtcgtatggtgtaaagcccttacggacttcggtccgtaagggcatcagag

SEQ ID NO: 16426 - RNA, 97 nt, synthetic construct
  misc_feature 1..97: note = engineered ribonucleic acid scaffold (ERS) sequence
  source 1..97: mol_type = other RNA
actggcgcttctatctgattactctgagcgccatcaccagcgactatgtcgtatgggctaaagcccttacggacttcggtccgtaagggcatcagag

SEQ ID NO: 16427 - RNA, 94 nt, synthetic construct
  misc_feature 1..94: note = engineered ribonucleic acid scaffold (ERS) sequence
  source 1..94: mol_type = other RNA
actggcgcttctatctgattactctgagcgccatcaccagcgactatgtcgtatgggtagcccttacggacttcggtccgtaagggcatcagag

SEQ ID NO: 16428 - RNA, 96 nt, synthetic construct
  misc_feature 1..96: note = engineered ribonucleic acid scaffold (ERS) sequence
  source 1..96: mol_type = other RNA
actggcgcttctatctgattactctgagcgccatcaccagcgactatgtcgtatgggtgaagcccttacggacttcggtccgtaagggcatcagag

SEQ ID NO: 16429 - RNA, 96 nt, synthetic construct
  misc_feature 1..96: note = engineered ribonucleic acid scaffold (ERS) sequence
  source 1..96: mol_type = other RNA
actggcgcttctatctgattactctgagcgccatcaccagcgactatgtcgtatgggtagagcccttacggacttcggtccgtaagggcatcagag

SEQ ID NO: 16430 - RNA, 98 nt, synthetic construct
  misc_feature 1..98: note = engineered ribonucleic acid scaffold (ERS) sequence
  source 1..98: mol_type = other RNA
actggcgcttctatctgattactctgagcgccaacaccagcgactatgtcgtatgggtaaagcctcttacggacttcggtccgtaagaggcatcagag

SEQ ID NO: 16431 - RNA, 98 nt, synthetic construct
  misc_feature 1..98: note = engineered ribonucleic acid scaffold (ERS) sequence
  source 1..98: mol_type = other RNA
actggcgcttctatctgattactctgagcgccagcaccagcgactatgtcgtatgggtaaagcctcttacggacttcggtccgtaagaggcatcagag

SEQ ID NO: 16432 - RNA, 98 nt, synthetic construct
  misc_feature 1..98: note = engineered ribonucleic acid scaffold (ERS) sequence
  source 1..98: mol_type = other RNA
actggcgcttctatctgattactctgagcgccatgaccagcgactatgtcgtatggctaaagcctcttacggacttcggtccgtaagaggcatcagag

SEQ ID NO: 16433 - RNA, 99 nt, synthetic construct
  misc_feature 1..99: note = engineered ribonucleic acid scaffold (ERS) sequence
  source 1..99: mol_type = other RNA
actggcgcttctatctgattactctgagcgccatgaccagcgactatgtcgtatgggctaaagcctcttacggacttcggtccgtaagaggcatcagag

SEQ ID NO: 16434 - RNA, 98 nt, synthetic construct
  misc_feature 1..98: note = engineered ribonucleic acid scaffold (ERS) sequence
  source 1..98: mol_type = other RNA
actggcgcttctatctgattactctgagcgccatgaccagcgactatgtcgtatgggtaaagcctcttacggacttcggtccgtaagaggcatcagag

SEQ ID NO: 16435 - RNA, 98 nt, synthetic construct
  misc_feature 1..98: note = engineered ribonucleic acid scaffold (ERS) sequence
  source 1..98: mol_type = other RNA
actggcgcttctatctgattactctgagcgccatccccagcgactatgtcgtatgggtaaagcctcttacggacttcggtccgtaagaggcatcagag

SEQ ID NO: 16436 - RNA, 99 nt, synthetic construct
  misc_feature 1..99: note = engineered ribonucleic acid scaffold (ERS) sequence
  source 1..99: mol_type = other RNA
actggcgcttctatctgattactctgagcgccatcgccagcgactatgtcgtatggcgtaaagcctcttacggacttcggtccgtaagaggcatcagag

SEQ ID NO: 16437 - RNA, 98 nt, synthetic construct
  misc_feature 1..98: note = engineered ribonucleic acid scaffold (ERS) sequence
  source 1..98: mol_type = other RNA
actggcgcttctatctgattactctgagcgccatcgccagcgactatgtcgtatgggtaaagcctcttacggacttcggtccgtaagaggcatcagag

SEQ ID NO: 16438 - RNA, 98 nt, synthetic construct
  misc_feature 1..98: note = engineered ribonucleic acid scaffold (ERS) sequence
  source 1..98: mol_type = other RNA
actggcgcttctatctgattactctgagcgccatctccagcgactatgtcgtatgggtaaagcctcttacggacttcggtccgtaagaggcatcagag

SEQ ID NO: 16439 - RNA, 98 nt, synthetic construct
  misc_feature 1..98: note = engineered ribonucleic acid scaffold (ERS) sequence
  source 1..98: mol_type = other RNA
actggcgcttctatctgattactctgagcgccatcacctgcgactatgtcgtaagggtaaagcctcttacggacttcggtccgtaagaggcatcagag

SEQ ID NO: 16440 - RNA, 98 nt, synthetic construct
  misc_feature 1..98: note = engineered ribonucleic acid scaffold (ERS) sequence
  source 1..98: mol_type = other RNA
actggcgcttctatctgattactctgagcgccatcaccagagactatgtcttatgggtaaagcctcttacggacttcggtccgtaagaggcatcagag

SEQ ID NO: 16441 - RNA, 98 nt, synthetic construct
  misc_feature 1..98: note = engineered ribonucleic acid scaffold (ERS) sequence
  source 1..98: mol_type = other RNA
actggcgcttctatctgattactctgagcgccatcaccagggactatgtcctatgggtaaagcctcttacggacttcggtccgtaagaggcatcagag

SEQ ID NO: 16442 - RNA, 99 nt, synthetic construct
  misc_feature 1..99: note = engineered ribonucleic acid scaffold (ERS) sequence
  source 1..99: mol_type = other RNA
actggcgcttctatctgattactctgagcgccatcaccaggcactatgtgctattgggtaaagcctcttacggacttcggtccgtaagaggcatcagag

SEQ ID NO: 16443 - RNA, 98 nt, synthetic construct
  misc_feature 1..98: note = engineered ribonucleic acid scaffold (ERS) sequence
  source 1..98: mol_type = other RNA
actggcgcttctatctgattactctgagcgccatcaccagccactatgtggtatgggtaaagcctcttacggacttcggtccgtaagaggcatcagag

SEQ ID NO: 16444 - RNA, 98 nt, synthetic construct
  misc_feature 1..98: note = engineered ribonucleic acid scaffold (ERS) sequence
  source 1..98: mol_type = other RNA
actggcgcttctatctgattactctgagcgccatcaccagctactatgtagtatgggtaaagcctcttacggacttcggtccgtaagaggcatcagag

SEQ ID NO: 16445 - RNA, 98 nt, synthetic construct
  misc_feature 1..98: note = engineered ribonucleic acid scaffold (ERS) sequence
  source 1..98: mol_type = other RNA
actggcgcttctatctgattactctgagcgccatcaccagcgattatgtcgtatgggtaaagcctcttacggacttcggtccgtaagaggcatcagag

SEQ ID NO: 16446 - RNA, 98 nt, synthetic construct
  misc_feature 1..98: note = engineered ribonucleic acid scaffold (ERS) sequence
  source 1..98: mol_type = other RNA
actggcgcttctatctgattactctgagcgccatcaccagcgacgatgtcgtatgggtaaagcctcttacggacttcggtccgtaagaggcatcagag

SEQ ID NO: 16447 - RNA, 98 nt, synthetic construct
  misc_feature 1..98: note = engineered ribonucleic acid scaffold (ERS) sequence
  source 1..98: mol_type = other RNA
actggcgcttctatctgattactctgagcgccatcaccagcgactctgtcgtatgggtaaagcctcttacggacttcggtccgtaagaggcatcagag

SEQ ID NO: 16448 - RNA, 98 nt, synthetic construct
  misc_feature 1..98: note = engineered ribonucleic acid scaffold (ERS) sequence
  source 1..98: mol_type = other RNA
actggcgcttctatctgattactctgagcgccatcaccagcgactatgtcgtgtgggtaaagcctcttacggacttcggtccgtaagaggcatcagag

SEQ ID NO: 16449 - RNA, 99 nt, synthetic construct
  misc_feature 1..99: note = engineered ribonucleic acid scaffold (ERS) sequence
  source 1..99: mol_type = other RNA
actggcgcttctatctgattactctgagcgccatcaccagcgactatgtcgtattgggtaaagcctcttacggacttcggtccgtaagaggcatcagag

SEQ ID NO: 16450 - RNA, 99 nt, synthetic construct
  misc_feature 1..99: note = engineered ribonucleic acid scaffold (ERS) sequence
  source 1..99: mol_type = other RNA
actggcgcttctatctgattactctgagcgccatcaccagcgactatgtcgtatggagtaaagcctcttacggacttcggtccgtaagaggcatcagag

SEQ ID NO: 16451 - RNA, 99 nt, synthetic construct
  misc_feature 1..99: note = engineered ribonucleic acid scaffold (ERS) sequence
  source 1..99: mol_type = other RNA
actggcgcttctatctgattactctgagcgccatcaccagcgactatgtcgtatggcgtaaagcctcttacggacttcggtccgtaagaggcatcagag

SEQ ID NO: 16452 - RNA, 99 nt, synthetic construct
  misc_feature 1..99: note = engineered ribonucleic acid scaffold (ERS) sequence
  source 1..99: mol_type = other RNA
actggcgcttctatctgattactctgagcgccatcaccagcgactatgtcgtatggtgtaaagcctcttacggacttcggtccgtaagaggcatcagag

SEQ ID NO: 16453 - RNA, 99 nt, synthetic construct
  misc_feature 1..99: note = engineered ribonucleic acid scaffold (ERS) sequence
  source 1..99: mol_type = other RNA
actggcgcttctatctgattactctgagcgccatcaccagcgactatgtcgtatgggctaaagcctcttacggacttcggtccgtaagaggcatcagag

SEQ ID NO: 16454 - RNA, 96 nt, synthetic construct
  misc_feature 1..96: note = engineered ribonucleic acid scaffold (ERS) sequence
  source 1..96: mol_type = other RNA
actggcgcttctatctgattactctgagcgccatcaccagcgactatgtcgtatgggtagcctcttacggacttcggtccgtaagaggcatcagag

SEQ ID NO: 16455 - RNA, 98 nt, synthetic construct
  misc_feature 1..98: note = engineered ribonucleic acid scaffold (ERS) sequence
  source 1..98: mol_type = other RNA
actggcgcttctatctgattactctgagcgccatcaccagcgactatgtcgtatgggtgaagcctcttacggacttcggtccgtaagaggcatcagag

SEQ ID NO: 16456 - RNA, 98 nt, synthetic construct
  misc_feature 1..98: note = engineered ribonucleic acid scaffold (ERS) sequence
  source 1..98: mol_type = other RNA
actggcgcttctatctgattactctgagcgccatcaccagcgactatgtcgtatgggtagagcctcttacggacttcggtccgtaagaggcatcagag

SEQ ID NO: 16457 - RNA, 98 nt, synthetic construct
  misc_feature 1..98: note = engineered ribonucleic acid scaffold (ERS) sequence
  source 1..98: mol_type = other RNA
actggcgcttctatctgattactctgagcgccaacaccagcgactatgtcgtatgggtaaagccgcttagggacttcggtccctaagaggcatcagag

SEQ ID NO: 16458 - RNA, 98 nt, synthetic construct
  misc_feature 1..98: note = engineered ribonucleic acid scaffold (ERS) sequence
  source 1..98: mol_type = other RNA
actggcgcttctatctgattactctgagcgccagcaccagcgactatgtcgtatgggtaaagccgcttagggacttcggtccctaagaggcatcagag

SEQ ID NO: 16459 - RNA, 98 nt, synthetic construct
  misc_feature 1..98: note = engineered ribonucleic acid scaffold (ERS) sequence
  source 1..98: mol_type = other RNA
actggcgcttctatctgattactctgagcgccatgaccagcgactatgtcgtatggctaaagccgcttagggacttcggtccctaagaggcatcagag

SEQ ID NO: 16460 - RNA, 99 nt, synthetic construct
  misc_feature 1..99: note = engineered ribonucleic acid scaffold (ERS) sequence
  source 1..99: mol_type = other RNA
actggcgcttctatctgattactctgagcgccatgaccagcgactatgtcgtatgggctaaagccgcttagggacttcggtccctaagaggcatcagag

SEQ ID NO: 16461 - RNA, 98 nt, synthetic construct
  misc_feature 1..98: note = engineered ribonucleic acid scaffold (ERS) sequence
  source 1..98: mol_type = other RNA
actggcgcttctatctgattactctgagcgccatgaccagcgactatgtcgtatgggtaaagccgcttagggacttcggtccctaagaggcatcagag

SEQ ID NO: 16462 - RNA, 98 nt, synthetic construct
  misc_feature 1..98: note = engineered ribonucleic acid scaffold (ERS) sequence
  source 1..98: mol_type = other RNA
actggcgcttctatctgattactctgagcgccatccccagcgactatgtcgtatgggtaaagccgcttagggacttcggtccctaagaggcatcagag

SEQ ID NO: 16463 - RNA, 99 nt, synthetic construct
  misc_feature 1..99: note = engineered ribonucleic acid scaffold (ERS) sequence
  source 1..99: mol_type = other RNA
actggcgcttctatctgattactctgagcgccatcgccagcgactatgtcgtatggcgtaaagccgcttagggacttcggtccctaagaggcatcagag

SEQ ID NO: 16464 - RNA, 98 nt, synthetic construct
  misc_feature 1..98: note = engineered ribonucleic acid scaffold (ERS) sequence
  source 1..98: mol_type = other RNA
actggcgcttctatctgattactctgagcgccatcgccagcgactatgtcgtatgggtaaagccgcttagggacttcggtccctaagaggcatcagag

SEQ ID NO: 16465 - RNA, 98 nt, synthetic construct
  misc_feature 1..98: note = engineered ribonucleic acid scaffold (ERS) sequence
  source 1..98: mol_type = other RNA
actggcgcttctatctgattactctgagcgccatctccagcgactatgtcgtatgggtaaagccgcttagggacttcggtccctaagaggcatcagag

SEQ ID NO: 16466 - RNA, 98 nt, synthetic construct
  misc_feature 1..98: note = engineered ribonucleic acid scaffold (ERS) sequence
  source 1..98: mol_type = other RNA
actggcgcttctatctgattactctgagcgccatcacctgcgactatgtcgtaagggtaaagccgcttagggacttcggtccctaagaggcatcagag

SEQ ID NO: 16467 - RNA, 98 nt, synthetic construct
  misc_feature 1..98: note = engineered ribonucleic acid scaffold (ERS) sequence
  source 1..98: mol_type = other RNA
actggcgcttctatctgattactctgagcgccatcaccagagactatgtcttatgggtaaagccgcttagggacttcggtccctaagaggcatcagag

SEQ ID NO: 16468 - RNA, 98 nt, synthetic construct
  misc_feature 1..98: note = engineered ribonucleic acid scaffold (ERS) sequence
  source 1..98: mol_type = other RNA
actggcgcttctatctgattactctgagcgccatcaccagggactatgtcctatgggtaaagccgcttagggacttcggtccctaagaggcatcagag

SEQ ID NO: 16469 - RNA, 99 nt, synthetic construct
  misc_feature 1..99: note = engineered ribonucleic acid scaffold (ERS) sequence
  source 1..99: mol_type = other RNA
actggcgcttctatctgattactctgagcgccatcaccaggcactatgtgctattgggtaaagccgcttagggacttcggtccctaagaggcatcagag

SEQ ID NO: 16470 - RNA, 98 nt, synthetic construct
  misc_feature 1..98: note = engineered ribonucleic acid scaffold (ERS) sequence
  source 1..98: mol_type = other RNA
actggcgcttctatctgattactctgagcgccatcaccagccactatgtggtatgggtaaagccgcttagggacttcggtccctaagaggcatcagag

SEQ ID NO: 16471 - RNA, 98 nt, synthetic construct
  misc_feature 1..98: note = engineered ribonucleic acid scaffold (ERS) sequence
  source 1..98: mol_type = other RNA
actggcgcttctatctgattactctgagcgccatcaccagctactatgtagtatgggtaaagccgcttagggacttcggtccctaagaggcatcagag

SEQ ID NO: 16472 - RNA, 98 nt, synthetic construct
  misc_feature 1..98: note = engineered ribonucleic acid scaffold (ERS) sequence
  source 1..98: mol_type = other RNA
actggcgcttctatctgattactctgagcgccatcaccagcgattatgtcgtatgggtaaagccgcttagggacttcggtccctaagaggcatcagag

SEQ ID NO: 16473 - RNA, 98 nt, synthetic construct
  misc_feature 1..98: note = engineered ribonucleic acid scaffold (ERS) sequence
  source 1..98: mol_type = other RNA
actggcgcttctatctgattactctgagcgccatcaccagcgacgatgtcgtatgggtaaagccgcttagggacttcggtccctaagaggcatcagag

SEQ ID NO: 16474 - RNA, 98 nt, synthetic construct
  misc_feature 1..98: note = engineered ribonucleic acid scaffold (ERS) sequence
  source 1..98: mol_type = other RNA
actggcgcttctatctgattactctgagcgccatcaccagcgactctgtcgtatgggtaaagccgcttagggacttcggtccctaagaggcatcagag

SEQ ID NO: 16475 - RNA, 98 nt, synthetic construct
  misc_feature 1..98: note = engineered ribonucleic acid scaffold (ERS) sequence
  source 1..98: mol_type = other RNA
actggcgcttctatctgattactctgagcgccatcaccagcgactatgtcgtgtgggtaaagccgcttagggacttcggtccctaagaggcatcagag

SEQ ID NO: 16476 - RNA, 99 nt, synthetic construct
  misc_feature 1..99: note = engineered ribonucleic acid scaffold (ERS) sequence
  source 1..99: mol_type = other RNA
actggcgcttctatctgattactctgagcgccatcaccagcgactatgtcgtattgggtaaagccgcttagggacttcggtccctaagaggcatcagag

SEQ ID NO: 16477 - RNA, 99 nt, synthetic construct
  misc_feature 1..99: note = engineered ribonucleic acid scaffold (ERS) sequence
  source 1..99: mol_type = other RNA
actggcgcttctatctgattactctgagcgccatcaccagcgactatgtcgtatggagtaaagccgcttagggacttcggtccctaagaggcatcagag

SEQ ID NO: 16478 - RNA, 99 nt, synthetic construct
  misc_feature 1..99: note = engineered ribonucleic acid scaffold (ERS) sequence
  source 1..99: mol_type = other RNA
actggcgcttctatctgattactctgagcgccatcaccagcgactatgtcgtatggcgtaaagccgcttagggacttcggtccctaagaggcatcagag

SEQ ID NO: 16479 - RNA, 99 nt, synthetic construct
  misc_feature 1..99: note = engineered ribonucleic acid scaffold (ERS) sequence
  source 1..99: mol_type = other RNA
actggcgcttctatctgattactctgagcgccatcaccagcgactatgtcgtatggtgtaaagccgcttagggacttcggtccctaagaggcatcagag

SEQ ID NO: 16480 - RNA, 99 nt, synthetic construct
  misc_feature 1..99: note = engineered ribonucleic acid scaffold (ERS) sequence
  source 1..99: mol_type = other RNA
actggcgcttctatctgattactctgagcgccatcaccagcgactatgtcgtatgggctaaagccgcttagggacttcggtccctaagaggcatcagag

SEQ ID NO: 16481 - RNA, 96 nt, synthetic construct
  misc_feature 1..96: note = engineered ribonucleic acid scaffold (ERS) sequence
  source 1..96: mol_type = other RNA
actggcgcttctatctgattactctgagcgccatcaccagcgactatgtcgtatgggtagccgcttagggacttcggtccctaagaggcatcagag

SEQ ID NO: 16482 - RNA, 98 nt, synthetic construct
  misc_feature 1..98: note = engineered ribonucleic acid scaffold (ERS) sequence
  source 1..98: mol_type = other RNA
actggcgcttctatctgattactctgagcgccatcaccagcgactatgtcgtatgggtgaagccgcttagggacttcggtccctaagaggcatcagag

SEQ ID NO: 16483 - RNA, 98 nt, synthetic construct
  misc_feature 1..98: note = engineered ribonucleic acid scaffold (ERS) sequence
  source 1..98: mol_type = other RNA
actggcgcttctatctgattactctgagcgccatcaccagcgactatgtcgtatgggtagagccgcttagggacttcggtccctaagaggcatcagag

SEQ ID NO: 16484 - RNA, 87 nt, synthetic construct
  misc_feature 1..87: note = engineered ribonucleic acid scaffold (ERS) sequence
  source 1..87: mol_type = other RNA
actggcgcttctatctgattactctcagcgccatcaccagcgactatgtcgtagtgggtaaactccctcttcggagggagatcagac

SEQ ID NO: 16485 - RNA, 87 nt, synthetic construct
  misc_feature 1..87: note = engineered ribonucleic acid scaffold (ERS) sequence
  source 1..87: mol_type = other RNA
actggcgcttctatctgattactttgagcgccatcaccagcgactatgtcgtagtgggtaaactccctcttcggagggagatcagag

SEQ ID NO: 16486 - RNA, 87 nt, synthetic construct
  misc_feature 1..87: note = engineered ribonucleic acid scaffold (ERS) sequence
  source 1..87: mol_type = other RNA
actggcgcttctatctgattactttgagcgccatcaccagcgactatgtcgtagtgggtaaactccctcttcggagggagatcaaag

SEQ ID NO: 16487 - RNA, 87 nt, synthetic construct
  misc_feature 1..87: note = engineered ribonucleic acid scaffold (ERS) sequence
  source 1..87: mol_type = other RNA
actggcgcttctatctgattagtctcagcgccatcaccagcgactatgtcgtagtgggtaaactccctcttcggagggagatgagac

SEQ ID NO: 16488 - RNA, 87 nt, synthetic construct
  misc_feature 1..87: note = engineered ribonucleic acid scaffold (ERS) sequence
  source 1..87: mol_type = other RNA
actggcgcttctatctgattagtctgagcgccatcaccagcgactatgtcgtagtgggtaaactccctcttcggagggagatcagac

SEQ ID NO: 16489 - RNA, 87 nt, synthetic construct
  misc_feature 1..87: note = engineered ribonucleic acid scaffold (ERS) sequence
  source 1..87: mol_type = other RNA
actggcgcttctatctgattactctcagcgccatcaccagcgactatgtcgtagtgggtaaactccctcttcggagggagatgagag

SEQ ID NO: 16490 - RNA, 87 nt, synthetic construct
  misc_feature 1..87: note = engineered ribonucleic acid scaffold (ERS) sequence
  source 1..87: mol_type = other RNA
actggcgctcccatctgattaccccgagcgccatcaccagcgactatgtcgtagtgggtaaactccctcttcggagggagatcgggg

SEQ ID NO: 16491 - RNA, 87 nt, synthetic construct
  misc_feature 1..87: note = engineered ribonucleic acid scaffold (ERS) sequence
  source 1..87: mol_type = other RNA
actggcgctcctatctgattactccgagcgccatcaccagcgactatgtcgtagtgggtaaactccctcttcggagggagatcggag

SEQ ID NO: 16492 - RNA, 87 nt, synthetic construct
  misc_feature 1..87: note = engineered ribonucleic acid scaffold (ERS) sequence
  source 1..87: mol_type = other RNA
actggcgctgggatctgattaccccgagcgccatcaccagcgactatgtcgtagtgggtaaactccctcttcggagggagatcgggg

SEQ ID NO: 16493 - RNA, 87 nt, synthetic construct
  misc_feature 1..87: note = engineered ribonucleic acid scaffold (ERS) sequence
  source 1..87: mol_type = other RNA
actggcgctggtatctgattactccgagcgccatcaccagcgactatgtcgtagtgggtaaactccctcttcggagggagatcggag

SEQ ID NO: 16494 - RNA, 87 nt, synthetic construct
  misc_feature 1..87: note = engineered ribonucleic acid scaffold (ERS) sequence
  source 1..87: mol_type = other RNA
actggcgcttccatctgattaccctgagcgccatcaccagcgactatgtcgtagtgggtaaactccctcttcggagggagatcaggg

SEQ ID NO: 16495 - RNA, 87 nt, synthetic construct
  misc_feature 1..87: note = engineered ribonucleic acid scaffold (ERS) sequence
  source 1..87: mol_type = other RNA
actggcgcttggatctgattaccctgagcgccatcaccagcgactatgtcgtagtgggtaaactccctcttcggagggagatcaggg

SEQ ID NO: 16496 - RNA, 87 nt, synthetic construct
  misc_feature 1..87: note = engineered ribonucleic acid scaffold (ERS) sequence
  source 1..87: mol_type = other RNA
actggcgcttgtatctgattactctgagcgccatcaccagcgactatgtcgtagtgggtaaactccctcttcggagggagatcagag

SEQ ID NO: 16497 - RNA, 87 nt, synthetic construct
  misc_feature 1..87: note = engineered ribonucleic acid scaffold (ERS) sequence
  source 1..87: mol_type = other RNA
actggcgcttttatctgattactttgagcgccatcaccagcgactatgtcgtagtgggtaaactccctcttcggagggagatcagag

SEQ ID NO: 16498 - RNA, 87 nt, synthetic construct
  misc_feature 1..87: note = engineered ribonucleic acid scaffold (ERS) sequence
  source 1..87: mol_type = other RNA
actggcgcttttatctgattactctgagcgccatcaccagcgactatgtcgtagtgggtaaactccctcttcggagggagatcagag

SEQ ID NO: 16499 - RNA, 87 nt, synthetic construct
  misc_feature 1..87: note = engineered ribonucleic acid scaffold (ERS) sequence
  source 1..87: mol_type = other RNA
actggcgcttttatctgattactctgagcgccatcaccagcgactatgtcgtagtgggtaaactccctcttcggagggagatcaaag

SEQ ID NO: 16500 - RNA, 87 nt, synthetic construct
  misc_feature 1..87: note = engineered ribonucleic acid scaffold (ERS) sequence
  source 1..87: mol_type = other RNA
actggcgcttctatctgattactctgagcgccatcaccagcgactatgtcgtagtgggtaaactccctcttcggagggagctcagag

SEQ ID NO: 16501 - RNA, 87 nt, synthetic construct
  misc_feature 1..87: note = engineered ribonucleic acid scaffold (ERS) sequence
  source 1..87: mol_type = other RNA
actggcgcttctatctgattactctgagcgccatcaccagcgactatgtcgtagtgggtaaactccctcttcggagggaggtcagag

SEQ ID NO: 16502 - RNA, 87 nt, synthetic construct
  misc_feature 1..87: note = engineered ribonucleic acid scaffold (ERS) sequence
  source 1..87: mol_type = other RNA
actggcgcttctatctgattactctgagcgccatcaccagcgactatgtcgtagtgggtaaactccctcttcggagggagatcaaag

SEQ ID NO: 16503 - RNA, 89 nt, synthetic construct
  misc_feature 1..89: note = engineered ribonucleic acid scaffold (ERS) sequence
  source 1..89: mol_type = other RNA
actggcgcttctatctgattactctcagcgccatcaccagcgactatgtcgtagtgggtaaagcgccctcttcggagggagcatcagac

SEQ ID NO: 16504 - RNA, 89 nt, synthetic construct
  misc_feature 1..89: note = engineered ribonucleic acid scaffold (ERS) sequence
  source 1..89: mol_type = other RNA
actggcgcttctatctgattactttgagcgccatcaccagcgactatgtcgtagtgggtaaagcgccctcttcggagggagcatcagag

SEQ ID NO: 16505 - RNA, 89 nt, synthetic construct
  misc_feature 1..89: note = engineered ribonucleic acid scaffold (ERS) sequence
  source 1..89: mol_type = other RNA
actggcgcttctatctgattactttgagcgccatcaccagcgactatgtcgtagtgggtaaagcgccctcttcggagggagcatcaaag

SEQ ID NO: 16506 - RNA, 89 nt, synthetic construct
  misc_feature 1..89: note = engineered ribonucleic acid scaffold (ERS) sequence
  source 1..89: mol_type = other RNA
actggcgcttctatctgattagtctcagcgccatcaccagcgactatgtcgtagtgggtaaagcgccctcttcggagggagcatgagac

SEQ ID NO: 16507 - RNA, 89 nt, synthetic construct
  misc_feature 1..89: note = engineered ribonucleic acid scaffold (ERS) sequence
  source 1..89: mol_type = other RNA
actggcgcttctatctgattagtctgagcgccatcaccagcgactatgtcgtagtgggtaaagcgccctcttcggagggagcatcagac

SEQ ID NO: 16508 - RNA, 89 nt, synthetic construct
  misc_feature 1..89: note = engineered ribonucleic acid scaffold (ERS) sequence
  source 1..89: mol_type = other RNA
actggcgcttctatctgattactctcagcgccatcaccagcgactatgtcgtagtgggtaaagcgccctcttcggagggagcatgagag

SEQ ID NO: 16509 - RNA, 89 nt, synthetic construct
  misc_feature 1..89: note = engineered ribonucleic acid scaffold (ERS) sequence
  source 1..89: mol_type = other RNA
actggcgctcccatctgattaccccgagcgccatcaccagcgactatgtcgtagtgggtaaagcgccctcttcggagggagcatcgggg

SEQ ID NO: 16510 - RNA, 89 nt, synthetic construct
  misc_feature 1..89: note = engineered ribonucleic acid scaffold (ERS) sequence
  source 1..89: mol_type = other RNA
actggcgctcctatctgattactccgagcgccatcaccagcgactatgtcgtagtgggtaaagcgccctcttcggagggagcatcggag

SEQ ID NO: 16511 - RNA, 89 nt, synthetic construct
  misc_feature 1..89: note = engineered ribonucleic acid scaffold (ERS) sequence
  source 1..89: mol_type = other RNA
actggcgctgggatctgattaccccgagcgccatcaccagcgactatgtcgtagtgggtaaagcgccctcttcggagggagcatcgggg

SEQ ID NO: 16512 - RNA, 89 nt, synthetic construct
  misc_feature 1..89: note = engineered ribonucleic acid scaffold (ERS) sequence
  source 1..89: mol_type = other RNA
actggcgctggtatctgattactccgagcgccatcaccagcgactatgtcgtagtgggtaaagcgccctcttcggagggagcatcggag

SEQ ID NO: 16513 - RNA, 89 nt, synthetic construct
  misc_feature 1..89: note = engineered ribonucleic acid scaffold (ERS) sequence
  source 1..89: mol_type = other RNA
actggcgcttccatctgattaccctgagcgccatcaccagcgactatgtcgtagtgggtaaagcgccctcttcggagggagcatcaggg

SEQ ID NO: 16514 - RNA, 89 nt, synthetic construct
  misc_feature 1..89: note = engineered ribonucleic acid scaffold (ERS) sequence
  source 1..89: mol_type = other RNA
actggcgcttggatctgattaccctgagcgccatcaccagcgactatgtcgtagtgggtaaagcgccctcttcggagggagcatcaggg

SEQ ID NO: 16515 - RNA, 89 nt, synthetic construct
  misc_feature 1..89: note = engineered ribonucleic acid scaffold (ERS) sequence
  source 1..89: mol_type = other RNA
actggcgcttgtatctgattactctgagcgccatcaccagcgactatgtcgtagtgggtaaagcgccctcttcggagggagcatcagag

SEQ ID NO: 16516 - RNA, 89 nt, synthetic construct
  misc_feature 1..89: note = engineered ribonucleic acid scaffold (ERS) sequence
  source 1..89: mol_type = other RNA
actggcgcttttatctgattactttgagcgccatcaccagcgactatgtcgtagtgggtaaagcgccctcttcggagggagcatcagag

SEQ ID NO: 16517 - RNA, 89 nt, synthetic construct
  misc_feature 1..89: note = engineered ribonucleic acid scaffold (ERS) sequence
  source 1..89: mol_type = other RNA
actggcgcttttatctgattactctgagcgccatcaccagcgactatgtcgtagtgggtaaagcgccctcttcggagggagcatcagag

SEQ ID NO: 16518 - RNA, 89 nt, synthetic construct
  misc_feature 1..89: note = engineered ribonucleic acid scaffold (ERS) sequence
  source 1..89: mol_type = other RNA
actggcgcttttatctgattactctgagcgccatcaccagcgactatgtcgtagtgggtaaagcgccctcttcggagggagcatcaaag

SEQ ID NO: 16519 - RNA, 89 nt, synthetic construct
  misc_feature 1..89: note = engineered ribonucleic acid scaffold (ERS) sequence
  source 1..89: mol_type = other RNA
actggcgcttctatctgattactctgagcgccatcaccagcgactatgtcgtagtgggtaaagcgccctcttcggagggagcctcagag

SEQ ID NO: 16520 - RNA, 89 nt, synthetic construct
  misc_feature 1..89: note = engineered ribonucleic acid scaffold (ERS) sequence
  source 1..89: mol_type = other RNA
actggcgcttctatctgattactctgagcgccatcaccagcgactatgtcgtagtgggtaaagcgccctcttcggagggagcgtcagag

SEQ ID NO: 16521 - RNA, 89 nt, synthetic construct
  misc_feature 1..89: note = engineered ribonucleic acid scaffold (ERS) sequence
  source 1..89: mol_type = other RNA
actggcgcttctatctgattactctgagcgccatcaccagcgactatgtcgtagtgggtaaagcgccctcttcggagggagcatcaaag

SEQ ID NO: 16522 - RNA, 99 nt, synthetic construct
  misc_feature 1..99: note = engineered ribonucleic acid scaffold (ERS) sequence
  source 1..99: mol_type = other RNA
actggcgcttctatctgattactctcagcgccatcaccagcgactatgtcgtagtgggtaaagcgccttacggacttcggtccgtaaggagcatcagac

SEQ ID NO: 16523 - RNA, 99 nt, synthetic construct
  misc_feature 1..99: note = engineered ribonucleic acid scaffold (ERS) sequence
  source 1..99: mol_type = other RNA
actggcgcttctatctgattactttgagcgccatcaccagcgactatgtcgtagtgggtaaagcgccttacggacttcggtccgtaaggagcatcagag

SEQ ID NO: 16524 - RNA, 99 nt, synthetic construct
  misc_feature 1..99: note = engineered ribonucleic acid scaffold (ERS) sequence
  source 1..99: mol_type = other RNA
actggcgcttctatctgattactttgagcgccatcaccagcgactatgtcgtagtgggtaaagcgccttacggacttcggtccgtaaggagcatcaaag

SEQ ID NO: 16525 - RNA, 99 nt, synthetic construct
  misc_feature 1..99: note = engineered ribonucleic acid scaffold (ERS) sequence
  source 1..99: mol_type = other RNA
actggcgcttctatctgattagtctcagcgccatcaccagcgactatgtcgtagtgggtaaagcgccttacggacttcggtccgtaaggagcatgagac

SEQ ID NO: 16526 - RNA, 99 nt, synthetic construct
  misc_feature 1..99: note = engineered ribonucleic acid scaffold (ERS) sequence
  source 1..99: mol_type = other RNA
actggcgcttctatctgattagtctgagcgccatcaccagcgactatgtcgtagtgggtaaagcgccttacggacttcggtccgtaaggagcatcagac

SEQ ID NO: 16527 - RNA, 99 nt, synthetic construct
  misc_feature 1..99: note = engineered ribonucleic acid scaffold (ERS) sequence
  source 1..99: mol_type = other RNA
actggcgcttctatctgattactctcagcgccatcaccagcgactatgtcgtagtgggtaaagcgccttacggacttcggtccgtaaggagcatgagag

SEQ ID NO: 16528 - RNA, 99 nt, synthetic construct
  misc_feature 1..99: note = engineered ribonucleic acid scaffold (ERS) sequence
  source 1..99: mol_type = other RNA
actggcgctcccatctgattaccccgagcgccatcaccagcgactatgtcgtagtgggtaaagcgccttacggacttcggtccgtaaggagcatcgggg

SEQ ID NO: 16529 - RNA, 99 nt, synthetic construct
  misc_feature 1..99: note = engineered ribonucleic acid scaffold (ERS) sequence
  source 1..99: mol_type = other RNA
actggcgctcctatctgattactccgagcgccatcaccagcgactatgtcgtagtgggtaaagcgccttacggacttcggtccgtaaggagcatcggag

SEQ ID NO: 16530 - RNA, 99 nt, synthetic construct
  misc_feature 1..99: note = engineered ribonucleic acid scaffold (ERS) sequence
  source 1..99: mol_type = other RNA
actggcgctgggatctgattaccccgagcgccatcaccagcgactatgtcgtagtgggtaaagcgccttacggacttcggtccgtaaggagcatcgggg

SEQ ID NO: 16531 - RNA, 99 nt, synthetic construct
  misc_feature 1..99: note = engineered ribonucleic acid scaffold (ERS) sequence
  source 1..99: mol_type = other RNA
actggcgctggtatctgattactccgagcgccatcaccagcgactatgtcgtagtgggtaaagcgccttacggacttcggtccgtaaggagcatcggag

SEQ ID NO: 16532 - RNA, 99 nt, synthetic construct
  misc_feature 1..99: note = engineered ribonucleic acid scaffold (ERS) sequence
  source 1..99: mol_type = other RNA
actggcgcttccatctgattaccctgagcgccatcaccagcgactatgtcgtagtgggtaaagcgccttacggacttcggtccgtaaggagcatcaggg

SEQ ID NO: 16533 - RNA, 99 nt, synthetic construct
  misc_feature 1..99: note = engineered ribonucleic acid scaffold (ERS) sequence
  source 1..99: mol_type = other RNA
actggcgcttggatctgattaccctgagcgccatcaccagcgactatgtcgtagtgggtaaagcgccttacggacttcggtccgtaaggagcatcaggg

SEQ ID NO: 16534 - RNA, 99 nt, synthetic construct
  misc_feature 1..99: note = engineered ribonucleic acid scaffold (ERS) sequence
  source 1..99: mol_type = other RNA
actggcgcttgtatctgattactctgagcgccatcaccagcgactatgtcgtagtgggtaaagcgccttacggacttcggtccgtaaggagcatcagag

SEQ ID NO: 16535 - RNA, 99 nt, synthetic construct
  misc_feature 1..99: note = engineered ribonucleic acid scaffold (ERS) sequence
  source 1..99: mol_type = other RNA
actggcgcttttatctgattactttgagcgccatcaccagcgactatgtcgtagtgggtaaagcgccttacggacttcggtccgtaaggagcatcagag

SEQ ID NO: 16536 - RNA, 99 nt, synthetic construct
  misc_feature 1..99: note = engineered ribonucleic acid scaffold (ERS) sequence
  source 1..99: mol_type = other RNA
actggcgcttttatctgattactctgagcgccatcaccagcgactatgtcgtagtgggtaaagcgccttacggacttcggtccgtaaggagcatcagag

SEQ ID NO: 16537 - RNA, 99 nt, synthetic construct
  misc_feature 1..99: note = engineered ribonucleic acid scaffold (ERS) sequence
  source 1..99: mol_type = other RNA
actggcgcttttatctgattactctgagcgccatcaccagcgactatgtcgtagtgggtaaagcgccttacggacttcggtccgtaaggagcatcaaag

SEQ ID NO: 16538 - RNA, 99 nt, synthetic construct
  misc_feature 1..99: note = engineered ribonucleic acid scaffold (ERS) sequence
  source 1..99: mol_type = other RNA
actggcgcttctatctgattactctgagcgccatcaccagcgactatgtcgtagtgggtaaagcgccttacggacttcggtccgtaaggagcctcagag

SEQ ID NO: 16539 - RNA, 99 nt, synthetic construct
  misc_feature 1..99: note = engineered ribonucleic acid scaffold (ERS) sequence
  source 1..99: mol_type = other RNA
actggcgcttctatctgattactctgagcgccatcaccagcgactatgtcgtagtgggtaaagcgccttacggacttcggtccgtaaggagcgtcagag

SEQ ID NO: 16540 - RNA, 99 nt, synthetic construct
  misc_feature 1..99: note = engineered ribonucleic acid scaffold (ERS) sequence
  source 1..99: mol_type = other RNA
actggcgcttctatctgattactctgagcgccatcaccagcgactatgtcgtagtgggtaaagcgccttacggacttcggtccgtaaggagcatcaaag

SEQ ID NO: 16541 - RNA, 99 nt, synthetic construct
  misc_feature 1..99: note = engineered ribonucleic acid scaffold (ERS) sequence
  source 1..99: mol_type = other RNA
actggcgcttctatctgattactctcagcgccatcaccagcgactatgtcgtagtgggtaaagcgcttacggaattcgtgtccgtaagaagcatcagac

SEQ ID NO: 16542 - RNA, 99 nt, synthetic construct
  misc_feature 1..99: note = engineered ribonucleic acid scaffold (ERS) sequence
  source 1..99: mol_type = other RNA
actggcgcttctatctgattactttgagcgccatcaccagcgactatgtcgtagtgggtaaagcgcttacggaattcgtgtccgtaagaagcatcagag

SEQ ID NO: 16543 - RNA, 99 nt, synthetic construct
  misc_feature 1..99: note = engineered ribonucleic acid scaffold (ERS) sequence
  source 1..99: mol_type = other RNA
actggcgcttctatctgattactttgagcgccatcaccagcgactatgtcgtagtgggtaaagcgcttacggaattcgtgtccgtaagaagcatcaaag

SEQ ID NO: 16544 - RNA, 99 nt, synthetic construct
  misc_feature 1..99: note = engineered ribonucleic acid scaffold (ERS) sequence
  source 1..99: mol_type = other RNA
actggcgcttctatctgattagtctcagcgccatcaccagcgactatgtcgtagtgggtaaagcgcttacggaattcgtgtccgtaagaagcatgagac

SEQ ID NO: 16545 - RNA, 99 nt, synthetic construct
  misc_feature 1..99: note = engineered ribonucleic acid scaffold (ERS) sequence
  source 1..99: mol_type = other RNA
actggcgcttctatctgattagtctgagcgccatcaccagcgactatgtcgtagtgggtaaagcgcttacggaattcgtgtccgtaagaagcatcagac

SEQ ID NO: 16546 - RNA, 99 nt, synthetic construct
  misc_feature 1..99: note = engineered ribonucleic acid scaffold (ERS) sequence
  source 1..99: mol_type = other RNA
actggcgcttctatctgattactctcagcgccatcaccagcgactatgtcgtagtgggtaaagcgcttacggaattcgtgtccgtaagaagcatgagag

SEQ ID NO: 16547 - RNA, 99 nt, synthetic construct
  misc_feature 1..99: note = engineered ribonucleic acid scaffold (ERS) sequence
  source 1..99: mol_type = other RNA
actggcgctcccatctgattaccccgagcgccatcaccagcgactatgtcgtagtgggtaaagcgcttacggaattcgtgtccgtaagaagcatcgggg

SEQ ID NO: 16548 - RNA, 99 nt, synthetic construct
  misc_feature 1..99: note = engineered ribonucleic acid scaffold (ERS) sequence
  source 1..99: mol_type = other RNA
actggcgctcctatctgattactccgagcgccatcaccagcgactatgtcgtagtgggtaaagcgcttacggaattcgtgtccgtaagaagcatcggag

SEQ ID NO: 16549 - RNA, 99 nt, synthetic construct
  misc_feature 1..99: note = engineered ribonucleic acid scaffold (ERS) sequence
  source 1..99: mol_type = other RNA
actggcgctgggatctgattaccccgagcgccatcaccagcgactatgtcgtagtgggtaaagcgcttacggaattcgtgtccgtaagaagcatcgggg

SEQ ID NO: 16550 - RNA, 99 nt, synthetic construct
  misc_feature 1..99: note = engineered ribonucleic acid scaffold (ERS) sequence
  source 1..99: mol_type = other RNA
actggcgctggtatctgattactccgagcgccatcaccagcgactatgtcgtagtgggtaaagcgcttacggaattcgtgtccgtaagaagcatcggag

SEQ ID NO: 16551 - RNA, 99 nt, synthetic construct
  misc_feature 1..99: note = engineered ribonucleic acid scaffold (ERS) sequence
  source 1..99: mol_type = other RNA
actggcgcttccatctgattaccctgagcgccatcaccagcgactatgtcgtagtgggtaaagcgcttacggaattcgtgtccgtaagaagcatcaggg

SEQ ID NO: 16552 - RNA, 99 nt, synthetic construct
  misc_feature 1..99: note = engineered ribonucleic acid scaffold (ERS) sequence
  source 1..99: mol_type = other RNA
actggcgcttggatctgattaccctgagcgccatcaccagcgactatgtcgtagtgggtaaagcgcttacggaattcgtgtccgtaagaagcatcaggg

SEQ ID NO: 16553 - RNA, 99 nt, synthetic construct
  misc_feature 1..99: note = engineered ribonucleic acid scaffold (ERS) sequence
  source 1..99: mol_type = other RNA
actggcgcttgtatctgattactctgagcgccatcaccagcgactatgtcgtagtgggtaaagcgcttacggaattcgtgtccgtaagaagcatcagag

SEQ ID NO: 16554 - RNA, 99 nt, synthetic construct
  misc_feature 1..99: note = engineered ribonucleic acid scaffold (ERS) sequence
  source 1..99: mol_type = other RNA
actggcgcttttatctgattactttgagcgccatcaccagcgactatgtcgtagtgggtaaagcgcttacggaattcgtgtccgtaagaagcatcagag

SEQ ID NO: 16555 - RNA, 99 nt, synthetic construct
  misc_feature 1..99: note = engineered ribonucleic acid scaffold (ERS) sequence
  source 1..99: mol_type = other RNA
actggcgcttttatctgattactctgagcgccatcaccagcgactatgtcgtagtgggtaaagcgcttacggaattcgtgtccgtaagaagcatcagag

SEQ ID NO: 16556 - RNA, 99 nt, synthetic construct
  misc_feature 1..99: note = engineered ribonucleic acid scaffold (ERS) sequence
  source 1..99: mol_type = other RNA
actggcgcttttatctgattactctgagcgccatcaccagcgactatgtcgtagtgggtaaagcgcttacggaattcgtgtccgtaagaagcatcaaag

SEQ ID NO: 16557 - RNA, 99 nt, synthetic construct
  misc_feature 1..99: note = engineered ribonucleic acid scaffold (ERS) sequence
  source 1..99: mol_type = other RNA
actggcgcttctatctgattactctgagcgccatcaccagcgactatgtcgtagtgggtaaagcgcttacggaattcgtgtccgtaagaagcctcagag

SEQ ID NO: 16558 - RNA, 99 nt, synthetic construct
  misc_feature 1..99: note = engineered ribonucleic acid scaffold (ERS) sequence
  source 1..99: mol_type = other RNA
actggcgcttctatctgattactctgagcgccatcaccagcgactatgtcgtagtgggtaaagcgcttacggaattcgtgtccgtaagaagcgtcagag

SEQ ID NO: 16559 - RNA, 99 nt, synthetic construct
  misc_feature 1..99: note = engineered ribonucleic acid scaffold (ERS) sequence
  source 1..99: mol_type = other RNA
actggcgcttctatctgattactctgagcgccatcaccagcgactatgtcgtagtgggtaaagcgcttacggaattcgtgtccgtaagaagcatcaaag

SEQ ID NO: 16560 - RNA, 100 nt, synthetic construct
  misc_feature 1..100: note = engineered ribonucleic acid scaffold (ERS) sequence
  source 1..100: mol_type = other RNA
actggcgcttctatctgattactctcagcgccatcaccagcgactatgtcgtagtgggtaaagcgcttacggacttcgcggtccgtaagaagcatcagac

SEQ ID NO: 16561 - RNA, 100 nt, synthetic construct
  misc_feature 1..100: note = engineered ribonucleic acid scaffold (ERS) sequence
  source 1..100: mol_type = other RNA
actggcgcttctatctgattactttgagcgccatcaccagcgactatgtcgtagtgggtaaagcgcttacggacttcgcggtccgtaagaagcatcagag

SEQ ID NO: 16562 - RNA, 100 nt, synthetic construct
  misc_feature 1..100: note = engineered ribonucleic acid scaffold (ERS) sequence
  source 1..100: mol_type = other RNA
actggcgcttctatctgattactttgagcgccatcaccagcgactatgtcgtagtgggtaaagcgcttacggacttcgcggtccgtaagaagcatcaaag

SEQ ID NO: 16563 - RNA, 100 nt, synthetic construct
  misc_feature 1..100: note = engineered ribonucleic acid scaffold (ERS) sequence
  source 1..100: mol_type = other RNA
actggcgcttctatctgattagtctcagcgccatcaccagcgactatgtcgtagtgggtaaagcgcttacggacttcgcggtccgtaagaagcatgagac

SEQ ID NO: 16564 - RNA, 100 nt, synthetic construct
  misc_feature 1..100: note = engineered ribonucleic acid scaffold (ERS) sequence
  source 1..100: mol_type = other RNA
actggcgcttctatctgattagtctgagcgccatcaccagcgactatgtcgtagtgggtaaagcgcttacggacttcgcggtccgtaagaagcatcagac

SEQ ID NO: 16565 - RNA, 100 nt, synthetic construct
  misc_feature 1..100: note = engineered ribonucleic acid scaffold (ERS) sequence
  source 1..100: mol_type = other RNA
actggcgcttctatctgattactctcagcgccatcaccagcgactatgtcgtagtgggtaaagcgcttacggacttcgcggtccgtaagaagcatgagag

SEQ ID NO: 16566 - RNA, 100 nt, synthetic construct
  misc_feature 1..100: note = engineered ribonucleic acid scaffold (ERS) sequence
  source 1..100: mol_type = other RNA
actggcgctcccatctgattaccccgagcgccatcaccagcgactatgtcgtagtgggtaaagcgcttacggacttcgcggtccgtaagaagcatcgggg

SEQ ID NO: 16567 - RNA, 100 nt, synthetic construct
  misc_feature 1..100: note = engineered ribonucleic acid scaffold (ERS) sequence
  source 1..100: mol_type = other RNA
actggcgctcctatctgattactccgagcgccatcaccagcgactatgtcgtagtgggtaaagcgcttacggacttcgcggtccgtaagaagcatcggag

SEQ ID NO: 16568 - RNA, 100 nt, synthetic construct
  misc_feature 1..100: note = engineered ribonucleic acid scaffold (ERS) sequence
  source 1..100: mol_type = other RNA
actggcgctgggatctgattaccccgagcgccatcaccagcgactatgtcgtagtgggtaaagcgcttacggacttcgcggtccgtaagaagcatcgggg

SEQ ID NO: 16569 - RNA, 100 nt, synthetic construct
  misc_feature 1..100: note = engineered ribonucleic acid scaffold (ERS) sequence
  source 1..100: mol_type = other RNA
actggcgctggtatctgattactccgagcgccatcaccagcgactatgtcgtagtgggtaaagcgcttacggacttcgcggtccgtaagaagcatcggag

SEQ ID NO: 16570 - RNA, 100 nt, synthetic construct
  misc_feature 1..100: note = engineered ribonucleic acid scaffold (ERS) sequence
  source 1..100: mol_type = other RNA
actggcgcttccatctgattaccctgagcgccatcaccagcgactatgtcgtagtgggtaaagcgcttacggacttcgcggtccgtaagaagcatcaggg

SEQ ID NO: 16571 - RNA, 100 nt, synthetic construct
  misc_feature 1..100: note = engineered ribonucleic acid scaffold (ERS) sequence
  source 1..100: mol_type = other RNA
actggcgcttggatctgattaccctgagcgccatcaccagcgactatgtcgtagtgggtaaagcgcttacggacttcgcggtccgtaagaagcatcaggg

SEQ ID NO: 16572 - RNA, 100 nt, synthetic construct
  misc_feature 1..100: note = engineered ribonucleic acid scaffold (ERS) sequence
  source 1..100: mol_type = other RNA
actggcgcttgtatctgattactctgagcgccatcaccagcgactatgtcgtagtgggtaaagcgcttacggacttcgcggtccgtaagaagcatcagag

SEQ ID NO: 16573 - RNA, 100 nt, synthetic construct
  misc_feature 1..100: note = engineered ribonucleic acid scaffold (ERS) sequence
  source 1..100: mol_type = other RNA
actggcgcttttatctgattactttgagcgccatcaccagcgactatgtcgtagtgggtaaagcgcttacggacttcgcggtccgtaagaagcatcagag

SEQ ID NO: 16574 - RNA, 100 nt, synthetic construct
  misc_feature 1..100: note = engineered ribonucleic acid scaffold (ERS) sequence
  source 1..100: mol_type = other RNA
actggcgcttttatctgattactctgagcgccatcaccagcgactatgtcgtagtgggtaaagcgcttacggacttcgcggtccgtaagaagcatcagag

SEQ ID NO: 16575 - RNA, 100 nt, synthetic construct
  misc_feature 1..100: note = engineered ribonucleic acid scaffold (ERS) sequence
  source 1..100: mol_type = other RNA
actggcgcttttatctgattactctgagcgccatcaccagcgactatgtcgtagtgggtaaagcgcttacggacttcgcggtccgtaagaagcatcaaag

SEQ ID NO: 16576 - RNA, 100 nt, synthetic construct
  misc_feature 1..100: note = engineered ribonucleic acid scaffold (ERS) sequence
  source 1..100: mol_type = other RNA
actggcgcttctatctgattactctgagcgccatcaccagcgactatgtcgtagtgggtaaagcgcttacggacttcgcggtccgtaagaagcctcagag

SEQ ID NO: 16577 - RNA, 100 nt, synthetic construct
  misc_feature 1..100: note = engineered ribonucleic acid scaffold (ERS) sequence
  source 1..100: mol_type = other RNA
actggcgcttctatctgattactctgagcgccatcaccagcgactatgtcgtagtgggtaaagcgcttacggacttcgcggtccgtaagaagcgtcagag

SEQ ID NO: 16578 - RNA, 100 nt, synthetic construct
  misc_feature 1..100: note = engineered ribonucleic acid scaffold (ERS) sequence
  source 1..100: mol_type = other RNA
actggcgcttctatctgattactctgagcgccatcaccagcgactatgtcgtagtgggtaaagcgcttacggacttcgcggtccgtaagaagcatcaaag

SEQ ID NO: 16579 - RNA, 98 nt, synthetic construct
  misc_feature 1..98: note = engineered ribonucleic acid scaffold (ERS) sequence
  source 1..98: mol_type = other RNA
actggcgcttctatctgattactctcagcgccatcaccagcgactatgtcgtagtgggtaaagcgcttacggacttcggtccgtaagaagcatcagac

SEQ ID NO: 16580 - RNA, 98 nt, synthetic construct
  misc_feature 1..98: note = engineered ribonucleic acid scaffold (ERS) sequence
  source 1..98: mol_type = other RNA
actggcgcttctatctgattactttgagcgccatcaccagcgactatgtcgtagtgggtaaagcgcttacggacttcggtccgtaagaagcatcagag

SEQ ID NO: 16581 - RNA, 98 nt, synthetic construct
  misc_feature 1..98: note = engineered ribonucleic acid scaffold (ERS) sequence
  source 1..98: mol_type = other RNA
actggcgcttctatctgattactttgagcgccatcaccagcgactatgtcgtagtgggtaaagcgcttacggacttcggtccgtaagaagcatcaaag

SEQ ID NO: 16582 - RNA, 98 nt, synthetic construct
  misc_feature 1..98: note = engineered ribonucleic acid scaffold (ERS) sequence
  source 1..98: mol_type = other RNA
actggcgcttctatctgattagtctcagcgccatcaccagcgactatgtcgtagtgggtaaagcgcttacggacttcggtccgtaagaagcatgagac

SEQ ID NO: 16583 - RNA, 98 nt, synthetic construct
  misc_feature 1..98: note = engineered ribonucleic acid scaffold (ERS) sequence
  source 1..98: mol_type = other RNA
actggcgcttctatctgattagtctgagcgccatcaccagcgactatgtcgtagtgggtaaagcgcttacggacttcggtccgtaagaagcatcagac

SEQ ID NO: 16584 - RNA, 98 nt, synthetic construct
  misc_feature 1..98: note = engineered ribonucleic acid scaffold (ERS) sequence
  source 1..98: mol_type = other RNA
actggcgcttctatctgattactctcagcgccatcaccagcgactatgtcgtagtgggtaaagcgcttacggacttcggtccgtaagaagcatgagag

SEQ ID NO: 16585 - RNA, 98 nt, synthetic construct
  misc_feature 1..98: note = engineered ribonucleic acid scaffold (ERS) sequence
  source 1..98: mol_type = other RNA
actggcgctcccatctgattaccccgagcgccatcaccagcgactatgtcgtagtgggtaaagcgcttacggacttcggtccgtaagaagcatcgggg

SEQ ID NO: 16586 - RNA, 98 nt, synthetic construct
  misc_feature 1..98: note = engineered ribonucleic acid scaffold (ERS) sequence
  source 1..98: mol_type = other RNA
actggcgctcctatctgattactccgagcgccatcaccagcgactatgtcgtagtgggtaaagcgcttacggacttcggtccgtaagaagcatcggag

SEQ ID NO: 16587 - RNA, 98 nt, synthetic construct
  misc_feature 1..98: note = engineered ribonucleic acid scaffold (ERS) sequence
  source 1..98: mol_type = other RNA
actggcgctgggatctgattaccccgagcgccatcaccagcgactatgtcgtagtgggtaaagcgcttacggacttcggtccgtaagaagcatcgggg

SEQ ID NO: 16588 - RNA, 98 nt, synthetic construct
  misc_feature 1..98: note = engineered ribonucleic acid scaffold (ERS) sequence
  source 1..98: mol_type = other RNA
actggcgctggtatctgattactccgagcgccatcaccagcgactatgtcgtagtgggtaaagcgcttacggacttcggtccgtaagaagcatcggag

SEQ ID NO: 16589 - RNA, 98 nt, synthetic construct
  misc_feature 1..98: note = engineered ribonucleic acid scaffold (ERS) sequence
  source 1..98: mol_type = other RNA
actggcgcttccatctgattaccctgagcgccatcaccagcgactatgtcgtagtgggtaaagcgcttacggacttcggtccgtaagaagcatcaggg

SEQ ID NO: 16590 - RNA, 98 nt, synthetic construct
  misc_feature 1..98: note = engineered ribonucleic acid scaffold (ERS) sequence
  source 1..98: mol_type = other RNA
actggcgcttggatctgattaccctgagcgccatcaccagcgactatgtcgtagtgggtaaagcgcttacggacttcggtccgtaagaagcatcaggg

SEQ ID NO: 16591 - RNA, 98 nt, synthetic construct
  misc_feature 1..98: note = engineered ribonucleic acid scaffold (ERS) sequence
  source 1..98: mol_type = other RNA
actggcgcttgtatctgattactctgagcgccatcaccagcgactatgtcgtagtgggtaaagcgcttacggacttcggtccgtaagaagcatcagag

SEQ ID NO: 16592 - RNA, 98 nt, synthetic construct
  misc_feature 1..98: note = engineered ribonucleic acid scaffold (ERS) sequence
  source 1..98: mol_type = other RNA
actggcgcttttatctgattactttgagcgccatcaccagcgactatgtcgtagtgggtaaagcgcttacggacttcggtccgtaagaagcatcagag

SEQ ID NO: 16593 - RNA, 98 nt, synthetic construct
  misc_feature 1..98: note = engineered ribonucleic acid scaffold (ERS) sequence
  source 1..98: mol_type = other RNA
actggcgcttttatctgattactctgagcgccatcaccagcgactatgtcgtagtgggtaaagcgcttacggacttcggtccgtaagaagcatcagag

SEQ ID NO: 16594 - RNA, 98 nt, synthetic construct
  misc_feature 1..98: note = engineered ribonucleic acid scaffold (ERS) sequence
  source 1..98: mol_type = other RNA
actggcgcttttatctgattactctgagcgccatcaccagcgactatgtcgtagtgggtaaagcgcttacggacttcggtccgtaagaagcatcaaag

SEQ ID NO: 16595 - RNA, 98 nt, synthetic construct
  misc_feature 1..98: note = engineered ribonucleic acid scaffold (ERS) sequence
  source 1..98: mol_type = other RNA
actggcgcttctatctgattactctgagcgccatcaccagcgactatgtcgtagtgggtaaagcgcttacggacttcggtccgtaagaagcctcagag

SEQ ID NO: 16596 - RNA, 98 nt, synthetic construct
  misc_feature 1..98: note = engineered ribonucleic acid scaffold (ERS) sequence
  source 1..98: mol_type = other RNA
actggcgcttctatctgattactctgagcgccatcaccagcgactatgtcgtagtgggtaaagcgcttacggacttcggtccgtaagaagcgtcagag

SEQ ID NO: 16597 - RNA, 98 nt, synthetic construct
  misc_feature 1..98: note = engineered ribonucleic acid scaffold (ERS) sequence
  source 1..98: mol_type = other RNA
actggcgcttctatctgattactctgagcgccatcaccagcgactatgtcgtagtgggtaaagcgcttacggacttcggtccgtaagaagcatcaaag

SEQ ID NO: 16598 - RNA, 98 nt, synthetic construct
  misc_feature 1..98: note = engineered ribonucleic acid scaffold (ERS) sequence
  source 1..98: mol_type = other RNA
actggcgcttctatctgattactctcagcgccatcaccagcgactatgtcgtagtgggtaaagcgcttacggacttcggtccgtaagtcgcatcagac

SEQ ID NO: 16599 - RNA, 98 nt, synthetic construct
  misc_feature 1..98: note = engineered ribonucleic acid scaffold (ERS) sequence
  source 1..98: mol_type = other RNA
actggcgcttctatctgattactttgagcgccatcaccagcgactatgtcgtagtgggtaaagcgcttacggacttcggtccgtaagtcgcatcagag

SEQ ID NO: 16600 - RNA, 98 nt, synthetic construct
  misc_feature 1..98: note = engineered ribonucleic acid scaffold (ERS) sequence
  source 1..98: mol_type = other RNA
actggcgcttctatctgattactttgagcgccatcaccagcgactatgtcgtagtgggtaaagcgcttacggacttcggtccgtaagtcgcatcaaag

SEQ ID NO: 16601 - RNA, 98 nt, synthetic construct
  misc_feature 1..98: note = engineered ribonucleic acid scaffold (ERS) sequence
  source 1..98: mol_type = other RNA
actggcgcttctatctgattagtctcagcgccatcaccagcgactatgtcgtagtgggtaaagcgcttacggacttcggtccgtaagtcgcatgagac

SEQ ID NO: 16602 - RNA, 98 nt, synthetic construct
  misc_feature 1..98: note = engineered ribonucleic acid scaffold (ERS) sequence
  source 1..98: mol_type = other RNA
actggcgcttctatctgattagtctgagcgccatcaccagcgactatgtcgtagtgggtaaagcgcttacggacttcggtccgtaagtcgcatcagac

SEQ ID NO: 16603 - RNA, 98 nt, synthetic construct
  misc_feature 1..98: note = engineered ribonucleic acid scaffold (ERS) sequence
  source 1..98: mol_type = other RNA
actggcgcttctatctgattactctcagcgccatcaccagcgactatgtcgtagtgggtaaagcgcttacggacttcggtccgtaagtcgcatgagag

SEQ ID NO: 16604 - RNA, 98 nt, synthetic construct
  misc_feature 1..98: note = engineered ribonucleic acid scaffold (ERS) sequence
  source 1..98: mol_type = other RNA
actggcgctcccatctgattaccccgagcgccatcaccagcgactatgtcgtagtgggtaaagcgcttacggacttcggtccgtaagtcgcatcgggg

SEQ ID NO: 16605 - RNA, 98 nt, synthetic construct
  misc_feature 1..98: note = engineered ribonucleic acid scaffold (ERS) sequence
  source 1..98: mol_type = other RNA
actggcgctcctatctgattactccgagcgccatcaccagcgactatgtcgtagtgggtaaagcgcttacggacttcggtccgtaagtcgcatcggag

SEQ ID NO: 16606 - RNA, 98 nt, synthetic construct
  misc_feature 1..98: note = engineered ribonucleic acid scaffold (ERS) sequence
  source 1..98: mol_type = other RNA
actggcgctgggatctgattaccccgagcgccatcaccagcgactatgtcgtagtgggtaaagcgcttacggacttcggtccgtaagtcgcatcgggg

SEQ ID NO: 16607 - RNA, 98 nt, synthetic construct
  misc_feature 1..98: note = engineered ribonucleic acid scaffold (ERS) sequence
  source 1..98: mol_type = other RNA
actggcgctggtatctgattactccgagcgccatcaccagcgactatgtcgtagtgggtaaagcgcttacggacttcggtccgtaagtcgcatcggag

SEQ ID NO: 16608 - RNA, 98 nt, synthetic construct
  misc_feature 1..98: note = engineered ribonucleic acid scaffold (ERS) sequence
  source 1..98: mol_type = other RNA
actggcgcttccatctgattaccctgagcgccatcaccagcgactatgtcgtagtgggtaaagcgcttacggacttcggtccgtaagtcgcatcaggg

SEQ ID NO: 16609 - RNA, 98 nt, synthetic construct
  misc_feature 1..98: note = engineered ribonucleic acid scaffold (ERS) sequence
  source 1..98: mol_type = other RNA
actggcgcttggatctgattaccctgagcgccatcaccagcgactatgtcgtagtgggtaaagcgcttacggacttcggtccgtaagtcgcatcaggg

SEQ ID NO: 16610 - RNA, 98 nt, synthetic construct
  misc_feature 1..98: note = engineered ribonucleic acid scaffold (ERS) sequence
  source 1..98: mol_type = other RNA
actggcgcttgtatctgattactctgagcgccatcaccagcgactatgtcgtagtgggtaaagcgcttacggacttcggtccgtaagtcgcatcagag

SEQ ID NO: 16611 - RNA, 98 nt, synthetic construct
  misc_feature 1..98: note = engineered ribonucleic acid scaffold (ERS) sequence
  source 1..98: mol_type = other RNA
actggcgcttttatctgattactttgagcgccatcaccagcgactatgtcgtagtgggtaaagcgcttacggacttcggtccgtaagtcgcatcagag

SEQ ID NO: 16612 - RNA, 98 nt, synthetic construct
  misc_feature 1..98: note = engineered ribonucleic acid scaffold (ERS) sequence
  source 1..98: mol_type = other RNA
actggcgcttttatctgattactctgagcgccatcaccagcgactatgtcgtagtgggtaaagcgcttacggacttcggtccgtaagtcgcatcagag

SEQ ID NO: 16613 - RNA, 98 nt, synthetic construct
  misc_feature 1..98: note = engineered ribonucleic acid scaffold (ERS) sequence
  source 1..98: mol_type = other RNA
actggcgcttttatctgattactctgagcgccatcaccagcgactatgtcgtagtgggtaaagcgcttacggacttcggtccgtaagtcgcatcaaag

SEQ ID NO: 16614 - RNA, 98 nt, synthetic construct
  misc_feature 1..98: note = engineered ribonucleic acid scaffold (ERS) sequence
  source 1..98: mol_type = other RNA
actggcgcttctatctgattactctgagcgccatcaccagcgactatgtcgtagtgggtaaagcgcttacggacttcggtccgtaagtcgcctcagag

SEQ ID NO: 16615 - RNA, 98 nt, synthetic construct
  misc_feature 1..98: note = engineered ribonucleic acid scaffold (ERS) sequence
  source 1..98: mol_type = other RNA
actggcgcttctatctgattactctgagcgccatcaccagcgactatgtcgtagtgggtaaagcgcttacggacttcggtccgtaagtcgcgtcagag

SEQ ID NO: 16616 - RNA, 98 nt, synthetic construct
  misc_feature 1..98: note = engineered ribonucleic acid scaffold (ERS) sequence
  source 1..98: mol_type = other RNA
actggcgcttctatctgattactctgagcgccatcaccagcgactatgtcgtagtgggtaaagcgcttacggacttcggtccgtaagtcgcatcaaag

SEQ ID NO: 16617 - RNA, 98 nt, synthetic construct
  misc_feature 1..98: note = engineered ribonucleic acid scaffold (ERS) sequence
  source 1..98: mol_type = other RNA
actggcgcttctatctgattactctcagcgccatcaccagcgactatgtcgtagtgggtaaagcgcttacggagttcgatccgtaagaagcatcagac

SEQ ID NO: 16618 - RNA, 98 nt, synthetic construct
  misc_feature 1..98: note = engineered ribonucleic acid scaffold (ERS) sequence
  source 1..98: mol_type = other RNA
actggcgcttctatctgattactttgagcgccatcaccagcgactatgtcgtagtgggtaaagcgcttacggagttcgatccgtaagaagcatcagag

SEQ ID NO: 16619 - RNA, 98 nt, synthetic construct
  misc_feature 1..98: note = engineered ribonucleic acid scaffold (ERS) sequence
  source 1..98: mol_type = other RNA
actggcgcttctatctgattactttgagcgccatcaccagcgactatgtcgtagtgggtaaagcgcttacggagttcgatccgtaagaagcatcaaag

SEQ ID NO: 16620 - RNA, 98 nt, synthetic construct
  misc_feature 1..98: note = engineered ribonucleic acid scaffold (ERS) sequence
  source 1..98: mol_type = other RNA
actggcgcttctatctgattagtctcagcgccatcaccagcgactatgtcgtagtgggtaaagcgcttacggagttcgatccgtaagaagcatgagac

SEQ ID NO: 16621 - RNA, 98 nt, synthetic construct
  misc_feature 1..98: note = engineered ribonucleic acid scaffold (ERS) sequence
  source 1..98: mol_type = other RNA
actggcgcttctatctgattagtctgagcgccatcaccagcgactatgtcgtagtgggtaaagcgcttacggagttcgatccgtaagaagcatcagac

SEQ ID NO: 16622 - RNA, 98 nt, synthetic construct
  misc_feature 1..98: note = engineered ribonucleic acid scaffold (ERS) sequence
  source 1..98: mol_type = other RNA
actggcgcttctatctgattactctcagcgccatcaccagcgactatgtcgtagtgggtaaagcgcttacggagttcgatccgtaagaagcatgagag

SEQ ID NO: 16623 - RNA, 98 nt, synthetic construct
  misc_feature 1..98: note = engineered ribonucleic acid scaffold (ERS) sequence
  source 1..98: mol_type = other RNA
actggcgctcccatctgattaccccgagcgccatcaccagcgactatgtcgtagtgggtaaagcgcttacggagttcgatccgtaagaagcatcgggg

SEQ ID NO: 16624 - RNA, 98 nt, synthetic construct
  misc_feature 1..98: note = engineered ribonucleic acid scaffold (ERS) sequence
  source 1..98: mol_type = other RNA
actggcgctcctatctgattactccgagcgccatcaccagcgactatgtcgtagtgggtaaagcgcttacggagttcgatccgtaagaagcatcggag

SEQ ID NO: 16625 - RNA, 98 nt, synthetic construct
  misc_feature 1..98: note = engineered ribonucleic acid scaffold (ERS) sequence
  source 1..98: mol_type = other RNA
actggcgctgggatctgattaccccgagcgccatcaccagcgactatgtcgtagtgggtaaagcgcttacggagttcgatccgtaagaagcatcgggg

SEQ ID NO: 16626 - RNA, 98 nt, synthetic construct
  misc_feature 1..98: note = engineered ribonucleic acid scaffold (ERS) sequence
  source 1..98: mol_type = other RNA
actggcgctggtatctgattactccgagcgccatcaccagcgactatgtcgtagtgggtaaagcgcttacggagttcgatccgtaagaagcatcggag

SEQ ID NO: 16627 - RNA, 98 nt, synthetic construct
  misc_feature 1..98: note = engineered ribonucleic acid scaffold (ERS) sequence
  source 1..98: mol_type = other RNA
actggcgcttccatctgattaccctgagcgccatcaccagcgactatgtcgtagtgggtaaagcgcttacggagttcgatccgtaagaagcatcaggg

SEQ ID NO: 16628 - RNA, 98 nt, synthetic construct
  misc_feature 1..98: note = engineered ribonucleic acid scaffold (ERS) sequence
  source 1..98: mol_type = other RNA
actggcgcttggatctgattaccctgagcgccatcaccagcgactatgtcgtagtgggtaaagcgcttacggagttcgatccgtaagaagcatcaggg

SEQ ID NO: 16629 - RNA, 98 nt, synthetic construct
  misc_feature 1..98: note = engineered ribonucleic acid scaffold (ERS) sequence
  source 1..98: mol_type = other RNA
actggcgcttgtatctgattactctgagcgccatcaccagcgactatgtcgtagtgggtaaagcgcttacggagttcgatccgtaagaagcatcagag

SEQ ID NO: 16630 - RNA, 98 nt, synthetic construct
  misc_feature 1..98: note = engineered ribonucleic acid scaffold (ERS) sequence
  source 1..98: mol_type = other RNA
actggcgcttttatctgattactttgagcgccatcaccagcgactatgtcgtagtgggtaaagcgcttacggagttcgatccgtaagaagcatcagag

SEQ ID NO: 16631 - RNA, 98 nt, synthetic construct
  misc_feature 1..98: note = engineered ribonucleic acid scaffold (ERS) sequence
  source 1..98: mol_type = other RNA
actggcgcttttatctgattactctgagcgccatcaccagcgactatgtcgtagtgggtaaagcgcttacggagttcgatccgtaagaagcatcagag

SEQ ID NO: 16632 - RNA, 98 nt, synthetic construct
  misc_feature 1..98: note = engineered ribonucleic acid scaffold (ERS) sequence
  source 1..98: mol_type = other RNA
actggcgcttttatctgattactctgagcgccatcaccagcgactatgtcgtagtgggtaaagcgcttacggagttcgatccgtaagaagcatcaaag

SEQ ID NO: 16633 - RNA, 98 nt, synthetic construct
  misc_feature 1..98: note = engineered ribonucleic acid scaffold (ERS) sequence
  source 1..98: mol_type = other RNA
actggcgcttctatctgattactctgagcgccatcaccagcgactatgtcgtagtgggtaaagcgcttacggagttcgatccgtaagaagcctcagag

SEQ ID NO: 16634 - RNA, 98 nt, synthetic construct
  misc_feature 1..98: note = engineered ribonucleic acid scaffold (ERS) sequence
  source 1..98: mol_type = other RNA
actggcgcttctatctgattactctgagcgccatcaccagcgactatgtcgtagtgggtaaagcgcttacggagttcgatccgtaagaagcgtcagag

SEQ ID NO: 16635 - RNA, 98 nt, synthetic construct
  misc_feature 1..98: note = engineered ribonucleic acid scaffold (ERS) sequence
  source 1..98: mol_type = other RNA
actggcgcttctatctgattactctgagcgccatcaccagcgactatgtcgtagtgggtaaagcgcttacggagttcgatccgtaagaagcatcaaag

SEQ ID NO: 16636 - RNA, 98 nt, synthetic construct
  misc_feature 1..98: note = engineered ribonucleic acid scaffold (ERS) sequence
  source 1..98: mol_type = other RNA
actggcgcttctatctgattactctcagcgccatcaccagcgactatgtcgtagtgggtaaagcgctttcggacttcggtccggaagaagcatcagac

SEQ ID NO: 16637 - RNA, 98 nt, synthetic construct
  misc_feature 1..98: note = engineered ribonucleic acid scaffold (ERS) sequence
  source 1..98: mol_type = other RNA
actggcgcttctatctgattactttgagcgccatcaccagcgactatgtcgtagtgggtaaagcgctttcggacttcggtccggaagaagcatcagag

SEQ ID NO: 16638 - RNA, 98 nt, synthetic construct
  misc_feature 1..98: note = engineered ribonucleic acid scaffold (ERS) sequence
  source 1..98: mol_type = other RNA
actggcgcttctatctgattactttgagcgccatcaccagcgactatgtcgtagtgggtaaagcgctttcggacttcggtccggaagaagcatcaaag

SEQ ID NO: 16639 - RNA, 98 nt, synthetic construct
  misc_feature 1..98: note = engineered ribonucleic acid scaffold (ERS) sequence
  source 1..98: mol_type = other RNA
actggcgcttctatctgattagtctcagcgccatcaccagcgactatgtcgtagtgggtaaagcgctttcggacttcggtccggaagaagcatgagac

SEQ ID NO: 16640 - RNA, 98 nt, synthetic construct
  misc_feature 1..98: note = engineered ribonucleic acid scaffold (ERS) sequence
  source 1..98: mol_type = other RNA
actggcgcttctatctgattagtctgagcgccatcaccagcgactatgtcgtagtgggtaaagcgctttcggacttcggtccggaagaagcatcagac

SEQ ID NO: 16641 - RNA, 98 nt, synthetic construct
  misc_feature 1..98: note = engineered ribonucleic acid scaffold (ERS) sequence
  source 1..98: mol_type = other RNA
actggcgcttctatctgattactctcagcgccatcaccagcgactatgtcgtagtgggtaaagcgctttcggacttcggtccggaagaagcatgagag

SEQ ID NO: 16642 - RNA, 98 nt, synthetic construct
  misc_feature 1..98: note = engineered ribonucleic acid scaffold (ERS) sequence
  source 1..98: mol_type = other RNA
actggcgctcccatctgattaccccgagcgccatcaccagcgactatgtcgtagtgggtaaagcgctttcggacttcggtccggaagaagcatcgggg

SEQ ID NO: 16643 - RNA, 98 nt, synthetic construct
  misc_feature 1..98: note = engineered ribonucleic acid scaffold (ERS) sequence
  source 1..98: mol_type = other RNA
actggcgctcctatctgattactccgagcgccatcaccagcgactatgtcgtagtgggtaaagcgctttcggacttcggtccggaagaagcatcggag

SEQ ID NO: 16644 - RNA, 98 nt, synthetic construct
  misc_feature 1..98: note = engineered ribonucleic acid scaffold (ERS) sequence
  source 1..98: mol_type = other RNA
actggcgctgggatctgattaccccgagcgccatcaccagcgactatgtcgtagtgggtaaagcgctttcggacttcggtccggaagaagcatcgggg

SEQ ID NO: 16645 - RNA, 98 nt, synthetic construct
  misc_feature 1..98: note = engineered ribonucleic acid scaffold (ERS) sequence
  source 1..98: mol_type = other RNA
actggcgctggtatctgattactccgagcgccatcaccagcgactatgtcgtagtgggtaaagcgctttcggacttcggtccggaagaagcatcggag

SEQ ID NO: 16646 - RNA, 98 nt, synthetic construct
  misc_feature 1..98: note = engineered ribonucleic acid scaffold (ERS) sequence
  source 1..98: mol_type = other RNA
actggcgcttccatctgattaccctgagcgccatcaccagcgactatgtcgtagtgggtaaagcgctttcggacttcggtccggaagaagcatcaggg

SEQ ID NO: 16647 - RNA, 98 nt, synthetic construct
  misc_feature 1..98: note = engineered ribonucleic acid scaffold (ERS) sequence
  source 1..98: mol_type = other RNA
actggcgcttggatctgattaccctgagcgccatcaccagcgactatgtcgtagtgggtaaagcgctttcggacttcggtccggaagaagcatcaggg

SEQ ID NO: 16648 - RNA, 98 nt, synthetic construct
  misc_feature 1..98: note = engineered ribonucleic acid scaffold (ERS) sequence
  source 1..98: mol_type = other RNA
actggcgcttgtatctgattactctgagcgccatcaccagcgactatgtcgtagtgggtaaagcgctttcggacttcggtccggaagaagcatcagag

SEQ ID NO: 16649 - RNA, 98 nt, synthetic construct
  misc_feature 1..98: note = engineered ribonucleic acid scaffold (ERS) sequence
  source 1..98: mol_type = other RNA
actggcgcttttatctgattactttgagcgccatcaccagcgactatgtcgtagtgggtaaagcgctttcggacttcggtccggaagaagcatcagag

SEQ ID NO: 16650 - RNA, 98 nt, synthetic construct
  misc_feature 1..98: note = engineered ribonucleic acid scaffold (ERS) sequence
  source 1..98: mol_type = other RNA
actggcgcttttatctgattactctgagcgccatcaccagcgactatgtcgtagtgggtaaagcgctttcggacttcggtccggaagaagcatcagag

SEQ ID NO: 16651 - RNA, 98 nt, synthetic construct
  misc_feature 1..98: note = engineered ribonucleic acid scaffold (ERS) sequence
  source 1..98: mol_type = other RNA
actggcgcttttatctgattactctgagcgccatcaccagcgactatgtcgtagtgggtaaagcgctttcggacttcggtccggaagaagcatcaaag

SEQ ID NO: 16652 - RNA, 98 nt, synthetic construct
  misc_feature 1..98: note = engineered ribonucleic acid scaffold (ERS) sequence
  source 1..98: mol_type = other RNA
actggcgcttctatctgattactctgagcgccatcaccagcgactatgtcgtagtgggtaaagcgctttcggacttcggtccggaagaagcctcagag

SEQ ID NO: 16653 - RNA, 98 nt, synthetic construct
  misc_feature 1..98: note = engineered ribonucleic acid scaffold (ERS) sequence
  source 1..98: mol_type = other RNA
actggcgcttctatctgattactctgagcgccatcaccagcgactatgtcgtagtgggtaaagcgctttcggacttcggtccggaagaagcgtcagag

SEQ ID NO: 16654 - RNA, 98 nt, synthetic construct
  misc_feature 1..98: note = engineered ribonucleic acid scaffold (ERS) sequence
  source 1..98: mol_type = other RNA
actggcgcttctatctgattactctgagcgccatcaccagcgactatgtcgtagtgggtaaagcgctttcggacttcggtccggaagaagcatcaaag

SEQ ID NO: 16655 - RNA, 102 nt, synthetic construct
  misc_feature 1..102: note = engineered ribonucleic acid scaffold (ERS) sequence
  source 1..102: mol_type = other RNA
actggcgcttctatctgattactctcagcgccatcaccagcgactatgtcgtagtgggtaaagcggcagatctgagcctccgagctctctgccgcatcagac

SEQ ID NO: 16656 - RNA, 102 nt, synthetic construct
  misc_feature 1..102: note = engineered ribonucleic acid scaffold (ERS) sequence
  source 1..102: mol_type = other RNA
actggcgcttctatctgattactttgagcgccatcaccagcgactatgtcgtagtgggtaaagcggcagatctgagcctccgagctctctgccgcatcagag

SEQ ID NO: 16657 - RNA, 102 nt, synthetic construct
  misc_feature 1..102: note = engineered ribonucleic acid scaffold (ERS) sequence
  source 1..102: mol_type = other RNA
actggcgcttctatctgattactttgagcgccatcaccagcgactatgtcgtagtgggtaaagcggcagatctgagcctccgagctctctgccgcatcaaag

SEQ ID NO: 16658 - RNA, 102 nt, synthetic construct
  misc_feature 1..102: note = engineered ribonucleic acid scaffold (ERS) sequence
  source 1..102: mol_type = other RNA
actggcgcttctatctgattagtctcagcgccatcaccagcgactatgtcgtagtgggtaaagcggcagatctgagcctccgagctctctgccgcatgagac

SEQ ID NO: 16659 - RNA, 102 nt, synthetic construct
  misc_feature 1..102: note = engineered ribonucleic acid scaffold (ERS) sequence
  source 1..102: mol_type = other RNA
actggcgcttctatctgattagtctgagcgccatcaccagcgactatgtcgtagtgggtaaagcggcagatctgagcctccgagctctctgccgcatcagac

SEQ ID NO: 16660 - RNA, 102 nt, synthetic construct
  misc_feature 1..102: note = engineered ribonucleic acid scaffold (ERS) sequence
  source 1..102: mol_type = other RNA
actggcgcttctatctgattactctcagcgccatcaccagcgactatgtcgtagtgggtaaagcggcagatctgagcctccgagctctctgccgcatgagag

SEQ ID NO: 16661 - RNA, 102 nt, synthetic construct
  misc_feature 1..102: note = engineered ribonucleic acid scaffold (ERS) sequence
  source 1..102: mol_type = other RNA
actggcgctcccatctgattaccccgagcgccatcaccagcgactatgtcgtagtgggtaaagcggcagatctgagcctccgagctctctgccgcatcgggg

SEQ ID NO: 16662 - RNA, 102 nt, synthetic construct
  misc_feature 1..102: note = engineered ribonucleic acid scaffold (ERS) sequence
  source 1..102: mol_type = other RNA
actggcgctcctatctgattactccgagcgccatcaccagcgactatgtcgtagtgggtaaagcggcagatctgagcctccgagctctctgccgcatcggag

SEQ ID NO: 16663 - RNA, 102 nt, synthetic construct
  misc_feature 1..102: note = engineered ribonucleic acid scaffold (ERS) sequence
  source 1..102: mol_type = other RNA
actggcgctgggatctgattaccccgagcgccatcaccagcgactatgtcgtagtgggtaaagcggcagatctgagcctccgagctctctgccgcatcgggg

SEQ ID NO: 16664 - RNA, 102 nt, synthetic construct
  misc_feature 1..102: note = engineered ribonucleic acid scaffold (ERS) sequence
  source 1..102: mol_type = other RNA
actggcgctggtatctgattactccgagcgccatcaccagcgactatgtcgtagtgggtaaagcggcagatctgagcctccgagctctctgccgcatcggag

SEQ ID NO: 16665 - RNA, 102 nt, synthetic construct
  misc_feature 1..102: note = engineered ribonucleic acid scaffold (ERS) sequence
  source 1..102: mol_type = other RNA
actggcgcttccatctgattaccctgagcgccatcaccagcgactatgtcgtagtgggtaaagcggcagatctgagcctccgagctctctgccgcatcaggg

SEQ ID NO: 16666 - RNA, 102 nt, synthetic construct
  misc_feature 1..102: note = engineered ribonucleic acid scaffold (ERS) sequence
  source 1..102: mol_type = other RNA
actggcgcttggatctgattaccctgagcgccatcaccagcgactatgtcgtagtgggtaaagcggcagatctgagcctccgagctctctgccgcatcaggg

SEQ ID NO: 16667 - RNA, 102 nt, synthetic construct
  misc_feature 1..102: note = engineered ribonucleic acid scaffold (ERS) sequence
  source 1..102: mol_type = other RNA
actggcgcttgtatctgattactctgagcgccatcaccagcgactatgtcgtagtgggtaaagcggcagatctgagcctccgagctctctgccgcatcagag

SEQ ID NO: 16668 - RNA, 102 nt, synthetic construct
  misc_feature 1..102: note = engineered ribonucleic acid scaffold (ERS) sequence
  source 1..102: mol_type = other RNA
actggcgcttttatctgattactttgagcgccatcaccagcgactatgtcgtagtgggtaaagcggcagatctgagcctccgagctctctgccgcatcagag

SEQ ID NO: 16669 - RNA, 102 nt, synthetic construct
  misc_feature 1..102: note = engineered ribonucleic acid scaffold (ERS) sequence
  source 1..102: mol_type = other RNA
actggcgcttttatctgattactctgagcgccatcaccagcgactatgtcgtagtgggtaaagcggcagatctgagcctccgagctctctgccgcatcagag

SEQ ID NO: 16670 - RNA, 102 nt, synthetic construct
  misc_feature 1..102: note = engineered ribonucleic acid scaffold (ERS) sequence
  source 1..102: mol_type = other RNA
actggcgcttttatctgattactctgagcgccatcaccagcgactatgtcgtagtgggtaaagcggcagatctgagcctccgagctctctgccgcatcaaag

SEQ ID NO: 16671 - RNA, 102 nt, synthetic construct
  misc_feature 1..102: note = engineered ribonucleic acid scaffold (ERS) sequence
  source 1..102: mol_type = other RNA
actggcgcttctatctgattactctgagcgccatcaccagcgactatgtcgtagtgggtaaagcggcagatctgagcctccgagctctctgccgcctcagag

SEQ ID NO: 16672 - RNA, 102 nt, synthetic construct
  misc_feature 1..102: note = engineered ribonucleic acid scaffold (ERS) sequence
  source 1..102: mol_type = other RNA
actggcgcttctatctgattactctgagcgccatcaccagcgactatgtcgtagtgggtaaagcggcagatctgagcctccgagctctctgccgcgtcagag

SEQ ID NO: 16673 - RNA, 102 nt, synthetic construct
  misc_feature 1..102: note = engineered ribonucleic acid scaffold (ERS) sequence
  source 1..102: mol_type = other RNA
actggcgcttctatctgattactctgagcgccatcaccagcgactatgtcgtagtgggtaaagcggcagatctgagcctccgagctctctgccgcatcaaag

SEQ ID NO: 16674 - RNA, 98 nt, synthetic construct
  misc_feature 1..98: note = engineered ribonucleic acid scaffold (ERS) sequence
  source 1..98: mol_type = other RNA
actggcgcttctatctgattactctcagcgccatcaccagcgactatgtcgtagtgggtaaagcggttacggacttcggtccgtaagacgcatcagac

SEQ ID NO: 16675 - RNA, 98 nt, synthetic construct
  misc_feature 1..98: note = engineered ribonucleic acid scaffold (ERS) sequence
  source 1..98: mol_type = other RNA
actggcgcttctatctgattactttgagcgccatcaccagcgactatgtcgtagtgggtaaagcggttacggacttcggtccgtaagacgcatcagag

SEQ ID NO: 16676 - RNA, 98 nt, synthetic construct
  misc_feature 1..98: note = engineered ribonucleic acid scaffold (ERS) sequence
  source 1..98: mol_type = other RNA
actggcgcttctatctgattactttgagcgccatcaccagcgactatgtcgtagtgggtaaagcggttacggacttcggtccgtaagacgcatcaaag

SEQ ID NO: 16677 - RNA, 98 nt, synthetic construct
  misc_feature 1..98: note = engineered ribonucleic acid scaffold (ERS) sequence
  source 1..98: mol_type = other RNA
actggcgcttctatctgattagtctcagcgccatcaccagcgactatgtcgtagtgggtaaagcggttacggacttcggtccgtaagacgcatgagac

SEQ ID NO: 16678 - RNA, 98 nt, synthetic construct
  misc_feature 1..98: note = engineered ribonucleic acid scaffold (ERS) sequence
  source 1..98: mol_type = other RNA
actggcgcttctatctgattagtctgagcgccatcaccagcgactatgtcgtagtgggtaaagcggttacggacttcggtccgtaagacgcatcagac

SEQ ID NO: 16679 - RNA, 98 nt, synthetic construct
  misc_feature 1..98: note = engineered ribonucleic acid scaffold (ERS) sequence
  source 1..98: mol_type = other RNA
actggcgcttctatctgattactctcagcgccatcaccagcgactatgtcgtagtgggtaaagcggttacggacttcggtccgtaagacgcatgagag

SEQ ID NO: 16680 - RNA, 98 nt, synthetic construct
  misc_feature 1..98: note = engineered ribonucleic acid scaffold (ERS) sequence
  source 1..98: mol_type = other RNA
actggcgctcccatctgattaccccgagcgccatcaccagcgactatgtcgtagtgggtaaagcggttacggacttcggtccgtaagacgcatcgggg

SEQ ID NO: 16681 - RNA, 98 nt, synthetic construct
  misc_feature 1..98: note = engineered ribonucleic acid scaffold (ERS) sequence
  source 1..98: mol_type = other RNA
actggcgctcctatctgattactccgagcgccatcaccagcgactatgtcgtagtgggtaaagcggttacggacttcggtccgtaagacgcatcggag

SEQ ID NO: 16682 - RNA, 98 nt, synthetic construct
  misc_feature 1..98: note = engineered ribonucleic acid scaffold (ERS) sequence
  source 1..98: mol_type = other RNA
actggcgctgggatctgattaccccgagcgccatcaccagcgactatgtcgtagtgggtaaagcggttacggacttcggtccgtaagacgcatcgggg

SEQ ID NO: 16683 - RNA, 98 nt, synthetic construct
  misc_feature 1..98: note = engineered ribonucleic acid scaffold (ERS) sequence
  source 1..98: mol_type = other RNA
actggcgctggtatctgattactccgagcgccatcaccagcgactatgtcgtagtgggtaaagcggttacggacttcggtccgtaagacgcatcggag

SEQ ID NO: 16684 - RNA, 98 nt, synthetic construct
  misc_feature 1..98: note = engineered ribonucleic acid scaffold (ERS) sequence
  source 1..98: mol_type = other RNA
actggcgcttccatctgattaccctgagcgccatcaccagcgactatgtcgtagtgggtaaagcggttacggacttcggtccgtaagacgcatcaggg

SEQ ID NO: 16685 - RNA, 98 nt, synthetic construct
  misc_feature 1..98: note = engineered ribonucleic acid scaffold (ERS) sequence
  source 1..98: mol_type = other RNA
actggcgcttggatctgattaccctgagcgccatcaccagcgactatgtcgtagtgggtaaagcggttacggacttcggtccgtaagacgcatcaggg

SEQ ID NO: 16686 - RNA, 98 nt, synthetic construct
  misc_feature 1..98: note = engineered ribonucleic acid scaffold (ERS) sequence
  source 1..98: mol_type = other RNA
actggcgcttgtatctgattactctgagcgccatcaccagcgactatgtcgtagtgggtaaagcggttacggacttcggtccgtaagacgcatcagag

SEQ ID NO: 16687 - RNA, 98 nt, synthetic construct
  misc_feature 1..98: note = engineered ribonucleic acid scaffold (ERS) sequence
  source 1..98: mol_type = other RNA
actggcgcttttatctgattactttgagcgccatcaccagcgactatgtcgtagtgggtaaagcggttacggacttcggtccgtaagacgcatcagag

SEQ ID NO: 16688 - RNA, 98 nt, synthetic construct
  misc_feature 1..98: note = engineered ribonucleic acid scaffold (ERS) sequence
  source 1..98: mol_type = other RNA
actggcgcttttatctgattactctgagcgccatcaccagcgactatgtcgtagtgggtaaagcggttacggacttcggtccgtaagacgcatcagag

SEQ ID NO: 16689 - RNA, 98 nt, synthetic construct
  misc_feature 1..98: note = engineered ribonucleic acid scaffold (ERS) sequence
  source 1..98: mol_type = other RNA
actggcgcttttatctgattactctgagcgccatcaccagcgactatgtcgtagtgggtaaagcggttacggacttcggtccgtaagacgcatcaaag

SEQ ID NO: 16690 - RNA, 98 nt, synthetic construct
  misc_feature 1..98: note = engineered ribonucleic acid scaffold (ERS) sequence
  source 1..98: mol_type = other RNA
actggcgcttctatctgattactctgagcgccatcaccagcgactatgtcgtagtgggtaaagcggttacggacttcggtccgtaagacgcctcagag

SEQ ID NO: 16691 - RNA, 98 nt, synthetic construct
  misc_feature 1..98: note = engineered ribonucleic acid scaffold (ERS) sequence
  source 1..98: mol_type = other RNA
actggcgcttctatctgattactctgagcgccatcaccagcgactatgtcgtagtgggtaaagcggttacggacttcggtccgtaagacgcgtcagag

SEQ ID NO: 16692 - RNA, 98 nt, synthetic construct
  misc_feature 1..98: note = engineered ribonucleic acid scaffold (ERS) sequence
  source 1..98: mol_type = other RNA
actggcgcttctatctgattactctgagcgccatcaccagcgactatgtcgtagtgggtaaagcggttacggacttcggtccgtaagacgcatcaaag

SEQ ID NO: 16693 - RNA, 75 nt, synthetic construct
  misc_feature 1..75: note = engineered ribonucleic acid scaffold (ERS) sequence
  source 1..75: mol_type = other RNA
actggcgcttctatctgattactctcagcgccatcaccagcgactatgtcgtagtgggtaaagctagcatcagac

SEQ ID NO: 16694 - RNA, 75 nt, synthetic construct
  misc_feature 1..75: note = engineered ribonucleic acid scaffold (ERS) sequence
  source 1..75: mol_type = other RNA
actggcgcttctatctgattactttgagcgccatcaccagcgactatgtcgtagtgggtaaagctagcatcagag

SEQ ID NO: 16695 - RNA, 75 nt, synthetic construct
  misc_feature 1..75: note = engineered ribonucleic acid scaffold (ERS) sequence
  source 1..75: mol_type = other RNA
actggcgcttctatctgattactttgagcgccatcaccagcgactatgtcgtagtgggtaaagctagcatcaaag

SEQ ID NO: 16696 - RNA, 75 nt, synthetic construct
  misc_feature 1..75: note = engineered ribonucleic acid scaffold (ERS) sequence
  source 1..75: mol_type = other RNA
actggcgcttctatctgattagtctcagcgccatcaccagcgactatgtcgtagtgggtaaagctagcatgagac

SEQ ID NO: 16697 - RNA, 75 nt, synthetic construct
  misc_feature 1..75: note = engineered ribonucleic acid scaffold (ERS) sequence
  source 1..75: mol_type = other RNA
actggcgcttctatctgattagtctgagcgccatcaccagcgactatgtcgtagtgggtaaagctagcatcagac

SEQ ID NO: 16698 - RNA, 75 nt, synthetic construct
  misc_feature 1..75: note = engineered ribonucleic acid scaffold (ERS) sequence
  source 1..75: mol_type = other RNA
actggcgcttctatctgattactctcagcgccatcaccagcgactatgtcgtagtgggtaaagctagcatgagag

SEQ ID NO: 16699 - RNA, 75 nt, synthetic construct
  misc_feature 1..75: note = engineered ribonucleic acid scaffold (ERS) sequence
  source 1..75: mol_type = other RNA
actggcgctcccatctgattaccccgagcgccatcaccagcgactatgtcgtagtgggtaaagctagcatcgggg

SEQ ID NO: 16700 - RNA, 75 nt, synthetic construct
  misc_feature 1..75: note = engineered ribonucleic acid scaffold (ERS) sequence
  source 1..75: mol_type = other RNA
actggcgctcctatctgattactccgagcgccatcaccagcgactatgtcgtagtgggtaaagctagcatcggag

SEQ ID NO: 16701 - RNA, 75 nt, synthetic construct
  misc_feature 1..75: note = engineered ribonucleic acid scaffold (ERS) sequence
  source 1..75: mol_type = other RNA
actggcgctgggatctgattaccccgagcgccatcaccagcgactatgtcgtagtgggtaaagctagcatcgggg

SEQ ID NO: 16702 - RNA, 75 nt, synthetic construct
  misc_feature 1..75: note = engineered ribonucleic acid scaffold (ERS) sequence
  source 1..75: mol_type = other RNA
actggcgctggtatctgattactccgagcgccatcaccagcgactatgtcgtagtgggtaaagctagcatcggag

SEQ ID NO: 16703 - RNA, 75 nt, synthetic construct
  misc_feature 1..75: note = engineered ribonucleic acid scaffold (ERS) sequence
  source 1..75: mol_type = other RNA
actggcgcttccatctgattaccctgagcgccatcaccagcgactatgtcgtagtgggtaaagctagcatcaggg

SEQ ID NO: 16704 - RNA, 75 nt, synthetic construct
  misc_feature 1..75: note = engineered ribonucleic acid scaffold (ERS) sequence
  source 1..75: mol_type = other RNA
actggcgcttggatctgattaccctgagcgccatcaccagcgactatgtcgtagtgggtaaagctagcatcaggg

SEQ ID NO: 16705 - RNA, 75 nt, synthetic construct
  misc_feature 1..75: note = engineered ribonucleic acid scaffold (ERS) sequence
  source 1..75: mol_type = other RNA
actggcgcttgtatctgattactctgagcgccatcaccagcgactatgtcgtagtgggtaaagctagcatcagag

SEQ ID NO: 16706 - RNA, 75 nt, synthetic construct
  misc_feature 1..75: note = engineered ribonucleic acid scaffold (ERS) sequence
  source 1..75: mol_type = other RNA
actggcgcttttatctgattactttgagcgccatcaccagcgactatgtcgtagtgggtaaagctagcatcagag

SEQ ID NO: 16707 - RNA, 75 nt, synthetic construct
  misc_feature 1..75: note = engineered ribonucleic acid scaffold (ERS) sequence
  source 1..75: mol_type = other RNA
actggcgcttttatctgattactctgagcgccatcaccagcgactatgtcgtagtgggtaaagctagcatcagag

SEQ ID NO: 16708 - RNA, 75 nt, synthetic construct
  misc_feature 1..75: note = engineered ribonucleic acid scaffold (ERS) sequence
  source 1..75: mol_type = other RNA
actggcgcttttatctgattactctgagcgccatcaccagcgactatgtcgtagtgggtaaagctagcatcaaag

SEQ ID NO: 16709 - RNA, 75 nt, synthetic construct
  misc_feature 1..75: note = engineered ribonucleic acid scaffold (ERS) sequence
  source 1..75: mol_type = other RNA
actggcgcttctatctgattactctgagcgccatcaccagcgactatgtcgtagtgggtaaagctagcctcagag

SEQ ID NO: 16710 - RNA, 75 nt, synthetic construct
  misc_feature 1..75: note = engineered ribonucleic acid scaffold (ERS) sequence
  source 1..75: mol_type = other RNA
actggcgcttctatctgattactctgagcgccatcaccagcgactatgtcgtagtgggtaaagctagcgtcagag

SEQ ID NO: 16711 - RNA, 75 nt, synthetic construct
  misc_feature 1..75: note = engineered ribonucleic acid scaffold (ERS) sequence
  source 1..75: mol_type = other RNA
actggcgcttctatctgattactctgagcgccatcaccagcgactatgtcgtagtgggtaaagctagcatcaaag

SEQ ID NO: 16712 - RNA, 89 nt, synthetic construct
  misc_feature 1..89: note = engineered ribonucleic acid scaffold (ERS) sequence
  source 1..89: mol_type = other RNA
actggcgcttctatctgattactctcagcgccatcaccagcgactatgtcgtagtgggtaaagctccctattcggatggagcatcagac

SEQ ID NO: 16713 - RNA, 89 nt, synthetic construct
  misc_feature 1..89: note = engineered ribonucleic acid scaffold (ERS) sequence
  source 1..89: mol_type = other RNA
actggcgcttctatctgattactttgagcgccatcaccagcgactatgtcgtagtgggtaaagctccctattcggatggagcatcagag

SEQ ID NO: 16714 - RNA, 89 nt, synthetic construct
  misc_feature 1..89: note = engineered ribonucleic acid scaffold (ERS) sequence
  source 1..89: mol_type = other RNA
actggcgcttctatctgattactttgagcgccatcaccagcgactatgtcgtagtgggtaaagctccctattcggatggagcatcaaag

SEQ ID NO: 16715 - RNA, 89 nt, synthetic construct
  misc_feature 1..89: note = engineered ribonucleic acid scaffold (ERS) sequence
  source 1..89: mol_type = other RNA
actggcgcttctatctgattagtctcagcgccatcaccagcgactatgtcgtagtgggtaaagctccctattcggatggagcatgagac

SEQ ID NO: 16716 - RNA, 89 nt, synthetic construct
  misc_feature 1..89: note = engineered ribonucleic acid scaffold (ERS) sequence
  source 1..89: mol_type = other RNA
actggcgcttctatctgattagtctgagcgccatcaccagcgactatgtcgtagtgggtaaagctccctattcggatggagcatcagac

SEQ ID NO: 16717 - RNA, 89 nt, synthetic construct
  misc_feature 1..89: note = engineered ribonucleic acid scaffold (ERS) sequence
  source 1..89: mol_type = other RNA
actggcgcttctatctgattactctcagcgccatcaccagcgactatgtcgtagtgggtaaagctccctattcggatggagcatgagag

SEQ ID NO: 16718 - RNA, 89 nt, synthetic construct
  misc_feature 1..89: note = engineered ribonucleic acid scaffold (ERS) sequence
  source 1..89: mol_type = other RNA
actggcgctcccatctgattaccccgagcgccatcaccagcgactatgtcgtagtgggtaaagctccctattcggatggagcatcgggg

SEQ ID NO: 16719 - RNA, 89 nt, synthetic construct
  misc_feature 1..89: note = engineered ribonucleic acid scaffold (ERS) sequence
  source 1..89: mol_type = other RNA
actggcgctcctatctgattactccgagcgccatcaccagcgactatgtcgtagtgggtaaagctccctattcggatggagcatcggag

SEQ ID NO: 16720 - RNA, 89 nt, synthetic construct
  misc_feature 1..89: note = engineered ribonucleic acid scaffold (ERS) sequence
  source 1..89: mol_type = other RNA
actggcgctgggatctgattaccccgagcgccatcaccagcgactatgtcgtagtgggtaaagctccctattcggatggagcatcgggg

SEQ ID NO: 16721 - RNA, 89 nt, synthetic construct
  misc_feature 1..89: note = engineered ribonucleic acid scaffold (ERS) sequence
  source 1..89: mol_type = other RNA
actggcgctggtatctgattactccgagcgccatcaccagcgactatgtcgtagtgggtaaagctccctattcggatggagcatcggag

SEQ ID NO: 16722 - RNA, 89 nt, synthetic construct
  misc_feature 1..89: note = engineered ribonucleic acid scaffold (ERS) sequence
  source 1..89: mol_type = other RNA
actggcgcttccatctgattaccctgagcgccatcaccagcgactatgtcgtagtgggtaaagctccctattcggatggagcatcaggg

SEQ ID NO: 16723 - RNA, 89 nt, synthetic construct
  misc_feature 1..89: note = engineered ribonucleic acid scaffold (ERS) sequence
  source 1..89: mol_type = other RNA
actggcgcttggatctgattaccctgagcgccatcaccagcgactatgtcgtagtgggtaaagctccctattcggatggagcatcaggg

SEQ ID NO: 16724 - RNA, 89 nt, synthetic construct
  misc_feature 1..89: note = engineered ribonucleic acid scaffold (ERS) sequence
  source 1..89: mol_type = other RNA
actggcgcttgtatctgattactctgagcgccatcaccagcgactatgtcgtagtgggtaaagctccctattcggatggagcatcagag

SEQ ID NO: 16725 - RNA, 89 nt, synthetic construct
  misc_feature 1..89: note = engineered ribonucleic acid scaffold (ERS) sequence
  source 1..89: mol_type = other RNA
actggcgcttttatctgattactttgagcgccatcaccagcgactatgtcgtagtgggtaaagctccctattcggatggagcatcagag

SEQ ID NO: 16726 - RNA, 89 nt, synthetic construct
  misc_feature 1..89: note = engineered ribonucleic acid scaffold (ERS) sequence
  source 1..89: mol_type = other RNA
actggcgcttttatctgattactctgagcgccatcaccagcgactatgtcgtagtgggtaaagctccctattcggatggagcatcagag

SEQ ID NO: 16727 - RNA, 89 nt, synthetic construct
  misc_feature 1..89: note = engineered ribonucleic acid scaffold (ERS) sequence
  source 1..89: mol_type = other RNA
actggcgcttttatctgattactctgagcgccatcaccagcgactatgtcgtagtgggtaaagctccctattcggatggagcatcaaag

SEQ ID NO: 16728 - RNA, 89 nt, synthetic construct
  misc_feature 1..89: note = engineered ribonucleic acid scaffold (ERS) sequence
  source 1..89: mol_type = other RNA
actggcgcttctatctgattactctgagcgccatcaccagcgactatgtcgtagtgggtaaagctccctattcggatggagcctcagag

SEQ ID NO: 16729 - RNA, 89 nt, synthetic construct
  misc_feature 1..89: note = engineered ribonucleic acid scaffold (ERS) sequence
  source 1..89: mol_type = other RNA
actggcgcttctatctgattactctgagcgccatcaccagcgactatgtcgtagtgggtaaagctccctattcggatggagcgtcagag

SEQ ID NO: 16730 - RNA, 89 nt, synthetic construct
  misc_feature 1..89: note = engineered ribonucleic acid scaffold (ERS) sequence
  source 1..89: mol_type = other RNA
actggcgcttctatctgattactctgagcgccatcaccagcgactatgtcgtagtgggtaaagctccctattcggatggagcatcaaag

SEQ ID NO: 16731 - RNA, 95 nt, synthetic construct
  misc_feature 1..95: note = engineered ribonucleic acid scaffold (ERS) sequence
  source 1..95: mol_type = other RNA
actggcgcttctatctgattactctcagcgccatcaccagcgactatgtcgtagtgggtaaagctccctcacagggatgtgagggagcatcagac

SEQ ID NO: 16732 - RNA, 95 nt, synthetic construct
  misc_feature 1..95: note = engineered ribonucleic acid scaffold (ERS) sequence
  source 1..95: mol_type = other RNA
actggcgcttctatctgattactttgagcgccatcaccagcgactatgtcgtagtgggtaaagctccctcacagggatgtgagggagcatcagag

SEQ ID NO: 16733 - RNA, 95 nt, synthetic construct
  misc_feature 1..95: note = engineered ribonucleic acid scaffold (ERS) sequence
  source 1..95: mol_type = other RNA
actggcgcttctatctgattactttgagcgccatcaccagcgactatgtcgtagtgggtaaagctccctcacagggatgtgagggagcatcaaag

SEQ ID NO: 16734 - RNA, 95 nt, synthetic construct
  misc_feature 1..95: note = engineered ribonucleic acid scaffold (ERS) sequence
  source 1..95: mol_type = other RNA
actggcgcttctatctgattagtctcagcgccatcaccagcgactatgtcgtagtgggtaaagctccctcacagggatgtgagggagcatgagac

SEQ ID NO: 16735 - RNA, 95 nt, synthetic construct
  misc_feature 1..95: note = engineered ribonucleic acid scaffold (ERS) sequence
  source 1..95: mol_type = other RNA
actggcgcttctatctgattagtctgagcgccatcaccagcgactatgtcgtagtgggtaaagctccctcacagggatgtgagggagcatcagac

SEQ ID NO: 16736 - RNA, 95 nt, synthetic construct
  misc_feature 1..95: note = engineered ribonucleic acid scaffold (ERS) sequence
  source 1..95: mol_type = other RNA
actggcgcttctatctgattactctcagcgccatcaccagcgactatgtcgtagtgggtaaagctccctcacagggatgtgagggagcatgagag

SEQ ID NO: 16737 - RNA, 95 nt, synthetic construct
  misc_feature 1..95: note = engineered ribonucleic acid scaffold (ERS) sequence
  source 1..95: mol_type = other RNA
actggcgctcccatctgattaccccgagcgccatcaccagcgactatgtcgtagtgggtaaagctccctcacagggatgtgagggagcatcgggg

SEQ ID NO: 16738 - RNA, 95 nt, synthetic construct
  misc_feature 1..95: note = engineered ribonucleic acid scaffold (ERS) sequence
  source 1..95: mol_type = other RNA
actggcgctcctatctgattactccgagcgccatcaccagcgactatgtcgtagtgggtaaagctccctcacagggatgtgagggagcatcggag

SEQ ID NO: 16739 - RNA, 95 nt, synthetic construct
  misc_feature 1..95: note = engineered ribonucleic acid scaffold (ERS) sequence
  source 1..95: mol_type = other RNA
actggcgctgggatctgattaccccgagcgccatcaccagcgactatgtcgtagtgggtaaagctccctcacagggatgtgagggagcatcgggg

SEQ ID NO: 16740 - RNA, 95 nt, synthetic construct
  misc_feature 1..95: note = engineered ribonucleic acid scaffold (ERS) sequence
  source 1..95: mol_type = other RNA
actggcgctggtatctgattactccgagcgccatcaccagcgactatgtcgtagtgggtaaagctccctcacagggatgtgagggagcatcggag

SEQ ID NO: 16741 - RNA, 95 nt, synthetic construct
  misc_feature 1..95: note = engineered ribonucleic acid scaffold (ERS) sequence
  source 1..95: mol_type = other RNA
actggcgcttccatctgattaccctgagcgccatcaccagcgactatgtcgtagtgggtaaagctccctcacagggatgtgagggagcatcaggg

SEQ ID NO: 16742 - RNA, 95 nt, synthetic construct
  misc_feature 1..95: note = engineered ribonucleic acid scaffold (ERS) sequence
  source 1..95: mol_type = other RNA
actggcgcttggatctgattaccctgagcgccatcaccagcgactatgtcgtagtgggtaaagctccctcacagggatgtgagggagcatcaggg

SEQ ID NO: 16743 - RNA, 95 nt, synthetic construct
  misc_feature 1..95: note = engineered ribonucleic acid scaffold (ERS) sequence
  source 1..95: mol_type = other RNA
actggcgcttgtatctgattactctgagcgccatcaccagcgactatgtcgtagtgggtaaagctccctcacagggatgtgagggagcatcagag

SEQ ID NO: 16744 - RNA, 95 nt, synthetic construct
  misc_feature 1..95: note = engineered ribonucleic acid scaffold (ERS) sequence
  source 1..95: mol_type = other RNA
actggcgcttttatctgattactttgagcgccatcaccagcgactatgtcgtagtgggtaaagctccctcacagggatgtgagggagcatcagag

SEQ ID NO: 16745 - RNA, 95 nt, synthetic construct
  misc_feature 1..95: note = engineered ribonucleic acid scaffold (ERS) sequence
  source 1..95: mol_type = other RNA
actggcgcttttatctgattactctgagcgccatcaccagcgactatgtcgtagtgggtaaagctccctcacagggatgtgagggagcatcagag

SEQ ID NO: 16746 - RNA, 95 nt, synthetic construct
  misc_feature 1..95: note = engineered ribonucleic acid scaffold (ERS) sequence
  source 1..95: mol_type = other RNA
actggcgcttttatctgattactctgagcgccatcaccagcgactatgtcgtagtgggtaaagctccctcacagggatgtgagggagcatcaaag

SEQ ID NO: 16747 - RNA, 95 nt, synthetic construct
  misc_feature 1..95: note = engineered ribonucleic acid scaffold (ERS) sequence
  source 1..95: mol_type = other RNA
actggcgcttctatctgattactctgagcgccatcaccagcgactatgtcgtagtgggtaaagctccctcacagggatgtgagggagcctcagag

SEQ ID NO: 16748 - RNA, 95 nt, synthetic construct
  misc_feature 1..95: note = engineered ribonucleic acid scaffold (ERS) sequence
  source 1..95: mol_type = other RNA
actggcgcttctatctgattactctgagcgccatcaccagcgactatgtcgtagtgggtaaagctccctcacagggatgtgagggagcgtcagag

SEQ ID NO: 16749 - RNA, 95 nt, synthetic construct
  misc_feature 1..95: note = engineered ribonucleic acid scaffold (ERS) sequence
  source 1..95: mol_type = other RNA
actggcgcttctatctgattactctgagcgccatcaccagcgactatgtcgtagtgggtaaagctccctcacagggatgtgagggagcatcaaag

SEQ ID NO: 16750 - RNA, 94 nt, synthetic construct
  misc_feature 1..94: note = engineered ribonucleic acid scaffold (ERS) sequence
  source 1..94: mol_type = other RNA
actggcgcttctatctgattactctcagcgccatcaccagcgactatgtcgtagtgggtaaagctccctcagctgcagtgagggagcatcagac

SEQ ID NO: 16751 - RNA, 94 nt, synthetic construct
  misc_feature 1..94: note = engineered ribonucleic acid scaffold (ERS) sequence
  source 1..94: mol_type = other RNA
actggcgcttctatctgattactttgagcgccatcaccagcgactatgtcgtagtgggtaaagctccctcagctgcagtgagggagcatcagag

SEQ ID NO: 16752 - RNA, 94 nt, synthetic construct
  misc_feature 1..94: note = engineered ribonucleic acid scaffold (ERS) sequence
  source 1..94: mol_type = other RNA
actggcgcttctatctgattactttgagcgccatcaccagcgactatgtcgtagtgggtaaagctccctcagctgcagtgagggagcatcaaag

SEQ ID NO: 16753 - RNA, 94 nt, synthetic construct
  misc_feature 1..94: note = engineered ribonucleic acid scaffold (ERS) sequence
  source 1..94: mol_type = other RNA
actggcgcttctatctgattagtctcagcgccatcaccagcgactatgtcgtagtgggtaaagctccctcagctgcagtgagggagcatgagac

SEQ ID NO: 16754 - RNA, 94 nt, synthetic construct
  misc_feature 1..94: note = engineered ribonucleic acid scaffold (ERS) sequence
  source 1..94: mol_type = other RNA
actggcgcttctatctgattagtctgagcgccatcaccagcgactatgtcgtagtgggtaaagctccctcagctgcagtgagggagcatcagac

SEQ ID NO: 16755 - RNA, 94 nt, synthetic construct
  misc_feature 1..94: note = engineered ribonucleic acid scaffold (ERS) sequence
  source 1..94: mol_type = other RNA
actggcgcttctatctgattactctcagcgccatcaccagcgactatgtcgtagtgggtaaagctccctcagctgcagtgagggagcatgagag

SEQ ID NO: 16756 - RNA, 94 nt, synthetic construct
  misc_feature 1..94: note = engineered ribonucleic acid scaffold (ERS) sequence
  source 1..94: mol_type = other RNA
actggcgctcccatctgattaccccgagcgccatcaccagcgactatgtcgtagtgggtaaagctccctcagctgcagtgagggagcatcgggg

SEQ ID NO: 16757 - RNA, 94 nt, synthetic construct
  misc_feature 1..94: note = engineered ribonucleic acid scaffold (ERS) sequence
  source 1..94: mol_type = other RNA
actggcgctcctatctgattactccgagcgccatcaccagcgactatgtcgtagtgggtaaagctccctcagctgcagtgagggagcatcggag

SEQ ID NO: 16758 - RNA, 94 nt, synthetic construct
  misc_feature 1..94: note = engineered ribonucleic acid scaffold (ERS) sequence
  source 1..94: mol_type = other RNA
actggcgctgggatctgattaccccgagcgccatcaccagcgactatgtcgtagtgggtaaagctccctcagctgcagtgagggagcatcgggg

SEQ ID NO: 16759 - RNA, 94 nt, synthetic construct
  misc_feature 1..94: note = engineered ribonucleic acid scaffold (ERS) sequence
  source 1..94: mol_type = other RNA
actggcgctggtatctgattactccgagcgccatcaccagcgactatgtcgtagtgggtaaagctccctcagctgcagtgagggagcatcggag

SEQ ID NO: 16760 - RNA, 94 nt, synthetic construct
  misc_feature 1..94: note = engineered ribonucleic acid scaffold (ERS) sequence
  source 1..94: mol_type = other RNA
actggcgcttccatctgattaccctgagcgccatcaccagcgactatgtcgtagtgggtaaagctccctcagctgcagtgagggagcatcaggg

SEQ ID NO: 16761 - RNA, 94 nt, synthetic construct
  misc_feature 1..94: note = engineered ribonucleic acid scaffold (ERS) sequence
  source 1..94: mol_type = other RNA
actggcgcttggatctgattaccctgagcgccatcaccagcgactatgtcgtagtgggtaaagctccctcagctgcagtgagggagcatcaggg

SEQ ID NO: 16762 - RNA, 94 nt, synthetic construct
  misc_feature 1..94: note = engineered ribonucleic acid scaffold (ERS) sequence
  source 1..94: mol_type = other RNA
actggcgcttgtatctgattactctgagcgccatcaccagcgactatgtcgtagtgggtaaagctccctcagctgcagtgagggagcatcagag

SEQ ID NO: 16763 - RNA, 94 nt, synthetic construct
  misc_feature 1..94: note = engineered ribonucleic acid scaffold (ERS) sequence
  source 1..94: mol_type = other RNA
actggcgcttttatctgattactttgagcgccatcaccagcgactatgtcgtagtgggtaaagctccctcagctgcagtgagggagcatcagag

SEQ ID NO: 16764 - RNA, 94 nt, synthetic construct
  misc_feature 1..94: note = engineered ribonucleic acid scaffold (ERS) sequence
  source 1..94: mol_type = other RNA
actggcgcttttatctgattactctgagcgccatcaccagcgactatgtcgtagtgggtaaagctccctcagctgcagtgagggagcatcagag

SEQ ID NO: 16765 - RNA, 94 nt, synthetic construct
  misc_feature 1..94: note = engineered ribonucleic acid scaffold (ERS) sequence
  source 1..94: mol_type = other RNA
actggcgcttttatctgattactctgagcgccatcaccagcgactatgtcgtagtgggtaaagctccctcagctgcagtgagggagcatcaaag

SEQ ID NO: 16766 - RNA, 94 nt, synthetic construct
  misc_feature 1..94: note = engineered ribonucleic acid scaffold (ERS) sequence
  source 1..94: mol_type = other RNA
actggcgcttctatctgattactctgagcgccatcaccagcgactatgtcgtagtgggtaaagctccctcagctgcagtgagggagcctcagag

SEQ ID NO: 16767 - RNA, 94 nt, synthetic construct
  misc_feature 1..94: note = engineered ribonucleic acid scaffold (ERS) sequence
  source 1..94: mol_type = other RNA
actggcgcttctatctgattactctgagcgccatcaccagcgactatgtcgtagtgggtaaagctccctcagctgcagtgagggagcgtcagag

SEQ ID NO: 16768 - RNA, 94 nt, synthetic construct
  misc_feature 1..94: note = engineered ribonucleic acid scaffold (ERS) sequence
  source 1..94: mol_type = other RNA
actggcgcttctatctgattactctgagcgccatcaccagcgactatgtcgtagtgggtaaagctccctcagctgcagtgagggagcatcaaag

SEQ ID NO: 16769 - RNA, 89 nt, synthetic construct
  misc_feature 1..89: note = engineered ribonucleic acid scaffold (ERS) sequence
  source 1..89: mol_type = other RNA
actggcgcttctatctgattactctcagcgccatcaccagcgactatgtcgtagtgggtaaagctccctcataggagggagcatcagac

SEQ ID NO: 16770 - RNA, 89 nt, synthetic construct
  misc_feature 1..89: note = engineered ribonucleic acid scaffold (ERS) sequence
  source 1..89: mol_type = other RNA
actggcgcttctatctgattactttgagcgccatcaccagcgactatgtcgtagtgggtaaagctccctcataggagggagcatcagag

SEQ ID NO: 16771 - RNA, 89 nt, synthetic construct
  misc_feature 1..89: note = engineered ribonucleic acid scaffold (ERS) sequence
  source 1..89: mol_type = other RNA
actggcgcttctatctgattactttgagcgccatcaccagcgactatgtcgtagtgggtaaagctccctcataggagggagcatcaaag

SEQ ID NO: 16772 - RNA, 89 nt, synthetic construct
  misc_feature 1..89: note = engineered ribonucleic acid scaffold (ERS) sequence
  source 1..89: mol_type = other RNA
actggcgcttctatctgattagtctcagcgccatcaccagcgactatgtcgtagtgggtaaagctccctcataggagggagcatgagac

SEQ ID NO: 16773 - RNA, 89 nt, synthetic construct
  misc_feature 1..89: note = engineered ribonucleic acid scaffold (ERS) sequence
  source 1..89: mol_type = other RNA
actggcgcttctatctgattagtctgagcgccatcaccagcgactatgtcgtagtgggtaaagctccctcataggagggagcatcagac

SEQ ID NO: 16774 - RNA, 89 nt, synthetic construct
  misc_feature 1..89: note = engineered ribonucleic acid scaffold (ERS) sequence
  source 1..89: mol_type = other RNA
actggcgcttctatctgattactctcagcgccatcaccagcgactatgtcgtagtgggtaaagctccctcataggagggagcatgagag

SEQ ID NO: 16775 - RNA, 89 nt, synthetic construct
  misc_feature 1..89: note = engineered ribonucleic acid scaffold (ERS) sequence
  source 1..89: mol_type = other RNA
actggcgctcccatctgattaccccgagcgccatcaccagcgactatgtcgtagtgggtaaagctccctcataggagggagcatcgggg

SEQ ID NO: 16776 - RNA, 89 nt, synthetic construct
  misc_feature 1..89: note = engineered ribonucleic acid scaffold (ERS) sequence
  source 1..89: mol_type = other RNA
actggcgctcctatctgattactccgagcgccatcaccagcgactatgtcgtagtgggtaaagctccctcataggagggagcatcggag

SEQ ID NO: 16777 - RNA, 89 nt, synthetic construct
  misc_feature 1..89: note = engineered ribonucleic acid scaffold (ERS) sequence
  source 1..89: mol_type = other RNA
actggcgctgggatctgattaccccgagcgccatcaccagcgactatgtcgtagtgggtaaagctccctcataggagggagcatcgggg

SEQ ID NO: 16778 - RNA, 89 nt, synthetic construct
  misc_feature 1..89: note = engineered ribonucleic acid scaffold (ERS) sequence
  source 1..89: mol_type = other RNA
actggcgctggtatctgattactccgagcgccatcaccagcgactatgtcgtagtgggtaaagctccctcataggagggagcatcggag

SEQ ID NO: 16779 - RNA, 89 nt, synthetic construct
  misc_feature 1..89: note = engineered ribonucleic acid scaffold (ERS) sequence
  source 1..89: mol_type = other RNA
actggcgcttccatctgattaccctgagcgccatcaccagcgactatgtcgtagtgggtaaagctccctcataggagggagcatcaggg

SEQ ID NO: 16780 - RNA, 89 nt, synthetic construct
  misc_feature 1..89: note = engineered ribonucleic acid scaffold (ERS) sequence
  source 1..89: mol_type = other RNA
actggcgcttggatctgattaccctgagcgccatcaccagcgactatgtcgtagtgggtaaagctccctcataggagggagcatcaggg

SEQ ID NO: 16781 - RNA, 89 nt, synthetic construct
  misc_feature 1..89: note = engineered ribonucleic acid scaffold (ERS) sequence
  source 1..89: mol_type = other RNA
actggcgcttgtatctgattactctgagcgccatcaccagcgactatgtcgtagtgggtaaagctccctcataggagggagcatcagag

SEQ ID NO: 16782 - RNA, 89 nt, synthetic construct
  misc_feature 1..89: note = engineered ribonucleic acid scaffold (ERS) sequence
  source 1..89: mol_type = other RNA
actggcgcttttatctgattactttgagcgccatcaccagcgactatgtcgtagtgggtaaagctccctcataggagggagcatcagag

SEQ ID NO: 16783 - RNA, 89 nt, synthetic construct
  misc_feature 1..89: note = engineered ribonucleic acid scaffold (ERS) sequence
  source 1..89: mol_type = other RNA
actggcgcttttatctgattactctgagcgccatcaccagcgactatgtcgtagtgggtaaagctccctcataggagggagcatcagag

SEQ ID NO: 16784 - RNA, 89 nt, synthetic construct
  misc_feature 1..89: note = engineered ribonucleic acid scaffold (ERS) sequence
  source 1..89: mol_type = other RNA
actggcgcttttatctgattactctgagcgccatcaccagcgactatgtcgtagtgggtaaagctccctcataggagggagcatcaaag

SEQ ID NO: 16785 - RNA, 89 nt, synthetic construct
  misc_feature 1..89: note = engineered ribonucleic acid scaffold (ERS) sequence
  source 1..89: mol_type = other RNA
actggcgcttctatctgattactctgagcgccatcaccagcgactatgtcgtagtgggtaaagctccctcataggagggagcctcagag

SEQ ID NO: 16786 - RNA, 89 nt, synthetic construct
  misc_feature 1..89: note = engineered ribonucleic acid scaffold (ERS) sequence
  source 1..89: mol_type = other RNA
actggcgcttctatctgattactctgagcgccatcaccagcgactatgtcgtagtgggtaaagctccctcataggagggagcgtcagag

SEQ ID NO: 16787 - RNA, 89 nt, synthetic construct
  misc_feature 1..89: note = engineered ribonucleic acid scaffold (ERS) sequence
  source 1..89: mol_type = other RNA
actggcgcttctatctgattactctgagcgccatcaccagcgactatgtcgtagtgggtaaagctccctcataggagggagcatcaaag

SEQ ID NO: 16788 - RNA, 90 nt, synthetic construct
  misc_feature 1..90: note = engineered ribonucleic acid scaffold (ERS) sequence
  source 1..90: mol_type = other RNA
actggcgcttctatctgattactctcagcgccatcaccagcgactatgtcgtagtgggtaaagctccctcttcaggagggagcatcagac

SEQ ID NO: 16789 - RNA, 90 nt, synthetic construct
  misc_feature 1..90: note = engineered ribonucleic acid scaffold (ERS) sequence
  source 1..90: mol_type = other RNA
actggcgcttctatctgattactttgagcgccatcaccagcgactatgtcgtagtgggtaaagctccctcttcaggagggagcatcagag

SEQ ID NO: 16790 - RNA, 90 nt, synthetic construct
  misc_feature 1..90: note = engineered ribonucleic acid scaffold (ERS) sequence
  source 1..90: mol_type = other RNA
actggcgcttctatctgattactttgagcgccatcaccagcgactatgtcgtagtgggtaaagctccctcttcaggagggagcatcaaag

SEQ ID NO: 16791 - RNA, 90 nt, synthetic construct
  misc_feature 1..90: note = engineered ribonucleic acid scaffold (ERS) sequence
  source 1..90: mol_type = other RNA
actggcgcttctatctgattagtctcagcgccatcaccagcgactatgtcgtagtgggtaaagctccctcttcaggagggagcatgagac

SEQ ID NO: 16792 - RNA, 90 nt, synthetic construct
  misc_feature 1..90: note = engineered ribonucleic acid scaffold (ERS) sequence
  source 1..90: mol_type = other RNA
actggcgcttctatctgattagtctgagcgccatcaccagcgactatgtcgtagtgggtaaagctccctcttcaggagggagcatcagac

SEQ ID NO: 16793 - RNA, 90 nt, synthetic construct
  misc_feature 1..90: note = engineered ribonucleic acid scaffold (ERS) sequence
  source 1..90: mol_type = other RNA
actggcgcttctatctgattactctcagcgccatcaccagcgactatgtcgtagtgggtaaagctccctcttcaggagggagcatgagag

SEQ ID NO: 16794 - RNA, 90 nt, synthetic construct
  misc_feature 1..90: note = engineered ribonucleic acid scaffold (ERS) sequence
  source 1..90: mol_type = other RNA
actggcgctcccatctgattaccccgagcgccatcaccagcgactatgtcgtagtgggtaaagctccctcttcaggagggagcatcgggg

SEQ ID NO: 16795 - RNA, 90 nt, synthetic construct
  misc_feature 1..90: note = engineered ribonucleic acid scaffold (ERS) sequence
  source 1..90: mol_type = other RNA
actggcgctcctatctgattactccgagcgccatcaccagcgactatgtcgtagtgggtaaagctccctcttcaggagggagcatcggag

SEQ ID NO: 16796 - RNA, 90 nt, synthetic construct
  misc_feature 1..90: note = engineered ribonucleic acid scaffold (ERS) sequence
  source 1..90: mol_type = other RNA
actggcgctgggatctgattaccccgagcgccatcaccagcgactatgtcgtagtgggtaaagctccctcttcaggagggagcatcgggg

SEQ ID NO: 16797 - RNA, 90 nt, synthetic construct
  misc_feature 1..90: note = engineered ribonucleic acid scaffold (ERS) sequence
  source 1..90: mol_type = other RNA
actggcgctggtatctgattactccgagcgccatcaccagcgactatgtcgtagtgggtaaagctccctcttcaggagggagcatcggag

SEQ ID NO: 16798 - RNA, 90 nt, synthetic construct
  misc_feature 1..90: note = engineered ribonucleic acid scaffold (ERS) sequence
  source 1..90: mol_type = other RNA
actggcgcttccatctgattaccctgagcgccatcaccagcgactatgtcgtagtgggtaaagctccctcttcaggagggagcatcaggg

SEQ ID NO: 16799 - RNA, 90 nt, synthetic construct
  misc_feature 1..90: note = engineered ribonucleic acid scaffold (ERS) sequence
  source 1..90: mol_type = other RNA
actggcgcttggatctgattaccctgagcgccatcaccagcgactatgtcgtagtgggtaaagctccctcttcaggagggagcatcaggg

SEQ ID NO: 16800 - RNA, 90 nt, synthetic construct
  misc_feature 1..90: note = engineered ribonucleic acid scaffold (ERS) sequence
  source 1..90: mol_type = other RNA
actggcgcttgtatctgattactctgagcgccatcaccagcgactatgtcgtagtgggtaaagctccctcttcaggagggagcatcagag

SEQ ID NO: 16801 - RNA, 90 nt, synthetic construct
  misc_feature 1..90: note = engineered ribonucleic acid scaffold (ERS) sequence
  source 1..90: mol_type = other RNA
actggcgcttttatctgattactttgagcgccatcaccagcgactatgtcgtagtgggtaaagctccctcttcaggagggagcatcagag

SEQ ID NO: 16802 - RNA, 90 nt, synthetic construct
  misc_feature 1..90: note = engineered ribonucleic acid scaffold (ERS) sequence
  source 1..90: mol_type = other RNA
actggcgcttttatctgattactctgagcgccatcaccagcgactatgtcgtagtgggtaaagctccctcttcaggagggagcatcagag

SEQ ID NO: 16803 - RNA, 90 nt, synthetic construct
  misc_feature 1..90: note = engineered ribonucleic acid scaffold (ERS) sequence
  source 1..90: mol_type = other RNA
actggcgcttttatctgattactctgagcgccatcaccagcgactatgtcgtagtgggtaaagctccctcttcaggagggagcatcaaag

SEQ ID NO: 16804 - RNA, 90 nt, synthetic construct
  misc_feature 1..90: note = engineered ribonucleic acid scaffold (ERS) sequence
  source 1..90: mol_type = other RNA
actggcgcttctatctgattactctgagcgccatcaccagcgactatgtcgtagtgggtaaagctccctcttcaggagggagcctcagag

SEQ ID NO: 16805 - RNA, 90 nt, synthetic construct
  misc_feature 1..90: note = engineered ribonucleic acid scaffold (ERS) sequence
  source 1..90: mol_type = other RNA
actggcgcttctatctgattactctgagcgccatcaccagcgactatgtcgtagtgggtaaagctccctcttcaggagggagcgtcagag

SEQ ID NO: 16806 - RNA, 90 nt, synthetic construct
  misc_feature 1..90: note = engineered ribonucleic acid scaffold (ERS) sequence
  source 1..90: mol_type = other RNA
actggcgcttctatctgattactctgagcgccatcaccagcgactatgtcgtagtgggtaaagctccctcttcaggagggagcatcaaag

SEQ ID NO: 16807 - RNA, 89 nt, synthetic construct
  misc_feature 1..89: note = engineered ribonucleic acid scaffold (ERS) sequence
  source 1..89: mol_type = other RNA
actggcgcttctatctgattactctcagcgccatcaccagcgactatgtcgtagtgggtaaagctccctcttcggagagtgcatcagac

SEQ ID NO: 16808 - RNA, 89 nt, synthetic construct
  misc_feature 1..89: note = engineered ribonucleic acid scaffold (ERS) sequence
  source 1..89: mol_type = other RNA
actggcgcttctatctgattactttgagcgccatcaccagcgactatgtcgtagtgggtaaagctccctcttcggagagtgcatcagag

SEQ ID NO: 16809 - RNA, 89 nt, synthetic construct
  misc_feature 1..89: note = engineered ribonucleic acid scaffold (ERS) sequence
  source 1..89: mol_type = other RNA
actggcgcttctatctgattactttgagcgccatcaccagcgactatgtcgtagtgggtaaagctccctcttcggagagtgcatcaaag

SEQ ID NO: 16810 - RNA, 89 nt, synthetic construct
  misc_feature 1..89: note = engineered ribonucleic acid scaffold (ERS) sequence
  source 1..89: mol_type = other RNA
actggcgcttctatctgattagtctcagcgccatcaccagcgactatgtcgtagtgggtaaagctccctcttcggagagtgcatgagac

SEQ ID NO: 16811 - RNA, 89 nt, synthetic construct
  misc_feature 1..89: note = engineered ribonucleic acid scaffold (ERS) sequence
  source 1..89: mol_type = other RNA
actggcgcttctatctgattagtctgagcgccatcaccagcgactatgtcgtagtgggtaaagctccctcttcggagagtgcatcagac

SEQ ID NO: 16812 - RNA, 89 nt, synthetic construct
  misc_feature 1..89: note = engineered ribonucleic acid scaffold (ERS) sequence
  source 1..89: mol_type = other RNA
actggcgcttctatctgattactctcagcgccatcaccagcgactatgtcgtagtgggtaaagctccctcttcggagagtgcatgagag

SEQ ID NO: 16813 - RNA, 89 nt, synthetic construct
  misc_feature 1..89: note = engineered ribonucleic acid scaffold (ERS) sequence
  source 1..89: mol_type = other RNA
actggcgctcccatctgattaccccgagcgccatcaccagcgactatgtcgtagtgggtaaagctccctcttcggagagtgcatcgggg

SEQ ID NO: 16814 - RNA, 89 nt, synthetic construct
  misc_feature 1..89: note = engineered ribonucleic acid scaffold (ERS) sequence
  source 1..89: mol_type = other RNA
actggcgctcctatctgattactccgagcgccatcaccagcgactatgtcgtagtgggtaaagctccctcttcggagagtgcatcggag

SEQ ID NO: 16815 - RNA, 89 nt, synthetic construct
  misc_feature 1..89: note = engineered ribonucleic acid scaffold (ERS) sequence
  source 1..89: mol_type = other RNA
actggcgctgggatctgattaccccgagcgccatcaccagcgactatgtcgtagtgggtaaagctccctcttcggagagtgcatcgggg

SEQ ID NO: 16816 - RNA, 89 nt, synthetic construct
  misc_feature 1..89: note = engineered ribonucleic acid scaffold (ERS) sequence
  source 1..89: mol_type = other RNA
actggcgctggtatctgattactccgagcgccatcaccagcgactatgtcgtagtgggtaaagctccctcttcggagagtgcatcggag

SEQ ID NO: 16817 - RNA, 89 nt, synthetic construct
  misc_feature 1..89: note = engineered ribonucleic acid scaffold (ERS) sequence
  source 1..89: mol_type = other RNA
actggcgcttccatctgattaccctgagcgccatcaccagcgactatgtcgtagtgggtaaagctccctcttcggagagtgcatcaggg

SEQ ID NO: 16818 - RNA, 89 nt, synthetic construct
  misc_feature 1..89: note = engineered ribonucleic acid scaffold (ERS) sequence
  source 1..89: mol_type = other RNA
actggcgcttggatctgattaccctgagcgccatcaccagcgactatgtcgtagtgggtaaagctccctcttcggagagtgcatcaggg

SEQ ID NO: 16819 - RNA, 89 nt, synthetic construct
  misc_feature 1..89: note = engineered ribonucleic acid scaffold (ERS) sequence
  source 1..89: mol_type = other RNA
actggcgcttgtatctgattactctgagcgccatcaccagcgactatgtcgtagtgggtaaagctccctcttcggagagtgcatcagag

SEQ ID NO: 16820 - RNA, 89 nt, synthetic construct
  misc_feature 1..89: note = engineered ribonucleic acid scaffold (ERS) sequence
  source 1..89: mol_type = other RNA
actggcgcttttatctgattactttgagcgccatcaccagcgactatgtcgtagtgggtaaagctccctcttcggagagtgcatcagag

SEQ ID NO: 16821 - RNA, 89 nt, synthetic construct
  misc_feature 1..89: note = engineered ribonucleic acid scaffold (ERS) sequence
  source 1..89: mol_type = other RNA
actggcgcttttatctgattactctgagcgccatcaccagcgactatgtcgtagtgggtaaagctccctcttcggagagtgcatcagag

SEQ ID NO: 16822 - RNA, 89 nt, synthetic construct
  misc_feature 1..89: note = engineered ribonucleic acid scaffold (ERS) sequence
  source 1..89: mol_type = other RNA
actggcgcttttatctgattactctgagcgccatcaccagcgactatgtcgtagtgggtaaagctccctcttcggagagtgcatcaaag

SEQ ID NO: 16823 - RNA, 89 nt, synthetic construct
  misc_feature 1..89: note = engineered ribonucleic acid scaffold (ERS) sequence
  source 1..89: mol_type = other RNA
actggcgcttctatctgattactctgagcgccatcaccagcgactatgtcgtagtgggtaaagctccctcttcggagagtgcctcagag

SEQ ID NO: 16824 - RNA, 89 nt, synthetic construct
  misc_feature 1..89: note = engineered ribonucleic acid scaffold (ERS) sequence
  source 1..89: mol_type = other RNA
actggcgcttctatctgattactctgagcgccatcaccagcgactatgtcgtagtgggtaaagctccctcttcggagagtgcgtcagag

SEQ ID NO: 16825 - RNA, 89 nt, synthetic construct
  misc_feature 1..89: note = engineered ribonucleic acid scaffold (ERS) sequence
  source 1..89: mol_type = other RNA
actggcgcttctatctgattactctgagcgccatcaccagcgactatgtcgtagtgggtaaagctccctcttcggagagtgcatcaaag

SEQ ID NO: 16826 - RNA, 89 nt, synthetic construct
  misc_feature 1..89: note = engineered ribonucleic acid scaffold (ERS) sequence
  source 1..89: mol_type = other RNA
actggcgcttctatctgattactctcagcgccatcaccagcgactatgtcgtagtgggtaaagctccctcttcggaggaggcatcagac

SEQ ID NO: 16827 - RNA, 89 nt, synthetic construct
  misc_feature 1..89: note = engineered ribonucleic acid scaffold (ERS) sequence
  source 1..89: mol_type = other RNA
actggcgcttctatctgattactttgagcgccatcaccagcgactatgtcgtagtgggtaaagctccctcttcggaggaggcatcagag

SEQ ID NO: 16828 - RNA, 89 nt, synthetic construct
  misc_feature 1..89: note = engineered ribonucleic acid scaffold (ERS) sequence
  source 1..89: mol_type = other RNA
actggcgcttctatctgattactttgagcgccatcaccagcgactatgtcgtagtgggtaaagctccctcttcggaggaggcatcaaag

SEQ ID NO: 16829 - RNA, 89 nt, synthetic construct
  misc_feature 1..89: note = engineered ribonucleic acid scaffold (ERS) sequence
  source 1..89: mol_type = other RNA
actggcgcttctatctgattagtctcagcgccatcaccagcgactatgtcgtagtgggtaaagctccctcttcggaggaggcatgagac

SEQ ID NO: 16830 - RNA, 89 nt, synthetic construct
  misc_feature 1..89: note = engineered ribonucleic acid scaffold (ERS) sequence
  source 1..89: mol_type = other RNA
actggcgcttctatctgattagtctgagcgccatcaccagcgactatgtcgtagtgggtaaagctccctcttcggaggaggcatcagac

SEQ ID NO: 16831 - RNA, 89 nt, synthetic construct
  misc_feature 1..89: note = engineered ribonucleic acid scaffold (ERS) sequence
  source 1..89: mol_type = other RNA
actggcgcttctatctgattactctcagcgccatcaccagcgactatgtcgtagtgggtaaagctccctcttcggaggaggcatgagag

SEQ ID NO: 16832 - RNA, 89 nt, synthetic construct
  misc_feature 1..89: note = engineered ribonucleic acid scaffold (ERS) sequence
  source 1..89: mol_type = other RNA
actggcgctcccatctgattaccccgagcgccatcaccagcgactatgtcgtagtgggtaaagctccctcttcggaggaggcatcgggg

SEQ ID NO: 16833 - RNA, 89 nt, synthetic construct
  misc_feature 1..89: note = engineered ribonucleic acid scaffold (ERS) sequence
  source 1..89: mol_type = other RNA
actggcgctcctatctgattactccgagcgccatcaccagcgactatgtcgtagtgggtaaagctccctcttcggaggaggcatcggag

SEQ ID NO: 16834 - RNA, 89 nt, synthetic construct
  misc_feature 1..89: note = engineered ribonucleic acid scaffold (ERS) sequence
  source 1..89: mol_type = other RNA
actggcgctgggatctgattaccccgagcgccatcaccagcgactatgtcgtagtgggtaaagctccctcttcggaggaggcatcgggg

SEQ ID NO: 16835 - RNA, 89 nt, synthetic construct
  misc_feature 1..89: note = engineered ribonucleic acid scaffold (ERS) sequence
  source 1..89: mol_type = other RNA
actggcgctggtatctgattactccgagcgccatcaccagcgactatgtcgtagtgggtaaagctccctcttcggaggaggcatcggag

SEQ ID NO: 16836 - RNA, 89 nt, synthetic construct
  misc_feature 1..89: note = engineered ribonucleic acid scaffold (ERS) sequence
  source 1..89: mol_type = other RNA
actggcgcttccatctgattaccctgagcgccatcaccagcgactatgtcgtagtgggtaaagctccctcttcggaggaggcatcaggg

SEQ ID NO: 16837 - RNA, 89 nt, synthetic construct
  misc_feature 1..89: note = engineered ribonucleic acid scaffold (ERS) sequence
  source 1..89: mol_type = other RNA
actggcgcttggatctgattaccctgagcgccatcaccagcgactatgtcgtagtgggtaaagctccctcttcggaggaggcatcaggg

SEQ ID NO: 16838 - RNA, 89 nt, synthetic construct
  misc_feature 1..89: note = engineered ribonucleic acid scaffold (ERS) sequence
  source 1..89: mol_type = other RNA
actggcgcttgtatctgattactctgagcgccatcaccagcgactatgtcgtagtgggtaaagctccctcttcggaggaggcatcagag

SEQ ID NO: 16839 - RNA, 89 nt, synthetic construct
  misc_feature 1..89: note = engineered ribonucleic acid scaffold (ERS) sequence
  source 1..89: mol_type = other RNA
actggcgcttttatctgattactttgagcgccatcaccagcgactatgtcgtagtgggtaaagctccctcttcggaggaggcatcagag

SEQ ID NO: 16840 - RNA, 89 nt, synthetic construct
  misc_feature 1..89: note = engineered ribonucleic acid scaffold (ERS) sequence
  source 1..89: mol_type = other RNA
actggcgcttttatctgattactctgagcgccatcaccagcgactatgtcgtagtgggtaaagctccctcttcggaggaggcatcagag

SEQ ID NO: 16841 - RNA, 89 nt, synthetic construct
  misc_feature 1..89: note = engineered ribonucleic acid scaffold (ERS) sequence
  source 1..89: mol_type = other RNA
actggcgcttttatctgattactctgagcgccatcaccagcgactatgtcgtagtgggtaaagctccctcttcggaggaggcatcaaag

SEQ ID NO: 16842 - RNA, 89 nt, synthetic construct
  misc_feature 1..89: note = engineered ribonucleic acid scaffold (ERS) sequence
  source 1..89: mol_type = other RNA
actggcgcttctatctgattactctgagcgccatcaccagcgactatgtcgtagtgggtaaagctccctcttcggaggaggcctcagag

SEQ ID NO: 16843 - RNA, 89 nt, synthetic construct
  misc_feature 1..89: note = engineered ribonucleic acid scaffold (ERS) sequence
  source 1..89: mol_type = other RNA
actggcgcttctatctgattactctgagcgccatcaccagcgactatgtcgtagtgggtaaagctccctcttcggaggaggcgtcagag

SEQ ID NO: 16844 - RNA, 89 nt, synthetic construct
  misc_feature 1..89: note = engineered ribonucleic acid scaffold (ERS) sequence
  source 1..89: mol_type = other RNA
actggcgcttctatctgattactctgagcgccatcaccagcgactatgtcgtagtgggtaaagctccctcttcggaggaggcatcaaag

SEQ ID NO: 16845 - RNA, 91 nt, synthetic construct
  misc_feature 1..91: note = engineered ribonucleic acid scaffold (ERS) sequence
  source 1..91: mol_type = other RNA
actggcgcttctatctgattactctcagcgccatcaccagcgactatgtcgtagtgggtaaagctccctcttcggagggaacgcatcagac

SEQ ID NO: 16846 - RNA, 91 nt, synthetic construct
  misc_feature 1..91: note = engineered ribonucleic acid scaffold (ERS) sequence
  source 1..91: mol_type = other RNA
actggcgcttctatctgattactttgagcgccatcaccagcgactatgtcgtagtgggtaaagctccctcttcggagggaacgcatcagag

SEQ ID NO: 16847 - RNA, 91 nt, synthetic construct
  misc_feature 1..91: note = engineered ribonucleic acid scaffold (ERS) sequence
  source 1..91: mol_type = other RNA
actggcgcttctatctgattactttgagcgccatcaccagcgactatgtcgtagtgggtaaagctccctcttcggagggaacgcatcaaag

SEQ ID NO: 16848 - RNA, 91 nt, synthetic construct
  misc_feature 1..91: note = engineered ribonucleic acid scaffold (ERS) sequence
  source 1..91: mol_type = other RNA
actggcgcttctatctgattagtctcagcgccatcaccagcgactatgtcgtagtgggtaaagctccctcttcggagggaacgcatgagac

SEQ ID NO: 16849 - RNA, 91 nt, synthetic construct
  misc_feature 1..91: note = engineered ribonucleic acid scaffold (ERS) sequence
  source 1..91: mol_type = other RNA
actggcgcttctatctgattagtctgagcgccatcaccagcgactatgtcgtagtgggtaaagctccctcttcggagggaacgcatcagac

SEQ ID NO: 16850 - RNA, 91 nt, synthetic construct
  misc_feature 1..91: note = engineered ribonucleic acid scaffold (ERS) sequence
  source 1..91: mol_type = other RNA
actggcgcttctatctgattactctcagcgccatcaccagcgactatgtcgtagtgggtaaagctccctcttcggagggaacgcatgagag

SEQ ID NO: 16851 - RNA, 91 nt, synthetic construct
  misc_feature 1..91: note = engineered ribonucleic acid scaffold (ERS) sequence
  source 1..91: mol_type = other RNA
actggcgctcccatctgattaccccgagcgccatcaccagcgactatgtcgtagtgggtaaagctccctcttcggagggaacgcatcgggg

SEQ ID NO: 16852 - RNA, 91 nt, synthetic construct
  misc_feature 1..91: note = engineered ribonucleic acid scaffold (ERS) sequence
  source 1..91: mol_type = other RNA
actggcgctcctatctgattactccgagcgccatcaccagcgactatgtcgtagtgggtaaagctccctcttcggagggaacgcatcggag

SEQ ID NO: 16853 - RNA, 91 nt, synthetic construct
  misc_feature 1..91: note = engineered ribonucleic acid scaffold (ERS) sequence
  source 1..91: mol_type = other RNA
actggcgctgggatctgattaccccgagcgccatcaccagcgactatgtcgtagtgggtaaagctccctcttcggagggaacgcatcgggg

SEQ ID NO: 16854 - RNA, 91 nt, synthetic construct
  misc_feature 1..91: note = engineered ribonucleic acid scaffold (ERS) sequence
  source 1..91: mol_type = other RNA
actggcgctggtatctgattactccgagcgccatcaccagcgactatgtcgtagtgggtaaagctccctcttcggagggaacgcatcggag

SEQ ID NO: 16855 - RNA, 91 nt, synthetic construct
  misc_feature 1..91: note = engineered ribonucleic acid scaffold (ERS) sequence
  source 1..91: mol_type = other RNA
actggcgcttccatctgattaccctgagcgccatcaccagcgactatgtcgtagtgggtaaagctccctcttcggagggaacgcatcaggg

SEQ ID NO: 16856 - RNA, 91 nt, synthetic construct
  misc_feature 1..91: note = engineered ribonucleic acid scaffold (ERS) sequence
  source 1..91: mol_type = other RNA
actggcgcttggatctgattaccctgagcgccatcaccagcgactatgtcgtagtgggtaaagctccctcttcggagggaacgcatcaggg

SEQ ID NO: 16857 - RNA, 91 nt, synthetic construct
  misc_feature 1..91: note = engineered ribonucleic acid scaffold (ERS) sequence
  source 1..91: mol_type = other RNA
actggcgcttgtatctgattactctgagcgccatcaccagcgactatgtcgtagtgggtaaagctccctcttcggagggaacgcatcagag

SEQ ID NO: 16858 - RNA, 91 nt, synthetic construct
  misc_feature 1..91: note = engineered ribonucleic acid scaffold (ERS) sequence
  source 1..91: mol_type = other RNA
actggcgcttttatctgattactttgagcgccatcaccagcgactatgtcgtagtgggtaaagctccctcttcggagggaacgcatcagag

SEQ ID NO: 16859 - RNA, 91 nt, synthetic construct
  misc_feature 1..91: note = engineered ribonucleic acid scaffold (ERS) sequence
  source 1..91: mol_type = other RNA
actggcgcttttatctgattactctgagcgccatcaccagcgactatgtcgtagtgggtaaagctccctcttcggagggaacgcatcagag

SEQ ID NO: 16860 - RNA, 91 nt, synthetic construct
  misc_feature 1..91: note = engineered ribonucleic acid scaffold (ERS) sequence
  source 1..91: mol_type = other RNA
actggcgcttttatctgattactctgagcgccatcaccagcgactatgtcgtagtgggtaaagctccctcttcggagggaacgcatcaaag

SEQ ID NO: 16861 - RNA, 91 nt, synthetic construct
  misc_feature 1..91: note = engineered ribonucleic acid scaffold (ERS) sequence
  source 1..91: mol_type = other RNA
actggcgcttctatctgattactctgagcgccatcaccagcgactatgtcgtagtgggtaaagctccctcttcggagggaacgcctcagag

SEQ ID NO: 16862 - RNA, 91 nt, synthetic construct
  misc_feature 1..91: note = engineered ribonucleic acid scaffold (ERS) sequence
  source 1..91: mol_type = other RNA
actggcgcttctatctgattactctgagcgccatcaccagcgactatgtcgtagtgggtaaagctccctcttcggagggaacgcgtcagag

SEQ ID NO: 16863 - RNA, 91 nt, synthetic construct
  misc_feature 1..91: note = engineered ribonucleic acid scaffold (ERS) sequence
  source 1..91: mol_type = other RNA
actggcgcttctatctgattactctgagcgccatcaccagcgactatgtcgtagtgggtaaagctccctcttcggagggaacgcatcaaag

SEQ ID NO: 16864 - RNA, 89 nt, synthetic construct; identical to SEQ ID NO: 789
  misc_feature 1..89: note = engineered ribonucleic acid scaffold (ERS) sequence
  source 1..89: mol_type = other RNA

SEQ ID NO: 16865 - RNA, 89 nt, synthetic construct; identical to SEQ ID NO: 775
  misc_feature 1..89: note = engineered ribonucleic acid scaffold (ERS) sequence
  source 1..89: mol_type = other RNA

SEQ ID NO: 16866 - RNA, 89 nt, synthetic construct; identical to SEQ ID NO: 779
  misc_feature 1..89: note = engineered ribonucleic acid scaffold (ERS) sequence
  source 1..89: mol_type = other RNA

SEQ ID NO: 16867 - RNA, 89 nt, synthetic construct; identical to SEQ ID NO: 787
  misc_feature 1..89: note = engineered ribonucleic acid scaffold (ERS) sequence
  source 1..89: mol_type = other RNA

SEQ ID NO: 16868 - RNA, 89 nt, synthetic construct; identical to SEQ ID NO: 788
  misc_feature 1..89: note = engineered ribonucleic acid scaffold (ERS) sequence
  source 1..89: mol_type = other RNA

SEQ ID NO: 16869 - RNA, 89 nt, synthetic construct; identical to SEQ ID NO: 773
  misc_feature 1..89: note = engineered ribonucleic acid scaffold (ERS) sequence
  source 1..89: mol_type = other RNA

SEQ ID NO: 16870 - RNA, 89 nt, synthetic construct; identical to SEQ ID NO: 785
  misc_feature 1..89: note = engineered ribonucleic acid scaffold (ERS) sequence
  source 1..89: mol_type = other RNA

SEQ ID NO: 16871 - RNA, 89 nt, synthetic construct; identical to SEQ ID NO: 782
  misc_feature 1..89: note = engineered ribonucleic acid scaffold (ERS) sequence
  source 1..89: mol_type = other RNA

SEQ ID NO: 16872 - RNA, 89 nt, synthetic construct; identical to SEQ ID NO: 786
  misc_feature 1..89: note = engineered ribonucleic acid scaffold (ERS) sequence
  source 1..89: mol_type = other RNA

SEQ ID NO: 16873 - RNA, 89 nt, synthetic construct; identical to SEQ ID NO: 784
  misc_feature 1..89: note = engineered ribonucleic acid scaffold (ERS) sequence
  source 1..89: mol_type = other RNA

SEQ ID NO: 16874 - RNA, 89 nt, synthetic construct; identical to SEQ ID NO: 781
  misc_feature 1..89: note = engineered ribonucleic acid scaffold (ERS) sequence
  source 1..89: mol_type = other RNA

SEQ ID NO: 16875 - RNA, 89 nt, synthetic construct; identical to SEQ ID NO: 783
  misc_feature 1..89: note = engineered ribonucleic acid scaffold (ERS) sequence
  source 1..89: mol_type = other RNA

SEQ ID NO: 16876 - RNA, 89 nt, synthetic construct; identical to SEQ ID NO: 780
  misc_feature 1..89: note = engineered ribonucleic acid scaffold (ERS) sequence
  source 1..89: mol_type = other RNA

SEQ ID NO: 16877 - RNA, 89 nt, synthetic construct; identical to SEQ ID NO: 777
  misc_feature 1..89: note = engineered ribonucleic acid scaffold (ERS) sequence
  source 1..89: mol_type = other RNA

SEQ ID NO: 16878 - RNA, 89 nt, synthetic construct; identical to SEQ ID NO: 774
  misc_feature 1..89: note = engineered ribonucleic acid scaffold (ERS) sequence
  source 1..89: mol_type = other RNA

SEQ ID NO: 16879 - RNA, 89 nt, synthetic construct; identical to SEQ ID NO: 778
  misc_feature 1..89: note = engineered ribonucleic acid scaffold (ERS) sequence
  source 1..89: mol_type = other RNA

SEQ ID NO: 16880 - RNA, 89 nt, synthetic construct; identical to SEQ ID NO: 790
  misc_feature 1..89: note = engineered ribonucleic acid scaffold (ERS) sequence
  source 1..89: mol_type = other RNA

SEQ ID NO: 16881 - RNA, 89 nt, synthetic construct; identical to SEQ ID NO: 791
  misc_feature 1..89: note = engineered ribonucleic acid scaffold (ERS) sequence
  source 1..89: mol_type = other RNA

SEQ ID NO: 16882 - RNA, 89 nt, synthetic construct; identical to SEQ ID NO: 776
  misc_feature 1..89: note = engineered ribonucleic acid scaffold (ERS) sequence
  source 1..89: mol_type = other RNA

SEQ ID NO: 16883 - RNA, 89 nt, synthetic construct
  misc_feature 1..89: note = engineered ribonucleic acid scaffold (ERS) sequence
  source 1..89: mol_type = other RNA
actggcgcttctatctgattactctcagcgccatcaccagcgactatgtcgtagtgggtaaagctccctggaaacagggagcatcagac

SEQ ID NO: 16884 - RNA, 89 nt, synthetic construct
  misc_feature 1..89: note = engineered ribonucleic acid scaffold (ERS) sequence
  source 1..89: mol_type = other RNA
actggcgcttctatctgattactttgagcgccatcaccagcgactatgtcgtagtgggtaaagctccctggaaacagggagcatcagag

SEQ ID NO: 16885 - RNA, 89 nt, synthetic construct
  misc_feature 1..89: note = engineered ribonucleic acid scaffold (ERS) sequence
  source 1..89: mol_type = other RNA
actggcgcttctatctgattactttgagcgccatcaccagcgactatgtcgtagtgggtaaagctccctggaaacagggagcatcaaag

SEQ ID NO: 16886 - RNA, 89 nt, synthetic construct
  misc_feature 1..89: note = engineered ribonucleic acid scaffold (ERS) sequence
  source 1..89: mol_type = other RNA
actggcgcttctatctgattagtctcagcgccatcaccagcgactatgtcgtagtgggtaaagctccctggaaacagggagcatgagac

SEQ ID NO: 16887 - RNA, 89 nt, synthetic construct
  misc_feature 1..89: note = engineered ribonucleic acid scaffold (ERS) sequence
  source 1..89: mol_type = other RNA
actggcgcttctatctgattagtctgagcgccatcaccagcgactatgtcgtagtgggtaaagctccctggaaacagggagcatcagac

SEQ ID NO: 16888 - RNA, 89 nt, synthetic construct
  misc_feature 1..89: note = engineered ribonucleic acid scaffold (ERS) sequence
  source 1..89: mol_type = other RNA
actggcgcttctatctgattactctcagcgccatcaccagcgactatgtcgtagtgggtaaagctccctggaaacagggagcatgagag

SEQ ID NO: 16889 - RNA, 89 nt, synthetic construct
  misc_feature 1..89: note = engineered ribonucleic acid scaffold (ERS) sequence
  source 1..89: mol_type = other RNA
actggcgctcccatctgattaccccgagcgccatcaccagcgactatgtcgtagtgggtaaagctccctggaaacagggagcatcgggg

SEQ ID NO: 16890 - RNA, 89 nt, synthetic construct
  misc_feature 1..89: note = engineered ribonucleic acid scaffold (ERS) sequence
  source 1..89: mol_type = other RNA
actggcgctcctatctgattactccgagcgccatcaccagcgactatgtcgtagtgggtaaagctccctggaaacagggagcatcggag

SEQ ID NO: 16891 - RNA, 89 nt, synthetic construct
  misc_feature 1..89: note = engineered ribonucleic acid scaffold (ERS) sequence
  source 1..89: mol_type = other RNA
actggcgctgggatctgattaccccgagcgccatcaccagcgactatgtcgtagtgggtaaagctccctggaaacagggagcatcgggg

SEQ ID NO: 16892 - RNA, 89 nt, synthetic construct
  misc_feature 1..89: note = engineered ribonucleic acid scaffold (ERS) sequence
  source 1..89: mol_type = other RNA
actggcgctggtatctgattactccgagcgccatcaccagcgactatgtcgtagtgggtaaagctccctggaaacagggagcatcggag

SEQ ID NO: 16893 - RNA, 89 nt, synthetic construct
  misc_feature 1..89: note = engineered ribonucleic acid scaffold (ERS) sequence
  source 1..89: mol_type = other RNA
actggcgcttccatctgattaccctgagcgccatcaccagcgactatgtcgtagtgggtaaagctccctggaaacagggagcatcaggg

SEQ ID NO: 16894 - RNA, 89 nt, synthetic construct
  misc_feature 1..89: note = engineered ribonucleic acid scaffold (ERS) sequence
  source 1..89: mol_type = other RNA
actggcgcttggatctgattaccctgagcgccatcaccagcgactatgtcgtagtgggtaaagctccctggaaacagggagcatcaggg

SEQ ID NO: 16895 - RNA, 89 nt, synthetic construct
  misc_feature 1..89: note = engineered ribonucleic acid scaffold (ERS) sequence
  source 1..89: mol_type = other RNA
actggcgcttgtatctgattactctgagcgccatcaccagcgactatgtcgtagtgggtaaagctccctggaaacagggagcatcagag

SEQ ID NO: 16896 - RNA, 89 nt, synthetic construct
  misc_feature 1..89: note = engineered ribonucleic acid scaffold (ERS) sequence
  source 1..89: mol_type = other RNA
actggcgcttttatctgattactttgagcgccatcaccagcgactatgtcgtagtgggtaaagctccctggaaacagggagcatcagag

SEQ ID NO: 16897 - RNA, 89 nt, synthetic construct
  misc_feature 1..89: note = engineered ribonucleic acid scaffold (ERS) sequence
  source 1..89: mol_type = other RNA
actggcgcttttatctgattactctgagcgccatcaccagcgactatgtcgtagtgggtaaagctccctggaaacagggagcatcagag

SEQ ID NO: 16898 - RNA, 89 nt, synthetic construct
  misc_feature 1..89: note = engineered ribonucleic acid scaffold (ERS) sequence
  source 1..89: mol_type = other RNA
actggcgcttttatctgattactctgagcgccatcaccagcgactatgtcgtagtgggtaaagctccctggaaacagggagcatcaaag

SEQ ID NO: 16899 - RNA, 89 nt, synthetic construct
  misc_feature 1..89: note = engineered ribonucleic acid scaffold (ERS) sequence
  source 1..89: mol_type = other RNA
actggcgcttctatctgattactctgagcgccatcaccagcgactatgtcgtagtgggtaaagctccctggaaacagggagcctcagag

SEQ ID NO: 16900 - RNA, 89 nt, synthetic construct
  misc_feature 1..89: note = engineered ribonucleic acid scaffold (ERS) sequence
  source 1..89: mol_type = other RNA
actggcgcttctatctgattactctgagcgccatcaccagcgactatgtcgtagtgggtaaagctccctggaaacagggagcgtcagag

SEQ ID NO: 16901 - RNA, 89 nt, synthetic construct
  misc_feature 1..89: note = engineered ribonucleic acid scaffold (ERS) sequence
  source 1..89: mol_type = other RNA
actggcgcttctatctgattactctgagcgccatcaccagcgactatgtcgtagtgggtaaagctccctggaaacagggagcatcaaag

SEQ ID NO: 16902 - RNA, 85 nt, synthetic construct
  misc_feature 1..85: note = engineered ribonucleic acid scaffold (ERS) sequence
  source 1..85: mol_type = other RNA
actggcgcttctatctgattactctcagcgccatcaccagcgactatgtcgtagtgggtaaagctcccttcggggagcatcagac

SEQ ID NO: 16903 - RNA, 85 nt, synthetic construct
  misc_feature 1..85: note = engineered ribonucleic acid scaffold (ERS) sequence
  source 1..85: mol_type = other RNA
actggcgcttctatctgattactttgagcgccatcaccagcgactatgtcgtagtgggtaaagctcccttcggggagcatcagag

SEQ ID NO: 16904 - RNA, 85 nt, synthetic construct
  misc_feature 1..85: note = engineered ribonucleic acid scaffold (ERS) sequence
  source 1..85: mol_type = other RNA
actggcgcttctatctgattactttgagcgccatcaccagcgactatgtcgtagtgggtaaagctcccttcggggagcatcaaag

SEQ ID NO: 16905 - RNA, 85 nt, synthetic construct
  misc_feature 1..85: note = engineered ribonucleic acid scaffold (ERS) sequence
  source 1..85: mol_type = other RNA
actggcgcttctatctgattagtctcagcgccatcaccagcgactatgtcgtagtgggtaaagctcccttcggggagcatgagac

SEQ ID NO: 16906 - RNA, 85 nt, synthetic construct
  misc_feature 1..85: note = engineered ribonucleic acid scaffold (ERS) sequence
  source 1..85: mol_type = other RNA
actggcgcttctatctgattagtctgagcgccatcaccagcgactatgtcgtagtgggtaaagctcccttcggggagcatcagac

SEQ ID NO: 16907 - RNA, 85 nt, synthetic construct
  misc_feature 1..85: note = engineered ribonucleic acid scaffold (ERS) sequence
  source 1..85: mol_type = other RNA
actggcgcttctatctgattactctcagcgccatcaccagcgactatgtcgtagtgggtaaagctcccttcggggagcatgagag

SEQ ID NO: 16908 - RNA, 85 nt, synthetic construct
  misc_feature 1..85: note = engineered ribonucleic acid scaffold (ERS) sequence
  source 1..85: mol_type = other RNA
actggcgctcccatctgattaccccgagcgccatcaccagcgactatgtcgtagtgggtaaagctcccttcggggagcatcgggg

SEQ ID NO: 16909 - RNA, 85 nt, synthetic construct
  misc_feature 1..85: note = engineered ribonucleic acid scaffold (ERS) sequence
  source 1..85: mol_type = other RNA
actggcgctcctatctgattactccgagcgccatcaccagcgactatgtcgtagtgggtaaagctcccttcggggagcatcggag

SEQ ID NO: 16910 - RNA, 85 nt, synthetic construct
  misc_feature 1..85: note = engineered ribonucleic acid scaffold (ERS) sequence
  source 1..85: mol_type = other RNA
actggcgctgggatctgattaccccgagcgccatcaccagcgactatgtcgtagtgggtaaagctcccttcggggagcatcgggg

SEQ ID NO: 16911 - RNA, 85 nt, synthetic construct
  misc_feature 1..85: note = engineered ribonucleic acid scaffold (ERS) sequence
  source 1..85: mol_type = other RNA
actggcgctggtatctgattactccgagcgccatcaccagcgactatgtcgtagtgggtaaagctcccttcggggagcatcggag

SEQ ID NO: 16912 - RNA, 85 nt, synthetic construct
  misc_feature 1..85: note = engineered ribonucleic acid scaffold (ERS) sequence
  source 1..85: mol_type = other RNA
actggcgcttccatctgattaccctgagcgccatcaccagcgactatgtcgtagtgggtaaagctcccttcggggagcatcaggg

SEQ ID NO: 16913 - RNA, 85 nt, synthetic construct
  misc_feature 1..85: note = engineered ribonucleic acid scaffold (ERS) sequence
  source 1..85: mol_type = other RNA
actggcgcttggatctgattaccctgagcgccatcaccagcgactatgtcgtagtgggtaaagctcccttcggggagcatcaggg

SEQ ID NO: 16914 - RNA, 85 nt, synthetic construct
  misc_feature 1..85: note = engineered ribonucleic acid scaffold (ERS) sequence
  source 1..85: mol_type = other RNA
actggcgcttgtatctgattactctgagcgccatcaccagcgactatgtcgtagtgggtaaagctcccttcggggagcatcagag

SEQ ID NO: 16915 - RNA, 85 nt, synthetic construct
  misc_feature 1..85: note = engineered ribonucleic acid scaffold (ERS) sequence
  source 1..85: mol_type = other RNA
actggcgcttttatctgattactttgagcgccatcaccagcgactatgtcgtagtgggtaaagctcccttcggggagcatcagag

SEQ ID NO: 16916 - RNA, 85 nt, synthetic construct
  misc_feature 1..85: note = engineered ribonucleic acid scaffold (ERS) sequence
  source 1..85: mol_type = other RNA
actggcgcttttatctgattactctgagcgccatcaccagcgactatgtcgtagtgggtaaagctcccttcggggagcatcagag

SEQ ID NO: 16917 - RNA, 85 nt, synthetic construct
  misc_feature 1..85: note = engineered ribonucleic acid scaffold (ERS) sequence
  source 1..85: mol_type = other RNA
actggcgcttttatctgattactctgagcgccatcaccagcgactatgtcgtagtgggtaaagctcccttcggggagcatcaaag

SEQ ID NO: 16918 - RNA, 85 nt, synthetic construct
  misc_feature 1..85: note = engineered ribonucleic acid scaffold (ERS) sequence
  source 1..85: mol_type = other RNA
actggcgcttctatctgattactctgagcgccatcaccagcgactatgtcgtagtgggtaaagctcccttcggggagcctcagag

SEQ ID NO: 16919 - RNA, 85 nt, synthetic construct
  misc_feature 1..85: note = engineered ribonucleic acid scaffold (ERS) sequence
  source 1..85: mol_type = other RNA
actggcgcttctatctgattactctgagcgccatcaccagcgactatgtcgtagtgggtaaagctcccttcggggagcgtcagag

SEQ ID NO: 16920 - RNA, 85 nt, synthetic construct
  misc_feature 1..85: note = engineered ribonucleic acid scaffold (ERS) sequence
  source 1..85: mol_type = other RNA
actggcgcttctatctgattactctgagcgccatcaccagcgactatgtcgtagtgggtaaagctcccttcggggagcatcaaag

SEQ ID NO: 16921 - RNA, 85 nt, synthetic construct
  misc_feature 1..85: note = engineered ribonucleic acid scaffold (ERS) sequence
  source 1..85: mol_type = other RNA
actggcgcttctatctgattactctcagcgccatcaccagcgactatgtcgtagtgggtaaagctccgttcgcggagcatcagac

SEQ ID NO: 16922 - RNA, 85 nt, synthetic construct
  misc_feature 1..85: note = engineered ribonucleic acid scaffold (ERS) sequence
  source 1..85: mol_type = other RNA
actggcgcttctatctgattactttgagcgccatcaccagcgactatgtcgtagtgggtaaagctccgttcgcggagcatcagag

SEQ ID NO: 16923 - RNA, 85 nt, synthetic construct
  misc_feature 1..85: note = engineered ribonucleic acid scaffold (ERS) sequence
  source 1..85: mol_type = other RNA
actggcgcttctatctgattactttgagcgccatcaccagcgactatgtcgtagtgggtaaagctccgttcgcggagcatcaaag

SEQ ID NO: 16924 - RNA, 85 nt, synthetic construct
  misc_feature 1..85: note = engineered ribonucleic acid scaffold (ERS) sequence
  source 1..85: mol_type = other RNA
actggcgcttctatctgattagtctcagcgccatcaccagcgactatgtcgtagtgggtaaagctccgttcgcggagcatgagac

SEQ ID NO: 16925 - RNA, 85 nt, synthetic construct
  misc_feature 1..85: note = engineered ribonucleic acid scaffold (ERS) sequence
  source 1..85: mol_type = other RNA
actggcgcttctatctgattagtctgagcgccatcaccagcgactatgtcgtagtgggtaaagctccgttcgcggagcatcagac

SEQ ID NO: 16926 - RNA, 85 nt, synthetic construct
  misc_feature 1..85: note = engineered ribonucleic acid scaffold (ERS) sequence
  source 1..85: mol_type = other RNA
actggcgcttctatctgattactctcagcgccatcaccagcgactatgtcgtagtgggtaaagctccgttcgcggagcatgagag

SEQ ID NO: 16927 - RNA, 85 nt, synthetic construct
  misc_feature 1..85: note = engineered ribonucleic acid scaffold (ERS) sequence
  source 1..85: mol_type = other RNA
actggcgctcccatctgattaccccgagcgccatcaccagcgactatgtcgtagtgggtaaagctccgttcgcggagcatcgggg

SEQ ID NO: 16928 - RNA, 85 nt, synthetic construct
  misc_feature 1..85: note = engineered ribonucleic acid scaffold (ERS) sequence
  source 1..85: mol_type = other RNA
actggcgctcctatctgattactccgagcgccatcaccagcgactatgtcgtagtgggtaaagctccgttcgcggagcatcggag

SEQ ID NO: 16929 - RNA, 85 nt, synthetic construct
  misc_feature 1..85: note = engineered ribonucleic acid scaffold (ERS) sequence
  source 1..85: mol_type = other RNA
actggcgctgggatctgattaccccgagcgccatcaccagcgactatgtcgtagtgggtaaagctccgttcgcggagcatcgggg

SEQ ID NO: 16930 - RNA, 85 nt, synthetic construct
  misc_feature 1..85: note = engineered ribonucleic acid scaffold (ERS) sequence
  source 1..85: mol_type = other RNA
actggcgctggtatctgattactccgagcgccatcaccagcgactatgtcgtagtgggtaaagctccgttcgcggagcatcggag

SEQ ID NO: 16931 - RNA, 85 nt, synthetic construct
  misc_feature 1..85: note = engineered ribonucleic acid scaffold (ERS) sequence
  source 1..85: mol_type = other RNA
actggcgcttccatctgattaccctgagcgccatcaccagcgactatgtcgtagtgggtaaagctccgttcgcggagcatcaggg

SEQ ID NO: 16932 - RNA, 85 nt, synthetic construct
  misc_feature 1..85: note = engineered ribonucleic acid scaffold (ERS) sequence
  source 1..85: mol_type = other RNA
actggcgcttggatctgattaccctgagcgccatcaccagcgactatgtcgtagtgggtaaagctccgttcgcggagcatcaggg

SEQ ID NO: 16933 - RNA, 85 nt, synthetic construct
  misc_feature 1..85: note = engineered ribonucleic acid scaffold (ERS) sequence
  source 1..85: mol_type = other RNA
actggcgcttgtatctgattactctgagcgccatcaccagcgactatgtcgtagtgggtaaagctccgttcgcggagcatcagag

SEQ ID NO: 16934 - RNA, 85 nt, synthetic construct
  misc_feature 1..85: note = engineered ribonucleic acid scaffold (ERS) sequence
  source 1..85: mol_type = other RNA
actggcgcttttatctgattactttgagcgccatcaccagcgactatgtcgtagtgggtaaagctccgttcgcggagcatcagag

SEQ ID NO: 16935 - RNA, 85 nt, synthetic construct
  misc_feature 1..85: note = engineered ribonucleic acid scaffold (ERS) sequence
  source 1..85: mol_type = other RNA
actggcgcttttatctgattactctgagcgccatcaccagcgactatgtcgtagtgggtaaagctccgttcgcggagcatcagag

SEQ ID NO: 16936 - RNA, 85 nt, synthetic construct
  misc_feature 1..85: note = engineered ribonucleic acid scaffold (ERS) sequence
  source 1..85: mol_type = other RNA
actggcgcttttatctgattactctgagcgccatcaccagcgactatgtcgtagtgggtaaagctccgttcgcggagcatcaaag

SEQ ID NO: 16937 - RNA, 85 nt, synthetic construct
  misc_feature 1..85: note = engineered ribonucleic acid scaffold (ERS) sequence
  source 1..85: mol_type = other RNA
actggcgcttctatctgattactctgagcgccatcaccagcgactatgtcgtagtgggtaaagctccgttcgcggagcctcagag

SEQ ID NO: 16938 - RNA, 85 nt, synthetic construct
  misc_feature 1..85: note = engineered ribonucleic acid scaffold (ERS) sequence
  source 1..85: mol_type = other RNA
actggcgcttctatctgattactctgagcgccatcaccagcgactatgtcgtagtgggtaaagctccgttcgcggagcgtcagag

SEQ ID NO: 16939 - RNA, 85 nt, synthetic construct
  misc_feature 1..85: note = engineered ribonucleic acid scaffold (ERS) sequence
  source 1..85: mol_type = other RNA
actggcgcttctatctgattactctgagcgccatcaccagcgactatgtcgtagtgggtaaagctccgttcgcggagcatcaaag

SEQ ID NO: 16940 - RNA, 87 nt, synthetic construct
  misc_feature 1..87: note = engineered ribonucleic acid scaffold (ERS) sequence
  source 1..87: mol_type = other RNA
actggcgcttctatctgattactctcagcgccatcaccagcgactatgtcgtagtgggtaaagctcctcttcggaggagcatcagac

SEQ ID NO: 16941 - RNA, 87 nt, synthetic construct
  misc_feature 1..87: note = engineered ribonucleic acid scaffold (ERS) sequence
  source 1..87: mol_type = other RNA
actggcgcttctatctgattactttgagcgccatcaccagcgactatgtcgtagtgggtaaagctcctcttcggaggagcatcagag

SEQ ID NO: 16942 - RNA, 87 nt, synthetic construct
  misc_feature 1..87: note = engineered ribonucleic acid scaffold (ERS) sequence
  source 1..87: mol_type = other RNA
actggcgcttctatctgattactttgagcgccatcaccagcgactatgtcgtagtgggtaaagctcctcttcggaggagcatcaaag

SEQ ID NO: 16943 - RNA, 87 nt, synthetic construct
  misc_feature 1..87: note = engineered ribonucleic acid scaffold (ERS) sequence
  source 1..87: mol_type = other RNA
actggcgcttctatctgattagtctcagcgccatcaccagcgactatgtcgtagtgggtaaagctcctcttcggaggagcatgagac

SEQ ID NO: 16944 - RNA, 87 nt, synthetic construct
  misc_feature 1..87: note = engineered ribonucleic acid scaffold (ERS) sequence
  source 1..87: mol_type = other RNA
actggcgcttctatctgattagtctgagcgccatcaccagcgactatgtcgtagtgggtaaagctcctcttcggaggagcatcagac

SEQ ID NO: 16945 - RNA, 87 nt, synthetic construct
  misc_feature 1..87: note = engineered ribonucleic acid scaffold (ERS) sequence
  source 1..87: mol_type = other RNA
actggcgcttctatctgattactctcagcgccatcaccagcgactatgtcgtagtgggtaaagctcctcttcggaggagcatgagag

SEQ ID NO: 16946 - RNA, 87 nt, synthetic construct
  misc_feature 1..87: note = engineered ribonucleic acid scaffold (ERS) sequence
  source 1..87: mol_type = other RNA
actggcgctcccatctgattaccccgagcgccatcaccagcgactatgtcgtagtgggtaaagctcctcttcggaggagcatcgggg

SEQ ID NO: 16947 - RNA, 87 nt, synthetic construct
  misc_feature 1..87: note = engineered ribonucleic acid scaffold (ERS) sequence
  source 1..87: mol_type = other RNA
actggcgctcctatctgattactccgagcgccatcaccagcgactatgtcgtagtgggtaaagctcctcttcggaggagcatcggag

SEQ ID NO: 16948 - RNA, 87 nt, synthetic construct
  misc_feature 1..87: note = engineered ribonucleic acid scaffold (ERS) sequence
  source 1..87: mol_type = other RNA
actggcgctgggatctgattaccccgagcgccatcaccagcgactatgtcgtagtgggtaaagctcctcttcggaggagcatcgggg

SEQ ID NO: 16949 - RNA, 87 nt, synthetic construct
  misc_feature 1..87: note = engineered ribonucleic acid scaffold (ERS) sequence
  source 1..87: mol_type = other RNA
actggcgctggtatctgattactccgagcgccatcaccagcgactatgtcgtagtgggtaaagctcctcttcggaggagcatcggag

SEQ ID NO: 16950 - RNA, 87 nt, synthetic construct
  misc_feature 1..87: note = engineered ribonucleic acid scaffold (ERS) sequence
  source 1..87: mol_type = other RNA
actggcgcttccatctgattaccctgagcgccatcaccagcgactatgtcgtagtgggtaaagctcctcttcggaggagcatcaggg

SEQ ID NO: 16951 - RNA, 87 nt, synthetic construct
  misc_feature 1..87: note = engineered ribonucleic acid scaffold (ERS) sequence
  source 1..87: mol_type = other RNA
actggcgcttggatctgattaccctgagcgccatcaccagcgactatgtcgtagtgggtaaagctcctcttcggaggagcatcaggg

SEQ ID NO: 16952 - RNA, 87 nt, synthetic construct
  misc_feature 1..87: note = engineered ribonucleic acid scaffold (ERS) sequence
  source 1..87: mol_type = other RNA
actggcgcttgtatctgattactctgagcgccatcaccagcgactatgtcgtagtgggtaaagctcctcttcggaggagcatcagag

SEQ ID NO: 16953 - RNA, 87 nt, synthetic construct
  misc_feature 1..87: note = engineered ribonucleic acid scaffold (ERS) sequence
  source 1..87: mol_type = other RNA
actggcgcttttatctgattactttgagcgccatcaccagcgactatgtcgtagtgggtaaagctcctcttcggaggagcatcagag

SEQ ID NO: 16954 - RNA, 87 nt, synthetic construct
  misc_feature 1..87: note = engineered ribonucleic acid scaffold (ERS) sequence
  source 1..87: mol_type = other RNA
actggcgcttttatctgattactctgagcgccatcaccagcgactatgtcgtagtgggtaaagctcctcttcggaggagcatcagag

SEQ ID NO: 16955 - RNA, 87 nt, synthetic construct
  misc_feature 1..87: note = engineered ribonucleic acid scaffold (ERS) sequence
  source 1..87: mol_type = other RNA
actggcgcttttatctgattactctgagcgccatcaccagcgactatgtcgtagtgggtaaagctcctcttcggaggagcatcaaag

SEQ ID NO: 16956 - RNA, 87 nt, synthetic construct
  misc_feature 1..87: note = engineered ribonucleic acid scaffold (ERS) sequence
  source 1..87: mol_type = other RNA
actggcgcttctatctgattactctgagcgccatcaccagcgactatgtcgtagtgggtaaagctcctcttcggaggagcctcagag

SEQ ID NO: 16957 - RNA, 87 nt, synthetic construct
  misc_feature 1..87: note = engineered ribonucleic acid scaffold (ERS) sequence
  source 1..87: mol_type = other RNA
actggcgcttctatctgattactctgagcgccatcaccagcgactatgtcgtagtgggtaaagctcctcttcggaggagcgtcagag

SEQ ID NO: 16958 - RNA, 87 nt, synthetic construct
  misc_feature 1..87: note = engineered ribonucleic acid scaffold (ERS) sequence
  source 1..87: mol_type = other RNA
actggcgcttctatctgattactctgagcgccatcaccagcgactatgtcgtagtgggtaaagctcctcttcggaggagcatcaaag

SEQ ID NO: 16959 - RNA, 85 nt, synthetic construct
  misc_feature 1..85: note = engineered ribonucleic acid scaffold (ERS) sequence
  source 1..85: mol_type = other RNA
actggcgcttctatctgattactctcagcgccatcaccagcgactatgtcgtagtgggtaaagctctcttcggagagcatcagac

SEQ ID NO: 16960 - RNA, 85 nt, synthetic construct
  misc_feature 1..85: note = engineered ribonucleic acid scaffold (ERS) sequence
  source 1..85: mol_type = other RNA
actggcgcttctatctgattactttgagcgccatcaccagcgactatgtcgtagtgggtaaagctctcttcggagagcatcagag

SEQ ID NO: 16961 - RNA, 85 nt, synthetic construct
  misc_feature 1..85: note = engineered ribonucleic acid scaffold (ERS) sequence
  source 1..85: mol_type = other RNA
actggcgcttctatctgattactttgagcgccatcaccagcgactatgtcgtagtgggtaaagctctcttcggagagcatcaaag

SEQ ID NO: 16962 - RNA, 85 nt, synthetic construct
  misc_feature 1..85: note = engineered ribonucleic acid scaffold (ERS) sequence
  source 1..85: mol_type = other RNA
actggcgcttctatctgattagtctcagcgccatcaccagcgactatgtcgtagtgggtaaagctctcttcggagagcatgagac

SEQ ID NO: 16963 - RNA, 85 nt, synthetic construct
  misc_feature 1..85: note = engineered ribonucleic acid scaffold (ERS) sequence
  source 1..85: mol_type = other RNA
actggcgcttctatctgattagtctgagcgccatcaccagcgactatgtcgtagtgggtaaagctctcttcggagagcatcagac

SEQ ID NO: 16964 - RNA, 85 nt, synthetic construct
  misc_feature 1..85: note = engineered ribonucleic acid scaffold (ERS) sequence
  source 1..85: mol_type = other RNA
actggcgcttctatctgattactctcagcgccatcaccagcgactatgtcgtagtgggtaaagctctcttcggagagcatgagag

SEQ ID NO: 16965 - RNA, 85 nt, synthetic construct
  misc_feature 1..85: note = engineered ribonucleic acid scaffold (ERS) sequence
  source 1..85: mol_type = other RNA
actggcgctcccatctgattaccccgagcgccatcaccagcgactatgtcgtagtgggtaaagctctcttcggagagcatcgggg

SEQ ID NO: 16966 - RNA, 85 nt, synthetic construct
  misc_feature 1..85: note = engineered ribonucleic acid scaffold (ERS) sequence
  source 1..85: mol_type = other RNA
actggcgctcctatctgattactccgagcgccatcaccagcgactatgtcgtagtgggtaaagctctcttcggagagcatcggag

SEQ ID NO: 16967 - RNA, 85 nt, synthetic construct
  misc_feature 1..85: note = engineered ribonucleic acid scaffold (ERS) sequence
  source 1..85: mol_type = other RNA
actggcgctgggatctgattaccccgagcgccatcaccagcgactatgtcgtagtgggtaaagctctcttcggagagcatcgggg

SEQ ID NO: 16968 - RNA, 85 nt, synthetic construct
  misc_feature 1..85: note = engineered ribonucleic acid scaffold (ERS) sequence
  source 1..85: mol_type = other RNA
actggcgctggtatctgattactccgagcgccatcaccagcgactatgtcgtagtgggtaaagctctcttcggagagcatcggag

SEQ ID NO: 16969 - RNA, 85 nt, synthetic construct
  misc_feature 1..85: note = engineered ribonucleic acid scaffold (ERS) sequence
  source 1..85: mol_type = other RNA
actggcgcttccatctgattaccctgagcgccatcaccagcgactatgtcgtagtgggtaaagctctcttcggagagcatcaggg

SEQ ID NO: 16970 - RNA, 85 nt, synthetic construct
  misc_feature 1..85: note = engineered ribonucleic acid scaffold (ERS) sequence
  source 1..85: mol_type = other RNA
actggcgcttggatctgattaccctgagcgccatcaccagcgactatgtcgtagtgggtaaagctctcttcggagagcatcaggg

SEQ ID NO: 16971 - RNA, 85 nt, synthetic construct
  misc_feature 1..85: note = engineered ribonucleic acid scaffold (ERS) sequence
  source 1..85: mol_type = other RNA
actggcgcttgtatctgattactctgagcgccatcaccagcgactatgtcgtagtgggtaaagctctcttcggagagcatcagag

SEQ ID NO: 16972 - RNA, 85 nt, synthetic construct
  misc_feature 1..85: note = engineered ribonucleic acid scaffold (ERS) sequence
  source 1..85: mol_type = other RNA
actggcgcttttatctgattactttgagcgccatcaccagcgactatgtcgtagtgggtaaagctctcttcggagagcatcagag

SEQ ID NO: 16973 - RNA, 85 nt, synthetic construct
  misc_feature 1..85: note = engineered ribonucleic acid scaffold (ERS) sequence
  source 1..85: mol_type = other RNA
actggcgcttttatctgattactctgagcgccatcaccagcgactatgtcgtagtgggtaaagctctcttcggagagcatcagag

SEQ ID NO: 16974 - RNA, 85 nt, synthetic construct
  misc_feature 1..85: note = engineered ribonucleic acid scaffold (ERS) sequence
  source 1..85: mol_type = other RNA
actggcgcttttatctgattactctgagcgccatcaccagcgactatgtcgtagtgggtaaagctctcttcggagagcatcaaag

SEQ ID NO: 16975 - RNA, 85 nt, synthetic construct
  misc_feature 1..85: note = engineered ribonucleic acid scaffold (ERS) sequence
  source 1..85: mol_type = other RNA
actggcgcttctatctgattactctgagcgccatcaccagcgactatgtcgtagtgggtaaagctctcttcggagagcctcagag

SEQ ID NO: 16976 - RNA, 85 nt, synthetic construct
  misc_feature 1..85: note = engineered ribonucleic acid scaffold (ERS) sequence
  source 1..85: mol_type = other RNA
actggcgcttctatctgattactctgagcgccatcaccagcgactatgtcgtagtgggtaaagctctcttcggagagcgtcagag

SEQ ID NO: 16977 - RNA, 85 nt, synthetic construct
  misc_feature 1..85: note = engineered ribonucleic acid scaffold (ERS) sequence
  source 1..85: mol_type = other RNA
actggcgcttctatctgattactctgagcgccatcaccagcgactatgtcgtagtgggtaaagctctcttcggagagcatcaaag

SEQ ID NO: 16978 - RNA, 77 nt, synthetic construct
  misc_feature 1..77: note = engineered ribonucleic acid scaffold (ERS) sequence
  source 1..77: mol_type = other RNA
actggcgcttctatctgattactctcagcgccatcaccagcgactatgtcgtagtgggtaaagctgcagcatcagac

SEQ ID NO: 16979 - RNA, 77 nt, synthetic construct
  misc_feature 1..77: note = engineered ribonucleic acid scaffold (ERS) sequence
  source 1..77: mol_type = other RNA
actggcgcttctatctgattactttgagcgccatcaccagcgactatgtcgtagtgggtaaagctgcagcatcagag

SEQ ID NO: 16980 - RNA, 77 nt, synthetic construct
  misc_feature 1..77: note = engineered ribonucleic acid scaffold (ERS) sequence
  source 1..77: mol_type = other RNA
actggcgcttctatctgattactttgagcgccatcaccagcgactatgtcgtagtgggtaaagctgcagcatcaaag

SEQ ID NO: 16981 - RNA, 77 nt, synthetic construct
  misc_feature 1..77: note = engineered ribonucleic acid scaffold (ERS) sequence
  source 1..77: mol_type = other RNA
actggcgcttctatctgattagtctcagcgccatcaccagcgactatgtcgtagtgggtaaagctgcagcatgagac

SEQ ID NO: 16982 - RNA, 77 nt, synthetic construct
  misc_feature 1..77: note = engineered ribonucleic acid scaffold (ERS) sequence
  source 1..77: mol_type = other RNA
actggcgcttctatctgattagtctgagcgccatcaccagcgactatgtcgtagtgggtaaagctgcagcatcagac

SEQ ID NO: 16983 - RNA, 77 nt, synthetic construct
  misc_feature 1..77: note = engineered ribonucleic acid scaffold (ERS) sequence
  source 1..77: mol_type = other RNA
actggcgcttctatctgattactctcagcgccatcaccagcgactatgtcgtagtgggtaaagctgcagcatgagag

SEQ ID NO: 16984 - RNA, 77 nt, synthetic construct
  misc_feature 1..77: note = engineered ribonucleic acid scaffold (ERS) sequence
  source 1..77: mol_type = other RNA
actggcgctcccatctgattaccccgagcgccatcaccagcgactatgtcgtagtgggtaaagctgcagcatcgggg

SEQ ID NO: 16985 - RNA, 77 nt, synthetic construct
  misc_feature 1..77: note = engineered ribonucleic acid scaffold (ERS) sequence
  source 1..77: mol_type = other RNA
actggcgctcctatctgattactccgagcgccatcaccagcgactatgtcgtagtgggtaaagctgcagcatcggag

SEQ ID NO: 16986 - RNA, 77 nt, synthetic construct
  misc_feature 1..77: note = engineered ribonucleic acid scaffold (ERS) sequence
  source 1..77: mol_type = other RNA
actggcgctgggatctgattaccccgagcgccatcaccagcgactatgtcgtagtgggtaaagctgcagcatcgggg

SEQ ID NO: 16987 - RNA, 77 nt, synthetic construct
  misc_feature 1..77: note = engineered ribonucleic acid scaffold (ERS) sequence
  source 1..77: mol_type = other RNA
actggcgctggtatctgattactccgagcgccatcaccagcgactatgtcgtagtgggtaaagctgcagcatcggag

SEQ ID NO: 16988 - RNA, 77 nt, synthetic construct
  misc_feature 1..77: note = engineered ribonucleic acid scaffold (ERS) sequence
  source 1..77: mol_type = other RNA
actggcgcttccatctgattaccctgagcgccatcaccagcgactatgtcgtagtgggtaaagctgcagcatcaggg

SEQ ID NO: 16989 - RNA, 77 nt, synthetic construct
  misc_feature 1..77: note = engineered ribonucleic acid scaffold (ERS) sequence
  source 1..77: mol_type = other RNA
actggcgcttggatctgattaccctgagcgccatcaccagcgactatgtcgtagtgggtaaagctgcagcatcaggg

SEQ ID NO: 16990 - RNA, 77 nt, synthetic construct
  misc_feature 1..77: note = engineered ribonucleic acid scaffold (ERS) sequence
  source 1..77: mol_type = other RNA
actggcgcttgtatctgattactctgagcgccatcaccagcgactatgtcgtagtgggtaaagctgcagcatcagag

SEQ ID NO: 16991 - RNA, 77 nt, synthetic construct
  misc_feature 1..77: note = engineered ribonucleic acid scaffold (ERS) sequence
  source 1..77: mol_type = other RNA
actggcgcttttatctgattactttgagcgccatcaccagcgactatgtcgtagtgggtaaagctgcagcatcagag

SEQ ID NO: 16992 - RNA, 77 nt, synthetic construct
  misc_feature 1..77: note = engineered ribonucleic acid scaffold (ERS) sequence
  source 1..77: mol_type = other RNA
actggcgcttttatctgattactctgagcgccatcaccagcgactatgtcgtagtgggtaaagctgcagcatcagag

SEQ ID NO: 16993 - RNA, 77 nt, synthetic construct
  misc_feature 1..77: note = engineered ribonucleic acid scaffold (ERS) sequence
  source 1..77: mol_type = other RNA
actggcgcttttatctgattactctgagcgccatcaccagcgactatgtcgtagtgggtaaagctgcagcatcaaag

SEQ ID NO: 16994 - RNA, 77 nt, synthetic construct
  misc_feature 1..77: note = engineered ribonucleic acid scaffold (ERS) sequence
  source 1..77: mol_type = other RNA
actggcgcttctatctgattactctgagcgccatcaccagcgactatgtcgtagtgggtaaagctgcagcctcagag

SEQ ID NO: 16995 - RNA, 77 nt, synthetic construct
  misc_feature 1..77: note = engineered ribonucleic acid scaffold (ERS) sequence
  source 1..77: mol_type = other RNA
actggcgcttctatctgattactctgagcgccatcaccagcgactatgtcgtagtgggtaaagctgcagcgtcagag

SEQ ID NO: 16996 - RNA, 77 nt, synthetic construct
  misc_feature 1..77: note = engineered ribonucleic acid scaffold (ERS) sequence
  source 1..77: mol_type = other RNA
actggcgcttctatctgattactctgagcgccatcaccagcgactatgtcgtagtgggtaaagctgcagcatcaaag

SEQ ID NO: 16997 - RNA, 83 nt, synthetic construct
  misc_feature 1..83: note = engineered ribonucleic acid scaffold (ERS) sequence
  source 1..83: mol_type = other RNA
actggcgcttctatctgattactctcagcgccatcaccagcgactatgtcgtagtgggtaaagctgcttcggcagcatcagac

SEQ ID NO: 16998 - RNA, 83 nt, synthetic construct
  misc_feature 1..83: note = engineered ribonucleic acid scaffold (ERS) sequence
  source 1..83: mol_type = other RNA
actggcgcttctatctgattactttgagcgccatcaccagcgactatgtcgtagtgggtaaagctgcttcggcagcatcagag

SEQ ID NO: 16999 - RNA, 83 nt, synthetic construct
  misc_feature 1..83: note = engineered ribonucleic acid scaffold (ERS) sequence
  source 1..83: mol_type = other RNA
actggcgcttctatctgattactttgagcgccatcaccagcgactatgtcgtagtgggtaaagctgcttcggcagcatcaaag

SEQ ID NO: 17000 - RNA, 83 nt, synthetic construct
  misc_feature 1..83: note = engineered ribonucleic acid scaffold (ERS) sequence
  source 1..83: mol_type = other RNA
actggcgcttctatctgattagtctcagcgccatcaccagcgactatgtcgtagtgggtaaagctgcttcggcagcatgagac

SEQ ID NO: 17001 - RNA, 83 nt, synthetic construct
  misc_feature 1..83: note = engineered ribonucleic acid scaffold (ERS) sequence
  source 1..83: mol_type = other RNA
actggcgcttctatctgattagtctgagcgccatcaccagcgactatgtcgtagtgggtaaagctgcttcggcagcatcagac

SEQ ID NO: 17002 - RNA, 83 nt, synthetic construct
  misc_feature 1..83: note = engineered ribonucleic acid scaffold (ERS) sequence
  source 1..83: mol_type = other RNA
actggcgcttctatctgattactctcagcgccatcaccagcgactatgtcgtagtgggtaaagctgcttcggcagcatgagag

SEQ ID NO: 17003 - RNA, 83 nt, synthetic construct
  misc_feature 1..83: note = engineered ribonucleic acid scaffold (ERS) sequence
  source 1..83: mol_type = other RNA
actggcgctcccatctgattaccccgagcgccatcaccagcgactatgtcgtagtgggtaaagctgcttcggcagcatcgggg

SEQ ID NO: 17004 - RNA, 83 nt, synthetic construct
  misc_feature 1..83: note = engineered ribonucleic acid scaffold (ERS) sequence
  source 1..83: mol_type = other RNA
actggcgctcctatctgattactccgagcgccatcaccagcgactatgtcgtagtgggtaaagctgcttcggcagcatcggag

SEQ ID NO: 17005 - RNA, 83 nt, synthetic construct
  misc_feature 1..83: note = engineered ribonucleic acid scaffold (ERS) sequence
  source 1..83: mol_type = other RNA
actggcgctgggatctgattaccccgagcgccatcaccagcgactatgtcgtagtgggtaaagctgcttcggcagcatcgggg

SEQ ID NO: 17006 - RNA, 83 nt, synthetic construct
  misc_feature 1..83: note = engineered ribonucleic acid scaffold (ERS) sequence
  source 1..83: mol_type = other RNA
actggcgctggtatctgattactccgagcgccatcaccagcgactatgtcgtagtgggtaaagctgcttcggcagcatcggag

SEQ ID NO: 17007 - RNA, 83 nt, synthetic construct
  misc_feature 1..83: note = engineered ribonucleic acid scaffold (ERS) sequence
  source 1..83: mol_type = other RNA
actggcgcttccatctgattaccctgagcgccatcaccagcgactatgtcgtagtgggtaaagctgcttcggcagcatcaggg

SEQ ID NO: 17008 - RNA, 83 nt, synthetic construct
  misc_feature 1..83: note = engineered ribonucleic acid scaffold (ERS) sequence
  source 1..83: mol_type = other RNA
actggcgcttggatctgattaccctgagcgccatcaccagcgactatgtcgtagtgggtaaagctgcttcggcagcatcaggg

SEQ ID NO: 17009 - RNA, 83 nt, synthetic construct
  misc_feature 1..83: note = engineered ribonucleic acid scaffold (ERS) sequence
  source 1..83: mol_type = other RNA
actggcgcttgtatctgattactctgagcgccatcaccagcgactatgtcgtagtgggtaaagctgcttcggcagcatcagag

SEQ ID NO: 17010 - RNA, 83 nt, synthetic construct
  misc_feature 1..83: note = engineered ribonucleic acid scaffold (ERS) sequence
  source 1..83: mol_type = other RNA
actggcgcttttatctgattactttgagcgccatcaccagcgactatgtcgtagtgggtaaagctgcttcggcagcatcagag

SEQ ID NO: 17011 - RNA, 83 nt, synthetic construct
  misc_feature 1..83: note = engineered ribonucleic acid scaffold (ERS) sequence
  source 1..83: mol_type = other RNA
actggcgcttttatctgattactctgagcgccatcaccagcgactatgtcgtagtgggtaaagctgcttcggcagcatcagag

SEQ ID NO: 17012 - RNA, 83 nt, synthetic construct
  misc_feature 1..83: note = engineered ribonucleic acid scaffold (ERS) sequence
  source 1..83: mol_type = other RNA
actggcgcttttatctgattactctgagcgccatcaccagcgactatgtcgtagtgggtaaagctgcttcggcagcatcaaag

SEQ ID NO: 17013 - RNA, 83 nt, synthetic construct
  misc_feature 1..83: note = engineered ribonucleic acid scaffold (ERS) sequence
  source 1..83: mol_type = other RNA
actggcgcttctatctgattactctgagcgccatcaccagcgactatgtcgtagtgggtaaagctgcttcggcagcctcagag

SEQ ID NO: 17014 - RNA, 83 nt, synthetic construct
  misc_feature 1..83: note = engineered ribonucleic acid scaffold (ERS) sequence
  source 1..83: mol_type = other RNA
actggcgcttctatctgattactctgagcgccatcaccagcgactatgtcgtagtgggtaaagctgcttcggcagcgtcagag

SEQ ID NO: 17015 - RNA, 83 nt, synthetic construct
  misc_feature 1..83: note = engineered ribonucleic acid scaffold (ERS) sequence
  source 1..83: mol_type = other RNA
actggcgcttctatctgattactctgagcgccatcaccagcgactatgtcgtagtgggtaaagctgcttcggcagcatcaaag

SEQ ID NO: 17016 - RNA, 89 nt, synthetic construct
  misc_feature 1..89: note = engineered ribonucleic acid scaffold (ERS) sequence
  source 1..89: mol_type = other RNA
actggcgcttctatctgattactctcagcgccatcaccagcgactatgtcgtagtgggtaaaggtccctcttcggagggaacatcagac

SEQ ID NO: 17017 - RNA, 89 nt, synthetic construct
  misc_feature 1..89: note = engineered ribonucleic acid scaffold (ERS) sequence
  source 1..89: mol_type = other RNA
actggcgcttctatctgattactttgagcgccatcaccagcgactatgtcgtagtgggtaaaggtccctcttcggagggaacatcagag

SEQ ID NO: 17018 - RNA, 89 nt, synthetic construct
  misc_feature 1..89: note = engineered ribonucleic acid scaffold (ERS) sequence
  source 1..89: mol_type = other RNA
actggcgcttctatctgattactttgagcgccatcaccagcgactatgtcgtagtgggtaaaggtccctcttcggagggaacatcaaag

SEQ ID NO: 17019 - RNA, 89 nt, synthetic construct
  misc_feature 1..89: note = engineered ribonucleic acid scaffold (ERS) sequence
  source 1..89: mol_type = other RNA
actggcgcttctatctgattagtctcagcgccatcaccagcgactatgtcgtagtgggtaaaggtccctcttcggagggaacatgagac

SEQ ID NO: 17020 - RNA, 89 nt, synthetic construct
  misc_feature 1..89: note = engineered ribonucleic acid scaffold (ERS) sequence
  source 1..89: mol_type = other RNA
actggcgcttctatctgattagtctgagcgccatcaccagcgactatgtcgtagtgggtaaaggtccctcttcggagggaacatcagac

SEQ ID NO: 17021 - RNA, 89 nt, synthetic construct
  misc_feature 1..89: note = engineered ribonucleic acid scaffold (ERS) sequence
  source 1..89: mol_type = other RNA
actggcgcttctatctgattactctcagcgccatcaccagcgactatgtcgtagtgggtaaaggtccctcttcggagggaacatgagag

SEQ ID NO: 17022 - RNA, 89 nt, synthetic construct
  misc_feature 1..89: note = engineered ribonucleic acid scaffold (ERS) sequence
  source 1..89: mol_type = other RNA
actggcgctcccatctgattaccccgagcgccatcaccagcgactatgtcgtagtgggtaaaggtccctcttcggagggaacatcgggg

SEQ ID NO: 17023 - RNA, 89 nt, synthetic construct
  misc_feature 1..89: note = engineered ribonucleic acid scaffold (ERS) sequence
  source 1..89: mol_type = other RNA
actggcgctcctatctgattactccgagcgccatcaccagcgactatgtcgtagtgggtaaaggtccctcttcggagggaacatcggag

SEQ ID NO: 17024 - RNA, 89 nt, synthetic construct
  misc_feature 1..89: note = engineered ribonucleic acid scaffold (ERS) sequence
  source 1..89: mol_type = other RNA
actggcgctgggatctgattaccccgagcgccatcaccagcgactatgtcgtagtgggtaaaggtccctcttcggagggaacatcgggg

SEQ ID NO: 17025 - RNA, 89 nt, synthetic construct
  misc_feature 1..89: note = engineered ribonucleic acid scaffold (ERS) sequence
  source 1..89: mol_type = other RNA
actggcgctggtatctgattactccgagcgccatcaccagcgactatgtcgtagtgggtaaaggtccctcttcggagggaacatcggag

SEQ ID NO: 17026 - RNA, 89 nt, synthetic construct
  misc_feature 1..89: note = engineered ribonucleic acid scaffold (ERS) sequence
  source 1..89: mol_type = other RNA
actggcgcttccatctgattaccctgagcgccatcaccagcgactatgtcgtagtgggtaaaggtccctcttcggagggaacatcaggg

SEQ ID NO: 17027 - RNA, 89 nt, synthetic construct
  misc_feature 1..89: note = engineered ribonucleic acid scaffold (ERS) sequence
  source 1..89: mol_type = other RNA
actggcgcttggatctgattaccctgagcgccatcaccagcgactatgtcgtagtgggtaaaggtccctcttcggagggaacatcaggg

SEQ ID NO: 17028 - RNA, 89 nt, synthetic construct
  misc_feature 1..89: note = engineered ribonucleic acid scaffold (ERS) sequence
  source 1..89: mol_type = other RNA
actggcgcttgtatctgattactctgagcgccatcaccagcgactatgtcgtagtgggtaaaggtccctcttcggagggaacatcagag

SEQ ID NO: 17029 - RNA, 89 nt, synthetic construct
  misc_feature 1..89: note = engineered ribonucleic acid scaffold (ERS) sequence
  source 1..89: mol_type = other RNA
actggcgcttttatctgattactttgagcgccatcaccagcgactatgtcgtagtgggtaaaggtccctcttcggagggaacatcagag

SEQ ID NO: 17030 - RNA, 89 nt, synthetic construct
  misc_feature 1..89: note = engineered ribonucleic acid scaffold (ERS) sequence
  source 1..89: mol_type = other RNA
actggcgcttttatctgattactctgagcgccatcaccagcgactatgtcgtagtgggtaaaggtccctcttcggagggaacatcagag

SEQ ID NO: 17031 - RNA, 89 nt, synthetic construct
  misc_feature 1..89: note = engineered ribonucleic acid scaffold (ERS) sequence
  source 1..89: mol_type = other RNA
actggcgcttttatctgattactctgagcgccatcaccagcgactatgtcgtagtgggtaaaggtccctcttcggagggaacatcaaag

SEQ ID NO: 17032 - RNA, 89 nt, synthetic construct
  misc_feature 1..89: note = engineered ribonucleic acid scaffold (ERS) sequence
  source 1..89: mol_type = other RNA
actggcgcttctatctgattactctgagcgccatcaccagcgactatgtcgtagtgggtaaaggtccctcttcggagggaacctcagag

SEQ ID NO: 17033 - RNA, 89 nt, synthetic construct
  misc_feature 1..89: note = engineered ribonucleic acid scaffold (ERS) sequence
  source 1..89: mol_type = other RNA
actggcgcttctatctgattactctgagcgccatcaccagcgactatgtcgtagtgggtaaaggtccctcttcggagggaacgtcagag

SEQ ID NO: 17034 - RNA, 89 nt, synthetic construct
  misc_feature 1..89: note = engineered ribonucleic acid scaffold (ERS) sequence
  source 1..89: mol_type = other RNA
actggcgcttctatctgattactctgagcgccatcaccagcgactatgtcgtagtgggtaaaggtccctcttcggagggaacatcaaag

SEQ ID NO: 17035 - RNA, 93 nt, synthetic construct
  misc_feature 1..93: note = engineered ribonucleic acid scaffold (ERS) sequence
  source 1..93: mol_type = other RNA
actggcgcttctatctgattactctcagcgccatcaccagcgactatgtcgtagtgggtaaaggtgacggtcttcggaccgtcaccatcagac

SEQ ID NO: 17036 - RNA, 93 nt, synthetic construct
  misc_feature 1..93: note = engineered ribonucleic acid scaffold (ERS) sequence
  source 1..93: mol_type = other RNA
actggcgcttctatctgattactttgagcgccatcaccagcgactatgtcgtagtgggtaaaggtgacggtcttcggaccgtcaccatcagag

SEQ ID NO: 17037 - RNA, 93 nt, synthetic construct
  misc_feature 1..93: note = engineered ribonucleic acid scaffold (ERS) sequence
  source 1..93: mol_type = other RNA
actggcgcttctatctgattactttgagcgccatcaccagcgactatgtcgtagtgggtaaaggtgacggtcttcggaccgtcaccatcaaag

SEQ ID NO: 17038 - RNA, 93 nt, synthetic construct
  misc_feature 1..93: note = engineered ribonucleic acid scaffold (ERS) sequence
  source 1..93: mol_type = other RNA
actggcgcttctatctgattagtctcagcgccatcaccagcgactatgtcgtagtgggtaaaggtgacggtcttcggaccgtcaccatgagac

SEQ ID NO: 17039 - RNA, 93 nt, synthetic construct
  misc_feature 1..93: note = engineered ribonucleic acid scaffold (ERS) sequence
  source 1..93: mol_type = other RNA
actggcgcttctatctgattagtctgagcgccatcaccagcgactatgtcgtagtgggtaaaggtgacggtcttcggaccgtcaccatcagac

SEQ ID NO: 17040 - RNA, 93 nt, synthetic construct
  misc_feature 1..93: note = engineered ribonucleic acid scaffold (ERS) sequence
  source 1..93: mol_type = other RNA
actggcgcttctatctgattactctcagcgccatcaccagcgactatgtcgtagtgggtaaaggtgacggtcttcggaccgtcaccatgagag

SEQ ID NO: 17041 - RNA, 93 nt, synthetic construct
  misc_feature 1..93: note = engineered ribonucleic acid scaffold (ERS) sequence
  source 1..93: mol_type = other RNA
actggcgctcccatctgattaccccgagcgccatcaccagcgactatgtcgtagtgggtaaaggtgacggtcttcggaccgtcaccatcgggg

SEQ ID NO: 17042 - RNA, 93 nt, synthetic construct
  misc_feature 1..93: note = engineered ribonucleic acid scaffold (ERS) sequence
  source 1..93: mol_type = other RNA
actggcgctcctatctgattactccgagcgccatcaccagcgactatgtcgtagtgggtaaaggtgacggtcttcggaccgtcaccatcggag

SEQ ID NO: 17043 - RNA, 93 nt, synthetic construct
  misc_feature 1..93: note = engineered ribonucleic acid scaffold (ERS) sequence
  source 1..93: mol_type = other RNA
actggcgctgggatctgattaccccgagcgccatcaccagcgactatgtcgtagtgggtaaaggtgacggtcttcggaccgtcaccatcgggg

SEQ ID NO: 17044 - RNA, 93 nt, synthetic construct
  misc_feature 1..93: note = engineered ribonucleic acid scaffold (ERS) sequence
  source 1..93: mol_type = other RNA
actggcgctggtatctgattactccgagcgccatcaccagcgactatgtcgtagtgggtaaaggtgacggtcttcggaccgtcaccatcggag

SEQ ID NO: 17045 - RNA, 93 nt, synthetic construct
  misc_feature 1..93: note = engineered ribonucleic acid scaffold (ERS) sequence
  source 1..93: mol_type = other RNA
actggcgcttccatctgattaccctgagcgccatcaccagcgactatgtcgtagtgggtaaaggtgacggtcttcggaccgtcaccatcaggg

SEQ ID NO: 17046 - RNA, 93 nt, synthetic construct
  misc_feature 1..93: note = engineered ribonucleic acid scaffold (ERS) sequence
  source 1..93: mol_type = other RNA
actggcgcttggatctgattaccctgagcgccatcaccagcgactatgtcgtagtgggtaaaggtgacggtcttcggaccgtcaccatcaggg

SEQ ID NO: 17047 - RNA, 93 nt, synthetic construct
  misc_feature 1..93: note = engineered ribonucleic acid scaffold (ERS) sequence
  source 1..93: mol_type = other RNA
actggcgcttgtatctgattactctgagcgccatcaccagcgactatgtcgtagtgggtaaaggtgacggtcttcggaccgtcaccatcagag

SEQ ID NO: 17048 - RNA, 93 nt, synthetic construct
  misc_feature 1..93: note = engineered ribonucleic acid scaffold (ERS) sequence
  source 1..93: mol_type = other RNA
actggcgcttttatctgattactttgagcgccatcaccagcgactatgtcgtagtgggtaaaggtgacggtcttcggaccgtcaccatcagag

SEQ ID NO: 17049 - RNA, 93 nt, synthetic construct
  misc_feature 1..93: note = engineered ribonucleic acid scaffold (ERS) sequence
  source 1..93: mol_type = other RNA
actggcgcttttatctgattactctgagcgccatcaccagcgactatgtcgtagtgggtaaaggtgacggtcttcggaccgtcaccatcagag

SEQ ID NO: 17050 - RNA, 93 nt, synthetic construct
  misc_feature 1..93: note = engineered ribonucleic acid scaffold (ERS) sequence
  source 1..93: mol_type = other RNA
actggcgcttttatctgattactctgagcgccatcaccagcgactatgtcgtagtgggtaaaggtgacggtcttcggaccgtcaccatcaaag

SEQ ID NO: 17051 - RNA, 93 nt, synthetic construct
  misc_feature 1..93: note = engineered ribonucleic acid scaffold (ERS) sequence
  source 1..93: mol_type = other RNA
actggcgcttctatctgattactctgagcgccatcaccagcgactatgtcgtagtgggtaaaggtgacggtcttcggaccgtcaccctcagag

SEQ ID NO: 17052 - RNA, 93 nt, synthetic construct
  misc_feature 1..93: note = engineered ribonucleic acid scaffold (ERS) sequence
  source 1..93: mol_type = other RNA
actggcgcttctatctgattactctgagcgccatcaccagcgactatgtcgtagtgggtaaaggtgacggtcttcggaccgtcaccgtcagag

SEQ ID NO: 17053 - RNA, 93 nt, synthetic construct
  misc_feature 1..93: note = engineered ribonucleic acid scaffold (ERS) sequence
  source 1..93: mol_type = other RNA
actggcgcttctatctgattactctgagcgccatcaccagcgactatgtcgtagtgggtaaaggtgacggtcttcggaccgtcaccatcaaag

SEQ ID NO: 17054 - RNA, 91 nt, synthetic construct
  misc_feature 1..91: note = engineered ribonucleic acid scaffold (ERS) sequence
  source 1..91: mol_type = other RNA
actggcgcttctatctgattactctcagcgccatcaccagcgactatgtcgtagtgggtaaagtctccctcttcggagggaggcatcagac

SEQ ID NO: 17055 - RNA, 91 nt, synthetic construct
  misc_feature 1..91: note = engineered ribonucleic acid scaffold (ERS) sequence
  source 1..91: mol_type = other RNA
actggcgcttctatctgattactttgagcgccatcaccagcgactatgtcgtagtgggtaaagtctccctcttcggagggaggcatcagag

SEQ ID NO: 17056 - RNA, 91 nt, synthetic construct
  misc_feature 1..91: note = engineered ribonucleic acid scaffold (ERS) sequence
  source 1..91: mol_type = other RNA
actggcgcttctatctgattactttgagcgccatcaccagcgactatgtcgtagtgggtaaagtctccctcttcggagggaggcatcaaag

SEQ ID NO: 17057 - RNA, 91 nt, synthetic construct
  misc_feature 1..91: note = engineered ribonucleic acid scaffold (ERS) sequence
  source 1..91: mol_type = other RNA
actggcgcttctatctgattagtctcagcgccatcaccagcgactatgtcgtagtgggtaaagtctccctcttcggagggaggcatgagac

SEQ ID NO: 17058 - RNA, 91 nt, synthetic construct
  misc_feature 1..91: note = engineered ribonucleic acid scaffold (ERS) sequence
  source 1..91: mol_type = other RNA
actggcgcttctatctgattagtctgagcgccatcaccagcgactatgtcgtagtgggtaaagtctccctcttcggagggaggcatcagac

SEQ ID NO: 17059 - RNA, 91 nt, synthetic construct
  misc_feature 1..91: note = engineered ribonucleic acid scaffold (ERS) sequence
  source 1..91: mol_type = other RNA
actggcgcttctatctgattactctcagcgccatcaccagcgactatgtcgtagtgggtaaagtctccctcttcggagggaggcatgagag

SEQ ID NO: 17060 - RNA, 91 nt, synthetic construct
  misc_feature 1..91: note = engineered ribonucleic acid scaffold (ERS) sequence
  source 1..91: mol_type = other RNA
actggcgctcccatctgattaccccgagcgccatcaccagcgactatgtcgtagtgggtaaagtctccctcttcggagggaggcatcgggg

SEQ ID NO: 17061 - RNA, 91 nt, synthetic construct
  misc_feature 1..91: note = engineered ribonucleic acid scaffold (ERS) sequence
  source 1..91: mol_type = other RNA
actggcgctcctatctgattactccgagcgccatcaccagcgactatgtcgtagtgggtaaagtctccctcttcggagggaggcatcggag

SEQ ID NO: 17062 - RNA, 91 nt, synthetic construct
  misc_feature 1..91: note = engineered ribonucleic acid scaffold (ERS) sequence
  source 1..91: mol_type = other RNA
actggcgctgggatctgattaccccgagcgccatcaccagcgactatgtcgtagtgggtaaagtctccctcttcggagggaggcatcgggg

SEQ ID NO: 17063 - RNA, 91 nt, synthetic construct
  misc_feature 1..91: note = engineered ribonucleic acid scaffold (ERS) sequence
  source 1..91: mol_type = other RNA
actggcgctggtatctgattactccgagcgccatcaccagcgactatgtcgtagtgggtaaagtctccctcttcggagggaggcatcggag

SEQ ID NO: 17064 - RNA, 91 nt, synthetic construct
  misc_feature 1..91: note = engineered ribonucleic acid scaffold (ERS) sequence
  source 1..91: mol_type = other RNA
actggcgcttccatctgattaccctgagcgccatcaccagcgactatgtcgtagtgggtaaagtctccctcttcggagggaggcatcaggg

SEQ ID NO: 17065 - RNA, 91 nt, synthetic construct
  misc_feature 1..91: note = engineered ribonucleic acid scaffold (ERS) sequence
  source 1..91: mol_type = other RNA
actggcgcttggatctgattaccctgagcgccatcaccagcgactatgtcgtagtgggtaaagtctccctcttcggagggaggcatcaggg

SEQ ID NO: 17066 - RNA, 91 nt, synthetic construct
  misc_feature 1..91: note = engineered ribonucleic acid scaffold (ERS) sequence
  source 1..91: mol_type = other RNA
actggcgcttgtatctgattactctgagcgccatcaccagcgactatgtcgtagtgggtaaagtctccctcttcggagggaggcatcagag

SEQ ID NO: 17067 - RNA, 91 nt, synthetic construct
  misc_feature 1..91: note = engineered ribonucleic acid scaffold (ERS) sequence
  source 1..91: mol_type = other RNA
actggcgcttttatctgattactttgagcgccatcaccagcgactatgtcgtagtgggtaaagtctccctcttcggagggaggcatcagag

SEQ ID NO: 17068 - RNA, 91 nt, synthetic construct
  misc_feature 1..91: note = engineered ribonucleic acid scaffold (ERS) sequence
  source 1..91: mol_type = other RNA
actggcgcttttatctgattactctgagcgccatcaccagcgactatgtcgtagtgggtaaagtctccctcttcggagggaggcatcagag

SEQ ID NO: 17069 - RNA, 91 nt, synthetic construct
  misc_feature 1..91: note = engineered ribonucleic acid scaffold (ERS) sequence
  source 1..91: mol_type = other RNA
actggcgcttttatctgattactctgagcgccatcaccagcgactatgtcgtagtgggtaaagtctccctcttcggagggaggcatcaaag

SEQ ID NO: 17070 - RNA, 91 nt, synthetic construct
  misc_feature 1..91: note = engineered ribonucleic acid scaffold (ERS) sequence
  source 1..91: mol_type = other RNA
actggcgcttctatctgattactctgagcgccatcaccagcgactatgtcgtagtgggtaaagtctccctcttcggagggaggcctcagag

SEQ ID NO: 17071 - RNA, 91 nt, synthetic construct
  misc_feature 1..91: note = engineered ribonucleic acid scaffold (ERS) sequence
  source 1..91: mol_type = other RNA
actggcgcttctatctgattactctgagcgccatcaccagcgactatgtcgtagtgggtaaagtctccctcttcggagggaggcgtcagag

SEQ ID NO: 17072 - RNA, 91 nt, synthetic construct
  misc_feature 1..91: note = engineered ribonucleic acid scaffold (ERS) sequence
  source 1..91: mol_type = other RNA
actggcgcttctatctgattactctgagcgccatcaccagcgactatgtcgtagtgggtaaagtctccctcttcggagggaggcatcaaag

SEQ ID NO: 17073 - RNA, 93 nt, synthetic construct
  misc_feature 1..93: note = engineered ribonucleic acid scaffold (ERS) sequence
  source 1..93: mol_type = other RNA
actggcgcttctatctgattactctcagcgccatcaccagcgactatgtcgtagtgggtaaagtgcgcccgcttcggcgggcgcacatcagac

SEQ ID NO: 17074 - RNA, 93 nt, synthetic construct
  misc_feature 1..93: note = engineered ribonucleic acid scaffold (ERS) sequence
  source 1..93: mol_type = other RNA
actggcgcttctatctgattactttgagcgccatcaccagcgactatgtcgtagtgggtaaagtgcgcccgcttcggcgggcgcacatcagag

SEQ ID NO: 17075 - RNA, 93 nt, synthetic construct
  misc_feature 1..93: note = engineered ribonucleic acid scaffold (ERS) sequence
  source 1..93: mol_type = other RNA
actggcgcttctatctgattactttgagcgccatcaccagcgactatgtcgtagtgggtaaagtgcgcccgcttcggcgggcgcacatcaaag

SEQ ID NO: 17076 - RNA, 93 nt, synthetic construct
  misc_feature 1..93: note = engineered ribonucleic acid scaffold (ERS) sequence
  source 1..93: mol_type = other RNA
actggcgcttctatctgattagtctcagcgccatcaccagcgactatgtcgtagtgggtaaagtgcgcccgcttcggcgggcgcacatgagac

SEQ ID NO: 17077 - RNA, 93 nt, synthetic construct
  misc_feature 1..93: note = engineered ribonucleic acid scaffold (ERS) sequence
  source 1..93: mol_type = other RNA
actggcgcttctatctgattagtctgagcgccatcaccagcgactatgtcgtagtgggtaaagtgcgcccgcttcggcgggcgcacatcagac

SEQ ID NO: 17078 - RNA, 93 nt, synthetic construct
  misc_feature 1..93: note = engineered ribonucleic acid scaffold (ERS) sequence
  source 1..93: mol_type = other RNA
actggcgcttctatctgattactctcagcgccatcaccagcgactatgtcgtagtgggtaaagtgcgcccgcttcggcgggcgcacatgagag

SEQ ID NO: 17079 - RNA, 93 nt, synthetic construct
  misc_feature 1..93: note = engineered ribonucleic acid scaffold (ERS) sequence
  source 1..93: mol_type = other RNA
actggcgctcccatctgattaccccgagcgccatcaccagcgactatgtcgtagtgggtaaagtgcgcccgcttcggcgggcgcacatcgggg

SEQ ID NO: 17080 - RNA, 93 nt, synthetic construct
  misc_feature 1..93: note = engineered ribonucleic acid scaffold (ERS) sequence
  source 1..93: mol_type = other RNA
actggcgctcctatctgattactccgagcgccatcaccagcgactatgtcgtagtgggtaaagtgcgcccgcttcggcgggcgcacatcggag

SEQ ID NO: 17081 - RNA, 93 nt, synthetic construct
  misc_feature 1..93: note = engineered ribonucleic acid scaffold (ERS) sequence
  source 1..93: mol_type = other RNA
actggcgctgggatctgattaccccgagcgccatcaccagcgactatgtcgtagtgggtaaagtgcgcccgcttcggcgggcgcacatcgggg

SEQ ID NO: 17082 - RNA, 93 nt, synthetic construct
  misc_feature 1..93: note = engineered ribonucleic acid scaffold (ERS) sequence
  source 1..93: mol_type = other RNA
actggcgctggtatctgattactccgagcgccatcaccagcgactatgtcgtagtgggtaaagtgcgcccgcttcggcgggcgcacatcggag

SEQ ID NO: 17083 - RNA, 93 nt, synthetic construct
  misc_feature 1..93: note = engineered ribonucleic acid scaffold (ERS) sequence
  source 1..93: mol_type = other RNA
actggcgcttccatctgattaccctgagcgccatcaccagcgactatgtcgtagtgggtaaagtgcgcccgcttcggcgggcgcacatcaggg

SEQ ID NO: 17084 - RNA, 93 nt, synthetic construct
  misc_feature 1..93: note = engineered ribonucleic acid scaffold (ERS) sequence
  source 1..93: mol_type = other RNA
actggcgcttggatctgattaccctgagcgccatcaccagcgactatgtcgtagtgggtaaagtgcgcccgcttcggcgggcgcacatcaggg

SEQ ID NO: 17085 - RNA, 93 nt, synthetic construct
  misc_feature 1..93: note = engineered ribonucleic acid scaffold (ERS) sequence
  source 1..93: mol_type = other RNA
actggcgcttgtatctgattactctgagcgccatcaccagcgactatgtcgtagtgggtaaagtgcgcccgcttcggcgggcgcacatcagag

SEQ ID NO: 17086 - RNA, 93 nt, synthetic construct
  misc_feature 1..93: note = engineered ribonucleic acid scaffold (ERS) sequence
  source 1..93: mol_type = other RNA
actggcgcttttatctgattactttgagcgccatcaccagcgactatgtcgtagtgggtaaagtgcgcccgcttcggcgggcgcacatcagag

SEQ ID NO: 17087 - RNA, 93 nt, synthetic construct
  misc_feature 1..93: note = engineered ribonucleic acid scaffold (ERS) sequence
  source 1..93: mol_type = other RNA
actggcgcttttatctgattactctgagcgccatcaccagcgactatgtcgtagtgggtaaagtgcgcccgcttcggcgggcgcacatcagag

SEQ ID NO: 17088 - RNA, 93 nt, synthetic construct
  misc_feature 1..93: note = engineered ribonucleic acid scaffold (ERS) sequence
  source 1..93: mol_type = other RNA
actggcgcttttatctgattactctgagcgccatcaccagcgactatgtcgtagtgggtaaagtgcgcccgcttcggcgggcgcacatcaaag

SEQ ID NO: 17089 - RNA, 93 nt, synthetic construct
  misc_feature 1..93: note = engineered ribonucleic acid scaffold (ERS) sequence
  source 1..93: mol_type = other RNA
actggcgcttctatctgattactctgagcgccatcaccagcgactatgtcgtagtgggtaaagtgcgcccgcttcggcgggcgcacctcagag

SEQ ID NO: 17090 - RNA, 93 nt, synthetic construct
  misc_feature 1..93: note = engineered ribonucleic acid scaffold (ERS) sequence
  source 1..93: mol_type = other RNA
actggcgcttctatctgattactctgagcgccatcaccagcgactatgtcgtagtgggtaaagtgcgcccgcttcggcgggcgcacgtcagag

SEQ ID NO: 17091 - RNA, 93 nt, synthetic construct
  misc_feature 1..93: note = engineered ribonucleic acid scaffold (ERS) sequence
  source 1..93: mol_type = other RNA
actggcgcttctatctgattactctgagcgccatcaccagcgactatgtcgtagtgggtaaagtgcgcccgcttcggcgggcgcacatcaaag

SEQ ID NO: 17092 - RNA, 93 nt, synthetic construct
  misc_feature 1..93: note = engineered ribonucleic acid scaffold (ERS) sequence
  source 1..93: mol_type = other RNA
actggcgcttctatctgattactctcagcgccatcaccagcgactatgtcgtagtgggtaaataatgaaaacttcggttttcattaatcagac

SEQ ID NO: 17093 - RNA, 93 nt, synthetic construct
  misc_feature 1..93: note = engineered ribonucleic acid scaffold (ERS) sequence
  source 1..93: mol_type = other RNA
actggcgcttctatctgattactttgagcgccatcaccagcgactatgtcgtagtgggtaaataatgaaaacttcggttttcattaatcagag

SEQ ID NO: 17094 - RNA, 93 nt, synthetic construct
  misc_feature 1..93: note = engineered ribonucleic acid scaffold (ERS) sequence
  source 1..93: mol_type = other RNA
actggcgcttctatctgattactttgagcgccatcaccagcgactatgtcgtagtgggtaaataatgaaaacttcggttttcattaatcaaag

SEQ ID NO: 17095 - RNA, 93 nt, synthetic construct
  misc_feature 1..93: note = engineered ribonucleic acid scaffold (ERS) sequence
  source 1..93: mol_type = other RNA
actggcgcttctatctgattagtctcagcgccatcaccagcgactatgtcgtagtgggtaaataatgaaaacttcggttttcattaatgagac

SEQ ID NO: 17096 - RNA, 93 nt, synthetic construct
  misc_feature 1..93: note = engineered ribonucleic acid scaffold (ERS) sequence
  source 1..93: mol_type = other RNA
actggcgcttctatctgattagtctgagcgccatcaccagcgactatgtcgtagtgggtaaataatgaaaacttcggttttcattaatcagac

SEQ ID NO: 17097 - RNA, 93 nt, synthetic construct
  misc_feature 1..93: note = engineered ribonucleic acid scaffold (ERS) sequence
  source 1..93: mol_type = other RNA
actggcgcttctatctgattactctcagcgccatcaccagcgactatgtcgtagtgggtaaataatgaaaacttcggttttcattaatgagag

SEQ ID NO: 17098 - RNA, 93 nt, synthetic construct
  misc_feature 1..93: note = engineered ribonucleic acid scaffold (ERS) sequence
  source 1..93: mol_type = other RNA
actggcgctcccatctgattaccccgagcgccatcaccagcgactatgtcgtagtgggtaaataatgaaaacttcggttttcattaatcgggg

SEQ ID NO: 17099 - RNA, 93 nt, synthetic construct
  misc_feature 1..93: note = engineered ribonucleic acid scaffold (ERS) sequence
  source 1..93: mol_type = other RNA
actggcgctcctatctgattactccgagcgccatcaccagcgactatgtcgtagtgggtaaataatgaaaacttcggttttcattaatcggag

SEQ ID NO: 17100 - RNA, 93 nt, synthetic construct
  misc_feature 1..93: note = engineered ribonucleic acid scaffold (ERS) sequence
  source 1..93: mol_type = other RNA
actggcgctgggatctgattaccccgagcgccatcaccagcgactatgtcgtagtgggtaaataatgaaaacttcggttttcattaatcgggg

SEQ ID NO: 17101 - RNA, 93 nt, synthetic construct
  misc_feature 1..93: note = engineered ribonucleic acid scaffold (ERS) sequence
  source 1..93: mol_type = other RNA
actggcgctggtatctgattactccgagcgccatcaccagcgactatgtcgtagtgggtaaataatgaaaacttcggttttcattaatcggag

SEQ ID NO: 17102 - RNA, 93 nt, synthetic construct
  misc_feature 1..93: note = engineered ribonucleic acid scaffold (ERS) sequence
  source 1..93: mol_type = other RNA
actggcgcttccatctgattaccctgagcgccatcaccagcgactatgtcgtagtgggtaaataatgaaaacttcggttttcattaatcaggg

SEQ ID NO: 17103 - RNA, 93 nt, synthetic construct
  misc_feature 1..93: note = engineered ribonucleic acid scaffold (ERS) sequence
  source 1..93: mol_type = other RNA
actggcgcttggatctgattaccctgagcgccatcaccagcgactatgtcgtagtgggtaaataatgaaaacttcggttttcattaatcaggg

SEQ ID NO: 17104 - RNA, 93 nt, synthetic construct
  misc_feature 1..93: note = engineered ribonucleic acid scaffold (ERS) sequence
  source 1..93: mol_type = other RNA
actggcgcttgtatctgattactctgagcgccatcaccagcgactatgtcgtagtgggtaaataatgaaaacttcggttttcattaatcagag

SEQ ID NO: 17105 - RNA, 93 nt, synthetic construct
  misc_feature 1..93: note = engineered ribonucleic acid scaffold (ERS) sequence
  source 1..93: mol_type = other RNA
actggcgcttttatctgattactttgagcgccatcaccagcgactatgtcgtagtgggtaaataatgaaaacttcggttttcattaatcagag

SEQ ID NO: 17106 - RNA, 93 nt, synthetic construct
  misc_feature 1..93: note = engineered ribonucleic acid scaffold (ERS) sequence
  source 1..93: mol_type = other RNA
actggcgcttttatctgattactctgagcgccatcaccagcgactatgtcgtagtgggtaaataatgaaaacttcggttttcattaatcagag

SEQ ID NO: 17107 - RNA, 93 nt, synthetic construct
  misc_feature 1..93: note = engineered ribonucleic acid scaffold (ERS) sequence
  source 1..93: mol_type = other RNA
actggcgcttttatctgattactctgagcgccatcaccagcgactatgtcgtagtgggtaaataatgaaaacttcggttttcattaatcaaag

SEQ ID NO: 17108 - RNA, 93 nt, synthetic construct
  misc_feature 1..93: note = engineered ribonucleic acid scaffold (ERS) sequence
  source 1..93: mol_type = other RNA
actggcgcttctatctgattactctgagcgccatcaccagcgactatgtcgtagtgggtaaataatgaaaacttcggttttcattactcagag

SEQ ID NO: 17109 - RNA, 93 nt, synthetic construct
  misc_feature 1..93: note = engineered ribonucleic acid scaffold (ERS) sequence
  source 1..93: mol_type = other RNA
actggcgcttctatctgattactctgagcgccatcaccagcgactatgtcgtagtgggtaaataatgaaaacttcggttttcattagtcagag

SEQ ID NO: 17110 - RNA, 93 nt, synthetic construct
  misc_feature 1..93: note = engineered ribonucleic acid scaffold (ERS) sequence
  source 1..93: mol_type = other RNA
actggcgcttctatctgattactctgagcgccatcaccagcgactatgtcgtagtgggtaaataatgaaaacttcggttttcattaatcaaag

SEQ ID NO: 17111 - RNA, 93 nt, synthetic construct
  misc_feature 1..93: note = engineered ribonucleic acid scaffold (ERS) sequence
  source 1..93: mol_type = other RNA
actggcgcttctatctgattactctcagcgccatcaccagcgactatgtcgtagtgggtaaatcgtaagaacttcggttcttacgaatcagac

SEQ ID NO: 17112 - RNA, 93 nt, synthetic construct
  misc_feature 1..93: note = engineered ribonucleic acid scaffold (ERS) sequence
  source 1..93: mol_type = other RNA
actggcgcttctatctgattactttgagcgccatcaccagcgactatgtcgtagtgggtaaatcgtaagaacttcggttcttacgaatcagag

SEQ ID NO: 17113 - RNA, 93 nt, synthetic construct
  misc_feature 1..93: note = engineered ribonucleic acid scaffold (ERS) sequence
  source 1..93: mol_type = other RNA
actggcgcttctatctgattactttgagcgccatcaccagcgactatgtcgtagtgggtaaatcgtaagaacttcggttcttacgaatcaaag

SEQ ID NO: 17114 - RNA, 93 nt, synthetic construct
  misc_feature 1..93: note = engineered ribonucleic acid scaffold (ERS) sequence
  source 1..93: mol_type = other RNA
actggcgcttctatctgattagtctcagcgccatcaccagcgactatgtcgtagtgggtaaatcgtaagaacttcggttcttacgaatgagac

SEQ ID NO: 17115 - RNA, 93 nt, synthetic construct
  misc_feature 1..93: note = engineered ribonucleic acid scaffold (ERS) sequence
  source 1..93: mol_type = other RNA
actggcgcttctatctgattagtctgagcgccatcaccagcgactatgtcgtagtgggtaaatcgtaagaacttcggttcttacgaatcagac

SEQ ID NO: 17116 - RNA, 93 nt, synthetic construct
  misc_feature 1..93: note = engineered ribonucleic acid scaffold (ERS) sequence
  source 1..93: mol_type = other RNA
actggcgcttctatctgattactctcagcgccatcaccagcgactatgtcgtagtgggtaaatcgtaagaacttcggttcttacgaatgagag

SEQ ID NO: 17117 - RNA, 93 nt, synthetic construct
  misc_feature 1..93: note = engineered ribonucleic acid scaffold (ERS) sequence
  source 1..93: mol_type = other RNA
actggcgctcccatctgattaccccgagcgccatcaccagcgactatgtcgtagtgggtaaatcgtaagaacttcggttcttacgaatcgggg

SEQ ID NO: 17118 - RNA, 93 nt, synthetic construct
  misc_feature 1..93: note = engineered ribonucleic acid scaffold (ERS) sequence
  source 1..93: mol_type = other RNA
actggcgctcctatctgattactccgagcgccatcaccagcgactatgtcgtagtgggtaaatcgtaagaacttcggttcttacgaatcggag

SEQ ID NO: 17119 - RNA, 93 nt, synthetic construct
  misc_feature 1..93: note = engineered ribonucleic acid scaffold (ERS) sequence
  source 1..93: mol_type = other RNA
actggcgctgggatctgattaccccgagcgccatcaccagcgactatgtcgtagtgggtaaatcgtaagaacttcggttcttacgaatcgggg

SEQ ID NO: 17120 - RNA, 93 nt, synthetic construct
  misc_feature 1..93: note = engineered ribonucleic acid scaffold (ERS) sequence
  source 1..93: mol_type = other RNA
actggcgctggtatctgattactccgagcgccatcaccagcgactatgtcgtagtgggtaaatcgtaagaacttcggttcttacgaatcggag

SEQ ID NO: 17121 - RNA, 93 nt, synthetic construct
  misc_feature 1..93: note = engineered ribonucleic acid scaffold (ERS) sequence
  source 1..93: mol_type = other RNA
actggcgcttccatctgattaccctgagcgccatcaccagcgactatgtcgtagtgggtaaatcgtaagaacttcggttcttacgaatcaggg

SEQ ID NO: 17122 - RNA, 93 nt, synthetic construct
  misc_feature 1..93: note = engineered ribonucleic acid scaffold (ERS) sequence
  source 1..93: mol_type = other RNA
actggcgcttggatctgattaccctgagcgccatcaccagcgactatgtcgtagtgggtaaatcgtaagaacttcggttcttacgaatcaggg

SEQ ID NO: 17123 - RNA, 93 nt, synthetic construct
  misc_feature 1..93: note = engineered ribonucleic acid scaffold (ERS) sequence
  source 1..93: mol_type = other RNA
actggcgcttgtatctgattactctgagcgccatcaccagcgactatgtcgtagtgggtaaatcgtaagaacttcggttcttacgaatcagag

SEQ ID NO: 17124 - RNA, 93 nt, synthetic construct
  misc_feature 1..93: note = engineered ribonucleic acid scaffold (ERS) sequence
  source 1..93: mol_type = other RNA
actggcgcttttatctgattactttgagcgccatcaccagcgactatgtcgtagtgggtaaatcgtaagaacttcggttcttacgaatcagag

SEQ ID NO: 17125 - RNA, 93 nt, synthetic construct
  misc_feature 1..93: note = engineered ribonucleic acid scaffold (ERS) sequence
  source 1..93: mol_type = other RNA
actggcgcttttatctgattactctgagcgccatcaccagcgactatgtcgtagtgggtaaatcgtaagaacttcggttcttacgaatcagag

SEQ ID NO: 17126 - RNA, 93 nt, synthetic construct
  misc_feature 1..93: note = engineered ribonucleic acid scaffold (ERS) sequence
  source 1..93: mol_type = other RNA
actggcgcttttatctgattactctgagcgccatcaccagcgactatgtcgtagtgggtaaatcgtaagaacttcggttcttacgaatcaaag

SEQ ID NO: 17127 - RNA, 93 nt, synthetic construct
  misc_feature 1..93: note = engineered ribonucleic acid scaffold (ERS) sequence
  source 1..93: mol_type = other RNA
actggcgcttctatctgattactctgagcgccatcaccagcgactatgtcgtagtgggtaaatcgtaagaacttcggttcttacgactcagag

SEQ ID NO: 17128 - RNA, 93 nt, synthetic construct
  misc_feature 1..93: note = engineered ribonucleic acid scaffold (ERS) sequence
  source 1..93: mol_type = other RNA
actggcgcttctatctgattactctgagcgccatcaccagcgactatgtcgtagtgggtaaatcgtaagaacttcggttcttacgagtcagag

SEQ ID NO: 17129 - RNA, 93 nt, synthetic construct
  misc_feature 1..93: note = engineered ribonucleic acid scaffold (ERS) sequence
  source 1..93: mol_type = other RNA
actggcgcttctatctgattactctgagcgccatcaccagcgactatgtcgtagtgggtaaatcgtaagaacttcggttcttacgaatcaaag

SEQ ID NO: 17130 - RNA, 93 nt, synthetic construct
  misc_feature 1..93: note = engineered ribonucleic acid scaffold (ERS) sequence
  source 1..93: mol_type = other RNA
actggcgcttctatctgattactctcagcgccatcaccagcgactatgtcgtagtgggtaaatggaagatgcttcggcatcttccaatcagac

SEQ ID NO: 17131 - RNA, 93 nt, synthetic construct
  misc_feature 1..93: note = engineered ribonucleic acid scaffold (ERS) sequence
  source 1..93: mol_type = other RNA
actggcgcttctatctgattactttgagcgccatcaccagcgactatgtcgtagtgggtaaatggaagatgcttcggcatcttccaatcagag

SEQ ID NO: 17132 - RNA, 93 nt, synthetic construct
  misc_feature 1..93: note = engineered ribonucleic acid scaffold (ERS) sequence
  source 1..93: mol_type = other RNA
actggcgcttctatctgattactttgagcgccatcaccagcgactatgtcgtagtgggtaaatggaagatgcttcggcatcttccaatcaaag

SEQ ID NO: 17133 - RNA, 93 nt, synthetic construct
  misc_feature 1..93: note = engineered ribonucleic acid scaffold (ERS) sequence
  source 1..93: mol_type = other RNA
actggcgcttctatctgattagtctcagcgccatcaccagcgactatgtcgtagtgggtaaatggaagatgcttcggcatcttccaatgagac

SEQ ID NO: 17134 - RNA, 93 nt, synthetic construct
  misc_feature 1..93: note = engineered ribonucleic acid scaffold (ERS) sequence
  source 1..93: mol_type = other RNA
actggcgcttctatctgattagtctgagcgccatcaccagcgactatgtcgtagtgggtaaatggaagatgcttcggcatcttccaatcagac

SEQ ID NO: 17135 - RNA, 93 nt, synthetic construct
  misc_feature 1..93: note = engineered ribonucleic acid scaffold (ERS) sequence
  source 1..93: mol_type = other RNA
actggcgcttctatctgattactctcagcgccatcaccagcgactatgtcgtagtgggtaaatggaagatgcttcggcatcttccaatgagag

SEQ ID NO: 17136 - RNA, 93 nt, synthetic construct
  misc_feature 1..93: note = engineered ribonucleic acid scaffold (ERS) sequence
  source 1..93: mol_type = other RNA
actggcgctcccatctgattaccccgagcgccatcaccagcgactatgtcgtagtgggtaaatggaagatgcttcggcatcttccaatcgggg

SEQ ID NO: 17137 - RNA, 93 nt, synthetic construct
  misc_feature 1..93: note = engineered ribonucleic acid scaffold (ERS) sequence
  source 1..93: mol_type = other RNA
actggcgctcctatctgattactccgagcgccatcaccagcgactatgtcgtagtgggtaaatggaagatgcttcggcatcttccaatcggag

SEQ ID NO: 17138 - RNA, 93 nt, synthetic construct
  misc_feature 1..93: note = engineered ribonucleic acid scaffold (ERS) sequence
  source 1..93: mol_type = other RNA
actggcgctgggatctgattaccccgagcgccatcaccagcgactatgtcgtagtgggtaaatggaagatgcttcggcatcttccaatcgggg

SEQ ID NO: 17139 - RNA, 93 nt, synthetic construct
  misc_feature 1..93: note = engineered ribonucleic acid scaffold (ERS) sequence
  source 1..93: mol_type = other RNA
actggcgctggtatctgattactccgagcgccatcaccagcgactatgtcgtagtgggtaaatggaagatgcttcggcatcttccaatcggag

SEQ ID NO: 17140 - RNA, 93 nt, synthetic construct
  misc_feature 1..93: note = engineered ribonucleic acid scaffold (ERS) sequence
  source 1..93: mol_type = other RNA
actggcgcttccatctgattaccctgagcgccatcaccagcgactatgtcgtagtgggtaaatggaagatgcttcggcatcttccaatcaggg

SEQ ID NO: 17141 - RNA, 93 nt, synthetic construct
  misc_feature 1..93: note = engineered ribonucleic acid scaffold (ERS) sequence
  source 1..93: mol_type = other RNA
actggcgcttggatctgattaccctgagcgccatcaccagcgactatgtcgtagtgggtaaatggaagatgcttcggcatcttccaatcaggg

SEQ ID NO: 17142 - RNA, 93 nt, synthetic construct
  misc_feature 1..93: note = engineered ribonucleic acid scaffold (ERS) sequence
  source 1..93: mol_type = other RNA
actggcgcttgtatctgattactctgagcgccatcaccagcgactatgtcgtagtgggtaaatggaagatgcttcggcatcttccaatcagag

SEQ ID NO: 17143 - RNA, 93 nt, synthetic construct
  misc_feature 1..93: note = engineered ribonucleic acid scaffold (ERS) sequence
  source 1..93: mol_type = other RNA
actggcgcttttatctgattactttgagcgccatcaccagcgactatgtcgtagtgggtaaatggaagatgcttcggcatcttccaatcagag

SEQ ID NO: 17144 - RNA, 93 nt, synthetic construct
  misc_feature 1..93: note = engineered ribonucleic acid scaffold (ERS) sequence
  source 1..93: mol_type = other RNA
actggcgcttttatctgattactctgagcgccatcaccagcgactatgtcgtagtgggtaaatggaagatgcttcggcatcttccaatcagag

SEQ ID NO: 17145 - RNA, 93 nt, synthetic construct
  misc_feature 1..93: note = engineered ribonucleic acid scaffold (ERS) sequence
  source 1..93: mol_type = other RNA
actggcgcttttatctgattactctgagcgccatcaccagcgactatgtcgtagtgggtaaatggaagatgcttcggcatcttccaatcaaag

SEQ ID NO: 17146 - RNA, 93 nt, synthetic construct
  misc_feature 1..93: note = engineered ribonucleic acid scaffold (ERS) sequence
  source 1..93: mol_type = other RNA
actggcgcttctatctgattactctgagcgccatcaccagcgactatgtcgtagtgggtaaatggaagatgcttcggcatcttccactcagag

SEQ ID NO: 17147 - RNA, 93 nt, synthetic construct
  misc_feature 1..93: note = engineered ribonucleic acid scaffold (ERS) sequence
  source 1..93: mol_type = other RNA
actggcgcttctatctgattactctgagcgccatcaccagcgactatgtcgtagtgggtaaatggaagatgcttcggcatcttccagtcagag

SEQ ID NO: 17148 - RNA, 93 nt, synthetic construct
  misc_feature 1..93: note = engineered ribonucleic acid scaffold (ERS) sequence
  source 1..93: mol_type = other RNA
actggcgcttctatctgattactctgagcgccatcaccagcgactatgtcgtagtgggtaaatggaagatgcttcggcatcttccaatcaaag

SEQ ID NO: 17149 - RNA, 97 nt, synthetic construct
  misc_feature 1..97: note = engineered ribonucleic acid scaffold (ERS) sequence
  source 1..97: mol_type = other RNA
actggcgcttctatctgattactctcagcgccatcaccagcgactatgtcgtagtgggtaaagcccttacggacttcggtccgtaagggcatcagac

SEQ ID NO: 17150 - RNA, 97 nt, synthetic construct
  misc_feature 1..97: note = engineered ribonucleic acid scaffold (ERS) sequence
  source 1..97: mol_type = other RNA
actggcgcttctatctgattactttgagcgccatcaccagcgactatgtcgtagtgggtaaagcccttacggacttcggtccgtaagggcatcagag

SEQ ID NO: 17151 - RNA, 97 nt, synthetic construct
  misc_feature 1..97: note = engineered ribonucleic acid scaffold (ERS) sequence
  source 1..97: mol_type = other RNA
actggcgcttctatctgattactttgagcgccatcaccagcgactatgtcgtagtgggtaaagcccttacggacttcggtccgtaagggcatcaaag

SEQ ID NO: 17152 - RNA, 97 nt, synthetic construct
  misc_feature 1..97: note = engineered ribonucleic acid scaffold (ERS) sequence
  source 1..97: mol_type = other RNA
actggcgcttctatctgattagtctcagcgccatcaccagcgactatgtcgtagtgggtaaagcccttacggacttcggtccgtaagggcatgagac

SEQ ID NO: 17153 - RNA, 97 nt, synthetic construct
  misc_feature 1..97: note = engineered ribonucleic acid scaffold (ERS) sequence
  source 1..97: mol_type = other RNA
actggcgcttctatctgattagtctgagcgccatcaccagcgactatgtcgtagtgggtaaagcccttacggacttcggtccgtaagggcatcagac

SEQ ID NO: 17154 - RNA, 97 nt, synthetic construct
  misc_feature 1..97: note = engineered ribonucleic acid scaffold (ERS) sequence
  source 1..97: mol_type = other RNA
actggcgcttctatctgattactctcagcgccatcaccagcgactatgtcgtagtgggtaaagcccttacggacttcggtccgtaagggcatgagag

SEQ ID NO: 17155 - RNA, 97 nt, synthetic construct
  misc_feature 1..97: note = engineered ribonucleic acid scaffold (ERS) sequence
  source 1..97: mol_type = other RNA
actggcgctcccatctgattaccccgagcgccatcaccagcgactatgtcgtagtgggtaaagcccttacggacttcggtccgtaagggcatcgggg

SEQ ID NO: 17156 - RNA, 97 nt, synthetic construct
  misc_feature 1..97: note = engineered ribonucleic acid scaffold (ERS) sequence
  source 1..97: mol_type = other RNA
actggcgctcctatctgattactccgagcgccatcaccagcgactatgtcgtagtgggtaaagcccttacggacttcggtccgtaagggcatcggag

SEQ ID NO: 17157 - RNA, 97 nt, synthetic construct
  misc_feature 1..97: note = engineered ribonucleic acid scaffold (ERS) sequence
  source 1..97: mol_type = other RNA
actggcgctgggatctgattaccccgagcgccatcaccagcgactatgtcgtagtgggtaaagcccttacggacttcggtccgtaagggcatcgggg

SEQ ID NO: 17158 - RNA, 97 nt, synthetic construct
  misc_feature 1..97: note = engineered ribonucleic acid scaffold (ERS) sequence
  source 1..97: mol_type = other RNA
actggcgctggtatctgattactccgagcgccatcaccagcgactatgtcgtagtgggtaaagcccttacggacttcggtccgtaagggcatcggag

SEQ ID NO: 17159 - RNA, 97 nt, synthetic construct
  misc_feature 1..97: note = engineered ribonucleic acid scaffold (ERS) sequence
  source 1..97: mol_type = other RNA
actggcgcttccatctgattaccctgagcgccatcaccagcgactatgtcgtagtgggtaaagcccttacggacttcggtccgtaagggcatcaggg

SEQ ID NO: 17160 - RNA, 97 nt, synthetic construct
  misc_feature 1..97: note = engineered ribonucleic acid scaffold (ERS) sequence
  source 1..97: mol_type = other RNA
actggcgcttggatctgattaccctgagcgccatcaccagcgactatgtcgtagtgggtaaagcccttacggacttcggtccgtaagggcatcaggg

SEQ ID NO: 17161 - RNA, 97 nt, synthetic construct
  misc_feature 1..97: note = engineered ribonucleic acid scaffold (ERS) sequence
  source 1..97: mol_type = other RNA
actggcgcttgtatctgattactctgagcgccatcaccagcgactatgtcgtagtgggtaaagcccttacggacttcggtccgtaagggcatcagag

SEQ ID NO: 17162 - RNA, 97 nt, synthetic construct
  misc_feature 1..97: note = engineered ribonucleic acid scaffold (ERS) sequence
  source 1..97: mol_type = other RNA
actggcgcttttatctgattactttgagcgccatcaccagcgactatgtcgtagtgggtaaagcccttacggacttcggtccgtaagggcatcagag

SEQ ID NO: 17163 - RNA, 97 nt, synthetic construct
  misc_feature 1..97: note = engineered ribonucleic acid scaffold (ERS) sequence
  source 1..97: mol_type = other RNA
actggcgcttttatctgattactctgagcgccatcaccagcgactatgtcgtagtgggtaaagcccttacggacttcggtccgtaagggcatcagag

SEQ ID NO: 17164 - RNA, 97 nt, synthetic construct
  misc_feature 1..97: note = engineered ribonucleic acid scaffold (ERS) sequence
  source 1..97: mol_type = other RNA
actggcgcttttatctgattactctgagcgccatcaccagcgactatgtcgtagtgggtaaagcccttacggacttcggtccgtaagggcatcaaag

SEQ ID NO: 17165 - RNA, 97 nt, synthetic construct
  misc_feature 1..97: note = engineered ribonucleic acid scaffold (ERS) sequence
  source 1..97: mol_type = other RNA
actggcgcttctatctgattactctgagcgccatcaccagcgactatgtcgtagtgggtaaagcccttacggacttcggtccgtaagggcctcagag

SEQ ID NO: 17166 - RNA, 97 nt, synthetic construct
  misc_feature 1..97: note = engineered ribonucleic acid scaffold (ERS) sequence
  source 1..97: mol_type = other RNA
actggcgcttctatctgattactctgagcgccatcaccagcgactatgtcgtagtgggtaaagcccttacggacttcggtccgtaagggcgtcagag

SEQ ID NO: 17167 - RNA, 97 nt, synthetic construct
  misc_feature 1..97: note = engineered ribonucleic acid scaffold (ERS) sequence
  source 1..97: mol_type = other RNA
actggcgcttctatctgattactctgagcgccatcaccagcgactatgtcgtagtgggtaaagcccttacggacttcggtccgtaagggcatcaaag

SEQ ID NO: 17168 - RNA, 99 nt, synthetic construct
  misc_feature 1..99: note = engineered ribonucleic acid scaffold (ERS) sequence
  source 1..99: mol_type = other RNA
actggcgcttctatctgattactctcagcgccatcaccagcgactatgtcgtagtgggtaaagcctcttacggacttcggtccgtaagaggcatcagac

SEQ ID NO: 17169 - RNA, 99 nt, synthetic construct
  misc_feature 1..99: note = engineered ribonucleic acid scaffold (ERS) sequence
  source 1..99: mol_type = other RNA
actggcgcttctatctgattactttgagcgccatcaccagcgactatgtcgtagtgggtaaagcctcttacggacttcggtccgtaagaggcatcagag

SEQ ID NO: 17170 - RNA, 99 nt, synthetic construct
  misc_feature 1..99: note = engineered ribonucleic acid scaffold (ERS) sequence
  source 1..99: mol_type = other RNA
actggcgcttctatctgattactttgagcgccatcaccagcgactatgtcgtagtgggtaaagcctcttacggacttcggtccgtaagaggcatcaaag

SEQ ID NO: 17171 - RNA, 99 nt, synthetic construct
  misc_feature 1..99: note = engineered ribonucleic acid scaffold (ERS) sequence
  source 1..99: mol_type = other RNA
actggcgcttctatctgattagtctcagcgccatcaccagcgactatgtcgtagtgggtaaagcctcttacggacttcggtccgtaagaggcatgagac

SEQ ID NO: 17172 - RNA, 99 nt, synthetic construct
  misc_feature 1..99: note = engineered ribonucleic acid scaffold (ERS) sequence
  source 1..99: mol_type = other RNA
actggcgcttctatctgattagtctgagcgccatcaccagcgactatgtcgtagtgggtaaagcctcttacggacttcggtccgtaagaggcatcagac

SEQ ID NO: 17173 - RNA, 99 nt, synthetic construct
  misc_feature 1..99: note = engineered ribonucleic acid scaffold (ERS) sequence
  source 1..99: mol_type = other RNA
actggcgcttctatctgattactctcagcgccatcaccagcgactatgtcgtagtgggtaaagcctcttacggacttcggtccgtaagaggcatgagag

SEQ ID NO: 17174 - RNA, 99 nt, synthetic construct
  misc_feature 1..99: note = engineered ribonucleic acid scaffold (ERS) sequence
  source 1..99: mol_type = other RNA
actggcgctcccatctgattaccccgagcgccatcaccagcgactatgtcgtagtgggtaaagcctcttacggacttcggtccgtaagaggcatcgggg

SEQ ID NO: 17175 - RNA, 99 nt, synthetic construct
  misc_feature 1..99: note = engineered ribonucleic acid scaffold (ERS) sequence
  source 1..99: mol_type = other RNA
actggcgctcctatctgattactccgagcgccatcaccagcgactatgtcgtagtgggtaaagcctcttacggacttcggtccgtaagaggcatcggag

SEQ ID NO: 17176 - RNA, 99 nt, synthetic construct
  misc_feature 1..99: note = engineered ribonucleic acid scaffold (ERS) sequence
  source 1..99: mol_type = other RNA
actggcgctgggatctgattaccccgagcgccatcaccagcgactatgtcgtagtgggtaaagcctcttacggacttcggtccgtaagaggcatcgggg

SEQ ID NO: 17177 - RNA, 99 nt, synthetic construct
  misc_feature 1..99: note = engineered ribonucleic acid scaffold (ERS) sequence
  source 1..99: mol_type = other RNA
actggcgctggtatctgattactccgagcgccatcaccagcgactatgtcgtagtgggtaaagcctcttacggacttcggtccgtaagaggcatcggag

SEQ ID NO: 17178 - RNA, 99 nt, synthetic construct
  misc_feature 1..99: note = engineered ribonucleic acid scaffold (ERS) sequence
  source 1..99: mol_type = other RNA
actggcgcttccatctgattaccctgagcgccatcaccagcgactatgtcgtagtgggtaaagcctcttacggacttcggtccgtaagaggcatcaggg

SEQ ID NO: 17179 - RNA, 99 nt, synthetic construct
  misc_feature 1..99: note = engineered ribonucleic acid scaffold (ERS) sequence
  source 1..99: mol_type = other RNA
actggcgcttggatctgattaccctgagcgccatcaccagcgactatgtcgtagtgggtaaagcctcttacggacttcggtccgtaagaggcatcaggg

SEQ ID NO: 17180 - RNA, 99 nt, synthetic construct
  misc_feature 1..99: note = engineered ribonucleic acid scaffold (ERS) sequence
  source 1..99: mol_type = other RNA
actggcgcttgtatctgattactctgagcgccatcaccagcgactatgtcgtagtgggtaaagcctcttacggacttcggtccgtaagaggcatcagag

SEQ ID NO: 17181 - RNA, 99 nt, synthetic construct
  misc_feature 1..99: note = engineered ribonucleic acid scaffold (ERS) sequence
  source 1..99: mol_type = other RNA
actggcgcttttatctgattactttgagcgccatcaccagcgactatgtcgtagtgggtaaagcctcttacggacttcggtccgtaagaggcatcagag

SEQ ID NO: 17182 - RNA, 99 nt, synthetic construct
  misc_feature 1..99: note = engineered ribonucleic acid scaffold (ERS) sequence
  source 1..99: mol_type = other RNA
actggcgcttttatctgattactctgagcgccatcaccagcgactatgtcgtagtgggtaaagcctcttacggacttcggtccgtaagaggcatcagag

SEQ ID NO: 17183 - RNA, 99 nt, synthetic construct
  misc_feature 1..99: note = engineered ribonucleic acid scaffold (ERS) sequence
  source 1..99: mol_type = other RNA
actggcgcttttatctgattactctgagcgccatcaccagcgactatgtcgtagtgggtaaagcctcttacggacttcggtccgtaagaggcatcaaag

SEQ ID NO: 17184 - RNA, 99 nt, synthetic construct
  misc_feature 1..99: note = engineered ribonucleic acid scaffold (ERS) sequence
  source 1..99: mol_type = other RNA
actggcgcttctatctgattactctgagcgccatcaccagcgactatgtcgtagtgggtaaagcctcttacggacttcggtccgtaagaggcctcagag

SEQ ID NO: 17185 - RNA, 99 nt, synthetic construct
  misc_feature 1..99: note = engineered ribonucleic acid scaffold (ERS) sequence
  source 1..99: mol_type = other RNA
actggcgcttctatctgattactctgagcgccatcaccagcgactatgtcgtagtgggtaaagcctcttacggacttcggtccgtaagaggcgtcagag

SEQ ID NO: 17186 - RNA, 99 nt, synthetic construct
  misc_feature 1..99: note = engineered ribonucleic acid scaffold (ERS) sequence
  source 1..99: mol_type = other RNA
actggcgcttctatctgattactctgagcgccatcaccagcgactatgtcgtagtgggtaaagcctcttacggacttcggtccgtaagaggcatcaaag

SEQ ID NO: 17187 - RNA, 99 nt, synthetic construct
  misc_feature 1..99: note = engineered ribonucleic acid scaffold (ERS) sequence
  source 1..99: mol_type = other RNA
actggcgcttctatctgattactctcagcgccatcaccagcgactatgtcgtagtgggtaaagccgcttagggacttcggtccctaagaggcatcagac

SEQ ID NO: 17188 - RNA, 99 nt, synthetic construct
  misc_feature 1..99: note = engineered ribonucleic acid scaffold (ERS) sequence
  source 1..99: mol_type = other RNA
actggcgcttctatctgattactttgagcgccatcaccagcgactatgtcgtagtgggtaaagccgcttagggacttcggtccctaagaggcatcagag

SEQ ID NO: 17189 - RNA, 99 nt, synthetic construct
  misc_feature 1..99: note = engineered ribonucleic acid scaffold (ERS) sequence
  source 1..99: mol_type = other RNA
actggcgcttctatctgattactttgagcgccatcaccagcgactatgtcgtagtgggtaaagccgcttagggacttcggtccctaagaggcatcaaag

SEQ ID NO: 17190 - RNA, 99 nt, synthetic construct
  misc_feature 1..99: note = engineered ribonucleic acid scaffold (ERS) sequence
  source 1..99: mol_type = other RNA
actggcgcttctatctgattagtctcagcgccatcaccagcgactatgtcgtagtgggtaaagccgcttagggacttcggtccctaagaggcatgagac

SEQ ID NO: 17191 - RNA, 99 nt, synthetic construct
  misc_feature 1..99: note = engineered ribonucleic acid scaffold (ERS) sequence
  source 1..99: mol_type = other RNA
actggcgcttctatctgattagtctgagcgccatcaccagcgactatgtcgtagtgggtaaagccgcttagggacttcggtccctaagaggcatcagac

SEQ ID NO: 17192 - RNA, 99 nt, synthetic construct
  misc_feature 1..99: note = engineered ribonucleic acid scaffold (ERS) sequence
  source 1..99: mol_type = other RNA
actggcgcttctatctgattactctcagcgccatcaccagcgactatgtcgtagtgggtaaagccgcttagggacttcggtccctaagaggcatgagag

SEQ ID NO: 17193 - RNA, 99 nt, synthetic construct
  misc_feature 1..99: note = engineered ribonucleic acid scaffold (ERS) sequence
  source 1..99: mol_type = other RNA
actggcgctcccatctgattaccccgagcgccatcaccagcgactatgtcgtagtgggtaaagccgcttagggacttcggtccctaagaggcatcgggg

SEQ ID NO: 17194 - RNA, 99 nt, synthetic construct
  misc_feature 1..99: note = engineered ribonucleic acid scaffold (ERS) sequence
  source 1..99: mol_type = other RNA
actggcgctcctatctgattactccgagcgccatcaccagcgactatgtcgtagtgggtaaagccgcttagggacttcggtccctaagaggcatcggag

SEQ ID NO: 17195 - RNA, 99 nt, synthetic construct
  misc_feature 1..99: note = engineered ribonucleic acid scaffold (ERS) sequence
  source 1..99: mol_type = other RNA
actggcgctgggatctgattaccccgagcgccatcaccagcgactatgtcgtagtgggtaaagccgcttagggacttcggtccctaagaggcatcgggg

SEQ ID NO: 17196 - RNA, 99 nt, synthetic construct
  misc_feature 1..99: note = engineered ribonucleic acid scaffold (ERS) sequence
  source 1..99: mol_type = other RNA
actggcgctggtatctgattactccgagcgccatcaccagcgactatgtcgtagtgggtaaagccgcttagggacttcggtccctaagaggcatcggag

SEQ ID NO: 17197 - RNA, 99 nt, synthetic construct
  misc_feature 1..99: note = engineered ribonucleic acid scaffold (ERS) sequence
  source 1..99: mol_type = other RNA
actggcgcttccatctgattaccctgagcgccatcaccagcgactatgtcgtagtgggtaaagccgcttagggacttcggtccctaagaggcatcaggg

SEQ ID NO: 17198 - RNA, 99 nt, synthetic construct
  misc_feature 1..99: note = engineered ribonucleic acid scaffold (ERS) sequence
  source 1..99: mol_type = other RNA
actggcgcttggatctgattaccctgagcgccatcaccagcgactatgtcgtagtgggtaaagccgcttagggacttcggtccctaagaggcatcaggg

SEQ ID NO: 17199 - RNA, 99 nt, synthetic construct
  misc_feature 1..99: note = engineered ribonucleic acid scaffold (ERS) sequence
  source 1..99: mol_type = other RNA
actggcgcttgtatctgattactctgagcgccatcaccagcgactatgtcgtagtgggtaaagccgcttagggacttcggtccctaagaggcatcagag

SEQ ID NO: 17200 - RNA, 99 nt, synthetic construct
  misc_feature 1..99: note = engineered ribonucleic acid scaffold (ERS) sequence
  source 1..99: mol_type = other RNA
actggcgcttttatctgattactttgagcgccatcaccagcgactatgtcgtagtgggtaaagccgcttagggacttcggtccctaagaggcatcagag

SEQ ID NO: 17201 - RNA, 99 nt, synthetic construct
  misc_feature 1..99: note = engineered ribonucleic acid scaffold (ERS) sequence
  source 1..99: mol_type = other RNA
actggcgcttttatctgattactctgagcgccatcaccagcgactatgtcgtagtgggtaaagccgcttagggacttcggtccctaagaggcatcagag

SEQ ID NO: 17202 - RNA, 99 nt, synthetic construct
  misc_feature 1..99: note = engineered ribonucleic acid scaffold (ERS) sequence
  source 1..99: mol_type = other RNA
actggcgcttttatctgattactctgagcgccatcaccagcgactatgtcgtagtgggtaaagccgcttagggacttcggtccctaagaggcatcaaag

SEQ ID NO: 17203 - RNA, 99 nt, synthetic construct
  misc_feature 1..99: note = engineered ribonucleic acid scaffold (ERS) sequence
  source 1..99: mol_type = other RNA
actggcgcttctatctgattactctgagcgccatcaccagcgactatgtcgtagtgggtaaagccgcttagggacttcggtccctaagaggcctcagag

SEQ ID NO: 17204 - RNA, 99 nt, synthetic construct
  misc_feature 1..99: note = engineered ribonucleic acid scaffold (ERS) sequence
  source 1..99: mol_type = other RNA
actggcgcttctatctgattactctgagcgccatcaccagcgactatgtcgtagtgggtaaagccgcttagggacttcggtccctaagaggcgtcagag

SEQ ID NO: 17205 - RNA, 99 nt, synthetic construct
  misc_feature 1..99: note = engineered ribonucleic acid scaffold (ERS) sequence
  source 1..99: mol_type = other RNA
actggcgcttctatctgattactctgagcgccatcaccagcgactatgtcgtagtgggtaaagccgcttagggacttcggtccctaagaggcatcaaag

SEQ ID NO: 17206 - RNA, 89 nt, synthetic construct
  misc_feature 1..89: note = engineered ribonucleic acid scaffold (ERS) sequence
  source 1..89: mol_type = other RNA
actggcgcttctatatctgattactctgagcgccatcaccagcgactatgtcgtagtgggtaaactccctcttcggagggagatcagag

SEQ ID NO: 17207 - RNA, 88 nt, synthetic construct
  misc_feature 1..88: note = engineered ribonucleic acid scaffold (ERS) sequence
  source 1..88: mol_type = other RNA
actggcgcttctaatctgattactctgagcgccatcaccagcgactatgtcgtagtgggtaaactccctcttcggagggagatcagag

SEQ ID NO: 17208 - RNA, 86 nt, synthetic construct
  misc_feature 1..86: note = engineered ribonucleic acid scaffold (ERS) sequence
  source 1..86: mol_type = other RNA
actggcgcttctactgattactctgagcgccatcaccagcgactatgtcgtagtgggtaaactccctcttcggagggagatcagag

SEQ ID NO: 17209 - RNA, 87 nt, synthetic construct
  misc_feature 1..87: note = engineered ribonucleic acid scaffold (ERS) sequence
  source 1..87: mol_type = other RNA
actggcgcttctaactgattactctgagcgccatcaccagcgactatgtcgtagtgggtaaactccctcttcggagggagatcagag

SEQ ID NO: 17210 - RNA, 87 nt, synthetic construct
  misc_feature 1..87: note = engineered ribonucleic acid scaffold (ERS) sequence
  source 1..87: mol_type = other RNA
actggcgcttctacctgattactctgagcgccatcaccagcgactatgtcgtagtgggtaaactccctcttcggagggagatcagag

SEQ ID NO: 17211 - RNA, 87 nt, synthetic construct
  misc_feature 1..87: note = engineered ribonucleic acid scaffold (ERS) sequence
  source 1..87: mol_type = other RNA
actggcgcttctagctgattactctgagcgccatcaccagcgactatgtcgtagtgggtaaactccctcttcggagggagatcagag

SEQ ID NO: 17212 - RNA, 89 nt, synthetic construct
  misc_feature 1..89: note = engineered ribonucleic acid scaffold (ERS) sequence
  source 1..89: mol_type = other RNA
actggcgcttctattactgattactctgagcgccatcaccagcgactatgtcgtagtgggtaaactccctcttcggagggagatcagag

SEQ ID NO: 17213 - RNA, 87 nt, synthetic construct
  misc_feature 1..87: note = engineered ribonucleic acid scaffold (ERS) sequence
  source 1..87: mol_type = other RNA
actggcgcttctatatgattactctgagcgccatcaccagcgactatgtcgtagtgggtaaactccctcttcggagggagatcagag

SEQ ID NO: 17214 - RNA, 87 nt, synthetic construct
  misc_feature 1..87: note = engineered ribonucleic acid scaffold (ERS) sequence
  source 1..87: mol_type = other RNA
actggcgcttctatgtgattactctgagcgccatcaccagcgactatgtcgtagtgggtaaactccctcttcggagggagatcagag

SEQ ID NO: 17215 - RNA, 87 nt, synthetic construct
  misc_feature 1..87: note = engineered ribonucleic acid scaffold (ERS) sequence
  source 1..87: mol_type = other RNA
actggcgcttctatttgattactctgagcgccatcaccagcgactatgtcgtagtgggtaaactccctcttcggagggagatcagag

SEQ ID NO: 17216 - RNA, 88 nt, synthetic construct
  misc_feature 1..88: note = engineered ribonucleic acid scaffold (ERS) sequence
  source 1..88: mol_type = other RNA
actggcgcttctatcttgattactctgagcgccatcaccagcgactatgtcgtagtgggtaaactccctcttcggagggagatcagag

SEQ ID NO: 17217 - RNA, 87 nt, synthetic construct
  misc_feature 1..87: note = engineered ribonucleic acid scaffold (ERS) sequence
  source 1..87: mol_type = other RNA
actggcgcttctatcagattactctgagcgccatcaccagcgactatgtcgtagtgggtaaactccctcttcggagggagatcagag

SEQ ID NO: 17218 - RNA, 87 nt, synthetic construct
  misc_feature 1..87: note = engineered ribonucleic acid scaffold (ERS) sequence
  source 1..87: mol_type = other RNA
actggcgcttctatcggattactctgagcgccatcaccagcgactatgtcgtagtgggtaaactccctcttcggagggagatcagag

SEQ ID NO: 17219 - RNA, 88 nt, synthetic construct
  misc_feature 1..88: note = engineered ribonucleic acid scaffold (ERS) sequence
  source 1..88: mol_type = other RNA
actggcgcttctatctgaattactctgagcgccatcaccagcgactatgtcgtagtgggtaaactccctcttcggagggagatcagag

SEQ ID NO: 17220 - RNA, 88 nt, synthetic construct
  misc_feature 1..88: note = engineered ribonucleic acid scaffold (ERS) sequence
  source 1..88: mol_type = other RNA
actggcgcttctatctgtattactctgagcgccatcaccagcgactatgtcgtagtgggtaaactccctcttcggagggagatcagag

SEQ ID NO: 17221 - RNA, 87 nt, synthetic construct
  misc_feature 1..87: note = engineered ribonucleic acid scaffold (ERS) sequence
  source 1..87: mol_type = other RNA
actggcgcttctatctggttactctgagcgccatcaccagcgactatgtcgtagtgggtaaactccctcttcggagggagatcagag

SEQ ID NO: 17222 - RNA, 87 nt, synthetic construct
  misc_feature 1..87: note = engineered ribonucleic acid scaffold (ERS) sequence
  source 1..87: mol_type = other RNA
actggcgcttctatctgtttactctgagcgccatcaccagcgactatgtcgtagtgggtaaactccctcttcggagggagatcagag

SEQ ID NO: 17223 - RNA, 88 nt, synthetic construct
  misc_feature 1..88: note = engineered ribonucleic acid scaffold (ERS) sequence
  source 1..88: mol_type = other RNA
actggcgcttctatctgatttactctgagcgccatcaccagcgactatgtcgtagtgggtaaactccctcttcggagggagatcagag

SEQ ID NO: 17224 - RNA, 87 nt, synthetic construct
  misc_feature 1..87: note = engineered ribonucleic acid scaffold (ERS) sequence
  source 1..87: mol_type = other RNA
actggcgcttctatctgattgctctgagcgccatcaccagcgactatgtcgtagtgggtaaactccctcttcggagggagatcagag

SEQ ID NO: 17225 - RNA, 91 nt, synthetic construct
  misc_feature 1..91: note = engineered ribonucleic acid scaffold (ERS) sequence
  source 1..91: mol_type = other RNA
actggcgcttctatatctgattactctgagcgccatcaccagcgactatgtcgtagtgggtaaagcgccctcttcggagggagcatcagag

SEQ ID NO: 17226 - RNA, 90 nt, synthetic construct
  misc_feature 1..90: note = engineered ribonucleic acid scaffold (ERS) sequence
  source 1..90: mol_type = other RNA
actggcgcttctaatctgattactctgagcgccatcaccagcgactatgtcgtagtgggtaaagcgccctcttcggagggagcatcagag

SEQ ID NO: 17227 - RNA, 88 nt, synthetic construct
  misc_feature 1..88: note = engineered ribonucleic acid scaffold (ERS) sequence
  source 1..88: mol_type = other RNA
actggcgcttctactgattactctgagcgccatcaccagcgactatgtcgtagtgggtaaagcgccctcttcggagggagcatcagag

SEQ ID NO: 17228 - RNA, 89 nt, synthetic construct
  misc_feature 1..89: note = engineered ribonucleic acid scaffold (ERS) sequence
  source 1..89: mol_type = other RNA
actggcgcttctaactgattactctgagcgccatcaccagcgactatgtcgtagtgggtaaagcgccctcttcggagggagcatcagag

SEQ ID NO: 17229 - RNA, 89 nt, synthetic construct
  misc_feature 1..89: note = engineered ribonucleic acid scaffold (ERS) sequence
  source 1..89: mol_type = other RNA
actggcgcttctacctgattactctgagcgccatcaccagcgactatgtcgtagtgggtaaagcgccctcttcggagggagcatcagag

SEQ ID NO: 17230 - RNA, 89 nt, synthetic construct
  misc_feature 1..89: note = engineered ribonucleic acid scaffold (ERS) sequence
  source 1..89: mol_type = other RNA
actggcgcttctagctgattactctgagcgccatcaccagcgactatgtcgtagtgggtaaagcgccctcttcggagggagcatcagag

SEQ ID NO: 17231 - RNA, 91 nt, synthetic construct
  misc_feature 1..91: note = engineered ribonucleic acid scaffold (ERS) sequence
  source 1..91: mol_type = other RNA
actggcgcttctattactgattactctgagcgccatcaccagcgactatgtcgtagtgggtaaagcgccctcttcggagggagcatcagag

SEQ ID NO: 17232 - RNA, 89 nt, synthetic construct
  misc_feature 1..89: note = engineered ribonucleic acid scaffold (ERS) sequence
  source 1..89: mol_type = other RNA
actggcgcttctatatgattactctgagcgccatcaccagcgactatgtcgtagtgggtaaagcgccctcttcggagggagcatcagag

SEQ ID NO: 17233 - RNA, 89 nt, synthetic construct
  misc_feature 1..89: note = engineered ribonucleic acid scaffold (ERS) sequence
  source 1..89: mol_type = other RNA
actggcgcttctatgtgattactctgagcgccatcaccagcgactatgtcgtagtgggtaaagcgccctcttcggagggagcatcagag

SEQ ID NO: 17234 - RNA, 89 nt, synthetic construct
  misc_feature 1..89: note = engineered ribonucleic acid scaffold (ERS) sequence
  source 1..89: mol_type = other RNA
actggcgcttctatttgattactctgagcgccatcaccagcgactatgtcgtagtgggtaaagcgccctcttcggagggagcatcagag

SEQ ID NO: 17235 - RNA, 90 nt, synthetic construct
  misc_feature 1..90: note = engineered ribonucleic acid scaffold (ERS) sequence
  source 1..90: mol_type = other RNA
actggcgcttctatcttgattactctgagcgccatcaccagcgactatgtcgtagtgggtaaagcgccctcttcggagggagcatcagag

SEQ ID NO: 17236 - RNA, 89 nt, synthetic construct
  misc_feature 1..89: note = engineered ribonucleic acid scaffold (ERS) sequence
  source 1..89: mol_type = other RNA
actggcgcttctatcagattactctgagcgccatcaccagcgactatgtcgtagtgggtaaagcgccctcttcggagggagcatcagag

SEQ ID NO: 17237 - RNA, 89 nt, synthetic construct
  misc_feature 1..89: note = engineered ribonucleic acid scaffold (ERS) sequence
  source 1..89: mol_type = other RNA
actggcgcttctatcggattactctgagcgccatcaccagcgactatgtcgtagtgggtaaagcgccctcttcggagggagcatcagag

SEQ ID NO: 17238 - RNA, 90 nt, synthetic construct
  misc_feature 1..90: note = engineered ribonucleic acid scaffold (ERS) sequence
  source 1..90: mol_type = other RNA
actggcgcttctatctgaattactctgagcgccatcaccagcgactatgtcgtagtgggtaaagcgccctcttcggagggagcatcagag

SEQ ID NO: 17239 - RNA, 90 nt, synthetic construct
  misc_feature 1..90: note = engineered ribonucleic acid scaffold (ERS) sequence
  source 1..90: mol_type = other RNA
actggcgcttctatctgtattactctgagcgccatcaccagcgactatgtcgtagtgggtaaagcgccctcttcggagggagcatcagag

SEQ ID NO: 17240 - RNA, 89 nt, synthetic construct
  misc_feature 1..89: note = engineered ribonucleic acid scaffold (ERS) sequence
  source 1..89: mol_type = other RNA
actggcgcttctatctggttactctgagcgccatcaccagcgactatgtcgtagtgggtaaagcgccctcttcggagggagcatcagag

SEQ ID NO: 17241 - RNA, 89 nt, synthetic construct
  misc_feature 1..89: note = engineered ribonucleic acid scaffold (ERS) sequence
  source 1..89: mol_type = other RNA
actggcgcttctatctgtttactctgagcgccatcaccagcgactatgtcgtagtgggtaaagcgccctcttcggagggagcatcagag

SEQ ID NO: 17242 - RNA, 90 nt, synthetic construct
  misc_feature 1..90: note = engineered ribonucleic acid scaffold (ERS) sequence
  source 1..90: mol_type = other RNA
actggcgcttctatctgatttactctgagcgccatcaccagcgactatgtcgtagtgggtaaagcgccctcttcggagggagcatcagag

SEQ ID NO: 17243 - RNA, 89 nt, synthetic construct
  misc_feature 1..89: note = engineered ribonucleic acid scaffold (ERS) sequence
  source 1..89: mol_type = other RNA
actggcgcttctatctgattgctctgagcgccatcaccagcgactatgtcgtagtgggtaaagcgccctcttcggagggagcatcagag

SEQ ID NO: 17244 - RNA, 101 nt, synthetic construct
  misc_feature 1..101: note = engineered ribonucleic acid scaffold (ERS) sequence
  source 1..101: mol_type = other RNA
actggcgcttctatatctgattactctgagcgccatcaccagcgactatgtcgtagtgggtaaagcgccttacggacttcggtccgtaaggagcatcagag

SEQ ID NO: 17245 - RNA, 100 nt, synthetic construct
  misc_feature 1..100: note = engineered ribonucleic acid scaffold (ERS) sequence
  source 1..100: mol_type = other RNA
actggcgcttctaatctgattactctgagcgccatcaccagcgactatgtcgtagtgggtaaagcgccttacggacttcggtccgtaaggagcatcagag

SEQ ID NO: 17246 - RNA, 98 nt, synthetic construct
  misc_feature 1..98: note = engineered ribonucleic acid scaffold (ERS) sequence
  source 1..98: mol_type = other RNA
actggcgcttctactgattactctgagcgccatcaccagcgactatgtcgtagtgggtaaagcgccttacggacttcggtccgtaaggagcatcagag

SEQ ID NO: 17247 - RNA, 99 nt, synthetic construct
  misc_feature 1..99: note = engineered ribonucleic acid scaffold (ERS) sequence
  source 1..99: mol_type = other RNA
actggcgcttctaactgattactctgagcgccatcaccagcgactatgtcgtagtgggtaaagcgccttacggacttcggtccgtaaggagcatcagag

SEQ ID NO: 17248 - RNA, 99 nt, synthetic construct
  misc_feature 1..99: note = engineered ribonucleic acid scaffold (ERS) sequence
  source 1..99: mol_type = other RNA
actggcgcttctacctgattactctgagcgccatcaccagcgactatgtcgtagtgggtaaagcgccttacggacttcggtccgtaaggagcatcagag

SEQ ID NO: 17249 - RNA, 99 nt, synthetic construct
  misc_feature 1..99: note = engineered ribonucleic acid scaffold (ERS) sequence
  source 1..99: mol_type = other RNA
actggcgcttctagctgattactctgagcgccatcaccagcgactatgtcgtagtgggtaaagcgccttacggacttcggtccgtaaggagcatcagag

SEQ ID NO: 17250 - RNA, 101 nt, synthetic construct
  misc_feature 1..101: note = engineered ribonucleic acid scaffold (ERS) sequence
  source 1..101: mol_type = other RNA
actggcgcttctattactgattactctgagcgccatcaccagcgactatgtcgtagtgggtaaagcgccttacggacttcggtccgtaaggagcatcagag

SEQ ID NO: 17251 - RNA, 99 nt, synthetic construct
  misc_feature 1..99: note = engineered ribonucleic acid scaffold (ERS) sequence
  source 1..99: mol_type = other RNA
actggcgcttctatatgattactctgagcgccatcaccagcgactatgtcgtagtgggtaaagcgccttacggacttcggtccgtaaggagcatcagag

SEQ ID NO: 17252 - RNA, 99 nt, synthetic construct
  misc_feature 1..99: note = engineered ribonucleic acid scaffold (ERS) sequence
  source 1..99: mol_type = other RNA
actggcgcttctatgtgattactctgagcgccatcaccagcgactatgtcgtagtgggtaaagcgccttacggacttcggtccgtaaggagcatcagag

SEQ ID NO: 17253 - RNA, 99 nt, synthetic construct
  misc_feature 1..99: note = engineered ribonucleic acid scaffold (ERS) sequence
  source 1..99: mol_type = other RNA
actggcgcttctatttgattactctgagcgccatcaccagcgactatgtcgtagtgggtaaagcgccttacggacttcggtccgtaaggagcatcagag

SEQ ID NO: 17254 - RNA, 100 nt, synthetic construct
  misc_feature 1..100: note = engineered ribonucleic acid scaffold (ERS) sequence
  source 1..100: mol_type = other RNA
actggcgcttctatcttgattactctgagcgccatcaccagcgactatgtcgtagtgggtaaagcgccttacggacttcggtccgtaaggagcatcagag

SEQ ID NO: 17255 - RNA, 99 nt, synthetic construct
  misc_feature 1..99: note = engineered ribonucleic acid scaffold (ERS) sequence
  source 1..99: mol_type = other RNA
actggcgcttctatcagattactctgagcgccatcaccagcgactatgtcgtagtgggtaaagcgccttacggacttcggtccgtaaggagcatcagag

SEQ ID NO: 17256 - RNA, 99 nt, synthetic construct
  misc_feature 1..99: note = engineered ribonucleic acid scaffold (ERS) sequence
  source 1..99: mol_type = other RNA
actggcgcttctatcggattactctgagcgccatcaccagcgactatgtcgtagtgggtaaagcgccttacggacttcggtccgtaaggagcatcagag

SEQ ID NO: 17257 - RNA, 100 nt, synthetic construct
  misc_feature 1..100: note = engineered ribonucleic acid scaffold (ERS) sequence
  source 1..100: mol_type = other RNA
actggcgcttctatctgaattactctgagcgccatcaccagcgactatgtcgtagtgggtaaagcgccttacggacttcggtccgtaaggagcatcagag

SEQ ID NO: 17258 - RNA, 100 nt, synthetic construct
  misc_feature 1..100: note = engineered ribonucleic acid scaffold (ERS) sequence
  source 1..100: mol_type = other RNA
actggcgcttctatctgtattactctgagcgccatcaccagcgactatgtcgtagtgggtaaagcgccttacggacttcggtccgtaaggagcatcagag

SEQ ID NO: 17259 - RNA, 99 nt, synthetic construct
  misc_feature 1..99: note = engineered ribonucleic acid scaffold (ERS) sequence
  source 1..99: mol_type = other RNA
actggcgcttctatctggttactctgagcgccatcaccagcgactatgtcgtagtgggtaaagcgccttacggacttcggtccgtaaggagcatcagag

SEQ ID NO: 17260 - RNA, 99 nt, synthetic construct
  misc_feature 1..99: note = engineered ribonucleic acid scaffold (ERS) sequence
  source 1..99: mol_type = other RNA
actggcgcttctatctgtttactctgagcgccatcaccagcgactatgtcgtagtgggtaaagcgccttacggacttcggtccgtaaggagcatcagag

SEQ ID NO: 17261 - RNA, 100 nt, synthetic construct
  misc_feature 1..100: note = engineered ribonucleic acid scaffold (ERS) sequence
  source 1..100: mol_type = other RNA
actggcgcttctatctgatttactctgagcgccatcaccagcgactatgtcgtagtgggtaaagcgccttacggacttcggtccgtaaggagcatcagag

SEQ ID NO: 17262 - RNA, 99 nt, synthetic construct
  misc_feature 1..99: note = engineered ribonucleic acid scaffold (ERS) sequence
  source 1..99: mol_type = other RNA
actggcgcttctatctgattgctctgagcgccatcaccagcgactatgtcgtagtgggtaaagcgccttacggacttcggtccgtaaggagcatcagag

SEQ ID NO: 17263 - RNA, 101 nt, synthetic construct
  misc_feature 1..101: note = engineered ribonucleic acid scaffold (ERS) sequence
  source 1..101: mol_type = other RNA
actggcgcttctatatctgattactctgagcgccatcaccagcgactatgtcgtagtgggtaaagcgcttacggaattcgtgtccgtaagaagcatcagag

SEQ ID NO: 17264 - RNA, 100 nt, synthetic construct
  misc_feature 1..100: note = engineered ribonucleic acid scaffold (ERS) sequence
  source 1..100: mol_type = other RNA
actggcgcttctaatctgattactctgagcgccatcaccagcgactatgtcgtagtgggtaaagcgcttacggaattcgtgtccgtaagaagcatcagag

SEQ ID NO: 17265 - RNA, 98 nt, synthetic construct
  misc_feature 1..98: note = engineered ribonucleic acid scaffold (ERS) sequence
  source 1..98: mol_type = other RNA
actggcgcttctactgattactctgagcgccatcaccagcgactatgtcgtagtgggtaaagcgcttacggaattcgtgtccgtaagaagcatcagag

SEQ ID NO: 17266 - RNA, 99 nt, synthetic construct
  misc_feature 1..99: note = engineered ribonucleic acid scaffold (ERS) sequence
  source 1..99: mol_type = other RNA
actggcgcttctaactgattactctgagcgccatcaccagcgactatgtcgtagtgggtaaagcgcttacggaattcgtgtccgtaagaagcatcagag

SEQ ID NO: 17267 - RNA, 99 nt, synthetic construct
  misc_feature 1..99: note = engineered ribonucleic acid scaffold (ERS) sequence
  source 1..99: mol_type = other RNA
actggcgcttctacctgattactctgagcgccatcaccagcgactatgtcgtagtgggtaaagcgcttacggaattcgtgtccgtaagaagcatcagag

SEQ ID NO: 17268 - RNA, 99 nt, synthetic construct
  misc_feature 1..99: note = engineered ribonucleic acid scaffold (ERS) sequence
  source 1..99: mol_type = other RNA
actggcgcttctagctgattactctgagcgccatcaccagcgactatgtcgtagtgggtaaagcgcttacggaattcgtgtccgtaagaagcatcagag

SEQ ID NO: 17269 - RNA, 101 nt, synthetic construct
  misc_feature 1..101: note = engineered ribonucleic acid scaffold (ERS) sequence
  source 1..101: mol_type = other RNA
actggcgcttctattactgattactctgagcgccatcaccagcgactatgtcgtagtgggtaaagcgcttacggaattcgtgtccgtaagaagcatcagag

SEQ ID NO: 17270 - RNA, 99 nt, synthetic construct
  misc_feature 1..99: note = engineered ribonucleic acid scaffold (ERS) sequence
  source 1..99: mol_type = other RNA
actggcgcttctatatgattactctgagcgccatcaccagcgactatgtcgtagtgggtaaagcgcttacggaattcgtgtccgtaagaagcatcagag

SEQ ID NO: 17271 - RNA, 99 nt, synthetic construct
  misc_feature 1..99: note = engineered ribonucleic acid scaffold (ERS) sequence
  source 1..99: mol_type = other RNA
actggcgcttctatgtgattactctgagcgccatcaccagcgactatgtcgtagtgggtaaagcgcttacggaattcgtgtccgtaagaagcatcagag

SEQ ID NO: 17272 - RNA, 99 nt, synthetic construct
  misc_feature 1..99: note = engineered ribonucleic acid scaffold (ERS) sequence
  source 1..99: mol_type = other RNA
actggcgcttctatttgattactctgagcgccatcaccagcgactatgtcgtagtgggtaaagcgcttacggaattcgtgtccgtaagaagcatcagag

SEQ ID NO: 17273 - RNA, 100 nt, synthetic construct
  misc_feature 1..100: note = engineered ribonucleic acid scaffold (ERS) sequence
  source 1..100: mol_type = other RNA
actggcgcttctatcttgattactctgagcgccatcaccagcgactatgtcgtagtgggtaaagcgcttacggaattcgtgtccgtaagaagcatcagag

SEQ ID NO: 17274 - RNA, 99 nt, synthetic construct
  misc_feature 1..99: note = engineered ribonucleic acid scaffold (ERS) sequence
  source 1..99: mol_type = other RNA
actggcgcttctatcagattactctgagcgccatcaccagcgactatgtcgtagtgggtaaagcgcttacggaattcgtgtccgtaagaagcatcagag

SEQ ID NO: 17275 - RNA, 99 nt, synthetic construct
  misc_feature 1..99: note = engineered ribonucleic acid scaffold (ERS) sequence
  source 1..99: mol_type = other RNA
actggcgcttctatcggattactctgagcgccatcaccagcgactatgtcgtagtgggtaaagcgcttacggaattcgtgtccgtaagaagcatcagag

SEQ ID NO: 17276 - RNA, 100 nt, synthetic construct
  misc_feature 1..100: note = engineered ribonucleic acid scaffold (ERS) sequence
  source 1..100: mol_type = other RNA
actggcgcttctatctgaattactctgagcgccatcaccagcgactatgtcgtagtgggtaaagcgcttacggaattcgtgtccgtaagaagcatcagag

SEQ ID NO: 17277 - RNA, 100 nt, synthetic construct
  misc_feature 1..100: note = engineered ribonucleic acid scaffold (ERS) sequence
  source 1..100: mol_type = other RNA
actggcgcttctatctgtattactctgagcgccatcaccagcgactatgtcgtagtgggtaaagcgcttacggaattcgtgtccgtaagaagcatcagag

SEQ ID NO: 17278 - RNA, 99 nt, synthetic construct
  misc_feature 1..99: note = engineered ribonucleic acid scaffold (ERS) sequence
  source 1..99: mol_type = other RNA
actggcgcttctatctggttactctgagcgccatcaccagcgactatgtcgtagtgggtaaagcgcttacggaattcgtgtccgtaagaagcatcagag

SEQ ID NO: 17279 - RNA, 99 nt, synthetic construct
  misc_feature 1..99: note = engineered ribonucleic acid scaffold (ERS) sequence
  source 1..99: mol_type = other RNA
actggcgcttctatctgtttactctgagcgccatcaccagcgactatgtcgtagtgggtaaagcgcttacggaattcgtgtccgtaagaagcatcagag

SEQ ID NO: 17280 - RNA, 100 nt, synthetic construct
  misc_feature 1..100: note = engineered ribonucleic acid scaffold (ERS) sequence
  source 1..100: mol_type = other RNA
actggcgcttctatctgatttactctgagcgccatcaccagcgactatgtcgtagtgggtaaagcgcttacggaattcgtgtccgtaagaagcatcagag

SEQ ID NO: 17281 - RNA, 99 nt, synthetic construct
  misc_feature 1..99: note = engineered ribonucleic acid scaffold (ERS) sequence
  source 1..99: mol_type = other RNA
actggcgcttctatctgattgctctgagcgccatcaccagcgactatgtcgtagtgggtaaagcgcttacggaattcgtgtccgtaagaagcatcagag

SEQ ID NO: 17282 - RNA, 102 nt, synthetic construct
  misc_feature 1..102: note = engineered ribonucleic acid scaffold (ERS) sequence
  source 1..102: mol_type = other RNA
actggcgcttctatatctgattactctgagcgccatcaccagcgactatgtcgtagtgggtaaagcgcttacggacttcgcggtccgtaagaagcatcagag

SEQ ID NO: 17283 - RNA, 101 nt, synthetic construct
  misc_feature 1..101: note = engineered ribonucleic acid scaffold (ERS) sequence
  source 1..101: mol_type = other RNA
actggcgcttctaatctgattactctgagcgccatcaccagcgactatgtcgtagtgggtaaagcgcttacggacttcgcggtccgtaagaagcatcagag

SEQ ID NO: 17284 - RNA, 99 nt, synthetic construct
  misc_feature 1..99: note = engineered ribonucleic acid scaffold (ERS) sequence
  source 1..99: mol_type = other RNA
actggcgcttctactgattactctgagcgccatcaccagcgactatgtcgtagtgggtaaagcgcttacggacttcgcggtccgtaagaagcatcagag

SEQ ID NO: 17285 - RNA, 100 nt, synthetic construct
  misc_feature 1..100: note = engineered ribonucleic acid scaffold (ERS) sequence
  source 1..100: mol_type = other RNA
actggcgcttctaactgattactctgagcgccatcaccagcgactatgtcgtagtgggtaaagcgcttacggacttcgcggtccgtaagaagcatcagag

SEQ ID NO: 17286 - RNA, 100 nt, synthetic construct
  misc_feature 1..100: note = engineered ribonucleic acid scaffold (ERS) sequence
  source 1..100: mol_type = other RNA
actggcgcttctacctgattactctgagcgccatcaccagcgactatgtcgtagtgggtaaagcgcttacggacttcgcggtccgtaagaagcatcagag

SEQ ID NO: 17287 - RNA, 100 nt, synthetic construct
  misc_feature 1..100: note = engineered ribonucleic acid scaffold (ERS) sequence
  source 1..100: mol_type = other RNA
actggcgcttctagctgattactctgagcgccatcaccagcgactatgtcgtagtgggtaaagcgcttacggacttcgcggtccgtaagaagcatcagag

SEQ ID NO: 17288 - RNA, 102 nt, synthetic construct
  misc_feature 1..102: note = engineered ribonucleic acid scaffold (ERS) sequence
  source 1..102: mol_type = other RNA
actggcgcttctattactgattactctgagcgccatcaccagcgactatgtcgtagtgggtaaagcgcttacggacttcgcggtccgtaagaagcatcagag

SEQ ID NO: 17289 - RNA, 100 nt, synthetic construct
  misc_feature 1..100: note = engineered ribonucleic acid scaffold (ERS) sequence
  source 1..100: mol_type = other RNA
actggcgcttctatatgattactctgagcgccatcaccagcgactatgtcgtagtgggtaaagcgcttacggacttcgcggtccgtaagaagcatcagag

SEQ ID NO: 17290 - RNA, 100 nt, synthetic construct
  misc_feature 1..100: note = engineered ribonucleic acid scaffold (ERS) sequence
  source 1..100: mol_type = other RNA
actggcgcttctatgtgattactctgagcgccatcaccagcgactatgtcgtagtgggtaaagcgcttacggacttcgcggtccgtaagaagcatcagag

SEQ ID NO: 17291 - RNA, 100 nt, synthetic construct
  misc_feature 1..100: note = engineered ribonucleic acid scaffold (ERS) sequence
  source 1..100: mol_type = other RNA
actggcgcttctatttgattactctgagcgccatcaccagcgactatgtcgtagtgggtaaagcgcttacggacttcgcggtccgtaagaagcatcagag

SEQ ID NO: 17292 - RNA, 101 nt, synthetic construct
  misc_feature 1..101: note = engineered ribonucleic acid scaffold (ERS) sequence
  source 1..101: mol_type = other RNA
actggcgcttctatcttgattactctgagcgccatcaccagcgactatgtcgtagtgggtaaagcgcttacggacttcgcggtccgtaagaagcatcagag

SEQ ID NO: 17293 - RNA, 100 nt, synthetic construct
  misc_feature 1..100: note = engineered ribonucleic acid scaffold (ERS) sequence
  source 1..100: mol_type = other RNA
actggcgcttctatcagattactctgagcgccatcaccagcgactatgtcgtagtgggtaaagcgcttacggacttcgcggtccgtaagaagcatcagag

SEQ ID NO: 17294 - RNA, 100 nt, synthetic construct
  misc_feature 1..100: note = engineered ribonucleic acid scaffold (ERS) sequence
  source 1..100: mol_type = other RNA
actggcgcttctatcggattactctgagcgccatcaccagcgactatgtcgtagtgggtaaagcgcttacggacttcgcggtccgtaagaagcatcagag

SEQ ID NO: 17295 - RNA, 101 nt, synthetic construct
  misc_feature 1..101: note = engineered ribonucleic acid scaffold (ERS) sequence
  source 1..101: mol_type = other RNA
actggcgcttctatctgaattactctgagcgccatcaccagcgactatgtcgtagtgggtaaagcgcttacggacttcgcggtccgtaagaagcatcagag

SEQ ID NO: 17296 - RNA, 101 nt, synthetic construct
  misc_feature 1..101: note = engineered ribonucleic acid scaffold (ERS) sequence
  source 1..101: mol_type = other RNA
actggcgcttctatctgtattactctgagcgccatcaccagcgactatgtcgtagtgggtaaagcgcttacggacttcgcggtccgtaagaagcatcagag

SEQ ID NO: 17297 - RNA, 100 nt, synthetic construct
  misc_feature 1..100: note = engineered ribonucleic acid scaffold (ERS) sequence
  source 1..100: mol_type = other RNA
actggcgcttctatctggttactctgagcgccatcaccagcgactatgtcgtagtgggtaaagcgcttacggacttcgcggtccgtaagaagcatcagag

SEQ ID NO: 17298 - RNA, 100 nt, synthetic construct
  misc_feature 1..100: note = engineered ribonucleic acid scaffold (ERS) sequence
  source 1..100: mol_type = other RNA
actggcgcttctatctgtttactctgagcgccatcaccagcgactatgtcgtagtgggtaaagcgcttacggacttcgcggtccgtaagaagcatcagag

SEQ ID NO: 17299 - RNA, 101 nt, synthetic construct
  misc_feature 1..101: note = engineered ribonucleic acid scaffold (ERS) sequence
  source 1..101: mol_type = other RNA
actggcgcttctatctgatttactctgagcgccatcaccagcgactatgtcgtagtgggtaaagcgcttacggacttcgcggtccgtaagaagcatcagag

SEQ ID NO: 17300 - RNA, 100 nt, synthetic construct
  misc_feature 1..100: note = engineered ribonucleic acid scaffold (ERS) sequence
  source 1..100: mol_type = other RNA
actggcgcttctatctgattgctctgagcgccatcaccagcgactatgtcgtagtgggtaaagcgcttacggacttcgcggtccgtaagaagcatcagag

SEQ ID NO: 17301 - RNA, 100 nt, synthetic construct
  misc_feature 1..100: note = engineered ribonucleic acid scaffold (ERS) sequence
  source 1..100: mol_type = other RNA
actggcgcttctatatctgattactctgagcgccatcaccagcgactatgtcgtagtgggtaaagcgcttacggacttcggtccgtaagaagcatcagag

SEQ ID NO: 17302 - RNA, 99 nt, synthetic construct
  misc_feature 1..99: note = engineered ribonucleic acid scaffold (ERS) sequence
  source 1..99: mol_type = other RNA
actggcgcttctaatctgattactctgagcgccatcaccagcgactatgtcgtagtgggtaaagcgcttacggacttcggtccgtaagaagcatcagag

SEQ ID NO: 17303 - RNA, 97 nt, synthetic construct
  misc_feature 1..97: note = engineered ribonucleic acid scaffold (ERS) sequence
  source 1..97: mol_type = other RNA
actggcgcttctactgattactctgagcgccatcaccagcgactatgtcgtagtgggtaaagcgcttacggacttcggtccgtaagaagcatcagag

SEQ ID NO: 17304 - RNA, 98 nt, synthetic construct
  misc_feature 1..98: note = engineered ribonucleic acid scaffold (ERS) sequence
  source 1..98: mol_type = other RNA
actggcgcttctaactgattactctgagcgccatcaccagcgactatgtcgtagtgggtaaagcgcttacggacttcggtccgtaagaagcatcagag

SEQ ID NO: 17305 - RNA, 98 nt, synthetic construct
  misc_feature 1..98: note = engineered ribonucleic acid scaffold (ERS) sequence
  source 1..98: mol_type = other RNA
actggcgcttctacctgattactctgagcgccatcaccagcgactatgtcgtagtgggtaaagcgcttacggacttcggtccgtaagaagcatcagag

SEQ ID NO: 17306 - RNA, 98 nt, synthetic construct
  misc_feature 1..98: note = engineered ribonucleic acid scaffold (ERS) sequence
  source 1..98: mol_type = other RNA
actggcgcttctagctgattactctgagcgccatcaccagcgactatgtcgtagtgggtaaagcgcttacggacttcggtccgtaagaagcatcagag

SEQ ID NO: 17307 - RNA, 100 nt, synthetic construct
  misc_feature 1..100: note = engineered ribonucleic acid scaffold (ERS) sequence
  source 1..100: mol_type = other RNA
actggcgcttctattactgattactctgagcgccatcaccagcgactatgtcgtagtgggtaaagcgcttacggacttcggtccgtaagaagcatcagag

SEQ ID NO: 17308 - RNA, 98 nt, synthetic construct
  misc_feature 1..98: note = engineered ribonucleic acid scaffold (ERS) sequence
  source 1..98: mol_type = other RNA
actggcgcttctatatgattactctgagcgccatcaccagcgactatgtcgtagtgggtaaagcgcttacggacttcggtccgtaagaagcatcagag

SEQ ID NO: 17309 - RNA, 98 nt, synthetic construct
  misc_feature 1..98: note = engineered ribonucleic acid scaffold (ERS) sequence
  source 1..98: mol_type = other RNA
actggcgcttctatgtgattactctgagcgccatcaccagcgactatgtcgtagtgggtaaagcgcttacggacttcggtccgtaagaagcatcagag

SEQ ID NO: 17310 - RNA, 98 nt, synthetic construct
  misc_feature 1..98: note = engineered ribonucleic acid scaffold (ERS) sequence
  source 1..98: mol_type = other RNA
actggcgcttctatttgattactctgagcgccatcaccagcgactatgtcgtagtgggtaaagcgcttacggacttcggtccgtaagaagcatcagag

SEQ ID NO: 17311 - RNA, 99 nt, synthetic construct
  misc_feature 1..99: note = engineered ribonucleic acid scaffold (ERS) sequence
  source 1..99: mol_type = other RNA
actggcgcttctatcttgattactctgagcgccatcaccagcgactatgtcgtagtgggtaaagcgcttacggacttcggtccgtaagaagcatcagag

SEQ ID NO: 17312 - RNA, 98 nt, synthetic construct
  misc_feature 1..98: note = engineered ribonucleic acid scaffold (ERS) sequence
  source 1..98: mol_type = other RNA
actggcgcttctatcagattactctgagcgccatcaccagcgactatgtcgtagtgggtaaagcgcttacggacttcggtccgtaagaagcatcagag

SEQ ID NO: 17313 - RNA, 98 nt, synthetic construct
  misc_feature 1..98: note = engineered ribonucleic acid scaffold (ERS) sequence
  source 1..98: mol_type = other RNA
actggcgcttctatcggattactctgagcgccatcaccagcgactatgtcgtagtgggtaaagcgcttacggacttcggtccgtaagaagcatcagag

SEQ ID NO: 17314 - RNA, 99 nt, synthetic construct
  misc_feature 1..99: note = engineered ribonucleic acid scaffold (ERS) sequence
  source 1..99: mol_type = other RNA
actggcgcttctatctgaattactctgagcgccatcaccagcgactatgtcgtagtgggtaaagcgcttacggacttcggtccgtaagaagcatcagag

SEQ ID NO: 17315 - RNA, 99 nt, synthetic construct
  misc_feature 1..99: note = engineered ribonucleic acid scaffold (ERS) sequence
  source 1..99: mol_type = other RNA
actggcgcttctatctgtattactctgagcgccatcaccagcgactatgtcgtagtgggtaaagcgcttacggacttcggtccgtaagaagcatcagag

SEQ ID NO: 17316 - RNA, 98 nt, synthetic construct
  misc_feature 1..98: note = engineered ribonucleic acid scaffold (ERS) sequence
  source 1..98: mol_type = other RNA
actggcgcttctatctggttactctgagcgccatcaccagcgactatgtcgtagtgggtaaagcgcttacggacttcggtccgtaagaagcatcagag

SEQ ID NO: 17317 - RNA, 98 nt, synthetic construct
  misc_feature 1..98: note = engineered ribonucleic acid scaffold (ERS) sequence
  source 1..98: mol_type = other RNA
actggcgcttctatctgtttactctgagcgccatcaccagcgactatgtcgtagtgggtaaagcgcttacggacttcggtccgtaagaagcatcagag

SEQ ID NO: 17318 - RNA, 99 nt, synthetic construct
  misc_feature 1..99: note = engineered ribonucleic acid scaffold (ERS) sequence
  source 1..99: mol_type = other RNA
actggcgcttctatctgatttactctgagcgccatcaccagcgactatgtcgtagtgggtaaagcgcttacggacttcggtccgtaagaagcatcagag

SEQ ID NO: 17319 - RNA, 98 nt, synthetic construct
  misc_feature 1..98: note = engineered ribonucleic acid scaffold (ERS) sequence
  source 1..98: mol_type = other RNA
actggcgcttctatctgattgctctgagcgccatcaccagcgactatgtcgtagtgggtaaagcgcttacggacttcggtccgtaagaagcatcagag

SEQ ID NO: 17320 - RNA, 100 nt, synthetic construct
  misc_feature 1..100: note = engineered ribonucleic acid scaffold (ERS) sequence
  source 1..100: mol_type = other RNA
actggcgcttctatatctgattactctgagcgccatcaccagcgactatgtcgtagtgggtaaagcgcttacggacttcggtccgtaagtcgcatcagag

SEQ ID NO: 17321 - RNA, 99 nt, synthetic construct
  misc_feature 1..99: note = engineered ribonucleic acid scaffold (ERS) sequence
  source 1..99: mol_type = other RNA
actggcgcttctaatctgattactctgagcgccatcaccagcgactatgtcgtagtgggtaaagcgcttacggacttcggtccgtaagtcgcatcagag

SEQ ID NO: 17322 - RNA, 97 nt, synthetic construct
  misc_feature 1..97: note = engineered ribonucleic acid scaffold (ERS) sequence
  source 1..97: mol_type = other RNA
actggcgcttctactgattactctgagcgccatcaccagcgactatgtcgtagtgggtaaagcgcttacggacttcggtccgtaagtcgcatcagag

SEQ ID NO: 17323 - RNA, 98 nt, synthetic construct
  misc_feature 1..98: note = engineered ribonucleic acid scaffold (ERS) sequence
  source 1..98: mol_type = other RNA
actggcgcttctaactgattactctgagcgccatcaccagcgactatgtcgtagtgggtaaagcgcttacggacttcggtccgtaagtcgcatcagag

SEQ ID NO: 17324 - RNA, 98 nt, synthetic construct
  misc_feature 1..98: note = engineered ribonucleic acid scaffold (ERS) sequence
  source 1..98: mol_type = other RNA
actggcgcttctacctgattactctgagcgccatcaccagcgactatgtcgtagtgggtaaagcgcttacggacttcggtccgtaagtcgcatcagag

SEQ ID NO: 17325 - RNA, 98 nt, synthetic construct
  misc_feature 1..98: note = engineered ribonucleic acid scaffold (ERS) sequence
  source 1..98: mol_type = other RNA
actggcgcttctagctgattactctgagcgccatcaccagcgactatgtcgtagtgggtaaagcgcttacggacttcggtccgtaagtcgcatcagag

SEQ ID NO: 17326 - RNA, 100 nt, synthetic construct
  misc_feature 1..100: note = engineered ribonucleic acid scaffold (ERS) sequence
  source 1..100: mol_type = other RNA
actggcgcttctattactgattactctgagcgccatcaccagcgactatgtcgtagtgggtaaagcgcttacggacttcggtccgtaagtcgcatcagag

SEQ ID NO: 17327 - RNA, 98 nt, synthetic construct
  misc_feature 1..98: note = engineered ribonucleic acid scaffold (ERS) sequence
  source 1..98: mol_type = other RNA
actggcgcttctatatgattactctgagcgccatcaccagcgactatgtcgtagtgggtaaagcgcttacggacttcggtccgtaagtcgcatcagag

SEQ ID NO: 17328 - RNA, 98 nt, synthetic construct
  misc_feature 1..98: note = engineered ribonucleic acid scaffold (ERS) sequence
  source 1..98: mol_type = other RNA
actggcgcttctatgtgattactctgagcgccatcaccagcgactatgtcgtagtgggtaaagcgcttacggacttcggtccgtaagtcgcatcagag

SEQ ID NO: 17329 - RNA, 98 nt, synthetic construct
  misc_feature 1..98: note = engineered ribonucleic acid scaffold (ERS) sequence
  source 1..98: mol_type = other RNA
actggcgcttctatttgattactctgagcgccatcaccagcgactatgtcgtagtgggtaaagcgcttacggacttcggtccgtaagtcgcatcagag

SEQ ID NO: 17330 - RNA, 99 nt, synthetic construct
  misc_feature 1..99: note = engineered ribonucleic acid scaffold (ERS) sequence
  source 1..99: mol_type = other RNA
actggcgcttctatcttgattactctgagcgccatcaccagcgactatgtcgtagtgggtaaagcgcttacggacttcggtccgtaagtcgcatcagag

SEQ ID NO: 17331 - RNA, 98 nt, synthetic construct
  misc_feature 1..98: note = engineered ribonucleic acid scaffold (ERS) sequence
  source 1..98: mol_type = other RNA
actggcgcttctatcagattactctgagcgccatcaccagcgactatgtcgtagtgggtaaagcgcttacggacttcggtccgtaagtcgcatcagag

SEQ ID NO: 17332 - RNA, 98 nt, synthetic construct
  misc_feature 1..98: note = engineered ribonucleic acid scaffold (ERS) sequence
  source 1..98: mol_type = other RNA
actggcgcttctatcggattactctgagcgccatcaccagcgactatgtcgtagtgggtaaagcgcttacggacttcggtccgtaagtcgcatcagag

SEQ ID NO: 17333 - RNA, 99 nt, synthetic construct
  misc_feature 1..99: note = engineered ribonucleic acid scaffold (ERS) sequence
  source 1..99: mol_type = other RNA
actggcgcttctatctgaattactctgagcgccatcaccagcgactatgtcgtagtgggtaaagcgcttacggacttcggtccgtaagtcgcatcagag

SEQ ID NO: 17334 - RNA, 99 nt, synthetic construct
  misc_feature 1..99: note = engineered ribonucleic acid scaffold (ERS) sequence
  source 1..99: mol_type = other RNA
actggcgcttctatctgtattactctgagcgccatcaccagcgactatgtcgtagtgggtaaagcgcttacggacttcggtccgtaagtcgcatcagag

SEQ ID NO: 17335 - RNA, 98 nt, synthetic construct
  misc_feature 1..98: note = engineered ribonucleic acid scaffold (ERS) sequence
  source 1..98: mol_type = other RNA
actggcgcttctatctggttactctgagcgccatcaccagcgactatgtcgtagtgggtaaagcgcttacggacttcggtccgtaagtcgcatcagag

SEQ ID NO: 17336 - RNA, 98 nt, synthetic construct
  misc_feature 1..98: note = engineered ribonucleic acid scaffold (ERS) sequence
  source 1..98: mol_type = other RNA
actggcgcttctatctgtttactctgagcgccatcaccagcgactatgtcgtagtgggtaaagcgcttacggacttcggtccgtaagtcgcatcagag

SEQ ID NO: 17337 - RNA, 99 nt, synthetic construct
  misc_feature 1..99: note = engineered ribonucleic acid scaffold (ERS) sequence
  source 1..99: mol_type = other RNA
actggcgcttctatctgatttactctgagcgccatcaccagcgactatgtcgtagtgggtaaagcgcttacggacttcggtccgtaagtcgcatcagag

SEQ ID NO: 17338 - RNA, 98 nt, synthetic construct
  misc_feature 1..98: note = engineered ribonucleic acid scaffold (ERS) sequence
  source 1..98: mol_type = other RNA
actggcgcttctatctgattgctctgagcgccatcaccagcgactatgtcgtagtgggtaaagcgcttacggacttcggtccgtaagtcgcatcagag

SEQ ID NO: 17339 - RNA, 100 nt, synthetic construct
  misc_feature 1..100: note = engineered ribonucleic acid scaffold (ERS) sequence
  source 1..100: mol_type = other RNA
actggcgcttctatatctgattactctgagcgccatcaccagcgactatgtcgtagtgggtaaagcgcttacggagttcgatccgtaagaagcatcagag

SEQ ID NO: 17340 - RNA, 99 nt, synthetic construct
  misc_feature 1..99: note = engineered ribonucleic acid scaffold (ERS) sequence
  source 1..99: mol_type = other RNA
actggcgcttctaatctgattactctgagcgccatcaccagcgactatgtcgtagtgggtaaagcgcttacggagttcgatccgtaagaagcatcagag

SEQ ID NO: 17341 - RNA, 97 nt, synthetic construct
  misc_feature 1..97: note = engineered ribonucleic acid scaffold (ERS) sequence
  source 1..97: mol_type = other RNA
actggcgcttctactgattactctgagcgccatcaccagcgactatgtcgtagtgggtaaagcgcttacggagttcgatccgtaagaagcatcagag

SEQ ID NO: 17342 - RNA, 98 nt, synthetic construct
  misc_feature 1..98: note = engineered ribonucleic acid scaffold (ERS) sequence
  source 1..98: mol_type = other RNA
actggcgcttctaactgattactctgagcgccatcaccagcgactatgtcgtagtgggtaaagcgcttacggagttcgatccgtaagaagcatcagag

SEQ ID NO: 17343 - RNA, 98 nt, synthetic construct
  misc_feature 1..98: note = engineered ribonucleic acid scaffold (ERS) sequence
  source 1..98: mol_type = other RNA
actggcgcttctacctgattactctgagcgccatcaccagcgactatgtcgtagtgggtaaagcgcttacggagttcgatccgtaagaagcatcagag

SEQ ID NO: 17344 - RNA, 98 nt, synthetic construct
  misc_feature 1..98: note = engineered ribonucleic acid scaffold (ERS) sequence
  source 1..98: mol_type = other RNA
actggcgcttctagctgattactctgagcgccatcaccagcgactatgtcgtagtgggtaaagcgcttacggagttcgatccgtaagaagcatcagag

SEQ ID NO: 17345 - RNA, 100 nt, synthetic construct
  misc_feature 1..100: note = engineered ribonucleic acid scaffold (ERS) sequence
  source 1..100: mol_type = other RNA
actggcgcttctattactgattactctgagcgccatcaccagcgactatgtcgtagtgggtaaagcgcttacggagttcgatccgtaagaagcatcagag

SEQ ID NO: 17346 - RNA, 98 nt, synthetic construct
  misc_feature 1..98: note = engineered ribonucleic acid scaffold (ERS) sequence
  source 1..98: mol_type = other RNA
actggcgcttctatatgattactctgagcgccatcaccagcgactatgtcgtagtgggtaaagcgcttacggagttcgatccgtaagaagcatcagag

SEQ ID NO: 17347 - RNA, 98 nt, synthetic construct
  misc_feature 1..98: note = engineered ribonucleic acid scaffold (ERS) sequence
  source 1..98: mol_type = other RNA
actggcgcttctatgtgattactctgagcgccatcaccagcgactatgtcgtagtgggtaaagcgcttacggagttcgatccgtaagaagcatcagag

SEQ ID NO: 17348 - RNA, 98 nt, synthetic construct
  misc_feature 1..98: note = engineered ribonucleic acid scaffold (ERS) sequence
  source 1..98: mol_type = other RNA
actggcgcttctatttgattactctgagcgccatcaccagcgactatgtcgtagtgggtaaagcgcttacggagttcgatccgtaagaagcatcagag

SEQ ID NO: 17349 - RNA, 99 nt, synthetic construct
  misc_feature 1..99: note = engineered ribonucleic acid scaffold (ERS) sequence
  source 1..99: mol_type = other RNA
actggcgcttctatcttgattactctgagcgccatcaccagcgactatgtcgtagtgggtaaagcgcttacggagttcgatccgtaagaagcatcagag

SEQ ID NO: 17350 - RNA, 98 nt, synthetic construct
  misc_feature 1..98: note = engineered ribonucleic acid scaffold (ERS) sequence
  source 1..98: mol_type = other RNA
actggcgcttctatcagattactctgagcgccatcaccagcgactatgtcgtagtgggtaaagcgcttacggagttcgatccgtaagaagcatcagag

SEQ ID NO: 17351 - RNA, 98 nt, synthetic construct
  misc_feature 1..98: note = engineered ribonucleic acid scaffold (ERS) sequence
  source 1..98: mol_type = other RNA
actggcgcttctatcggattactctgagcgccatcaccagcgactatgtcgtagtgggtaaagcgcttacggagttcgatccgtaagaagcatcagag

SEQ ID NO: 17352 - RNA, 99 nt, synthetic construct
  misc_feature 1..99: note = engineered ribonucleic acid scaffold (ERS) sequence
  source 1..99: mol_type = other RNA
actggcgcttctatctgaattactctgagcgccatcaccagcgactatgtcgtagtgggtaaagcgcttacggagttcgatccgtaagaagcatcagag

SEQ ID NO: 17353 - RNA, 99 nt, synthetic construct
  misc_feature 1..99: note = engineered ribonucleic acid scaffold (ERS) sequence
  source 1..99: mol_type = other RNA
actggcgcttctatctgtattactctgagcgccatcaccagcgactatgtcgtagtgggtaaagcgcttacggagttcgatccgtaagaagcatcagag

SEQ ID NO: 17354 - RNA, 98 nt, synthetic construct
  misc_feature 1..98: note = engineered ribonucleic acid scaffold (ERS) sequence
  source 1..98: mol_type = other RNA
actggcgcttctatctggttactctgagcgccatcaccagcgactatgtcgtagtgggtaaagcgcttacggagttcgatccgtaagaagcatcagag

SEQ ID NO: 17355 - RNA, 98 nt, synthetic construct
  misc_feature 1..98: note = engineered ribonucleic acid scaffold (ERS) sequence
  source 1..98: mol_type = other RNA
actggcgcttctatctgtttactctgagcgccatcaccagcgactatgtcgtagtgggtaaagcgcttacggagttcgatccgtaagaagcatcagag

SEQ ID NO: 17356 - RNA, 99 nt, synthetic construct
  misc_feature 1..99: note = engineered ribonucleic acid scaffold (ERS) sequence
  source 1..99: mol_type = other RNA
actggcgcttctatctgatttactctgagcgccatcaccagcgactatgtcgtagtgggtaaagcgcttacggagttcgatccgtaagaagcatcagag

SEQ ID NO: 17357 - RNA, 98 nt, synthetic construct
  misc_feature 1..98: note = engineered ribonucleic acid scaffold (ERS) sequence
  source 1..98: mol_type = other RNA
actggcgcttctatctgattgctctgagcgccatcaccagcgactatgtcgtagtgggtaaagcgcttacggagttcgatccgtaagaagcatcagag

SEQ ID NO: 17358 - RNA, 100 nt, synthetic construct
  misc_feature 1..100: note = engineered ribonucleic acid scaffold (ERS) sequence
  source 1..100: mol_type = other RNA
actggcgcttctatatctgattactctgagcgccatcaccagcgactatgtcgtagtgggtaaagcgctttcggacttcggtccggaagaagcatcagag

SEQ ID NO: 17359 - RNA, 99 nt, synthetic construct
  misc_feature 1..99: note = engineered ribonucleic acid scaffold (ERS) sequence
  source 1..99: mol_type = other RNA
actggcgcttctaatctgattactctgagcgccatcaccagcgactatgtcgtagtgggtaaagcgctttcggacttcggtccggaagaagcatcagag

SEQ ID NO: 17360 - RNA, 97 nt, synthetic construct
  misc_feature 1..97: note = engineered ribonucleic acid scaffold (ERS) sequence
  source 1..97: mol_type = other RNA
actggcgcttctactgattactctgagcgccatcaccagcgactatgtcgtagtgggtaaagcgctttcggacttcggtccggaagaagcatcagag

SEQ ID NO: 17361 - RNA, 98 nt, synthetic construct
  misc_feature 1..98: note = engineered ribonucleic acid scaffold (ERS) sequence
  source 1..98: mol_type = other RNA
actggcgcttctaactgattactctgagcgccatcaccagcgactatgtcgtagtgggtaaagcgctttcggacttcggtccggaagaagcatcagag

SEQ ID NO: 17362 - RNA, 98 nt, synthetic construct
  misc_feature 1..98: note = engineered ribonucleic acid scaffold (ERS) sequence
  source 1..98: mol_type = other RNA
actggcgcttctacctgattactctgagcgccatcaccagcgactatgtcgtagtgggtaaagcgctttcggacttcggtccggaagaagcatcagag

SEQ ID NO: 17363 - RNA, 98 nt, synthetic construct
  misc_feature 1..98: note = engineered ribonucleic acid scaffold (ERS) sequence
  source 1..98: mol_type = other RNA
actggcgcttctagctgattactctgagcgccatcaccagcgactatgtcgtagtgggtaaagcgctttcggacttcggtccggaagaagcatcagag

SEQ ID NO: 17364 - RNA, 100 nt, synthetic construct
  misc_feature 1..100: note = engineered ribonucleic acid scaffold (ERS) sequence
  source 1..100: mol_type = other RNA
actggcgcttctattactgattactctgagcgccatcaccagcgactatgtcgtagtgggtaaagcgctttcggacttcggtccggaagaagcatcagag

SEQ ID NO: 17365 - RNA, 98 nt, synthetic construct
  misc_feature 1..98: note = engineered ribonucleic acid scaffold (ERS) sequence
  source 1..98: mol_type = other RNA
actggcgcttctatatgattactctgagcgccatcaccagcgactatgtcgtagtgggtaaagcgctttcggacttcggtccggaagaagcatcagag

SEQ ID NO: 17366 - RNA, 98 nt, synthetic construct
  misc_feature 1..98: note = engineered ribonucleic acid scaffold (ERS) sequence
  source 1..98: mol_type = other RNA
actggcgcttctatgtgattactctgagcgccatcaccagcgactatgtcgtagtgggtaaagcgctttcggacttcggtccggaagaagcatcagag

SEQ ID NO: 17367 - RNA, 98 nt, synthetic construct
  misc_feature 1..98: note = engineered ribonucleic acid scaffold (ERS) sequence
  source 1..98: mol_type = other RNA
actggcgcttctatttgattactctgagcgccatcaccagcgactatgtcgtagtgggtaaagcgctttcggacttcggtccggaagaagcatcagag

SEQ ID NO: 17368 - RNA, 99 nt, synthetic construct
  misc_feature 1..99: note = engineered ribonucleic acid scaffold (ERS) sequence
  source 1..99: mol_type = other RNA
actggcgcttctatcttgattactctgagcgccatcaccagcgactatgtcgtagtgggtaaagcgctttcggacttcggtccggaagaagcatcagag

SEQ ID NO: 17369 - RNA, 98 nt, synthetic construct
  misc_feature 1..98: note = engineered ribonucleic acid scaffold (ERS) sequence
  source 1..98: mol_type = other RNA
actggcgcttctatcagattactctgagcgccatcaccagcgactatgtcgtagtgggtaaagcgctttcggacttcggtccggaagaagcatcagag

SEQ ID NO: 17370 - RNA, 98 nt, synthetic construct
  misc_feature 1..98: note = engineered ribonucleic acid scaffold (ERS) sequence
  source 1..98: mol_type = other RNA
actggcgcttctatcggattactctgagcgccatcaccagcgactatgtcgtagtgggtaaagcgctttcggacttcggtccggaagaagcatcagag

SEQ ID NO: 17371 - RNA, 99 nt, synthetic construct
  misc_feature 1..99: note = engineered ribonucleic acid scaffold (ERS) sequence
  source 1..99: mol_type = other RNA
actggcgcttctatctgaattactctgagcgccatcaccagcgactatgtcgtagtgggtaaagcgctttcggacttcggtccggaagaagcatcagag

SEQ ID NO: 17372 - RNA, 99 nt, synthetic construct
  misc_feature 1..99: note = engineered ribonucleic acid scaffold (ERS) sequence
  source 1..99: mol_type = other RNA
actggcgcttctatctgtattactctgagcgccatcaccagcgactatgtcgtagtgggtaaagcgctttcggacttcggtccggaagaagcatcagag

SEQ ID NO: 17373 - RNA, 98 nt, synthetic construct
  misc_feature 1..98: note = engineered ribonucleic acid scaffold (ERS) sequence
  source 1..98: mol_type = other RNA
actggcgcttctatctggttactctgagcgccatcaccagcgactatgtcgtagtgggtaaagcgctttcggacttcggtccggaagaagcatcagag

SEQ ID NO: 17374 - RNA, 98 nt, synthetic construct
  misc_feature 1..98: note = engineered ribonucleic acid scaffold (ERS) sequence
  source 1..98: mol_type = other RNA
actggcgcttctatctgtttactctgagcgccatcaccagcgactatgtcgtagtgggtaaagcgctttcggacttcggtccggaagaagcatcagag

SEQ ID NO: 17375 - RNA, 99 nt, synthetic construct
  misc_feature 1..99: note = engineered ribonucleic acid scaffold (ERS) sequence
  source 1..99: mol_type = other RNA
actggcgcttctatctgatttactctgagcgccatcaccagcgactatgtcgtagtgggtaaagcgctttcggacttcggtccggaagaagcatcagag

SEQ ID NO: 17376 - RNA, 98 nt, synthetic construct
  misc_feature 1..98: note = engineered ribonucleic acid scaffold (ERS) sequence
  source 1..98: mol_type = other RNA
actggcgcttctatctgattgctctgagcgccatcaccagcgactatgtcgtagtgggtaaagcgctttcggacttcggtccggaagaagcatcagag

SEQ ID NO: 17377 - RNA, 104 nt, synthetic construct
  misc_feature 1..104: note = engineered ribonucleic acid scaffold (ERS) sequence
  source 1..104: mol_type = other RNA
actggcgcttctatatctgattactctgagcgccatcaccagcgactatgtcgtagtgggtaaagcggcagatctgagcctccgagctctctgccgcatcagag

SEQ ID NO: 17378 - RNA, 103 nt, synthetic construct
  misc_feature 1..103: note = engineered ribonucleic acid scaffold (ERS) sequence
  source 1..103: mol_type = other RNA
actggcgcttctaatctgattactctgagcgccatcaccagcgactatgtcgtagtgggtaaagcggcagatctgagcctccgagctctctgccgcatcagag

SEQ ID NO: 17379 - RNA, 101 nt, synthetic construct
  misc_feature 1..101: note = engineered ribonucleic acid scaffold (ERS) sequence
  source 1..101: mol_type = other RNA
actggcgcttctactgattactctgagcgccatcaccagcgactatgtcgtagtgggtaaagcggcagatctgagcctccgagctctctgccgcatcagag

SEQ ID NO: 17380 - RNA, 102 nt, synthetic construct
  misc_feature 1..102: note = engineered ribonucleic acid scaffold (ERS) sequence
  source 1..102: mol_type = other RNA
actggcgcttctaactgattactctgagcgccatcaccagcgactatgtcgtagtgggtaaagcggcagatctgagcctccgagctctctgccgcatcagag

SEQ ID NO: 17381 - RNA, 102 nt, synthetic construct
  misc_feature 1..102: note = engineered ribonucleic acid scaffold (ERS) sequence
  source 1..102: mol_type = other RNA
actggcgcttctacctgattactctgagcgccatcaccagcgactatgtcgtagtgggtaaagcggcagatctgagcctccgagctctctgccgcatcagag

SEQ ID NO: 17382 - RNA, 102 nt, synthetic construct
  misc_feature 1..102: note = engineered ribonucleic acid scaffold (ERS) sequence
  source 1..102: mol_type = other RNA
actggcgcttctagctgattactctgagcgccatcaccagcgactatgtcgtagtgggtaaagcggcagatctgagcctccgagctctctgccgcatcagag

SEQ ID NO: 17383 - RNA, 104 nt, synthetic construct
  misc_feature 1..104: note = engineered ribonucleic acid scaffold (ERS) sequence
  source 1..104: mol_type = other RNA
actggcgcttctattactgattactctgagcgccatcaccagcgactatgtcgtagtgggtaaagcggcagatctgagcctccgagctctctgccgcatcagag

SEQ ID NO: 17384 - RNA, 102 nt, synthetic construct
  misc_feature 1..102: note = engineered ribonucleic acid scaffold (ERS) sequence
  source 1..102: mol_type = other RNA
actggcgcttctatatgattactctgagcgccatcaccagcgactatgtcgtagtgggtaaagcggcagatctgagcctccgagctctctgccgcatcagag

SEQ ID NO: 17385 - RNA, 102 nt, synthetic construct
  misc_feature 1..102: note = engineered ribonucleic acid scaffold (ERS) sequence
  source 1..102: mol_type = other RNA
actggcgcttctatgtgattactctgagcgccatcaccagcgactatgtcgtagtgggtaaagcggcagatctgagcctccgagctctctgccgcatcagag

SEQ ID NO: 17386 - RNA, 102 nt, synthetic construct
  misc_feature 1..102: note = engineered ribonucleic acid scaffold (ERS) sequence
  source 1..102: mol_type = other RNA
actggcgcttctatttgattactctgagcgccatcaccagcgactatgtcgtagtgggtaaagcggcagatctgagcctccgagctctctgccgcatcagag

SEQ ID NO: 17387 - RNA, 103 nt, synthetic construct
  misc_feature 1..103: note = engineered ribonucleic acid scaffold (ERS) sequence
  source 1..103: mol_type = other RNA
actggcgcttctatcttgattactctgagcgccatcaccagcgactatgtcgtagtgggtaaagcggcagatctgagcctccgagctctctgccgcatcagag

SEQ ID NO: 17388 - RNA, 102 nt, synthetic construct
  misc_feature 1..102: note = engineered ribonucleic acid scaffold (ERS) sequence
  source 1..102: mol_type = other RNA
actggcgcttctatcagattactctgagcgccatcaccagcgactatgtcgtagtgggtaaagcggcagatctgagcctccgagctctctgccgcatcagag

SEQ ID NO: 17389 - RNA, 102 nt, synthetic construct
  misc_feature 1..102: note = engineered ribonucleic acid scaffold (ERS) sequence
  source 1..102: mol_type = other RNA
actggcgcttctatcggattactctgagcgccatcaccagcgactatgtcgtagtgggtaaagcggcagatctgagcctccgagctctctgccgcatcagag

SEQ ID NO: 17390 - RNA, 103 nt, synthetic construct
  misc_feature 1..103: note = engineered ribonucleic acid scaffold (ERS) sequence
  source 1..103: mol_type = other RNA
actggcgcttctatctgaattactctgagcgccatcaccagcgactatgtcgtagtgggtaaagcggcagatctgagcctccgagctctctgccgcatcagag

SEQ ID NO: 17391 - RNA, 103 nt, synthetic construct
  misc_feature 1..103: note = engineered ribonucleic acid scaffold (ERS) sequence
  source 1..103: mol_type = other RNA
actggcgcttctatctgtattactctgagcgccatcaccagcgactatgtcgtagtgggtaaagcggcagatctgagcctccgagctctctgccgcatcagag

SEQ ID NO: 17392 - RNA, 102 nt, synthetic construct
  misc_feature 1..102: note = engineered ribonucleic acid scaffold (ERS) sequence
  source 1..102: mol_type = other RNA
actggcgcttctatctggttactctgagcgccatcaccagcgactatgtcgtagtgggtaaagcggcagatctgagcctccgagctctctgccgcatcagag

SEQ ID NO: 17393 - RNA, 102 nt, synthetic construct
  misc_feature 1..102: note = engineered ribonucleic acid scaffold (ERS) sequence
  source 1..102: mol_type = other RNA
actggcgcttctatctgtttactctgagcgccatcaccagcgactatgtcgtagtgggtaaagcggcagatctgagcctccgagctctctgccgcatcagag

SEQ ID NO: 17394 - RNA, 103 nt, synthetic construct
  misc_feature 1..103: note = engineered ribonucleic acid scaffold (ERS) sequence
  source 1..103: mol_type = other RNA
actggcgcttctatctgatttactctgagcgccatcaccagcgactatgtcgtagtgggtaaagcggcagatctgagcctccgagctctctgccgcatcagag

SEQ ID NO: 17395 - RNA, 102 nt, synthetic construct
  misc_feature 1..102: note = engineered ribonucleic acid scaffold (ERS) sequence
  source 1..102: mol_type = other RNA
actggcgcttctatctgattgctctgagcgccatcaccagcgactatgtcgtagtgggtaaagcggcagatctgagcctccgagctctctgccgcatcagag

SEQ ID NO: 17396 - RNA, 100 nt, synthetic construct
  misc_feature 1..100: note = engineered ribonucleic acid scaffold (ERS) sequence
  source 1..100: mol_type = other RNA
actggcgcttctatatctgattactctgagcgccatcaccagcgactatgtcgtagtgggtaaagcggttacggacttcggtccgtaagacgcatcagag

SEQ ID NO: 17397 - RNA, 99 nt, synthetic construct
  misc_feature 1..99: note = engineered ribonucleic acid scaffold (ERS) sequence
  source 1..99: mol_type = other RNA
actggcgcttctaatctgattactctgagcgccatcaccagcgactatgtcgtagtgggtaaagcggttacggacttcggtccgtaagacgcatcagag

SEQ ID NO: 17398 - RNA, 97 nt, synthetic construct
  misc_feature 1..97: note = engineered ribonucleic acid scaffold (ERS) sequence
  source 1..97: mol_type = other RNA
actggcgcttctactgattactctgagcgccatcaccagcgactatgtcgtagtgggtaaagcggttacggacttcggtccgtaagacgcatcagag

SEQ ID NO: 17399 - RNA, 98 nt, synthetic construct
  misc_feature 1..98: note = engineered ribonucleic acid scaffold (ERS) sequence
  source 1..98: mol_type = other RNA
actggcgcttctaactgattactctgagcgccatcaccagcgactatgtcgtagtgggtaaagcggttacggacttcggtccgtaagacgcatcagag

SEQ ID NO: 17400 - RNA, 98 nt, synthetic construct
  misc_feature 1..98: note = engineered ribonucleic acid scaffold (ERS) sequence
  source 1..98: mol_type = other RNA
actggcgcttctacctgattactctgagcgccatcaccagcgactatgtcgtagtgggtaaagcggttacggacttcggtccgtaagacgcatcagag

SEQ ID NO: 17401 - RNA, 98 nt, synthetic construct
  misc_feature 1..98: note = engineered ribonucleic acid scaffold (ERS) sequence
  source 1..98: mol_type = other RNA
actggcgcttctagctgattactctgagcgccatcaccagcgactatgtcgtagtgggtaaagcggttacggacttcggtccgtaagacgcatcagag

SEQ ID NO: 17402 - RNA, 100 nt, synthetic construct
  misc_feature 1..100: note = engineered ribonucleic acid scaffold (ERS) sequence
  source 1..100: mol_type = other RNA
actggcgcttctattactgattactctgagcgccatcaccagcgactatgtcgtagtgggtaaagcggttacggacttcggtccgtaagacgcatcagag

SEQ ID NO: 17403 - RNA, 98 nt, synthetic construct
  misc_feature 1..98: note = engineered ribonucleic acid scaffold (ERS) sequence
  source 1..98: mol_type = other RNA
actggcgcttctatatgattactctgagcgccatcaccagcgactatgtcgtagtgggtaaagcggttacggacttcggtccgtaagacgcatcagag

SEQ ID NO: 17404 - RNA, 98 nt, synthetic construct
  misc_feature 1..98: note = engineered ribonucleic acid scaffold (ERS) sequence
  source 1..98: mol_type = other RNA
actggcgcttctatgtgattactctgagcgccatcaccagcgactatgtcgtagtgggtaaagcggttacggacttcggtccgtaagacgcatcagag

SEQ ID NO: 17405 - RNA, 98 nt, synthetic construct
  misc_feature 1..98: note = engineered ribonucleic acid scaffold (ERS) sequence
  source 1..98: mol_type = other RNA
actggcgcttctatttgattactctgagcgccatcaccagcgactatgtcgtagtgggtaaagcggttacggacttcggtccgtaagacgcatcagag

SEQ ID NO: 17406 - RNA, 99 nt, synthetic construct
  misc_feature 1..99: note = engineered ribonucleic acid scaffold (ERS) sequence
  source 1..99: mol_type = other RNA
actggcgcttctatcttgattactctgagcgccatcaccagcgactatgtcgtagtgggtaaagcggttacggacttcggtccgtaagacgcatcagag

SEQ ID NO: 17407 - RNA, 98 nt, synthetic construct
  misc_feature 1..98: note = engineered ribonucleic acid scaffold (ERS) sequence
  source 1..98: mol_type = other RNA
actggcgcttctatcagattactctgagcgccatcaccagcgactatgtcgtagtgggtaaagcggttacggacttcggtccgtaagacgcatcagag

SEQ ID NO: 17408 - RNA, 98 nt, synthetic construct
  misc_feature 1..98: note = engineered ribonucleic acid scaffold (ERS) sequence
  source 1..98: mol_type = other RNA
actggcgcttctatcggattactctgagcgccatcaccagcgactatgtcgtagtgggtaaagcggttacggacttcggtccgtaagacgcatcagag

SEQ ID NO: 17409 - RNA, 99 nt, synthetic construct
  misc_feature 1..99: note = engineered ribonucleic acid scaffold (ERS) sequence
  source 1..99: mol_type = other RNA
actggcgcttctatctgaattactctgagcgccatcaccagcgactatgtcgtagtgggtaaagcggttacggacttcggtccgtaagacgcatcagag

SEQ ID NO: 17410 - RNA, 99 nt, synthetic construct
  misc_feature 1..99: note = engineered ribonucleic acid scaffold (ERS) sequence
  source 1..99: mol_type = other RNA
actggcgcttctatctgtattactctgagcgccatcaccagcgactatgtcgtagtgggtaaagcggttacggacttcggtccgtaagacgcatcagag

SEQ ID NO: 17411 - RNA, 98 nt, synthetic construct
  misc_feature 1..98: note = engineered ribonucleic acid scaffold (ERS) sequence
  source 1..98: mol_type = other RNA
actggcgcttctatctggttactctgagcgccatcaccagcgactatgtcgtagtgggtaaagcggttacggacttcggtccgtaagacgcatcagag

SEQ ID NO: 17412 - RNA, 98 nt, synthetic construct
  misc_feature 1..98: note = engineered ribonucleic acid scaffold (ERS) sequence
  source 1..98: mol_type = other RNA
actggcgcttctatctgtttactctgagcgccatcaccagcgactatgtcgtagtgggtaaagcggttacggacttcggtccgtaagacgcatcagag

SEQ ID NO: 17413 - RNA, 99 nt, synthetic construct
  misc_feature 1..99: note = engineered ribonucleic acid scaffold (ERS) sequence
  source 1..99: mol_type = other RNA
actggcgcttctatctgatttactctgagcgccatcaccagcgactatgtcgtagtgggtaaagcggttacggacttcggtccgtaagacgcatcagag

SEQ ID NO: 17414 - RNA, 98 nt, synthetic construct
  misc_feature 1..98: note = engineered ribonucleic acid scaffold (ERS) sequence
  source 1..98: mol_type = other RNA
actggcgcttctatctgattgctctgagcgccatcaccagcgactatgtcgtagtgggtaaagcggttacggacttcggtccgtaagacgcatcagag

SEQ ID NO: 17415 - RNA, 77 nt, synthetic construct
  misc_feature 1..77: note = engineered ribonucleic acid scaffold (ERS) sequence
  source 1..77: mol_type = other RNA
actggcgcttctatatctgattactctgagcgccatcaccagcgactatgtcgtagtgggtaaagctagcatcagag

SEQ ID NO: 17416 - RNA, 76 nt, synthetic construct
  misc_feature 1..76: note = engineered ribonucleic acid scaffold (ERS) sequence
  source 1..76: mol_type = other RNA
actggcgcttctaatctgattactctgagcgccatcaccagcgactatgtcgtagtgggtaaagctagcatcagag

SEQ ID NO: 17417 - RNA, 74 nt, synthetic construct
  misc_feature 1..74: note = engineered ribonucleic acid scaffold (ERS) sequence
  source 1..74: mol_type = other RNA
actggcgcttctactgattactctgagcgccatcaccagcgactatgtcgtagtgggtaaagctagcatcagag

SEQ ID NO: 17418 - RNA, 75 nt, synthetic construct
  misc_feature 1..75: note = engineered ribonucleic acid scaffold (ERS) sequence
  source 1..75: mol_type = other RNA
actggcgcttctaactgattactctgagcgccatcaccagcgactatgtcgtagtgggtaaagctagcatcagag

SEQ ID NO: 17419 - RNA, 75 nt, synthetic construct
  misc_feature 1..75: note = engineered ribonucleic acid scaffold (ERS) sequence
  source 1..75: mol_type = other RNA
actggcgcttctacctgattactctgagcgccatcaccagcgactatgtcgtagtgggtaaagctagcatcagag

SEQ ID NO: 17420 - RNA, 75 nt, synthetic construct
  misc_feature 1..75: note = engineered ribonucleic acid scaffold (ERS) sequence
  source 1..75: mol_type = other RNA
actggcgcttctagctgattactctgagcgccatcaccagcgactatgtcgtagtgggtaaagctagcatcagag

SEQ ID NO: 17421 - RNA, 77 nt, synthetic construct
  misc_feature 1..77: note = engineered ribonucleic acid scaffold (ERS) sequence
  source 1..77: mol_type = other RNA
actggcgcttctattactgattactctgagcgccatcaccagcgactatgtcgtagtgggtaaagctagcatcagag

SEQ ID NO: 17422 - RNA, 75 nt, synthetic construct
  misc_feature 1..75: note = engineered ribonucleic acid scaffold (ERS) sequence
  source 1..75: mol_type = other RNA
actggcgcttctatatgattactctgagcgccatcaccagcgactatgtcgtagtgggtaaagctagcatcagag

SEQ ID NO: 17423 - RNA, 75 nt, synthetic construct
  misc_feature 1..75: note = engineered ribonucleic acid scaffold (ERS) sequence
  source 1..75: mol_type = other RNA
actggcgcttctatgtgattactctgagcgccatcaccagcgactatgtcgtagtgggtaaagctagcatcagag

SEQ ID NO: 17424 - RNA, 75 nt, synthetic construct
  misc_feature 1..75: note = engineered ribonucleic acid scaffold (ERS) sequence
  source 1..75: mol_type = other RNA
actggcgcttctatttgattactctgagcgccatcaccagcgactatgtcgtagtgggtaaagctagcatcagag

SEQ ID NO: 17425 - RNA, 76 nt, synthetic construct
  misc_feature 1..76: note = engineered ribonucleic acid scaffold (ERS) sequence
  source 1..76: mol_type = other RNA
actggcgcttctatcttgattactctgagcgccatcaccagcgactatgtcgtagtgggtaaagctagcatcagag

SEQ ID NO: 17426 - RNA, 75 nt, synthetic construct
  misc_feature 1..75: note = engineered ribonucleic acid scaffold (ERS) sequence
  source 1..75: mol_type = other RNA
actggcgcttctatcagattactctgagcgccatcaccagcgactatgtcgtagtgggtaaagctagcatcagag

SEQ ID NO: 17427 - RNA, 75 nt, synthetic construct
  misc_feature 1..75: note = engineered ribonucleic acid scaffold (ERS) sequence
  source 1..75: mol_type = other RNA
actggcgcttctatcggattactctgagcgccatcaccagcgactatgtcgtagtgggtaaagctagcatcagag

SEQ ID NO: 17428 - RNA, 76 nt, synthetic construct
  misc_feature 1..76: note = engineered ribonucleic acid scaffold (ERS) sequence
  source 1..76: mol_type = other RNA
actggcgcttctatctgaattactctgagcgccatcaccagcgactatgtcgtagtgggtaaagctagcatcagag

SEQ ID NO: 17429 - RNA, 76 nt, synthetic construct
  misc_feature 1..76: note = engineered ribonucleic acid scaffold (ERS) sequence
  source 1..76: mol_type = other RNA
actggcgcttctatctgtattactctgagcgccatcaccagcgactatgtcgtagtgggtaaagctagcatcagag

SEQ ID NO: 17430 - RNA, 75 nt, synthetic construct
  misc_feature 1..75: note = engineered ribonucleic acid scaffold (ERS) sequence
  source 1..75: mol_type = other RNA
actggcgcttctatctggttactctgagcgccatcaccagcgactatgtcgtagtgggtaaagctagcatcagag

SEQ ID NO: 17431 - RNA, 75 nt, synthetic construct
  misc_feature 1..75: note = engineered ribonucleic acid scaffold (ERS) sequence
  source 1..75: mol_type = other RNA
actggcgcttctatctgtttactctgagcgccatcaccagcgactatgtcgtagtgggtaaagctagcatcagag

SEQ ID NO: 17432 - RNA, 76 nt, synthetic construct
  misc_feature 1..76: note = engineered ribonucleic acid scaffold (ERS) sequence
  source 1..76: mol_type = other RNA
actggcgcttctatctgatttactctgagcgccatcaccagcgactatgtcgtagtgggtaaagctagcatcagag

SEQ ID NO: 17433 - RNA, 75 nt, synthetic construct
  misc_feature 1..75: note = engineered ribonucleic acid scaffold (ERS) sequence
  source 1..75: mol_type = other RNA
actggcgcttctatctgattgctctgagcgccatcaccagcgactatgtcgtagtgggtaaagctagcatcagag

SEQ ID NO: 17434 - RNA, 91 nt, synthetic construct
  misc_feature 1..91: note = engineered ribonucleic acid scaffold (ERS) sequence
  source 1..91: mol_type = other RNA
actggcgcttctatatctgattactctgagcgccatcaccagcgactatgtcgtagtgggtaaagctccctattcggatggagcatcagag

SEQ ID NO: 17435 - RNA, 90 nt, synthetic construct
  misc_feature 1..90: note = engineered ribonucleic acid scaffold (ERS) sequence
  source 1..90: mol_type = other RNA
actggcgcttctaatctgattactctgagcgccatcaccagcgactatgtcgtagtgggtaaagctccctattcggatggagcatcagag

SEQ ID NO: 17436 - RNA, 88 nt, synthetic construct
  misc_feature 1..88: note = engineered ribonucleic acid scaffold (ERS) sequence
  source 1..88: mol_type = other RNA
actggcgcttctactgattactctgagcgccatcaccagcgactatgtcgtagtgggtaaagctccctattcggatggagcatcagag

SEQ ID NO: 17437 - RNA, 89 nt, synthetic construct
  misc_feature 1..89: note = engineered ribonucleic acid scaffold (ERS) sequence
  source 1..89: mol_type = other RNA
actggcgcttctaactgattactctgagcgccatcaccagcgactatgtcgtagtgggtaaagctccctattcggatggagcatcagag

SEQ ID NO: 17438 - RNA, 89 nt, synthetic construct
  misc_feature 1..89: note = engineered ribonucleic acid scaffold (ERS) sequence
  source 1..89: mol_type = other RNA
actggcgcttctacctgattactctgagcgccatcaccagcgactatgtcgtagtgggtaaagctccctattcggatggagcatcagag

SEQ ID NO: 17439 - RNA, 89 nt, synthetic construct
  misc_feature 1..89: note = engineered ribonucleic acid scaffold (ERS) sequence
  source 1..89: mol_type = other RNA
actggcgcttctagctgattactctgagcgccatcaccagcgactatgtcgtagtgggtaaagctccctattcggatggagcatcagag

SEQ ID NO: 17440 - RNA, 91 nt, synthetic construct
  misc_feature 1..91: note = engineered ribonucleic acid scaffold (ERS) sequence
  source 1..91: mol_type = other RNA
actggcgcttctattactgattactctgagcgccatcaccagcgactatgtcgtagtgggtaaagctccctattcggatggagcatcagag

SEQ ID NO: 17441 - RNA, 89 nt, synthetic construct
  misc_feature 1..89: note = engineered ribonucleic acid scaffold (ERS) sequence
  source 1..89: mol_type = other RNA
actggcgcttctatatgattactctgagcgccatcaccagcgactatgtcgtagtgggtaaagctccctattcggatggagcatcagag

SEQ ID NO: 17442 - RNA, 89 nt, synthetic construct
  misc_feature 1..89: note = engineered ribonucleic acid scaffold (ERS) sequence
  source 1..89: mol_type = other RNA
actggcgcttctatgtgattactctgagcgccatcaccagcgactatgtcgtagtgggtaaagctccctattcggatggagcatcagag

SEQ ID NO: 17443 - RNA, 89 nt, synthetic construct
  misc_feature 1..89: note = engineered ribonucleic acid scaffold (ERS) sequence
  source 1..89: mol_type = other RNA
actggcgcttctatttgattactctgagcgccatcaccagcgactatgtcgtagtgggtaaagctccctattcggatggagcatcagag

SEQ ID NO: 17444 - RNA, 90 nt, synthetic construct
  misc_feature 1..90: note = engineered ribonucleic acid scaffold (ERS) sequence
  source 1..90: mol_type = other RNA
actggcgcttctatcttgattactctgagcgccatcaccagcgactatgtcgtagtgggtaaagctccctattcggatggagcatcagag

SEQ ID NO: 17445 - RNA, 89 nt, synthetic construct
  misc_feature 1..89: note = engineered ribonucleic acid scaffold (ERS) sequence
  source 1..89: mol_type = other RNA
actggcgcttctatcagattactctgagcgccatcaccagcgactatgtcgtagtgggtaaagctccctattcggatggagcatcagag

SEQ ID NO: 17446 - RNA, 89 nt, synthetic construct
  misc_feature 1..89: note = engineered ribonucleic acid scaffold (ERS) sequence
  source 1..89: mol_type = other RNA
actggcgcttctatcggattactctgagcgccatcaccagcgactatgtcgtagtgggtaaagctccctattcggatggagcatcagag

SEQ ID NO: 17447 - RNA, 90 nt, synthetic construct
  misc_feature 1..90: note = engineered ribonucleic acid scaffold (ERS) sequence
  source 1..90: mol_type = other RNA
actggcgcttctatctgaattactctgagcgccatcaccagcgactatgtcgtagtgggtaaagctccctattcggatggagcatcagag

SEQ ID NO: 17448 - RNA, 90 nt, synthetic construct
  misc_feature 1..90: note = engineered ribonucleic acid scaffold (ERS) sequence
  source 1..90: mol_type = other RNA
actggcgcttctatctgtattactctgagcgccatcaccagcgactatgtcgtagtgggtaaagctccctattcggatggagcatcagag

SEQ ID NO: 17449 - RNA, 89 nt, synthetic construct
  misc_feature 1..89: note = engineered ribonucleic acid scaffold (ERS) sequence
  source 1..89: mol_type = other RNA
actggcgcttctatctggttactctgagcgccatcaccagcgactatgtcgtagtgggtaaagctccctattcggatggagcatcagag

SEQ ID NO: 17450 - RNA, 89 nt, synthetic construct
  misc_feature 1..89: note = engineered ribonucleic acid scaffold (ERS) sequence
  source 1..89: mol_type = other RNA
actggcgcttctatctgtttactctgagcgccatcaccagcgactatgtcgtagtgggtaaagctccctattcggatggagcatcagag

SEQ ID NO: 17451 - RNA, 90 nt, synthetic construct
  misc_feature 1..90: note = engineered ribonucleic acid scaffold (ERS) sequence
  source 1..90: mol_type = other RNA
actggcgcttctatctgatttactctgagcgccatcaccagcgactatgtcgtagtgggtaaagctccctattcggatggagcatcagag

SEQ ID NO: 17452 - RNA, 89 nt, synthetic construct
  misc_feature 1..89: note = engineered ribonucleic acid scaffold (ERS) sequence
  source 1..89: mol_type = other RNA
actggcgcttctatctgattgctctgagcgccatcaccagcgactatgtcgtagtgggtaaagctccctattcggatggagcatcagag

SEQ ID NO: 17453 - RNA, 97 nt, synthetic construct
  misc_feature 1..97: note = engineered ribonucleic acid scaffold (ERS) sequence
  source 1..97: mol_type = other RNA
actggcgcttctatatctgattactctgagcgccatcaccagcgactatgtcgtagtgggtaaagctccctcacagggatgtgagggagcatcagag

SEQ ID NO: 17454 - RNA, 96 nt, synthetic construct
  misc_feature 1..96: note = engineered ribonucleic acid scaffold (ERS) sequence
  source 1..96: mol_type = other RNA
actggcgcttctaatctgattactctgagcgccatcaccagcgactatgtcgtagtgggtaaagctccctcacagggatgtgagggagcatcagag

SEQ ID NO: 17455 - RNA, 94 nt, synthetic construct
  misc_feature 1..94: note = engineered ribonucleic acid scaffold (ERS) sequence
  source 1..94: mol_type = other RNA
actggcgcttctactgattactctgagcgccatcaccagcgactatgtcgtagtgggtaaagctccctcacagggatgtgagggagcatcagag

SEQ ID NO: 17456 - RNA, 95 nt, synthetic construct
  misc_feature 1..95: note = engineered ribonucleic acid scaffold (ERS) sequence
  source 1..95: mol_type = other RNA
actggcgcttctaactgattactctgagcgccatcaccagcgactatgtcgtagtgggtaaagctccctcacagggatgtgagggagcatcagag

SEQ ID NO: 17457 - RNA, 95 nt, synthetic construct
  misc_feature 1..95: note = engineered ribonucleic acid scaffold (ERS) sequence
  source 1..95: mol_type = other RNA
actggcgcttctacctgattactctgagcgccatcaccagcgactatgtcgtagtgggtaaagctccctcacagggatgtgagggagcatcagag

SEQ ID NO: 17458 - RNA, 95 nt, synthetic construct
  misc_feature 1..95: note = engineered ribonucleic acid scaffold (ERS) sequence
  source 1..95: mol_type = other RNA
actggcgcttctagctgattactctgagcgccatcaccagcgactatgtcgtagtgggtaaagctccctcacagggatgtgagggagcatcagag

SEQ ID NO: 17459 - RNA, 97 nt, synthetic construct
  misc_feature 1..97: note = engineered ribonucleic acid scaffold (ERS) sequence
  source 1..97: mol_type = other RNA
actggcgcttctattactgattactctgagcgccatcaccagcgactatgtcgtagtgggtaaagctccctcacagggatgtgagggagcatcagag

SEQ ID NO: 17460 - RNA, 95 nt, synthetic construct
  misc_feature 1..95: note = engineered ribonucleic acid scaffold (ERS) sequence
  source 1..95: mol_type = other RNA
actggcgcttctatatgattactctgagcgccatcaccagcgactatgtcgtagtgggtaaagctccctcacagggatgtgagggagcatcagag

SEQ ID NO: 17461 - RNA, 95 nt, synthetic construct
  misc_feature 1..95: note = engineered ribonucleic acid scaffold (ERS) sequence
  source 1..95: mol_type = other RNA
actggcgcttctatgtgattactctgagcgccatcaccagcgactatgtcgtagtgggtaaagctccctcacagggatgtgagggagcatcagag

SEQ ID NO: 17462 - RNA, 95 nt, synthetic construct
  misc_feature 1..95: note = engineered ribonucleic acid scaffold (ERS) sequence
  source 1..95: mol_type = other RNA
actggcgcttctatttgattactctgagcgccatcaccagcgactatgtcgtagtgggtaaagctccctcacagggatgtgagggagcatcagag

SEQ ID NO: 17463 - RNA, 96 nt, synthetic construct
  misc_feature 1..96: note = engineered ribonucleic acid scaffold (ERS) sequence
  source 1..96: mol_type = other RNA
actggcgcttctatcttgattactctgagcgccatcaccagcgactatgtcgtagtgggtaaagctccctcacagggatgtgagggagcatcagag

SEQ ID NO: 17464 - RNA, 95 nt, synthetic construct
  misc_feature 1..95: note = engineered ribonucleic acid scaffold (ERS) sequence
  source 1..95: mol_type = other RNA
actggcgcttctatcagattactctgagcgccatcaccagcgactatgtcgtagtgggtaaagctccctcacagggatgtgagggagcatcagag

SEQ ID NO: 17465 - RNA, 95 nt, synthetic construct
  misc_feature 1..95: note = engineered ribonucleic acid scaffold (ERS) sequence
  source 1..95: mol_type = other RNA
actggcgcttctatcggattactctgagcgccatcaccagcgactatgtcgtagtgggtaaagctccctcacagggatgtgagggagcatcagag

SEQ ID NO: 17466 - RNA, 96 nt, synthetic construct
  misc_feature 1..96: note = engineered ribonucleic acid scaffold (ERS) sequence
  source 1..96: mol_type = other RNA
actggcgcttctatctgaattactctgagcgccatcaccagcgactatgtcgtagtgggtaaagctccctcacagggatgtgagggagcatcagag

SEQ ID NO: 17467 - RNA, 96 nt, synthetic construct
  misc_feature 1..96: note = engineered ribonucleic acid scaffold (ERS) sequence
  source 1..96: mol_type = other RNA
actggcgcttctatctgtattactctgagcgccatcaccagcgactatgtcgtagtgggtaaagctccctcacagggatgtgagggagcatcagag

SEQ ID NO: 17468 - RNA, 95 nt, synthetic construct
  misc_feature 1..95: note = engineered ribonucleic acid scaffold (ERS) sequence
  source 1..95: mol_type = other RNA
actggcgcttctatctggttactctgagcgccatcaccagcgactatgtcgtagtgggtaaagctccctcacagggatgtgagggagcatcagag

SEQ ID NO: 17469 - RNA, 95 nt, synthetic construct
  misc_feature 1..95: note = engineered ribonucleic acid scaffold (ERS) sequence
  source 1..95: mol_type = other RNA
actggcgcttctatctgtttactctgagcgccatcaccagcgactatgtcgtagtgggtaaagctccctcacagggatgtgagggagcatcagag

SEQ ID NO: 17470 - RNA, 96 nt, synthetic construct
  misc_feature 1..96: note = engineered ribonucleic acid scaffold (ERS) sequence
  source 1..96: mol_type = other RNA
actggcgcttctatctgatttactctgagcgccatcaccagcgactatgtcgtagtgggtaaagctccctcacagggatgtgagggagcatcagag

SEQ ID NO: 17471 - RNA, 95 nt, synthetic construct
  misc_feature 1..95: note = engineered ribonucleic acid scaffold (ERS) sequence
  source 1..95: mol_type = other RNA
actggcgcttctatctgattgctctgagcgccatcaccagcgactatgtcgtagtgggtaaagctccctcacagggatgtgagggagcatcagag

SEQ ID NO: 17472 - RNA, 96 nt, synthetic construct
  misc_feature 1..96: note = engineered ribonucleic acid scaffold (ERS) sequence
  source 1..96: mol_type = other RNA
actggcgcttctatatctgattactctgagcgccatcaccagcgactatgtcgtagtgggtaaagctccctcagctgcagtgagggagcatcagag

SEQ ID NO: 17473 - RNA, 95 nt, synthetic construct
  misc_feature 1..95: note = engineered ribonucleic acid scaffold (ERS) sequence
  source 1..95: mol_type = other RNA
actggcgcttctaatctgattactctgagcgccatcaccagcgactatgtcgtagtgggtaaagctccctcagctgcagtgagggagcatcagag

SEQ ID NO: 17474 - RNA, 93 nt, synthetic construct
  misc_feature 1..93: note = engineered ribonucleic acid scaffold (ERS) sequence
  source 1..93: mol_type = other RNA
actggcgcttctactgattactctgagcgccatcaccagcgactatgtcgtagtgggtaaagctccctcagctgcagtgagggagcatcagag

SEQ ID NO: 17475 - RNA, 94 nt, synthetic construct
  misc_feature 1..94: note = engineered ribonucleic acid scaffold (ERS) sequence
  source 1..94: mol_type = other RNA
actggcgcttctaactgattactctgagcgccatcaccagcgactatgtcgtagtgggtaaagctccctcagctgcagtgagggagcatcagag

SEQ ID NO: 17476 - RNA, 94 nt, synthetic construct
  misc_feature 1..94: note = engineered ribonucleic acid scaffold (ERS) sequence
  source 1..94: mol_type = other RNA
actggcgcttctacctgattactctgagcgccatcaccagcgactatgtcgtagtgggtaaagctccctcagctgcagtgagggagcatcagag

SEQ ID NO: 17477 - RNA, 94 nt, synthetic construct
  misc_feature 1..94: note = engineered ribonucleic acid scaffold (ERS) sequence
  source 1..94: mol_type = other RNA
actggcgcttctagctgattactctgagcgccatcaccagcgactatgtcgtagtgggtaaagctccctcagctgcagtgagggagcatcagag

SEQ ID NO: 17478 - RNA, 96 nt, synthetic construct
  misc_feature 1..96: note = engineered ribonucleic acid scaffold (ERS) sequence
  source 1..96: mol_type = other RNA
actggcgcttctattactgattactctgagcgccatcaccagcgactatgtcgtagtgggtaaagctccctcagctgcagtgagggagcatcagag

SEQ ID NO: 17479 - RNA, 94 nt, synthetic construct
  misc_feature 1..94: note = engineered ribonucleic acid scaffold (ERS) sequence
  source 1..94: mol_type = other RNA
actggcgcttctatatgattactctgagcgccatcaccagcgactatgtcgtagtgggtaaagctccctcagctgcagtgagggagcatcagag

SEQ ID NO: 17480 - RNA, 94 nt, synthetic construct
  misc_feature 1..94: note = engineered ribonucleic acid scaffold (ERS) sequence
  source 1..94: mol_type = other RNA
actggcgcttctatgtgattactctgagcgccatcaccagcgactatgtcgtagtgggtaaagctccctcagctgcagtgagggagcatcagag

SEQ ID NO: 17481 - RNA, 94 nt, synthetic construct
  misc_feature 1..94: note = engineered ribonucleic acid scaffold (ERS) sequence
  source 1..94: mol_type = other RNA
actggcgcttctatttgattactctgagcgccatcaccagcgactatgtcgtagtgggtaaagctccctcagctgcagtgagggagcatcagag

SEQ ID NO: 17482 - RNA, 95 nt, synthetic construct
  misc_feature 1..95: note = engineered ribonucleic acid scaffold (ERS) sequence
  source 1..95: mol_type = other RNA
actggcgcttctatcttgattactctgagcgccatcaccagcgactatgtcgtagtgggtaaagctccctcagctgcagtgagggagcatcagag

SEQ ID NO: 17483 - RNA, 94 nt, synthetic construct
  misc_feature 1..94: note = engineered ribonucleic acid scaffold (ERS) sequence
  source 1..94: mol_type = other RNA
actggcgcttctatcagattactctgagcgccatcaccagcgactatgtcgtagtgggtaaagctccctcagctgcagtgagggagcatcagag

SEQ ID NO: 17484 - RNA, 94 nt, synthetic construct
  misc_feature 1..94: note = engineered ribonucleic acid scaffold (ERS) sequence
  source 1..94: mol_type = other RNA
actggcgcttctatcggattactctgagcgccatcaccagcgactatgtcgtagtgggtaaagctccctcagctgcagtgagggagcatcagag

SEQ ID NO: 17485 - RNA, 95 nt, synthetic construct
  misc_feature 1..95: note = engineered ribonucleic acid scaffold (ERS) sequence
  source 1..95: mol_type = other RNA
actggcgcttctatctgaattactctgagcgccatcaccagcgactatgtcgtagtgggtaaagctccctcagctgcagtgagggagcatcagag

SEQ ID NO: 17486 - RNA, 95 nt, synthetic construct
  misc_feature 1..95: note = engineered ribonucleic acid scaffold (ERS) sequence
  source 1..95: mol_type = other RNA
actggcgcttctatctgtattactctgagcgccatcaccagcgactatgtcgtagtgggtaaagctccctcagctgcagtgagggagcatcagag

SEQ ID NO: 17487 - RNA, 94 nt, synthetic construct
  misc_feature 1..94: note = engineered ribonucleic acid scaffold (ERS) sequence
  source 1..94: mol_type = other RNA
actggcgcttctatctggttactctgagcgccatcaccagcgactatgtcgtagtgggtaaagctccctcagctgcagtgagggagcatcagag

SEQ ID NO: 17488 - RNA, 94 nt, synthetic construct
  misc_feature 1..94: note = engineered ribonucleic acid scaffold (ERS) sequence
  source 1..94: mol_type = other RNA
actggcgcttctatctgtttactctgagcgccatcaccagcgactatgtcgtagtgggtaaagctccctcagctgcagtgagggagcatcagag

SEQ ID NO: 17489 - RNA, 95 nt, synthetic construct
  misc_feature 1..95: note = engineered ribonucleic acid scaffold (ERS) sequence
  source 1..95: mol_type = other RNA
actggcgcttctatctgatttactctgagcgccatcaccagcgactatgtcgtagtgggtaaagctccctcagctgcagtgagggagcatcagag

SEQ ID NO: 17490 - RNA, 94 nt, synthetic construct
  misc_feature 1..94: note = engineered ribonucleic acid scaffold (ERS) sequence
  source 1..94: mol_type = other RNA
actggcgcttctatctgattgctctgagcgccatcaccagcgactatgtcgtagtgggtaaagctccctcagctgcagtgagggagcatcagag

SEQ ID NO: 17491 - RNA, 91 nt, synthetic construct
  misc_feature 1..91: note = engineered ribonucleic acid scaffold (ERS) sequence
  source 1..91: mol_type = other RNA
actggcgcttctatatctgattactctgagcgccatcaccagcgactatgtcgtagtgggtaaagctccctcataggagggagcatcagag

SEQ ID NO: 17492 - RNA, 90 nt, synthetic construct
  misc_feature 1..90: note = engineered ribonucleic acid scaffold (ERS) sequence
  source 1..90: mol_type = other RNA
actggcgcttctaatctgattactctgagcgccatcaccagcgactatgtcgtagtgggtaaagctccctcataggagggagcatcagag

SEQ ID NO: 17493 - RNA, 88 nt, synthetic construct
  misc_feature 1..88: note = engineered ribonucleic acid scaffold (ERS) sequence
  source 1..88: mol_type = other RNA
actggcgcttctactgattactctgagcgccatcaccagcgactatgtcgtagtgggtaaagctccctcataggagggagcatcagag

SEQ ID NO: 17494 - RNA, 89 nt, synthetic construct
  misc_feature 1..89: note = engineered ribonucleic acid scaffold (ERS) sequence
  source 1..89: mol_type = other RNA
actggcgcttctaactgattactctgagcgccatcaccagcgactatgtcgtagtgggtaaagctccctcataggagggagcatcagag

SEQ ID NO: 17495 - RNA, 89 nt, synthetic construct
  misc_feature 1..89: note = engineered ribonucleic acid scaffold (ERS) sequence
  source 1..89: mol_type = other RNA
actggcgcttctacctgattactctgagcgccatcaccagcgactatgtcgtagtgggtaaagctccctcataggagggagcatcagag

SEQ ID NO: 17496 - RNA, 89 nt, synthetic construct
  misc_feature 1..89: note = engineered ribonucleic acid scaffold (ERS) sequence
  source 1..89: mol_type = other RNA
actggcgcttctagctgattactctgagcgccatcaccagcgactatgtcgtagtgggtaaagctccctcataggagggagcatcagag

SEQ ID NO: 17497 - RNA, 91 nt, synthetic construct
  misc_feature 1..91: note = engineered ribonucleic acid scaffold (ERS) sequence
  source 1..91: mol_type = other RNA
actggcgcttctattactgattactctgagcgccatcaccagcgactatgtcgtagtgggtaaagctccctcataggagggagcatcagag

SEQ ID NO: 17498 - RNA, 89 nt, synthetic construct
  misc_feature 1..89: note = engineered ribonucleic acid scaffold (ERS) sequence
  source 1..89: mol_type = other RNA
actggcgcttctatatgattactctgagcgccatcaccagcgactatgtcgtagtgggtaaagctccctcataggagggagcatcagag

SEQ ID NO: 17499 - RNA, 89 nt, synthetic construct
  misc_feature 1..89: note = engineered ribonucleic acid scaffold (ERS) sequence
  source 1..89: mol_type = other RNA
actggcgcttctatgtgattactctgagcgccatcaccagcgactatgtcgtagtgggtaaagctccctcataggagggagcatcagag

SEQ ID NO: 17500 - RNA, 89 nt, synthetic construct
  misc_feature 1..89: note = engineered ribonucleic acid scaffold (ERS) sequence
  source 1..89: mol_type = other RNA
actggcgcttctatttgattactctgagcgccatcaccagcgactatgtcgtagtgggtaaagctccctcataggagggagcatcagag

SEQ ID NO: 17501 - RNA, 90 nt, synthetic construct
  misc_feature 1..90: note = engineered ribonucleic acid scaffold (ERS) sequence
  source 1..90: mol_type = other RNA
actggcgcttctatcttgattactctgagcgccatcaccagcgactatgtcgtagtgggtaaagctccctcataggagggagcatcagag

SEQ ID NO: 17502 - RNA, 89 nt, synthetic construct
  misc_feature 1..89: note = engineered ribonucleic acid scaffold (ERS) sequence
  source 1..89: mol_type = other RNA
actggcgcttctatcagattactctgagcgccatcaccagcgactatgtcgtagtgggtaaagctccctcataggagggagcatcagag

SEQ ID NO: 17503 - RNA, 89 nt, synthetic construct
  misc_feature 1..89: note = engineered ribonucleic acid scaffold (ERS) sequence
  source 1..89: mol_type = other RNA
actggcgcttctatcggattactctgagcgccatcaccagcgactatgtcgtagtgggtaaagctccctcataggagggagcatcagag

SEQ ID NO: 17504 - RNA, 90 nt, synthetic construct
  misc_feature 1..90: note = engineered ribonucleic acid scaffold (ERS) sequence
  source 1..90: mol_type = other RNA
actggcgcttctatctgaattactctgagcgccatcaccagcgactatgtcgtagtgggtaaagctccctcataggagggagcatcagag

SEQ ID NO: 17505 - RNA, 90 nt, synthetic construct
  misc_feature 1..90: note = engineered ribonucleic acid scaffold (ERS) sequence
  source 1..90: mol_type = other RNA
actggcgcttctatctgtattactctgagcgccatcaccagcgactatgtcgtagtgggtaaagctccctcataggagggagcatcagag

SEQ ID NO: 17506 - RNA, 89 nt, synthetic construct
  misc_feature 1..89: note = engineered ribonucleic acid scaffold (ERS) sequence
  source 1..89: mol_type = other RNA
actggcgcttctatctggttactctgagcgccatcaccagcgactatgtcgtagtgggtaaagctccctcataggagggagcatcagag

SEQ ID NO: 17507 - RNA, 89 nt, synthetic construct
  misc_feature 1..89: note = engineered ribonucleic acid scaffold (ERS) sequence
  source 1..89: mol_type = other RNA
actggcgcttctatctgtttactctgagcgccatcaccagcgactatgtcgtagtgggtaaagctccctcataggagggagcatcagag

SEQ ID NO: 17508 - RNA, 90 nt, synthetic construct
  misc_feature 1..90: note = engineered ribonucleic acid scaffold (ERS) sequence
  source 1..90: mol_type = other RNA
actggcgcttctatctgatttactctgagcgccatcaccagcgactatgtcgtagtgggtaaagctccctcataggagggagcatcagag

SEQ ID NO: 17509 - RNA, 89 nt, synthetic construct
  misc_feature 1..89: note = engineered ribonucleic acid scaffold (ERS) sequence
  source 1..89: mol_type = other RNA
actggcgcttctatctgattgctctgagcgccatcaccagcgactatgtcgtagtgggtaaagctccctcataggagggagcatcagag

SEQ ID NO: 17510 - RNA, 92 nt, synthetic construct
  misc_feature 1..92: note = engineered ribonucleic acid scaffold (ERS) sequence
  source 1..92: mol_type = other RNA
actggcgcttctatatctgattactctgagcgccatcaccagcgactatgtcgtagtgggtaaagctccctcttcaggagggagcatcagag

SEQ ID NO: 17511 - RNA, 91 nt, synthetic construct
  misc_feature 1..91: note = engineered ribonucleic acid scaffold (ERS) sequence
  source 1..91: mol_type = other RNA
actggcgcttctaatctgattactctgagcgccatcaccagcgactatgtcgtagtgggtaaagctccctcttcaggagggagcatcagag

SEQ ID NO: 17512 - RNA, 89 nt, synthetic construct
  misc_feature 1..89: note = engineered ribonucleic acid scaffold (ERS) sequence
  source 1..89: mol_type = other RNA
actggcgcttctactgattactctgagcgccatcaccagcgactatgtcgtagtgggtaaagctccctcttcaggagggagcatcagag

SEQ ID NO: 17513 - RNA, 90 nt, synthetic construct
  misc_feature 1..90: note = engineered ribonucleic acid scaffold (ERS) sequence
  source 1..90: mol_type = other RNA
actggcgcttctaactgattactctgagcgccatcaccagcgactatgtcgtagtgggtaaagctccctcttcaggagggagcatcagag

SEQ ID NO: 17514 - RNA, 90 nt, synthetic construct
  misc_feature 1..90: note = engineered ribonucleic acid scaffold (ERS) sequence
  source 1..90: mol_type = other RNA
actggcgcttctacctgattactctgagcgccatcaccagcgactatgtcgtagtgggtaaagctccctcttcaggagggagcatcagag

SEQ ID NO: 17515 - RNA, 90 nt, synthetic construct
  misc_feature 1..90: note = engineered ribonucleic acid scaffold (ERS) sequence
  source 1..90: mol_type = other RNA
actggcgcttctagctgattactctgagcgccatcaccagcgactatgtcgtagtgggtaaagctccctcttcaggagggagcatcagag

SEQ ID NO: 17516 - RNA, 92 nt, synthetic construct
  misc_feature 1..92: note = engineered ribonucleic acid scaffold (ERS) sequence
  source 1..92: mol_type = other RNA
actggcgcttctattactgattactctgagcgccatcaccagcgactatgtcgtagtgggtaaagctccctcttcaggagggagcatcagag

SEQ ID NO: 17517 - RNA, 90 nt, synthetic construct
  misc_feature 1..90: note = engineered ribonucleic acid scaffold (ERS) sequence
  source 1..90: mol_type = other RNA
actggcgcttctatatgattactctgagcgccatcaccagcgactatgtcgtagtgggtaaagctccctcttcaggagggagcatcagag

SEQ ID NO: 17518 - RNA, 90 nt, synthetic construct
  misc_feature 1..90: note = engineered ribonucleic acid scaffold (ERS) sequence
  source 1..90: mol_type = other RNA
actggcgcttctatgtgattactctgagcgccatcaccagcgactatgtcgtagtgggtaaagctccctcttcaggagggagcatcagag

SEQ ID NO: 17519 - RNA, 90 nt, synthetic construct
  misc_feature 1..90: note = engineered ribonucleic acid scaffold (ERS) sequence
  source 1..90: mol_type = other RNA
actggcgcttctatttgattactctgagcgccatcaccagcgactatgtcgtagtgggtaaagctccctcttcaggagggagcatcagag

SEQ ID NO: 17520 - RNA, 91 nt, synthetic construct
  misc_feature 1..91: note = engineered ribonucleic acid scaffold (ERS) sequence
  source 1..91: mol_type = other RNA
actggcgcttctatcttgattactctgagcgccatcaccagcgactatgtcgtagtgggtaaagctccctcttcaggagggagcatcagag

SEQ ID NO: 17521 - RNA, 90 nt, synthetic construct
  misc_feature 1..90: note = engineered ribonucleic acid scaffold (ERS) sequence
  source 1..90: mol_type = other RNA
actggcgcttctatcagattactctgagcgccatcaccagcgactatgtcgtagtgggtaaagctccctcttcaggagggagcatcagag

SEQ ID NO: 17522 - RNA, 90 nt, synthetic construct
  misc_feature 1..90: note = engineered ribonucleic acid scaffold (ERS) sequence
  source 1..90: mol_type = other RNA
actggcgcttctatcggattactctgagcgccatcaccagcgactatgtcgtagtgggtaaagctccctcttcaggagggagcatcagag

SEQ ID NO: 17523 - RNA, 91 nt, synthetic construct
  misc_feature 1..91: note = engineered ribonucleic acid scaffold (ERS) sequence
  source 1..91: mol_type = other RNA
actggcgcttctatctgaattactctgagcgccatcaccagcgactatgtcgtagtgggtaaagctccctcttcaggagggagcatcagag

SEQ ID NO: 17524 - RNA, 91 nt, synthetic construct
  misc_feature 1..91: note = engineered ribonucleic acid scaffold (ERS) sequence
  source 1..91: mol_type = other RNA
actggcgcttctatctgtattactctgagcgccatcaccagcgactatgtcgtagtgggtaaagctccctcttcaggagggagcatcagag

SEQ ID NO: 17525 - RNA, 90 nt, synthetic construct
  misc_feature 1..90: note = engineered ribonucleic acid scaffold (ERS) sequence
  source 1..90: mol_type = other RNA
actggcgcttctatctggttactctgagcgccatcaccagcgactatgtcgtagtgggtaaagctccctcttcaggagggagcatcagag

SEQ ID NO: 17526 - RNA, 90 nt, synthetic construct
  misc_feature 1..90: note = engineered ribonucleic acid scaffold (ERS) sequence
  source 1..90: mol_type = other RNA
actggcgcttctatctgtttactctgagcgccatcaccagcgactatgtcgtagtgggtaaagctccctcttcaggagggagcatcagag

SEQ ID NO: 17527 - RNA, 91 nt, synthetic construct
  misc_feature 1..91: note = engineered ribonucleic acid scaffold (ERS) sequence
  source 1..91: mol_type = other RNA
actggcgcttctatctgatttactctgagcgccatcaccagcgactatgtcgtagtgggtaaagctccctcttcaggagggagcatcagag

SEQ ID NO: 17528 - RNA, 90 nt, synthetic construct
  misc_feature 1..90: note = engineered ribonucleic acid scaffold (ERS) sequence
  source 1..90: mol_type = other RNA
actggcgcttctatctgattgctctgagcgccatcaccagcgactatgtcgtagtgggtaaagctccctcttcaggagggagcatcagag

SEQ ID NO: 17529 - RNA, 91 nt, synthetic construct
  misc_feature 1..91: note = engineered ribonucleic acid scaffold (ERS) sequence
  source 1..91: mol_type = other RNA
actggcgcttctatatctgattactctgagcgccatcaccagcgactatgtcgtagtgggtaaagctccctcttcggagagtgcatcagag

SEQ ID NO: 17530 - RNA, 90 nt, synthetic construct
  misc_feature 1..90: note = engineered ribonucleic acid scaffold (ERS) sequence
  source 1..90: mol_type = other RNA
actggcgcttctaatctgattactctgagcgccatcaccagcgactatgtcgtagtgggtaaagctccctcttcggagagtgcatcagag

SEQ ID NO: 17531 - RNA, 88 nt, synthetic construct
  misc_feature 1..88: note = engineered ribonucleic acid scaffold (ERS) sequence
  source 1..88: mol_type = other RNA
actggcgcttctactgattactctgagcgccatcaccagcgactatgtcgtagtgggtaaagctccctcttcggagagtgcatcagag

SEQ ID NO: 17532 - RNA, 89 nt, synthetic construct
  misc_feature 1..89: note = engineered ribonucleic acid scaffold (ERS) sequence
  source 1..89: mol_type = other RNA
actggcgcttctaactgattactctgagcgccatcaccagcgactatgtcgtagtgggtaaagctccctcttcggagagtgcatcagag

SEQ ID NO: 17533 - RNA, 89 nt, synthetic construct
  misc_feature 1..89: note = engineered ribonucleic acid scaffold (ERS) sequence
  source 1..89: mol_type = other RNA
actggcgcttctacctgattactctgagcgccatcaccagcgactatgtcgtagtgggtaaagctccctcttcggagagtgcatcagag

SEQ ID NO: 17534 - RNA, 89 nt, synthetic construct
  misc_feature 1..89: note = engineered ribonucleic acid scaffold (ERS) sequence
  source 1..89: mol_type = other RNA
actggcgcttctagctgattactctgagcgccatcaccagcgactatgtcgtagtgggtaaagctccctcttcggagagtgcatcagag

SEQ ID NO: 17535 - RNA, 91 nt, synthetic construct
  misc_feature 1..91: note = engineered ribonucleic acid scaffold (ERS) sequence
  source 1..91: mol_type = other RNA
actggcgcttctattactgattactctgagcgccatcaccagcgactatgtcgtagtgggtaaagctccctcttcggagagtgcatcagag

SEQ ID NO: 17536 - RNA, 89 nt, synthetic construct
  misc_feature 1..89: note = engineered ribonucleic acid scaffold (ERS) sequence
  source 1..89: mol_type = other RNA
actggcgcttctatatgattactctgagcgccatcaccagcgactatgtcgtagtgggtaaagctccctcttcggagagtgcatcagag

SEQ ID NO: 17537 - RNA, 89 nt, synthetic construct
  misc_feature 1..89: note = engineered ribonucleic acid scaffold (ERS) sequence
  source 1..89: mol_type = other RNA
actggcgcttctatgtgattactctgagcgccatcaccagcgactatgtcgtagtgggtaaagctccctcttcggagagtgcatcagag

SEQ ID NO: 17538 - RNA, 89 nt, synthetic construct
  misc_feature 1..89: note = engineered ribonucleic acid scaffold (ERS) sequence
  source 1..89: mol_type = other RNA
actggcgcttctatttgattactctgagcgccatcaccagcgactatgtcgtagtgggtaaagctccctcttcggagagtgcatcagag

SEQ ID NO: 17539 - RNA, 90 nt, synthetic construct
  misc_feature 1..90: note = engineered ribonucleic acid scaffold (ERS) sequence
  source 1..90: mol_type = other RNA
actggcgcttctatcttgattactctgagcgccatcaccagcgactatgtcgtagtgggtaaagctccctcttcggagagtgcatcagag

SEQ ID NO: 17540 - RNA, 89 nt, synthetic construct
  misc_feature 1..89: note = engineered ribonucleic acid scaffold (ERS) sequence
  source 1..89: mol_type = other RNA
actggcgcttctatcagattactctgagcgccatcaccagcgactatgtcgtagtgggtaaagctccctcttcggagagtgcatcagag

SEQ ID NO: 17541 - RNA, 89 nt, synthetic construct
  misc_feature 1..89: note = engineered ribonucleic acid scaffold (ERS) sequence
  source 1..89: mol_type = other RNA
actggcgcttctatcggattactctgagcgccatcaccagcgactatgtcgtagtgggtaaagctccctcttcggagagtgcatcagag

SEQ ID NO: 17542 - RNA, 90 nt, synthetic construct
  misc_feature 1..90: note = engineered ribonucleic acid scaffold (ERS) sequence
  source 1..90: mol_type = other RNA
actggcgcttctatctgaattactctgagcgccatcaccagcgactatgtcgtagtgggtaaagctccctcttcggagagtgcatcagag

SEQ ID NO: 17543 - RNA, 90 nt, synthetic construct
  misc_feature 1..90: note = engineered ribonucleic acid scaffold (ERS) sequence
  source 1..90: mol_type = other RNA
actggcgcttctatctgtattactctgagcgccatcaccagcgactatgtcgtagtgggtaaagctccctcttcggagagtgcatcagag

SEQ ID NO: 17544 - RNA, 89 nt, synthetic construct
  misc_feature 1..89: note = engineered ribonucleic acid scaffold (ERS) sequence
  source 1..89: mol_type = other RNA
actggcgcttctatctggttactctgagcgccatcaccagcgactatgtcgtagtgggtaaagctccctcttcggagagtgcatcagag

SEQ ID NO: 17545 - RNA, 89 nt, synthetic construct
  misc_feature 1..89: note = engineered ribonucleic acid scaffold (ERS) sequence
  source 1..89: mol_type = other RNA
actggcgcttctatctgtttactctgagcgccatcaccagcgactatgtcgtagtgggtaaagctccctcttcggagagtgcatcagag

SEQ ID NO: 17546 - RNA, 90 nt, synthetic construct
  misc_feature 1..90: note = engineered ribonucleic acid scaffold (ERS) sequence
  source 1..90: mol_type = other RNA
actggcgcttctatctgatttactctgagcgccatcaccagcgactatgtcgtagtgggtaaagctccctcttcggagagtgcatcagag

SEQ ID NO: 17547 - RNA, 89 nt, synthetic construct
  misc_feature 1..89: note = engineered ribonucleic acid scaffold (ERS) sequence
  source 1..89: mol_type = other RNA
actggcgcttctatctgattgctctgagcgccatcaccagcgactatgtcgtagtgggtaaagctccctcttcggagagtgcatcagag

SEQ ID NO: 17548 - RNA, 91 nt, synthetic construct
  misc_feature 1..91: note = engineered ribonucleic acid scaffold (ERS) sequence
  source 1..91: mol_type = other RNA
actggcgcttctatatctgattactctgagcgccatcaccagcgactatgtcgtagtgggtaaagctccctcttcggaggaggcatcagag

SEQ ID NO: 17549 - RNA, 90 nt, synthetic construct
  misc_feature 1..90: note = engineered ribonucleic acid scaffold (ERS) sequence
  source 1..90: mol_type = other RNA
actggcgcttctaatctgattactctgagcgccatcaccagcgactatgtcgtagtgggtaaagctccctcttcggaggaggcatcagag

SEQ ID NO: 17550 - RNA, 88 nt, synthetic construct
  misc_feature 1..88: note = engineered ribonucleic acid scaffold (ERS) sequence
  source 1..88: mol_type = other RNA
actggcgcttctactgattactctgagcgccatcaccagcgactatgtcgtagtgggtaaagctccctcttcggaggaggcatcagag

SEQ ID NO: 17551 - RNA, 89 nt, synthetic construct
  misc_feature 1..89: note = engineered ribonucleic acid scaffold (ERS) sequence
  source 1..89: mol_type = other RNA
actggcgcttctaactgattactctgagcgccatcaccagcgactatgtcgtagtgggtaaagctccctcttcggaggaggcatcagag

SEQ ID NO: 17552 - RNA, 89 nt, synthetic construct
  misc_feature 1..89: note = engineered ribonucleic acid scaffold (ERS) sequence
  source 1..89: mol_type = other RNA
actggcgcttctacctgattactctgagcgccatcaccagcgactatgtcgtagtgggtaaagctccctcttcggaggaggcatcagag

SEQ ID NO: 17553 - RNA, 89 nt, synthetic construct
  misc_feature 1..89: note = engineered ribonucleic acid scaffold (ERS) sequence
  source 1..89: mol_type = other RNA
actggcgcttctagctgattactctgagcgccatcaccagcgactatgtcgtagtgggtaaagctccctcttcggaggaggcatcagag

SEQ ID NO: 17554 - RNA, 91 nt, synthetic construct
  misc_feature 1..91: note = engineered ribonucleic acid scaffold (ERS) sequence
  source 1..91: mol_type = other RNA
actggcgcttctattactgattactctgagcgccatcaccagcgactatgtcgtagtgggtaaagctccctcttcggaggaggcatcagag

SEQ ID NO: 17555 - RNA, 89 nt, synthetic construct
  misc_feature 1..89: note = engineered ribonucleic acid scaffold (ERS) sequence
  source 1..89: mol_type = other RNA
actggcgcttctatatgattactctgagcgccatcaccagcgactatgtcgtagtgggtaaagctccctcttcggaggaggcatcagag

SEQ ID NO: 17556 - RNA, 89 nt, synthetic construct
  misc_feature 1..89: note = engineered ribonucleic acid scaffold (ERS) sequence
  source 1..89: mol_type = other RNA
actggcgcttctatgtgattactctgagcgccatcaccagcgactatgtcgtagtgggtaaagctccctcttcggaggaggcatcagag

SEQ ID NO: 17557 - RNA, 89 nt, synthetic construct
  misc_feature 1..89: note = engineered ribonucleic acid scaffold (ERS) sequence
  source 1..89: mol_type = other RNA
actggcgcttctatttgattactctgagcgccatcaccagcgactatgtcgtagtgggtaaagctccctcttcggaggaggcatcagag

SEQ ID NO: 17558 - RNA, 90 nt, synthetic construct
  misc_feature 1..90: note = engineered ribonucleic acid scaffold (ERS) sequence
  source 1..90: mol_type = other RNA
actggcgcttctatcttgattactctgagcgccatcaccagcgactatgtcgtagtgggtaaagctccctcttcggaggaggcatcagag

SEQ ID NO: 17559 - RNA, 89 nt, synthetic construct
  misc_feature 1..89: note = engineered ribonucleic acid scaffold (ERS) sequence
  source 1..89: mol_type = other RNA
actggcgcttctatcagattactctgagcgccatcaccagcgactatgtcgtagtgggtaaagctccctcttcggaggaggcatcagag

SEQ ID NO: 17560 - RNA, 89 nt, synthetic construct
  misc_feature 1..89: note = engineered ribonucleic acid scaffold (ERS) sequence
  source 1..89: mol_type = other RNA
actggcgcttctatcggattactctgagcgccatcaccagcgactatgtcgtagtgggtaaagctccctcttcggaggaggcatcagag

SEQ ID NO: 17561 - RNA, 90 nt, synthetic construct
  misc_feature 1..90: note = engineered ribonucleic acid scaffold (ERS) sequence
  source 1..90: mol_type = other RNA
actggcgcttctatctgaattactctgagcgccatcaccagcgactatgtcgtagtgggtaaagctccctcttcggaggaggcatcagag

SEQ ID NO: 17562 - RNA, 90 nt, synthetic construct
  misc_feature 1..90: note = engineered ribonucleic acid scaffold (ERS) sequence
  source 1..90: mol_type = other RNA
actggcgcttctatctgtattactctgagcgccatcaccagcgactatgtcgtagtgggtaaagctccctcttcggaggaggcatcagag

SEQ ID NO: 17563 - RNA, 89 nt, synthetic construct
  misc_feature 1..89: note = engineered ribonucleic acid scaffold (ERS) sequence
  source 1..89: mol_type = other RNA
actggcgcttctatctggttactctgagcgccatcaccagcgactatgtcgtagtgggtaaagctccctcttcggaggaggcatcagag

SEQ ID NO: 17564 - RNA, 89 nt, synthetic construct
  misc_feature 1..89: note = engineered ribonucleic acid scaffold (ERS) sequence
  source 1..89: mol_type = other RNA
actggcgcttctatctgtttactctgagcgccatcaccagcgactatgtcgtagtgggtaaagctccctcttcggaggaggcatcagag

SEQ ID NO: 17565 - RNA, 90 nt, synthetic construct
  misc_feature 1..90: note = engineered ribonucleic acid scaffold (ERS) sequence
  source 1..90: mol_type = other RNA
actggcgcttctatctgatttactctgagcgccatcaccagcgactatgtcgtagtgggtaaagctccctcttcggaggaggcatcagag

SEQ ID NO: 17566 - RNA, 89 nt, synthetic construct
  misc_feature 1..89: note = engineered ribonucleic acid scaffold (ERS) sequence
  source 1..89: mol_type = other RNA
actggcgcttctatctgattgctctgagcgccatcaccagcgactatgtcgtagtgggtaaagctccctcttcggaggaggcatcagag

SEQ ID NO: 17567 - RNA, 93 nt, synthetic construct
  misc_feature 1..93: note = engineered ribonucleic acid scaffold (ERS) sequence
  source 1..93: mol_type = other RNA
actggcgcttctatatctgattactctgagcgccatcaccagcgactatgtcgtagtgggtaaagctccctcttcggagggaacgcatcagag

SEQ ID NO: 17568 - RNA, 92 nt, synthetic construct
  misc_feature 1..92: note = engineered ribonucleic acid scaffold (ERS) sequence
  source 1..92: mol_type = other RNA
actggcgcttctaatctgattactctgagcgccatcaccagcgactatgtcgtagtgggtaaagctccctcttcggagggaacgcatcagag

SEQ ID NO: 17569 - RNA, 90 nt, synthetic construct
  misc_feature 1..90: note = engineered ribonucleic acid scaffold (ERS) sequence
  source 1..90: mol_type = other RNA
actggcgcttctactgattactctgagcgccatcaccagcgactatgtcgtagtgggtaaagctccctcttcggagggaacgcatcagag

SEQ ID NO: 17570 - RNA, 91 nt, synthetic construct
  misc_feature 1..91: note = engineered ribonucleic acid scaffold (ERS) sequence
  source 1..91: mol_type = other RNA
actggcgcttctaactgattactctgagcgccatcaccagcgactatgtcgtagtgggtaaagctccctcttcggagggaacgcatcagag

SEQ ID NO: 17571 - RNA, 91 nt, synthetic construct
  misc_feature 1..91: note = engineered ribonucleic acid scaffold (ERS) sequence
  source 1..91: mol_type = other RNA
actggcgcttctacctgattactctgagcgccatcaccagcgactatgtcgtagtgggtaaagctccctcttcggagggaacgcatcagag

SEQ ID NO: 17572 - RNA, 91 nt, synthetic construct
  misc_feature 1..91: note = engineered ribonucleic acid scaffold (ERS) sequence
  source 1..91: mol_type = other RNA
actggcgcttctagctgattactctgagcgccatcaccagcgactatgtcgtagtgggtaaagctccctcttcggagggaacgcatcagag

SEQ ID NO: 17573 - RNA, 93 nt, synthetic construct
  misc_feature 1..93: note = engineered ribonucleic acid scaffold (ERS) sequence
  source 1..93: mol_type = other RNA
actggcgcttctattactgattactctgagcgccatcaccagcgactatgtcgtagtgggtaaagctccctcttcggagggaacgcatcagag

SEQ ID NO: 17574 - RNA, 91 nt, synthetic construct
  misc_feature 1..91: note = engineered ribonucleic acid scaffold (ERS) sequence
  source 1..91: mol_type = other RNA
actggcgcttctatatgattactctgagcgccatcaccagcgactatgtcgtagtgggtaaagctccctcttcggagggaacgcatcagag

SEQ ID NO: 17575 - RNA, 91 nt, synthetic construct
  misc_feature 1..91: note = engineered ribonucleic acid scaffold (ERS) sequence
  source 1..91: mol_type = other RNA
actggcgcttctatgtgattactctgagcgccatcaccagcgactatgtcgtagtgggtaaagctccctcttcggagggaacgcatcagag

SEQ ID NO: 17576 - RNA, 91 nt, synthetic construct
  misc_feature 1..91: note = engineered ribonucleic acid scaffold (ERS) sequence
  source 1..91: mol_type = other RNA
actggcgcttctatttgattactctgagcgccatcaccagcgactatgtcgtagtgggtaaagctccctcttcggagggaacgcatcagag

SEQ ID NO: 17577 - RNA, 92 nt, synthetic construct
  misc_feature 1..92: note = engineered ribonucleic acid scaffold (ERS) sequence
  source 1..92: mol_type = other RNA
actggcgcttctatcttgattactctgagcgccatcaccagcgactatgtcgtagtgggtaaagctccctcttcggagggaacgcatcagag

SEQ ID NO: 17578 - RNA, 91 nt, synthetic construct
  misc_feature 1..91: note = engineered ribonucleic acid scaffold (ERS) sequence
  source 1..91: mol_type = other RNA
actggcgcttctatcagattactctgagcgccatcaccagcgactatgtcgtagtgggtaaagctccctcttcggagggaacgcatcagag

SEQ ID NO: 17579 - RNA, 91 nt, synthetic construct
  misc_feature 1..91: note = engineered ribonucleic acid scaffold (ERS) sequence
  source 1..91: mol_type = other RNA
actggcgcttctatcggattactctgagcgccatcaccagcgactatgtcgtagtgggtaaagctccctcttcggagggaacgcatcagag

SEQ ID NO: 17580 - RNA, 92 nt, synthetic construct
  misc_feature 1..92: note = engineered ribonucleic acid scaffold (ERS) sequence
  source 1..92: mol_type = other RNA
actggcgcttctatctgaattactctgagcgccatcaccagcgactatgtcgtagtgggtaaagctccctcttcggagggaacgcatcagag

SEQ ID NO: 17581 - RNA, 92 nt, synthetic construct
  misc_feature 1..92: note = engineered ribonucleic acid scaffold (ERS) sequence
  source 1..92: mol_type = other RNA
actggcgcttctatctgtattactctgagcgccatcaccagcgactatgtcgtagtgggtaaagctccctcttcggagggaacgcatcagag

SEQ ID NO: 17582 - RNA, 91 nt, synthetic construct
  misc_feature 1..91: note = engineered ribonucleic acid scaffold (ERS) sequence
  source 1..91: mol_type = other RNA
actggcgcttctatctggttactctgagcgccatcaccagcgactatgtcgtagtgggtaaagctccctcttcggagggaacgcatcagag

SEQ ID NO: 17583 - RNA, 91 nt, synthetic construct
  misc_feature 1..91: note = engineered ribonucleic acid scaffold (ERS) sequence
  source 1..91: mol_type = other RNA
actggcgcttctatctgtttactctgagcgccatcaccagcgactatgtcgtagtgggtaaagctccctcttcggagggaacgcatcagag

SEQ ID NO: 17584 - RNA, 92 nt, synthetic construct
  misc_feature 1..92: note = engineered ribonucleic acid scaffold (ERS) sequence
  source 1..92: mol_type = other RNA
actggcgcttctatctgatttactctgagcgccatcaccagcgactatgtcgtagtgggtaaagctccctcttcggagggaacgcatcagag

SEQ ID NO: 17585 - RNA, 91 nt, synthetic construct
  misc_feature 1..91: note = engineered ribonucleic acid scaffold (ERS) sequence
  source 1..91: mol_type = other RNA
actggcgcttctatctgattgctctgagcgccatcaccagcgactatgtcgtagtgggtaaagctccctcttcggagggaacgcatcagag

SEQ ID NO: 17586 - RNA, 91 nt, synthetic construct; identical to SEQ ID NO: 768
  misc_feature 1..91: note = engineered ribonucleic acid scaffold (ERS) sequence
  source 1..91: mol_type = other RNA

SEQ ID NO: 17587 - RNA, 90 nt, synthetic construct; identical to SEQ ID NO: 754
  misc_feature 1..90: note = engineered ribonucleic acid scaffold (ERS) sequence
  source 1..90: mol_type = other RNA

SEQ ID NO: 17588 - RNA, 88 nt, synthetic construct; identical to SEQ ID NO: 757
  misc_feature 1..88: note = engineered ribonucleic acid scaffold (ERS) sequence
  source 1..88: mol_type = other RNA

SEQ ID NO: 17589 - RNA, 89 nt, synthetic construct; identical to SEQ ID NO: 755
  misc_feature 1..89: note = engineered ribonucleic acid scaffold (ERS) sequence
  source 1..89: mol_type = other RNA

SEQ ID NO: 17590 - RNA, 89 nt, synthetic construct; identical to SEQ ID NO: 770
  misc_feature 1..89: note = engineered ribonucleic acid scaffold (ERS) sequence
  source 1..89: mol_type = other RNA

SEQ ID NO: 17591 - RNA, 89 nt, synthetic construct; identical to SEQ ID NO: 756
  misc_feature 1..89: note = engineered ribonucleic acid scaffold (ERS) sequence
  source 1..89: mol_type = other RNA

SEQ ID NO: 17592 - RNA, 91 nt, synthetic construct; identical to SEQ ID NO: 769
  misc_feature 1..91: note = engineered ribonucleic acid scaffold (ERS) sequence
  source 1..91: mol_type = other RNA

SEQ ID NO: 17593 - RNA, 89 nt, synthetic construct; identical to SEQ ID NO: 758
  misc_feature 1..89: note = engineered ribonucleic acid scaffold (ERS) sequence
  source 1..89: mol_type = other RNA

SEQ ID NO: 17594 - RNA, 89 nt, synthetic construct; identical to SEQ ID NO: 760
  misc_feature 1..89: note = engineered ribonucleic acid scaffold (ERS) sequence
  source 1..89: mol_type = other RNA

SEQ ID NO: 17595 - RNA, 89 nt, synthetic construct; identical to SEQ ID NO: 759
  misc_feature 1..89: note = engineered ribonucleic acid scaffold (ERS) sequence
  source 1..89: mol_type = other RNA

SEQ ID NO: 17596 - RNA, 90 nt, synthetic construct; identical to SEQ ID NO: 761
  misc_feature 1..90: note = engineered ribonucleic acid scaffold (ERS) sequence
  source 1..90: mol_type = other RNA

SEQ ID NO: 17597 - RNA, 89 nt, synthetic construct; identical to SEQ ID NO: 771
  misc_feature 1..89: note = engineered ribonucleic acid scaffold (ERS) sequence
  source 1..89: mol_type = other RNA

SEQ ID NO: 17598 - RNA, 89 nt, synthetic construct; identical to SEQ ID NO: 772
  misc_feature 1..89: note = engineered ribonucleic acid scaffold (ERS) sequence
  source 1..89: mol_type = other RNA

SEQ ID NO: 17599 - RNA, 90 nt, synthetic construct; identical to SEQ ID NO: 764
  misc_feature 1..90: note = engineered ribonucleic acid scaffold (ERS) sequence
  source 1..90: mol_type = other RNA

SEQ ID NO: 17600 - RNA, 90 nt, synthetic construct; identical to SEQ ID NO: 763
  misc_feature 1..90: note = engineered ribonucleic acid scaffold (ERS) sequence
  source 1..90: mol_type = other RNA

SEQ ID NO: 17601 - RNA, 89 nt, synthetic construct; identical to SEQ ID NO: 765
  misc_feature 1..89: note = engineered ribonucleic acid scaffold (ERS) sequence
  source 1..89: mol_type = other RNA

SEQ ID NO: 17602 - RNA, 89 nt, synthetic construct; identical to SEQ ID NO: 766
  misc_feature 1..89: note = engineered ribonucleic acid scaffold (ERS) sequence
  source 1..89: mol_type = other RNA

SEQ ID NO: 17603 - RNA, 90 nt, synthetic construct; identical to SEQ ID NO: 762
  misc_feature 1..90: note = engineered ribonucleic acid scaffold (ERS) sequence
  source 1..90: mol_type = other RNA

SEQ ID NO: 17604 - RNA, 89 nt, synthetic construct; identical to SEQ ID NO: 767
  misc_feature 1..89: note = engineered ribonucleic acid scaffold (ERS) sequence
  source 1..89: mol_type = other RNA

SEQ ID NO: 17605 - RNA, 91 nt, synthetic construct
  misc_feature 1..91: note = engineered ribonucleic acid scaffold (ERS) sequence
  source 1..91: mol_type = other RNA
actggcgcttctatatctgattactctgagcgccatcaccagcgactatgtcgtagtgggtaaagctccctggaaacagggagcatcagag

SEQ ID NO: 17606 - RNA, 90 nt, synthetic construct
  misc_feature 1..90: note = engineered ribonucleic acid scaffold (ERS) sequence
  source 1..90: mol_type = other RNA
actggcgcttctaatctgattactctgagcgccatcaccagcgactatgtcgtagtgggtaaagctccctggaaacagggagcatcagag

SEQ ID NO: 17607 - RNA, 88 nt, synthetic construct
  misc_feature 1..88: note = engineered ribonucleic acid scaffold (ERS) sequence
  source 1..88: mol_type = other RNA
actggcgcttctactgattactctgagcgccatcaccagcgactatgtcgtagtgggtaaagctccctggaaacagggagcatcagag

SEQ ID NO: 17608 - RNA, 89 nt, synthetic construct
  misc_feature 1..89: note = engineered ribonucleic acid scaffold (ERS) sequence
  source 1..89: mol_type = other RNA
actggcgcttctaactgattactctgagcgccatcaccagcgactatgtcgtagtgggtaaagctccctggaaacagggagcatcagag

SEQ ID NO: 17609 - RNA, 89 nt, synthetic construct
  misc_feature 1..89: note = engineered ribonucleic acid scaffold (ERS) sequence
  source 1..89: mol_type = other RNA
actggcgcttctacctgattactctgagcgccatcaccagcgactatgtcgtagtgggtaaagctccctggaaacagggagcatcagag

SEQ ID NO: 17610 - RNA, 89 nt, synthetic construct
  misc_feature 1..89: note = engineered ribonucleic acid scaffold (ERS) sequence
  source 1..89: mol_type = other RNA
actggcgcttctagctgattactctgagcgccatcaccagcgactatgtcgtagtgggtaaagctccctggaaacagggagcatcagag

SEQ ID NO: 17611 - RNA, 91 nt, synthetic construct
  misc_feature 1..91: note = engineered ribonucleic acid scaffold (ERS) sequence
  source 1..91: mol_type = other RNA
actggcgcttctattactgattactctgagcgccatcaccagcgactatgtcgtagtgggtaaagctccctggaaacagggagcatcagag

SEQ ID NO: 17612 - RNA, 89 nt, synthetic construct
  misc_feature 1..89: note = engineered ribonucleic acid scaffold (ERS) sequence
  source 1..89: mol_type = other RNA
actggcgcttctatatgattactctgagcgccatcaccagcgactatgtcgtagtgggtaaagctccctggaaacagggagcatcagag

SEQ ID NO: 17613 - RNA, 89 nt, synthetic construct
  misc_feature 1..89: note = engineered ribonucleic acid scaffold (ERS) sequence
  source 1..89: mol_type = other RNA
actggcgcttctatgtgattactctgagcgccatcaccagcgactatgtcgtagtgggtaaagctccctggaaacagggagcatcagag

SEQ ID NO: 17614 - RNA, 89 nt, synthetic construct
  misc_feature 1..89: note = engineered ribonucleic acid scaffold (ERS) sequence
  source 1..89: mol_type = other RNA
actggcgcttctatttgattactctgagcgccatcaccagcgactatgtcgtagtgggtaaagctccctggaaacagggagcatcagag

SEQ ID NO: 17615 - RNA, 90 nt, synthetic construct
  misc_feature 1..90: note = engineered ribonucleic acid scaffold (ERS) sequence
  source 1..90: mol_type = other RNA
actggcgcttctatcttgattactctgagcgccatcaccagcgactatgtcgtagtgggtaaagctccctggaaacagggagcatcagag

SEQ ID NO: 17616 - RNA, 89 nt, synthetic construct
  misc_feature 1..89: note = engineered ribonucleic acid scaffold (ERS) sequence
  source 1..89: mol_type = other RNA
actggcgcttctatcagattactctgagcgccatcaccagcgactatgtcgtagtgggtaaagctccctggaaacagggagcatcagag

SEQ ID NO: 17617 - RNA, 89 nt, synthetic construct
  misc_feature 1..89: note = engineered ribonucleic acid scaffold (ERS) sequence
  source 1..89: mol_type = other RNA
actggcgcttctatcggattactctgagcgccatcaccagcgactatgtcgtagtgggtaaagctccctggaaacagggagcatcagag

SEQ ID NO: 17618 - RNA, 90 nt, synthetic construct
  misc_feature 1..90: note = engineered ribonucleic acid scaffold (ERS) sequence
  source 1..90: mol_type = other RNA
actggcgcttctatctgaattactctgagcgccatcaccagcgactatgtcgtagtgggtaaagctccctggaaacagggagcatcagag

SEQ ID NO: 17619 - RNA, 90 nt, synthetic construct
  misc_feature 1..90: note = engineered ribonucleic acid scaffold (ERS) sequence
  source 1..90: mol_type = other RNA
actggcgcttctatctgtattactctgagcgccatcaccagcgactatgtcgtagtgggtaaagctccctggaaacagggagcatcagag

SEQ ID NO: 17620 - RNA, 89 nt, synthetic construct
  misc_feature 1..89: note = engineered ribonucleic acid scaffold (ERS) sequence
  source 1..89: mol_type = other RNA
actggcgcttctatctggttactctgagcgccatcaccagcgactatgtcgtagtgggtaaagctccctggaaacagggagcatcagag

SEQ ID NO: 17621 - RNA, 89 nt, synthetic construct
  misc_feature 1..89: note = engineered ribonucleic acid scaffold (ERS) sequence
  source 1..89: mol_type = other RNA
actggcgcttctatctgtttactctgagcgccatcaccagcgactatgtcgtagtgggtaaagctccctggaaacagggagcatcagag

SEQ ID NO: 17622 - RNA, 90 nt, synthetic construct
  misc_feature 1..90: note = engineered ribonucleic acid scaffold (ERS) sequence
  source 1..90: mol_type = other RNA
actggcgcttctatctgatttactctgagcgccatcaccagcgactatgtcgtagtgggtaaagctccctggaaacagggagcatcagag

SEQ ID NO: 17623 - RNA, 89 nt, synthetic construct
  misc_feature 1..89: note = engineered ribonucleic acid scaffold (ERS) sequence
  source 1..89: mol_type = other RNA
actggcgcttctatctgattgctctgagcgccatcaccagcgactatgtcgtagtgggtaaagctccctggaaacagggagcatcagag

SEQ ID NO: 17624 - RNA, 87 nt, synthetic construct
  misc_feature 1..87: note = engineered ribonucleic acid scaffold (ERS) sequence
  source 1..87: mol_type = other RNA
actggcgcttctatatctgattactctgagcgccatcaccagcgactatgtcgtagtgggtaaagctcccttcggggagcatcagag

SEQ ID NO: 17625 - RNA, 86 nt, synthetic construct
  misc_feature 1..86: note = engineered ribonucleic acid scaffold (ERS) sequence
  source 1..86: mol_type = other RNA
actggcgcttctaatctgattactctgagcgccatcaccagcgactatgtcgtagtgggtaaagctcccttcggggagcatcagag

SEQ ID NO: 17626 - RNA, 84 nt, synthetic construct
  misc_feature 1..84: note = engineered ribonucleic acid scaffold (ERS) sequence
  source 1..84: mol_type = other RNA
actggcgcttctactgattactctgagcgccatcaccagcgactatgtcgtagtgggtaaagctcccttcggggagcatcagag

SEQ ID NO: 17627 - RNA, 85 nt, synthetic construct
  misc_feature 1..85: note = engineered ribonucleic acid scaffold (ERS) sequence
  source 1..85: mol_type = other RNA
actggcgcttctaactgattactctgagcgccatcaccagcgactatgtcgtagtgggtaaagctcccttcggggagcatcagag

SEQ ID NO: 17628 - RNA, 85 nt, synthetic construct
  misc_feature 1..85: note = engineered ribonucleic acid scaffold (ERS) sequence
  source 1..85: mol_type = other RNA
actggcgcttctacctgattactctgagcgccatcaccagcgactatgtcgtagtgggtaaagctcccttcggggagcatcagag

SEQ ID NO: 17629 - RNA, 85 nt, synthetic construct
  misc_feature 1..85: note = engineered ribonucleic acid scaffold (ERS) sequence
  source 1..85: mol_type = other RNA
actggcgcttctagctgattactctgagcgccatcaccagcgactatgtcgtagtgggtaaagctcccttcggggagcatcagag

SEQ ID NO: 17630 - RNA, 87 nt, synthetic construct
  misc_feature 1..87: note = engineered ribonucleic acid scaffold (ERS) sequence
  source 1..87: mol_type = other RNA
actggcgcttctattactgattactctgagcgccatcaccagcgactatgtcgtagtgggtaaagctcccttcggggagcatcagag

SEQ ID NO: 17631 - RNA, 85 nt, synthetic construct
  misc_feature 1..85: note = engineered ribonucleic acid scaffold (ERS) sequence
  source 1..85: mol_type = other RNA
actggcgcttctatatgattactctgagcgccatcaccagcgactatgtcgtagtgggtaaagctcccttcggggagcatcagag

SEQ ID NO: 17632 - RNA, 85 nt, synthetic construct
  misc_feature 1..85: note = engineered ribonucleic acid scaffold (ERS) sequence
  source 1..85: mol_type = other RNA
actggcgcttctatgtgattactctgagcgccatcaccagcgactatgtcgtagtgggtaaagctcccttcggggagcatcagag

SEQ ID NO: 17633 - RNA, 85 nt, synthetic construct
  misc_feature 1..85: note = engineered ribonucleic acid scaffold (ERS) sequence
  source 1..85: mol_type = other RNA
actggcgcttctatttgattactctgagcgccatcaccagcgactatgtcgtagtgggtaaagctcccttcggggagcatcagag

SEQ ID NO: 17634 - RNA, 86 nt, synthetic construct
  misc_feature 1..86: note = engineered ribonucleic acid scaffold (ERS) sequence
  source 1..86: mol_type = other RNA
actggcgcttctatcttgattactctgagcgccatcaccagcgactatgtcgtagtgggtaaagctcccttcggggagcatcagag

SEQ ID NO: 17635 - RNA, 85 nt, synthetic construct
  misc_feature 1..85: note = engineered ribonucleic acid scaffold (ERS) sequence
  source 1..85: mol_type = other RNA
actggcgcttctatcagattactctgagcgccatcaccagcgactatgtcgtagtgggtaaagctcccttcggggagcatcagag

SEQ ID NO: 17636 - RNA, 85 nt, synthetic construct
  misc_feature 1..85: note = engineered ribonucleic acid scaffold (ERS) sequence
  source 1..85: mol_type = other RNA
actggcgcttctatcggattactctgagcgccatcaccagcgactatgtcgtagtgggtaaagctcccttcggggagcatcagag

SEQ ID NO: 17637 - RNA, 86 nt, synthetic construct
  misc_feature 1..86: note = engineered ribonucleic acid scaffold (ERS) sequence
  source 1..86: mol_type = other RNA
actggcgcttctatctgaattactctgagcgccatcaccagcgactatgtcgtagtgggtaaagctcccttcggggagcatcagag

SEQ ID NO: 17638 - RNA, 86 nt, synthetic construct
  misc_feature 1..86: note = engineered ribonucleic acid scaffold (ERS) sequence
  source 1..86: mol_type = other RNA
actggcgcttctatctgtattactctgagcgccatcaccagcgactatgtcgtagtgggtaaagctcccttcggggagcatcagag

SEQ ID NO: 17639 - RNA, 85 nt, synthetic construct
  misc_feature 1..85: note = engineered ribonucleic acid scaffold (ERS) sequence
  source 1..85: mol_type = other RNA
actggcgcttctatctggttactctgagcgccatcaccagcgactatgtcgtagtgggtaaagctcccttcggggagcatcagag

SEQ ID NO: 17640 - RNA, 85 nt, synthetic construct
  misc_feature 1..85: note = engineered ribonucleic acid scaffold (ERS) sequence
  source 1..85: mol_type = other RNA
actggcgcttctatctgtttactctgagcgccatcaccagcgactatgtcgtagtgggtaaagctcccttcggggagcatcagag

SEQ ID NO: 17641 - RNA, 86 nt, synthetic construct
  misc_feature 1..86: note = engineered ribonucleic acid scaffold (ERS) sequence
  source 1..86: mol_type = other RNA
actggcgcttctatctgatttactctgagcgccatcaccagcgactatgtcgtagtgggtaaagctcccttcggggagcatcagag

SEQ ID NO: 17642 - RNA, 85 nt, synthetic construct
  misc_feature 1..85: note = engineered ribonucleic acid scaffold (ERS) sequence
  source 1..85: mol_type = other RNA
actggcgcttctatctgattgctctgagcgccatcaccagcgactatgtcgtagtgggtaaagctcccttcggggagcatcagag

SEQ ID NO: 17643 - RNA, 87 nt, synthetic construct
  misc_feature 1..87: note = engineered ribonucleic acid scaffold (ERS) sequence
  source 1..87: mol_type = other RNA
actggcgcttctatatctgattactctgagcgccatcaccagcgactatgtcgtagtgggtaaagctccgttcgcggagcatcagag

SEQ ID NO: 17644 - RNA, 86 nt, synthetic construct
  misc_feature 1..86: note = engineered ribonucleic acid scaffold (ERS) sequence
  source 1..86: mol_type = other RNA
actggcgcttctaatctgattactctgagcgccatcaccagcgactatgtcgtagtgggtaaagctccgttcgcggagcatcagag

SEQ ID NO: 17645 - RNA, 84 nt, synthetic construct
  misc_feature 1..84: note = engineered ribonucleic acid scaffold (ERS) sequence
  source 1..84: mol_type = other RNA
actggcgcttctactgattactctgagcgccatcaccagcgactatgtcgtagtgggtaaagctccgttcgcggagcatcagag

SEQ ID NO: 17646 - RNA, 85 nt, synthetic construct
  misc_feature 1..85: note = engineered ribonucleic acid scaffold (ERS) sequence
  source 1..85: mol_type = other RNA
actggcgcttctaactgattactctgagcgccatcaccagcgactatgtcgtagtgggtaaagctccgttcgcggagcatcagag

SEQ ID NO: 17647 - RNA, 85 nt, synthetic construct
  misc_feature 1..85: note = engineered ribonucleic acid scaffold (ERS) sequence
  source 1..85: mol_type = other RNA
actggcgcttctacctgattactctgagcgccatcaccagcgactatgtcgtagtgggtaaagctccgttcgcggagcatcagag

SEQ ID NO: 17648 - RNA, 85 nt, synthetic construct
  misc_feature 1..85: note = engineered ribonucleic acid scaffold (ERS) sequence
  source 1..85: mol_type = other RNA
actggcgcttctagctgattactctgagcgccatcaccagcgactatgtcgtagtgggtaaagctccgttcgcggagcatcagag

SEQ ID NO: 17649 - RNA, 87 nt, synthetic construct
  misc_feature 1..87: note = engineered ribonucleic acid scaffold (ERS) sequence
  source 1..87: mol_type = other RNA
actggcgcttctattactgattactctgagcgccatcaccagcgactatgtcgtagtgggtaaagctccgttcgcggagcatcagag

SEQ ID NO: 17650 - RNA, 85 nt, synthetic construct
  misc_feature 1..85: note = engineered ribonucleic acid scaffold (ERS) sequence
  source 1..85: mol_type = other RNA
actggcgcttctatatgattactctgagcgccatcaccagcgactatgtcgtagtgggtaaagctccgttcgcggagcatcagag

SEQ ID NO: 17651 - RNA, 85 nt, synthetic construct
  misc_feature 1..85: note = engineered ribonucleic acid scaffold (ERS) sequence
  source 1..85: mol_type = other RNA
actggcgcttctatgtgattactctgagcgccatcaccagcgactatgtcgtagtgggtaaagctccgttcgcggagcatcagag

SEQ ID NO: 17652 - RNA, 85 nt, synthetic construct
  misc_feature 1..85: note = engineered ribonucleic acid scaffold (ERS) sequence
  source 1..85: mol_type = other RNA
actggcgcttctatttgattactctgagcgccatcaccagcgactatgtcgtagtgggtaaagctccgttcgcggagcatcagag

SEQ ID NO: 17653 - RNA, 86 nt, synthetic construct
  misc_feature 1..86: note = engineered ribonucleic acid scaffold (ERS) sequence
  source 1..86: mol_type = other RNA
actggcgcttctatcttgattactctgagcgccatcaccagcgactatgtcgtagtgggtaaagctccgttcgcggagcatcagag

SEQ ID NO: 17654 - RNA, 85 nt, synthetic construct
  misc_feature 1..85: note = engineered ribonucleic acid scaffold (ERS) sequence
  source 1..85: mol_type = other RNA
actggcgcttctatcagattactctgagcgccatcaccagcgactatgtcgtagtgggtaaagctccgttcgcggagcatcagag

SEQ ID NO: 17655 - RNA, 85 nt, synthetic construct
  misc_feature 1..85: note = engineered ribonucleic acid scaffold (ERS) sequence
  source 1..85: mol_type = other RNA
actggcgcttctatcggattactctgagcgccatcaccagcgactatgtcgtagtgggtaaagctccgttcgcggagcatcagag

SEQ ID NO: 17656 - RNA, 86 nt, synthetic construct
  misc_feature 1..86: note = engineered ribonucleic acid scaffold (ERS) sequence
  source 1..86: mol_type = other RNA
actggcgcttctatctgaattactctgagcgccatcaccagcgactatgtcgtagtgggtaaagctccgttcgcggagcatcagag

SEQ ID NO: 17657 - RNA, 86 nt, synthetic construct
  misc_feature 1..86: note = engineered ribonucleic acid scaffold (ERS) sequence
  source 1..86: mol_type = other RNA
actggcgcttctatctgtattactctgagcgccatcaccagcgactatgtcgtagtgggtaaagctccgttcgcggagcatcagag

SEQ ID NO: 17658 - RNA, 85 nt, synthetic construct
  misc_feature 1..85: note = engineered ribonucleic acid scaffold (ERS) sequence
  source 1..85: mol_type = other RNA
actggcgcttctatctggttactctgagcgccatcaccagcgactatgtcgtagtgggtaaagctccgttcgcggagcatcagag

SEQ ID NO: 17659 - RNA, 85 nt, synthetic construct
  misc_feature 1..85: note = engineered ribonucleic acid scaffold (ERS) sequence
  source 1..85: mol_type = other RNA
actggcgcttctatctgtttactctgagcgccatcaccagcgactatgtcgtagtgggtaaagctccgttcgcggagcatcagag

SEQ ID NO: 17660 - RNA, 86 nt, synthetic construct
  misc_feature 1..86: note = engineered ribonucleic acid scaffold (ERS) sequence
  source 1..86: mol_type = other RNA
actggcgcttctatctgatttactctgagcgccatcaccagcgactatgtcgtagtgggtaaagctccgttcgcggagcatcagag

SEQ ID NO: 17661 - RNA, 85 nt, synthetic construct
  misc_feature 1..85: note = engineered ribonucleic acid scaffold (ERS) sequence
  source 1..85: mol_type = other RNA
actggcgcttctatctgattgctctgagcgccatcaccagcgactatgtcgtagtgggtaaagctccgttcgcggagcatcagag

SEQ ID NO: 17662 - RNA, 89 nt, synthetic construct
  misc_feature 1..89: note = engineered ribonucleic acid scaffold (ERS) sequence
  source 1..89: mol_type = other RNA
actggcgcttctatatctgattactctgagcgccatcaccagcgactatgtcgtagtgggtaaagctcctcttcggaggagcatcagag

SEQ ID NO: 17663 - RNA, 88 nt, synthetic construct
  misc_feature 1..88: note = engineered ribonucleic acid scaffold (ERS) sequence
  source 1..88: mol_type = other RNA
actggcgcttctaatctgattactctgagcgccatcaccagcgactatgtcgtagtgggtaaagctcctcttcggaggagcatcagag

SEQ ID NO: 17664 - RNA, 86 nt, synthetic construct
  misc_feature 1..86: note = engineered ribonucleic acid scaffold (ERS) sequence
  source 1..86: mol_type = other RNA
actggcgcttctactgattactctgagcgccatcaccagcgactatgtcgtagtgggtaaagctcctcttcggaggagcatcagag

SEQ ID NO: 17665 - RNA, 87 nt, synthetic construct
  misc_feature 1..87: note = engineered ribonucleic acid scaffold (ERS) sequence
  source 1..87: mol_type = other RNA
actggcgcttctaactgattactctgagcgccatcaccagcgactatgtcgtagtgggtaaagctcctcttcggaggagcatcagag

SEQ ID NO: 17666 - RNA, 87 nt, synthetic construct
  misc_feature 1..87: note = engineered ribonucleic acid scaffold (ERS) sequence
  source 1..87: mol_type = other RNA
actggcgcttctacctgattactctgagcgccatcaccagcgactatgtcgtagtgggtaaagctcctcttcggaggagcatcagag

SEQ ID NO: 17667 - RNA, 87 nt, synthetic construct
  misc_feature 1..87: note = engineered ribonucleic acid scaffold (ERS) sequence
  source 1..87: mol_type = other RNA
actggcgcttctagctgattactctgagcgccatcaccagcgactatgtcgtagtgggtaaagctcctcttcggaggagcatcagag

SEQ ID NO: 17668 - RNA, 89 nt, synthetic construct
  misc_feature 1..89: note = engineered ribonucleic acid scaffold (ERS) sequence
  source 1..89: mol_type = other RNA
actggcgcttctattactgattactctgagcgccatcaccagcgactatgtcgtagtgggtaaagctcctcttcggaggagcatcagag

SEQ ID NO: 17669 - RNA, 87 nt, synthetic construct
  misc_feature 1..87: note = engineered ribonucleic acid scaffold (ERS) sequence
  source 1..87: mol_type = other RNA
actggcgcttctatatgattactctgagcgccatcaccagcgactatgtcgtagtgggtaaagctcctcttcggaggagcatcagag

SEQ ID NO: 17670 - RNA, 87 nt, synthetic construct
  misc_feature 1..87: note = engineered ribonucleic acid scaffold (ERS) sequence
  source 1..87: mol_type = other RNA
actggcgcttctatgtgattactctgagcgccatcaccagcgactatgtcgtagtgggtaaagctcctcttcggaggagcatcagag

SEQ ID NO: 17671 - RNA, 87 nt, synthetic construct
  misc_feature 1..87: note = engineered ribonucleic acid scaffold (ERS) sequence
  source 1..87: mol_type = other RNA
actggcgcttctatttgattactctgagcgccatcaccagcgactatgtcgtagtgggtaaagctcctcttcggaggagcatcagag

SEQ ID NO: 17672 - RNA, 88 nt, synthetic construct
  misc_feature 1..88: note = engineered ribonucleic acid scaffold (ERS) sequence
  source 1..88: mol_type = other RNA
actggcgcttctatcttgattactctgagcgccatcaccagcgactatgtcgtagtgggtaaagctcctcttcggaggagcatcagag

SEQ ID NO: 17673 - RNA, 87 nt, synthetic construct
  misc_feature 1..87: note = engineered ribonucleic acid scaffold (ERS) sequence
  source 1..87: mol_type = other RNA
actggcgcttctatcagattactctgagcgccatcaccagcgactatgtcgtagtgggtaaagctcctcttcggaggagcatcagag

SEQ ID NO: 17674 - RNA, 87 nt, synthetic construct
  misc_feature 1..87: note = engineered ribonucleic acid scaffold (ERS) sequence
  source 1..87: mol_type = other RNA
actggcgcttctatcggattactctgagcgccatcaccagcgactatgtcgtagtgggtaaagctcctcttcggaggagcatcagag

SEQ ID NO: 17675 - RNA, 88 nt, synthetic construct
  misc_feature 1..88: note = engineered ribonucleic acid scaffold (ERS) sequence
  source 1..88: mol_type = other RNA
actggcgcttctatctgaattactctgagcgccatcaccagcgactatgtcgtagtgggtaaagctcctcttcggaggagcatcagag

SEQ ID NO: 17676 - RNA, 88 nt, synthetic construct
  misc_feature 1..88: note = engineered ribonucleic acid scaffold (ERS) sequence
  source 1..88: mol_type = other RNA
actggcgcttctatctgtattactctgagcgccatcaccagcgactatgtcgtagtgggtaaagctcctcttcggaggagcatcagag

SEQ ID NO: 17677 - RNA, 87 nt, synthetic construct
  misc_feature 1..87: note = engineered ribonucleic acid scaffold (ERS) sequence
  source 1..87: mol_type = other RNA
actggcgcttctatctggttactctgagcgccatcaccagcgactatgtcgtagtgggtaaagctcctcttcggaggagcatcagag

SEQ ID NO: 17678 - RNA, 87 nt, synthetic construct
  misc_feature 1..87: note = engineered ribonucleic acid scaffold (ERS) sequence
  source 1..87: mol_type = other RNA
actggcgcttctatctgtttactctgagcgccatcaccagcgactatgtcgtagtgggtaaagctcctcttcggaggagcatcagag

SEQ ID NO: 17679 - RNA, 88 nt, synthetic construct
  misc_feature 1..88: note = engineered ribonucleic acid scaffold (ERS) sequence
  source 1..88: mol_type = other RNA
actggcgcttctatctgatttactctgagcgccatcaccagcgactatgtcgtagtgggtaaagctcctcttcggaggagcatcagag

SEQ ID NO: 17680 - RNA, 87 nt, synthetic construct
  misc_feature 1..87: note = engineered ribonucleic acid scaffold (ERS) sequence
  source 1..87: mol_type = other RNA
actggcgcttctatctgattgctctgagcgccatcaccagcgactatgtcgtagtgggtaaagctcctcttcggaggagcatcagag

SEQ ID NO: 17681 - RNA, 87 nt, synthetic construct
  misc_feature 1..87: note = engineered ribonucleic acid scaffold (ERS) sequence
  source 1..87: mol_type = other RNA
actggcgcttctatatctgattactctgagcgccatcaccagcgactatgtcgtagtgggtaaagctctcttcggagagcatcagag

SEQ ID NO: 17682 - RNA, 86 nt, synthetic construct
  misc_feature 1..86: note = engineered ribonucleic acid scaffold (ERS) sequence
  source 1..86: mol_type = other RNA
actggcgcttctaatctgattactctgagcgccatcaccagcgactatgtcgtagtgggtaaagctctcttcggagagcatcagag

SEQ ID NO: 17683 - RNA, 84 nt, synthetic construct
  misc_feature 1..84: note = engineered ribonucleic acid scaffold (ERS) sequence
  source 1..84: mol_type = other RNA
actggcgcttctactgattactctgagcgccatcaccagcgactatgtcgtagtgggtaaagctctcttcggagagcatcagag

SEQ ID NO: 17684 - RNA, 85 nt, synthetic construct
  misc_feature 1..85: note = engineered ribonucleic acid scaffold (ERS) sequence
  source 1..85: mol_type = other RNA
actggcgcttctaactgattactctgagcgccatcaccagcgactatgtcgtagtgggtaaagctctcttcggagagcatcagag

SEQ ID NO: 17685 - RNA, 85 nt, synthetic construct
  misc_feature 1..85: note = engineered ribonucleic acid scaffold (ERS) sequence
  source 1..85: mol_type = other RNA
actggcgcttctacctgattactctgagcgccatcaccagcgactatgtcgtagtgggtaaagctctcttcggagagcatcagag

SEQ ID NO: 17686 - RNA, 85 nt, synthetic construct
  misc_feature 1..85: note = engineered ribonucleic acid scaffold (ERS) sequence
  source 1..85: mol_type = other RNA
actggcgcttctagctgattactctgagcgccatcaccagcgactatgtcgtagtgggtaaagctctcttcggagagcatcagag

SEQ ID NO: 17687 - RNA, 87 nt, synthetic construct
  misc_feature 1..87: note = engineered ribonucleic acid scaffold (ERS) sequence
  source 1..87: mol_type = other RNA
actggcgcttctattactgattactctgagcgccatcaccagcgactatgtcgtagtgggtaaagctctcttcggagagcatcagag

SEQ ID NO: 17688 - RNA, 85 nt, synthetic construct
  misc_feature 1..85: note = engineered ribonucleic acid scaffold (ERS) sequence
  source 1..85: mol_type = other RNA
actggcgcttctatatgattactctgagcgccatcaccagcgactatgtcgtagtgggtaaagctctcttcggagagcatcagag

SEQ ID NO: 17689 - RNA, 85 nt, synthetic construct
  misc_feature 1..85: note = engineered ribonucleic acid scaffold (ERS) sequence
  source 1..85: mol_type = other RNA
actggcgcttctatgtgattactctgagcgccatcaccagcgactatgtcgtagtgggtaaagctctcttcggagagcatcagag

SEQ ID NO: 17690 - RNA, 85 nt, synthetic construct
  misc_feature 1..85: note = engineered ribonucleic acid scaffold (ERS) sequence
  source 1..85: mol_type = other RNA
actggcgcttctatttgattactctgagcgccatcaccagcgactatgtcgtagtgggtaaagctctcttcggagagcatcagag

SEQ ID NO: 17691 - RNA, 86 nt, synthetic construct
  misc_feature 1..86: note = engineered ribonucleic acid scaffold (ERS) sequence
  source 1..86: mol_type = other RNA
actggcgcttctatcttgattactctgagcgccatcaccagcgactatgtcgtagtgggtaaagctctcttcggagagcatcagag

SEQ ID NO: 17692 - RNA, 85 nt, synthetic construct
  misc_feature 1..85: note = engineered ribonucleic acid scaffold (ERS) sequence
  source 1..85: mol_type = other RNA
actggcgcttctatcagattactctgagcgccatcaccagcgactatgtcgtagtgggtaaagctctcttcggagagcatcagag

SEQ ID NO: 17693 - RNA, 85 nt, synthetic construct
  misc_feature 1..85: note = engineered ribonucleic acid scaffold (ERS) sequence
  source 1..85: mol_type = other RNA
actggcgcttctatcggattactctgagcgccatcaccagcgactatgtcgtagtgggtaaagctctcttcggagagcatcagag

SEQ ID NO: 17694 - RNA, 86 nt, synthetic construct
  misc_feature 1..86: note = engineered ribonucleic acid scaffold (ERS) sequence
  source 1..86: mol_type = other RNA
actggcgcttctatctgaattactctgagcgccatcaccagcgactatgtcgtagtgggtaaagctctcttcggagagcatcagag

SEQ ID NO: 17695 - RNA, 86 nt, synthetic construct
  misc_feature 1..86: note = engineered ribonucleic acid scaffold (ERS) sequence
  source 1..86: mol_type = other RNA
actggcgcttctatctgtattactctgagcgccatcaccagcgactatgtcgtagtgggtaaagctctcttcggagagcatcagag

SEQ ID NO: 17696 - RNA, 85 nt, synthetic construct
  misc_feature 1..85: note = engineered ribonucleic acid scaffold (ERS) sequence
  source 1..85: mol_type = other RNA
actggcgcttctatctggttactctgagcgccatcaccagcgactatgtcgtagtgggtaaagctctcttcggagagcatcagag

SEQ ID NO: 17697 - RNA, 85 nt, synthetic construct
  misc_feature 1..85: note = engineered ribonucleic acid scaffold (ERS) sequence
  source 1..85: mol_type = other RNA
actggcgcttctatctgtttactctgagcgccatcaccagcgactatgtcgtagtgggtaaagctctcttcggagagcatcagag

SEQ ID NO: 17698 - RNA, 86 nt, synthetic construct
  misc_feature 1..86: note = engineered ribonucleic acid scaffold (ERS) sequence
  source 1..86: mol_type = other RNA
actggcgcttctatctgatttactctgagcgccatcaccagcgactatgtcgtagtgggtaaagctctcttcggagagcatcagag

SEQ ID NO: 17699 - RNA, 85 nt, synthetic construct
  misc_feature 1..85: note = engineered ribonucleic acid scaffold (ERS) sequence
  source 1..85: mol_type = other RNA
actggcgcttctatctgattgctctgagcgccatcaccagcgactatgtcgtagtgggtaaagctctcttcggagagcatcagag

SEQ ID NO: 17700 - RNA, 79 nt, synthetic construct
  misc_feature 1..79: note = engineered ribonucleic acid scaffold (ERS) sequence
  source 1..79: mol_type = other RNA
actggcgcttctatatctgattactctgagcgccatcaccagcgactatgtcgtagtgggtaaagctgcagcatcagag

SEQ ID NO: 17701 - RNA, 78 nt, synthetic construct
  misc_feature 1..78: note = engineered ribonucleic acid scaffold (ERS) sequence
  source 1..78: mol_type = other RNA
actggcgcttctaatctgattactctgagcgccatcaccagcgactatgtcgtagtgggtaaagctgcagcatcagag

SEQ ID NO: 17702 - RNA, 76 nt, synthetic construct
  misc_feature 1..76: note = engineered ribonucleic acid scaffold (ERS) sequence
  source 1..76: mol_type = other RNA
actggcgcttctactgattactctgagcgccatcaccagcgactatgtcgtagtgggtaaagctgcagcatcagag

SEQ ID NO: 17703 - RNA, 77 nt, synthetic construct
  misc_feature 1..77: note = engineered ribonucleic acid scaffold (ERS) sequence
  source 1..77: mol_type = other RNA
actggcgcttctaactgattactctgagcgccatcaccagcgactatgtcgtagtgggtaaagctgcagcatcagag

SEQ ID NO: 17704 - RNA, 77 nt, synthetic construct
  misc_feature 1..77: note = engineered ribonucleic acid scaffold (ERS) sequence
  source 1..77: mol_type = other RNA
actggcgcttctacctgattactctgagcgccatcaccagcgactatgtcgtagtgggtaaagctgcagcatcagag

SEQ ID NO: 17705 - RNA, 77 nt, synthetic construct
  misc_feature 1..77: note = engineered ribonucleic acid scaffold (ERS) sequence
  source 1..77: mol_type = other RNA
actggcgcttctagctgattactctgagcgccatcaccagcgactatgtcgtagtgggtaaagctgcagcatcagag

SEQ ID NO: 17706 - RNA, 79 nt, synthetic construct
  misc_feature 1..79: note = engineered ribonucleic acid scaffold (ERS) sequence
  source 1..79: mol_type = other RNA
actggcgcttctattactgattactctgagcgccatcaccagcgactatgtcgtagtgggtaaagctgcagcatcagag

SEQ ID NO: 17707 - RNA, 77 nt, synthetic construct
  misc_feature 1..77: note = engineered ribonucleic acid scaffold (ERS) sequence
  source 1..77: mol_type = other RNA
actggcgcttctatatgattactctgagcgccatcaccagcgactatgtcgtagtgggtaaagctgcagcatcagag

SEQ ID NO: 17708 - RNA, 77 nt, synthetic construct
  misc_feature 1..77: note = engineered ribonucleic acid scaffold (ERS) sequence
  source 1..77: mol_type = other RNA
actggcgcttctatgtgattactctgagcgccatcaccagcgactatgtcgtagtgggtaaagctgcagcatcagag

SEQ ID NO: 17709 - RNA, 77 nt, synthetic construct
  misc_feature 1..77: note = engineered ribonucleic acid scaffold (ERS) sequence
  source 1..77: mol_type = other RNA
actggcgcttctatttgattactctgagcgccatcaccagcgactatgtcgtagtgggtaaagctgcagcatcagag

SEQ ID NO: 17710 - RNA, 78 nt, synthetic construct
  misc_feature 1..78: note = engineered ribonucleic acid scaffold (ERS) sequence
  source 1..78: mol_type = other RNA
actggcgcttctatcttgattactctgagcgccatcaccagcgactatgtcgtagtgggtaaagctgcagcatcagag

SEQ ID NO: 17711 - RNA, 77 nt, synthetic construct
  misc_feature 1..77: note = engineered ribonucleic acid scaffold (ERS) sequence
  source 1..77: mol_type = other RNA
actggcgcttctatcagattactctgagcgccatcaccagcgactatgtcgtagtgggtaaagctgcagcatcagag

SEQ ID NO: 17712 - RNA, 77 nt, synthetic construct
  misc_feature 1..77: note = engineered ribonucleic acid scaffold (ERS) sequence
  source 1..77: mol_type = other RNA
actggcgcttctatcggattactctgagcgccatcaccagcgactatgtcgtagtgggtaaagctgcagcatcagag

SEQ ID NO: 17713 - RNA, 78 nt, synthetic construct
  misc_feature 1..78: note = engineered ribonucleic acid scaffold (ERS) sequence
  source 1..78: mol_type = other RNA
actggcgcttctatctgaattactctgagcgccatcaccagcgactatgtcgtagtgggtaaagctgcagcatcagag

SEQ ID NO: 17714 - RNA, 78 nt, synthetic construct
  misc_feature 1..78: note = engineered ribonucleic acid scaffold (ERS) sequence
  source 1..78: mol_type = other RNA
actggcgcttctatctgtattactctgagcgccatcaccagcgactatgtcgtagtgggtaaagctgcagcatcagag

SEQ ID NO: 17715 - RNA, 77 nt, synthetic construct
  misc_feature 1..77: note = engineered ribonucleic acid scaffold (ERS) sequence
  source 1..77: mol_type = other RNA
actggcgcttctatctggttactctgagcgccatcaccagcgactatgtcgtagtgggtaaagctgcagcatcagag

SEQ ID NO: 17716 - RNA, 77 nt, synthetic construct
  misc_feature 1..77: note = engineered ribonucleic acid scaffold (ERS) sequence
  source 1..77: mol_type = other RNA
actggcgcttctatctgtttactctgagcgccatcaccagcgactatgtcgtagtgggtaaagctgcagcatcagag

SEQ ID NO: 17717 - RNA, 78 nt, synthetic construct
  misc_feature 1..78: note = engineered ribonucleic acid scaffold (ERS) sequence
  source 1..78: mol_type = other RNA
actggcgcttctatctgatttactctgagcgccatcaccagcgactatgtcgtagtgggtaaagctgcagcatcagag

SEQ ID NO: 17718 - RNA, 77 nt, synthetic construct
  misc_feature 1..77: note = engineered ribonucleic acid scaffold (ERS) sequence
  source 1..77: mol_type = other RNA
actggcgcttctatctgattgctctgagcgccatcaccagcgactatgtcgtagtgggtaaagctgcagcatcagag

SEQ ID NO: 17719 - RNA, 85 nt, synthetic construct
  misc_feature 1..85: note = engineered ribonucleic acid scaffold (ERS) sequence
  source 1..85: mol_type = other RNA
actggcgcttctatatctgattactctgagcgccatcaccagcgactatgtcgtagtgggtaaagctgcttcggcagcatcagag

SEQ ID NO: 17720 - RNA, 84 nt, synthetic construct
  misc_feature 1..84: note = engineered ribonucleic acid scaffold (ERS) sequence
  source 1..84: mol_type = other RNA
actggcgcttctaatctgattactctgagcgccatcaccagcgactatgtcgtagtgggtaaagctgcttcggcagcatcagag

SEQ ID NO: 17721 - RNA, 82 nt, synthetic construct
  misc_feature 1..82: note = engineered ribonucleic acid scaffold (ERS) sequence
  source 1..82: mol_type = other RNA
actggcgcttctactgattactctgagcgccatcaccagcgactatgtcgtagtgggtaaagctgcttcggcagcatcagag

SEQ ID NO: 17722 - RNA, 83 nt, synthetic construct
  misc_feature 1..83: note = engineered ribonucleic acid scaffold (ERS) sequence
  source 1..83: mol_type = other RNA
actggcgcttctaactgattactctgagcgccatcaccagcgactatgtcgtagtgggtaaagctgcttcggcagcatcagag

SEQ ID NO: 17723 - RNA, 83 nt, synthetic construct
  misc_feature 1..83: note = engineered ribonucleic acid scaffold (ERS) sequence
  source 1..83: mol_type = other RNA
actggcgcttctacctgattactctgagcgccatcaccagcgactatgtcgtagtgggtaaagctgcttcggcagcatcagag

SEQ ID NO: 17724 - RNA, 83 nt, synthetic construct
  misc_feature 1..83: note = engineered ribonucleic acid scaffold (ERS) sequence
  source 1..83: mol_type = other RNA
actggcgcttctagctgattactctgagcgccatcaccagcgactatgtcgtagtgggtaaagctgcttcggcagcatcagag

SEQ ID NO: 17725 - RNA, 85 nt, synthetic construct
  misc_feature 1..85: note = engineered ribonucleic acid scaffold (ERS) sequence
  source 1..85: mol_type = other RNA
actggcgcttctattactgattactctgagcgccatcaccagcgactatgtcgtagtgggtaaagctgcttcggcagcatcagag

SEQ ID NO: 17726 - RNA, 83 nt, synthetic construct
  misc_feature 1..83: note = engineered ribonucleic acid scaffold (ERS) sequence
  source 1..83: mol_type = other RNA
actggcgcttctatatgattactctgagcgccatcaccagcgactatgtcgtagtgggtaaagctgcttcggcagcatcagag

SEQ ID NO: 17727 - RNA, 83 nt, synthetic construct
  misc_feature 1..83: note = engineered ribonucleic acid scaffold (ERS) sequence
  source 1..83: mol_type = other RNA
actggcgcttctatgtgattactctgagcgccatcaccagcgactatgtcgtagtgggtaaagctgcttcggcagcatcagag

SEQ ID NO: 17728 - RNA, 83 nt, synthetic construct
  misc_feature 1..83: note = engineered ribonucleic acid scaffold (ERS) sequence
  source 1..83: mol_type = other RNA
actggcgcttctatttgattactctgagcgccatcaccagcgactatgtcgtagtgggtaaagctgcttcggcagcatcagag

SEQ ID NO: 17729 - RNA, 84 nt, synthetic construct
  misc_feature 1..84: note = engineered ribonucleic acid scaffold (ERS) sequence
  source 1..84: mol_type = other RNA
actggcgcttctatcttgattactctgagcgccatcaccagcgactatgtcgtagtgggtaaagctgcttcggcagcatcagag

SEQ ID NO: 17730 - RNA, 83 nt, synthetic construct
  misc_feature 1..83: note = engineered ribonucleic acid scaffold (ERS) sequence
  source 1..83: mol_type = other RNA
actggcgcttctatcagattactctgagcgccatcaccagcgactatgtcgtagtgggtaaagctgcttcggcagcatcagag

SEQ ID NO: 17731 - RNA, 83 nt, synthetic construct
  misc_feature 1..83: note = engineered ribonucleic acid scaffold (ERS) sequence
  source 1..83: mol_type = other RNA
actggcgcttctatcggattactctgagcgccatcaccagcgactatgtcgtagtgggtaaagctgcttcggcagcatcagag

SEQ ID NO: 17732 - RNA, 84 nt, synthetic construct
  misc_feature 1..84: note = engineered ribonucleic acid scaffold (ERS) sequence
  source 1..84: mol_type = other RNA
actggcgcttctatctgaattactctgagcgccatcaccagcgactatgtcgtagtgggtaaagctgcttcggcagcatcagag

SEQ ID NO: 17733 - RNA, 84 nt, synthetic construct
  misc_feature 1..84: note = engineered ribonucleic acid scaffold (ERS) sequence
  source 1..84: mol_type = other RNA
actggcgcttctatctgtattactctgagcgccatcaccagcgactatgtcgtagtgggtaaagctgcttcggcagcatcagag

SEQ ID NO: 17734 - RNA, 83 nt, synthetic construct
  misc_feature 1..83: note = engineered ribonucleic acid scaffold (ERS) sequence
  source 1..83: mol_type = other RNA
actggcgcttctatctggttactctgagcgccatcaccagcgactatgtcgtagtgggtaaagctgcttcggcagcatcagag

SEQ ID NO: 17735 - RNA, 83 nt, synthetic construct
  misc_feature 1..83: note = engineered ribonucleic acid scaffold (ERS) sequence
  source 1..83: mol_type = other RNA
actggcgcttctatctgtttactctgagcgccatcaccagcgactatgtcgtagtgggtaaagctgcttcggcagcatcagag

SEQ ID NO: 17736 - RNA, 84 nt, synthetic construct
  misc_feature 1..84: note = engineered ribonucleic acid scaffold (ERS) sequence
  source 1..84: mol_type = other RNA
actggcgcttctatctgatttactctgagcgccatcaccagcgactatgtcgtagtgggtaaagctgcttcggcagcatcagag

SEQ ID NO: 17737 - RNA, 83 nt, synthetic construct
  misc_feature 1..83: note = engineered ribonucleic acid scaffold (ERS) sequence
  source 1..83: mol_type = other RNA
actggcgcttctatctgattgctctgagcgccatcaccagcgactatgtcgtagtgggtaaagctgcttcggcagcatcagag

SEQ ID NO: 17738 - RNA, 91 nt, synthetic construct
  misc_feature 1..91: note = engineered ribonucleic acid scaffold (ERS) sequence
  source 1..91: mol_type = other RNA
actggcgcttctatatctgattactctgagcgccatcaccagcgactatgtcgtagtgggtaaaggtccctcttcggagggaacatcagag

SEQ ID NO: 17739 - RNA, 90 nt, synthetic construct
  misc_feature 1..90: note = engineered ribonucleic acid scaffold (ERS) sequence
  source 1..90: mol_type = other RNA
actggcgcttctaatctgattactctgagcgccatcaccagcgactatgtcgtagtgggtaaaggtccctcttcggagggaacatcagag

SEQ ID NO: 17740 - RNA, 88 nt, synthetic construct
  misc_feature 1..88: note = engineered ribonucleic acid scaffold (ERS) sequence
  source 1..88: mol_type = other RNA
actggcgcttctactgattactctgagcgccatcaccagcgactatgtcgtagtgggtaaaggtccctcttcggagggaacatcagag

SEQ ID NO: 17741 - RNA, 89 nt, synthetic construct
  misc_feature 1..89: note = engineered ribonucleic acid scaffold (ERS) sequence
  source 1..89: mol_type = other RNA
actggcgcttctaactgattactctgagcgccatcaccagcgactatgtcgtagtgggtaaaggtccctcttcggagggaacatcagag

SEQ ID NO: 17742 - RNA, 89 nt, synthetic construct
  misc_feature 1..89: note = engineered ribonucleic acid scaffold (ERS) sequence
  source 1..89: mol_type = other RNA
actggcgcttctacctgattactctgagcgccatcaccagcgactatgtcgtagtgggtaaaggtccctcttcggagggaacatcagag

SEQ ID NO: 17743 - RNA, 89 nt, synthetic construct
  misc_feature 1..89: note = engineered ribonucleic acid scaffold (ERS) sequence
  source 1..89: mol_type = other RNA
actggcgcttctagctgattactctgagcgccatcaccagcgactatgtcgtagtgggtaaaggtccctcttcggagggaacatcagag

SEQ ID NO: 17744 - RNA, 91 nt, synthetic construct
  misc_feature 1..91: note = engineered ribonucleic acid scaffold (ERS) sequence
  source 1..91: mol_type = other RNA
actggcgcttctattactgattactctgagcgccatcaccagcgactatgtcgtagtgggtaaaggtccctcttcggagggaacatcagag

SEQ ID NO: 17745 - RNA, 89 nt, synthetic construct
  misc_feature 1..89: note = engineered ribonucleic acid scaffold (ERS) sequence
  source 1..89: mol_type = other RNA
actggcgcttctatatgattactctgagcgccatcaccagcgactatgtcgtagtgggtaaaggtccctcttcggagggaacatcagag

SEQ ID NO: 17746 - RNA, 89 nt, synthetic construct
  misc_feature 1..89: note = engineered ribonucleic acid scaffold (ERS) sequence
  source 1..89: mol_type = other RNA
actggcgcttctatgtgattactctgagcgccatcaccagcgactatgtcgtagtgggtaaaggtccctcttcggagggaacatcagag

SEQ ID NO: 17747 - RNA, 89 nt, synthetic construct
  misc_feature 1..89: note = engineered ribonucleic acid scaffold (ERS) sequence
  source 1..89: mol_type = other RNA
actggcgcttctatttgattactctgagcgccatcaccagcgactatgtcgtagtgggtaaaggtccctcttcggagggaacatcagag

SEQ ID NO: 17748 - RNA, 90 nt, synthetic construct
  misc_feature 1..90: note = engineered ribonucleic acid scaffold (ERS) sequence
  source 1..90: mol_type = other RNA
actggcgcttctatcttgattactctgagcgccatcaccagcgactatgtcgtagtgggtaaaggtccctcttcggagggaacatcagag

SEQ ID NO: 17749 - RNA, 89 nt, synthetic construct
  misc_feature 1..89: note = engineered ribonucleic acid scaffold (ERS) sequence
  source 1..89: mol_type = other RNA
actggcgcttctatcagattactctgagcgccatcaccagcgactatgtcgtagtgggtaaaggtccctcttcggagggaacatcagag

SEQ ID NO: 17750 - RNA, 89 nt, synthetic construct
  misc_feature 1..89: note = engineered ribonucleic acid scaffold (ERS) sequence
  source 1..89: mol_type = other RNA
actggcgcttctatcggattactctgagcgccatcaccagcgactatgtcgtagtgggtaaaggtccctcttcggagggaacatcagag

SEQ ID NO: 17751 - RNA, 90 nt, synthetic construct
  misc_feature 1..90: note = engineered ribonucleic acid scaffold (ERS) sequence
  source 1..90: mol_type = other RNA
actggcgcttctatctgaattactctgagcgccatcaccagcgactatgtcgtagtgggtaaaggtccctcttcggagggaacatcagag

SEQ ID NO: 17752 - RNA, 90 nt, synthetic construct
  misc_feature 1..90: note = engineered ribonucleic acid scaffold (ERS) sequence
  source 1..90: mol_type = other RNA
actggcgcttctatctgtattactctgagcgccatcaccagcgactatgtcgtagtgggtaaaggtccctcttcggagggaacatcagag

SEQ ID NO: 17753 - RNA, 89 nt, synthetic construct
  misc_feature 1..89: note = engineered ribonucleic acid scaffold (ERS) sequence
  source 1..89: mol_type = other RNA
actggcgcttctatctggttactctgagcgccatcaccagcgactatgtcgtagtgggtaaaggtccctcttcggagggaacatcagag

SEQ ID NO: 17754 - RNA, 89 nt, synthetic construct
  misc_feature 1..89: note = engineered ribonucleic acid scaffold (ERS) sequence
  source 1..89: mol_type = other RNA
actggcgcttctatctgtttactctgagcgccatcaccagcgactatgtcgtagtgggtaaaggtccctcttcggagggaacatcagag

SEQ ID NO: 17755 - RNA, 90 nt, synthetic construct
  misc_feature 1..90: note = engineered ribonucleic acid scaffold (ERS) sequence
  source 1..90: mol_type = other RNA
actggcgcttctatctgatttactctgagcgccatcaccagcgactatgtcgtagtgggtaaaggtccctcttcggagggaacatcagag

SEQ ID NO: 17756 - RNA, 89 nt, synthetic construct
  misc_feature 1..89: note = engineered ribonucleic acid scaffold (ERS) sequence
  source 1..89: mol_type = other RNA
actggcgcttctatctgattgctctgagcgccatcaccagcgactatgtcgtagtgggtaaaggtccctcttcggagggaacatcagag

SEQ ID NO: 17757 - RNA, 95 nt, synthetic construct
  misc_feature 1..95: note = engineered ribonucleic acid scaffold (ERS) sequence
  source 1..95: mol_type = other RNA
actggcgcttctatatctgattactctgagcgccatcaccagcgactatgtcgtagtgggtaaaggtgacggtcttcggaccgtcaccatcagag

SEQ ID NO: 17758 - RNA, 94 nt, synthetic construct
  misc_feature 1..94: note = engineered ribonucleic acid scaffold (ERS) sequence
  source 1..94: mol_type = other RNA
actggcgcttctaatctgattactctgagcgccatcaccagcgactatgtcgtagtgggtaaaggtgacggtcttcggaccgtcaccatcagag

SEQ ID NO: 17759 - RNA, 92 nt, synthetic construct
  misc_feature 1..92: note = engineered ribonucleic acid scaffold (ERS) sequence
  source 1..92: mol_type = other RNA
actggcgcttctactgattactctgagcgccatcaccagcgactatgtcgtagtgggtaaaggtgacggtcttcggaccgtcaccatcagag

SEQ ID NO: 17760 - RNA, 93 nt, synthetic construct
  misc_feature 1..93: note = engineered ribonucleic acid scaffold (ERS) sequence
  source 1..93: mol_type = other RNA
actggcgcttctaactgattactctgagcgccatcaccagcgactatgtcgtagtgggtaaaggtgacggtcttcggaccgtcaccatcagag

SEQ ID NO: 17761 - RNA, 93 nt, synthetic construct
  misc_feature 1..93: note = engineered ribonucleic acid scaffold (ERS) sequence
  source 1..93: mol_type = other RNA
actggcgcttctacctgattactctgagcgccatcaccagcgactatgtcgtagtgggtaaaggtgacggtcttcggaccgtcaccatcagag

SEQ ID NO: 17762 - RNA, 93 nt, synthetic construct
  misc_feature 1..93: note = engineered ribonucleic acid scaffold (ERS) sequence
  source 1..93: mol_type = other RNA
actggcgcttctagctgattactctgagcgccatcaccagcgactatgtcgtagtgggtaaaggtgacggtcttcggaccgtcaccatcagag

SEQ ID NO: 17763 - RNA, 95 nt, synthetic construct
  misc_feature 1..95: note = engineered ribonucleic acid scaffold (ERS) sequence
  source 1..95: mol_type = other RNA
actggcgcttctattactgattactctgagcgccatcaccagcgactatgtcgtagtgggtaaaggtgacggtcttcggaccgtcaccatcagag

SEQ ID NO: 17764 - RNA, 93 nt, synthetic construct
  misc_feature 1..93: note = engineered ribonucleic acid scaffold (ERS) sequence
  source 1..93: mol_type = other RNA
actggcgcttctatatgattactctgagcgccatcaccagcgactatgtcgtagtgggtaaaggtgacggtcttcggaccgtcaccatcagag

SEQ ID NO: 17765 - RNA, 93 nt, synthetic construct
  misc_feature 1..93: note = engineered ribonucleic acid scaffold (ERS) sequence
  source 1..93: mol_type = other RNA
actggcgcttctatgtgattactctgagcgccatcaccagcgactatgtcgtagtgggtaaaggtgacggtcttcggaccgtcaccatcagag

SEQ ID NO: 17766 - RNA, 93 nt, synthetic construct
  misc_feature 1..93: note = engineered ribonucleic acid scaffold (ERS) sequence
  source 1..93: mol_type = other RNA
actggcgcttctatttgattactctgagcgccatcaccagcgactatgtcgtagtgggtaaaggtgacggtcttcggaccgtcaccatcagag

SEQ ID NO: 17767 - RNA, 94 nt, synthetic construct
  misc_feature 1..94: note = engineered ribonucleic acid scaffold (ERS) sequence
  source 1..94: mol_type = other RNA
actggcgcttctatcttgattactctgagcgccatcaccagcgactatgtcgtagtgggtaaaggtgacggtcttcggaccgtcaccatcagag

SEQ ID NO: 17768 - RNA, 93 nt, synthetic construct
  misc_feature 1..93: note = engineered ribonucleic acid scaffold (ERS) sequence
  source 1..93: mol_type = other RNA
actggcgcttctatcagattactctgagcgccatcaccagcgactatgtcgtagtgggtaaaggtgacggtcttcggaccgtcaccatcagag

SEQ ID NO: 17769 - RNA, 93 nt, synthetic construct
  misc_feature 1..93: note = engineered ribonucleic acid scaffold (ERS) sequence
  source 1..93: mol_type = other RNA
actggcgcttctatcggattactctgagcgccatcaccagcgactatgtcgtagtgggtaaaggtgacggtcttcggaccgtcaccatcagag

SEQ ID NO: 17770 - RNA, 94 nt, synthetic construct
  misc_feature 1..94: note = engineered ribonucleic acid scaffold (ERS) sequence
  source 1..94: mol_type = other RNA
actggcgcttctatctgaattactctgagcgccatcaccagcgactatgtcgtagtgggtaaaggtgacggtcttcggaccgtcaccatcagag

SEQ ID NO: 17771 - RNA, 94 nt, synthetic construct
  misc_feature 1..94: note = engineered ribonucleic acid scaffold (ERS) sequence
  source 1..94: mol_type = other RNA
actggcgcttctatctgtattactctgagcgccatcaccagcgactatgtcgtagtgggtaaaggtgacggtcttcggaccgtcaccatcagag

SEQ ID NO: 17772 - RNA, 93 nt, synthetic construct
  misc_feature 1..93: note = engineered ribonucleic acid scaffold (ERS) sequence
  source 1..93: mol_type = other RNA
actggcgcttctatctggttactctgagcgccatcaccagcgactatgtcgtagtgggtaaaggtgacggtcttcggaccgtcaccatcagag

SEQ ID NO: 17773 - RNA, 93 nt, synthetic construct
  misc_feature 1..93: note = engineered ribonucleic acid scaffold (ERS) sequence
  source 1..93: mol_type = other RNA
actggcgcttctatctgtttactctgagcgccatcaccagcgactatgtcgtagtgggtaaaggtgacggtcttcggaccgtcaccatcagag

SEQ ID NO: 17774 - RNA, 94 nt, synthetic construct
  misc_feature 1..94: note = engineered ribonucleic acid scaffold (ERS) sequence
  source 1..94: mol_type = other RNA
actggcgcttctatctgatttactctgagcgccatcaccagcgactatgtcgtagtgggtaaaggtgacggtcttcggaccgtcaccatcagag

SEQ ID NO: 17775 - RNA, 93 nt, synthetic construct
  misc_feature 1..93: note = engineered ribonucleic acid scaffold (ERS) sequence
  source 1..93: mol_type = other RNA
actggcgcttctatctgattgctctgagcgccatcaccagcgactatgtcgtagtgggtaaaggtgacggtcttcggaccgtcaccatcagag

SEQ ID NO: 17776 - RNA, 93 nt, synthetic construct
  misc_feature 1..93: note = engineered ribonucleic acid scaffold (ERS) sequence
  source 1..93: mol_type = other RNA
actggcgcttctatatctgattactctgagcgccatcaccagcgactatgtcgtagtgggtaaagtctccctcttcggagggaggcatcagag

SEQ ID NO: 17777 - RNA, 92 nt, synthetic construct
  misc_feature 1..92: note = engineered ribonucleic acid scaffold (ERS) sequence
  source 1..92: mol_type = other RNA
actggcgcttctaatctgattactctgagcgccatcaccagcgactatgtcgtagtgggtaaagtctccctcttcggagggaggcatcagag

SEQ ID NO: 17778 - RNA, 90 nt, synthetic construct
  misc_feature 1..90: note = engineered ribonucleic acid scaffold (ERS) sequence
  source 1..90: mol_type = other RNA
actggcgcttctactgattactctgagcgccatcaccagcgactatgtcgtagtgggtaaagtctccctcttcggagggaggcatcagag

SEQ ID NO: 17779 - RNA, 91 nt, synthetic construct
  misc_feature 1..91: note = engineered ribonucleic acid scaffold (ERS) sequence
  source 1..91: mol_type = other RNA
actggcgcttctaactgattactctgagcgccatcaccagcgactatgtcgtagtgggtaaagtctccctcttcggagggaggcatcagag

SEQ ID NO: 17780 - RNA, 91 nt, synthetic construct
  misc_feature 1..91: note = engineered ribonucleic acid scaffold (ERS) sequence
  source 1..91: mol_type = other RNA
actggcgcttctacctgattactctgagcgccatcaccagcgactatgtcgtagtgggtaaagtctccctcttcggagggaggcatcagag

SEQ ID NO: 17781 - RNA, 91 nt, synthetic construct
  misc_feature 1..91: note = engineered ribonucleic acid scaffold (ERS) sequence
  source 1..91: mol_type = other RNA
actggcgcttctagctgattactctgagcgccatcaccagcgactatgtcgtagtgggtaaagtctccctcttcggagggaggcatcagag

SEQ ID NO: 17782 - RNA, 93 nt, synthetic construct
  misc_feature 1..93: note = engineered ribonucleic acid scaffold (ERS) sequence
  source 1..93: mol_type = other RNA
actggcgcttctattactgattactctgagcgccatcaccagcgactatgtcgtagtgggtaaagtctccctcttcggagggaggcatcagag

SEQ ID NO: 17783 - RNA, 91 nt, synthetic construct
  misc_feature 1..91: note = engineered ribonucleic acid scaffold (ERS) sequence
  source 1..91: mol_type = other RNA
actggcgcttctatatgattactctgagcgccatcaccagcgactatgtcgtagtgggtaaagtctccctcttcggagggaggcatcagag

SEQ ID NO: 17784 - RNA, 91 nt, synthetic construct
  misc_feature 1..91: note = engineered ribonucleic acid scaffold (ERS) sequence
  source 1..91: mol_type = other RNA
actggcgcttctatgtgattactctgagcgccatcaccagcgactatgtcgtagtgggtaaagtctccctcttcggagggaggcatcagag

SEQ ID NO: 17785 - RNA, 91 nt, synthetic construct
  misc_feature 1..91: note = engineered ribonucleic acid scaffold (ERS) sequence
  source 1..91: mol_type = other RNA
actggcgcttctatttgattactctgagcgccatcaccagcgactatgtcgtagtgggtaaagtctccctcttcggagggaggcatcagag

SEQ ID NO: 17786 - RNA, 92 nt, synthetic construct
  misc_feature 1..92: note = engineered ribonucleic acid scaffold (ERS) sequence
  source 1..92: mol_type = other RNA
actggcgcttctatcttgattactctgagcgccatcaccagcgactatgtcgtagtgggtaaagtctccctcttcggagggaggcatcagag

SEQ ID NO: 17787 - RNA, 91 nt, synthetic construct
  misc_feature 1..91: note = engineered ribonucleic acid scaffold (ERS) sequence
  source 1..91: mol_type = other RNA
actggcgcttctatcagattactctgagcgccatcaccagcgactatgtcgtagtgggtaaagtctccctcttcggagggaggcatcagag

SEQ ID NO: 17788 - RNA, 91 nt, synthetic construct
  misc_feature 1..91: note = engineered ribonucleic acid scaffold (ERS) sequence
  source 1..91: mol_type = other RNA
actggcgcttctatcggattactctgagcgccatcaccagcgactatgtcgtagtgggtaaagtctccctcttcggagggaggcatcagag

SEQ ID NO: 17789 - RNA, 92 nt, synthetic construct
  misc_feature 1..92: note = engineered ribonucleic acid scaffold (ERS) sequence
  source 1..92: mol_type = other RNA
actggcgcttctatctgaattactctgagcgccatcaccagcgactatgtcgtagtgggtaaagtctccctcttcggagggaggcatcagag

SEQ ID NO: 17790 - RNA, 92 nt, synthetic construct
  misc_feature 1..92: note = engineered ribonucleic acid scaffold (ERS) sequence
  source 1..92: mol_type = other RNA
actggcgcttctatctgtattactctgagcgccatcaccagcgactatgtcgtagtgggtaaagtctccctcttcggagggaggcatcagag

SEQ ID NO: 17791 - RNA, 91 nt, synthetic construct
  misc_feature 1..91: note = engineered ribonucleic acid scaffold (ERS) sequence
  source 1..91: mol_type = other RNA
actggcgcttctatctggttactctgagcgccatcaccagcgactatgtcgtagtgggtaaagtctccctcttcggagggaggcatcagag

SEQ ID NO: 17792 - RNA, 91 nt, synthetic construct
  misc_feature 1..91: note = engineered ribonucleic acid scaffold (ERS) sequence
  source 1..91: mol_type = other RNA
actggcgcttctatctgtttactctgagcgccatcaccagcgactatgtcgtagtgggtaaagtctccctcttcggagggaggcatcagag

SEQ ID NO: 17793 - RNA, 92 nt, synthetic construct
  misc_feature 1..92: note = engineered ribonucleic acid scaffold (ERS) sequence
  source 1..92: mol_type = other RNA
actggcgcttctatctgatttactctgagcgccatcaccagcgactatgtcgtagtgggtaaagtctccctcttcggagggaggcatcagag

SEQ ID NO: 17794 - RNA, 91 nt, synthetic construct
  misc_feature 1..91: note = engineered ribonucleic acid scaffold (ERS) sequence
  source 1..91: mol_type = other RNA
actggcgcttctatctgattgctctgagcgccatcaccagcgactatgtcgtagtgggtaaagtctccctcttcggagggaggcatcagag

SEQ ID NO: 17795 - RNA, 95 nt, synthetic construct
  misc_feature 1..95: note = engineered ribonucleic acid scaffold (ERS) sequence
  source 1..95: mol_type = other RNA
actggcgcttctatatctgattactctgagcgccatcaccagcgactatgtcgtagtgggtaaagtgcgcccgcttcggcgggcgcacatcagag

SEQ ID NO: 17796 - RNA, 94 nt, synthetic construct
  misc_feature 1..94: note = engineered ribonucleic acid scaffold (ERS) sequence
  source 1..94: mol_type = other RNA
actggcgcttctaatctgattactctgagcgccatcaccagcgactatgtcgtagtgggtaaagtgcgcccgcttcggcgggcgcacatcagag

SEQ ID NO: 17797 - RNA, 92 nt, synthetic construct
  misc_feature 1..92: note = engineered ribonucleic acid scaffold (ERS) sequence
  source 1..92: mol_type = other RNA
actggcgcttctactgattactctgagcgccatcaccagcgactatgtcgtagtgggtaaagtgcgcccgcttcggcgggcgcacatcagag

SEQ ID NO: 17798 - RNA, 93 nt, synthetic construct
  misc_feature 1..93: note = engineered ribonucleic acid scaffold (ERS) sequence
  source 1..93: mol_type = other RNA
actggcgcttctaactgattactctgagcgccatcaccagcgactatgtcgtagtgggtaaagtgcgcccgcttcggcgggcgcacatcagag

SEQ ID NO: 17799 - RNA, 93 nt, synthetic construct
  misc_feature 1..93: note = engineered ribonucleic acid scaffold (ERS) sequence
  source 1..93: mol_type = other RNA
actggcgcttctacctgattactctgagcgccatcaccagcgactatgtcgtagtgggtaaagtgcgcccgcttcggcgggcgcacatcagag

SEQ ID NO: 17800 - RNA, 93 nt, synthetic construct
  misc_feature 1..93: note = engineered ribonucleic acid scaffold (ERS) sequence
  source 1..93: mol_type = other RNA
actggcgcttctagctgattactctgagcgccatcaccagcgactatgtcgtagtgggtaaagtgcgcccgcttcggcgggcgcacatcagag

SEQ ID NO: 17801 - RNA, 95 nt, synthetic construct
  misc_feature 1..95: note = engineered ribonucleic acid scaffold (ERS) sequence
  source 1..95: mol_type = other RNA
actggcgcttctattactgattactctgagcgccatcaccagcgactatgtcgtagtgggtaaagtgcgcccgcttcggcgggcgcacatcagag

SEQ ID NO: 17802 - RNA, 93 nt, synthetic construct
  misc_feature 1..93: note = engineered ribonucleic acid scaffold (ERS) sequence
  source 1..93: mol_type = other RNA
actggcgcttctatatgattactctgagcgccatcaccagcgactatgtcgtagtgggtaaagtgcgcccgcttcggcgggcgcacatcagag

SEQ ID NO: 17803 - RNA, 93 nt, synthetic construct
  misc_feature 1..93: note = engineered ribonucleic acid scaffold (ERS) sequence
  source 1..93: mol_type = other RNA
actggcgcttctatgtgattactctgagcgccatcaccagcgactatgtcgtagtgggtaaagtgcgcccgcttcggcgggcgcacatcagag

SEQ ID NO: 17804 - RNA, 93 nt, synthetic construct
  misc_feature 1..93: note = engineered ribonucleic acid scaffold (ERS) sequence
  source 1..93: mol_type = other RNA
actggcgcttctatttgattactctgagcgccatcaccagcgactatgtcgtagtgggtaaagtgcgcccgcttcggcgggcgcacatcagag

SEQ ID NO: 17805 - RNA, 94 nt, synthetic construct
  misc_feature 1..94: note = engineered ribonucleic acid scaffold (ERS) sequence
  source 1..94: mol_type = other RNA
actggcgcttctatcttgattactctgagcgccatcaccagcgactatgtcgtagtgggtaaagtgcgcccgcttcggcgggcgcacatcagag

SEQ ID NO: 17806 - RNA, 93 nt, synthetic construct
  misc_feature 1..93: note = engineered ribonucleic acid scaffold (ERS) sequence
  source 1..93: mol_type = other RNA
actggcgcttctatcagattactctgagcgccatcaccagcgactatgtcgtagtgggtaaagtgcgcccgcttcggcgggcgcacatcagag

SEQ ID NO: 17807 - RNA, 93 nt, synthetic construct
  misc_feature 1..93: note = engineered ribonucleic acid scaffold (ERS) sequence
  source 1..93: mol_type = other RNA
actggcgcttctatcggattactctgagcgccatcaccagcgactatgtcgtagtgggtaaagtgcgcccgcttcggcgggcgcacatcagag

SEQ ID NO: 17808 - RNA, 94 nt, synthetic construct
  misc_feature 1..94: note = engineered ribonucleic acid scaffold (ERS) sequence
  source 1..94: mol_type = other RNA
actggcgcttctatctgaattactctgagcgccatcaccagcgactatgtcgtagtgggtaaagtgcgcccgcttcggcgggcgcacatcagag

SEQ ID NO: 17809 - RNA, 94 nt, synthetic construct
  misc_feature 1..94: note = engineered ribonucleic acid scaffold (ERS) sequence
  source 1..94: mol_type = other RNA
actggcgcttctatctgtattactctgagcgccatcaccagcgactatgtcgtagtgggtaaagtgcgcccgcttcggcgggcgcacatcagag

SEQ ID NO: 17810 - RNA, 93 nt, synthetic construct
  misc_feature 1..93: note = engineered ribonucleic acid scaffold (ERS) sequence
  source 1..93: mol_type = other RNA
actggcgcttctatctggttactctgagcgccatcaccagcgactatgtcgtagtgggtaaagtgcgcccgcttcggcgggcgcacatcagag

SEQ ID NO: 17811 - RNA, 93 nt, synthetic construct
  misc_feature 1..93: note = engineered ribonucleic acid scaffold (ERS) sequence
  source 1..93: mol_type = other RNA
actggcgcttctatctgtttactctgagcgccatcaccagcgactatgtcgtagtgggtaaagtgcgcccgcttcggcgggcgcacatcagag

SEQ ID NO: 17812 - RNA, 94 nt, synthetic construct
  misc_feature 1..94: note = engineered ribonucleic acid scaffold (ERS) sequence
  source 1..94: mol_type = other RNA
actggcgcttctatctgatttactctgagcgccatcaccagcgactatgtcgtagtgggtaaagtgcgcccgcttcggcgggcgcacatcagag

SEQ ID NO: 17813 - RNA, 93 nt, synthetic construct
  misc_feature 1..93: note = engineered ribonucleic acid scaffold (ERS) sequence
  source 1..93: mol_type = other RNA
actggcgcttctatctgattgctctgagcgccatcaccagcgactatgtcgtagtgggtaaagtgcgcccgcttcggcgggcgcacatcagag

SEQ ID NO: 17814 - RNA, 95 nt, synthetic construct
  misc_feature 1..95: note = engineered ribonucleic acid scaffold (ERS) sequence
  source 1..95: mol_type = other RNA
actggcgcttctatatctgattactctgagcgccatcaccagcgactatgtcgtagtgggtaaataatgaaaacttcggttttcattaatcagag

SEQ ID NO: 17815 - RNA, 94 nt, synthetic construct
  misc_feature 1..94: note = engineered ribonucleic acid scaffold (ERS) sequence
  source 1..94: mol_type = other RNA
actggcgcttctaatctgattactctgagcgccatcaccagcgactatgtcgtagtgggtaaataatgaaaacttcggttttcattaatcagag

SEQ ID NO: 17816 - RNA, 92 nt, synthetic construct
  misc_feature 1..92: note = engineered ribonucleic acid scaffold (ERS) sequence
  source 1..92: mol_type = other RNA
actggcgcttctactgattactctgagcgccatcaccagcgactatgtcgtagtgggtaaataatgaaaacttcggttttcattaatcagag

SEQ ID NO: 17817 - RNA, 93 nt, synthetic construct
  misc_feature 1..93: note = engineered ribonucleic acid scaffold (ERS) sequence
  source 1..93: mol_type = other RNA
actggcgcttctaactgattactctgagcgccatcaccagcgactatgtcgtagtgggtaaataatgaaaacttcggttttcattaatcagag

SEQ ID NO: 17818 - RNA, 93 nt, synthetic construct
  misc_feature 1..93: note = engineered ribonucleic acid scaffold (ERS) sequence
  source 1..93: mol_type = other RNA
actggcgcttctacctgattactctgagcgccatcaccagcgactatgtcgtagtgggtaaataatgaaaacttcggttttcattaatcagag

SEQ ID NO: 17819 - RNA, 93 nt, synthetic construct
  misc_feature 1..93: note = engineered ribonucleic acid scaffold (ERS) sequence
  source 1..93: mol_type = other RNA
actggcgcttctagctgattactctgagcgccatcaccagcgactatgtcgtagtgggtaaataatgaaaacttcggttttcattaatcagag

SEQ ID NO: 17820 - RNA, 95 nt, synthetic construct
  misc_feature 1..95: note = engineered ribonucleic acid scaffold (ERS) sequence
  source 1..95: mol_type = other RNA
actggcgcttctattactgattactctgagcgccatcaccagcgactatgtcgtagtgggtaaataatgaaaacttcggttttcattaatcagag

SEQ ID NO: 17821 - RNA, 93 nt, synthetic construct
  misc_feature 1..93: note = engineered ribonucleic acid scaffold (ERS) sequence
  source 1..93: mol_type = other RNA
actggcgcttctatatgattactctgagcgccatcaccagcgactatgtcgtagtgggtaaataatgaaaacttcggttttcattaatcagag

SEQ ID NO: 17822 - RNA, 93 nt, synthetic construct
  misc_feature 1..93: note = engineered ribonucleic acid scaffold (ERS) sequence
  source 1..93: mol_type = other RNA
actggcgcttctatgtgattactctgagcgccatcaccagcgactatgtcgtagtgggtaaataatgaaaacttcggttttcattaatcagag

SEQ ID NO: 17823 - RNA, 93 nt, synthetic construct
  misc_feature 1..93: note = engineered ribonucleic acid scaffold (ERS) sequence
  source 1..93: mol_type = other RNA
actggcgcttctatttgattactctgagcgccatcaccagcgactatgtcgtagtgggtaaataatgaaaacttcggttttcattaatcagag

SEQ ID NO: 17824 - RNA, 94 nt, synthetic construct
  misc_feature 1..94: note = engineered ribonucleic acid scaffold (ERS) sequence
  source 1..94: mol_type = other RNA
actggcgcttctatcttgattactctgagcgccatcaccagcgactatgtcgtagtgggtaaataatgaaaacttcggttttcattaatcagag

SEQ ID NO: 17825 - RNA, 93 nt, synthetic construct
  misc_feature 1..93: note = engineered ribonucleic acid scaffold (ERS) sequence
  source 1..93: mol_type = other RNA
actggcgcttctatcagattactctgagcgccatcaccagcgactatgtcgtagtgggtaaataatgaaaacttcggttttcattaatcagag

SEQ ID NO: 17826 - RNA, 93 nt, synthetic construct
  misc_feature 1..93: note = engineered ribonucleic acid scaffold (ERS) sequence
  source 1..93: mol_type = other RNA
actggcgcttctatcggattactctgagcgccatcaccagcgactatgtcgtagtgggtaaataatgaaaacttcggttttcattaatcagag

SEQ ID NO: 17827 - RNA, 94 nt, synthetic construct
  misc_feature 1..94: note = engineered ribonucleic acid scaffold (ERS) sequence
  source 1..94: mol_type = other RNA
actggcgcttctatctgaattactctgagcgccatcaccagcgactatgtcgtagtgggtaaataatgaaaacttcggttttcattaatcagag

SEQ ID NO: 17828 - RNA, 94 nt, synthetic construct
  misc_feature 1..94: note = engineered ribonucleic acid scaffold (ERS) sequence
  source 1..94: mol_type = other RNA
actggcgcttctatctgtattactctgagcgccatcaccagcgactatgtcgtagtgggtaaataatgaaaacttcggttttcattaatcagag

SEQ ID NO: 17829 - RNA, 93 nt, synthetic construct
  misc_feature 1..93: note = engineered ribonucleic acid scaffold (ERS) sequence
  source 1..93: mol_type = other RNA
actggcgcttctatctggttactctgagcgccatcaccagcgactatgtcgtagtgggtaaataatgaaaacttcggttttcattaatcagag

SEQ ID NO: 17830 - RNA, 93 nt, synthetic construct
  misc_feature 1..93: note = engineered ribonucleic acid scaffold (ERS) sequence
  source 1..93: mol_type = other RNA
actggcgcttctatctgtttactctgagcgccatcaccagcgactatgtcgtagtgggtaaataatgaaaacttcggttttcattaatcagag

SEQ ID NO: 17831 - RNA, 94 nt, synthetic construct
  misc_feature 1..94: note = engineered ribonucleic acid scaffold (ERS) sequence
  source 1..94: mol_type = other RNA
actggcgcttctatctgatttactctgagcgccatcaccagcgactatgtcgtagtgggtaaataatgaaaacttcggttttcattaatcagag

SEQ ID NO: 17832 - RNA, 93 nt, synthetic construct
  misc_feature 1..93: note = engineered ribonucleic acid scaffold (ERS) sequence
  source 1..93: mol_type = other RNA
actggcgcttctatctgattgctctgagcgccatcaccagcgactatgtcgtagtgggtaaataatgaaaacttcggttttcattaatcagag

SEQ ID NO: 17833 - RNA, 95 nt, synthetic construct
  misc_feature 1..95: note = engineered ribonucleic acid scaffold (ERS) sequence
  source 1..95: mol_type = other RNA
actggcgcttctatatctgattactctgagcgccatcaccagcgactatgtcgtagtgggtaaatcgtaagaacttcggttcttacgaatcagag

SEQ ID NO: 17834 - RNA, 94 nt, synthetic construct
  misc_feature 1..94: note = engineered ribonucleic acid scaffold (ERS) sequence
  source 1..94: mol_type = other RNA
actggcgcttctaatctgattactctgagcgccatcaccagcgactatgtcgtagtgggtaaatcgtaagaacttcggttcttacgaatcagag

SEQ ID NO: 17835 - RNA, 92 nt, synthetic construct
  misc_feature 1..92: note = engineered ribonucleic acid scaffold (ERS) sequence
  source 1..92: mol_type = other RNA
actggcgcttctactgattactctgagcgccatcaccagcgactatgtcgtagtgggtaaatcgtaagaacttcggttcttacgaatcagag

SEQ ID NO: 17836 - RNA, 93 nt, synthetic construct
  misc_feature 1..93: note = engineered ribonucleic acid scaffold (ERS) sequence
  source 1..93: mol_type = other RNA
actggcgcttctaactgattactctgagcgccatcaccagcgactatgtcgtagtgggtaaatcgtaagaacttcggttcttacgaatcagag

SEQ ID NO: 17837 - RNA, 93 nt, synthetic construct
  misc_feature 1..93: note = engineered ribonucleic acid scaffold (ERS) sequence
  source 1..93: mol_type = other RNA
actggcgcttctacctgattactctgagcgccatcaccagcgactatgtcgtagtgggtaaatcgtaagaacttcggttcttacgaatcagag

SEQ ID NO: 17838 - RNA, 93 nt, synthetic construct
  misc_feature 1..93: note = engineered ribonucleic acid scaffold (ERS) sequence
  source 1..93: mol_type = other RNA
actggcgcttctagctgattactctgagcgccatcaccagcgactatgtcgtagtgggtaaatcgtaagaacttcggttcttacgaatcagag

SEQ ID NO: 17839 - RNA, 95 nt, synthetic construct
  misc_feature 1..95: note = engineered ribonucleic acid scaffold (ERS) sequence
  source 1..95: mol_type = other RNA
actggcgcttctattactgattactctgagcgccatcaccagcgactatgtcgtagtgggtaaatcgtaagaacttcggttcttacgaatcagag

SEQ ID NO: 17840 - RNA, 93 nt, synthetic construct
  misc_feature 1..93: note = engineered ribonucleic acid scaffold (ERS) sequence
  source 1..93: mol_type = other RNA
actggcgcttctatatgattactctgagcgccatcaccagcgactatgtcgtagtgggtaaatcgtaagaacttcggttcttacgaatcagag

SEQ ID NO: 17841 - RNA, 93 nt, synthetic construct
  misc_feature 1..93: note = engineered ribonucleic acid scaffold (ERS) sequence
  source 1..93: mol_type = other RNA
actggcgcttctatgtgattactctgagcgccatcaccagcgactatgtcgtagtgggtaaatcgtaagaacttcggttcttacgaatcagag

SEQ ID NO: 17842 - RNA, 93 nt, synthetic construct
  misc_feature 1..93: note = engineered ribonucleic acid scaffold (ERS) sequence
  source 1..93: mol_type = other RNA
actggcgcttctatttgattactctgagcgccatcaccagcgactatgtcgtagtgggtaaatcgtaagaacttcggttcttacgaatcagag

SEQ ID NO: 17843 - RNA, 94 nt, synthetic construct
  misc_feature 1..94: note = engineered ribonucleic acid scaffold (ERS) sequence
  source 1..94: mol_type = other RNA
actggcgcttctatcttgattactctgagcgccatcaccagcgactatgtcgtagtgggtaaatcgtaagaacttcggttcttacgaatcagag

SEQ ID NO: 17844 - RNA, 93 nt, synthetic construct
  misc_feature 1..93: note = engineered ribonucleic acid scaffold (ERS) sequence
  source 1..93: mol_type = other RNA
actggcgcttctatcagattactctgagcgccatcaccagcgactatgtcgtagtgggtaaatcgtaagaacttcggttcttacgaatcagag

SEQ ID NO: 17845 - RNA, 93 nt, synthetic construct
  misc_feature 1..93: note = engineered ribonucleic acid scaffold (ERS) sequence
  source 1..93: mol_type = other RNA
actggcgcttctatcggattactctgagcgccatcaccagcgactatgtcgtagtgggtaaatcgtaagaacttcggttcttacgaatcagag

SEQ ID NO: 17846 - RNA, 94 nt, synthetic construct
  misc_feature 1..94: note = engineered ribonucleic acid scaffold (ERS) sequence
  source 1..94: mol_type = other RNA
actggcgcttctatctgaattactctgagcgccatcaccagcgactatgtcgtagtgggtaaatcgtaagaacttcggttcttacgaatcagag

SEQ ID NO: 17847 - RNA, 94 nt, synthetic construct
  misc_feature 1..94: note = engineered ribonucleic acid scaffold (ERS) sequence
  source 1..94: mol_type = other RNA
actggcgcttctatctgtattactctgagcgccatcaccagcgactatgtcgtagtgggtaaatcgtaagaacttcggttcttacgaatcagag

SEQ ID NO: 17848 - RNA, 93 nt, synthetic construct
  misc_feature 1..93: note = engineered ribonucleic acid scaffold (ERS) sequence
  source 1..93: mol_type = other RNA
actggcgcttctatctggttactctgagcgccatcaccagcgactatgtcgtagtgggtaaatcgtaagaacttcggttcttacgaatcagag

SEQ ID NO: 17849 - RNA, 93 nt, synthetic construct
  misc_feature 1..93: note = engineered ribonucleic acid scaffold (ERS) sequence
  source 1..93: mol_type = other RNA
actggcgcttctatctgtttactctgagcgccatcaccagcgactatgtcgtagtgggtaaatcgtaagaacttcggttcttacgaatcagag

SEQ ID NO: 17850 - RNA, 94 nt, synthetic construct
  misc_feature 1..94: note = engineered ribonucleic acid scaffold (ERS) sequence
  source 1..94: mol_type = other RNA
actggcgcttctatctgatttactctgagcgccatcaccagcgactatgtcgtagtgggtaaatcgtaagaacttcggttcttacgaatcagag

SEQ ID NO: 17851 - RNA, 93 nt, synthetic construct
  misc_feature 1..93: note = engineered ribonucleic acid scaffold (ERS) sequence
  source 1..93: mol_type = other RNA
actggcgcttctatctgattgctctgagcgccatcaccagcgactatgtcgtagtgggtaaatcgtaagaacttcggttcttacgaatcagag

SEQ ID NO: 17852 - RNA, 95 nt, synthetic construct
  misc_feature 1..95: note = engineered ribonucleic acid scaffold (ERS) sequence
  source 1..95: mol_type = other RNA
actggcgcttctatatctgattactctgagcgccatcaccagcgactatgtcgtagtgggtaaatggaagatgcttcggcatcttccaatcagag

SEQ ID NO: 17853 - RNA, 94 nt, synthetic construct
  misc_feature 1..94: note = engineered ribonucleic acid scaffold (ERS) sequence
  source 1..94: mol_type = other RNA
actggcgcttctaatctgattactctgagcgccatcaccagcgactatgtcgtagtgggtaaatggaagatgcttcggcatcttccaatcagag

SEQ ID NO: 17854 - RNA, 92 nt, synthetic construct
  misc_feature 1..92: note = engineered ribonucleic acid scaffold (ERS) sequence
  source 1..92: mol_type = other RNA
actggcgcttctactgattactctgagcgccatcaccagcgactatgtcgtagtgggtaaatggaagatgcttcggcatcttccaatcagag

SEQ ID NO: 17855 - RNA, 93 nt, synthetic construct
  misc_feature 1..93: note = engineered ribonucleic acid scaffold (ERS) sequence
  source 1..93: mol_type = other RNA
actggcgcttctaactgattactctgagcgccatcaccagcgactatgtcgtagtgggtaaatggaagatgcttcggcatcttccaatcagag

SEQ ID NO: 17856 - RNA, 93 nt, synthetic construct
  misc_feature 1..93: note = engineered ribonucleic acid scaffold (ERS) sequence
  source 1..93: mol_type = other RNA
actggcgcttctacctgattactctgagcgccatcaccagcgactatgtcgtagtgggtaaatggaagatgcttcggcatcttccaatcagag

SEQ ID NO: 17857 - RNA, 93 nt, synthetic construct
  misc_feature 1..93: note = engineered ribonucleic acid scaffold (ERS) sequence
  source 1..93: mol_type = other RNA
actggcgcttctagctgattactctgagcgccatcaccagcgactatgtcgtagtgggtaaatggaagatgcttcggcatcttccaatcagag

SEQ ID NO: 17858 - RNA, 95 nt, synthetic construct
  misc_feature 1..95: note = engineered ribonucleic acid scaffold (ERS) sequence
  source 1..95: mol_type = other RNA
actggcgcttctattactgattactctgagcgccatcaccagcgactatgtcgtagtgggtaaatggaagatgcttcggcatcttccaatcagag

SEQ ID NO: 17859 - RNA, 93 nt, synthetic construct
  misc_feature 1..93: note = engineered ribonucleic acid scaffold (ERS) sequence
  source 1..93: mol_type = other RNA
actggcgcttctatatgattactctgagcgccatcaccagcgactatgtcgtagtgggtaaatggaagatgcttcggcatcttccaatcagag

SEQ ID NO: 17860 - RNA, 93 nt, synthetic construct
  misc_feature 1..93: note = engineered ribonucleic acid scaffold (ERS) sequence
  source 1..93: mol_type = other RNA
actggcgcttctatgtgattactctgagcgccatcaccagcgactatgtcgtagtgggtaaatggaagatgcttcggcatcttccaatcagag

SEQ ID NO: 17861 - RNA, 93 nt, synthetic construct
  misc_feature 1..93: note = engineered ribonucleic acid scaffold (ERS) sequence
  source 1..93: mol_type = other RNA
actggcgcttctatttgattactctgagcgccatcaccagcgactatgtcgtagtgggtaaatggaagatgcttcggcatcttccaatcagag

SEQ ID NO: 17862 - RNA, 94 nt, synthetic construct
  misc_feature 1..94: note = engineered ribonucleic acid scaffold (ERS) sequence
  source 1..94: mol_type = other RNA
actggcgcttctatcttgattactctgagcgccatcaccagcgactatgtcgtagtgggtaaatggaagatgcttcggcatcttccaatcagag

SEQ ID NO: 17863 - RNA, 93 nt, synthetic construct
  misc_feature 1..93: note = engineered ribonucleic acid scaffold (ERS) sequence
  source 1..93: mol_type = other RNA
actggcgcttctatcagattactctgagcgccatcaccagcgactatgtcgtagtgggtaaatggaagatgcttcggcatcttccaatcagag

SEQ ID NO: 17864 - RNA, 93 nt, synthetic construct
  misc_feature 1..93: note = engineered ribonucleic acid scaffold (ERS) sequence
  source 1..93: mol_type = other RNA
actggcgcttctatcggattactctgagcgccatcaccagcgactatgtcgtagtgggtaaatggaagatgcttcggcatcttccaatcagag

SEQ ID NO: 17865 - RNA, 94 nt, synthetic construct
  misc_feature 1..94: note = engineered ribonucleic acid scaffold (ERS) sequence
  source 1..94: mol_type = other RNA
actggcgcttctatctgaattactctgagcgccatcaccagcgactatgtcgtagtgggtaaatggaagatgcttcggcatcttccaatcagag

SEQ ID NO: 17866 - RNA, 94 nt, synthetic construct
  misc_feature 1..94: note = engineered ribonucleic acid scaffold (ERS) sequence
  source 1..94: mol_type = other RNA
actggcgcttctatctgtattactctgagcgccatcaccagcgactatgtcgtagtgggtaaatggaagatgcttcggcatcttccaatcagag

SEQ ID NO: 17867 - RNA, 93 nt, synthetic construct
  misc_feature 1..93: note = engineered ribonucleic acid scaffold (ERS) sequence
  source 1..93: mol_type = other RNA
actggcgcttctatctggttactctgagcgccatcaccagcgactatgtcgtagtgggtaaatggaagatgcttcggcatcttccaatcagag

SEQ ID NO: 17868 - RNA, 93 nt, synthetic construct
  misc_feature 1..93: note = engineered ribonucleic acid scaffold (ERS) sequence
  source 1..93: mol_type = other RNA
actggcgcttctatctgtttactctgagcgccatcaccagcgactatgtcgtagtgggtaaatggaagatgcttcggcatcttccaatcagag

SEQ ID NO: 17869 - RNA, 94 nt, synthetic construct
  misc_feature 1..94: note = engineered ribonucleic acid scaffold (ERS) sequence
  source 1..94: mol_type = other RNA
actggcgcttctatctgatttactctgagcgccatcaccagcgactatgtcgtagtgggtaaatggaagatgcttcggcatcttccaatcagag

SEQ ID NO: 17870 - RNA, 93 nt, synthetic construct
  misc_feature 1..93: note = engineered ribonucleic acid scaffold (ERS) sequence
  source 1..93: mol_type = other RNA
actggcgcttctatctgattgctctgagcgccatcaccagcgactatgtcgtagtgggtaaatggaagatgcttcggcatcttccaatcagag

SEQ ID NO: 17871 - RNA, 99 nt, synthetic construct
  misc_feature 1..99: note = engineered ribonucleic acid scaffold (ERS) sequence
  source 1..99: mol_type = other RNA
actggcgcttctatatctgattactctgagcgccatcaccagcgactatgtcgtagtgggtaaagcccttacggacttcggtccgtaagggcatcagag

SEQ ID NO: 17872 - RNA, 98 nt, synthetic construct
  misc_feature 1..98: note = engineered ribonucleic acid scaffold (ERS) sequence
  source 1..98: mol_type = other RNA
actggcgcttctaatctgattactctgagcgccatcaccagcgactatgtcgtagtgggtaaagcccttacggacttcggtccgtaagggcatcagag

SEQ ID NO: 17873 - RNA, 96 nt, synthetic construct
  misc_feature 1..96: note = engineered ribonucleic acid scaffold (ERS) sequence
  source 1..96: mol_type = other RNA
actggcgcttctactgattactctgagcgccatcaccagcgactatgtcgtagtgggtaaagcccttacggacttcggtccgtaagggcatcagag

SEQ ID NO: 17874 - RNA, 97 nt, synthetic construct
  misc_feature 1..97: note = engineered ribonucleic acid scaffold (ERS) sequence
  source 1..97: mol_type = other RNA
actggcgcttctaactgattactctgagcgccatcaccagcgactatgtcgtagtgggtaaagcccttacggacttcggtccgtaagggcatcagag

SEQ ID NO: 17875 - RNA, 97 nt, synthetic construct
  misc_feature 1..97: note = engineered ribonucleic acid scaffold (ERS) sequence
  source 1..97: mol_type = other RNA
actggcgcttctacctgattactctgagcgccatcaccagcgactatgtcgtagtgggtaaagcccttacggacttcggtccgtaagggcatcagag

SEQ ID NO: 17876 - RNA, 97 nt, synthetic construct
  misc_feature 1..97: note = engineered ribonucleic acid scaffold (ERS) sequence
  source 1..97: mol_type = other RNA
actggcgcttctagctgattactctgagcgccatcaccagcgactatgtcgtagtgggtaaagcccttacggacttcggtccgtaagggcatcagag

SEQ ID NO: 17877 - RNA, 99 nt, synthetic construct
  misc_feature 1..99: note = engineered ribonucleic acid scaffold (ERS) sequence
  source 1..99: mol_type = other RNA
actggcgcttctattactgattactctgagcgccatcaccagcgactatgtcgtagtgggtaaagcccttacggacttcggtccgtaagggcatcagag

SEQ ID NO: 17878 - RNA, 97 nt, synthetic construct
  misc_feature 1..97: note = engineered ribonucleic acid scaffold (ERS) sequence
  source 1..97: mol_type = other RNA
actggcgcttctatatgattactctgagcgccatcaccagcgactatgtcgtagtgggtaaagcccttacggacttcggtccgtaagggcatcagag

SEQ ID NO: 17879 - RNA, 97 nt, synthetic construct
  misc_feature 1..97: note = engineered ribonucleic acid scaffold (ERS) sequence
  source 1..97: mol_type = other RNA
actggcgcttctatgtgattactctgagcgccatcaccagcgactatgtcgtagtgggtaaagcccttacggacttcggtccgtaagggcatcagag

SEQ ID NO: 17880 - RNA, 97 nt, synthetic construct
  misc_feature 1..97: note = engineered ribonucleic acid scaffold (ERS) sequence
  source 1..97: mol_type = other RNA
actggcgcttctatttgattactctgagcgccatcaccagcgactatgtcgtagtgggtaaagcccttacggacttcggtccgtaagggcatcagag

SEQ ID NO: 17881 - RNA, 98 nt, synthetic construct
  misc_feature 1..98: note = engineered ribonucleic acid scaffold (ERS) sequence
  source 1..98: mol_type = other RNA
actggcgcttctatcttgattactctgagcgccatcaccagcgactatgtcgtagtgggtaaagcccttacggacttcggtccgtaagggcatcagag

SEQ ID NO: 17882 - RNA, 97 nt, synthetic construct
  misc_feature 1..97: note = engineered ribonucleic acid scaffold (ERS) sequence
  source 1..97: mol_type = other RNA
actggcgcttctatcagattactctgagcgccatcaccagcgactatgtcgtagtgggtaaagcccttacggacttcggtccgtaagggcatcagag

SEQ ID NO: 17883 - RNA, 97 nt, synthetic construct
  misc_feature 1..97: note = engineered ribonucleic acid scaffold (ERS) sequence
  source 1..97: mol_type = other RNA
actggcgcttctatcggattactctgagcgccatcaccagcgactatgtcgtagtgggtaaagcccttacggacttcggtccgtaagggcatcagag

SEQ ID NO: 17884 - RNA, 98 nt, synthetic construct
  misc_feature 1..98: note = engineered ribonucleic acid scaffold (ERS) sequence
  source 1..98: mol_type = other RNA
actggcgcttctatctgaattactctgagcgccatcaccagcgactatgtcgtagtgggtaaagcccttacggacttcggtccgtaagggcatcagag

SEQ ID NO: 17885 - RNA, 98 nt, synthetic construct
  misc_feature 1..98: note = engineered ribonucleic acid scaffold (ERS) sequence
  source 1..98: mol_type = other RNA
actggcgcttctatctgtattactctgagcgccatcaccagcgactatgtcgtagtgggtaaagcccttacggacttcggtccgtaagggcatcagag

SEQ ID NO: 17886 - RNA, 97 nt, synthetic construct
  misc_feature 1..97: note = engineered ribonucleic acid scaffold (ERS) sequence
  source 1..97: mol_type = other RNA
actggcgcttctatctggttactctgagcgccatcaccagcgactatgtcgtagtgggtaaagcccttacggacttcggtccgtaagggcatcagag

SEQ ID NO: 17887 - RNA, 97 nt, synthetic construct
  misc_feature 1..97: note = engineered ribonucleic acid scaffold (ERS) sequence
  source 1..97: mol_type = other RNA
actggcgcttctatctgtttactctgagcgccatcaccagcgactatgtcgtagtgggtaaagcccttacggacttcggtccgtaagggcatcagag

SEQ ID NO: 17888 - RNA, 98 nt, synthetic construct
  misc_feature 1..98: note = engineered ribonucleic acid scaffold (ERS) sequence
  source 1..98: mol_type = other RNA
actggcgcttctatctgatttactctgagcgccatcaccagcgactatgtcgtagtgggtaaagcccttacggacttcggtccgtaagggcatcagag

SEQ ID NO: 17889 - RNA, 97 nt, synthetic construct
  misc_feature 1..97: note = engineered ribonucleic acid scaffold (ERS) sequence
  source 1..97: mol_type = other RNA
actggcgcttctatctgattgctctgagcgccatcaccagcgactatgtcgtagtgggtaaagcccttacggacttcggtccgtaagggcatcagag

SEQ ID NO: 17890 - RNA, 101 nt, synthetic construct
  misc_feature 1..101: note = engineered ribonucleic acid scaffold (ERS) sequence
  source 1..101: mol_type = other RNA
actggcgcttctatatctgattactctgagcgccatcaccagcgactatgtcgtagtgggtaaagcctcttacggacttcggtccgtaagaggcatcagag

SEQ ID NO: 17891 - RNA, 100 nt, synthetic construct
  misc_feature 1..100: note = engineered ribonucleic acid scaffold (ERS) sequence
  source 1..100: mol_type = other RNA
actggcgcttctaatctgattactctgagcgccatcaccagcgactatgtcgtagtgggtaaagcctcttacggacttcggtccgtaagaggcatcagag

SEQ ID NO: 17892 - RNA, 98 nt, synthetic construct
  misc_feature 1..98: note = engineered ribonucleic acid scaffold (ERS) sequence
  source 1..98: mol_type = other RNA
actggcgcttctactgattactctgagcgccatcaccagcgactatgtcgtagtgggtaaagcctcttacggacttcggtccgtaagaggcatcagag

SEQ ID NO: 17893 - RNA, 99 nt, synthetic construct
  misc_feature 1..99: note = engineered ribonucleic acid scaffold (ERS) sequence
  source 1..99: mol_type = other RNA
actggcgcttctaactgattactctgagcgccatcaccagcgactatgtcgtagtgggtaaagcctcttacggacttcggtccgtaagaggcatcagag

SEQ ID NO: 17894 - RNA, 99 nt, synthetic construct
  misc_feature 1..99: note = engineered ribonucleic acid scaffold (ERS) sequence
  source 1..99: mol_type = other RNA
actggcgcttctacctgattactctgagcgccatcaccagcgactatgtcgtagtgggtaaagcctcttacggacttcggtccgtaagaggcatcagag

SEQ ID NO: 17895 - RNA, 99 nt, synthetic construct
  misc_feature 1..99: note = engineered ribonucleic acid scaffold (ERS) sequence
  source 1..99: mol_type = other RNA
actggcgcttctagctgattactctgagcgccatcaccagcgactatgtcgtagtgggtaaagcctcttacggacttcggtccgtaagaggcatcagag

SEQ ID NO: 17896 - RNA, 101 nt, synthetic construct
  misc_feature 1..101: note = engineered ribonucleic acid scaffold (ERS) sequence
  source 1..101: mol_type = other RNA
actggcgcttctattactgattactctgagcgccatcaccagcgactatgtcgtagtgggtaaagcctcttacggacttcggtccgtaagaggcatcagag

SEQ ID NO: 17897 - RNA, 99 nt, synthetic construct
  misc_feature 1..99: note = engineered ribonucleic acid scaffold (ERS) sequence
  source 1..99: mol_type = other RNA
actggcgcttctatatgattactctgagcgccatcaccagcgactatgtcgtagtgggtaaagcctcttacggacttcggtccgtaagaggcatcagag

SEQ ID NO: 17898 - RNA, 99 nt, synthetic construct
  misc_feature 1..99: note = engineered ribonucleic acid scaffold (ERS) sequence
  source 1..99: mol_type = other RNA
actggcgcttctatgtgattactctgagcgccatcaccagcgactatgtcgtagtgggtaaagcctcttacggacttcggtccgtaagaggcatcagag

SEQ ID NO: 17899 - RNA, 99 nt, synthetic construct
  misc_feature 1..99: note = engineered ribonucleic acid scaffold (ERS) sequence
  source 1..99: mol_type = other RNA
actggcgcttctatttgattactctgagcgccatcaccagcgactatgtcgtagtgggtaaagcctcttacggacttcggtccgtaagaggcatcagag

SEQ ID NO: 17900 - RNA, 100 nt, synthetic construct
  misc_feature 1..100: note = engineered ribonucleic acid scaffold (ERS) sequence
  source 1..100: mol_type = other RNA
actggcgcttctatcttgattactctgagcgccatcaccagcgactatgtcgtagtgggtaaagcctcttacggacttcggtccgtaagaggcatcagag

SEQ ID NO: 17901 - RNA, 99 nt, synthetic construct
  misc_feature 1..99: note = engineered ribonucleic acid scaffold (ERS) sequence
  source 1..99: mol_type = other RNA
actggcgcttctatcagattactctgagcgccatcaccagcgactatgtcgtagtgggtaaagcctcttacggacttcggtccgtaagaggcatcagag

SEQ ID NO: 17902 - RNA, 99 nt, synthetic construct
  misc_feature 1..99: note = engineered ribonucleic acid scaffold (ERS) sequence
  source 1..99: mol_type = other RNA
actggcgcttctatcggattactctgagcgccatcaccagcgactatgtcgtagtgggtaaagcctcttacggacttcggtccgtaagaggcatcagag

SEQ ID NO: 17903 - RNA, 100 nt, synthetic construct
  misc_feature 1..100: note = engineered ribonucleic acid scaffold (ERS) sequence
  source 1..100: mol_type = other RNA
actggcgcttctatctgaattactctgagcgccatcaccagcgactatgtcgtagtgggtaaagcctcttacggacttcggtccgtaagaggcatcagag

SEQ ID NO: 17904 - RNA, 100 nt, synthetic construct
  misc_feature 1..100: note = engineered ribonucleic acid scaffold (ERS) sequence
  source 1..100: mol_type = other RNA
actggcgcttctatctgtattactctgagcgccatcaccagcgactatgtcgtagtgggtaaagcctcttacggacttcggtccgtaagaggcatcagag

SEQ ID NO: 17905 - RNA, 99 nt, synthetic construct
  misc_feature 1..99: note = engineered ribonucleic acid scaffold (ERS) sequence
  source 1..99: mol_type = other RNA
actggcgcttctatctggttactctgagcgccatcaccagcgactatgtcgtagtgggtaaagcctcttacggacttcggtccgtaagaggcatcagag

SEQ ID NO: 17906 - RNA, 99 nt, synthetic construct
  misc_feature 1..99: note = engineered ribonucleic acid scaffold (ERS) sequence
  source 1..99: mol_type = other RNA
actggcgcttctatctgtttactctgagcgccatcaccagcgactatgtcgtagtgggtaaagcctcttacggacttcggtccgtaagaggcatcagag

SEQ ID NO: 17907 - RNA, 100 nt, synthetic construct
  misc_feature 1..100: note = engineered ribonucleic acid scaffold (ERS) sequence
  source 1..100: mol_type = other RNA
actggcgcttctatctgatttactctgagcgccatcaccagcgactatgtcgtagtgggtaaagcctcttacggacttcggtccgtaagaggcatcagag

SEQ ID NO: 17908 - RNA, 99 nt, synthetic construct
  misc_feature 1..99: note = engineered ribonucleic acid scaffold (ERS) sequence
  source 1..99: mol_type = other RNA
actggcgcttctatctgattgctctgagcgccatcaccagcgactatgtcgtagtgggtaaagcctcttacggacttcggtccgtaagaggcatcagag

SEQ ID NO: 17909 - RNA, 101 nt, synthetic construct
  misc_feature 1..101: note = engineered ribonucleic acid scaffold (ERS) sequence
  source 1..101: mol_type = other RNA
actggcgcttctatatctgattactctgagcgccatcaccagcgactatgtcgtagtgggtaaagccgcttagggacttcggtccctaagaggcatcagag

SEQ ID NO: 17910 - RNA, 100 nt, synthetic construct
  misc_feature 1..100: note = engineered ribonucleic acid scaffold (ERS) sequence
  source 1..100: mol_type = other RNA
actggcgcttctaatctgattactctgagcgccatcaccagcgactatgtcgtagtgggtaaagccgcttagggacttcggtccctaagaggcatcagag

SEQ ID NO: 17911 - RNA, 98 nt, synthetic construct
  misc_feature 1..98: note = engineered ribonucleic acid scaffold (ERS) sequence
  source 1..98: mol_type = other RNA
actggcgcttctactgattactctgagcgccatcaccagcgactatgtcgtagtgggtaaagccgcttagggacttcggtccctaagaggcatcagag

SEQ ID NO: 17912 - RNA, 99 nt, synthetic construct
  misc_feature 1..99: note = engineered ribonucleic acid scaffold (ERS) sequence
  source 1..99: mol_type = other RNA
actggcgcttctaactgattactctgagcgccatcaccagcgactatgtcgtagtgggtaaagccgcttagggacttcggtccctaagaggcatcagag

SEQ ID NO: 17913 - RNA, 99 nt, synthetic construct
  misc_feature 1..99: note = engineered ribonucleic acid scaffold (ERS) sequence
  source 1..99: mol_type = other RNA
actggcgcttctacctgattactctgagcgccatcaccagcgactatgtcgtagtgggtaaagccgcttagggacttcggtccctaagaggcatcagag

SEQ ID NO: 17914 - RNA, 99 nt, synthetic construct
  misc_feature 1..99: note = engineered ribonucleic acid scaffold (ERS) sequence
  source 1..99: mol_type = other RNA
actggcgcttctagctgattactctgagcgccatcaccagcgactatgtcgtagtgggtaaagccgcttagggacttcggtccctaagaggcatcagag

SEQ ID NO: 17915 - RNA, 101 nt, synthetic construct
  misc_feature 1..101: note = engineered ribonucleic acid scaffold (ERS) sequence
  source 1..101: mol_type = other RNA
actggcgcttctattactgattactctgagcgccatcaccagcgactatgtcgtagtgggtaaagccgcttagggacttcggtccctaagaggcatcagag

SEQ ID NO: 17916 - RNA, 99 nt, synthetic construct
  misc_feature 1..99: note = engineered ribonucleic acid scaffold (ERS) sequence
  source 1..99: mol_type = other RNA
actggcgcttctatatgattactctgagcgccatcaccagcgactatgtcgtagtgggtaaagccgcttagggacttcggtccctaagaggcatcagag

SEQ ID NO: 17917 - RNA, 99 nt, synthetic construct
  misc_feature 1..99: note = engineered ribonucleic acid scaffold (ERS) sequence
  source 1..99: mol_type = other RNA
actggcgcttctatgtgattactctgagcgccatcaccagcgactatgtcgtagtgggtaaagccgcttagggacttcggtccctaagaggcatcagag

SEQ ID NO: 17918 - RNA, 99 nt, synthetic construct
  misc_feature 1..99: note = engineered ribonucleic acid scaffold (ERS) sequence
  source 1..99: mol_type = other RNA
actggcgcttctatttgattactctgagcgccatcaccagcgactatgtcgtagtgggtaaagccgcttagggacttcggtccctaagaggcatcagag

SEQ ID NO: 17919 - RNA, 100 nt, synthetic construct
  misc_feature 1..100: note = engineered ribonucleic acid scaffold (ERS) sequence
  source 1..100: mol_type = other RNA
actggcgcttctatcttgattactctgagcgccatcaccagcgactatgtcgtagtgggtaaagccgcttagggacttcggtccctaagaggcatcagag

SEQ ID NO: 17920 - RNA, 99 nt, synthetic construct
  misc_feature 1..99: note = engineered ribonucleic acid scaffold (ERS) sequence
  source 1..99: mol_type = other RNA
actggcgcttctatcagattactctgagcgccatcaccagcgactatgtcgtagtgggtaaagccgcttagggacttcggtccctaagaggcatcagag

SEQ ID NO: 17921 - RNA, 99 nt, synthetic construct
  misc_feature 1..99: note = engineered ribonucleic acid scaffold (ERS) sequence
  source 1..99: mol_type = other RNA
actggcgcttctatcggattactctgagcgccatcaccagcgactatgtcgtagtgggtaaagccgcttagggacttcggtccctaagaggcatcagag

SEQ ID NO: 17922 - RNA, 100 nt, synthetic construct
  misc_feature 1..100: note = engineered ribonucleic acid scaffold (ERS) sequence
  source 1..100: mol_type = other RNA
actggcgcttctatctgaattactctgagcgccatcaccagcgactatgtcgtagtgggtaaagccgcttagggacttcggtccctaagaggcatcagag

SEQ ID NO: 17923 - RNA, 100 nt, synthetic construct
  misc_feature 1..100: note = engineered ribonucleic acid scaffold (ERS) sequence
  source 1..100: mol_type = other RNA
actggcgcttctatctgtattactctgagcgccatcaccagcgactatgtcgtagtgggtaaagccgcttagggacttcggtccctaagaggcatcagag

SEQ ID NO: 17924 - RNA, 99 nt, synthetic construct
  misc_feature 1..99: note = engineered ribonucleic acid scaffold (ERS) sequence
  source 1..99: mol_type = other RNA
actggcgcttctatctggttactctgagcgccatcaccagcgactatgtcgtagtgggtaaagccgcttagggacttcggtccctaagaggcatcagag

SEQ ID NO: 17925 - RNA, 99 nt, synthetic construct
  misc_feature 1..99: note = engineered ribonucleic acid scaffold (ERS) sequence
  source 1..99: mol_type = other RNA
actggcgcttctatctgtttactctgagcgccatcaccagcgactatgtcgtagtgggtaaagccgcttagggacttcggtccctaagaggcatcagag

SEQ ID NO: 17926 - RNA, 100 nt, synthetic construct
  misc_feature 1..100: note = engineered ribonucleic acid scaffold (ERS) sequence
  source 1..100: mol_type = other RNA
actggcgcttctatctgatttactctgagcgccatcaccagcgactatgtcgtagtgggtaaagccgcttagggacttcggtccctaagaggcatcagag

SEQ ID NO: 17927 - RNA, 99 nt, synthetic construct
  misc_feature 1..99: note = engineered ribonucleic acid scaffold (ERS) sequence
  source 1..99: mol_type = other RNA
actggcgcttctatctgattgctctgagcgccatcaccagcgactatgtcgtagtgggtaaagccgcttagggacttcggtccctaagaggcatcagag

SEQ ID NO: 17928 - RNA, 93 nt, synthetic construct
  misc_feature 1..93: note = engineered ribonucleic acid scaffold (ERS) sequence
  source 1..93: mol_type = other RNA
acacgggggcacttctatctgattactctgccgtgtctcaccagcgactatgtcgtagtgggtaaagctccctcttcggagggagcatcagag

SEQ ID NO: 17929 - RNA, 92 nt, synthetic construct
  misc_feature 1..92: note = engineered ribonucleic acid scaffold (ERS) sequence
  source 1..92: mol_type = other RNA
aacacggggcacttctatctgattactctgccgtgttcaccagcgactatgtcgtagtgggtaaagctccctcttcggagggagcatcagag

SEQ ID NO: 17930 - RNA, 93 nt, synthetic construct
  misc_feature 1..93: note = engineered ribonucleic acid scaffold (ERS) sequence
  source 1..93: mol_type = other RNA
acacacggggcacttctatctgattactctgccgtgttcaccagcgactatgtcgtagtgggtaaagctccctcttcggagggagcatcagag

SEQ ID NO: 17931 - RNA, 94 nt, synthetic construct
  misc_feature 1..94: note = engineered ribonucleic acid scaffold (ERS) sequence
  source 1..94: mol_type = other RNA
acacacgggggcacttctatctgattactctgccgtgttcaccagcgactatgtcgtagtgggtaaagctccctcttcggagggagcatcagag

SEQ ID NO: 17932 - RNA, 93 nt, synthetic construct
  misc_feature 1..93: note = engineered ribonucleic acid scaffold (ERS) sequence
  source 1..93: mol_type = other RNA
actggtgggcacttctatctgattactctgaccagtctcaccagcgactatgtcgtagtgggtaaagctccctcttcggagggagcatcagag

SEQ ID NO: 17933 - RNA, 92 nt, synthetic construct
  misc_feature 1..92: note = engineered ribonucleic acid scaffold (ERS) sequence
  source 1..92: mol_type = other RNA
aactggtggcacttctatctgattactctgaccagttcaccagcgactatgtcgtagtgggtaaagctccctcttcggagggagcatcagag

SEQ ID NO: 17934 - RNA, 93 nt, synthetic construct
  misc_feature 1..93: note = engineered ribonucleic acid scaffold (ERS) sequence
  source 1..93: mol_type = other RNA
acactggtggcacttctatctgattactctgaccagttcaccagcgactatgtcgtagtgggtaaagctccctcttcggagggagcatcagag

SEQ ID NO: 17935 - RNA, 94 nt, synthetic construct
  misc_feature 1..94: note = engineered ribonucleic acid scaffold (ERS) sequence
  source 1..94: mol_type = other RNA
acactggtgggcacttctatctgattactctgaccagttcaccagcgactatgtcgtagtgggtaaagctccctcttcggagggagcatcagag

SEQ ID NO: 17936 - RNA, 93 nt, synthetic construct
  misc_feature 1..93: note = engineered ribonucleic acid scaffold (ERS) sequence
  source 1..93: mol_type = other RNA
aggccggggcacttctatctgattactctgcggcctctcaccagcgactatgtcgtagtgggtaaagctccctcttcggagggagcatcagag

SEQ ID NO: 17937 - RNA, 92 nt, synthetic construct
  misc_feature 1..92: note = engineered ribonucleic acid scaffold (ERS) sequence
  source 1..92: mol_type = other RNA
aaggccgggcacttctatctgattactctgcggccttcaccagcgactatgtcgtagtgggtaaagctccctcttcggagggagcatcagag

SEQ ID NO: 17938 - RNA, 93 nt, synthetic construct
  misc_feature 1..93: note = engineered ribonucleic acid scaffold (ERS) sequence
  source 1..93: mol_type = other RNA
acaggccgggcacttctatctgattactctgcggccttcaccagcgactatgtcgtagtgggtaaagctccctcttcggagggagcatcagag

SEQ ID NO: 17939 - RNA, 94 nt, synthetic construct
  misc_feature 1..94: note = engineered ribonucleic acid scaffold (ERS) sequence
  source 1..94: mol_type = other RNA
acaggccggggcacttctatctgattactctgcggccttcaccagcgactatgtcgtagtgggtaaagctccctcttcggagggagcatcagag

SEQ ID NO: 17940 - RNA, 93 nt, synthetic construct
  misc_feature 1..93: note = engineered ribonucleic acid scaffold (ERS) sequence
  source 1..93: mol_type = other RNA
aggtccgggcacttctatctgattactctgggacctctcaccagcgactatgtcgtagtgggtaaagctccctcttcggagggagcatcagag

SEQ ID NO: 17941 - RNA, 92 nt, synthetic construct
  misc_feature 1..92: note = engineered ribonucleic acid scaffold (ERS) sequence
  source 1..92: mol_type = other RNA
aaggtccggcacttctatctgattactctgggaccttcaccagcgactatgtcgtagtgggtaaagctccctcttcggagggagcatcagag

SEQ ID NO: 17942 - RNA, 93 nt, synthetic construct
  misc_feature 1..93: note = engineered ribonucleic acid scaffold (ERS) sequence
  source 1..93: mol_type = other RNA
acaggtccggcacttctatctgattactctgggaccttcaccagcgactatgtcgtagtgggtaaagctccctcttcggagggagcatcagag

SEQ ID NO: 17943 - RNA, 94 nt, synthetic construct
  misc_feature 1..94: note = engineered ribonucleic acid scaffold (ERS) sequence
  source 1..94: mol_type = other RNA
acaggtccgggcacttctatctgattactctgggaccttcaccagcgactatgtcgtagtgggtaaagctccctcttcggagggagcatcagag

SEQ ID NO: 17944 - RNA, 93 nt, synthetic construct
  misc_feature 1..93: note = engineered ribonucleic acid scaffold (ERS) sequence
  source 1..93: mol_type = other RNA
cagcaagggcacttctatctgattactctgttgctgctcaccagcgactatgtcgtagtgggtaaagctccctcttcggagggagcatcagag

SEQ ID NO: 17945 - RNA, 92 nt, synthetic construct
  misc_feature 1..92: note = engineered ribonucleic acid scaffold (ERS) sequence
  source 1..92: mol_type = other RNA
acagcaaggcacttctatctgattactctgttgctgtcaccagcgactatgtcgtagtgggtaaagctccctcttcggagggagcatcagag

SEQ ID NO: 17946 - RNA, 93 nt, synthetic construct
  misc_feature 1..93: note = engineered ribonucleic acid scaffold (ERS) sequence
  source 1..93: mol_type = other RNA
accagcaaggcacttctatctgattactctgttgctgtcaccagcgactatgtcgtagtgggtaaagctccctcttcggagggagcatcagag

SEQ ID NO: 17947 - RNA, 94 nt, synthetic construct
  misc_feature 1..94: note = engineered ribonucleic acid scaffold (ERS) sequence
  source 1..94: mol_type = other RNA
accagcaagggcacttctatctgattactctgttgctgtcaccagcgactatgtcgtagtgggtaaagctccctcttcggagggagcatcagag

SEQ ID NO: 17948 - RNA, 93 nt, synthetic construct
  misc_feature 1..93: note = engineered ribonucleic acid scaffold (ERS) sequence
  source 1..93: mol_type = other RNA
cgagacgggcacttctatctgattactctgggctcgctcaccagcgactatgtcgtagtgggtaaagctccctcttcggagggagcatcagag

SEQ ID NO: 17949 - RNA, 92 nt, synthetic construct
  misc_feature 1..92: note = engineered ribonucleic acid scaffold (ERS) sequence
  source 1..92: mol_type = other RNA
acgagacggcacttctatctgattactctgggctcgtcaccagcgactatgtcgtagtgggtaaagctccctcttcggagggagcatcagag

SEQ ID NO: 17950 - RNA, 93 nt, synthetic construct
  misc_feature 1..93: note = engineered ribonucleic acid scaffold (ERS) sequence
  source 1..93: mol_type = other RNA
accgagacggcacttctatctgattactctgggctcgtcaccagcgactatgtcgtagtgggtaaagctccctcttcggagggagcatcagag

SEQ ID NO: 17951 - RNA, 94 nt, synthetic construct
  misc_feature 1..94: note = engineered ribonucleic acid scaffold (ERS) sequence
  source 1..94: mol_type = other RNA
accgagacgggcacttctatctgattactctgggctcgtcaccagcgactatgtcgtagtgggtaaagctccctcttcggagggagcatcagag

SEQ ID NO: 17952 - RNA, 93 nt, synthetic construct
  misc_feature 1..93: note = engineered ribonucleic acid scaffold (ERS) sequence
  source 1..93: mol_type = other RNA
ctgtaggggcacttctatctgattactctgctacagctcaccagcgactatgtcgtagtgggtaaagctccctcttcggagggagcatcagag

SEQ ID NO: 17953 - RNA, 92 nt, synthetic construct
  misc_feature 1..92: note = engineered ribonucleic acid scaffold (ERS) sequence
  source 1..92: mol_type = other RNA
actgtagggcacttctatctgattactctgctacagtcaccagcgactatgtcgtagtgggtaaagctccctcttcggagggagcatcagag

SEQ ID NO: 17954 - RNA, 93 nt, synthetic construct
  misc_feature 1..93: note = engineered ribonucleic acid scaffold (ERS) sequence
  source 1..93: mol_type = other RNA
acctgtagggcacttctatctgattactctgctacagtcaccagcgactatgtcgtagtgggtaaagctccctcttcggagggagcatcagag

SEQ ID NO: 17955 - RNA, 94 nt, synthetic construct
  misc_feature 1..94: note = engineered ribonucleic acid scaffold (ERS) sequence
  source 1..94: mol_type = other RNA
acctgtaggggcacttctatctgattactctgctacagtcaccagcgactatgtcgtagtgggtaaagctccctcttcggagggagcatcagag

SEQ ID NO: 17956 - RNA, 93 nt, synthetic construct
  misc_feature 1..93: note = engineered ribonucleic acid scaffold (ERS) sequence
  source 1..93: mol_type = other RNA
gagcacgggcacttctatctgattactctggggctcctcaccagcgactatgtcgtagtgggtaaagctccctcttcggagggagcatcagag

SEQ ID NO: 17957 - RNA, 92 nt, synthetic construct
  misc_feature 1..92: note = engineered ribonucleic acid scaffold (ERS) sequence
  source 1..92: mol_type = other RNA
agagcacggcacttctatctgattactctggggctctcaccagcgactatgtcgtagtgggtaaagctccctcttcggagggagcatcagag

SEQ ID NO: 17958 - RNA, 93 nt, synthetic construct
  misc_feature 1..93: note = engineered ribonucleic acid scaffold (ERS) sequence
  source 1..93: mol_type = other RNA
acgagcacggcacttctatctgattactctggggctctcaccagcgactatgtcgtagtgggtaaagctccctcttcggagggagcatcagag

SEQ ID NO: 17959 - RNA, 94 nt, synthetic construct
  misc_feature 1..94: note = engineered ribonucleic acid scaffold (ERS) sequence
  source 1..94: mol_type = other RNA
acgagcacgggcacttctatctgattactctggggctctcaccagcgactatgtcgtagtgggtaaagctccctcttcggagggagcatcagag

SEQ ID NO: 17960 - RNA, 93 nt, synthetic construct
  misc_feature 1..93: note = engineered ribonucleic acid scaffold (ERS) sequence
  source 1..93: mol_type = other RNA
gaggtggggcacttctatctgattactctgcacctcctcaccagcgactatgtcgtagtgggtaaagctccctcttcggagggagcatcagag

SEQ ID NO: 17961 - RNA, 92 nt, synthetic construct
  misc_feature 1..92: note = engineered ribonucleic acid scaffold (ERS) sequence
  source 1..92: mol_type = other RNA
agaggtgggcacttctatctgattactctgcacctctcaccagcgactatgtcgtagtgggtaaagctccctcttcggagggagcatcagag

SEQ ID NO: 17962 - RNA, 93 nt, synthetic construct
  misc_feature 1..93: note = engineered ribonucleic acid scaffold (ERS) sequence
  source 1..93: mol_type = other RNA
acgaggtgggcacttctatctgattactctgcacctctcaccagcgactatgtcgtagtgggtaaagctccctcttcggagggagcatcagag

SEQ ID NO: 17963 - RNA, 94 nt, synthetic construct
  misc_feature 1..94: note = engineered ribonucleic acid scaffold (ERS) sequence
  source 1..94: mol_type = other RNA
acgaggtggggcacttctatctgattactctgcacctctcaccagcgactatgtcgtagtgggtaaagctccctcttcggagggagcatcagag

SEQ ID NO: 17964 - RNA, 93 nt, synthetic construct
  misc_feature 1..93: note = engineered ribonucleic acid scaffold (ERS) sequence
  source 1..93: mol_type = other RNA
gggactgggcacttctatctgattactctgagtcccctcaccagcgactatgtcgtagtgggtaaagctccctcttcggagggagcatcagag

SEQ ID NO: 17965 - RNA, 92 nt, synthetic construct
  misc_feature 1..92: note = engineered ribonucleic acid scaffold (ERS) sequence
  source 1..92: mol_type = other RNA
agggactggcacttctatctgattactctgagtccctcaccagcgactatgtcgtagtgggtaaagctccctcttcggagggagcatcagag

SEQ ID NO: 17966 - RNA, 93 nt, synthetic construct
  misc_feature 1..93: note = engineered ribonucleic acid scaffold (ERS) sequence
  source 1..93: mol_type = other RNA
acgggactggcacttctatctgattactctgagtccctcaccagcgactatgtcgtagtgggtaaagctccctcttcggagggagcatcagag

SEQ ID NO: 17967 - RNA, 94 nt, synthetic construct
  misc_feature 1..94: note = engineered ribonucleic acid scaffold (ERS) sequence
  source 1..94: mol_type = other RNA
acgggactgggcacttctatctgattactctgagtccctcaccagcgactatgtcgtagtgggtaaagctccctcttcggagggagcatcagag

SEQ ID NO: 17968 - RNA, 93 nt, synthetic construct
  misc_feature 1..93: note = engineered ribonucleic acid scaffold (ERS) sequence
  source 1..93: mol_type = other RNA
gggcaagggcacttctatctgattactctgttgcccctcaccagcgactatgtcgtagtgggtaaagctccctcttcggagggagcatcagag

SEQ ID NO: 17969 - RNA, 92 nt, synthetic construct
  misc_feature 1..92: note = engineered ribonucleic acid scaffold (ERS) sequence
  source 1..92: mol_type = other RNA
agggcaaggcacttctatctgattactctgttgccctcaccagcgactatgtcgtagtgggtaaagctccctcttcggagggagcatcagag

SEQ ID NO: 17970 - RNA, 93 nt, synthetic construct
  misc_feature 1..93: note = engineered ribonucleic acid scaffold (ERS) sequence
  source 1..93: mol_type = other RNA
acgggcaaggcacttctatctgattactctgttgccctcaccagcgactatgtcgtagtgggtaaagctccctcttcggagggagcatcagag

SEQ ID NO: 17971 - RNA, 94 nt, synthetic construct
  misc_feature 1..94: note = engineered ribonucleic acid scaffold (ERS) sequence
  source 1..94: mol_type = other RNA
acgggcaagggcacttctatctgattactctgttgccctcaccagcgactatgtcgtagtgggtaaagctccctcttcggagggagcatcagag

SEQ ID NO: 17972 - RNA, 93 nt, synthetic construct
  misc_feature 1..93: note = engineered ribonucleic acid scaffold (ERS) sequence
  source 1..93: mol_type = other RNA
tgtgcggggcacttctatctgattactctgcgcacactcaccagcgactatgtcgtagtgggtaaagctccctcttcggagggagcatcagag

SEQ ID NO: 17973 - RNA, 92 nt, synthetic construct
  misc_feature 1..92: note = engineered ribonucleic acid scaffold (ERS) sequence
  source 1..92: mol_type = other RNA
atgtgcgggcacttctatctgattactctgcgcacatcaccagcgactatgtcgtagtgggtaaagctccctcttcggagggagcatcagag

SEQ ID NO: 17974 - RNA, 93 nt, synthetic construct
  misc_feature 1..93: note = engineered ribonucleic acid scaffold (ERS) sequence
  source 1..93: mol_type = other RNA
actgtgcgggcacttctatctgattactctgcgcacatcaccagcgactatgtcgtagtgggtaaagctccctcttcggagggagcatcagag

SEQ ID NO: 17975 - RNA, 94 nt, synthetic construct
  misc_feature 1..94: note = engineered ribonucleic acid scaffold (ERS) sequence
  source 1..94: mol_type = other RNA
actgtgcggggcacttctatctgattactctgcgcacatcaccagcgactatgtcgtagtgggtaaagctccctcttcggagggagcatcagag

SEQ ID NO: 17976 - RNA, 88 nt, synthetic construct
  misc_feature 1..88: note = engineered ribonucleic acid scaffold (ERS) sequence
  source 1..88: mol_type = other RNA
gggcgcttctatctgattactctgagtgccgctcaccagcgactatgtcgtagtgggtaaagctccctcttcggagggagcatcagag

SEQ ID NO: 17977 - RNA, 88 nt, synthetic construct
  misc_feature 1..88: note = engineered ribonucleic acid scaffold (ERS) sequence
  source 1..88: mol_type = other RNA
gggcgcttctatctgattactctgagagccgctcaccagcgactatgtcgtagtgggtaaagctccctcttcggagggagcatcagag

SEQ ID NO: 17978 - RNA, 88 nt, synthetic construct
  misc_feature 1..88: note = engineered ribonucleic acid scaffold (ERS) sequence
  source 1..88: mol_type = other RNA
gggcgcttctatctgattactctgagagcctctcaccagcgactatgtcgtagtgggtaaagctccctcttcggagggagcatcagag

SEQ ID NO: 17979 - RNA, 89 nt, synthetic construct
  misc_feature 1..89: note = engineered ribonucleic acid scaffold (ERS) sequence
  source 1..89: mol_type = other RNA
atgggtgcttctatctgattactctgagacccatcaccagcgactatgtcgtagtgggtaaagctccctcttcggagggagcatcagag

SEQ ID NO: 17980 - RNA, 90 nt, synthetic construct
  misc_feature 1..90: note = engineered ribonucleic acid scaffold (ERS) sequence
  source 1..90: mol_type = other RNA
atgggctacttctatctgattactctgaggcccatcaccagcgactatgtcgtagtgggtaaagctccctcttcggagggagcatcagag

SEQ ID NO: 17981 - RNA, 87 nt, synthetic construct
  misc_feature 1..87: note = engineered ribonucleic acid scaffold (ERS) sequence
  source 1..87: mol_type = other RNA
acacacggttctatctgattactctgccgtgtacaccagcgactatgtcgtatgggtaaagctccctcttcggagggagcatcagag

SEQ ID NO: 17982 - RNA, 87 nt, synthetic construct
  misc_feature 1..87: note = engineered ribonucleic acid scaffold (ERS) sequence
  source 1..87: mol_type = other RNA
acacacggttctatctgattactctgccgtgtgcaccagcgactatgtcgtatgggtaaagctccctcttcggagggagcatcagag

SEQ ID NO: 17983 - RNA, 87 nt, synthetic construct
  misc_feature 1..87: note = engineered ribonucleic acid scaffold (ERS) sequence
  source 1..87: mol_type = other RNA
acacacggttctatctgattactctgccgtgttgaccagcgactatgtcgtatggctaaagctccctcttcggagggagcatcagag

SEQ ID NO: 17984 - RNA, 88 nt, synthetic construct
  misc_feature 1..88: note = engineered ribonucleic acid scaffold (ERS) sequence
  source 1..88: mol_type = other RNA
acacacggttctatctgattactctgccgtgttgaccagcgactatgtcgtatgggctaaagctccctcttcggagggagcatcagag

SEQ ID NO: 17985 - RNA, 87 nt, synthetic construct
  misc_feature 1..87: note = engineered ribonucleic acid scaffold (ERS) sequence
  source 1..87: mol_type = other RNA
acacacggttctatctgattactctgccgtgttgaccagcgactatgtcgtatgggtaaagctccctcttcggagggagcatcagag

SEQ ID NO: 17986 - RNA, 87 nt, synthetic construct
  misc_feature 1..87: note = engineered ribonucleic acid scaffold (ERS) sequence
  source 1..87: mol_type = other RNA
acacacggttctatctgattactctgccgtgttccccagcgactatgtcgtatgggtaaagctccctcttcggagggagcatcagag

SEQ ID NO: 17987 - RNA, 88 nt, synthetic construct
  misc_feature 1..88: note = engineered ribonucleic acid scaffold (ERS) sequence
  source 1..88: mol_type = other RNA
acacacggttctatctgattactctgccgtgttcgccagcgactatgtcgtatggcgtaaagctccctcttcggagggagcatcagag

SEQ ID NO: 17988 - RNA, 87 nt, synthetic construct
  misc_feature 1..87: note = engineered ribonucleic acid scaffold (ERS) sequence
  source 1..87: mol_type = other RNA
acacacggttctatctgattactctgccgtgttcgccagcgactatgtcgtatgggtaaagctccctcttcggagggagcatcagag

SEQ ID NO: 17989 - RNA, 87 nt, synthetic construct
  misc_feature 1..87: note = engineered ribonucleic acid scaffold (ERS) sequence
  source 1..87: mol_type = other RNA
acacacggttctatctgattactctgccgtgttctccagcgactatgtcgtatgggtaaagctccctcttcggagggagcatcagag

SEQ ID NO: 17990 - RNA, 87 nt, synthetic construct
  misc_feature 1..87: note = engineered ribonucleic acid scaffold (ERS) sequence
  source 1..87: mol_type = other RNA
acacacggttctatctgattactctgccgtgttcacctgcgactatgtcgtaagggtaaagctccctcttcggagggagcatcagag

SEQ ID NO: 17991 - RNA, 87 nt, synthetic construct
  misc_feature 1..87: note = engineered ribonucleic acid scaffold (ERS) sequence
  source 1..87: mol_type = other RNA
acacacggttctatctgattactctgccgtgttcaccagagactatgtcttatgggtaaagctccctcttcggagggagcatcagag

SEQ ID NO: 17992 - RNA, 87 nt, synthetic construct
  misc_feature 1..87: note = engineered ribonucleic acid scaffold (ERS) sequence
  source 1..87: mol_type = other RNA
acacacggttctatctgattactctgccgtgttcaccagggactatgtcctatgggtaaagctccctcttcggagggagcatcagag

SEQ ID NO: 17993 - RNA, 88 nt, synthetic construct
  misc_feature 1..88: note = engineered ribonucleic acid scaffold (ERS) sequence
  source 1..88: mol_type = other RNA
acacacggttctatctgattactctgccgtgttcaccaggcactatgtgctattgggtaaagctccctcttcggagggagcatcagag

SEQ ID NO: 17994 - RNA, 87 nt, synthetic construct
  misc_feature 1..87: note = engineered ribonucleic acid scaffold (ERS) sequence
  source 1..87: mol_type = other RNA
acacacggttctatctgattactctgccgtgttcaccagccactatgtggtatgggtaaagctccctcttcggagggagcatcagag

SEQ ID NO: 17995 - RNA, 87 nt, synthetic construct
  misc_feature 1..87: note = engineered ribonucleic acid scaffold (ERS) sequence
  source 1..87: mol_type = other RNA
acacacggttctatctgattactctgccgtgttcaccagctactatgtagtatgggtaaagctccctcttcggagggagcatcagag

SEQ ID NO: 17996 - RNA, 87 nt, synthetic construct
  misc_feature 1..87: note = engineered ribonucleic acid scaffold (ERS) sequence
  source 1..87: mol_type = other RNA
acacacggttctatctgattactctgccgtgttcaccagcgattatgtcgtatgggtaaagctccctcttcggagggagcatcagag

SEQ ID NO: 17997 - RNA, 87 nt, synthetic construct
  misc_feature 1..87: note = engineered ribonucleic acid scaffold (ERS) sequence
  source 1..87: mol_type = other RNA
acacacggttctatctgattactctgccgtgttcaccagcgacgatgtcgtatgggtaaagctccctcttcggagggagcatcagag

SEQ ID NO: 17998 - RNA, 87 nt, synthetic construct
  misc_feature 1..87: note = engineered ribonucleic acid scaffold (ERS) sequence
  source 1..87: mol_type = other RNA
acacacggttctatctgattactctgccgtgttcaccagcgactctgtcgtatgggtaaagctccctcttcggagggagcatcagag

SEQ ID NO: 17999 - RNA, 87 nt, synthetic construct
  misc_feature 1..87: note = engineered ribonucleic acid scaffold (ERS) sequence
  source 1..87: mol_type = other RNA
acacacggttctatctgattactctgccgtgttcaccagcgactatgtcgtgtgggtaaagctccctcttcggagggagcatcagag

SEQ ID NO: 18000 - RNA, 88 nt, synthetic construct
  misc_feature 1..88: note = engineered ribonucleic acid scaffold (ERS) sequence
  source 1..88: mol_type = other RNA
acacacggttctatctgattactctgccgtgttcaccagcgactatgtcgtattgggtaaagctccctcttcggagggagcatcagag

SEQ ID NO: 18001 - RNA, 88 nt, synthetic construct
  misc_feature 1..88: note = engineered ribonucleic acid scaffold (ERS) sequence
  source 1..88: mol_type = other RNA
acacacggttctatctgattactctgccgtgttcaccagcgactatgtcgtatggagtaaagctccctcttcggagggagcatcagag

SEQ ID NO: 18002 - RNA, 88 nt, synthetic construct
  misc_feature 1..88: note = engineered ribonucleic acid scaffold (ERS) sequence
  source 1..88: mol_type = other RNA
acacacggttctatctgattactctgccgtgttcaccagcgactatgtcgtatggcgtaaagctccctcttcggagggagcatcagag

SEQ ID NO: 18003 - RNA, 88 nt, synthetic construct
  misc_feature 1..88: note = engineered ribonucleic acid scaffold (ERS) sequence
  source 1..88: mol_type = other RNA
acacacggttctatctgattactctgccgtgttcaccagcgactatgtcgtatggtgtaaagctccctcttcggagggagcatcagag

SEQ ID NO: 18004 - RNA, 88 nt, synthetic construct
  misc_feature 1..88: note = engineered ribonucleic acid scaffold (ERS) sequence
  source 1..88: mol_type = other RNA
acacacggttctatctgattactctgccgtgttcaccagcgactatgtcgtatgggctaaagctccctcttcggagggagcatcagag

SEQ ID NO: 18005 - RNA, 85 nt, synthetic construct
  misc_feature 1..85: note = engineered ribonucleic acid scaffold (ERS) sequence
  source 1..85: mol_type = other RNA
acacacggttctatctgattactctgccgtgttcaccagcgactatgtcgtatgggtagctccctcttcggagggagcatcagag

SEQ ID NO: 18006 - RNA, 87 nt, synthetic construct
  misc_feature 1..87: note = engineered ribonucleic acid scaffold (ERS) sequence
  source 1..87: mol_type = other RNA
acacacggttctatctgattactctgccgtgttcaccagcgactatgtcgtatgggtgaagctccctcttcggagggagcatcagag

SEQ ID NO: 18007 - RNA, 87 nt, synthetic construct
  misc_feature 1..87: note = engineered ribonucleic acid scaffold (ERS) sequence
  source 1..87: mol_type = other RNA
acacacggttctatctgattactctgccgtgttcaccagcgactatgtcgtatgggtagagctccctcttcggagggagcatcagag

SEQ ID NO: 18008 - RNA, 87 nt, synthetic construct
  misc_feature 1..87: note = engineered ribonucleic acid scaffold (ERS) sequence
  source 1..87: mol_type = other RNA
acactggtttctatctgattactctgaccagtacaccagcgactatgtcgtatgggtaaagctccctcttcggagggagcatcagag

SEQ ID NO: 18009 - RNA, 87 nt, synthetic construct
  misc_feature 1..87: note = engineered ribonucleic acid scaffold (ERS) sequence
  source 1..87: mol_type = other RNA
acactggtttctatctgattactctgaccagtgcaccagcgactatgtcgtatgggtaaagctccctcttcggagggagcatcagag

SEQ ID NO: 18010 - RNA, 87 nt, synthetic construct
  misc_feature 1..87: note = engineered ribonucleic acid scaffold (ERS) sequence
  source 1..87: mol_type = other RNA
acactggtttctatctgattactctgaccagttgaccagcgactatgtcgtatggctaaagctccctcttcggagggagcatcagag

SEQ ID NO: 18011 - RNA, 88 nt, synthetic construct
  misc_feature 1..88: note = engineered ribonucleic acid scaffold (ERS) sequence
  source 1..88: mol_type = other RNA
acactggtttctatctgattactctgaccagttgaccagcgactatgtcgtatgggctaaagctccctcttcggagggagcatcagag

SEQ ID NO: 18012 - RNA, 87 nt, synthetic construct
  misc_feature 1..87: note = engineered ribonucleic acid scaffold (ERS) sequence
  source 1..87: mol_type = other RNA
acactggtttctatctgattactctgaccagttgaccagcgactatgtcgtatgggtaaagctccctcttcggagggagcatcagag

SEQ ID NO: 18013 - RNA, 87 nt, synthetic construct
  misc_feature 1..87: note = engineered ribonucleic acid scaffold (ERS) sequence
  source 1..87: mol_type = other RNA
acactggtttctatctgattactctgaccagttccccagcgactatgtcgtatgggtaaagctccctcttcggagggagcatcagag

SEQ ID NO: 18014 - RNA, 88 nt, synthetic construct
  misc_feature 1..88: note = engineered ribonucleic acid scaffold (ERS) sequence
  source 1..88: mol_type = other RNA
acactggtttctatctgattactctgaccagttcgccagcgactatgtcgtatggcgtaaagctccctcttcggagggagcatcagag

SEQ ID NO: 18015 - RNA, 87 nt, synthetic construct
  misc_feature 1..87: note = engineered ribonucleic acid scaffold (ERS) sequence
  source 1..87: mol_type = other RNA
acactggtttctatctgattactctgaccagttcgccagcgactatgtcgtatgggtaaagctccctcttcggagggagcatcagag

SEQ ID NO: 18016 - RNA, 87 nt, synthetic construct
  misc_feature 1..87: note = engineered ribonucleic acid scaffold (ERS) sequence
  source 1..87: mol_type = other RNA
acactggtttctatctgattactctgaccagttctccagcgactatgtcgtatgggtaaagctccctcttcggagggagcatcagag

SEQ ID NO: 18017 - RNA, 87 nt, synthetic construct
  misc_feature 1..87: note = engineered ribonucleic acid scaffold (ERS) sequence
  source 1..87: mol_type = other RNA
acactggtttctatctgattactctgaccagttcacctgcgactatgtcgtaagggtaaagctccctcttcggagggagcatcagag

SEQ ID NO: 18018 - RNA, 87 nt, synthetic construct
  misc_feature 1..87: note = engineered ribonucleic acid scaffold (ERS) sequence
  source 1..87: mol_type = other RNA
acactggtttctatctgattactctgaccagttcaccagagactatgtcttatgggtaaagctccctcttcggagggagcatcagag

SEQ ID NO: 18019 - RNA, 87 nt, synthetic construct
  misc_feature 1..87: note = engineered ribonucleic acid scaffold (ERS) sequence
  source 1..87: mol_type = other RNA
acactggtttctatctgattactctgaccagttcaccagggactatgtcctatgggtaaagctccctcttcggagggagcatcagag

SEQ ID NO: 18020 - RNA, 88 nt, synthetic construct
  misc_feature 1..88: note = engineered ribonucleic acid scaffold (ERS) sequence
  source 1..88: mol_type = other RNA
acactggtttctatctgattactctgaccagttcaccaggcactatgtgctattgggtaaagctccctcttcggagggagcatcagag

SEQ ID NO: 18021 - RNA, 87 nt, synthetic construct
  misc_feature 1..87: note = engineered ribonucleic acid scaffold (ERS) sequence
  source 1..87: mol_type = other RNA
acactggtttctatctgattactctgaccagttcaccagccactatgtggtatgggtaaagctccctcttcggagggagcatcagag

SEQ ID NO: 18022 - RNA, 87 nt, synthetic construct
  misc_feature 1..87: note = engineered ribonucleic acid scaffold (ERS) sequence
  source 1..87: mol_type = other RNA
acactggtttctatctgattactctgaccagttcaccagctactatgtagtatgggtaaagctccctcttcggagggagcatcagag

SEQ ID NO: 18023 - RNA, 87 nt, synthetic construct
  misc_feature 1..87: note = engineered ribonucleic acid scaffold (ERS) sequence
  source 1..87: mol_type = other RNA
acactggtttctatctgattactctgaccagttcaccagcgattatgtcgtatgggtaaagctccctcttcggagggagcatcagag

SEQ ID NO: 18024 - RNA, 87 nt, synthetic construct
  misc_feature 1..87: note = engineered ribonucleic acid scaffold (ERS) sequence
  source 1..87: mol_type = other RNA
acactggtttctatctgattactctgaccagttcaccagcgacgatgtcgtatgggtaaagctccctcttcggagggagcatcagag

SEQ ID NO: 18025 - RNA, 87 nt, synthetic construct
  misc_feature 1..87: note = engineered ribonucleic acid scaffold (ERS) sequence
  source 1..87: mol_type = other RNA
acactggtttctatctgattactctgaccagttcaccagcgactctgtcgtatgggtaaagctccctcttcggagggagcatcagag

SEQ ID NO: 18026 - RNA, 87 nt, synthetic construct
  misc_feature 1..87: note = engineered ribonucleic acid scaffold (ERS) sequence
  source 1..87: mol_type = other RNA
acactggtttctatctgattactctgaccagttcaccagcgactatgtcgtgtgggtaaagctccctcttcggagggagcatcagag

SEQ ID NO: 18027 - RNA, 88 nt, synthetic construct
  misc_feature 1..88: note = engineered ribonucleic acid scaffold (ERS) sequence
  source 1..88: mol_type = other RNA
acactggtttctatctgattactctgaccagttcaccagcgactatgtcgtattgggtaaagctccctcttcggagggagcatcagag

SEQ ID NO: 18028 - RNA, 88 nt, synthetic construct
  misc_feature 1..88: note = engineered ribonucleic acid scaffold (ERS) sequence
  source 1..88: mol_type = other RNA
acactggtttctatctgattactctgaccagttcaccagcgactatgtcgtatggagtaaagctccctcttcggagggagcatcagag

SEQ ID NO: 18029 - RNA, 88 nt, synthetic construct
  misc_feature 1..88: note = engineered ribonucleic acid scaffold (ERS) sequence
  source 1..88: mol_type = other RNA
acactggtttctatctgattactctgaccagttcaccagcgactatgtcgtatggcgtaaagctccctcttcggagggagcatcagag

SEQ ID NO: 18030 - RNA, 88 nt, synthetic construct
  misc_feature 1..88: note = engineered ribonucleic acid scaffold (ERS) sequence
  source 1..88: mol_type = other RNA
acactggtttctatctgattactctgaccagttcaccagcgactatgtcgtatggtgtaaagctccctcttcggagggagcatcagag

SEQ ID NO: 18031 - RNA, 88 nt, synthetic construct
  misc_feature 1..88: note = engineered ribonucleic acid scaffold (ERS) sequence
  source 1..88: mol_type = other RNA
acactggtttctatctgattactctgaccagttcaccagcgactatgtcgtatgggctaaagctccctcttcggagggagcatcagag

SEQ ID NO: 18032 - RNA, 85 nt, synthetic construct
  misc_feature 1..85: note = engineered ribonucleic acid scaffold (ERS) sequence
  source 1..85: mol_type = other RNA
acactggtttctatctgattactctgaccagttcaccagcgactatgtcgtatgggtagctccctcttcggagggagcatcagag

SEQ ID NO: 18033 - RNA, 87 nt, synthetic construct
  misc_feature 1..87: note = engineered ribonucleic acid scaffold (ERS) sequence
  source 1..87: mol_type = other RNA
acactggtttctatctgattactctgaccagttcaccagcgactatgtcgtatgggtgaagctccctcttcggagggagcatcagag

SEQ ID NO: 18034 - RNA, 87 nt, synthetic construct
  misc_feature 1..87: note = engineered ribonucleic acid scaffold (ERS) sequence
  source 1..87: mol_type = other RNA
acactggtttctatctgattactctgaccagttcaccagcgactatgtcgtatgggtagagctccctcttcggagggagcatcagag

SEQ ID NO: 18035 - RNA, 87 nt, synthetic construct
  misc_feature 1..87: note = engineered ribonucleic acid scaffold (ERS) sequence
  source 1..87: mol_type = other RNA
acaggccgttctatctgattactctgcggcctacaccagcgactatgtcgtatgggtaaagctccctcttcggagggagcatcagag

SEQ ID NO: 18036 - RNA, 87 nt, synthetic construct
  misc_feature 1..87: note = engineered ribonucleic acid scaffold (ERS) sequence
  source 1..87: mol_type = other RNA
acaggccgttctatctgattactctgcggcctgcaccagcgactatgtcgtatgggtaaagctccctcttcggagggagcatcagag

SEQ ID NO: 18037 - RNA, 87 nt, synthetic construct
  misc_feature 1..87: note = engineered ribonucleic acid scaffold (ERS) sequence
  source 1..87: mol_type = other RNA
acaggccgttctatctgattactctgcggccttgaccagcgactatgtcgtatggctaaagctccctcttcggagggagcatcagag

SEQ ID NO: 18038 - RNA, 88 nt, synthetic construct
  misc_feature 1..88: note = engineered ribonucleic acid scaffold (ERS) sequence
  source 1..88: mol_type = other RNA
acaggccgttctatctgattactctgcggccttgaccagcgactatgtcgtatgggctaaagctccctcttcggagggagcatcagag

SEQ ID NO: 18039 - RNA, 87 nt, synthetic construct
  misc_feature 1..87: note = engineered ribonucleic acid scaffold (ERS) sequence
  source 1..87: mol_type = other RNA
acaggccgttctatctgattactctgcggccttgaccagcgactatgtcgtatgggtaaagctccctcttcggagggagcatcagag

SEQ ID NO: 18040 - RNA, 87 nt, synthetic construct
  misc_feature 1..87: note = engineered ribonucleic acid scaffold (ERS) sequence
  source 1..87: mol_type = other RNA
acaggccgttctatctgattactctgcggccttccccagcgactatgtcgtatgggtaaagctccctcttcggagggagcatcagag

SEQ ID NO: 18041 - RNA, 88 nt, synthetic construct
  misc_feature 1..88: note = engineered ribonucleic acid scaffold (ERS) sequence
  source 1..88: mol_type = other RNA
acaggccgttctatctgattactctgcggccttcgccagcgactatgtcgtatggcgtaaagctccctcttcggagggagcatcagag

SEQ ID NO: 18042 - RNA, 87 nt, synthetic construct
  misc_feature 1..87: note = engineered ribonucleic acid scaffold (ERS) sequence
  source 1..87: mol_type = other RNA
acaggccgttctatctgattactctgcggccttcgccagcgactatgtcgtatgggtaaagctccctcttcggagggagcatcagag

SEQ ID NO: 18043 - RNA, 87 nt, synthetic construct
  misc_feature 1..87: note = engineered ribonucleic acid scaffold (ERS) sequence
  source 1..87: mol_type = other RNA
acaggccgttctatctgattactctgcggccttctccagcgactatgtcgtatgggtaaagctccctcttcggagggagcatcagag

SEQ ID NO: 18044 - RNA, 87 nt, synthetic construct
  misc_feature 1..87: note = engineered ribonucleic acid scaffold (ERS) sequence
  source 1..87: mol_type = other RNA
acaggccgttctatctgattactctgcggccttcacctgcgactatgtcgtaagggtaaagctccctcttcggagggagcatcagag

SEQ ID NO: 18045 - RNA, 87 nt, synthetic construct
  misc_feature 1..87: note = engineered ribonucleic acid scaffold (ERS) sequence
  source 1..87: mol_type = other RNA
acaggccgttctatctgattactctgcggccttcaccagagactatgtcttatgggtaaagctccctcttcggagggagcatcagag

SEQ ID NO: 18046 - RNA, 87 nt, synthetic construct
  misc_feature 1..87: note = engineered ribonucleic acid scaffold (ERS) sequence
  source 1..87: mol_type = other RNA
acaggccgttctatctgattactctgcggccttcaccagggactatgtcctatgggtaaagctccctcttcggagggagcatcagag

SEQ ID NO: 18047 - RNA, 88 nt, synthetic construct
  misc_feature 1..88: note = engineered ribonucleic acid scaffold (ERS) sequence
  source 1..88: mol_type = other RNA
acaggccgttctatctgattactctgcggccttcaccaggcactatgtgctattgggtaaagctccctcttcggagggagcatcagag

SEQ ID NO: 18048 - RNA, 87 nt, synthetic construct
  misc_feature 1..87: note = engineered ribonucleic acid scaffold (ERS) sequence
  source 1..87: mol_type = other RNA
acaggccgttctatctgattactctgcggccttcaccagccactatgtggtatgggtaaagctccctcttcggagggagcatcagag

SEQ ID NO: 18049 - RNA, 87 nt, synthetic construct
  misc_feature 1..87: note = engineered ribonucleic acid scaffold (ERS) sequence
  source 1..87: mol_type = other RNA
acaggccgttctatctgattactctgcggccttcaccagctactatgtagtatgggtaaagctccctcttcggagggagcatcagag

SEQ ID NO: 18050 - RNA, 87 nt, synthetic construct
  misc_feature 1..87: note = engineered ribonucleic acid scaffold (ERS) sequence
  source 1..87: mol_type = other RNA
acaggccgttctatctgattactctgcggccttcaccagcgattatgtcgtatgggtaaagctccctcttcggagggagcatcagag

SEQ ID NO: 18051 - RNA, 87 nt, synthetic construct
  misc_feature 1..87: note = engineered ribonucleic acid scaffold (ERS) sequence
  source 1..87: mol_type = other RNA
acaggccgttctatctgattactctgcggccttcaccagcgacgatgtcgtatgggtaaagctccctcttcggagggagcatcagag

SEQ ID NO: 18052 - RNA, 87 nt, synthetic construct
  misc_feature 1..87: note = engineered ribonucleic acid scaffold (ERS) sequence
  source 1..87: mol_type = other RNA
acaggccgttctatctgattactctgcggccttcaccagcgactctgtcgtatgggtaaagctccctcttcggagggagcatcagag

SEQ ID NO: 18053 - RNA, 87 nt, synthetic construct
  misc_feature 1..87: note = engineered ribonucleic acid scaffold (ERS) sequence
  source 1..87: mol_type = other RNA
acaggccgttctatctgattactctgcggccttcaccagcgactatgtcgtgtgggtaaagctccctcttcggagggagcatcagag

SEQ ID NO: 18054 - RNA, 88 nt, synthetic construct
  misc_feature 1..88: note = engineered ribonucleic acid scaffold (ERS) sequence
  source 1..88: mol_type = other RNA
acaggccgttctatctgattactctgcggccttcaccagcgactatgtcgtattgggtaaagctccctcttcggagggagcatcagag

SEQ ID NO: 18055 - RNA, 88 nt, synthetic construct
  misc_feature 1..88: note = engineered ribonucleic acid scaffold (ERS) sequence
  source 1..88: mol_type = other RNA
acaggccgttctatctgattactctgcggccttcaccagcgactatgtcgtatggagtaaagctccctcttcggagggagcatcagag

SEQ ID NO: 18056 - RNA, 88 nt, synthetic construct
  misc_feature 1..88: note = engineered ribonucleic acid scaffold (ERS) sequence
  source 1..88: mol_type = other RNA
acaggccgttctatctgattactctgcggccttcaccagcgactatgtcgtatggcgtaaagctccctcttcggagggagcatcagag

SEQ ID NO: 18057 - RNA, 88 nt, synthetic construct
  misc_feature 1..88: note = engineered ribonucleic acid scaffold (ERS) sequence
  source 1..88: mol_type = other RNA
acaggccgttctatctgattactctgcggccttcaccagcgactatgtcgtatggtgtaaagctccctcttcggagggagcatcagag

SEQ ID NO: 18058 - RNA, 88 nt, synthetic construct
  misc_feature 1..88: note = engineered ribonucleic acid scaffold (ERS) sequence
  source 1..88: mol_type = other RNA
acaggccgttctatctgattactctgcggccttcaccagcgactatgtcgtatgggctaaagctccctcttcggagggagcatcagag

SEQ ID NO: 18059 - RNA, 85 nt, synthetic construct
  misc_feature 1..85: note = engineered ribonucleic acid scaffold (ERS) sequence
  source 1..85: mol_type = other RNA
acaggccgttctatctgattactctgcggccttcaccagcgactatgtcgtatgggtagctccctcttcggagggagcatcagag

SEQ ID NO: 18060 - RNA, 87 nt, synthetic construct
  misc_feature 1..87: note = engineered ribonucleic acid scaffold (ERS) sequence
  source 1..87: mol_type = other RNA
acaggccgttctatctgattactctgcggccttcaccagcgactatgtcgtatgggtgaagctccctcttcggagggagcatcagag

SEQ ID NO: 18061 - RNA, 87 nt, synthetic construct
  misc_feature 1..87: note = engineered ribonucleic acid scaffold (ERS) sequence
  source 1..87: mol_type = other RNA
acaggccgttctatctgattactctgcggccttcaccagcgactatgtcgtatgggtagagctccctcttcggagggagcatcagag

SEQ ID NO: 18062 - RNA, 87 nt, synthetic construct
  misc_feature 1..87: note = engineered ribonucleic acid scaffold (ERS) sequence
  source 1..87: mol_type = other RNA
acaggtccttctatctgattactctgggacctacaccagcgactatgtcgtatgggtaaagctccctcttcggagggagcatcagag

SEQ ID NO: 18063 - RNA, 87 nt, synthetic construct
  misc_feature 1..87: note = engineered ribonucleic acid scaffold (ERS) sequence
  source 1..87: mol_type = other RNA
acaggtccttctatctgattactctgggacctgcaccagcgactatgtcgtatgggtaaagctccctcttcggagggagcatcagag

SEQ ID NO: 18064 - RNA, 87 nt, synthetic construct
  misc_feature 1..87: note = engineered ribonucleic acid scaffold (ERS) sequence
  source 1..87: mol_type = other RNA
acaggtccttctatctgattactctgggaccttgaccagcgactatgtcgtatggctaaagctccctcttcggagggagcatcagag

SEQ ID NO: 18065 - RNA, 88 nt, synthetic construct
  misc_feature 1..88: note = engineered ribonucleic acid scaffold (ERS) sequence
  source 1..88: mol_type = other RNA
acaggtccttctatctgattactctgggaccttgaccagcgactatgtcgtatgggctaaagctccctcttcggagggagcatcagag

SEQ ID NO: 18066 - RNA, 87 nt, synthetic construct
  misc_feature 1..87: note = engineered ribonucleic acid scaffold (ERS) sequence
  source 1..87: mol_type = other RNA
acaggtccttctatctgattactctgggaccttgaccagcgactatgtcgtatgggtaaagctccctcttcggagggagcatcagag

SEQ ID NO: 18067 - RNA, 87 nt, synthetic construct
  misc_feature 1..87: note = engineered ribonucleic acid scaffold (ERS) sequence
  source 1..87: mol_type = other RNA
acaggtccttctatctgattactctgggaccttccccagcgactatgtcgtatgggtaaagctccctcttcggagggagcatcagag

SEQ ID NO: 18068 - RNA, 88 nt, synthetic construct
  misc_feature 1..88: note = engineered ribonucleic acid scaffold (ERS) sequence
  source 1..88: mol_type = other RNA
acaggtccttctatctgattactctgggaccttcgccagcgactatgtcgtatggcgtaaagctccctcttcggagggagcatcagag

SEQ ID NO: 18069 - RNA, 87 nt, synthetic construct
  misc_feature 1..87: note = engineered ribonucleic acid scaffold (ERS) sequence
  source 1..87: mol_type = other RNA
acaggtccttctatctgattactctgggaccttcgccagcgactatgtcgtatgggtaaagctccctcttcggagggagcatcagag

SEQ ID NO: 18070 - RNA, 87 nt, synthetic construct
  misc_feature 1..87: note = engineered ribonucleic acid scaffold (ERS) sequence
  source 1..87: mol_type = other RNA
acaggtccttctatctgattactctgggaccttctccagcgactatgtcgtatgggtaaagctccctcttcggagggagcatcagag

SEQ ID NO: 18071 - RNA, 87 nt, synthetic construct
  misc_feature 1..87: note = engineered ribonucleic acid scaffold (ERS) sequence
  source 1..87: mol_type = other RNA
acaggtccttctatctgattactctgggaccttcacctgcgactatgtcgtaagggtaaagctccctcttcggagggagcatcagag

SEQ ID NO: 18072 - RNA, 87 nt, synthetic construct
  misc_feature 1..87: note = engineered ribonucleic acid scaffold (ERS) sequence
  source 1..87: mol_type = other RNA
acaggtccttctatctgattactctgggaccttcaccagagactatgtcttatgggtaaagctccctcttcggagggagcatcagag

SEQ ID NO: 18073 - RNA, 87 nt, synthetic construct
  misc_feature 1..87: note = engineered ribonucleic acid scaffold (ERS) sequence
  source 1..87: mol_type = other RNA
acaggtccttctatctgattactctgggaccttcaccagggactatgtcctatgggtaaagctccctcttcggagggagcatcagag

SEQ ID NO: 18074 - RNA, 88 nt, synthetic construct
  misc_feature 1..88: note = engineered ribonucleic acid scaffold (ERS) sequence
  source 1..88: mol_type = other RNA
acaggtccttctatctgattactctgggaccttcaccaggcactatgtgctattgggtaaagctccctcttcggagggagcatcagag

SEQ ID NO: 18075 - RNA, 87 nt, synthetic construct
  misc_feature 1..87: note = engineered ribonucleic acid scaffold (ERS) sequence
  source 1..87: mol_type = other RNA
acaggtccttctatctgattactctgggaccttcaccagccactatgtggtatgggtaaagctccctcttcggagggagcatcagag

SEQ ID NO: 18076 - RNA, 87 nt, synthetic construct
  misc_feature 1..87: note = engineered ribonucleic acid scaffold (ERS) sequence
  source 1..87: mol_type = other RNA
acaggtccttctatctgattactctgggaccttcaccagctactatgtagtatgggtaaagctccctcttcggagggagcatcagag

SEQ ID NO: 18077 - RNA, 87 nt, synthetic construct
  misc_feature 1..87: note = engineered ribonucleic acid scaffold (ERS) sequence
  source 1..87: mol_type = other RNA
acaggtccttctatctgattactctgggaccttcaccagcgattatgtcgtatgggtaaagctccctcttcggagggagcatcagag

SEQ ID NO: 18078 - RNA, 87 nt, synthetic construct
  misc_feature 1..87: note = engineered ribonucleic acid scaffold (ERS) sequence
  source 1..87: mol_type = other RNA
acaggtccttctatctgattactctgggaccttcaccagcgacgatgtcgtatgggtaaagctccctcttcggagggagcatcagag

SEQ ID NO: 18079 - RNA, 87 nt, synthetic construct
  misc_feature 1..87: note = engineered ribonucleic acid scaffold (ERS) sequence
  source 1..87: mol_type = other RNA
acaggtccttctatctgattactctgggaccttcaccagcgactctgtcgtatgggtaaagctccctcttcggagggagcatcagag

SEQ ID NO: 18080 - RNA, 87 nt, synthetic construct
  misc_feature 1..87: note = engineered ribonucleic acid scaffold (ERS) sequence
  source 1..87: mol_type = other RNA
acaggtccttctatctgattactctgggaccttcaccagcgactatgtcgtgtgggtaaagctccctcttcggagggagcatcagag

SEQ ID NO: 18081 - RNA, 88 nt, synthetic construct
  misc_feature 1..88: note = engineered ribonucleic acid scaffold (ERS) sequence
  source 1..88: mol_type = other RNA
acaggtccttctatctgattactctgggaccttcaccagcgactatgtcgtattgggtaaagctccctcttcggagggagcatcagag

SEQ ID NO: 18082 - RNA, 88 nt, synthetic construct
  misc_feature 1..88: note = engineered ribonucleic acid scaffold (ERS) sequence
  source 1..88: mol_type = other RNA
acaggtccttctatctgattactctgggaccttcaccagcgactatgtcgtatggagtaaagctccctcttcggagggagcatcagag

SEQ ID NO: 18083 - RNA, 88 nt, synthetic construct
  misc_feature 1..88: note = engineered ribonucleic acid scaffold (ERS) sequence
  source 1..88: mol_type = other RNA
acaggtccttctatctgattactctgggaccttcaccagcgactatgtcgtatggcgtaaagctccctcttcggagggagcatcagag

SEQ ID NO: 18084 - RNA, 88 nt, synthetic construct
  misc_feature 1..88: note = engineered ribonucleic acid scaffold (ERS) sequence
  source 1..88: mol_type = other RNA
acaggtccttctatctgattactctgggaccttcaccagcgactatgtcgtatggtgtaaagctccctcttcggagggagcatcagag

SEQ ID NO: 18085 - RNA, 88 nt, synthetic construct
  misc_feature 1..88: note = engineered ribonucleic acid scaffold (ERS) sequence
  source 1..88: mol_type = other RNA
acaggtccttctatctgattactctgggaccttcaccagcgactatgtcgtatgggctaaagctccctcttcggagggagcatcagag

SEQ ID NO: 18086 - RNA, 85 nt, synthetic construct
  misc_feature 1..85: note = engineered ribonucleic acid scaffold (ERS) sequence
  source 1..85: mol_type = other RNA
acaggtccttctatctgattactctgggaccttcaccagcgactatgtcgtatgggtagctccctcttcggagggagcatcagag

SEQ ID NO: 18087 - RNA, 87 nt, synthetic construct
  misc_feature 1..87: note = engineered ribonucleic acid scaffold (ERS) sequence
  source 1..87: mol_type = other RNA
acaggtccttctatctgattactctgggaccttcaccagcgactatgtcgtatgggtgaagctccctcttcggagggagcatcagag

SEQ ID NO: 18088 - RNA, 87 nt, synthetic construct
  misc_feature 1..87: note = engineered ribonucleic acid scaffold (ERS) sequence
  source 1..87: mol_type = other RNA
acaggtccttctatctgattactctgggaccttcaccagcgactatgtcgtatgggtagagctccctcttcggagggagcatcagag

SEQ ID NO: 18089 - RNA, 87 nt, synthetic construct
  misc_feature 1..87: note = engineered ribonucleic acid scaffold (ERS) sequence
  source 1..87: mol_type = other RNA
accagcaattctatctgattactctgttgctgacaccagcgactatgtcgtatgggtaaagctccctcttcggagggagcatcagag

SEQ ID NO: 18090 - RNA, 87 nt, synthetic construct
  misc_feature 1..87: note = engineered ribonucleic acid scaffold (ERS) sequence
  source 1..87: mol_type = other RNA
accagcaattctatctgattactctgttgctggcaccagcgactatgtcgtatgggtaaagctccctcttcggagggagcatcagag

SEQ ID NO: 18091 - RNA, 87 nt, synthetic construct
  misc_feature 1..87: note = engineered ribonucleic acid scaffold (ERS) sequence
  source 1..87: mol_type = other RNA
accagcaattctatctgattactctgttgctgtgaccagcgactatgtcgtatggctaaagctccctcttcggagggagcatcagag

SEQ ID NO: 18092 - RNA, 88 nt, synthetic construct
  misc_feature 1..88: note = engineered ribonucleic acid scaffold (ERS) sequence
  source 1..88: mol_type = other RNA
accagcaattctatctgattactctgttgctgtgaccagcgactatgtcgtatgggctaaagctccctcttcggagggagcatcagag

SEQ ID NO: 18093 - RNA, 87 nt, synthetic construct
  misc_feature 1..87: note = engineered ribonucleic acid scaffold (ERS) sequence
  source 1..87: mol_type = other RNA
accagcaattctatctgattactctgttgctgtgaccagcgactatgtcgtatgggtaaagctccctcttcggagggagcatcagag

SEQ ID NO: 18094 - RNA, 87 nt, synthetic construct
  misc_feature 1..87: note = engineered ribonucleic acid scaffold (ERS) sequence
  source 1..87: mol_type = other RNA
accagcaattctatctgattactctgttgctgtccccagcgactatgtcgtatgggtaaagctccctcttcggagggagcatcagag

SEQ ID NO: 18095 - RNA, 88 nt, synthetic construct
  misc_feature 1..88: note = engineered ribonucleic acid scaffold (ERS) sequence
  source 1..88: mol_type = other RNA
accagcaattctatctgattactctgttgctgtcgccagcgactatgtcgtatggcgtaaagctccctcttcggagggagcatcagag

SEQ ID NO: 18096 - RNA, 87 nt, synthetic construct
  misc_feature 1..87: note = engineered ribonucleic acid scaffold (ERS) sequence
  source 1..87: mol_type = other RNA
accagcaattctatctgattactctgttgctgtcgccagcgactatgtcgtatgggtaaagctccctcttcggagggagcatcagag

SEQ ID NO: 18097 - RNA, 87 nt, synthetic construct
  misc_feature 1..87: note = engineered ribonucleic acid scaffold (ERS) sequence
  source 1..87: mol_type = other RNA
accagcaattctatctgattactctgttgctgtctccagcgactatgtcgtatgggtaaagctccctcttcggagggagcatcagag

SEQ ID NO: 18098 - RNA, 87 nt, synthetic construct
  misc_feature 1..87: note = engineered ribonucleic acid scaffold (ERS) sequence
  source 1..87: mol_type = other RNA
accagcaattctatctgattactctgttgctgtcacctgcgactatgtcgtaagggtaaagctccctcttcggagggagcatcagag

SEQ ID NO: 18099 - RNA, 87 nt, synthetic construct
  misc_feature 1..87: note = engineered ribonucleic acid scaffold (ERS) sequence
  source 1..87: mol_type = other RNA
accagcaattctatctgattactctgttgctgtcaccagagactatgtcttatgggtaaagctccctcttcggagggagcatcagag

SEQ ID NO: 18100 - RNA, 87 nt, synthetic construct
  misc_feature 1..87: note = engineered ribonucleic acid scaffold (ERS) sequence
  source 1..87: mol_type = other RNA
accagcaattctatctgattactctgttgctgtcaccagggactatgtcctatgggtaaagctccctcttcggagggagcatcagag

SEQ ID NO: 18101 - RNA, 88 nt, synthetic construct
  misc_feature 1..88: note = engineered ribonucleic acid scaffold (ERS) sequence
  source 1..88: mol_type = other RNA
accagcaattctatctgattactctgttgctgtcaccaggcactatgtgctattgggtaaagctccctcttcggagggagcatcagag

SEQ ID NO: 18102 - RNA, 87 nt, synthetic construct
  misc_feature 1..87: note = engineered ribonucleic acid scaffold (ERS) sequence
  source 1..87: mol_type = other RNA
accagcaattctatctgattactctgttgctgtcaccagccactatgtggtatgggtaaagctccctcttcggagggagcatcagag

SEQ ID NO: 18103 - RNA, 87 nt, synthetic construct
  misc_feature 1..87: note = engineered ribonucleic acid scaffold (ERS) sequence
  source 1..87: mol_type = other RNA
accagcaattctatctgattactctgttgctgtcaccagctactatgtagtatgggtaaagctccctcttcggagggagcatcagag

SEQ ID NO: 18104 - RNA, 87 nt, synthetic construct
  misc_feature 1..87: note = engineered ribonucleic acid scaffold (ERS) sequence
  source 1..87: mol_type = other RNA
accagcaattctatctgattactctgttgctgtcaccagcgattatgtcgtatgggtaaagctccctcttcggagggagcatcagag

SEQ ID NO: 18105 - RNA, 87 nt, synthetic construct
  misc_feature 1..87: note = engineered ribonucleic acid scaffold (ERS) sequence
  source 1..87: mol_type = other RNA
accagcaattctatctgattactctgttgctgtcaccagcgacgatgtcgtatgggtaaagctccctcttcggagggagcatcagag

SEQ ID NO: 18106 - RNA, 87 nt, synthetic construct
  misc_feature 1..87: note = engineered ribonucleic acid scaffold (ERS) sequence
  source 1..87: mol_type = other RNA
accagcaattctatctgattactctgttgctgtcaccagcgactctgtcgtatgggtaaagctccctcttcggagggagcatcagag

SEQ ID NO: 18107 - RNA, 87 nt, synthetic construct
  misc_feature 1..87: note = engineered ribonucleic acid scaffold (ERS) sequence
  source 1..87: mol_type = other RNA
accagcaattctatctgattactctgttgctgtcaccagcgactatgtcgtgtgggtaaagctccctcttcggagggagcatcagag

SEQ ID NO: 18108 - RNA, 88 nt, synthetic construct
  misc_feature 1..88: note = engineered ribonucleic acid scaffold (ERS) sequence
  source 1..88: mol_type = other RNA
accagcaattctatctgattactctgttgctgtcaccagcgactatgtcgtattgggtaaagctccctcttcggagggagcatcagag

SEQ ID NO: 18109 - RNA, 88 nt, synthetic construct
  misc_feature 1..88: note = engineered ribonucleic acid scaffold (ERS) sequence
  source 1..88: mol_type = other RNA
accagcaattctatctgattactctgttgctgtcaccagcgactatgtcgtatggagtaaagctccctcttcggagggagcatcagag

SEQ ID NO: 18110 - RNA, 88 nt, synthetic construct
  misc_feature 1..88: note = engineered ribonucleic acid scaffold (ERS) sequence
  source 1..88: mol_type = other RNA
accagcaattctatctgattactctgttgctgtcaccagcgactatgtcgtatggcgtaaagctccctcttcggagggagcatcagag

SEQ ID NO: 18111 - RNA, 88 nt, synthetic construct
  misc_feature 1..88: note = engineered ribonucleic acid scaffold (ERS) sequence
  source 1..88: mol_type = other RNA
accagcaattctatctgattactctgttgctgtcaccagcgactatgtcgtatggtgtaaagctccctcttcggagggagcatcagag

SEQ ID NO: 18112 - RNA, 88 nt, synthetic construct
  misc_feature 1..88: note = engineered ribonucleic acid scaffold (ERS) sequence
  source 1..88: mol_type = other RNA
accagcaattctatctgattactctgttgctgtcaccagcgactatgtcgtatgggctaaagctccctcttcggagggagcatcagag

SEQ ID NO: 18113 - RNA, 85 nt, synthetic construct
  misc_feature 1..85: note = engineered ribonucleic acid scaffold (ERS) sequence
  source 1..85: mol_type = other RNA
accagcaattctatctgattactctgttgctgtcaccagcgactatgtcgtatgggtagctccctcttcggagggagcatcagag

SEQ ID NO: 18114 - RNA, 87 nt, synthetic construct
  misc_feature 1..87: note = engineered ribonucleic acid scaffold (ERS) sequence
  source 1..87: mol_type = other RNA
accagcaattctatctgattactctgttgctgtcaccagcgactatgtcgtatgggtgaagctccctcttcggagggagcatcagag

SEQ ID NO: 18115 - RNA, 87 nt, synthetic construct
  misc_feature 1..87: note = engineered ribonucleic acid scaffold (ERS) sequence
  source 1..87: mol_type = other RNA
accagcaattctatctgattactctgttgctgtcaccagcgactatgtcgtatgggtagagctccctcttcggagggagcatcagag

SEQ ID NO: 18116 - RNA, 87 nt, synthetic construct
  misc_feature 1..87: note = engineered ribonucleic acid scaffold (ERS) sequence
  source 1..87: mol_type = other RNA
accgagacttctatctgattactctgggctcgacaccagcgactatgtcgtatgggtaaagctccctcttcggagggagcatcagag

SEQ ID NO: 18117 - RNA, 87 nt, synthetic construct
  misc_feature 1..87: note = engineered ribonucleic acid scaffold (ERS) sequence
  source 1..87: mol_type = other RNA
accgagacttctatctgattactctgggctcggcaccagcgactatgtcgtatgggtaaagctccctcttcggagggagcatcagag

SEQ ID NO: 18118 - RNA, 87 nt, synthetic construct
  misc_feature 1..87: note = engineered ribonucleic acid scaffold (ERS) sequence
  source 1..87: mol_type = other RNA
accgagacttctatctgattactctgggctcgtgaccagcgactatgtcgtatggctaaagctccctcttcggagggagcatcagag

SEQ ID NO: 18119 - RNA, 88 nt, synthetic construct
  misc_feature 1..88: note = engineered ribonucleic acid scaffold (ERS) sequence
  source 1..88: mol_type = other RNA
accgagacttctatctgattactctgggctcgtgaccagcgactatgtcgtatgggctaaagctccctcttcggagggagcatcagag

SEQ ID NO: 18120 - RNA, 87 nt, synthetic construct
  misc_feature 1..87: note = engineered ribonucleic acid scaffold (ERS) sequence
  source 1..87: mol_type = other RNA
accgagacttctatctgattactctgggctcgtgaccagcgactatgtcgtatgggtaaagctccctcttcggagggagcatcagag

SEQ ID NO: 18121 - RNA, 87 nt, synthetic construct
  misc_feature 1..87: note = engineered ribonucleic acid scaffold (ERS) sequence
  source 1..87: mol_type = other RNA
accgagacttctatctgattactctgggctcgtccccagcgactatgtcgtatgggtaaagctccctcttcggagggagcatcagag

SEQ ID NO: 18122 - RNA, 88 nt, synthetic construct
  misc_feature 1..88: note = engineered ribonucleic acid scaffold (ERS) sequence
  source 1..88: mol_type = other RNA
accgagacttctatctgattactctgggctcgtcgccagcgactatgtcgtatggcgtaaagctccctcttcggagggagcatcagag

SEQ ID NO: 18123 - RNA, 87 nt, synthetic construct
  misc_feature 1..87: note = engineered ribonucleic acid scaffold (ERS) sequence
  source 1..87: mol_type = other RNA
accgagacttctatctgattactctgggctcgtcgccagcgactatgtcgtatgggtaaagctccctcttcggagggagcatcagag

SEQ ID NO: 18124 - RNA, 87 nt, synthetic construct
  misc_feature 1..87: note = engineered ribonucleic acid scaffold (ERS) sequence
  source 1..87: mol_type = other RNA
accgagacttctatctgattactctgggctcgtctccagcgactatgtcgtatgggtaaagctccctcttcggagggagcatcagag

SEQ ID NO: 18125 - RNA, 87 nt, synthetic construct
  misc_feature 1..87: note = engineered ribonucleic acid scaffold (ERS) sequence
  source 1..87: mol_type = other RNA
accgagacttctatctgattactctgggctcgtcacctgcgactatgtcgtaagggtaaagctccctcttcggagggagcatcagag

SEQ ID NO: 18126 - RNA, 87 nt, synthetic construct
  misc_feature 1..87: note = engineered ribonucleic acid scaffold (ERS) sequence
  source 1..87: mol_type = other RNA
accgagacttctatctgattactctgggctcgtcaccagagactatgtcttatgggtaaagctccctcttcggagggagcatcagag

SEQ ID NO: 18127 - RNA, 87 nt, synthetic construct
  misc_feature 1..87: note = engineered ribonucleic acid scaffold (ERS) sequence
  source 1..87: mol_type = other RNA
accgagacttctatctgattactctgggctcgtcaccagggactatgtcctatgggtaaagctccctcttcggagggagcatcagag

SEQ ID NO: 18128 - RNA, 88 nt, synthetic construct
  misc_feature 1..88: note = engineered ribonucleic acid scaffold (ERS) sequence
  source 1..88: mol_type = other RNA
accgagacttctatctgattactctgggctcgtcaccaggcactatgtgctattgggtaaagctccctcttcggagggagcatcagag

SEQ ID NO: 18129 - RNA, 87 nt, synthetic construct
  misc_feature 1..87: note = engineered ribonucleic acid scaffold (ERS) sequence
  source 1..87: mol_type = other RNA
accgagacttctatctgattactctgggctcgtcaccagccactatgtggtatgggtaaagctccctcttcggagggagcatcagag

SEQ ID NO: 18130 - RNA, 87 nt, synthetic construct
  misc_feature 1..87: note = engineered ribonucleic acid scaffold (ERS) sequence
  source 1..87: mol_type = other RNA
accgagacttctatctgattactctgggctcgtcaccagctactatgtagtatgggtaaagctccctcttcggagggagcatcagag

SEQ ID NO: 18131 - RNA, 87 nt, synthetic construct
  misc_feature 1..87: note = engineered ribonucleic acid scaffold (ERS) sequence
  source 1..87: mol_type = other RNA
accgagacttctatctgattactctgggctcgtcaccagcgattatgtcgtatgggtaaagctccctcttcggagggagcatcagag

SEQ ID NO: 18132 - RNA, 87 nt, synthetic construct
  misc_feature 1..87: note = engineered ribonucleic acid scaffold (ERS) sequence
  source 1..87: mol_type = other RNA
accgagacttctatctgattactctgggctcgtcaccagcgacgatgtcgtatgggtaaagctccctcttcggagggagcatcagag

SEQ ID NO: 18133 - RNA, 87 nt, synthetic construct
  misc_feature 1..87: note = engineered ribonucleic acid scaffold (ERS) sequence
  source 1..87: mol_type = other RNA
accgagacttctatctgattactctgggctcgtcaccagcgactctgtcgtatgggtaaagctccctcttcggagggagcatcagag

SEQ ID NO: 18134 - RNA, 87 nt, synthetic construct
  misc_feature 1..87: note = engineered ribonucleic acid scaffold (ERS) sequence
  source 1..87: mol_type = other RNA
accgagacttctatctgattactctgggctcgtcaccagcgactatgtcgtgtgggtaaagctccctcttcggagggagcatcagag

SEQ ID NO: 18135 - RNA, 88 nt, synthetic construct
  misc_feature 1..88: note = engineered ribonucleic acid scaffold (ERS) sequence
  source 1..88: mol_type = other RNA
accgagacttctatctgattactctgggctcgtcaccagcgactatgtcgtattgggtaaagctccctcttcggagggagcatcagag

SEQ ID NO: 18136 - RNA, 88 nt, synthetic construct
  misc_feature 1..88: note = engineered ribonucleic acid scaffold (ERS) sequence
  source 1..88: mol_type = other RNA
accgagacttctatctgattactctgggctcgtcaccagcgactatgtcgtatggagtaaagctccctcttcggagggagcatcagag

SEQ ID NO: 18137 - RNA, 88 nt, synthetic construct
  misc_feature 1..88: note = engineered ribonucleic acid scaffold (ERS) sequence
  source 1..88: mol_type = other RNA
accgagacttctatctgattactctgggctcgtcaccagcgactatgtcgtatggcgtaaagctccctcttcggagggagcatcagag

SEQ ID NO: 18138 - RNA, 88 nt, synthetic construct
  misc_feature 1..88: note = engineered ribonucleic acid scaffold (ERS) sequence
  source 1..88: mol_type = other RNA
accgagacttctatctgattactctgggctcgtcaccagcgactatgtcgtatggtgtaaagctccctcttcggagggagcatcagag

SEQ ID NO: 18139 - RNA, 88 nt, synthetic construct
  misc_feature 1..88: note = engineered ribonucleic acid scaffold (ERS) sequence
  source 1..88: mol_type = other RNA
accgagacttctatctgattactctgggctcgtcaccagcgactatgtcgtatgggctaaagctccctcttcggagggagcatcagag

SEQ ID NO: 18140 - RNA, 85 nt, synthetic construct
  misc_feature 1..85: note = engineered ribonucleic acid scaffold (ERS) sequence
  source 1..85: mol_type = other RNA
accgagacttctatctgattactctgggctcgtcaccagcgactatgtcgtatgggtagctccctcttcggagggagcatcagag

SEQ ID NO: 18141 - RNA, 87 nt, synthetic construct
  misc_feature 1..87: note = engineered ribonucleic acid scaffold (ERS) sequence
  source 1..87: mol_type = other RNA
accgagacttctatctgattactctgggctcgtcaccagcgactatgtcgtatgggtgaagctccctcttcggagggagcatcagag

SEQ ID NO: 18142 - RNA, 87 nt, synthetic construct
  misc_feature 1..87: note = engineered ribonucleic acid scaffold (ERS) sequence
  source 1..87: mol_type = other RNA
accgagacttctatctgattactctgggctcgtcaccagcgactatgtcgtatgggtagagctccctcttcggagggagcatcagag

SEQ ID NO: 18143 - RNA, 87 nt, synthetic construct
  misc_feature 1..87: note = engineered ribonucleic acid scaffold (ERS) sequence
  source 1..87: mol_type = other RNA
acctgtagttctatctgattactctgctacagacaccagcgactatgtcgtatgggtaaagctccctcttcggagggagcatcagag

SEQ ID NO: 18144 - RNA, 87 nt, synthetic construct
  misc_feature 1..87: note = engineered ribonucleic acid scaffold (ERS) sequence
  source 1..87: mol_type = other RNA
acctgtagttctatctgattactctgctacaggcaccagcgactatgtcgtatgggtaaagctccctcttcggagggagcatcagag

SEQ ID NO: 18145 - RNA, 87 nt, synthetic construct
  misc_feature 1..87: note = engineered ribonucleic acid scaffold (ERS) sequence
  source 1..87: mol_type = other RNA
acctgtagttctatctgattactctgctacagtgaccagcgactatgtcgtatggctaaagctccctcttcggagggagcatcagag

SEQ ID NO: 18146 - RNA, 88 nt, synthetic construct
  misc_feature 1..88: note = engineered ribonucleic acid scaffold (ERS) sequence
  source 1..88: mol_type = other RNA
acctgtagttctatctgattactctgctacagtgaccagcgactatgtcgtatgggctaaagctccctcttcggagggagcatcagag

SEQ ID NO: 18147 - RNA, 87 nt, synthetic construct
  misc_feature 1..87: note = engineered ribonucleic acid scaffold (ERS) sequence
  source 1..87: mol_type = other RNA
acctgtagttctatctgattactctgctacagtgaccagcgactatgtcgtatgggtaaagctccctcttcggagggagcatcagag

SEQ ID NO: 18148 - RNA, 87 nt, synthetic construct
  misc_feature 1..87: note = engineered ribonucleic acid scaffold (ERS) sequence
  source 1..87: mol_type = other RNA
acctgtagttctatctgattactctgctacagtccccagcgactatgtcgtatgggtaaagctccctcttcggagggagcatcagag

SEQ ID NO: 18149 - RNA, 88 nt, synthetic construct
  misc_feature 1..88: note = engineered ribonucleic acid scaffold (ERS) sequence
  source 1..88: mol_type = other RNA
acctgtagttctatctgattactctgctacagtcgccagcgactatgtcgtatggcgtaaagctccctcttcggagggagcatcagag

SEQ ID NO: 18150 - RNA, 87 nt, synthetic construct
  misc_feature 1..87: note = engineered ribonucleic acid scaffold (ERS) sequence
  source 1..87: mol_type = other RNA
acctgtagttctatctgattactctgctacagtcgccagcgactatgtcgtatgggtaaagctccctcttcggagggagcatcagag

SEQ ID NO: 18151 - RNA, 87 nt, synthetic construct
  misc_feature 1..87: note = engineered ribonucleic acid scaffold (ERS) sequence
  source 1..87: mol_type = other RNA
acctgtagttctatctgattactctgctacagtctccagcgactatgtcgtatgggtaaagctccctcttcggagggagcatcagag

SEQ ID NO: 18152 - RNA, 87 nt, synthetic construct
  misc_feature 1..87: note = engineered ribonucleic acid scaffold (ERS) sequence
  source 1..87: mol_type = other RNA
acctgtagttctatctgattactctgctacagtcacctgcgactatgtcgtaagggtaaagctccctcttcggagggagcatcagag

SEQ ID NO: 18153 - RNA, 87 nt, synthetic construct
  misc_feature 1..87: note = engineered ribonucleic acid scaffold (ERS) sequence
  source 1..87: mol_type = other RNA
acctgtagttctatctgattactctgctacagtcaccagagactatgtcttatgggtaaagctccctcttcggagggagcatcagag

SEQ ID NO: 18154 - RNA, 87 nt, synthetic construct
  misc_feature 1..87: note = engineered ribonucleic acid scaffold (ERS) sequence
  source 1..87: mol_type = other RNA
acctgtagttctatctgattactctgctacagtcaccagggactatgtcctatgggtaaagctccctcttcggagggagcatcagag

SEQ ID NO: 18155 - RNA, 88 nt, synthetic construct
  misc_feature 1..88: note = engineered ribonucleic acid scaffold (ERS) sequence
  source 1..88: mol_type = other RNA
acctgtagttctatctgattactctgctacagtcaccaggcactatgtgctattgggtaaagctccctcttcggagggagcatcagag

SEQ ID NO: 18156 - RNA, 87 nt, synthetic construct
  misc_feature 1..87: note = engineered ribonucleic acid scaffold (ERS) sequence
  source 1..87: mol_type = other RNA
acctgtagttctatctgattactctgctacagtcaccagccactatgtggtatgggtaaagctccctcttcggagggagcatcagag

SEQ ID NO: 18157 - RNA, 87 nt, synthetic construct
  misc_feature 1..87: note = engineered ribonucleic acid scaffold (ERS) sequence
  source 1..87: mol_type = other RNA
acctgtagttctatctgattactctgctacagtcaccagctactatgtagtatgggtaaagctccctcttcggagggagcatcagag

SEQ ID NO: 18158 - RNA, 87 nt, synthetic construct
  misc_feature 1..87: note = engineered ribonucleic acid scaffold (ERS) sequence
  source 1..87: mol_type = other RNA
acctgtagttctatctgattactctgctacagtcaccagcgattatgtcgtatgggtaaagctccctcttcggagggagcatcagag

SEQ ID NO: 18159 - RNA, 87 nt, synthetic construct
  misc_feature 1..87: note = engineered ribonucleic acid scaffold (ERS) sequence
  source 1..87: mol_type = other RNA
acctgtagttctatctgattactctgctacagtcaccagcgacgatgtcgtatgggtaaagctccctcttcggagggagcatcagag

SEQ ID NO: 18160 - RNA, 87 nt, synthetic construct
  misc_feature 1..87: note = engineered ribonucleic acid scaffold (ERS) sequence
  source 1..87: mol_type = other RNA
acctgtagttctatctgattactctgctacagtcaccagcgactctgtcgtatgggtaaagctccctcttcggagggagcatcagag

SEQ ID NO: 18161 - RNA, 87 nt, synthetic construct
  misc_feature 1..87: note = engineered ribonucleic acid scaffold (ERS) sequence
  source 1..87: mol_type = other RNA
acctgtagttctatctgattactctgctacagtcaccagcgactatgtcgtgtgggtaaagctccctcttcggagggagcatcagag

SEQ ID NO: 18162 - RNA, 88 nt, synthetic construct
  misc_feature 1..88: note = engineered ribonucleic acid scaffold (ERS) sequence
  source 1..88: mol_type = other RNA
acctgtagttctatctgattactctgctacagtcaccagcgactatgtcgtattgggtaaagctccctcttcggagggagcatcagag

SEQ ID NO: 18163 - RNA, 88 nt, synthetic construct
  misc_feature 1..88: note = engineered ribonucleic acid scaffold (ERS) sequence
  source 1..88: mol_type = other RNA
acctgtagttctatctgattactctgctacagtcaccagcgactatgtcgtatggagtaaagctccctcttcggagggagcatcagag

SEQ ID NO: 18164 - RNA, 88 nt, synthetic construct
  misc_feature 1..88: note = engineered ribonucleic acid scaffold (ERS) sequence
  source 1..88: mol_type = other RNA
acctgtagttctatctgattactctgctacagtcaccagcgactatgtcgtatggcgtaaagctccctcttcggagggagcatcagag

SEQ ID NO: 18165 - RNA, 88 nt, synthetic construct
  misc_feature 1..88: note = engineered ribonucleic acid scaffold (ERS) sequence
  source 1..88: mol_type = other RNA
acctgtagttctatctgattactctgctacagtcaccagcgactatgtcgtatggtgtaaagctccctcttcggagggagcatcagag

SEQ ID NO: 18166 - RNA, 88 nt, synthetic construct
  misc_feature 1..88: note = engineered ribonucleic acid scaffold (ERS) sequence
  source 1..88: mol_type = other RNA
acctgtagttctatctgattactctgctacagtcaccagcgactatgtcgtatgggctaaagctccctcttcggagggagcatcagag

SEQ ID NO: 18167 - RNA, 85 nt, synthetic construct
  misc_feature 1..85: note = engineered ribonucleic acid scaffold (ERS) sequence
  source 1..85: mol_type = other RNA
acctgtagttctatctgattactctgctacagtcaccagcgactatgtcgtatgggtagctccctcttcggagggagcatcagag

SEQ ID NO: 18168 - RNA, 87 nt, synthetic construct
  misc_feature 1..87: note = engineered ribonucleic acid scaffold (ERS) sequence
  source 1..87: mol_type = other RNA
acctgtagttctatctgattactctgctacagtcaccagcgactatgtcgtatgggtgaagctccctcttcggagggagcatcagag

SEQ ID NO: 18169 - RNA, 87 nt, synthetic construct
  misc_feature 1..87: note = engineered ribonucleic acid scaffold (ERS) sequence
  source 1..87: mol_type = other RNA
acctgtagttctatctgattactctgctacagtcaccagcgactatgtcgtatgggtagagctccctcttcggagggagcatcagag

SEQ ID NO: 18170 - RNA, 87 nt, synthetic construct
  misc_feature 1..87: note = engineered ribonucleic acid scaffold (ERS) sequence
  source 1..87: mol_type = other RNA
acgagcacttctatctgattactctggggctcacaccagcgactatgtcgtatgggtaaagctccctcttcggagggagcatcagag

SEQ ID NO: 18171 - RNA, 87 nt, synthetic construct
  misc_feature 1..87: note = engineered ribonucleic acid scaffold (ERS) sequence
  source 1..87: mol_type = other RNA
acgagcacttctatctgattactctggggctcgcaccagcgactatgtcgtatgggtaaagctccctcttcggagggagcatcagag

SEQ ID NO: 18172 - RNA, 87 nt, synthetic construct
  misc_feature 1..87: note = engineered ribonucleic acid scaffold (ERS) sequence
  source 1..87: mol_type = other RNA
acgagcacttctatctgattactctggggctctgaccagcgactatgtcgtatggctaaagctccctcttcggagggagcatcagag

SEQ ID NO: 18173 - RNA, 88 nt, synthetic construct
  misc_feature 1..88: note = engineered ribonucleic acid scaffold (ERS) sequence
  source 1..88: mol_type = other RNA
acgagcacttctatctgattactctggggctctgaccagcgactatgtcgtatgggctaaagctccctcttcggagggagcatcagag

SEQ ID NO: 18174 - RNA, 87 nt, synthetic construct
  misc_feature 1..87: note = engineered ribonucleic acid scaffold (ERS) sequence
  source 1..87: mol_type = other RNA
acgagcacttctatctgattactctggggctctgaccagcgactatgtcgtatgggtaaagctccctcttcggagggagcatcagag

SEQ ID NO: 18175 - RNA, 87 nt, synthetic construct
  misc_feature 1..87: note = engineered ribonucleic acid scaffold (ERS) sequence
  source 1..87: mol_type = other RNA
acgagcacttctatctgattactctggggctctccccagcgactatgtcgtatgggtaaagctccctcttcggagggagcatcagag

SEQ ID NO: 18176 - RNA, 88 nt, synthetic construct
  misc_feature 1..88: note = engineered ribonucleic acid scaffold (ERS) sequence
  source 1..88: mol_type = other RNA
acgagcacttctatctgattactctggggctctcgccagcgactatgtcgtatggcgtaaagctccctcttcggagggagcatcagag

SEQ ID NO: 18177 - RNA, 87 nt, synthetic construct
  misc_feature 1..87: note = engineered ribonucleic acid scaffold (ERS) sequence
  source 1..87: mol_type = other RNA
acgagcacttctatctgattactctggggctctcgccagcgactatgtcgtatgggtaaagctccctcttcggagggagcatcagag

SEQ ID NO: 18178 - RNA, 87 nt, synthetic construct
  misc_feature 1..87: note = engineered ribonucleic acid scaffold (ERS) sequence
  source 1..87: mol_type = other RNA
acgagcacttctatctgattactctggggctctctccagcgactatgtcgtatgggtaaagctccctcttcggagggagcatcagag

SEQ ID NO: 18179 - RNA, 87 nt, synthetic construct
  misc_feature 1..87: note = engineered ribonucleic acid scaffold (ERS) sequence
  source 1..87: mol_type = other RNA
acgagcacttctatctgattactctggggctctcacctgcgactatgtcgtaagggtaaagctccctcttcggagggagcatcagag

SEQ ID NO: 18180 - RNA, 87 nt, synthetic construct
  misc_feature 1..87: note = engineered ribonucleic acid scaffold (ERS) sequence
  source 1..87: mol_type = other RNA
acgagcacttctatctgattactctggggctctcaccagagactatgtcttatgggtaaagctccctcttcggagggagcatcagag

SEQ ID NO: 18181 - RNA, 87 nt, synthetic construct
  misc_feature 1..87: note = engineered ribonucleic acid scaffold (ERS) sequence
  source 1..87: mol_type = other RNA
acgagcacttctatctgattactctggggctctcaccagggactatgtcctatgggtaaagctccctcttcggagggagcatcagag

SEQ ID NO: 18182 - RNA, 88 nt, synthetic construct
  misc_feature 1..88: note = engineered ribonucleic acid scaffold (ERS) sequence
  source 1..88: mol_type = other RNA
acgagcacttctatctgattactctggggctctcaccaggcactatgtgctattgggtaaagctccctcttcggagggagcatcagag

SEQ ID NO: 18183 - RNA, 87 nt, synthetic construct
  misc_feature 1..87: note = engineered ribonucleic acid scaffold (ERS) sequence
  source 1..87: mol_type = other RNA
acgagcacttctatctgattactctggggctctcaccagccactatgtggtatgggtaaagctccctcttcggagggagcatcagag

SEQ ID NO: 18184 - RNA, 87 nt, synthetic construct
  misc_feature 1..87: note = engineered ribonucleic acid scaffold (ERS) sequence
  source 1..87: mol_type = other RNA
acgagcacttctatctgattactctggggctctcaccagctactatgtagtatgggtaaagctccctcttcggagggagcatcagag

SEQ ID NO: 18185 - RNA, 87 nt, synthetic construct
  misc_feature 1..87: note = engineered ribonucleic acid scaffold (ERS) sequence
  source 1..87: mol_type = other RNA
acgagcacttctatctgattactctggggctctcaccagcgattatgtcgtatgggtaaagctccctcttcggagggagcatcagag

SEQ ID NO: 18186 - RNA, 87 nt, synthetic construct
  misc_feature 1..87: note = engineered ribonucleic acid scaffold (ERS) sequence
  source 1..87: mol_type = other RNA
acgagcacttctatctgattactctggggctctcaccagcgacgatgtcgtatgggtaaagctccctcttcggagggagcatcagag

SEQ ID NO: 18187 - RNA, 87 nt, synthetic construct
  misc_feature 1..87: note = engineered ribonucleic acid scaffold (ERS) sequence
  source 1..87: mol_type = other RNA
acgagcacttctatctgattactctggggctctcaccagcgactctgtcgtatgggtaaagctccctcttcggagggagcatcagag

SEQ ID NO: 18188 - RNA, 87 nt, synthetic construct
  misc_feature 1..87: note = engineered ribonucleic acid scaffold (ERS) sequence
  source 1..87: mol_type = other RNA
acgagcacttctatctgattactctggggctctcaccagcgactatgtcgtgtgggtaaagctccctcttcggagggagcatcagag

SEQ ID NO: 18189 - RNA, 88 nt, synthetic construct
  misc_feature 1..88: note = engineered ribonucleic acid scaffold (ERS) sequence
  source 1..88: mol_type = other RNA
acgagcacttctatctgattactctggggctctcaccagcgactatgtcgtattgggtaaagctccctcttcggagggagcatcagag

SEQ ID NO: 18190 - RNA, 88 nt, synthetic construct
  misc_feature 1..88: note = engineered ribonucleic acid scaffold (ERS) sequence
  source 1..88: mol_type = other RNA
acgagcacttctatctgattactctggggctctcaccagcgactatgtcgtatggagtaaagctccctcttcggagggagcatcagag

SEQ ID NO: 18191 - RNA, 88 nt, synthetic construct
  misc_feature 1..88: note = engineered ribonucleic acid scaffold (ERS) sequence
  source 1..88: mol_type = other RNA
acgagcacttctatctgattactctggggctctcaccagcgactatgtcgtatggcgtaaagctccctcttcggagggagcatcagag

SEQ ID NO: 18192 - RNA, 88 nt, synthetic construct
  misc_feature 1..88: note = engineered ribonucleic acid scaffold (ERS) sequence
  source 1..88: mol_type = other RNA
acgagcacttctatctgattactctggggctctcaccagcgactatgtcgtatggtgtaaagctccctcttcggagggagcatcagag

SEQ ID NO: 18193 - RNA, 88 nt, synthetic construct
  misc_feature 1..88: note = engineered ribonucleic acid scaffold (ERS) sequence
  source 1..88: mol_type = other RNA
acgagcacttctatctgattactctggggctctcaccagcgactatgtcgtatgggctaaagctccctcttcggagggagcatcagag

SEQ ID NO: 18194 - RNA, 85 nt, synthetic construct
  misc_feature 1..85: note = engineered ribonucleic acid scaffold (ERS) sequence
  source 1..85: mol_type = other RNA
acgagcacttctatctgattactctggggctctcaccagcgactatgtcgtatgggtagctccctcttcggagggagcatcagag

SEQ ID NO: 18195 - RNA, 87 nt, synthetic construct
  misc_feature 1..87: note = engineered ribonucleic acid scaffold (ERS) sequence
  source 1..87: mol_type = other RNA
acgagcacttctatctgattactctggggctctcaccagcgactatgtcgtatgggtgaagctccctcttcggagggagcatcagag

SEQ ID NO: 18196 - RNA, 87 nt, synthetic construct
  misc_feature 1..87: note = engineered ribonucleic acid scaffold (ERS) sequence
  source 1..87: mol_type = other RNA
acgagcacttctatctgattactctggggctctcaccagcgactatgtcgtatgggtagagctccctcttcggagggagcatcagag

SEQ ID NO: 18197 - RNA, 87 nt, synthetic construct
  misc_feature 1..87: note = engineered ribonucleic acid scaffold (ERS) sequence
  source 1..87: mol_type = other RNA
acgaggtgttctatctgattactctgcacctcacaccagcgactatgtcgtatgggtaaagctccctcttcggagggagcatcagag

SEQ ID NO: 18198 - RNA, 87 nt, synthetic construct
  misc_feature 1..87: note = engineered ribonucleic acid scaffold (ERS) sequence
  source 1..87: mol_type = other RNA
acgaggtgttctatctgattactctgcacctcgcaccagcgactatgtcgtatgggtaaagctccctcttcggagggagcatcagag

SEQ ID NO: 18199 - RNA, 87 nt, synthetic construct
  misc_feature 1..87: note = engineered ribonucleic acid scaffold (ERS) sequence
  source 1..87: mol_type = other RNA
acgaggtgttctatctgattactctgcacctctgaccagcgactatgtcgtatggctaaagctccctcttcggagggagcatcagag

SEQ ID NO: 18200 - RNA, 88 nt, synthetic construct
  misc_feature 1..88: note = engineered ribonucleic acid scaffold (ERS) sequence
  source 1..88: mol_type = other RNA
acgaggtgttctatctgattactctgcacctctgaccagcgactatgtcgtatgggctaaagctccctcttcggagggagcatcagag

SEQ ID NO: 18201 - RNA, 87 nt, synthetic construct
  misc_feature 1..87: note = engineered ribonucleic acid scaffold (ERS) sequence
  source 1..87: mol_type = other RNA
acgaggtgttctatctgattactctgcacctctgaccagcgactatgtcgtatgggtaaagctccctcttcggagggagcatcagag

SEQ ID NO: 18202 - RNA, 87 nt, synthetic construct
  misc_feature 1..87: note = engineered ribonucleic acid scaffold (ERS) sequence
  source 1..87: mol_type = other RNA
acgaggtgttctatctgattactctgcacctctccccagcgactatgtcgtatgggtaaagctccctcttcggagggagcatcagag

SEQ ID NO: 18203 - RNA, 88 nt, synthetic construct
  misc_feature 1..88: note = engineered ribonucleic acid scaffold (ERS) sequence
  source 1..88: mol_type = other RNA
acgaggtgttctatctgattactctgcacctctcgccagcgactatgtcgtatggcgtaaagctccctcttcggagggagcatcagag

SEQ ID NO: 18204 - RNA, 87 nt, synthetic construct
  misc_feature 1..87: note = engineered ribonucleic acid scaffold (ERS) sequence
  source 1..87: mol_type = other RNA
acgaggtgttctatctgattactctgcacctctcgccagcgactatgtcgtatgggtaaagctccctcttcggagggagcatcagag

SEQ ID NO: 18205 - RNA, 87 nt, synthetic construct
  misc_feature 1..87: note = engineered ribonucleic acid scaffold (ERS) sequence
  source 1..87: mol_type = other RNA
acgaggtgttctatctgattactctgcacctctctccagcgactatgtcgtatgggtaaagctccctcttcggagggagcatcagag

SEQ ID NO: 18206 - RNA, 87 nt, synthetic construct
  misc_feature 1..87: note = engineered ribonucleic acid scaffold (ERS) sequence
  source 1..87: mol_type = other RNA
acgaggtgttctatctgattactctgcacctctcacctgcgactatgtcgtaagggtaaagctccctcttcggagggagcatcagag

SEQ ID NO: 18207 - RNA, 87 nt, synthetic construct
  misc_feature 1..87: note = engineered ribonucleic acid scaffold (ERS) sequence
  source 1..87: mol_type = other RNA
acgaggtgttctatctgattactctgcacctctcaccagagactatgtcttatgggtaaagctccctcttcggagggagcatcagag

SEQ ID NO: 18208 - RNA, 87 nt, synthetic construct
  misc_feature 1..87: note = engineered ribonucleic acid scaffold (ERS) sequence
  source 1..87: mol_type = other RNA
acgaggtgttctatctgattactctgcacctctcaccagggactatgtcctatgggtaaagctccctcttcggagggagcatcagag

SEQ ID NO: 18209 - RNA, 88 nt, synthetic construct
  misc_feature 1..88: note = engineered ribonucleic acid scaffold (ERS) sequence
  source 1..88: mol_type = other RNA
acgaggtgttctatctgattactctgcacctctcaccaggcactatgtgctattgggtaaagctccctcttcggagggagcatcagag

SEQ ID NO: 18210 - RNA, 87 nt, synthetic construct
  misc_feature 1..87: note = engineered ribonucleic acid scaffold (ERS) sequence
  source 1..87: mol_type = other RNA
acgaggtgttctatctgattactctgcacctctcaccagccactatgtggtatgggtaaagctccctcttcggagggagcatcagag

SEQ ID NO: 18211 - RNA, 87 nt, synthetic construct
  misc_feature 1..87: note = engineered ribonucleic acid scaffold (ERS) sequence
  source 1..87: mol_type = other RNA
acgaggtgttctatctgattactctgcacctctcaccagctactatgtagtatgggtaaagctccctcttcggagggagcatcagag

SEQ ID NO: 18212 - RNA, 87 nt, synthetic construct
  misc_feature 1..87: note = engineered ribonucleic acid scaffold (ERS) sequence
  source 1..87: mol_type = other RNA
acgaggtgttctatctgattactctgcacctctcaccagcgattatgtcgtatgggtaaagctccctcttcggagggagcatcagag

SEQ ID NO: 18213 - RNA, 87 nt, synthetic construct
  misc_feature 1..87: note = engineered ribonucleic acid scaffold (ERS) sequence
  source 1..87: mol_type = other RNA
acgaggtgttctatctgattactctgcacctctcaccagcgacgatgtcgtatgggtaaagctccctcttcggagggagcatcagag

SEQ ID NO: 18214 - RNA, 87 nt, synthetic construct
  misc_feature 1..87: note = engineered ribonucleic acid scaffold (ERS) sequence
  source 1..87: mol_type = other RNA
acgaggtgttctatctgattactctgcacctctcaccagcgactctgtcgtatgggtaaagctccctcttcggagggagcatcagag

SEQ ID NO: 18215 - RNA, 87 nt, synthetic construct
  misc_feature 1..87: note = engineered ribonucleic acid scaffold (ERS) sequence
  source 1..87: mol_type = other RNA
acgaggtgttctatctgattactctgcacctctcaccagcgactatgtcgtgtgggtaaagctccctcttcggagggagcatcagag

SEQ ID NO: 18216 - RNA, 88 nt, synthetic construct
  misc_feature 1..88: note = engineered ribonucleic acid scaffold (ERS) sequence
  source 1..88: mol_type = other RNA
acgaggtgttctatctgattactctgcacctctcaccagcgactatgtcgtattgggtaaagctccctcttcggagggagcatcagag

SEQ ID NO: 18217 - RNA, 88 nt, synthetic construct
  misc_feature 1..88: note = engineered ribonucleic acid scaffold (ERS) sequence
  source 1..88: mol_type = other RNA
acgaggtgttctatctgattactctgcacctctcaccagcgactatgtcgtatggagtaaagctccctcttcggagggagcatcagag

SEQ ID NO: 18218 - RNA, 88 nt, synthetic construct
  misc_feature 1..88: note = engineered ribonucleic acid scaffold (ERS) sequence
  source 1..88: mol_type = other RNA
acgaggtgttctatctgattactctgcacctctcaccagcgactatgtcgtatggcgtaaagctccctcttcggagggagcatcagag

SEQ ID NO: 18219 - RNA, 88 nt, synthetic construct
  misc_feature 1..88: note = engineered ribonucleic acid scaffold (ERS) sequence
  source 1..88: mol_type = other RNA
acgaggtgttctatctgattactctgcacctctcaccagcgactatgtcgtatggtgtaaagctccctcttcggagggagcatcagag

SEQ ID NO: 18220 - RNA, 88 nt, synthetic construct
  misc_feature 1..88: note = engineered ribonucleic acid scaffold (ERS) sequence
  source 1..88: mol_type = other RNA
acgaggtgttctatctgattactctgcacctctcaccagcgactatgtcgtatgggctaaagctccctcttcggagggagcatcagag

SEQ ID NO: 18221 - RNA, 85 nt, synthetic construct
  misc_feature 1..85: note = engineered ribonucleic acid scaffold (ERS) sequence
  source 1..85: mol_type = other RNA
acgaggtgttctatctgattactctgcacctctcaccagcgactatgtcgtatgggtagctccctcttcggagggagcatcagag

SEQ ID NO: 18222 - RNA, 87 nt, synthetic construct
  misc_feature 1..87: note = engineered ribonucleic acid scaffold (ERS) sequence
  source 1..87: mol_type = other RNA
acgaggtgttctatctgattactctgcacctctcaccagcgactatgtcgtatgggtgaagctccctcttcggagggagcatcagag

SEQ ID NO: 18223 - RNA, 87 nt, synthetic construct
  misc_feature 1..87: note = engineered ribonucleic acid scaffold (ERS) sequence
  source 1..87: mol_type = other RNA
acgaggtgttctatctgattactctgcacctctcaccagcgactatgtcgtatgggtagagctccctcttcggagggagcatcagag

SEQ ID NO: 18224 - RNA, 87 nt, synthetic construct
  misc_feature 1..87: note = engineered ribonucleic acid scaffold (ERS) sequence
  source 1..87: mol_type = other RNA
acgggactttctatctgattactctgagtcccacaccagcgactatgtcgtatgggtaaagctccctcttcggagggagcatcagag

SEQ ID NO: 18225 - RNA, 87 nt, synthetic construct
  misc_feature 1..87: note = engineered ribonucleic acid scaffold (ERS) sequence
  source 1..87: mol_type = other RNA
acgggactttctatctgattactctgagtcccgcaccagcgactatgtcgtatgggtaaagctccctcttcggagggagcatcagag

SEQ ID NO: 18226 - RNA, 87 nt, synthetic construct
  misc_feature 1..87: note = engineered ribonucleic acid scaffold (ERS) sequence
  source 1..87: mol_type = other RNA
acgggactttctatctgattactctgagtccctgaccagcgactatgtcgtatggctaaagctccctcttcggagggagcatcagag

SEQ ID NO: 18227 - RNA, 88 nt, synthetic construct
  misc_feature 1..88: note = engineered ribonucleic acid scaffold (ERS) sequence
  source 1..88: mol_type = other RNA
acgggactttctatctgattactctgagtccctgaccagcgactatgtcgtatgggctaaagctccctcttcggagggagcatcagag

SEQ ID NO: 18228 - RNA, 87 nt, synthetic construct
  misc_feature 1..87: note = engineered ribonucleic acid scaffold (ERS) sequence
  source 1..87: mol_type = other RNA
acgggactttctatctgattactctgagtccctgaccagcgactatgtcgtatgggtaaagctccctcttcggagggagcatcagag

SEQ ID NO: 18229 - RNA, 87 nt, synthetic construct
  misc_feature 1..87: note = engineered ribonucleic acid scaffold (ERS) sequence
  source 1..87: mol_type = other RNA
acgggactttctatctgattactctgagtccctccccagcgactatgtcgtatgggtaaagctccctcttcggagggagcatcagag

SEQ ID NO: 18230 - RNA, 88 nt, synthetic construct
  misc_feature 1..88: note = engineered ribonucleic acid scaffold (ERS) sequence
  source 1..88: mol_type = other RNA
acgggactttctatctgattactctgagtccctcgccagcgactatgtcgtatggcgtaaagctccctcttcggagggagcatcagag

SEQ ID NO: 18231 - RNA, 87 nt, synthetic construct
  misc_feature 1..87: note = engineered ribonucleic acid scaffold (ERS) sequence
  source 1..87: mol_type = other RNA
acgggactttctatctgattactctgagtccctcgccagcgactatgtcgtatgggtaaagctccctcttcggagggagcatcagag

SEQ ID NO: 18232 - RNA, 87 nt, synthetic construct
  misc_feature 1..87: note = engineered ribonucleic acid scaffold (ERS) sequence
  source 1..87: mol_type = other RNA
acgggactttctatctgattactctgagtccctctccagcgactatgtcgtatgggtaaagctccctcttcggagggagcatcagag

SEQ ID NO: 18233 - RNA, 87 nt, synthetic construct
  misc_feature 1..87: note = engineered ribonucleic acid scaffold (ERS) sequence
  source 1..87: mol_type = other RNA
acgggactttctatctgattactctgagtccctcacctgcgactatgtcgtaagggtaaagctccctcttcggagggagcatcagag

SEQ ID NO: 18234 - RNA, 87 nt, synthetic construct
  misc_feature 1..87: note = engineered ribonucleic acid scaffold (ERS) sequence
  source 1..87: mol_type = other RNA
acgggactttctatctgattactctgagtccctcaccagagactatgtcttatgggtaaagctccctcttcggagggagcatcagag

SEQ ID NO: 18235 - RNA, 87 nt, synthetic construct
  misc_feature 1..87: note = engineered ribonucleic acid scaffold (ERS) sequence
  source 1..87: mol_type = other RNA
acgggactttctatctgattactctgagtccctcaccagggactatgtcctatgggtaaagctccctcttcggagggagcatcagag

SEQ ID NO: 18236 - RNA, 88 nt, synthetic construct
  misc_feature 1..88: note = engineered ribonucleic acid scaffold (ERS) sequence
  source 1..88: mol_type = other RNA
acgggactttctatctgattactctgagtccctcaccaggcactatgtgctattgggtaaagctccctcttcggagggagcatcagag

SEQ ID NO: 18237 - RNA, 87 nt, synthetic construct
  misc_feature 1..87: note = engineered ribonucleic acid scaffold (ERS) sequence
  source 1..87: mol_type = other RNA
acgggactttctatctgattactctgagtccctcaccagccactatgtggtatgggtaaagctccctcttcggagggagcatcagag

SEQ ID NO: 18238 - RNA, 87 nt, synthetic construct
  misc_feature 1..87: note = engineered ribonucleic acid scaffold (ERS) sequence
  source 1..87: mol_type = other RNA
acgggactttctatctgattactctgagtccctcaccagctactatgtagtatgggtaaagctccctcttcggagggagcatcagag

SEQ ID NO: 18239 - RNA, 87 nt, synthetic construct
  misc_feature 1..87: note = engineered ribonucleic acid scaffold (ERS) sequence
  source 1..87: mol_type = other RNA
acgggactttctatctgattactctgagtccctcaccagcgattatgtcgtatgggtaaagctccctcttcggagggagcatcagag

SEQ ID NO: 18240 - RNA, 87 nt, synthetic construct
  misc_feature 1..87: note = engineered ribonucleic acid scaffold (ERS) sequence
  source 1..87: mol_type = other RNA
acgggactttctatctgattactctgagtccctcaccagcgacgatgtcgtatgggtaaagctccctcttcggagggagcatcagag

SEQ ID NO: 18241 - RNA, 87 nt, synthetic construct
  misc_feature 1..87: note = engineered ribonucleic acid scaffold (ERS) sequence
  source 1..87: mol_type = other RNA
acgggactttctatctgattactctgagtccctcaccagcgactctgtcgtatgggtaaagctccctcttcggagggagcatcagag

SEQ ID NO: 18242 - RNA, 87 nt, synthetic construct
  misc_feature 1..87: note = engineered ribonucleic acid scaffold (ERS) sequence
  source 1..87: mol_type = other RNA
acgggactttctatctgattactctgagtccctcaccagcgactatgtcgtgtgggtaaagctccctcttcggagggagcatcagag

SEQ ID NO: 18243 - RNA, 88 nt, synthetic construct
  misc_feature 1..88: note = engineered ribonucleic acid scaffold (ERS) sequence
  source 1..88: mol_type = other RNA
acgggactttctatctgattactctgagtccctcaccagcgactatgtcgtattgggtaaagctccctcttcggagggagcatcagag

SEQ ID NO: 18244 - RNA, 88 nt, synthetic construct
  misc_feature 1..88: note = engineered ribonucleic acid scaffold (ERS) sequence
  source 1..88: mol_type = other RNA
acgggactttctatctgattactctgagtccctcaccagcgactatgtcgtatggagtaaagctccctcttcggagggagcatcagag

SEQ ID NO: 18245 - RNA, 88 nt, synthetic construct
  misc_feature 1..88: note = engineered ribonucleic acid scaffold (ERS) sequence
  source 1..88: mol_type = other RNA
acgggactttctatctgattactctgagtccctcaccagcgactatgtcgtatggcgtaaagctccctcttcggagggagcatcagag

SEQ ID NO: 18246 - RNA, 88 nt, synthetic construct
  misc_feature 1..88: note = engineered ribonucleic acid scaffold (ERS) sequence
  source 1..88: mol_type = other RNA
acgggactttctatctgattactctgagtccctcaccagcgactatgtcgtatggtgtaaagctccctcttcggagggagcatcagag

SEQ ID NO: 18247 - RNA, 88 nt, synthetic construct
  misc_feature 1..88: note = engineered ribonucleic acid scaffold (ERS) sequence
  source 1..88: mol_type = other RNA
acgggactttctatctgattactctgagtccctcaccagcgactatgtcgtatgggctaaagctccctcttcggagggagcatcagag

SEQ ID NO: 18248 - RNA, 85 nt, synthetic construct
  misc_feature 1..85: note = engineered ribonucleic acid scaffold (ERS) sequence
  source 1..85: mol_type = other RNA
acgggactttctatctgattactctgagtccctcaccagcgactatgtcgtatgggtagctccctcttcggagggagcatcagag

SEQ ID NO: 18249 - RNA, 87 nt, synthetic construct
  misc_feature 1..87: note = engineered ribonucleic acid scaffold (ERS) sequence
  source 1..87: mol_type = other RNA
acgggactttctatctgattactctgagtccctcaccagcgactatgtcgtatgggtgaagctccctcttcggagggagcatcagag

SEQ ID NO: 18250 - RNA, 87 nt, synthetic construct
  misc_feature 1..87: note = engineered ribonucleic acid scaffold (ERS) sequence
  source 1..87: mol_type = other RNA
acgggactttctatctgattactctgagtccctcaccagcgactatgtcgtatgggtagagctccctcttcggagggagcatcagag

SEQ ID NO: 18251 - RNA, 87 nt, synthetic construct
  misc_feature 1..87: note = engineered ribonucleic acid scaffold (ERS) sequence
  source 1..87: mol_type = other RNA
acgggcaattctatctgattactctgttgcccacaccagcgactatgtcgtatgggtaaagctccctcttcggagggagcatcagag

SEQ ID NO: 18252 - RNA, 87 nt, synthetic construct
  misc_feature 1..87: note = engineered ribonucleic acid scaffold (ERS) sequence
  source 1..87: mol_type = other RNA
acgggcaattctatctgattactctgttgcccgcaccagcgactatgtcgtatgggtaaagctccctcttcggagggagcatcagag

SEQ ID NO: 18253 - RNA, 87 nt, synthetic construct
  misc_feature 1..87: note = engineered ribonucleic acid scaffold (ERS) sequence
  source 1..87: mol_type = other RNA
acgggcaattctatctgattactctgttgccctgaccagcgactatgtcgtatggctaaagctccctcttcggagggagcatcagag

SEQ ID NO: 18254 - RNA, 88 nt, synthetic construct
  misc_feature 1..88: note = engineered ribonucleic acid scaffold (ERS) sequence
  source 1..88: mol_type = other RNA
acgggcaattctatctgattactctgttgccctgaccagcgactatgtcgtatgggctaaagctccctcttcggagggagcatcagag

SEQ ID NO: 18255 - RNA, 87 nt, synthetic construct
  misc_feature 1..87: note = engineered ribonucleic acid scaffold (ERS) sequence
  source 1..87: mol_type = other RNA
acgggcaattctatctgattactctgttgccctgaccagcgactatgtcgtatgggtaaagctccctcttcggagggagcatcagag

SEQ ID NO: 18256 - RNA, 87 nt, synthetic construct
  misc_feature 1..87: note = engineered ribonucleic acid scaffold (ERS) sequence
  source 1..87: mol_type = other RNA
acgggcaattctatctgattactctgttgccctccccagcgactatgtcgtatgggtaaagctccctcttcggagggagcatcagag

SEQ ID NO: 18257 - RNA, 88 nt, synthetic construct
  misc_feature 1..88: note = engineered ribonucleic acid scaffold (ERS) sequence
  source 1..88: mol_type = other RNA
acgggcaattctatctgattactctgttgccctcgccagcgactatgtcgtatggcgtaaagctccctcttcggagggagcatcagag

SEQ ID NO: 18258 - RNA, 87 nt, synthetic construct
  misc_feature 1..87: note = engineered ribonucleic acid scaffold (ERS) sequence
  source 1..87: mol_type = other RNA
acgggcaattctatctgattactctgttgccctcgccagcgactatgtcgtatgggtaaagctccctcttcggagggagcatcagag

SEQ ID NO: 18259 - RNA, 87 nt, synthetic construct
  misc_feature 1..87: note = engineered ribonucleic acid scaffold (ERS) sequence
  source 1..87: mol_type = other RNA
acgggcaattctatctgattactctgttgccctctccagcgactatgtcgtatgggtaaagctccctcttcggagggagcatcagag

SEQ ID NO: 18260 - RNA, 87 nt, synthetic construct
  misc_feature 1..87: note = engineered ribonucleic acid scaffold (ERS) sequence
  source 1..87: mol_type = other RNA
acgggcaattctatctgattactctgttgccctcacctgcgactatgtcgtaagggtaaagctccctcttcggagggagcatcagag

SEQ ID NO: 18261 - RNA, 87 nt, synthetic construct
  misc_feature 1..87: note = engineered ribonucleic acid scaffold (ERS) sequence
  source 1..87: mol_type = other RNA
acgggcaattctatctgattactctgttgccctcaccagagactatgtcttatgggtaaagctccctcttcggagggagcatcagag

SEQ ID NO: 18262 - RNA, 87 nt, synthetic construct
  misc_feature 1..87: note = engineered ribonucleic acid scaffold (ERS) sequence
  source 1..87: mol_type = other RNA
acgggcaattctatctgattactctgttgccctcaccagggactatgtcctatgggtaaagctccctcttcggagggagcatcagag

SEQ ID NO: 18263 - RNA, 88 nt, synthetic construct
  misc_feature 1..88: note = engineered ribonucleic acid scaffold (ERS) sequence
  source 1..88: mol_type = other RNA
acgggcaattctatctgattactctgttgccctcaccaggcactatgtgctattgggtaaagctccctcttcggagggagcatcagag

SEQ ID NO: 18264 - RNA, 87 nt, synthetic construct
  misc_feature 1..87: note = engineered ribonucleic acid scaffold (ERS) sequence
  source 1..87: mol_type = other RNA
acgggcaattctatctgattactctgttgccctcaccagccactatgtggtatgggtaaagctccctcttcggagggagcatcagag

SEQ ID NO: 18265 - RNA, 87 nt, synthetic construct
  misc_feature 1..87: note = engineered ribonucleic acid scaffold (ERS) sequence
  source 1..87: mol_type = other RNA
acgggcaattctatctgattactctgttgccctcaccagctactatgtagtatgggtaaagctccctcttcggagggagcatcagag

SEQ ID NO: 18266 - RNA, 87 nt, synthetic construct
  misc_feature 1..87: note = engineered ribonucleic acid scaffold (ERS) sequence
  source 1..87: mol_type = other RNA
acgggcaattctatctgattactctgttgccctcaccagcgattatgtcgtatgggtaaagctccctcttcggagggagcatcagag

SEQ ID NO: 18267 - RNA, 87 nt, synthetic construct
  misc_feature 1..87: note = engineered ribonucleic acid scaffold (ERS) sequence
  source 1..87: mol_type = other RNA
acgggcaattctatctgattactctgttgccctcaccagcgacgatgtcgtatgggtaaagctccctcttcggagggagcatcagag

SEQ ID NO: 18268 - RNA, 87 nt, synthetic construct
  misc_feature 1..87: note = engineered ribonucleic acid scaffold (ERS) sequence
  source 1..87: mol_type = other RNA
acgggcaattctatctgattactctgttgccctcaccagcgactctgtcgtatgggtaaagctccctcttcggagggagcatcagag

SEQ ID NO: 18269 - RNA, 87 nt, synthetic construct
  misc_feature 1..87: note = engineered ribonucleic acid scaffold (ERS) sequence
  source 1..87: mol_type = other RNA
acgggcaattctatctgattactctgttgccctcaccagcgactatgtcgtgtgggtaaagctccctcttcggagggagcatcagag

SEQ ID NO: 18270 - RNA, 88 nt, synthetic construct
  misc_feature 1..88: note = engineered ribonucleic acid scaffold (ERS) sequence
  source 1..88: mol_type = other RNA
acgggcaattctatctgattactctgttgccctcaccagcgactatgtcgtattgggtaaagctccctcttcggagggagcatcagag

SEQ ID NO: 18271 - RNA, 88 nt, synthetic construct
  misc_feature 1..88: note = engineered ribonucleic acid scaffold (ERS) sequence
  source 1..88: mol_type = other RNA
acgggcaattctatctgattactctgttgccctcaccagcgactatgtcgtatggagtaaagctccctcttcggagggagcatcagag

SEQ ID NO: 18272 - RNA, 88 nt, synthetic construct
  misc_feature 1..88: note = engineered ribonucleic acid scaffold (ERS) sequence
  source 1..88: mol_type = other RNA
acgggcaattctatctgattactctgttgccctcaccagcgactatgtcgtatggcgtaaagctccctcttcggagggagcatcagag

SEQ ID NO: 18273 - RNA, 88 nt, synthetic construct
  misc_feature 1..88: note = engineered ribonucleic acid scaffold (ERS) sequence
  source 1..88: mol_type = other RNA
acgggcaattctatctgattactctgttgccctcaccagcgactatgtcgtatggtgtaaagctccctcttcggagggagcatcagag

SEQ ID NO: 18274 - RNA, 88 nt, synthetic construct
  misc_feature 1..88: note = engineered ribonucleic acid scaffold (ERS) sequence
  source 1..88: mol_type = other RNA
acgggcaattctatctgattactctgttgccctcaccagcgactatgtcgtatgggctaaagctccctcttcggagggagcatcagag

SEQ ID NO: 18275 - RNA, 85 nt, synthetic construct
  misc_feature 1..85: note = engineered ribonucleic acid scaffold (ERS) sequence
  source 1..85: mol_type = other RNA
acgggcaattctatctgattactctgttgccctcaccagcgactatgtcgtatgggtagctccctcttcggagggagcatcagag

SEQ ID NO: 18276 - RNA, 87 nt, synthetic construct
  misc_feature 1..87: note = engineered ribonucleic acid scaffold (ERS) sequence
  source 1..87: mol_type = other RNA
acgggcaattctatctgattactctgttgccctcaccagcgactatgtcgtatgggtgaagctccctcttcggagggagcatcagag

SEQ ID NO: 18277 - RNA, 87 nt, synthetic construct
  misc_feature 1..87: note = engineered ribonucleic acid scaffold (ERS) sequence
  source 1..87: mol_type = other RNA
acgggcaattctatctgattactctgttgccctcaccagcgactatgtcgtatgggtagagctccctcttcggagggagcatcagag

SEQ ID NO: 18278 - RNA, 87 nt, synthetic construct
  misc_feature 1..87: note = engineered ribonucleic acid scaffold (ERS) sequence
  source 1..87: mol_type = other RNA
actgtgcgttctatctgattactctgcgcacaacaccagcgactatgtcgtatgggtaaagctccctcttcggagggagcatcagag

SEQ ID NO: 18279 - RNA, 87 nt, synthetic construct
  misc_feature 1..87: note = engineered ribonucleic acid scaffold (ERS) sequence
  source 1..87: mol_type = other RNA
actgtgcgttctatctgattactctgcgcacagcaccagcgactatgtcgtatgggtaaagctccctcttcggagggagcatcagag

SEQ ID NO: 18280 - RNA, 87 nt, synthetic construct
  misc_feature 1..87: note = engineered ribonucleic acid scaffold (ERS) sequence
  source 1..87: mol_type = other RNA
actgtgcgttctatctgattactctgcgcacatgaccagcgactatgtcgtatggctaaagctccctcttcggagggagcatcagag

SEQ ID NO: 18281 - RNA, 88 nt, synthetic construct
  misc_feature 1..88: note = engineered ribonucleic acid scaffold (ERS) sequence
  source 1..88: mol_type = other RNA
actgtgcgttctatctgattactctgcgcacatgaccagcgactatgtcgtatgggctaaagctccctcttcggagggagcatcagag

SEQ ID NO: 18282 - RNA, 87 nt, synthetic construct
  misc_feature 1..87: note = engineered ribonucleic acid scaffold (ERS) sequence
  source 1..87: mol_type = other RNA
actgtgcgttctatctgattactctgcgcacatgaccagcgactatgtcgtatgggtaaagctccctcttcggagggagcatcagag

SEQ ID NO: 18283 - RNA, 87 nt, synthetic construct
  misc_feature 1..87: note = engineered ribonucleic acid scaffold (ERS) sequence
  source 1..87: mol_type = other RNA
actgtgcgttctatctgattactctgcgcacatccccagcgactatgtcgtatgggtaaagctccctcttcggagggagcatcagag

SEQ ID NO: 18284 - RNA, 88 nt, synthetic construct
  misc_feature 1..88: note = engineered ribonucleic acid scaffold (ERS) sequence
  source 1..88: mol_type = other RNA
actgtgcgttctatctgattactctgcgcacatcgccagcgactatgtcgtatggcgtaaagctccctcttcggagggagcatcagag

SEQ ID NO: 18285 - RNA, 87 nt, synthetic construct
  misc_feature 1..87: note = engineered ribonucleic acid scaffold (ERS) sequence
  source 1..87: mol_type = other RNA
actgtgcgttctatctgattactctgcgcacatcgccagcgactatgtcgtatgggtaaagctccctcttcggagggagcatcagag

SEQ ID NO: 18286 - RNA, 87 nt, synthetic construct
  misc_feature 1..87: note = engineered ribonucleic acid scaffold (ERS) sequence
  source 1..87: mol_type = other RNA
actgtgcgttctatctgattactctgcgcacatctccagcgactatgtcgtatgggtaaagctccctcttcggagggagcatcagag

SEQ ID NO: 18287 - RNA, 87 nt, synthetic construct
  misc_feature 1..87: note = engineered ribonucleic acid scaffold (ERS) sequence
  source 1..87: mol_type = other RNA
actgtgcgttctatctgattactctgcgcacatcacctgcgactatgtcgtaagggtaaagctccctcttcggagggagcatcagag

SEQ ID NO: 18288 - RNA, 87 nt, synthetic construct
  misc_feature 1..87: note = engineered ribonucleic acid scaffold (ERS) sequence
  source 1..87: mol_type = other RNA
actgtgcgttctatctgattactctgcgcacatcaccagagactatgtcttatgggtaaagctccctcttcggagggagcatcagag

SEQ ID NO: 18289 - RNA, 87 nt, synthetic construct
  misc_feature 1..87: note = engineered ribonucleic acid scaffold (ERS) sequence
  source 1..87: mol_type = other RNA
actgtgcgttctatctgattactctgcgcacatcaccagggactatgtcctatgggtaaagctccctcttcggagggagcatcagag

SEQ ID NO: 18290 - RNA, 88 nt, synthetic construct
  misc_feature 1..88: note = engineered ribonucleic acid scaffold (ERS) sequence
  source 1..88: mol_type = other RNA
actgtgcgttctatctgattactctgcgcacatcaccaggcactatgtgctattgggtaaagctccctcttcggagggagcatcagag

SEQ ID NO: 18291 - RNA, 87 nt, synthetic construct
  misc_feature 1..87: note = engineered ribonucleic acid scaffold (ERS) sequence
  source 1..87: mol_type = other RNA
actgtgcgttctatctgattactctgcgcacatcaccagccactatgtggtatgggtaaagctccctcttcggagggagcatcagag

SEQ ID NO: 18292 - RNA, 87 nt, synthetic construct
  misc_feature 1..87: note = engineered ribonucleic acid scaffold (ERS) sequence
  source 1..87: mol_type = other RNA
actgtgcgttctatctgattactctgcgcacatcaccagctactatgtagtatgggtaaagctccctcttcggagggagcatcagag

SEQ ID NO: 18293 - RNA, 87 nt, synthetic construct
  misc_feature 1..87: note = engineered ribonucleic acid scaffold (ERS) sequence
  source 1..87: mol_type = other RNA
actgtgcgttctatctgattactctgcgcacatcaccagcgattatgtcgtatgggtaaagctccctcttcggagggagcatcagag

SEQ ID NO: 18294 - RNA, 87 nt, synthetic construct
  misc_feature 1..87: note = engineered ribonucleic acid scaffold (ERS) sequence
  source 1..87: mol_type = other RNA
actgtgcgttctatctgattactctgcgcacatcaccagcgacgatgtcgtatgggtaaagctccctcttcggagggagcatcagag

SEQ ID NO: 18295 - RNA, 87 nt, synthetic construct
  misc_feature 1..87: note = engineered ribonucleic acid scaffold (ERS) sequence
  source 1..87: mol_type = other RNA
actgtgcgttctatctgattactctgcgcacatcaccagcgactctgtcgtatgggtaaagctccctcttcggagggagcatcagag

SEQ ID NO: 18296 - RNA, 87 nt, synthetic construct
  misc_feature 1..87: note = engineered ribonucleic acid scaffold (ERS) sequence
  source 1..87: mol_type = other RNA
actgtgcgttctatctgattactctgcgcacatcaccagcgactatgtcgtgtgggtaaagctccctcttcggagggagcatcagag

SEQ ID NO: 18297 - RNA, 88 nt, synthetic construct
  misc_feature 1..88: note = engineered ribonucleic acid scaffold (ERS) sequence
  source 1..88: mol_type = other RNA
actgtgcgttctatctgattactctgcgcacatcaccagcgactatgtcgtattgggtaaagctccctcttcggagggagcatcagag

SEQ ID NO: 18298 - RNA, 88 nt, synthetic construct
  misc_feature 1..88: note = engineered ribonucleic acid scaffold (ERS) sequence
  source 1..88: mol_type = other RNA
actgtgcgttctatctgattactctgcgcacatcaccagcgactatgtcgtatggagtaaagctccctcttcggagggagcatcagag

SEQ ID NO: 18299 - RNA, 88 nt, synthetic construct
  misc_feature 1..88: note = engineered ribonucleic acid scaffold (ERS) sequence
  source 1..88: mol_type = other RNA
actgtgcgttctatctgattactctgcgcacatcaccagcgactatgtcgtatggcgtaaagctccctcttcggagggagcatcagag

SEQ ID NO: 18300 - RNA, 88 nt, synthetic construct
  misc_feature 1..88: note = engineered ribonucleic acid scaffold (ERS) sequence
  source 1..88: mol_type = other RNA
actgtgcgttctatctgattactctgcgcacatcaccagcgactatgtcgtatggtgtaaagctccctcttcggagggagcatcagag

SEQ ID NO: 18301 - RNA, 88 nt, synthetic construct
  misc_feature 1..88: note = engineered ribonucleic acid scaffold (ERS) sequence
  source 1..88: mol_type = other RNA
actgtgcgttctatctgattactctgcgcacatcaccagcgactatgtcgtatgggctaaagctccctcttcggagggagcatcagag

SEQ ID NO: 18302 - RNA, 85 nt, synthetic construct
  misc_feature 1..85: note = engineered ribonucleic acid scaffold (ERS) sequence
  source 1..85: mol_type = other RNA
actgtgcgttctatctgattactctgcgcacatcaccagcgactatgtcgtatgggtagctccctcttcggagggagcatcagag

SEQ ID NO: 18303 - RNA, 87 nt, synthetic construct
  misc_feature 1..87: note = engineered ribonucleic acid scaffold (ERS) sequence
  source 1..87: mol_type = other RNA
actgtgcgttctatctgattactctgcgcacatcaccagcgactatgtcgtatgggtgaagctccctcttcggagggagcatcagag

SEQ ID NO: 18304 - RNA, 87 nt, synthetic construct
  misc_feature 1..87: note = engineered ribonucleic acid scaffold (ERS) sequence
  source 1..87: mol_type = other RNA
actgtgcgttctatctgattactctgcgcacatcaccagcgactatgtcgtatgggtagagctccctcttcggagggagcatcagag

SEQ ID NO: 18305 - RNA, 88 nt, synthetic construct
  misc_feature 1..88: note = engineered ribonucleic acid scaffold (ERS) sequence
  source 1..88: mol_type = other RNA
actggcgcttctatctgattactctgggcgccaacaccagcgactatgtcgtatgggtaaagctccctcttcggagggagcatcagag

SEQ ID NO: 18306 - RNA, 88 nt, synthetic construct
  misc_feature 1..88: note = engineered ribonucleic acid scaffold (ERS) sequence
  source 1..88: mol_type = other RNA
actggcgcttctatctgattactctgggcgccagcaccagcgactatgtcgtatgggtaaagctccctcttcggagggagcatcagag

SEQ ID NO: 18307 - RNA, 88 nt, synthetic construct
  misc_feature 1..88: note = engineered ribonucleic acid scaffold (ERS) sequence
  source 1..88: mol_type = other RNA
actggcgcttctatctgattactctgggcgccatgaccagcgactatgtcgtatggctaaagctccctcttcggagggagcatcagag

SEQ ID NO: 18308 - RNA, 89 nt, synthetic construct
  misc_feature 1..89: note = engineered ribonucleic acid scaffold (ERS) sequence
  source 1..89: mol_type = other RNA
actggcgcttctatctgattactctgggcgccatgaccagcgactatgtcgtatgggctaaagctccctcttcggagggagcatcagag

SEQ ID NO: 18309 - RNA, 88 nt, synthetic construct
  misc_feature 1..88: note = engineered ribonucleic acid scaffold (ERS) sequence
  source 1..88: mol_type = other RNA
actggcgcttctatctgattactctgggcgccatgaccagcgactatgtcgtatgggtaaagctccctcttcggagggagcatcagag

SEQ ID NO: 18310 - RNA, 88 nt, synthetic construct
  misc_feature 1..88: note = engineered ribonucleic acid scaffold (ERS) sequence
  source 1..88: mol_type = other RNA
actggcgcttctatctgattactctgggcgccatccccagcgactatgtcgtatgggtaaagctccctcttcggagggagcatcagag

SEQ ID NO: 18311 - RNA, 89 nt, synthetic construct
  misc_feature 1..89: note = engineered ribonucleic acid scaffold (ERS) sequence
  source 1..89: mol_type = other RNA
actggcgcttctatctgattactctgggcgccatcgccagcgactatgtcgtatggcgtaaagctccctcttcggagggagcatcagag

SEQ ID NO: 18312 - RNA, 88 nt, synthetic construct
  misc_feature 1..88: note = engineered ribonucleic acid scaffold (ERS) sequence
  source 1..88: mol_type = other RNA
actggcgcttctatctgattactctgggcgccatcgccagcgactatgtcgtatgggtaaagctccctcttcggagggagcatcagag

SEQ ID NO: 18313 - RNA, 88 nt, synthetic construct
  misc_feature 1..88: note = engineered ribonucleic acid scaffold (ERS) sequence
  source 1..88: mol_type = other RNA
actggcgcttctatctgattactctgggcgccatctccagcgactatgtcgtatgggtaaagctccctcttcggagggagcatcagag

SEQ ID NO: 18314 - RNA, 88 nt, synthetic construct
  misc_feature 1..88: note = engineered ribonucleic acid scaffold (ERS) sequence
  source 1..88: mol_type = other RNA
actggcgcttctatctgattactctgggcgccatcacctgcgactatgtcgtaagggtaaagctccctcttcggagggagcatcagag

SEQ ID NO: 18315 - RNA, 88 nt, synthetic construct
  misc_feature 1..88: note = engineered ribonucleic acid scaffold (ERS) sequence
  source 1..88: mol_type = other RNA
actggcgcttctatctgattactctgggcgccatcaccagagactatgtcttatgggtaaagctccctcttcggagggagcatcagag

SEQ ID NO: 18316 - RNA, 88 nt, synthetic construct
  misc_feature 1..88: note = engineered ribonucleic acid scaffold (ERS) sequence
  source 1..88: mol_type = other RNA
actggcgcttctatctgattactctgggcgccatcaccagggactatgtcctatgggtaaagctccctcttcggagggagcatcagag

SEQ ID NO: 18317 - RNA, 89 nt, synthetic construct
  misc_feature 1..89: note = engineered ribonucleic acid scaffold (ERS) sequence
  source 1..89: mol_type = other RNA
actggcgcttctatctgattactctgggcgccatcaccaggcactatgtgctattgggtaaagctccctcttcggagggagcatcagag

SEQ ID NO: 18318 - RNA, 88 nt, synthetic construct
  misc_feature 1..88: note = engineered ribonucleic acid scaffold (ERS) sequence
  source 1..88: mol_type = other RNA
actggcgcttctatctgattactctgggcgccatcaccagccactatgtggtatgggtaaagctccctcttcggagggagcatcagag

SEQ ID NO: 18319 - RNA, 88 nt, synthetic construct
  misc_feature 1..88: note = engineered ribonucleic acid scaffold (ERS) sequence
  source 1..88: mol_type = other RNA
actggcgcttctatctgattactctgggcgccatcaccagctactatgtagtatgggtaaagctccctcttcggagggagcatcagag

SEQ ID NO: 18320 - RNA, 88 nt, synthetic construct
  misc_feature 1..88: note = engineered ribonucleic acid scaffold (ERS) sequence
  source 1..88: mol_type = other RNA
actggcgcttctatctgattactctgggcgccatcaccagcgattatgtcgtatgggtaaagctccctcttcggagggagcatcagag

SEQ ID NO: 18321 - RNA, 88 nt, synthetic construct
  misc_feature 1..88: note = engineered ribonucleic acid scaffold (ERS) sequence
  source 1..88: mol_type = other RNA
actggcgcttctatctgattactctgggcgccatcaccagcgacgatgtcgtatgggtaaagctccctcttcggagggagcatcagag

SEQ ID NO: 18322 - RNA, 88 nt, synthetic construct
  misc_feature 1..88: note = engineered ribonucleic acid scaffold (ERS) sequence
  source 1..88: mol_type = other RNA
actggcgcttctatctgattactctgggcgccatcaccagcgactctgtcgtatgggtaaagctccctcttcggagggagcatcagag

SEQ ID NO: 18323 - RNA, 88 nt, synthetic construct
  misc_feature 1..88: note = engineered ribonucleic acid scaffold (ERS) sequence
  source 1..88: mol_type = other RNA
actggcgcttctatctgattactctgggcgccatcaccagcgactatgtcgtgtgggtaaagctccctcttcggagggagcatcagag

SEQ ID NO: 18324 - RNA, 89 nt, synthetic construct
  misc_feature 1..89: note = engineered ribonucleic acid scaffold (ERS) sequence
  source 1..89: mol_type = other RNA
actggcgcttctatctgattactctgggcgccatcaccagcgactatgtcgtattgggtaaagctccctcttcggagggagcatcagag

SEQ ID NO: 18325 - RNA, 89 nt, synthetic construct
  misc_feature 1..89: note = engineered ribonucleic acid scaffold (ERS) sequence
  source 1..89: mol_type = other RNA
actggcgcttctatctgattactctgggcgccatcaccagcgactatgtcgtatggagtaaagctccctcttcggagggagcatcagag

SEQ ID NO: 18326 - RNA, 89 nt, synthetic construct
  misc_feature 1..89: note = engineered ribonucleic acid scaffold (ERS) sequence
  source 1..89: mol_type = other RNA
actggcgcttctatctgattactctgggcgccatcaccagcgactatgtcgtatggcgtaaagctccctcttcggagggagcatcagag

SEQ ID NO: 18327 - RNA, 89 nt, synthetic construct
  misc_feature 1..89: note = engineered ribonucleic acid scaffold (ERS) sequence
  source 1..89: mol_type = other RNA
actggcgcttctatctgattactctgggcgccatcaccagcgactatgtcgtatggtgtaaagctccctcttcggagggagcatcagag

SEQ ID NO: 18328 - RNA, 89 nt, synthetic construct
  misc_feature 1..89: note = engineered ribonucleic acid scaffold (ERS) sequence
  source 1..89: mol_type = other RNA
actggcgcttctatctgattactctgggcgccatcaccagcgactatgtcgtatgggctaaagctccctcttcggagggagcatcagag

SEQ ID NO: 18329 - RNA, 86 nt, synthetic construct
  misc_feature 1..86: note = engineered ribonucleic acid scaffold (ERS) sequence
  source 1..86: mol_type = other RNA
actggcgcttctatctgattactctgggcgccatcaccagcgactatgtcgtatgggtagctccctcttcggagggagcatcagag

SEQ ID NO: 18330 - RNA, 88 nt, synthetic construct
  misc_feature 1..88: note = engineered ribonucleic acid scaffold (ERS) sequence
  source 1..88: mol_type = other RNA
actggcgcttctatctgattactctgggcgccatcaccagcgactatgtcgtatgggtgaagctccctcttcggagggagcatcagag

SEQ ID NO: 18331 - RNA, 88 nt, synthetic construct
  misc_feature 1..88: note = engineered ribonucleic acid scaffold (ERS) sequence
  source 1..88: mol_type = other RNA
actggcgcttctatctgattactctgggcgccatcaccagcgactatgtcgtatgggtagagctccctcttcggagggagcatcagag

SEQ ID NO: 18332 - RNA, 88 nt, synthetic construct
  misc_feature 1..88: note = engineered ribonucleic acid scaffold (ERS) sequence
  source 1..88: mol_type = other RNA
actggcgcttctatctgattactctgggagccaacaccagcgactatgtcgtatgggtaaagctccctcttcggagggagcatcagag

SEQ ID NO: 18333 - RNA, 88 nt, synthetic construct
  misc_feature 1..88: note = engineered ribonucleic acid scaffold (ERS) sequence
  source 1..88: mol_type = other RNA
actggcgcttctatctgattactctgggagccagcaccagcgactatgtcgtatgggtaaagctccctcttcggagggagcatcagag

SEQ ID NO: 18334 - RNA, 88 nt, synthetic construct
  misc_feature 1..88: note = engineered ribonucleic acid scaffold (ERS) sequence
  source 1..88: mol_type = other RNA
actggcgcttctatctgattactctgggagccatgaccagcgactatgtcgtatggctaaagctccctcttcggagggagcatcagag

SEQ ID NO: 18335 - RNA, 89 nt, synthetic construct
  misc_feature 1..89: note = engineered ribonucleic acid scaffold (ERS) sequence
  source 1..89: mol_type = other RNA
actggcgcttctatctgattactctgggagccatgaccagcgactatgtcgtatgggctaaagctccctcttcggagggagcatcagag

SEQ ID NO: 18336 - RNA, 88 nt, synthetic construct
  misc_feature 1..88: note = engineered ribonucleic acid scaffold (ERS) sequence
  source 1..88: mol_type = other RNA
actggcgcttctatctgattactctgggagccatgaccagcgactatgtcgtatgggtaaagctccctcttcggagggagcatcagag

SEQ ID NO: 18337 - RNA, 88 nt, synthetic construct
  misc_feature 1..88: note = engineered ribonucleic acid scaffold (ERS) sequence
  source 1..88: mol_type = other RNA
actggcgcttctatctgattactctgggagccatccccagcgactatgtcgtatgggtaaagctccctcttcggagggagcatcagag

SEQ ID NO: 18338 - RNA, 89 nt, synthetic construct
  misc_feature 1..89: note = engineered ribonucleic acid scaffold (ERS) sequence
  source 1..89: mol_type = other RNA
actggcgcttctatctgattactctgggagccatcgccagcgactatgtcgtatggcgtaaagctccctcttcggagggagcatcagag

SEQ ID NO: 18339 - RNA, 88 nt, synthetic construct
  misc_feature 1..88: note = engineered ribonucleic acid scaffold (ERS) sequence
  source 1..88: mol_type = other RNA
actggcgcttctatctgattactctgggagccatcgccagcgactatgtcgtatgggtaaagctccctcttcggagggagcatcagag

SEQ ID NO: 18340 - RNA, 88 nt, synthetic construct
  misc_feature 1..88: note = engineered ribonucleic acid scaffold (ERS) sequence
  source 1..88: mol_type = other RNA
actggcgcttctatctgattactctgggagccatctccagcgactatgtcgtatgggtaaagctccctcttcggagggagcatcagag

SEQ ID NO: 18341 - RNA, 88 nt, synthetic construct
  misc_feature 1..88: note = engineered ribonucleic acid scaffold (ERS) sequence
  source 1..88: mol_type = other RNA
actggcgcttctatctgattactctgggagccatcacctgcgactatgtcgtaagggtaaagctccctcttcggagggagcatcagag

SEQ ID NO: 18342 - RNA, 88 nt, synthetic construct
  misc_feature 1..88: note = engineered ribonucleic acid scaffold (ERS) sequence
  source 1..88: mol_type = other RNA
actggcgcttctatctgattactctgggagccatcaccagagactatgtcttatgggtaaagctccctcttcggagggagcatcagag

SEQ ID NO: 18343 - RNA, 88 nt, synthetic construct
  misc_feature 1..88: note = engineered ribonucleic acid scaffold (ERS) sequence
  source 1..88: mol_type = other RNA
actggcgcttctatctgattactctgggagccatcaccagggactatgtcctatgggtaaagctccctcttcggagggagcatcagag

SEQ ID NO: 18344 - RNA, 89 nt, synthetic construct
  misc_feature 1..89: note = engineered ribonucleic acid scaffold (ERS) sequence
  source 1..89: mol_type = other RNA
actggcgcttctatctgattactctgggagccatcaccaggcactatgtgctattgggtaaagctccctcttcggagggagcatcagag

SEQ ID NO: 18345 - RNA, 88 nt, synthetic construct
  misc_feature 1..88: note = engineered ribonucleic acid scaffold (ERS) sequence
  source 1..88: mol_type = other RNA
actggcgcttctatctgattactctgggagccatcaccagccactatgtggtatgggtaaagctccctcttcggagggagcatcagag

SEQ ID NO: 18346 - RNA, 88 nt, synthetic construct
  misc_feature 1..88: note = engineered ribonucleic acid scaffold (ERS) sequence
  source 1..88: mol_type = other RNA
actggcgcttctatctgattactctgggagccatcaccagctactatgtagtatgggtaaagctccctcttcggagggagcatcagag

SEQ ID NO: 18347 - RNA, 88 nt, synthetic construct
  misc_feature 1..88: note = engineered ribonucleic acid scaffold (ERS) sequence
  source 1..88: mol_type = other RNA
actggcgcttctatctgattactctgggagccatcaccagcgattatgtcgtatgggtaaagctccctcttcggagggagcatcagag

SEQ ID NO: 18348 - RNA, 88 nt, synthetic construct
  misc_feature 1..88: note = engineered ribonucleic acid scaffold (ERS) sequence
  source 1..88: mol_type = other RNA
actggcgcttctatctgattactctgggagccatcaccagcgacgatgtcgtatgggtaaagctccctcttcggagggagcatcagag

SEQ ID NO: 18349 - RNA, 88 nt, synthetic construct
  misc_feature 1..88: note = engineered ribonucleic acid scaffold (ERS) sequence
  source 1..88: mol_type = other RNA
actggcgcttctatctgattactctgggagccatcaccagcgactctgtcgtatgggtaaagctccctcttcggagggagcatcagag

SEQ ID NO: 18350 - RNA, 88 nt, synthetic construct
  misc_feature 1..88: note = engineered ribonucleic acid scaffold (ERS) sequence
  source 1..88: mol_type = other RNA
actggcgcttctatctgattactctgggagccatcaccagcgactatgtcgtgtgggtaaagctccctcttcggagggagcatcagag

SEQ ID NO: 18351 - RNA, 89 nt, synthetic construct
  misc_feature 1..89: note = engineered ribonucleic acid scaffold (ERS) sequence
  source 1..89: mol_type = other RNA
actggcgcttctatctgattactctgggagccatcaccagcgactatgtcgtattgggtaaagctccctcttcggagggagcatcagag

SEQ ID NO: 18352 - RNA, 89 nt, synthetic construct
  misc_feature 1..89: note = engineered ribonucleic acid scaffold (ERS) sequence
  source 1..89: mol_type = other RNA
actggcgcttctatctgattactctgggagccatcaccagcgactatgtcgtatggagtaaagctccctcttcggagggagcatcagag

SEQ ID NO: 18353 - RNA, 89 nt, synthetic construct
  misc_feature 1..89: note = engineered ribonucleic acid scaffold (ERS) sequence
  source 1..89: mol_type = other RNA
actggcgcttctatctgattactctgggagccatcaccagcgactatgtcgtatggcgtaaagctccctcttcggagggagcatcagag

SEQ ID NO: 18354 - RNA, 89 nt, synthetic construct
  misc_feature 1..89: note = engineered ribonucleic acid scaffold (ERS) sequence
  source 1..89: mol_type = other RNA
actggcgcttctatctgattactctgggagccatcaccagcgactatgtcgtatggtgtaaagctccctcttcggagggagcatcagag

SEQ ID NO: 18355 - RNA, 89 nt, synthetic construct
  misc_feature 1..89: note = engineered ribonucleic acid scaffold (ERS) sequence
  source 1..89: mol_type = other RNA
actggcgcttctatctgattactctgggagccatcaccagcgactatgtcgtatgggctaaagctccctcttcggagggagcatcagag

SEQ ID NO: 18356 - RNA, 86 nt, synthetic construct
  misc_feature 1..86: note = engineered ribonucleic acid scaffold (ERS) sequence
  source 1..86: mol_type = other RNA
actggcgcttctatctgattactctgggagccatcaccagcgactatgtcgtatgggtagctccctcttcggagggagcatcagag

SEQ ID NO: 18357 - RNA, 88 nt, synthetic construct
  misc_feature 1..88: note = engineered ribonucleic acid scaffold (ERS) sequence
  source 1..88: mol_type = other RNA
actggcgcttctatctgattactctgggagccatcaccagcgactatgtcgtatgggtgaagctccctcttcggagggagcatcagag

SEQ ID NO: 18358 - RNA, 88 nt, synthetic construct
  misc_feature 1..88: note = engineered ribonucleic acid scaffold (ERS) sequence
  source 1..88: mol_type = other RNA
actggcgcttctatctgattactctgggagccatcaccagcgactatgtcgtatgggtagagctccctcttcggagggagcatcagag

SEQ ID NO: 18359 - RNA, 88 nt, synthetic construct
  misc_feature 1..88: note = engineered ribonucleic acid scaffold (ERS) sequence
  source 1..88: mol_type = other RNA
actggcgcttctatctgattactctgtgagccaacaccagcgactatgtcgtatgggtaaagctccctcttcggagggagcatcagag

SEQ ID NO: 18360 - RNA, 88 nt, synthetic construct
  misc_feature 1..88: note = engineered ribonucleic acid scaffold (ERS) sequence
  source 1..88: mol_type = other RNA
actggcgcttctatctgattactctgtgagccagcaccagcgactatgtcgtatgggtaaagctccctcttcggagggagcatcagag

SEQ ID NO: 18361 - RNA, 88 nt, synthetic construct
  misc_feature 1..88: note = engineered ribonucleic acid scaffold (ERS) sequence
  source 1..88: mol_type = other RNA
actggcgcttctatctgattactctgtgagccatgaccagcgactatgtcgtatggctaaagctccctcttcggagggagcatcagag

SEQ ID NO: 18362 - RNA, 89 nt, synthetic construct
  misc_feature 1..89: note = engineered ribonucleic acid scaffold (ERS) sequence
  source 1..89: mol_type = other RNA
actggcgcttctatctgattactctgtgagccatgaccagcgactatgtcgtatgggctaaagctccctcttcggagggagcatcagag

SEQ ID NO: 18363 - RNA, 88 nt, synthetic construct
  misc_feature 1..88: note = engineered ribonucleic acid scaffold (ERS) sequence
  source 1..88: mol_type = other RNA
actggcgcttctatctgattactctgtgagccatgaccagcgactatgtcgtatgggtaaagctccctcttcggagggagcatcagag

SEQ ID NO: 18364 - RNA, 88 nt, synthetic construct
  misc_feature 1..88: note = engineered ribonucleic acid scaffold (ERS) sequence
  source 1..88: mol_type = other RNA
actggcgcttctatctgattactctgtgagccatccccagcgactatgtcgtatgggtaaagctccctcttcggagggagcatcagag

SEQ ID NO: 18365 - RNA, 89 nt, synthetic construct
  misc_feature 1..89: note = engineered ribonucleic acid scaffold (ERS) sequence
  source 1..89: mol_type = other RNA
actggcgcttctatctgattactctgtgagccatcgccagcgactatgtcgtatggcgtaaagctccctcttcggagggagcatcagag

SEQ ID NO: 18366 - RNA, 88 nt, synthetic construct
  misc_feature 1..88: note = engineered ribonucleic acid scaffold (ERS) sequence
  source 1..88: mol_type = other RNA
actggcgcttctatctgattactctgtgagccatcgccagcgactatgtcgtatgggtaaagctccctcttcggagggagcatcagag

SEQ ID NO: 18367 - RNA, 88 nt, synthetic construct
  misc_feature 1..88: note = engineered ribonucleic acid scaffold (ERS) sequence
  source 1..88: mol_type = other RNA
actggcgcttctatctgattactctgtgagccatctccagcgactatgtcgtatgggtaaagctccctcttcggagggagcatcagag

SEQ ID NO: 18368 - RNA, 88 nt, synthetic construct
  misc_feature 1..88: note = engineered ribonucleic acid scaffold (ERS) sequence
  source 1..88: mol_type = other RNA
actggcgcttctatctgattactctgtgagccatcacctgcgactatgtcgtaagggtaaagctccctcttcggagggagcatcagag

SEQ ID NO: 18369 - RNA, 88 nt, synthetic construct
  misc_feature 1..88: note = engineered ribonucleic acid scaffold (ERS) sequence
  source 1..88: mol_type = other RNA
actggcgcttctatctgattactctgtgagccatcaccagagactatgtcttatgggtaaagctccctcttcggagggagcatcagag

SEQ ID NO: 18370 - RNA, 88 nt, synthetic construct
  misc_feature 1..88: note = engineered ribonucleic acid scaffold (ERS) sequence
  source 1..88: mol_type = other RNA
actggcgcttctatctgattactctgtgagccatcaccagggactatgtcctatgggtaaagctccctcttcggagggagcatcagag

SEQ ID NO: 18371 - RNA, 89 nt, synthetic construct
  misc_feature 1..89: note = engineered ribonucleic acid scaffold (ERS) sequence
  source 1..89: mol_type = other RNA
actggcgcttctatctgattactctgtgagccatcaccaggcactatgtgctattgggtaaagctccctcttcggagggagcatcagag

SEQ ID NO: 18372 - RNA, 88 nt, synthetic construct
  misc_feature 1..88: note = engineered ribonucleic acid scaffold (ERS) sequence
  source 1..88: mol_type = other RNA
actggcgcttctatctgattactctgtgagccatcaccagccactatgtggtatgggtaaagctccctcttcggagggagcatcagag

SEQ ID NO: 18373 - RNA, 88 nt, synthetic construct
  misc_feature 1..88: note = engineered ribonucleic acid scaffold (ERS) sequence
  source 1..88: mol_type = other RNA
actggcgcttctatctgattactctgtgagccatcaccagctactatgtagtatgggtaaagctccctcttcggagggagcatcagag

SEQ ID NO: 18374 - RNA, 88 nt, synthetic construct
  misc_feature 1..88: note = engineered ribonucleic acid scaffold (ERS) sequence
  source 1..88: mol_type = other RNA
actggcgcttctatctgattactctgtgagccatcaccagcgattatgtcgtatgggtaaagctccctcttcggagggagcatcagag

SEQ ID NO: 18375 - RNA, 88 nt, synthetic construct
  misc_feature 1..88: note = engineered ribonucleic acid scaffold (ERS) sequence
  source 1..88: mol_type = other RNA
actggcgcttctatctgattactctgtgagccatcaccagcgacgatgtcgtatgggtaaagctccctcttcggagggagcatcagag

SEQ ID NO: 18376 - RNA, 88 nt, synthetic construct
  misc_feature 1..88: note = engineered ribonucleic acid scaffold (ERS) sequence
  source 1..88: mol_type = other RNA
actggcgcttctatctgattactctgtgagccatcaccagcgactctgtcgtatgggtaaagctccctcttcggagggagcatcagag

SEQ ID NO: 18377 - RNA, 88 nt, synthetic construct
  misc_feature 1..88: note = engineered ribonucleic acid scaffold (ERS) sequence
  source 1..88: mol_type = other RNA
actggcgcttctatctgattactctgtgagccatcaccagcgactatgtcgtgtgggtaaagctccctcttcggagggagcatcagag

SEQ ID NO: 18378 - RNA, 89 nt, synthetic construct
  misc_feature 1..89: note = engineered ribonucleic acid scaffold (ERS) sequence
  source 1..89: mol_type = other RNA
actggcgcttctatctgattactctgtgagccatcaccagcgactatgtcgtattgggtaaagctccctcttcggagggagcatcagag

SEQ ID NO: 18379 - RNA, 89 nt, synthetic construct
  misc_feature 1..89: note = engineered ribonucleic acid scaffold (ERS) sequence
  source 1..89: mol_type = other RNA
actggcgcttctatctgattactctgtgagccatcaccagcgactatgtcgtatggagtaaagctccctcttcggagggagcatcagag

SEQ ID NO: 18380 - RNA, 89 nt, synthetic construct
  misc_feature 1..89: note = engineered ribonucleic acid scaffold (ERS) sequence
  source 1..89: mol_type = other RNA
actggcgcttctatctgattactctgtgagccatcaccagcgactatgtcgtatggcgtaaagctccctcttcggagggagcatcagag

SEQ ID NO: 18381 - RNA, 89 nt, synthetic construct
  misc_feature 1..89: note = engineered ribonucleic acid scaffold (ERS) sequence
  source 1..89: mol_type = other RNA
actggcgcttctatctgattactctgtgagccatcaccagcgactatgtcgtatggtgtaaagctccctcttcggagggagcatcagag

SEQ ID NO: 18382 - RNA, 89 nt, synthetic construct
  misc_feature 1..89: note = engineered ribonucleic acid scaffold (ERS) sequence
  source 1..89: mol_type = other RNA
actggcgcttctatctgattactctgtgagccatcaccagcgactatgtcgtatgggctaaagctccctcttcggagggagcatcagag

SEQ ID NO: 18383 - RNA, 86 nt, synthetic construct
  misc_feature 1..86: note = engineered ribonucleic acid scaffold (ERS) sequence
  source 1..86: mol_type = other RNA
actggcgcttctatctgattactctgtgagccatcaccagcgactatgtcgtatgggtagctccctcttcggagggagcatcagag

SEQ ID NO: 18384 - RNA, 88 nt, synthetic construct
  misc_feature 1..88: note = engineered ribonucleic acid scaffold (ERS) sequence
  source 1..88: mol_type = other RNA
actggcgcttctatctgattactctgtgagccatcaccagcgactatgtcgtatgggtgaagctccctcttcggagggagcatcagag

SEQ ID NO: 18385 - RNA, 88 nt, synthetic construct
  misc_feature 1..88: note = engineered ribonucleic acid scaffold (ERS) sequence
  source 1..88: mol_type = other RNA
actggcgcttctatctgattactctgtgagccatcaccagcgactatgtcgtatgggtagagctccctcttcggagggagcatcagag

SEQ ID NO: 18386 - RNA, 89 nt, synthetic construct
  misc_feature 1..89: note = engineered ribonucleic acid scaffold (ERS) sequence
  source 1..89: mol_type = other RNA
actggcgcttctatctgattactctgaggagccaacaccagcgactatgtcgtatgggtaaagctccctcttcggagggagcatcagag

SEQ ID NO: 18387 - RNA, 89 nt, synthetic construct
  misc_feature 1..89: note = engineered ribonucleic acid scaffold (ERS) sequence
  source 1..89: mol_type = other RNA
actggcgcttctatctgattactctgaggagccagcaccagcgactatgtcgtatgggtaaagctccctcttcggagggagcatcagag

SEQ ID NO: 18388 - RNA, 89 nt, synthetic construct
  misc_feature 1..89: note = engineered ribonucleic acid scaffold (ERS) sequence
  source 1..89: mol_type = other RNA
actggcgcttctatctgattactctgaggagccatgaccagcgactatgtcgtatggctaaagctccctcttcggagggagcatcagag

SEQ ID NO: 18389 - RNA, 90 nt, synthetic construct
  misc_feature 1..90: note = engineered ribonucleic acid scaffold (ERS) sequence
  source 1..90: mol_type = other RNA
actggcgcttctatctgattactctgaggagccatgaccagcgactatgtcgtatgggctaaagctccctcttcggagggagcatcagag

SEQ ID NO: 18390 - RNA, 89 nt, synthetic construct
  misc_feature 1..89: note = engineered ribonucleic acid scaffold (ERS) sequence
  source 1..89: mol_type = other RNA
actggcgcttctatctgattactctgaggagccatgaccagcgactatgtcgtatgggtaaagctccctcttcggagggagcatcagag

SEQ ID NO: 18391 - RNA, 89 nt, synthetic construct
  misc_feature 1..89: note = engineered ribonucleic acid scaffold (ERS) sequence
  source 1..89: mol_type = other RNA
actggcgcttctatctgattactctgaggagccatccccagcgactatgtcgtatgggtaaagctccctcttcggagggagcatcagag

SEQ ID NO: 18392 - RNA, 90 nt, synthetic construct
  misc_feature 1..90: note = engineered ribonucleic acid scaffold (ERS) sequence
  source 1..90: mol_type = other RNA
actggcgcttctatctgattactctgaggagccatcgccagcgactatgtcgtatggcgtaaagctccctcttcggagggagcatcagag

SEQ ID NO: 18393 - RNA, 89 nt, synthetic construct
  misc_feature 1..89: note = engineered ribonucleic acid scaffold (ERS) sequence
  source 1..89: mol_type = other RNA
actggcgcttctatctgattactctgaggagccatcgccagcgactatgtcgtatgggtaaagctccctcttcggagggagcatcagag

SEQ ID NO: 18394 - RNA, 89 nt, synthetic construct
  misc_feature 1..89: note = engineered ribonucleic acid scaffold (ERS) sequence
  source 1..89: mol_type = other RNA
actggcgcttctatctgattactctgaggagccatctccagcgactatgtcgtatgggtaaagctccctcttcggagggagcatcagag

SEQ ID NO: 18395 - RNA, 89 nt, synthetic construct
  misc_feature 1..89: note = engineered ribonucleic acid scaffold (ERS) sequence
  source 1..89: mol_type = other RNA
actggcgcttctatctgattactctgaggagccatcacctgcgactatgtcgtaagggtaaagctccctcttcggagggagcatcagag

SEQ ID NO: 18396 - RNA, 89 nt, synthetic construct
  misc_feature 1..89: note = engineered ribonucleic acid scaffold (ERS) sequence
  source 1..89: mol_type = other RNA
actggcgcttctatctgattactctgaggagccatcaccagagactatgtcttatgggtaaagctccctcttcggagggagcatcagag

SEQ ID NO: 18397 - RNA, 89 nt, synthetic construct
  misc_feature 1..89: note = engineered ribonucleic acid scaffold (ERS) sequence
  source 1..89: mol_type = other RNA
actggcgcttctatctgattactctgaggagccatcaccagggactatgtcctatgggtaaagctccctcttcggagggagcatcagag

SEQ ID NO: 18398 - RNA, 90 nt, synthetic construct
  misc_feature 1..90: note = engineered ribonucleic acid scaffold (ERS) sequence
  source 1..90: mol_type = other RNA
actggcgcttctatctgattactctgaggagccatcaccaggcactatgtgctattgggtaaagctccctcttcggagggagcatcagag

SEQ ID NO: 18399 - RNA, 89 nt, synthetic construct
  misc_feature 1..89: note = engineered ribonucleic acid scaffold (ERS) sequence
  source 1..89: mol_type = other RNA
actggcgcttctatctgattactctgaggagccatcaccagccactatgtggtatgggtaaagctccctcttcggagggagcatcagag

SEQ ID NO: 18400 - RNA, 89 nt, synthetic construct
  misc_feature 1..89: note = engineered ribonucleic acid scaffold (ERS) sequence
  source 1..89: mol_type = other RNA
actggcgcttctatctgattactctgaggagccatcaccagctactatgtagtatgggtaaagctccctcttcggagggagcatcagag

SEQ ID NO: 18401 - RNA, 89 nt, synthetic construct
  misc_feature 1..89: note = engineered ribonucleic acid scaffold (ERS) sequence
  source 1..89: mol_type = other RNA
actggcgcttctatctgattactctgaggagccatcaccagcgattatgtcgtatgggtaaagctccctcttcggagggagcatcagag

SEQ ID NO: 18402 - RNA, 89 nt, synthetic construct
  misc_feature 1..89: note = engineered ribonucleic acid scaffold (ERS) sequence
  source 1..89: mol_type = other RNA
actggcgcttctatctgattactctgaggagccatcaccagcgacgatgtcgtatgggtaaagctccctcttcggagggagcatcagag

SEQ ID NO: 18403 - RNA, 89 nt, synthetic construct
  misc_feature 1..89: note = engineered ribonucleic acid scaffold (ERS) sequence
  source 1..89: mol_type = other RNA
actggcgcttctatctgattactctgaggagccatcaccagcgactctgtcgtatgggtaaagctccctcttcggagggagcatcagag

SEQ ID NO: 18404 - RNA, 89 nt, synthetic construct
  misc_feature 1..89: note = engineered ribonucleic acid scaffold (ERS) sequence
  source 1..89: mol_type = other RNA
actggcgcttctatctgattactctgaggagccatcaccagcgactatgtcgtgtgggtaaagctccctcttcggagggagcatcagag

SEQ ID NO: 18405 - RNA, 90 nt, synthetic construct
  misc_feature 1..90: note = engineered ribonucleic acid scaffold (ERS) sequence
  source 1..90: mol_type = other RNA
actggcgcttctatctgattactctgaggagccatcaccagcgactatgtcgtattgggtaaagctccctcttcggagggagcatcagag

SEQ ID NO: 18406 - RNA, 90 nt, synthetic construct
  misc_feature 1..90: note = engineered ribonucleic acid scaffold (ERS) sequence
  source 1..90: mol_type = other RNA
actggcgcttctatctgattactctgaggagccatcaccagcgactatgtcgtatggagtaaagctccctcttcggagggagcatcagag

SEQ ID NO: 18407 - RNA, 90 nt, synthetic construct
  misc_feature 1..90: note = engineered ribonucleic acid scaffold (ERS) sequence
  source 1..90: mol_type = other RNA
actggcgcttctatctgattactctgaggagccatcaccagcgactatgtcgtatggcgtaaagctccctcttcggagggagcatcagag

SEQ ID NO: 18408 - RNA, 90 nt, synthetic construct
  misc_feature 1..90: note = engineered ribonucleic acid scaffold (ERS) sequence
  source 1..90: mol_type = other RNA
actggcgcttctatctgattactctgaggagccatcaccagcgactatgtcgtatggtgtaaagctccctcttcggagggagcatcagag

SEQ ID NO: 18409 - RNA, 90 nt, synthetic construct
  misc_feature 1..90: note = engineered ribonucleic acid scaffold (ERS) sequence
  source 1..90: mol_type = other RNA
actggcgcttctatctgattactctgaggagccatcaccagcgactatgtcgtatgggctaaagctccctcttcggagggagcatcagag

SEQ ID NO: 18410 - RNA, 87 nt, synthetic construct
  misc_feature 1..87: note = engineered ribonucleic acid scaffold (ERS) sequence
  source 1..87: mol_type = other RNA
actggcgcttctatctgattactctgaggagccatcaccagcgactatgtcgtatgggtagctccctcttcggagggagcatcagag

SEQ ID NO: 18411 - RNA, 89 nt, synthetic construct
  misc_feature 1..89: note = engineered ribonucleic acid scaffold (ERS) sequence
  source 1..89: mol_type = other RNA
actggcgcttctatctgattactctgaggagccatcaccagcgactatgtcgtatgggtgaagctccctcttcggagggagcatcagag

SEQ ID NO: 18412 - RNA, 89 nt, synthetic construct
  misc_feature 1..89: note = engineered ribonucleic acid scaffold (ERS) sequence
  source 1..89: mol_type = other RNA
actggcgcttctatctgattactctgaggagccatcaccagcgactatgtcgtatgggtagagctccctcttcggagggagcatcagag

SEQ ID NO: 18413 - RNA, 88 nt, synthetic construct
  misc_feature 1..88: note = engineered ribonucleic acid scaffold (ERS) sequence
  source 1..88: mol_type = other RNA
actggcgcttctatctgattactctgatagccaacaccagcgactatgtcgtatgggtaaagctccctcttcggagggagcatcagag

SEQ ID NO: 18414 - RNA, 88 nt, synthetic construct
  misc_feature 1..88: note = engineered ribonucleic acid scaffold (ERS) sequence
  source 1..88: mol_type = other RNA
actggcgcttctatctgattactctgatagccagcaccagcgactatgtcgtatgggtaaagctccctcttcggagggagcatcagag

SEQ ID NO: 18415 - RNA, 88 nt, synthetic construct
  misc_feature 1..88: note = engineered ribonucleic acid scaffold (ERS) sequence
  source 1..88: mol_type = other RNA
actggcgcttctatctgattactctgatagccatgaccagcgactatgtcgtatggctaaagctccctcttcggagggagcatcagag

SEQ ID NO: 18416 - RNA, 89 nt, synthetic construct
  misc_feature 1..89: note = engineered ribonucleic acid scaffold (ERS) sequence
  source 1..89: mol_type = other RNA
actggcgcttctatctgattactctgatagccatgaccagcgactatgtcgtatgggctaaagctccctcttcggagggagcatcagag

SEQ ID NO: 18417 - RNA, 88 nt, synthetic construct
  misc_feature 1..88: note = engineered ribonucleic acid scaffold (ERS) sequence
  source 1..88: mol_type = other RNA
actggcgcttctatctgattactctgatagccatgaccagcgactatgtcgtatgggtaaagctccctcttcggagggagcatcagag

SEQ ID NO: 18418 - RNA, 88 nt, synthetic construct
  misc_feature 1..88: note = engineered ribonucleic acid scaffold (ERS) sequence
  source 1..88: mol_type = other RNA
actggcgcttctatctgattactctgatagccatccccagcgactatgtcgtatgggtaaagctccctcttcggagggagcatcagag

SEQ ID NO: 18419 - RNA, 89 nt, synthetic construct
  misc_feature 1..89: note = engineered ribonucleic acid scaffold (ERS) sequence
  source 1..89: mol_type = other RNA
actggcgcttctatctgattactctgatagccatcgccagcgactatgtcgtatggcgtaaagctccctcttcggagggagcatcagag

SEQ ID NO: 18420 - RNA, 88 nt, synthetic construct
  misc_feature 1..88: note = engineered ribonucleic acid scaffold (ERS) sequence
  source 1..88: mol_type = other RNA
actggcgcttctatctgattactctgatagccatcgccagcgactatgtcgtatgggtaaagctccctcttcggagggagcatcagag

SEQ ID NO: 18421 - RNA, 88 nt, synthetic construct
  misc_feature 1..88: note = engineered ribonucleic acid scaffold (ERS) sequence
  source 1..88: mol_type = other RNA
actggcgcttctatctgattactctgatagccatctccagcgactatgtcgtatgggtaaagctccctcttcggagggagcatcagag

SEQ ID NO: 18422 - RNA, 88 nt, synthetic construct
  misc_feature 1..88: note = engineered ribonucleic acid scaffold (ERS) sequence
  source 1..88: mol_type = other RNA
actggcgcttctatctgattactctgatagccatcacctgcgactatgtcgtaagggtaaagctccctcttcggagggagcatcagag

SEQ ID NO: 18423 - RNA, 88 nt, synthetic construct
  misc_feature 1..88: note = engineered ribonucleic acid scaffold (ERS) sequence
  source 1..88: mol_type = other RNA
actggcgcttctatctgattactctgatagccatcaccagagactatgtcttatgggtaaagctccctcttcggagggagcatcagag

SEQ ID NO: 18424 - RNA, 88 nt, synthetic construct
  misc_feature 1..88: note = engineered ribonucleic acid scaffold (ERS) sequence
  source 1..88: mol_type = other RNA
actggcgcttctatctgattactctgatagccatcaccagggactatgtcctatgggtaaagctccctcttcggagggagcatcagag

SEQ ID NO: 18425 - RNA, 89 nt, synthetic construct
  misc_feature 1..89: note = engineered ribonucleic acid scaffold (ERS) sequence
  source 1..89: mol_type = other RNA
actggcgcttctatctgattactctgatagccatcaccaggcactatgtgctattgggtaaagctccctcttcggagggagcatcagag

SEQ ID NO: 18426 - RNA, 88 nt, synthetic construct
  misc_feature 1..88: note = engineered ribonucleic acid scaffold (ERS) sequence
  source 1..88: mol_type = other RNA
actggcgcttctatctgattactctgatagccatcaccagccactatgtggtatgggtaaagctccctcttcggagggagcatcagag

SEQ ID NO: 18427 - RNA, 88 nt, synthetic construct
  misc_feature 1..88: note = engineered ribonucleic acid scaffold (ERS) sequence
  source 1..88: mol_type = other RNA
actggcgcttctatctgattactctgatagccatcaccagctactatgtagtatgggtaaagctccctcttcggagggagcatcagag

SEQ ID NO: 18428 - RNA, 88 nt, synthetic construct
  misc_feature 1..88: note = engineered ribonucleic acid scaffold (ERS) sequence
  source 1..88: mol_type = other RNA
actggcgcttctatctgattactctgatagccatcaccagcgattatgtcgtatgggtaaagctccctcttcggagggagcatcagag

SEQ ID NO: 18429 - RNA, 88 nt, synthetic construct
  misc_feature 1..88: note = engineered ribonucleic acid scaffold (ERS) sequence
  source 1..88: mol_type = other RNA
actggcgcttctatctgattactctgatagccatcaccagcgacgatgtcgtatgggtaaagctccctcttcggagggagcatcagag

SEQ ID NO: 18430 - RNA, 88 nt, synthetic construct
  misc_feature 1..88: note = engineered ribonucleic acid scaffold (ERS) sequence
  source 1..88: mol_type = other RNA
actggcgcttctatctgattactctgatagccatcaccagcgactctgtcgtatgggtaaagctccctcttcggagggagcatcagag

SEQ ID NO: 18431 - RNA, 88 nt, synthetic construct
  misc_feature 1..88: note = engineered ribonucleic acid scaffold (ERS) sequence
  source 1..88: mol_type = other RNA
actggcgcttctatctgattactctgatagccatcaccagcgactatgtcgtgtgggtaaagctccctcttcggagggagcatcagag

SEQ ID NO: 18432 - RNA, 89 nt, synthetic construct
  misc_feature 1..89: note = engineered ribonucleic acid scaffold (ERS) sequence
  source 1..89: mol_type = other RNA
actggcgcttctatctgattactctgatagccatcaccagcgactatgtcgtattgggtaaagctccctcttcggagggagcatcagag

SEQ ID NO: 18433 - RNA, 89 nt, synthetic construct
  misc_feature 1..89: note = engineered ribonucleic acid scaffold (ERS) sequence
  source 1..89: mol_type = other RNA
actggcgcttctatctgattactctgatagccatcaccagcgactatgtcgtatggagtaaagctccctcttcggagggagcatcagag

SEQ ID NO: 18434 - RNA, 89 nt, synthetic construct
  misc_feature 1..89: note = engineered ribonucleic acid scaffold (ERS) sequence
  source 1..89: mol_type = other RNA
actggcgcttctatctgattactctgatagccatcaccagcgactatgtcgtatggcgtaaagctccctcttcggagggagcatcagag

SEQ ID NO: 18435 - RNA, 89 nt, synthetic construct
  misc_feature 1..89: note = engineered ribonucleic acid scaffold (ERS) sequence
  source 1..89: mol_type = other RNA
actggcgcttctatctgattactctgatagccatcaccagcgactatgtcgtatggtgtaaagctccctcttcggagggagcatcagag

SEQ ID NO: 18436 - RNA, 89 nt, synthetic construct
  misc_feature 1..89: note = engineered ribonucleic acid scaffold (ERS) sequence
  source 1..89: mol_type = other RNA
actggcgcttctatctgattactctgatagccatcaccagcgactatgtcgtatgggctaaagctccctcttcggagggagcatcagag

SEQ ID NO: 18437 - RNA, 86 nt, synthetic construct
  misc_feature 1..86: note = engineered ribonucleic acid scaffold (ERS) sequence
  source 1..86: mol_type = other RNA
actggcgcttctatctgattactctgatagccatcaccagcgactatgtcgtatgggtagctccctcttcggagggagcatcagag

SEQ ID NO: 18438 - RNA, 88 nt, synthetic construct
  misc_feature 1..88: note = engineered ribonucleic acid scaffold (ERS) sequence
  source 1..88: mol_type = other RNA
actggcgcttctatctgattactctgatagccatcaccagcgactatgtcgtatgggtgaagctccctcttcggagggagcatcagag

SEQ ID NO: 18439 - RNA, 88 nt, synthetic construct
  misc_feature 1..88: note = engineered ribonucleic acid scaffold (ERS) sequence
  source 1..88: mol_type = other RNA
actggcgcttctatctgattactctgatagccatcaccagcgactatgtcgtatgggtagagctccctcttcggagggagcatcagag

SEQ ID NO: 18440 - RNA, 89 nt, synthetic construct
  misc_feature 1..89: note = engineered ribonucleic acid scaffold (ERS) sequence
  source 1..89: mol_type = other RNA
actggcgcttctatctgattactctgagctgccaacaccagcgactatgtcgtatgggtaaagctccctcttcggagggagcatcagag

SEQ ID NO: 18441 - RNA, 89 nt, synthetic construct
  misc_feature 1..89: note = engineered ribonucleic acid scaffold (ERS) sequence
  source 1..89: mol_type = other RNA
actggcgcttctatctgattactctgagctgccagcaccagcgactatgtcgtatgggtaaagctccctcttcggagggagcatcagag

SEQ ID NO: 18442 - RNA, 89 nt, synthetic construct
  misc_feature 1..89: note = engineered ribonucleic acid scaffold (ERS) sequence
  source 1..89: mol_type = other RNA
actggcgcttctatctgattactctgagctgccatgaccagcgactatgtcgtatggctaaagctccctcttcggagggagcatcagag

SEQ ID NO: 18443 - RNA, 90 nt, synthetic construct
  misc_feature 1..90: note = engineered ribonucleic acid scaffold (ERS) sequence
  source 1..90: mol_type = other RNA
actggcgcttctatctgattactctgagctgccatgaccagcgactatgtcgtatgggctaaagctccctcttcggagggagcatcagag

SEQ ID NO: 18444 - RNA, 89 nt, synthetic construct
  misc_feature 1..89: note = engineered ribonucleic acid scaffold (ERS) sequence
  source 1..89: mol_type = other RNA
actggcgcttctatctgattactctgagctgccatgaccagcgactatgtcgtatgggtaaagctccctcttcggagggagcatcagag

SEQ ID NO: 18445 - RNA, 89 nt, synthetic construct
  misc_feature 1..89: note = engineered ribonucleic acid scaffold (ERS) sequence
  source 1..89: mol_type = other RNA
actggcgcttctatctgattactctgagctgccatccccagcgactatgtcgtatgggtaaagctccctcttcggagggagcatcagag

SEQ ID NO: 18446 - RNA, 90 nt, synthetic construct
  misc_feature 1..90: note = engineered ribonucleic acid scaffold (ERS) sequence
  source 1..90: mol_type = other RNA
actggcgcttctatctgattactctgagctgccatcgccagcgactatgtcgtatggcgtaaagctccctcttcggagggagcatcagag

SEQ ID NO: 18447 - RNA, 89 nt, synthetic construct
  misc_feature 1..89: note = engineered ribonucleic acid scaffold (ERS) sequence
  source 1..89: mol_type = other RNA
actggcgcttctatctgattactctgagctgccatcgccagcgactatgtcgtatgggtaaagctccctcttcggagggagcatcagag

SEQ ID NO: 18448 - RNA, 89 nt, synthetic construct
  misc_feature 1..89: note = engineered ribonucleic acid scaffold (ERS) sequence
  source 1..89: mol_type = other RNA
actggcgcttctatctgattactctgagctgccatctccagcgactatgtcgtatgggtaaagctccctcttcggagggagcatcagag

SEQ ID NO: 18449 - RNA, 89 nt, synthetic construct
  misc_feature 1..89: note = engineered ribonucleic acid scaffold (ERS) sequence
  source 1..89: mol_type = other RNA
actggcgcttctatctgattactctgagctgccatcacctgcgactatgtcgtaagggtaaagctccctcttcggagggagcatcagag

SEQ ID NO: 18450 - RNA, 89 nt, synthetic construct
  misc_feature 1..89: note = engineered ribonucleic acid scaffold (ERS) sequence
  source 1..89: mol_type = other RNA
actggcgcttctatctgattactctgagctgccatcaccagagactatgtcttatgggtaaagctccctcttcggagggagcatcagag

SEQ ID NO: 18451 - RNA, 89 nt, synthetic construct
  misc_feature 1..89: note = engineered ribonucleic acid scaffold (ERS) sequence
  source 1..89: mol_type = other RNA
actggcgcttctatctgattactctgagctgccatcaccagggactatgtcctatgggtaaagctccctcttcggagggagcatcagag

SEQ ID NO: 18452 - RNA, 90 nt, synthetic construct
  misc_feature 1..90: note = engineered ribonucleic acid scaffold (ERS) sequence
  source 1..90: mol_type = other RNA
actggcgcttctatctgattactctgagctgccatcaccaggcactatgtgctattgggtaaagctccctcttcggagggagcatcagag

SEQ ID NO: 18453 - RNA, 89 nt, synthetic construct
  misc_feature 1..89: note = engineered ribonucleic acid scaffold (ERS) sequence
  source 1..89: mol_type = other RNA
actggcgcttctatctgattactctgagctgccatcaccagccactatgtggtatgggtaaagctccctcttcggagggagcatcagag

SEQ ID NO: 18454 - RNA, 89 nt, synthetic construct
  misc_feature 1..89: note = engineered ribonucleic acid scaffold (ERS) sequence
  source 1..89: mol_type = other RNA
actggcgcttctatctgattactctgagctgccatcaccagctactatgtagtatgggtaaagctccctcttcggagggagcatcagag

SEQ ID NO: 18455 - RNA, 89 nt, synthetic construct
  misc_feature 1..89: note = engineered ribonucleic acid scaffold (ERS) sequence
  source 1..89: mol_type = other RNA
actggcgcttctatctgattactctgagctgccatcaccagcgattatgtcgtatgggtaaagctccctcttcggagggagcatcagag

SEQ ID NO: 18456 - RNA, 89 nt, synthetic construct
  misc_feature 1..89: note = engineered ribonucleic acid scaffold (ERS) sequence
  source 1..89: mol_type = other RNA
actggcgcttctatctgattactctgagctgccatcaccagcgacgatgtcgtatgggtaaagctccctcttcggagggagcatcagag

SEQ ID NO: 18457 - RNA, 89 nt, synthetic construct
  misc_feature 1..89: note = engineered ribonucleic acid scaffold (ERS) sequence
  source 1..89: mol_type = other RNA
actggcgcttctatctgattactctgagctgccatcaccagcgactctgtcgtatgggtaaagctccctcttcggagggagcatcagag

SEQ ID NO: 18458 - RNA, 89 nt, synthetic construct
  misc_feature 1..89: note = engineered ribonucleic acid scaffold (ERS) sequence
  source 1..89: mol_type = other RNA
actggcgcttctatctgattactctgagctgccatcaccagcgactatgtcgtgtgggtaaagctccctcttcggagggagcatcagag

SEQ ID NO: 18459 - RNA, 90 nt, synthetic construct
  misc_feature 1..90: note = engineered ribonucleic acid scaffold (ERS) sequence
  source 1..90: mol_type = other RNA
actggcgcttctatctgattactctgagctgccatcaccagcgactatgtcgtattgggtaaagctccctcttcggagggagcatcagag

SEQ ID NO: 18460 - RNA, 90 nt, synthetic construct
  misc_feature 1..90: note = engineered ribonucleic acid scaffold (ERS) sequence
  source 1..90: mol_type = other RNA
actggcgcttctatctgattactctgagctgccatcaccagcgactatgtcgtatggagtaaagctccctcttcggagggagcatcagag

SEQ ID NO: 18461 - RNA, 90 nt, synthetic construct
  misc_feature 1..90: note = engineered ribonucleic acid scaffold (ERS) sequence
  source 1..90: mol_type = other RNA
actggcgcttctatctgattactctgagctgccatcaccagcgactatgtcgtatggcgtaaagctccctcttcggagggagcatcagag

SEQ ID NO: 18462 - RNA, 90 nt, synthetic construct
  misc_feature 1..90: note = engineered ribonucleic acid scaffold (ERS) sequence
  source 1..90: mol_type = other RNA
actggcgcttctatctgattactctgagctgccatcaccagcgactatgtcgtatggtgtaaagctccctcttcggagggagcatcagag

SEQ ID NO: 18463 - RNA, 90 nt, synthetic construct
  misc_feature 1..90: note = engineered ribonucleic acid scaffold (ERS) sequence
  source 1..90: mol_type = other RNA
actggcgcttctatctgattactctgagctgccatcaccagcgactatgtcgtatgggctaaagctccctcttcggagggagcatcagag

SEQ ID NO: 18464 - RNA, 87 nt, synthetic construct
  misc_feature 1..87: note = engineered ribonucleic acid scaffold (ERS) sequence
  source 1..87: mol_type = other RNA
actggcgcttctatctgattactctgagctgccatcaccagcgactatgtcgtatgggtagctccctcttcggagggagcatcagag

SEQ ID NO: 18465 - RNA, 89 nt, synthetic construct
  misc_feature 1..89: note = engineered ribonucleic acid scaffold (ERS) sequence
  source 1..89: mol_type = other RNA
actggcgcttctatctgattactctgagctgccatcaccagcgactatgtcgtatgggtgaagctccctcttcggagggagcatcagag

SEQ ID NO: 18466 - RNA, 89 nt, synthetic construct
  misc_feature 1..89: note = engineered ribonucleic acid scaffold (ERS) sequence
  source 1..89: mol_type = other RNA
actggcgcttctatctgattactctgagctgccatcaccagcgactatgtcgtatgggtagagctccctcttcggagggagcatcagag

SEQ ID NO: 18467 - RNA, 89 nt, synthetic construct
  misc_feature 1..89: note = engineered ribonucleic acid scaffold (ERS) sequence
  source 1..89: mol_type = other RNA
actggcacttctatctgattactctgagtagccaacaccagcgactatgtcgtatgggtaaagctccctcttcggagggagcatcagag

SEQ ID NO: 18468 - RNA, 89 nt, synthetic construct
  misc_feature 1..89: note = engineered ribonucleic acid scaffold (ERS) sequence
  source 1..89: mol_type = other RNA
actggcacttctatctgattactctgagtagccagcaccagcgactatgtcgtatgggtaaagctccctcttcggagggagcatcagag

SEQ ID NO: 18469 - RNA, 89 nt, synthetic construct
  misc_feature 1..89: note = engineered ribonucleic acid scaffold (ERS) sequence
  source 1..89: mol_type = other RNA
actggcacttctatctgattactctgagtagccatgaccagcgactatgtcgtatggctaaagctccctcttcggagggagcatcagag

SEQ ID NO: 18470 - RNA, 90 nt, synthetic construct
  misc_feature 1..90: note = engineered ribonucleic acid scaffold (ERS) sequence
  source 1..90: mol_type = other RNA
actggcacttctatctgattactctgagtagccatgaccagcgactatgtcgtatgggctaaagctccctcttcggagggagcatcagag

SEQ ID NO: 18471 - RNA, 89 nt, synthetic construct
  misc_feature 1..89: note = engineered ribonucleic acid scaffold (ERS) sequence
  source 1..89: mol_type = other RNA
actggcacttctatctgattactctgagtagccatgaccagcgactatgtcgtatgggtaaagctccctcttcggagggagcatcagag

SEQ ID NO: 18472 - RNA, 89 nt, synthetic construct
  misc_feature 1..89: note = engineered ribonucleic acid scaffold (ERS) sequence
  source 1..89: mol_type = other RNA
actggcacttctatctgattactctgagtagccatccccagcgactatgtcgtatgggtaaagctccctcttcggagggagcatcagag

SEQ ID NO: 18473 - RNA, 90 nt, synthetic construct
  misc_feature 1..90: note = engineered ribonucleic acid scaffold (ERS) sequence
  source 1..90: mol_type = other RNA
actggcacttctatctgattactctgagtagccatcgccagcgactatgtcgtatggcgtaaagctccctcttcggagggagcatcagag

SEQ ID NO: 18474 - RNA, 89 nt, synthetic construct
  misc_feature 1..89: note = engineered ribonucleic acid scaffold (ERS) sequence
  source 1..89: mol_type = other RNA
actggcacttctatctgattactctgagtagccatcgccagcgactatgtcgtatgggtaaagctccctcttcggagggagcatcagag

SEQ ID NO: 18475 - RNA, 89 nt, synthetic construct
  misc_feature 1..89: note = engineered ribonucleic acid scaffold (ERS) sequence
  source 1..89: mol_type = other RNA
actggcacttctatctgattactctgagtagccatctccagcgactatgtcgtatgggtaaagctccctcttcggagggagcatcagag

SEQ ID NO: 18476 - RNA, 89 nt, synthetic construct
  misc_feature 1..89: note = engineered ribonucleic acid scaffold (ERS) sequence
  source 1..89: mol_type = other RNA
actggcacttctatctgattactctgagtagccatcacctgcgactatgtcgtaagggtaaagctccctcttcggagggagcatcagag

SEQ ID NO: 18477 - RNA, 89 nt, synthetic construct
  misc_feature 1..89: note = engineered ribonucleic acid scaffold (ERS) sequence
  source 1..89: mol_type = other RNA
actggcacttctatctgattactctgagtagccatcaccagagactatgtcttatgggtaaagctccctcttcggagggagcatcagag

SEQ ID NO: 18478 - RNA, 89 nt, synthetic construct
  misc_feature 1..89: note = engineered ribonucleic acid scaffold (ERS) sequence
  source 1..89: mol_type = other RNA
actggcacttctatctgattactctgagtagccatcaccagggactatgtcctatgggtaaagctccctcttcggagggagcatcagag

SEQ ID NO: 18479 - RNA, 90 nt, synthetic construct
  misc_feature 1..90: note = engineered ribonucleic acid scaffold (ERS) sequence
  source 1..90: mol_type = other RNA
actggcacttctatctgattactctgagtagccatcaccaggcactatgtgctattgggtaaagctccctcttcggagggagcatcagag

SEQ ID NO: 18480 - RNA, 89 nt, synthetic construct
  misc_feature 1..89: note = engineered ribonucleic acid scaffold (ERS) sequence
  source 1..89: mol_type = other RNA
actggcacttctatctgattactctgagtagccatcaccagccactatgtggtatgggtaaagctccctcttcggagggagcatcagag

SEQ ID NO: 18481 - RNA, 89 nt, synthetic construct
  misc_feature 1..89: note = engineered ribonucleic acid scaffold (ERS) sequence
  source 1..89: mol_type = other RNA
actggcacttctatctgattactctgagtagccatcaccagctactatgtagtatgggtaaagctccctcttcggagggagcatcagag

SEQ ID NO: 18482 - RNA, 89 nt, synthetic construct
  misc_feature 1..89: note = engineered ribonucleic acid scaffold (ERS) sequence
  source 1..89: mol_type = other RNA
actggcacttctatctgattactctgagtagccatcaccagcgattatgtcgtatgggtaaagctccctcttcggagggagcatcagag

SEQ ID NO: 18483 - RNA, 89 nt, synthetic construct
  misc_feature 1..89: note = engineered ribonucleic acid scaffold (ERS) sequence
  source 1..89: mol_type = other RNA
actggcacttctatctgattactctgagtagccatcaccagcgacgatgtcgtatgggtaaagctccctcttcggagggagcatcagag

SEQ ID NO: 18484 - RNA, 89 nt, synthetic construct
  misc_feature 1..89: note = engineered ribonucleic acid scaffold (ERS) sequence
  source 1..89: mol_type = other RNA
actggcacttctatctgattactctgagtagccatcaccagcgactctgtcgtatgggtaaagctccctcttcggagggagcatcagag

SEQ ID NO: 18485 - RNA, 89 nt, synthetic construct
  misc_feature 1..89: note = engineered ribonucleic acid scaffold (ERS) sequence
  source 1..89: mol_type = other RNA
actggcacttctatctgattactctgagtagccatcaccagcgactatgtcgtgtgggtaaagctccctcttcggagggagcatcagag

SEQ ID NO: 18486 - RNA, 90 nt, synthetic construct
  misc_feature 1..90: note = engineered ribonucleic acid scaffold (ERS) sequence
  source 1..90: mol_type = other RNA
actggcacttctatctgattactctgagtagccatcaccagcgactatgtcgtattgggtaaagctccctcttcggagggagcatcagag

SEQ ID NO: 18487 - RNA, 90 nt, synthetic construct
  misc_feature 1..90: note = engineered ribonucleic acid scaffold (ERS) sequence
  source 1..90: mol_type = other RNA
actggcacttctatctgattactctgagtagccatcaccagcgactatgtcgtatggagtaaagctccctcttcggagggagcatcagag

SEQ ID NO: 18488 - RNA, 90 nt, synthetic construct
  misc_feature 1..90: note = engineered ribonucleic acid scaffold (ERS) sequence
  source 1..90: mol_type = other RNA
actggcacttctatctgattactctgagtagccatcaccagcgactatgtcgtatggcgtaaagctccctcttcggagggagcatcagag

SEQ ID NO: 18489 - RNA, 90 nt, synthetic construct
  misc_feature 1..90: note = engineered ribonucleic acid scaffold (ERS) sequence
  source 1..90: mol_type = other RNA
actggcacttctatctgattactctgagtagccatcaccagcgactatgtcgtatggtgtaaagctccctcttcggagggagcatcagag

SEQ ID NO: 18490 - RNA, 90 nt, synthetic construct
  misc_feature 1..90: note = engineered ribonucleic acid scaffold (ERS) sequence
  source 1..90: mol_type = other RNA
actggcacttctatctgattactctgagtagccatcaccagcgactatgtcgtatgggctaaagctccctcttcggagggagcatcagag

SEQ ID NO: 18491 - RNA, 87 nt, synthetic construct
  misc_feature 1..87: note = engineered ribonucleic acid scaffold (ERS) sequence
  source 1..87: mol_type = other RNA
actggcacttctatctgattactctgagtagccatcaccagcgactatgtcgtatgggtagctccctcttcggagggagcatcagag

SEQ ID NO: 18492 - RNA, 89 nt, synthetic construct
  misc_feature 1..89: note = engineered ribonucleic acid scaffold (ERS) sequence
  source 1..89: mol_type = other RNA
actggcacttctatctgattactctgagtagccatcaccagcgactatgtcgtatgggtgaagctccctcttcggagggagcatcagag

SEQ ID NO: 18493 - RNA, 89 nt, synthetic construct
  misc_feature 1..89: note = engineered ribonucleic acid scaffold (ERS) sequence
  source 1..89: mol_type = other RNA
actggcacttctatctgattactctgagtagccatcaccagcgactatgtcgtatgggtagagctccctcttcggagggagcatcagag

SEQ ID NO: 18494 - RNA, 89 nt, synthetic construct
  misc_feature 1..89: note = engineered ribonucleic acid scaffold (ERS) sequence
  source 1..89: mol_type = other RNA
actggcgcttctatctgattactctgagtagccaacaccagcgactatgtcgtatgggtaaagctccctcttcggagggagcatcagag

SEQ ID NO: 18495 - RNA, 89 nt, synthetic construct
  misc_feature 1..89: note = engineered ribonucleic acid scaffold (ERS) sequence
  source 1..89: mol_type = other RNA
actggcgcttctatctgattactctgagtagccagcaccagcgactatgtcgtatgggtaaagctccctcttcggagggagcatcagag

SEQ ID NO: 18496 - RNA, 89 nt, synthetic construct
  misc_feature 1..89: note = engineered ribonucleic acid scaffold (ERS) sequence
  source 1..89: mol_type = other RNA
actggcgcttctatctgattactctgagtagccatgaccagcgactatgtcgtatggctaaagctccctcttcggagggagcatcagag

SEQ ID NO: 18497 - RNA, 90 nt, synthetic construct
  misc_feature 1..90: note = engineered ribonucleic acid scaffold (ERS) sequence
  source 1..90: mol_type = other RNA
actggcgcttctatctgattactctgagtagccatgaccagcgactatgtcgtatgggctaaagctccctcttcggagggagcatcagag

SEQ ID NO: 18498 - RNA, 89 nt, synthetic construct
  misc_feature 1..89: note = engineered ribonucleic acid scaffold (ERS) sequence
  source 1..89: mol_type = other RNA
actggcgcttctatctgattactctgagtagccatgaccagcgactatgtcgtatgggtaaagctccctcttcggagggagcatcagag

SEQ ID NO: 18499 - RNA, 89 nt, synthetic construct
  misc_feature 1..89: note = engineered ribonucleic acid scaffold (ERS) sequence
  source 1..89: mol_type = other RNA
actggcgcttctatctgattactctgagtagccatccccagcgactatgtcgtatgggtaaagctccctcttcggagggagcatcagag

SEQ ID NO: 18500 - RNA, 90 nt, synthetic construct
  misc_feature 1..90: note = engineered ribonucleic acid scaffold (ERS) sequence
  source 1..90: mol_type = other RNA
actggcgcttctatctgattactctgagtagccatcgccagcgactatgtcgtatggcgtaaagctccctcttcggagggagcatcagag

SEQ ID NO: 18501 - RNA, 89 nt, synthetic construct
  misc_feature 1..89: note = engineered ribonucleic acid scaffold (ERS) sequence
  source 1..89: mol_type = other RNA
actggcgcttctatctgattactctgagtagccatcgccagcgactatgtcgtatgggtaaagctccctcttcggagggagcatcagag

SEQ ID NO: 18502 - RNA, 89 nt, synthetic construct
  misc_feature 1..89: note = engineered ribonucleic acid scaffold (ERS) sequence
  source 1..89: mol_type = other RNA
actggcgcttctatctgattactctgagtagccatctccagcgactatgtcgtatgggtaaagctccctcttcggagggagcatcagag

SEQ ID NO: 18503 - RNA, 89 nt, synthetic construct
  misc_feature 1..89: note = engineered ribonucleic acid scaffold (ERS) sequence
  source 1..89: mol_type = other RNA
actggcgcttctatctgattactctgagtagccatcacctgcgactatgtcgtaagggtaaagctccctcttcggagggagcatcagag

SEQ ID NO: 18504 - RNA, 89 nt, synthetic construct
  misc_feature 1..89: note = engineered ribonucleic acid scaffold (ERS) sequence
  source 1..89: mol_type = other RNA
actggcgcttctatctgattactctgagtagccatcaccagagactatgtcttatgggtaaagctccctcttcggagggagcatcagag

SEQ ID NO: 18505 - RNA, 89 nt, synthetic construct
  misc_feature 1..89: note = engineered ribonucleic acid scaffold (ERS) sequence
  source 1..89: mol_type = other RNA
actggcgcttctatctgattactctgagtagccatcaccagggactatgtcctatgggtaaagctccctcttcggagggagcatcagag

SEQ ID NO: 18506 - RNA, 90 nt, synthetic construct
  misc_feature 1..90: note = engineered ribonucleic acid scaffold (ERS) sequence
  source 1..90: mol_type = other RNA
actggcgcttctatctgattactctgagtagccatcaccaggcactatgtgctattgggtaaagctccctcttcggagggagcatcagag

SEQ ID NO: 18507 - RNA, 89 nt, synthetic construct
  misc_feature 1..89: note = engineered ribonucleic acid scaffold (ERS) sequence
  source 1..89: mol_type = other RNA
actggcgcttctatctgattactctgagtagccatcaccagccactatgtggtatgggtaaagctccctcttcggagggagcatcagag

SEQ ID NO: 18508 - RNA, 89 nt, synthetic construct
  misc_feature 1..89: note = engineered ribonucleic acid scaffold (ERS) sequence
  source 1..89: mol_type = other RNA
actggcgcttctatctgattactctgagtagccatcaccagctactatgtagtatgggtaaagctccctcttcggagggagcatcagag

SEQ ID NO: 18509 - RNA, 89 nt, synthetic construct
  misc_feature 1..89: note = engineered ribonucleic acid scaffold (ERS) sequence
  source 1..89: mol_type = other RNA
actggcgcttctatctgattactctgagtagccatcaccagcgattatgtcgtatgggtaaagctccctcttcggagggagcatcagag

SEQ ID NO: 18510 - RNA, 89 nt, synthetic construct
  misc_feature 1..89: note = engineered ribonucleic acid scaffold (ERS) sequence
  source 1..89: mol_type = other RNA
actggcgcttctatctgattactctgagtagccatcaccagcgacgatgtcgtatgggtaaagctccctcttcggagggagcatcagag

SEQ ID NO: 18511 - RNA, 89 nt, synthetic construct
  misc_feature 1..89: note = engineered ribonucleic acid scaffold (ERS) sequence
  source 1..89: mol_type = other RNA
actggcgcttctatctgattactctgagtagccatcaccagcgactctgtcgtatgggtaaagctccctcttcggagggagcatcagag

SEQ ID NO: 18512 - RNA, 89 nt, synthetic construct
  misc_feature 1..89: note = engineered ribonucleic acid scaffold (ERS) sequence
  source 1..89: mol_type = other RNA
actggcgcttctatctgattactctgagtagccatcaccagcgactatgtcgtgtgggtaaagctccctcttcggagggagcatcagag

SEQ ID NO: 18513 - RNA, 90 nt, synthetic construct
  misc_feature 1..90: note = engineered ribonucleic acid scaffold (ERS) sequence
  source 1..90: mol_type = other RNA
actggcgcttctatctgattactctgagtagccatcaccagcgactatgtcgtattgggtaaagctccctcttcggagggagcatcagag

SEQ ID NO: 18514 - RNA, 90 nt, synthetic construct
  misc_feature 1..90: note = engineered ribonucleic acid scaffold (ERS) sequence
  source 1..90: mol_type = other RNA
actggcgcttctatctgattactctgagtagccatcaccagcgactatgtcgtatggagtaaagctccctcttcggagggagcatcagag

SEQ ID NO: 18515 - RNA, 90 nt, synthetic construct
  misc_feature 1..90: note = engineered ribonucleic acid scaffold (ERS) sequence
  source 1..90: mol_type = other RNA
actggcgcttctatctgattactctgagtagccatcaccagcgactatgtcgtatggcgtaaagctccctcttcggagggagcatcagag

SEQ ID NO: 18516 - RNA, 90 nt, synthetic construct
  misc_feature 1..90: note = engineered ribonucleic acid scaffold (ERS) sequence
  source 1..90: mol_type = other RNA
actggcgcttctatctgattactctgagtagccatcaccagcgactatgtcgtatggtgtaaagctccctcttcggagggagcatcagag

SEQ ID NO: 18517 - RNA, 90 nt, synthetic construct
  misc_feature 1..90: note = engineered ribonucleic acid scaffold (ERS) sequence
  source 1..90: mol_type = other RNA
actggcgcttctatctgattactctgagtagccatcaccagcgactatgtcgtatgggctaaagctccctcttcggagggagcatcagag

SEQ ID NO: 18518 - RNA, 87 nt, synthetic construct
  misc_feature 1..87: note = engineered ribonucleic acid scaffold (ERS) sequence
  source 1..87: mol_type = other RNA
actggcgcttctatctgattactctgagtagccatcaccagcgactatgtcgtatgggtagctccctcttcggagggagcatcagag

SEQ ID NO: 18519 - RNA, 89 nt, synthetic construct
  misc_feature 1..89: note = engineered ribonucleic acid scaffold (ERS) sequence
  source 1..89: mol_type = other RNA
actggcgcttctatctgattactctgagtagccatcaccagcgactatgtcgtatgggtgaagctccctcttcggagggagcatcagag

SEQ ID NO: 18520 - RNA, 89 nt, synthetic construct
  misc_feature 1..89: note = engineered ribonucleic acid scaffold (ERS) sequence
  source 1..89: mol_type = other RNA
actggcgcttctatctgattactctgagtagccatcaccagcgactatgtcgtatgggtagagctccctcttcggagggagcatcagag

SEQ ID NO: 18521 - RNA, 88 nt, synthetic construct
  misc_feature 1..88: note = engineered ribonucleic acid scaffold (ERS) sequence
  source 1..88: mol_type = other RNA
actggcgcttctatctgattactctgagcaccaacaccagcgactatgtcgtatgggtaaagctccctcttcggagggagcatcagag

SEQ ID NO: 18522 - RNA, 88 nt, synthetic construct
  misc_feature 1..88: note = engineered ribonucleic acid scaffold (ERS) sequence
  source 1..88: mol_type = other RNA
actggcgcttctatctgattactctgagcaccagcaccagcgactatgtcgtatgggtaaagctccctcttcggagggagcatcagag

SEQ ID NO: 18523 - RNA, 88 nt, synthetic construct
  misc_feature 1..88: note = engineered ribonucleic acid scaffold (ERS) sequence
  source 1..88: mol_type = other RNA
actggcgcttctatctgattactctgagcaccatgaccagcgactatgtcgtatggctaaagctccctcttcggagggagcatcagag

SEQ ID NO: 18524 - RNA, 89 nt, synthetic construct
  misc_feature 1..89: note = engineered ribonucleic acid scaffold (ERS) sequence
  source 1..89: mol_type = other RNA
actggcgcttctatctgattactctgagcaccatgaccagcgactatgtcgtatgggctaaagctccctcttcggagggagcatcagag

SEQ ID NO: 18525 - RNA, 88 nt, synthetic construct
  misc_feature 1..88: note = engineered ribonucleic acid scaffold (ERS) sequence
  source 1..88: mol_type = other RNA
actggcgcttctatctgattactctgagcaccatgaccagcgactatgtcgtatgggtaaagctccctcttcggagggagcatcagag

SEQ ID NO: 18526 - RNA, 88 nt, synthetic construct
  misc_feature 1..88: note = engineered ribonucleic acid scaffold (ERS) sequence
  source 1..88: mol_type = other RNA
actggcgcttctatctgattactctgagcaccatccccagcgactatgtcgtatgggtaaagctccctcttcggagggagcatcagag

SEQ ID NO: 18527 - RNA, 89 nt, synthetic construct
  misc_feature 1..89: note = engineered ribonucleic acid scaffold (ERS) sequence
  source 1..89: mol_type = other RNA
actggcgcttctatctgattactctgagcaccatcgccagcgactatgtcgtatggcgtaaagctccctcttcggagggagcatcagag

SEQ ID NO: 18528 - RNA, 88 nt, synthetic construct
  misc_feature 1..88: note = engineered ribonucleic acid scaffold (ERS) sequence
  source 1..88: mol_type = other RNA
actggcgcttctatctgattactctgagcaccatcgccagcgactatgtcgtatgggtaaagctccctcttcggagggagcatcagag

SEQ ID NO: 18529 - RNA, 88 nt, synthetic construct
  misc_feature 1..88: note = engineered ribonucleic acid scaffold (ERS) sequence
  source 1..88: mol_type = other RNA
actggcgcttctatctgattactctgagcaccatctccagcgactatgtcgtatgggtaaagctccctcttcggagggagcatcagag

SEQ ID NO: 18530 - RNA, 88 nt, synthetic construct
  misc_feature 1..88: note = engineered ribonucleic acid scaffold (ERS) sequence
  source 1..88: mol_type = other RNA
actggcgcttctatctgattactctgagcaccatcacctgcgactatgtcgtaagggtaaagctccctcttcggagggagcatcagag

SEQ ID NO: 18531 - RNA, 88 nt, synthetic construct
  misc_feature 1..88: note = engineered ribonucleic acid scaffold (ERS) sequence
  source 1..88: mol_type = other RNA
actggcgcttctatctgattactctgagcaccatcaccagagactatgtcttatgggtaaagctccctcttcggagggagcatcagag

SEQ ID NO: 18532 - RNA, 88 nt, synthetic construct
  misc_feature 1..88: note = engineered ribonucleic acid scaffold (ERS) sequence
  source 1..88: mol_type = other RNA
actggcgcttctatctgattactctgagcaccatcaccagggactatgtcctatgggtaaagctccctcttcggagggagcatcagag

SEQ ID NO: 18533 - RNA, 89 nt, synthetic construct
  misc_feature 1..89: note = engineered ribonucleic acid scaffold (ERS) sequence
  source 1..89: mol_type = other RNA
actggcgcttctatctgattactctgagcaccatcaccaggcactatgtgctattgggtaaagctccctcttcggagggagcatcagag

SEQ ID NO: 18534 - RNA, 88 nt, synthetic construct
  misc_feature 1..88: note = engineered ribonucleic acid scaffold (ERS) sequence
  source 1..88: mol_type = other RNA
actggcgcttctatctgattactctgagcaccatcaccagccactatgtggtatgggtaaagctccctcttcggagggagcatcagag

SEQ ID NO: 18535 - RNA, 88 nt, synthetic construct
  misc_feature 1..88: note = engineered ribonucleic acid scaffold (ERS) sequence
  source 1..88: mol_type = other RNA
actggcgcttctatctgattactctgagcaccatcaccagctactatgtagtatgggtaaagctccctcttcggagggagcatcagag

SEQ ID NO: 18536 - RNA, 88 nt, synthetic construct
  misc_feature 1..88: note = engineered ribonucleic acid scaffold (ERS) sequence
  source 1..88: mol_type = other RNA
actggcgcttctatctgattactctgagcaccatcaccagcgattatgtcgtatgggtaaagctccctcttcggagggagcatcagag

SEQ ID NO: 18537 - RNA, 88 nt, synthetic construct
  misc_feature 1..88: note = engineered ribonucleic acid scaffold (ERS) sequence
  source 1..88: mol_type = other RNA
actggcgcttctatctgattactctgagcaccatcaccagcgacgatgtcgtatgggtaaagctccctcttcggagggagcatcagag

SEQ ID NO: 18538 - RNA, 88 nt, synthetic construct
  misc_feature 1..88: note = engineered ribonucleic acid scaffold (ERS) sequence
  source 1..88: mol_type = other RNA
actggcgcttctatctgattactctgagcaccatcaccagcgactctgtcgtatgggtaaagctccctcttcggagggagcatcagag

SEQ ID NO: 18539 - RNA, 88 nt, synthetic construct
  misc_feature 1..88: note = engineered ribonucleic acid scaffold (ERS) sequence
  source 1..88: mol_type = other RNA
actggcgcttctatctgattactctgagcaccatcaccagcgactatgtcgtgtgggtaaagctccctcttcggagggagcatcagag

SEQ ID NO: 18540 - RNA, 89 nt, synthetic construct
  misc_feature 1..89: note = engineered ribonucleic acid scaffold (ERS) sequence
  source 1..89: mol_type = other RNA
actggcgcttctatctgattactctgagcaccatcaccagcgactatgtcgtattgggtaaagctccctcttcggagggagcatcagag

SEQ ID NO: 18541 - RNA, 89 nt, synthetic construct
  misc_feature 1..89: note = engineered ribonucleic acid scaffold (ERS) sequence
  source 1..89: mol_type = other RNA
actggcgcttctatctgattactctgagcaccatcaccagcgactatgtcgtatggagtaaagctccctcttcggagggagcatcagag

SEQ ID NO: 18542 - RNA, 89 nt, synthetic construct
  misc_feature 1..89: note = engineered ribonucleic acid scaffold (ERS) sequence
  source 1..89: mol_type = other RNA
actggcgcttctatctgattactctgagcaccatcaccagcgactatgtcgtatggcgtaaagctccctcttcggagggagcatcagag

SEQ ID NO: 18543 - RNA, 89 nt, synthetic construct
  misc_feature 1..89: note = engineered ribonucleic acid scaffold (ERS) sequence
  source 1..89: mol_type = other RNA
actggcgcttctatctgattactctgagcaccatcaccagcgactatgtcgtatggtgtaaagctccctcttcggagggagcatcagag

SEQ ID NO: 18544 - RNA, 89 nt, synthetic construct
  misc_feature 1..89: note = engineered ribonucleic acid scaffold (ERS) sequence
  source 1..89: mol_type = other RNA
actggcgcttctatctgattactctgagcaccatcaccagcgactatgtcgtatgggctaaagctccctcttcggagggagcatcagag

SEQ ID NO: 18545 - RNA, 86 nt, synthetic construct
  misc_feature 1..86: note = engineered ribonucleic acid scaffold (ERS) sequence
  source 1..86: mol_type = other RNA
actggcgcttctatctgattactctgagcaccatcaccagcgactatgtcgtatgggtagctccctcttcggagggagcatcagag

SEQ ID NO: 18546 - RNA, 88 nt, synthetic construct
  misc_feature 1..88: note = engineered ribonucleic acid scaffold (ERS) sequence
  source 1..88: mol_type = other RNA
actggcgcttctatctgattactctgagcaccatcaccagcgactatgtcgtatgggtgaagctccctcttcggagggagcatcagag

SEQ ID NO: 18547 - RNA, 88 nt, synthetic construct
  misc_feature 1..88: note = engineered ribonucleic acid scaffold (ERS) sequence
  source 1..88: mol_type = other RNA
actggcgcttctatctgattactctgagcaccatcaccagcgactatgtcgtatgggtagagctccctcttcggagggagcatcagag

SEQ ID NO: 18548 - RNA, 88 nt, synthetic construct
  misc_feature 1..88: note = engineered ribonucleic acid scaffold (ERS) sequence
  source 1..88: mol_type = other RNA
actggcacttctatctgattactctgagcgccaacaccagcgactatgtcgtatgggtaaagctccctcttcggagggagcatcagag

SEQ ID NO: 18549 - RNA, 88 nt, synthetic construct
  misc_feature 1..88: note = engineered ribonucleic acid scaffold (ERS) sequence
  source 1..88: mol_type = other RNA
actggcacttctatctgattactctgagcgccagcaccagcgactatgtcgtatgggtaaagctccctcttcggagggagcatcagag

SEQ ID NO: 18550 - RNA, 88 nt, synthetic construct
  misc_feature 1..88: note = engineered ribonucleic acid scaffold (ERS) sequence
  source 1..88: mol_type = other RNA
actggcacttctatctgattactctgagcgccatgaccagcgactatgtcgtatggctaaagctccctcttcggagggagcatcagag

SEQ ID NO: 18551 - RNA, 89 nt, synthetic construct
  misc_feature 1..89: note = engineered ribonucleic acid scaffold (ERS) sequence
  source 1..89: mol_type = other RNA
actggcacttctatctgattactctgagcgccatgaccagcgactatgtcgtatgggctaaagctccctcttcggagggagcatcagag

SEQ ID NO: 18552 - RNA, 88 nt, synthetic construct
  misc_feature 1..88: note = engineered ribonucleic acid scaffold (ERS) sequence
  source 1..88: mol_type = other RNA
actggcacttctatctgattactctgagcgccatgaccagcgactatgtcgtatgggtaaagctccctcttcggagggagcatcagag

SEQ ID NO: 18553 - RNA, 88 nt, synthetic construct
  misc_feature 1..88: note = engineered ribonucleic acid scaffold (ERS) sequence
  source 1..88: mol_type = other RNA
actggcacttctatctgattactctgagcgccatccccagcgactatgtcgtatgggtaaagctccctcttcggagggagcatcagag

SEQ ID NO: 18554 - RNA, 89 nt, synthetic construct
  misc_feature 1..89: note = engineered ribonucleic acid scaffold (ERS) sequence
  source 1..89: mol_type = other RNA
actggcacttctatctgattactctgagcgccatcgccagcgactatgtcgtatggcgtaaagctccctcttcggagggagcatcagag

SEQ ID NO: 18555 - RNA, 88 nt, synthetic construct
  misc_feature 1..88: note = engineered ribonucleic acid scaffold (ERS) sequence
  source 1..88: mol_type = other RNA
actggcacttctatctgattactctgagcgccatcgccagcgactatgtcgtatgggtaaagctccctcttcggagggagcatcagag

SEQ ID NO: 18556 - RNA, 88 nt, synthetic construct
  misc_feature 1..88: note = engineered ribonucleic acid scaffold (ERS) sequence
  source 1..88: mol_type = other RNA
actggcacttctatctgattactctgagcgccatctccagcgactatgtcgtatgggtaaagctccctcttcggagggagcatcagag

SEQ ID NO: 18557 - RNA, 88 nt, synthetic construct
  misc_feature 1..88: note = engineered ribonucleic acid scaffold (ERS) sequence
  source 1..88: mol_type = other RNA
actggcacttctatctgattactctgagcgccatcacctgcgactatgtcgtaagggtaaagctccctcttcggagggagcatcagag

SEQ ID NO: 18558 - RNA, 88 nt, synthetic construct
  misc_feature 1..88: note = engineered ribonucleic acid scaffold (ERS) sequence
  source 1..88: mol_type = other RNA
actggcacttctatctgattactctgagcgccatcaccagagactatgtcttatgggtaaagctccctcttcggagggagcatcagag

SEQ ID NO: 18559 - RNA, 88 nt, synthetic construct
  misc_feature 1..88: note = engineered ribonucleic acid scaffold (ERS) sequence
  source 1..88: mol_type = other RNA
actggcacttctatctgattactctgagcgccatcaccagggactatgtcctatgggtaaagctccctcttcggagggagcatcagag

SEQ ID NO: 18560 - RNA, 89 nt, synthetic construct
  misc_feature 1..89: note = engineered ribonucleic acid scaffold (ERS) sequence
  source 1..89: mol_type = other RNA
actggcacttctatctgattactctgagcgccatcaccaggcactatgtgctattgggtaaagctccctcttcggagggagcatcagag

SEQ ID NO: 18561 - RNA, 88 nt, synthetic construct
  misc_feature 1..88: note = engineered ribonucleic acid scaffold (ERS) sequence
  source 1..88: mol_type = other RNA
actggcacttctatctgattactctgagcgccatcaccagccactatgtggtatgggtaaagctccctcttcggagggagcatcagag

SEQ ID NO: 18562 - RNA, 88 nt, synthetic construct
  misc_feature 1..88: note = engineered ribonucleic acid scaffold (ERS) sequence
  source 1..88: mol_type = other RNA
actggcacttctatctgattactctgagcgccatcaccagctactatgtagtatgggtaaagctccctcttcggagggagcatcagag

SEQ ID NO: 18563 - RNA, 88 nt, synthetic construct
  misc_feature 1..88: note = engineered ribonucleic acid scaffold (ERS) sequence
  source 1..88: mol_type = other RNA
actggcacttctatctgattactctgagcgccatcaccagcgattatgtcgtatgggtaaagctccctcttcggagggagcatcagag

SEQ ID NO: 18564 - RNA, 88 nt, synthetic construct
  misc_feature 1..88: note = engineered ribonucleic acid scaffold (ERS) sequence
  source 1..88: mol_type = other RNA
actggcacttctatctgattactctgagcgccatcaccagcgacgatgtcgtatgggtaaagctccctcttcggagggagcatcagag

SEQ ID NO: 18565 - RNA, 88 nt, synthetic construct
  misc_feature 1..88: note = engineered ribonucleic acid scaffold (ERS) sequence
  source 1..88: mol_type = other RNA
actggcacttctatctgattactctgagcgccatcaccagcgactctgtcgtatgggtaaagctccctcttcggagggagcatcagag

SEQ ID NO: 18566 - RNA, 88 nt, synthetic construct
  misc_feature 1..88: note = engineered ribonucleic acid scaffold (ERS) sequence
  source 1..88: mol_type = other RNA
actggcacttctatctgattactctgagcgccatcaccagcgactatgtcgtgtgggtaaagctccctcttcggagggagcatcagag

SEQ ID NO: 18567 - RNA, 89 nt, synthetic construct
  misc_feature 1..89: note = engineered ribonucleic acid scaffold (ERS) sequence
  source 1..89: mol_type = other RNA
actggcacttctatctgattactctgagcgccatcaccagcgactatgtcgtattgggtaaagctccctcttcggagggagcatcagag

SEQ ID NO: 18568 - RNA, 89 nt, synthetic construct
  misc_feature 1..89: note = engineered ribonucleic acid scaffold (ERS) sequence
  source 1..89: mol_type = other RNA
actggcacttctatctgattactctgagcgccatcaccagcgactatgtcgtatggagtaaagctccctcttcggagggagcatcagag

SEQ ID NO: 18569 - RNA, 89 nt, synthetic construct
  misc_feature 1..89: note = engineered ribonucleic acid scaffold (ERS) sequence
  source 1..89: mol_type = other RNA
actggcacttctatctgattactctgagcgccatcaccagcgactatgtcgtatggcgtaaagctccctcttcggagggagcatcagag

SEQ ID NO: 18570 - RNA, 89 nt, synthetic construct
  misc_feature 1..89: note = engineered ribonucleic acid scaffold (ERS) sequence
  source 1..89: mol_type = other RNA
actggcacttctatctgattactctgagcgccatcaccagcgactatgtcgtatggtgtaaagctccctcttcggagggagcatcagag

SEQ ID NO: 18571 - RNA, 89 nt, synthetic construct
  misc_feature 1..89: note = engineered ribonucleic acid scaffold (ERS) sequence
  source 1..89: mol_type = other RNA
actggcacttctatctgattactctgagcgccatcaccagcgactatgtcgtatgggctaaagctccctcttcggagggagcatcagag

SEQ ID NO: 18572 - RNA, 86 nt, synthetic construct
  misc_feature 1..86: note = engineered ribonucleic acid scaffold (ERS) sequence
  source 1..86: mol_type = other RNA
actggcacttctatctgattactctgagcgccatcaccagcgactatgtcgtatgggtagctccctcttcggagggagcatcagag

SEQ ID NO: 18573 - RNA, 88 nt, synthetic construct
  misc_feature 1..88: note = engineered ribonucleic acid scaffold (ERS) sequence
  source 1..88: mol_type = other RNA
actggcacttctatctgattactctgagcgccatcaccagcgactatgtcgtatgggtgaagctccctcttcggagggagcatcagag

SEQ ID NO: 18574 - RNA, 88 nt, synthetic construct
  misc_feature 1..88: note = engineered ribonucleic acid scaffold (ERS) sequence
  source 1..88: mol_type = other RNA
actggcacttctatctgattactctgagcgccatcaccagcgactatgtcgtatgggtagagctccctcttcggagggagcatcagag

SEQ ID NO: 18575 - RNA, 88 nt, synthetic construct
  misc_feature 1..88: note = engineered ribonucleic acid scaffold (ERS) sequence
  source 1..88: mol_type = other RNA
actggcgcttctatctgattactctgagggccaacaccagcgactatgtcgtatgggtaaagctccctcttcggagggagcatcagag

SEQ ID NO: 18576 - RNA, 88 nt, synthetic construct
  misc_feature 1..88: note = engineered ribonucleic acid scaffold (ERS) sequence
  source 1..88: mol_type = other RNA
actggcgcttctatctgattactctgagggccagcaccagcgactatgtcgtatgggtaaagctccctcttcggagggagcatcagag

SEQ ID NO: 18577 - RNA, 88 nt, synthetic construct
  misc_feature 1..88: note = engineered ribonucleic acid scaffold (ERS) sequence
  source 1..88: mol_type = other RNA
actggcgcttctatctgattactctgagggccatgaccagcgactatgtcgtatggctaaagctccctcttcggagggagcatcagag

SEQ ID NO: 18578 - RNA, 89 nt, synthetic construct
  misc_feature 1..89: note = engineered ribonucleic acid scaffold (ERS) sequence
  source 1..89: mol_type = other RNA
actggcgcttctatctgattactctgagggccatgaccagcgactatgtcgtatgggctaaagctccctcttcggagggagcatcagag

SEQ ID NO: 18579 - RNA, 88 nt, synthetic construct
  misc_feature 1..88: note = engineered ribonucleic acid scaffold (ERS) sequence
  source 1..88: mol_type = other RNA
actggcgcttctatctgattactctgagggccatgaccagcgactatgtcgtatgggtaaagctccctcttcggagggagcatcagag

SEQ ID NO: 18580 - RNA, 88 nt, synthetic construct
  misc_feature 1..88: note = engineered ribonucleic acid scaffold (ERS) sequence
  source 1..88: mol_type = other RNA
actggcgcttctatctgattactctgagggccatccccagcgactatgtcgtatgggtaaagctccctcttcggagggagcatcagag

SEQ ID NO: 18581 - RNA, 89 nt, synthetic construct
  misc_feature 1..89: note = engineered ribonucleic acid scaffold (ERS) sequence
  source 1..89: mol_type = other RNA
actggcgcttctatctgattactctgagggccatcgccagcgactatgtcgtatggcgtaaagctccctcttcggagggagcatcagag

SEQ ID NO: 18582 - RNA, 88 nt, synthetic construct
  misc_feature 1..88: note = engineered ribonucleic acid scaffold (ERS) sequence
  source 1..88: mol_type = other RNA
actggcgcttctatctgattactctgagggccatcgccagcgactatgtcgtatgggtaaagctccctcttcggagggagcatcagag

SEQ ID NO: 18583 - RNA, 88 nt, synthetic construct
  misc_feature 1..88: note = engineered ribonucleic acid scaffold (ERS) sequence
  source 1..88: mol_type = other RNA
actggcgcttctatctgattactctgagggccatctccagcgactatgtcgtatgggtaaagctccctcttcggagggagcatcagag

SEQ ID NO: 18584 - RNA, 88 nt, synthetic construct
  misc_feature 1..88: note = engineered ribonucleic acid scaffold (ERS) sequence
  source 1..88: mol_type = other RNA
actggcgcttctatctgattactctgagggccatcacctgcgactatgtcgtaagggtaaagctccctcttcggagggagcatcagag

SEQ ID NO: 18585 - RNA, 88 nt, synthetic construct
  misc_feature 1..88: note = engineered ribonucleic acid scaffold (ERS) sequence
  source 1..88: mol_type = other RNA
actggcgcttctatctgattactctgagggccatcaccagagactatgtcttatgggtaaagctccctcttcggagggagcatcagag

SEQ ID NO: 18586 - RNA, 88 nt, synthetic construct
  misc_feature 1..88: note = engineered ribonucleic acid scaffold (ERS) sequence
  source 1..88: mol_type = other RNA
actggcgcttctatctgattactctgagggccatcaccagggactatgtcctatgggtaaagctccctcttcggagggagcatcagag

SEQ ID NO: 18587 - RNA, 89 nt, synthetic construct
  misc_feature 1..89: note = engineered ribonucleic acid scaffold (ERS) sequence
  source 1..89: mol_type = other RNA
actggcgcttctatctgattactctgagggccatcaccaggcactatgtgctattgggtaaagctccctcttcggagggagcatcagag

SEQ ID NO: 18588 - RNA, 88 nt, synthetic construct
  misc_feature 1..88: note = engineered ribonucleic acid scaffold (ERS) sequence
  source 1..88: mol_type = other RNA
actggcgcttctatctgattactctgagggccatcaccagccactatgtggtatgggtaaagctccctcttcggagggagcatcagag

SEQ ID NO: 18589 - RNA, 88 nt, synthetic construct
  misc_feature 1..88: note = engineered ribonucleic acid scaffold (ERS) sequence
  source 1..88: mol_type = other RNA
actggcgcttctatctgattactctgagggccatcaccagctactatgtagtatgggtaaagctccctcttcggagggagcatcagag

SEQ ID NO: 18590 - RNA, 88 nt, synthetic construct
  misc_feature 1..88: note = engineered ribonucleic acid scaffold (ERS) sequence
  source 1..88: mol_type = other RNA
actggcgcttctatctgattactctgagggccatcaccagcgattatgtcgtatgggtaaagctccctcttcggagggagcatcagag

SEQ ID NO: 18591 - RNA, 88 nt, synthetic construct
  misc_feature 1..88: note = engineered ribonucleic acid scaffold (ERS) sequence
  source 1..88: mol_type = other RNA
actggcgcttctatctgattactctgagggccatcaccagcgacgatgtcgtatgggtaaagctccctcttcggagggagcatcagag

SEQ ID NO: 18592 - RNA, 88 nt, synthetic construct
  misc_feature 1..88: note = engineered ribonucleic acid scaffold (ERS) sequence
  source 1..88: mol_type = other RNA
actggcgcttctatctgattactctgagggccatcaccagcgactctgtcgtatgggtaaagctccctcttcggagggagcatcagag

SEQ ID NO: 18593 - RNA, 88 nt, synthetic construct
  misc_feature 1..88: note = engineered ribonucleic acid scaffold (ERS) sequence
  source 1..88: mol_type = other RNA
actggcgcttctatctgattactctgagggccatcaccagcgactatgtcgtgtgggtaaagctccctcttcggagggagcatcagag

SEQ ID NO: 18594 - RNA, 89 nt, synthetic construct
  misc_feature 1..89: note = engineered ribonucleic acid scaffold (ERS) sequence
  source 1..89: mol_type = other RNA
actggcgcttctatctgattactctgagggccatcaccagcgactatgtcgtattgggtaaagctccctcttcggagggagcatcagag

SEQ ID NO: 18595 - RNA, 89 nt, synthetic construct
  misc_feature 1..89: note = engineered ribonucleic acid scaffold (ERS) sequence
  source 1..89: mol_type = other RNA
actggcgcttctatctgattactctgagggccatcaccagcgactatgtcgtatggagtaaagctccctcttcggagggagcatcagag

SEQ ID NO: 18596 - RNA, 89 nt, synthetic construct
  misc_feature 1..89: note = engineered ribonucleic acid scaffold (ERS) sequence
  source 1..89: mol_type = other RNA
actggcgcttctatctgattactctgagggccatcaccagcgactatgtcgtatggcgtaaagctccctcttcggagggagcatcagag

SEQ ID NO: 18597 - RNA, 89 nt, synthetic construct
  misc_feature 1..89: note = engineered ribonucleic acid scaffold (ERS) sequence
  source 1..89: mol_type = other RNA
actggcgcttctatctgattactctgagggccatcaccagcgactatgtcgtatggtgtaaagctccctcttcggagggagcatcagag

SEQ ID NO: 18598 - RNA, 89 nt, synthetic construct
  misc_feature 1..89: note = engineered ribonucleic acid scaffold (ERS) sequence
  source 1..89: mol_type = other RNA
actggcgcttctatctgattactctgagggccatcaccagcgactatgtcgtatgggctaaagctccctcttcggagggagcatcagag

SEQ ID NO: 18599 - RNA, 86 nt, synthetic construct
  misc_feature 1..86: note = engineered ribonucleic acid scaffold (ERS) sequence
  source 1..86: mol_type = other RNA
actggcgcttctatctgattactctgagggccatcaccagcgactatgtcgtatgggtagctccctcttcggagggagcatcagag

SEQ ID NO: 18600 - RNA, 88 nt, synthetic construct
  misc_feature 1..88: note = engineered ribonucleic acid scaffold (ERS) sequence
  source 1..88: mol_type = other RNA
actggcgcttctatctgattactctgagggccatcaccagcgactatgtcgtatgggtgaagctccctcttcggagggagcatcagag

SEQ ID NO: 18601 - RNA, 88 nt, synthetic construct
  misc_feature 1..88: note = engineered ribonucleic acid scaffold (ERS) sequence
  source 1..88: mol_type = other RNA
actggcgcttctatctgattactctgagggccatcaccagcgactatgtcgtatgggtagagctccctcttcggagggagcatcagag

SEQ ID NO: 18602 - RNA, 88 nt, synthetic construct
  misc_feature 1..88: note = engineered ribonucleic acid scaffold (ERS) sequence
  source 1..88: mol_type = other RNA
actggcgcttctatctgattactctgagtgccgacaccagcgactatgtcgtatgggtaaagctccctcttcggagggagcatcagag

SEQ ID NO: 18603 - RNA, 88 nt, synthetic construct
  misc_feature 1..88: note = engineered ribonucleic acid scaffold (ERS) sequence
  source 1..88: mol_type = other RNA
actggcgcttctatctgattactctgagtgccggcaccagcgactatgtcgtatgggtaaagctccctcttcggagggagcatcagag

SEQ ID NO: 18604 - RNA, 88 nt, synthetic construct
  misc_feature 1..88: note = engineered ribonucleic acid scaffold (ERS) sequence
  source 1..88: mol_type = other RNA
actggcgcttctatctgattactctgagtgccgtgaccagcgactatgtcgtatggctaaagctccctcttcggagggagcatcagag

SEQ ID NO: 18605 - RNA, 89 nt, synthetic construct
  misc_feature 1..89: note = engineered ribonucleic acid scaffold (ERS) sequence
  source 1..89: mol_type = other RNA
actggcgcttctatctgattactctgagtgccgtgaccagcgactatgtcgtatgggctaaagctccctcttcggagggagcatcagag

SEQ ID NO: 18606 - RNA, 88 nt, synthetic construct
  misc_feature 1..88: note = engineered ribonucleic acid scaffold (ERS) sequence
  source 1..88: mol_type = other RNA
actggcgcttctatctgattactctgagtgccgtgaccagcgactatgtcgtatgggtaaagctccctcttcggagggagcatcagag

SEQ ID NO: 18607 - RNA, 88 nt, synthetic construct
  misc_feature 1..88: note = engineered ribonucleic acid scaffold (ERS) sequence
  source 1..88: mol_type = other RNA
actggcgcttctatctgattactctgagtgccgtccccagcgactatgtcgtatgggtaaagctccctcttcggagggagcatcagag

SEQ ID NO: 18608 - RNA, 89 nt, synthetic construct
  misc_feature 1..89: note = engineered ribonucleic acid scaffold (ERS) sequence
  source 1..89: mol_type = other RNA
actggcgcttctatctgattactctgagtgccgtcgccagcgactatgtcgtatggcgtaaagctccctcttcggagggagcatcagag

SEQ ID NO: 18609 - RNA, 88 nt, synthetic construct
  misc_feature 1..88: note = engineered ribonucleic acid scaffold (ERS) sequence
  source 1..88: mol_type = other RNA
actggcgcttctatctgattactctgagtgccgtcgccagcgactatgtcgtatgggtaaagctccctcttcggagggagcatcagag

SEQ ID NO: 18610 - RNA, 88 nt, synthetic construct
  misc_feature 1..88: note = engineered ribonucleic acid scaffold (ERS) sequence
  source 1..88: mol_type = other RNA
actggcgcttctatctgattactctgagtgccgtctccagcgactatgtcgtatgggtaaagctccctcttcggagggagcatcagag

SEQ ID NO: 18611 - RNA, 88 nt, synthetic construct
  misc_feature 1..88: note = engineered ribonucleic acid scaffold (ERS) sequence
  source 1..88: mol_type = other RNA
actggcgcttctatctgattactctgagtgccgtcacctgcgactatgtcgtaagggtaaagctccctcttcggagggagcatcagag

SEQ ID NO: 18612 - RNA, 88 nt, synthetic construct
  misc_feature 1..88: note = engineered ribonucleic acid scaffold (ERS) sequence
  source 1..88: mol_type = other RNA
actggcgcttctatctgattactctgagtgccgtcaccagagactatgtcttatgggtaaagctccctcttcggagggagcatcagag

SEQ ID NO: 18613 - RNA, 88 nt, synthetic construct
  misc_feature 1..88: note = engineered ribonucleic acid scaffold (ERS) sequence
  source 1..88: mol_type = other RNA
actggcgcttctatctgattactctgagtgccgtcaccagggactatgtcctatgggtaaagctccctcttcggagggagcatcagag

SEQ ID NO: 18614 - RNA, 89 nt, synthetic construct
  misc_feature 1..89: note = engineered ribonucleic acid scaffold (ERS) sequence
  source 1..89: mol_type = other RNA
actggcgcttctatctgattactctgagtgccgtcaccaggcactatgtgctattgggtaaagctccctcttcggagggagcatcagag

SEQ ID NO: 18615 - RNA, 88 nt, synthetic construct
  misc_feature 1..88: note = engineered ribonucleic acid scaffold (ERS) sequence
  source 1..88: mol_type = other RNA
actggcgcttctatctgattactctgagtgccgtcaccagccactatgtggtatgggtaaagctccctcttcggagggagcatcagag

SEQ ID NO: 18616 - RNA, 88 nt, synthetic construct
  misc_feature 1..88: note = engineered ribonucleic acid scaffold (ERS) sequence
  source 1..88: mol_type = other RNA
actggcgcttctatctgattactctgagtgccgtcaccagctactatgtagtatgggtaaagctccctcttcggagggagcatcagag

SEQ ID NO: 18617 - RNA, 88 nt, synthetic construct
  misc_feature 1..88: note = engineered ribonucleic acid scaffold (ERS) sequence
  source 1..88: mol_type = other RNA
actggcgcttctatctgattactctgagtgccgtcaccagcgattatgtcgtatgggtaaagctccctcttcggagggagcatcagag

SEQ ID NO: 18618 - RNA, 88 nt, synthetic construct
  misc_feature 1..88: note = engineered ribonucleic acid scaffold (ERS) sequence
  source 1..88: mol_type = other RNA
actggcgcttctatctgattactctgagtgccgtcaccagcgacgatgtcgtatgggtaaagctccctcttcggagggagcatcagag

SEQ ID NO: 18619 - RNA, 88 nt, synthetic construct
  misc_feature 1..88: note = engineered ribonucleic acid scaffold (ERS) sequence
  source 1..88: mol_type = other RNA
actggcgcttctatctgattactctgagtgccgtcaccagcgactctgtcgtatgggtaaagctccctcttcggagggagcatcagag

SEQ ID NO: 18620 - RNA, 88 nt, synthetic construct
  misc_feature 1..88: note = engineered ribonucleic acid scaffold (ERS) sequence
  source 1..88: mol_type = other RNA
actggcgcttctatctgattactctgagtgccgtcaccagcgactatgtcgtgtgggtaaagctccctcttcggagggagcatcagag

SEQ ID NO: 18621 - RNA, 89 nt, synthetic construct
  misc_feature 1..89: note = engineered ribonucleic acid scaffold (ERS) sequence
  source 1..89: mol_type = other RNA
actggcgcttctatctgattactctgagtgccgtcaccagcgactatgtcgtattgggtaaagctccctcttcggagggagcatcagag

SEQ ID NO: 18622 - RNA, 89 nt, synthetic construct
  misc_feature 1..89: note = engineered ribonucleic acid scaffold (ERS) sequence
  source 1..89: mol_type = other RNA
actggcgcttctatctgattactctgagtgccgtcaccagcgactatgtcgtatggagtaaagctccctcttcggagggagcatcagag

SEQ ID NO: 18623 - RNA, 89 nt, synthetic construct
  misc_feature 1..89: note = engineered ribonucleic acid scaffold (ERS) sequence
  source 1..89: mol_type = other RNA
actggcgcttctatctgattactctgagtgccgtcaccagcgactatgtcgtatggcgtaaagctccctcttcggagggagcatcagag

SEQ ID NO: 18624 - RNA, 89 nt, synthetic construct
  misc_feature 1..89: note = engineered ribonucleic acid scaffold (ERS) sequence
  source 1..89: mol_type = other RNA
actggcgcttctatctgattactctgagtgccgtcaccagcgactatgtcgtatggtgtaaagctccctcttcggagggagcatcagag

SEQ ID NO: 18625 - RNA, 89 nt, synthetic construct
  misc_feature 1..89: note = engineered ribonucleic acid scaffold (ERS) sequence
  source 1..89: mol_type = other RNA
actggcgcttctatctgattactctgagtgccgtcaccagcgactatgtcgtatgggctaaagctccctcttcggagggagcatcagag

SEQ ID NO: 18626 - RNA, 86 nt, synthetic construct
  misc_feature 1..86: note = engineered ribonucleic acid scaffold (ERS) sequence
  source 1..86: mol_type = other RNA
actggcgcttctatctgattactctgagtgccgtcaccagcgactatgtcgtatgggtagctccctcttcggagggagcatcagag

SEQ ID NO: 18627 - RNA, 88 nt, synthetic construct
  misc_feature 1..88: note = engineered ribonucleic acid scaffold (ERS) sequence
  source 1..88: mol_type = other RNA
actggcgcttctatctgattactctgagtgccgtcaccagcgactatgtcgtatgggtgaagctccctcttcggagggagcatcagag

SEQ ID NO: 18628 - RNA, 88 nt, synthetic construct
  misc_feature 1..88: note = engineered ribonucleic acid scaffold (ERS) sequence
  source 1..88: mol_type = other RNA
actggcgcttctatctgattactctgagtgccgtcaccagcgactatgtcgtatgggtagagctccctcttcggagggagcatcagag

SEQ ID NO: 18629 - RNA, 88 nt, synthetic construct
  misc_feature 1..88: note = engineered ribonucleic acid scaffold (ERS) sequence
  source 1..88: mol_type = other RNA
actggcacttctatctgattactctgagtgccaacaccagcgactatgtcgtatgggtaaagctccctcttcggagggagcatcagag

SEQ ID NO: 18630 - RNA, 88 nt, synthetic construct
  misc_feature 1..88: note = engineered ribonucleic acid scaffold (ERS) sequence
  source 1..88: mol_type = other RNA
actggcacttctatctgattactctgagtgccagcaccagcgactatgtcgtatgggtaaagctccctcttcggagggagcatcagag

SEQ ID NO: 18631 - RNA, 88 nt, synthetic construct
  misc_feature 1..88: note = engineered ribonucleic acid scaffold (ERS) sequence
  source 1..88: mol_type = other RNA
actggcacttctatctgattactctgagtgccatgaccagcgactatgtcgtatggctaaagctccctcttcggagggagcatcagag

SEQ ID NO: 18632 - RNA, 89 nt, synthetic construct
  misc_feature 1..89: note = engineered ribonucleic acid scaffold (ERS) sequence
  source 1..89: mol_type = other RNA
actggcacttctatctgattactctgagtgccatgaccagcgactatgtcgtatgggctaaagctccctcttcggagggagcatcagag

SEQ ID NO: 18633 - RNA, 88 nt, synthetic construct
  misc_feature 1..88: note = engineered ribonucleic acid scaffold (ERS) sequence
  source 1..88: mol_type = other RNA
actggcacttctatctgattactctgagtgccatgaccagcgactatgtcgtatgggtaaagctccctcttcggagggagcatcagag

SEQ ID NO: 18634 - RNA, 88 nt, synthetic construct
  misc_feature 1..88: note = engineered ribonucleic acid scaffold (ERS) sequence
  source 1..88: mol_type = other RNA
actggcacttctatctgattactctgagtgccatccccagcgactatgtcgtatgggtaaagctccctcttcggagggagcatcagag

SEQ ID NO: 18635 - RNA, 89 nt, synthetic construct
  misc_feature 1..89: note = engineered ribonucleic acid scaffold (ERS) sequence
  source 1..89: mol_type = other RNA
actggcacttctatctgattactctgagtgccatcgccagcgactatgtcgtatggcgtaaagctccctcttcggagggagcatcagag

SEQ ID NO: 18636 - RNA, 88 nt, synthetic construct
  misc_feature 1..88: note = engineered ribonucleic acid scaffold (ERS) sequence
  source 1..88: mol_type = other RNA
actggcacttctatctgattactctgagtgccatcgccagcgactatgtcgtatgggtaaagctccctcttcggagggagcatcagag

SEQ ID NO: 18637 - RNA, 88 nt, synthetic construct
  misc_feature 1..88: note = engineered ribonucleic acid scaffold (ERS) sequence
  source 1..88: mol_type = other RNA
actggcacttctatctgattactctgagtgccatctccagcgactatgtcgtatgggtaaagctccctcttcggagggagcatcagag

SEQ ID NO: 18638 - RNA, 88 nt, synthetic construct
  misc_feature 1..88: note = engineered ribonucleic acid scaffold (ERS) sequence
  source 1..88: mol_type = other RNA
actggcacttctatctgattactctgagtgccatcacctgcgactatgtcgtaagggtaaagctccctcttcggagggagcatcagag

SEQ ID NO: 18639 - RNA, 88 nt, synthetic construct
  misc_feature 1..88: note = engineered ribonucleic acid scaffold (ERS) sequence
  source 1..88: mol_type = other RNA
actggcacttctatctgattactctgagtgccatcaccagagactatgtcttatgggtaaagctccctcttcggagggagcatcagag

SEQ ID NO: 18640 - RNA, 88 nt, synthetic construct
  misc_feature 1..88: note = engineered ribonucleic acid scaffold (ERS) sequence
  source 1..88: mol_type = other RNA
actggcacttctatctgattactctgagtgccatcaccagggactatgtcctatgggtaaagctccctcttcggagggagcatcagag

SEQ ID NO: 18641 - RNA, 89 nt, synthetic construct
  misc_feature 1..89: note = engineered ribonucleic acid scaffold (ERS) sequence
  source 1..89: mol_type = other RNA
actggcacttctatctgattactctgagtgccatcaccaggcactatgtgctattgggtaaagctccctcttcggagggagcatcagag

SEQ ID NO: 18642 - RNA, 88 nt, synthetic construct
  misc_feature 1..88: note = engineered ribonucleic acid scaffold (ERS) sequence
  source 1..88: mol_type = other RNA
actggcacttctatctgattactctgagtgccatcaccagccactatgtggtatgggtaaagctccctcttcggagggagcatcagag

SEQ ID NO: 18643 - RNA, 88 nt, synthetic construct
  misc_feature 1..88: note = engineered ribonucleic acid scaffold (ERS) sequence
  source 1..88: mol_type = other RNA
actggcacttctatctgattactctgagtgccatcaccagctactatgtagtatgggtaaagctccctcttcggagggagcatcagag

SEQ ID NO: 18644 - RNA, 88 nt, synthetic construct
  misc_feature 1..88: note = engineered ribonucleic acid scaffold (ERS) sequence
  source 1..88: mol_type = other RNA
actggcacttctatctgattactctgagtgccatcaccagcgattatgtcgtatgggtaaagctccctcttcggagggagcatcagag

SEQ ID NO: 18645 - RNA, 88 nt, synthetic construct
  misc_feature 1..88: note = engineered ribonucleic acid scaffold (ERS) sequence
  source 1..88: mol_type = other RNA
actggcacttctatctgattactctgagtgccatcaccagcgacgatgtcgtatgggtaaagctccctcttcggagggagcatcagag

SEQ ID NO: 18646 - RNA, 88 nt, synthetic construct
  misc_feature 1..88: note = engineered ribonucleic acid scaffold (ERS) sequence
  source 1..88: mol_type = other RNA
actggcacttctatctgattactctgagtgccatcaccagcgactctgtcgtatgggtaaagctccctcttcggagggagcatcagag

SEQ ID NO: 18647 - RNA, 88 nt, synthetic construct
  misc_feature 1..88: note = engineered ribonucleic acid scaffold (ERS) sequence
  source 1..88: mol_type = other RNA
actggcacttctatctgattactctgagtgccatcaccagcgactatgtcgtgtgggtaaagctccctcttcggagggagcatcagag

SEQ ID NO: 18648 - RNA, 89 nt, synthetic construct
  misc_feature 1..89: note = engineered ribonucleic acid scaffold (ERS) sequence
  source 1..89: mol_type = other RNA
actggcacttctatctgattactctgagtgccatcaccagcgactatgtcgtattgggtaaagctccctcttcggagggagcatcagag

SEQ ID NO: 18649 - RNA, 89 nt, synthetic construct
  misc_feature 1..89: note = engineered ribonucleic acid scaffold (ERS) sequence
  source 1..89: mol_type = other RNA
actggcacttctatctgattactctgagtgccatcaccagcgactatgtcgtatggagtaaagctccctcttcggagggagcatcagag

SEQ ID NO: 18650 - RNA, 89 nt, synthetic construct
  misc_feature 1..89: note = engineered ribonucleic acid scaffold (ERS) sequence
  source 1..89: mol_type = other RNA
actggcacttctatctgattactctgagtgccatcaccagcgactatgtcgtatggcgtaaagctccctcttcggagggagcatcagag

SEQ ID NO: 18651 - RNA, 89 nt, synthetic construct
  misc_feature 1..89: note = engineered ribonucleic acid scaffold (ERS) sequence
  source 1..89: mol_type = other RNA
actggcacttctatctgattactctgagtgccatcaccagcgactatgtcgtatggtgtaaagctccctcttcggagggagcatcagag

SEQ ID NO: 18652 - RNA, 89 nt, synthetic construct
  misc_feature 1..89: note = engineered ribonucleic acid scaffold (ERS) sequence
  source 1..89: mol_type = other RNA
actggcacttctatctgattactctgagtgccatcaccagcgactatgtcgtatgggctaaagctccctcttcggagggagcatcagag

SEQ ID NO: 18653 - RNA, 86 nt, synthetic construct
  misc_feature 1..86: note = engineered ribonucleic acid scaffold (ERS) sequence
  source 1..86: mol_type = other RNA
actggcacttctatctgattactctgagtgccatcaccagcgactatgtcgtatgggtagctccctcttcggagggagcatcagag

SEQ ID NO: 18654 - RNA, 88 nt, synthetic construct
  misc_feature 1..88: note = engineered ribonucleic acid scaffold (ERS) sequence
  source 1..88: mol_type = other RNA
actggcacttctatctgattactctgagtgccatcaccagcgactatgtcgtatgggtgaagctccctcttcggagggagcatcagag

SEQ ID NO: 18655 - RNA, 88 nt, synthetic construct
  misc_feature 1..88: note = engineered ribonucleic acid scaffold (ERS) sequence
  source 1..88: mol_type = other RNA
actggcacttctatctgattactctgagtgccatcaccagcgactatgtcgtatgggtagagctccctcttcggagggagcatcagag

SEQ ID NO: 18656 - RNA, 88 nt, synthetic construct
  misc_feature 1..88: note = engineered ribonucleic acid scaffold (ERS) sequence
  source 1..88: mol_type = other RNA
actggcgcttctatctgattactctgagaaccaacaccagcgactatgtcgtatgggtaaagctccctcttcggagggagcatcagag

SEQ ID NO: 18657 - RNA, 88 nt, synthetic construct
  misc_feature 1..88: note = engineered ribonucleic acid scaffold (ERS) sequence
  source 1..88: mol_type = other RNA
actggcgcttctatctgattactctgagaaccagcaccagcgactatgtcgtatgggtaaagctccctcttcggagggagcatcagag

SEQ ID NO: 18658 - RNA, 88 nt, synthetic construct
  misc_feature 1..88: note = engineered ribonucleic acid scaffold (ERS) sequence
  source 1..88: mol_type = other RNA
actggcgcttctatctgattactctgagaaccatgaccagcgactatgtcgtatggctaaagctccctcttcggagggagcatcagag

SEQ ID NO: 18659 - RNA, 89 nt, synthetic construct
  misc_feature 1..89: note = engineered ribonucleic acid scaffold (ERS) sequence
  source 1..89: mol_type = other RNA
actggcgcttctatctgattactctgagaaccatgaccagcgactatgtcgtatgggctaaagctccctcttcggagggagcatcagag

SEQ ID NO: 18660 - RNA, 88 nt, synthetic construct
  misc_feature 1..88: note = engineered ribonucleic acid scaffold (ERS) sequence
  source 1..88: mol_type = other RNA
actggcgcttctatctgattactctgagaaccatgaccagcgactatgtcgtatgggtaaagctccctcttcggagggagcatcagag

SEQ ID NO: 18661 - RNA, 88 nt, synthetic construct
  misc_feature 1..88: note = engineered ribonucleic acid scaffold (ERS) sequence
  source 1..88: mol_type = other RNA
actggcgcttctatctgattactctgagaaccatccccagcgactatgtcgtatgggtaaagctccctcttcggagggagcatcagag

SEQ ID NO: 18662 - RNA, 89 nt, synthetic construct
  misc_feature 1..89: note = engineered ribonucleic acid scaffold (ERS) sequence
  source 1..89: mol_type = other RNA
actggcgcttctatctgattactctgagaaccatcgccagcgactatgtcgtatggcgtaaagctccctcttcggagggagcatcagag

SEQ ID NO: 18663 - RNA, 88 nt, synthetic construct
  misc_feature 1..88: note = engineered ribonucleic acid scaffold (ERS) sequence
  source 1..88: mol_type = other RNA
actggcgcttctatctgattactctgagaaccatcgccagcgactatgtcgtatgggtaaagctccctcttcggagggagcatcagag

SEQ ID NO: 18664 - RNA, 88 nt, synthetic construct
  misc_feature 1..88: note = engineered ribonucleic acid scaffold (ERS) sequence
  source 1..88: mol_type = other RNA
actggcgcttctatctgattactctgagaaccatctccagcgactatgtcgtatgggtaaagctccctcttcggagggagcatcagag

SEQ ID NO: 18665 - RNA, 88 nt, synthetic construct
  misc_feature 1..88: note = engineered ribonucleic acid scaffold (ERS) sequence
  source 1..88: mol_type = other RNA
actggcgcttctatctgattactctgagaaccatcacctgcgactatgtcgtaagggtaaagctccctcttcggagggagcatcagag

SEQ ID NO: 18666 - RNA, 88 nt, synthetic construct
  misc_feature 1..88: note = engineered ribonucleic acid scaffold (ERS) sequence
  source 1..88: mol_type = other RNA
actggcgcttctatctgattactctgagaaccatcaccagagactatgtcttatgggtaaagctccctcttcggagggagcatcagag

SEQ ID NO: 18667 - RNA, 88 nt, synthetic construct
  misc_feature 1..88: note = engineered ribonucleic acid scaffold (ERS) sequence
  source 1..88: mol_type = other RNA
actggcgcttctatctgattactctgagaaccatcaccagggactatgtcctatgggtaaagctccctcttcggagggagcatcagag

SEQ ID NO: 18668 - RNA, 89 nt, synthetic construct
  misc_feature 1..89: note = engineered ribonucleic acid scaffold (ERS) sequence
  source 1..89: mol_type = other RNA
actggcgcttctatctgattactctgagaaccatcaccaggcactatgtgctattgggtaaagctccctcttcggagggagcatcagag

SEQ ID NO: 18669 - RNA, 88 nt, synthetic construct
  misc_feature 1..88: note = engineered ribonucleic acid scaffold (ERS) sequence
  source 1..88: mol_type = other RNA
actggcgcttctatctgattactctgagaaccatcaccagccactatgtggtatgggtaaagctccctcttcggagggagcatcagag

SEQ ID NO: 18670 - RNA, 88 nt, synthetic construct
  misc_feature 1..88: note = engineered ribonucleic acid scaffold (ERS) sequence
  source 1..88: mol_type = other RNA
actggcgcttctatctgattactctgagaaccatcaccagctactatgtagtatgggtaaagctccctcttcggagggagcatcagag

SEQ ID NO: 18671 - RNA, 88 nt, synthetic construct
  misc_feature 1..88: note = engineered ribonucleic acid scaffold (ERS) sequence
  source 1..88: mol_type = other RNA
actggcgcttctatctgattactctgagaaccatcaccagcgattatgtcgtatgggtaaagctccctcttcggagggagcatcagag

SEQ ID NO: 18672 - RNA, 88 nt, synthetic construct
  misc_feature 1..88: note = engineered ribonucleic acid scaffold (ERS) sequence
  source 1..88: mol_type = other RNA
actggcgcttctatctgattactctgagaaccatcaccagcgacgatgtcgtatgggtaaagctccctcttcggagggagcatcagag

SEQ ID NO: 18673 - RNA, 88 nt, synthetic construct
  misc_feature 1..88: note = engineered ribonucleic acid scaffold (ERS) sequence
  source 1..88: mol_type = other RNA
actggcgcttctatctgattactctgagaaccatcaccagcgactctgtcgtatgggtaaagctccctcttcggagggagcatcagag

SEQ ID NO: 18674 - RNA, 88 nt, synthetic construct
  misc_feature 1..88: note = engineered ribonucleic acid scaffold (ERS) sequence
  source 1..88: mol_type = other RNA
actggcgcttctatctgattactctgagaaccatcaccagcgactatgtcgtgtgggtaaagctccctcttcggagggagcatcagag

SEQ ID NO: 18675 - RNA, 89 nt, synthetic construct
  misc_feature 1..89: note = engineered ribonucleic acid scaffold (ERS) sequence
  source 1..89: mol_type = other RNA
actggcgcttctatctgattactctgagaaccatcaccagcgactatgtcgtattgggtaaagctccctcttcggagggagcatcagag

SEQ ID NO: 18676 - RNA, 89 nt, synthetic construct
  misc_feature 1..89: note = engineered ribonucleic acid scaffold (ERS) sequence
  source 1..89: mol_type = other RNA
actggcgcttctatctgattactctgagaaccatcaccagcgactatgtcgtatggagtaaagctccctcttcggagggagcatcagag

SEQ ID NO: 18677 - RNA, 89 nt, synthetic construct
  misc_feature 1..89: note = engineered ribonucleic acid scaffold (ERS) sequence
  source 1..89: mol_type = other RNA
actggcgcttctatctgattactctgagaaccatcaccagcgactatgtcgtatggcgtaaagctccctcttcggagggagcatcagag

SEQ ID NO: 18678 - RNA, 89 nt, synthetic construct
  misc_feature 1..89: note = engineered ribonucleic acid scaffold (ERS) sequence
  source 1..89: mol_type = other RNA
actggcgcttctatctgattactctgagaaccatcaccagcgactatgtcgtatggtgtaaagctccctcttcggagggagcatcagag

SEQ ID NO: 18679 - RNA, 89 nt, synthetic construct
  misc_feature 1..89: note = engineered ribonucleic acid scaffold (ERS) sequence
  source 1..89: mol_type = other RNA
actggcgcttctatctgattactctgagaaccatcaccagcgactatgtcgtatgggctaaagctccctcttcggagggagcatcagag

SEQ ID NO: 18680 - RNA, 86 nt, synthetic construct
  misc_feature 1..86: note = engineered ribonucleic acid scaffold (ERS) sequence
  source 1..86: mol_type = other RNA
actggcgcttctatctgattactctgagaaccatcaccagcgactatgtcgtatgggtagctccctcttcggagggagcatcagag

SEQ ID NO: 18681 - RNA, 88 nt, synthetic construct
  misc_feature 1..88: note = engineered ribonucleic acid scaffold (ERS) sequence
  source 1..88: mol_type = other RNA
actggcgcttctatctgattactctgagaaccatcaccagcgactatgtcgtatgggtgaagctccctcttcggagggagcatcagag

SEQ ID NO: 18682 - RNA, 88 nt, synthetic construct
  misc_feature 1..88: note = engineered ribonucleic acid scaffold (ERS) sequence
  source 1..88: mol_type = other RNA
actggcgcttctatctgattactctgagaaccatcaccagcgactatgtcgtatgggtagagctccctcttcggagggagcatcagag

SEQ ID NO: 18683 - RNA, 88 nt, synthetic construct
  misc_feature 1..88: note = engineered ribonucleic acid scaffold (ERS) sequence
  source 1..88: mol_type = other RNA
actggcgcttctatctgattactctgagagccgacaccagcgactatgtcgtatgggtaaagctccctcttcggagggagcatcagag

SEQ ID NO: 18684 - RNA, 88 nt, synthetic construct
  misc_feature 1..88: note = engineered ribonucleic acid scaffold (ERS) sequence
  source 1..88: mol_type = other RNA
actggcgcttctatctgattactctgagagccggcaccagcgactatgtcgtatgggtaaagctccctcttcggagggagcatcagag

SEQ ID NO: 18685 - RNA, 88 nt, synthetic construct
  misc_feature 1..88: note = engineered ribonucleic acid scaffold (ERS) sequence
  source 1..88: mol_type = other RNA
actggcgcttctatctgattactctgagagccgtgaccagcgactatgtcgtatggctaaagctccctcttcggagggagcatcagag

SEQ ID NO: 18686 - RNA, 89 nt, synthetic construct
  misc_feature 1..89: note = engineered ribonucleic acid scaffold (ERS) sequence
  source 1..89: mol_type = other RNA
actggcgcttctatctgattactctgagagccgtgaccagcgactatgtcgtatgggctaaagctccctcttcggagggagcatcagag

SEQ ID NO: 18687 - RNA, 88 nt, synthetic construct
  misc_feature 1..88: note = engineered ribonucleic acid scaffold (ERS) sequence
  source 1..88: mol_type = other RNA
actggcgcttctatctgattactctgagagccgtgaccagcgactatgtcgtatgggtaaagctccctcttcggagggagcatcagag

SEQ ID NO: 18688 - RNA, 88 nt, synthetic construct
  misc_feature 1..88: note = engineered ribonucleic acid scaffold (ERS) sequence
  source 1..88: mol_type = other RNA
actggcgcttctatctgattactctgagagccgtccccagcgactatgtcgtatgggtaaagctccctcttcggagggagcatcagag

SEQ ID NO: 18689 - RNA, 89 nt, synthetic construct
  misc_feature 1..89: note = engineered ribonucleic acid scaffold (ERS) sequence
  source 1..89: mol_type = other RNA
actggcgcttctatctgattactctgagagccgtcgccagcgactatgtcgtatggcgtaaagctccctcttcggagggagcatcagag

SEQ ID NO: 18690 - RNA, 88 nt, synthetic construct
  misc_feature 1..88: note = engineered ribonucleic acid scaffold (ERS) sequence
  source 1..88: mol_type = other RNA
actggcgcttctatctgattactctgagagccgtcgccagcgactatgtcgtatgggtaaagctccctcttcggagggagcatcagag

SEQ ID NO: 18691 - RNA, 88 nt, synthetic construct
  misc_feature 1..88: note = engineered ribonucleic acid scaffold (ERS) sequence
  source 1..88: mol_type = other RNA
actggcgcttctatctgattactctgagagccgtctccagcgactatgtcgtatgggtaaagctccctcttcggagggagcatcagag

SEQ ID NO: 18692 - RNA, 88 nt, synthetic construct
  misc_feature 1..88: note = engineered ribonucleic acid scaffold (ERS) sequence
  source 1..88: mol_type = other RNA
actggcgcttctatctgattactctgagagccgtcacctgcgactatgtcgtaagggtaaagctccctcttcggagggagcatcagag

SEQ ID NO: 18693 - RNA, 88 nt, synthetic construct
  misc_feature 1..88: note = engineered ribonucleic acid scaffold (ERS) sequence
  source 1..88: mol_type = other RNA
actggcgcttctatctgattactctgagagccgtcaccagagactatgtcttatgggtaaagctccctcttcggagggagcatcagag

SEQ ID NO: 18694 - RNA, 88 nt, synthetic construct
  misc_feature 1..88: note = engineered ribonucleic acid scaffold (ERS) sequence
  source 1..88: mol_type = other RNA
actggcgcttctatctgattactctgagagccgtcaccagggactatgtcctatgggtaaagctccctcttcggagggagcatcagag

SEQ ID NO: 18695 - RNA, 89 nt, synthetic construct
  misc_feature 1..89: note = engineered ribonucleic acid scaffold (ERS) sequence
  source 1..89: mol_type = other RNA
actggcgcttctatctgattactctgagagccgtcaccaggcactatgtgctattgggtaaagctccctcttcggagggagcatcagag

SEQ ID NO: 18696 - RNA, 88 nt, synthetic construct
  misc_feature 1..88: note = engineered ribonucleic acid scaffold (ERS) sequence
  source 1..88: mol_type = other RNA
actggcgcttctatctgattactctgagagccgtcaccagccactatgtggtatgggtaaagctccctcttcggagggagcatcagag

SEQ ID NO: 18697 - RNA, 88 nt, synthetic construct
  misc_feature 1..88: note = engineered ribonucleic acid scaffold (ERS) sequence
  source 1..88: mol_type = other RNA
actggcgcttctatctgattactctgagagccgtcaccagctactatgtagtatgggtaaagctccctcttcggagggagcatcagag

SEQ ID NO: 18698 - RNA, 88 nt, synthetic construct
  misc_feature 1..88: note = engineered ribonucleic acid scaffold (ERS) sequence
  source 1..88: mol_type = other RNA
actggcgcttctatctgattactctgagagccgtcaccagcgattatgtcgtatgggtaaagctccctcttcggagggagcatcagag

SEQ ID NO: 18699 - RNA, 88 nt, synthetic construct
  misc_feature 1..88: note = engineered ribonucleic acid scaffold (ERS) sequence
  source 1..88: mol_type = other RNA
actggcgcttctatctgattactctgagagccgtcaccagcgacgatgtcgtatgggtaaagctccctcttcggagggagcatcagag

SEQ ID NO: 18700 - RNA, 88 nt, synthetic construct
  misc_feature 1..88: note = engineered ribonucleic acid scaffold (ERS) sequence
  source 1..88: mol_type = other RNA
actggcgcttctatctgattactctgagagccgtcaccagcgactctgtcgtatgggtaaagctccctcttcggagggagcatcagag

SEQ ID NO: 18701 - RNA, 88 nt, synthetic construct
  misc_feature 1..88: note = engineered ribonucleic acid scaffold (ERS) sequence
  source 1..88: mol_type = other RNA
actggcgcttctatctgattactctgagagccgtcaccagcgactatgtcgtgtgggtaaagctccctcttcggagggagcatcagag

SEQ ID NO: 18702 - RNA, 89 nt, synthetic construct
  misc_feature 1..89: note = engineered ribonucleic acid scaffold (ERS) sequence
  source 1..89: mol_type = other RNA
actggcgcttctatctgattactctgagagccgtcaccagcgactatgtcgtattgggtaaagctccctcttcggagggagcatcagag

SEQ ID NO: 18703 - RNA, 89 nt, synthetic construct
  misc_feature 1..89: note = engineered ribonucleic acid scaffold (ERS) sequence
  source 1..89: mol_type = other RNA
actggcgcttctatctgattactctgagagccgtcaccagcgactatgtcgtatggagtaaagctccctcttcggagggagcatcagag

SEQ ID NO: 18704 - RNA, 89 nt, synthetic construct
  misc_feature 1..89: note = engineered ribonucleic acid scaffold (ERS) sequence
  source 1..89: mol_type = other RNA
actggcgcttctatctgattactctgagagccgtcaccagcgactatgtcgtatggcgtaaagctccctcttcggagggagcatcagag

SEQ ID NO: 18705 - RNA, 89 nt, synthetic construct
  misc_feature 1..89: note = engineered ribonucleic acid scaffold (ERS) sequence
  source 1..89: mol_type = other RNA
actggcgcttctatctgattactctgagagccgtcaccagcgactatgtcgtatggtgtaaagctccctcttcggagggagcatcagag

SEQ ID NO: 18706 - RNA, 89 nt, synthetic construct
  misc_feature 1..89: note = engineered ribonucleic acid scaffold (ERS) sequence
  source 1..89: mol_type = other RNA
actggcgcttctatctgattactctgagagccgtcaccagcgactatgtcgtatgggctaaagctccctcttcggagggagcatcagag

SEQ ID NO: 18707 - RNA, 86 nt, synthetic construct
  misc_feature 1..86: note = engineered ribonucleic acid scaffold (ERS) sequence
  source 1..86: mol_type = other RNA
actggcgcttctatctgattactctgagagccgtcaccagcgactatgtcgtatgggtagctccctcttcggagggagcatcagag

SEQ ID NO: 18708 - RNA, 88 nt, synthetic construct
  misc_feature 1..88: note = engineered ribonucleic acid scaffold (ERS) sequence
  source 1..88: mol_type = other RNA
actggcgcttctatctgattactctgagagccgtcaccagcgactatgtcgtatgggtgaagctccctcttcggagggagcatcagag

SEQ ID NO: 18709 - RNA, 88 nt, synthetic construct
  misc_feature 1..88: note = engineered ribonucleic acid scaffold (ERS) sequence
  source 1..88: mol_type = other RNA
actggcgcttctatctgattactctgagagccgtcaccagcgactatgtcgtatgggtagagctccctcttcggagggagcatcagag

SEQ ID NO: 18710 - RNA, 88 nt, synthetic construct
  misc_feature 1..88: note = engineered ribonucleic acid scaffold (ERS) sequence
  source 1..88: mol_type = other RNA
actggcgcttctatctgattactctgagagcctacaccagcgactatgtcgtatgggtaaagctccctcttcggagggagcatcagag

SEQ ID NO: 18711 - RNA, 88 nt, synthetic construct
  misc_feature 1..88: note = engineered ribonucleic acid scaffold (ERS) sequence
  source 1..88: mol_type = other RNA
actggcgcttctatctgattactctgagagcctgcaccagcgactatgtcgtatgggtaaagctccctcttcggagggagcatcagag

SEQ ID NO: 18712 - RNA, 88 nt, synthetic construct
  misc_feature 1..88: note = engineered ribonucleic acid scaffold (ERS) sequence
  source 1..88: mol_type = other RNA
actggcgcttctatctgattactctgagagccttgaccagcgactatgtcgtatggctaaagctccctcttcggagggagcatcagag

SEQ ID NO: 18713 - RNA, 89 nt, synthetic construct
  misc_feature 1..89: note = engineered ribonucleic acid scaffold (ERS) sequence
  source 1..89: mol_type = other RNA
actggcgcttctatctgattactctgagagccttgaccagcgactatgtcgtatgggctaaagctccctcttcggagggagcatcagag

SEQ ID NO: 18714 - RNA, 88 nt, synthetic construct
  misc_feature 1..88: note = engineered ribonucleic acid scaffold (ERS) sequence
  source 1..88: mol_type = other RNA
actggcgcttctatctgattactctgagagccttgaccagcgactatgtcgtatgggtaaagctccctcttcggagggagcatcagag

SEQ ID NO: 18715 - RNA, 88 nt, synthetic construct
  misc_feature 1..88: note = engineered ribonucleic acid scaffold (ERS) sequence
  source 1..88: mol_type = other RNA
actggcgcttctatctgattactctgagagccttccccagcgactatgtcgtatgggtaaagctccctcttcggagggagcatcagag

SEQ ID NO: 18716 - RNA, 89 nt, synthetic construct
  misc_feature 1..89: note = engineered ribonucleic acid scaffold (ERS) sequence
  source 1..89: mol_type = other RNA
actggcgcttctatctgattactctgagagccttcgccagcgactatgtcgtatggcgtaaagctccctcttcggagggagcatcagag

SEQ ID NO: 18717 - RNA, 88 nt, synthetic construct
  misc_feature 1..88: note = engineered ribonucleic acid scaffold (ERS) sequence
  source 1..88: mol_type = other RNA
actggcgcttctatctgattactctgagagccttcgccagcgactatgtcgtatgggtaaagctccctcttcggagggagcatcagag

SEQ ID NO: 18718 - RNA, 88 nt, synthetic construct
  misc_feature 1..88: note = engineered ribonucleic acid scaffold (ERS) sequence
  source 1..88: mol_type = other RNA
actggcgcttctatctgattactctgagagccttctccagcgactatgtcgtatgggtaaagctccctcttcggagggagcatcagag

SEQ ID NO: 18719 - RNA, 88 nt, synthetic construct
  misc_feature 1..88: note = engineered ribonucleic acid scaffold (ERS) sequence
  source 1..88: mol_type = other RNA
actggcgcttctatctgattactctgagagccttcacctgcgactatgtcgtaagggtaaagctccctcttcggagggagcatcagag

SEQ ID NO: 18720 - RNA, 88 nt, synthetic construct
  misc_feature 1..88: note = engineered ribonucleic acid scaffold (ERS) sequence
  source 1..88: mol_type = other RNA
actggcgcttctatctgattactctgagagccttcaccagagactatgtcttatgggtaaagctccctcttcggagggagcatcagag

SEQ ID NO: 18721 - RNA, 88 nt, synthetic construct
  misc_feature 1..88: note = engineered ribonucleic acid scaffold (ERS) sequence
  source 1..88: mol_type = other RNA
actggcgcttctatctgattactctgagagccttcaccagggactatgtcctatgggtaaagctccctcttcggagggagcatcagag

SEQ ID NO: 18722 - RNA, 89 nt, synthetic construct
  misc_feature 1..89: note = engineered ribonucleic acid scaffold (ERS) sequence
  source 1..89: mol_type = other RNA
actggcgcttctatctgattactctgagagccttcaccaggcactatgtgctattgggtaaagctccctcttcggagggagcatcagag

SEQ ID NO: 18723 - RNA, 88 nt, synthetic construct
  misc_feature 1..88: note = engineered ribonucleic acid scaffold (ERS) sequence
  source 1..88: mol_type = other RNA
actggcgcttctatctgattactctgagagccttcaccagccactatgtggtatgggtaaagctccctcttcggagggagcatcagag

SEQ ID NO: 18724 - RNA, 88 nt, synthetic construct
  misc_feature 1..88: note = engineered ribonucleic acid scaffold (ERS) sequence
  source 1..88: mol_type = other RNA
actggcgcttctatctgattactctgagagccttcaccagctactatgtagtatgggtaaagctccctcttcggagggagcatcagag

SEQ ID NO: 18725 - RNA, 88 nt, synthetic construct
  misc_feature 1..88: note = engineered ribonucleic acid scaffold (ERS) sequence
  source 1..88: mol_type = other RNA
actggcgcttctatctgattactctgagagccttcaccagcgattatgtcgtatgggtaaagctccctcttcggagggagcatcagag

SEQ ID NO: 18726 - RNA, 88 nt, synthetic construct
  misc_feature 1..88: note = engineered ribonucleic acid scaffold (ERS) sequence
  source 1..88: mol_type = other RNA
actggcgcttctatctgattactctgagagccttcaccagcgacgatgtcgtatgggtaaagctccctcttcggagggagcatcagag

SEQ ID NO: 18727 - RNA, 88 nt, synthetic construct
  misc_feature 1..88: note = engineered ribonucleic acid scaffold (ERS) sequence
  source 1..88: mol_type = other RNA
actggcgcttctatctgattactctgagagccttcaccagcgactctgtcgtatgggtaaagctccctcttcggagggagcatcagag

SEQ ID NO: 18728 - RNA, 88 nt, synthetic construct
  misc_feature 1..88: note = engineered ribonucleic acid scaffold (ERS) sequence
  source 1..88: mol_type = other RNA
actggcgcttctatctgattactctgagagccttcaccagcgactatgtcgtgtgggtaaagctccctcttcggagggagcatcagag

SEQ ID NO: 18729 - RNA, 89 nt, synthetic construct
  misc_feature 1..89: note = engineered ribonucleic acid scaffold (ERS) sequence
  source 1..89: mol_type = other RNA
actggcgcttctatctgattactctgagagccttcaccagcgactatgtcgtattgggtaaagctccctcttcggagggagcatcagag

SEQ ID NO: 18730 - RNA, 89 nt, synthetic construct
  misc_feature 1..89: note = engineered ribonucleic acid scaffold (ERS) sequence
  source 1..89: mol_type = other RNA
actggcgcttctatctgattactctgagagccttcaccagcgactatgtcgtatggagtaaagctccctcttcggagggagcatcagag

SEQ ID NO: 18731 - RNA, 89 nt, synthetic construct
  misc_feature 1..89: note = engineered ribonucleic acid scaffold (ERS) sequence
  source 1..89: mol_type = other RNA
actggcgcttctatctgattactctgagagccttcaccagcgactatgtcgtatggcgtaaagctccctcttcggagggagcatcagag

SEQ ID NO: 18732 - RNA, 89 nt, synthetic construct
  misc_feature 1..89: note = engineered ribonucleic acid scaffold (ERS) sequence
  source 1..89: mol_type = other RNA
actggcgcttctatctgattactctgagagccttcaccagcgactatgtcgtatggtgtaaagctccctcttcggagggagcatcagag

SEQ ID NO: 18733 - RNA, 89 nt, synthetic construct
  misc_feature 1..89: note = engineered ribonucleic acid scaffold (ERS) sequence
  source 1..89: mol_type = other RNA
actggcgcttctatctgattactctgagagccttcaccagcgactatgtcgtatgggctaaagctccctcttcggagggagcatcagag

SEQ ID NO: 18734 - RNA, 86 nt, synthetic construct
  misc_feature 1..86: note = engineered ribonucleic acid scaffold (ERS) sequence
  source 1..86: mol_type = other RNA
actggcgcttctatctgattactctgagagccttcaccagcgactatgtcgtatgggtagctccctcttcggagggagcatcagag

SEQ ID NO: 18735 - RNA, 88 nt, synthetic construct
  misc_feature 1..88: note = engineered ribonucleic acid scaffold (ERS) sequence
  source 1..88: mol_type = other RNA
actggcgcttctatctgattactctgagagccttcaccagcgactatgtcgtatgggtgaagctccctcttcggagggagcatcagag

SEQ ID NO: 18736 - RNA, 88 nt, synthetic construct
  misc_feature 1..88: note = engineered ribonucleic acid scaffold (ERS) sequence
  source 1..88: mol_type = other RNA
actggcgcttctatctgattactctgagagccttcaccagcgactatgtcgtatgggtagagctccctcttcggagggagcatcagag

SEQ ID NO: 18737 - RNA, 88 nt, synthetic construct
  misc_feature 1..88: note = engineered ribonucleic acid scaffold (ERS) sequence
  source 1..88: mol_type = other RNA
actggggcttctatctgattactctgagacccaacaccagcgactatgtcgtatgggtaaagctccctcttcggagggagcatcagag

SEQ ID NO: 18738 - RNA, 88 nt, synthetic construct
  misc_feature 1..88: note = engineered ribonucleic acid scaffold (ERS) sequence
  source 1..88: mol_type = other RNA
actggggcttctatctgattactctgagacccagcaccagcgactatgtcgtatgggtaaagctccctcttcggagggagcatcagag

SEQ ID NO: 18739 - RNA, 88 nt, synthetic construct
  misc_feature 1..88: note = engineered ribonucleic acid scaffold (ERS) sequence
  source 1..88: mol_type = other RNA
actggggcttctatctgattactctgagacccatgaccagcgactatgtcgtatggctaaagctccctcttcggagggagcatcagag

SEQ ID NO: 18740 - RNA, 89 nt, synthetic construct
  misc_feature 1..89: note = engineered ribonucleic acid scaffold (ERS) sequence
  source 1..89: mol_type = other RNA
actggggcttctatctgattactctgagacccatgaccagcgactatgtcgtatgggctaaagctccctcttcggagggagcatcagag

SEQ ID NO: 18741 - RNA, 88 nt, synthetic construct
  misc_feature 1..88: note = engineered ribonucleic acid scaffold (ERS) sequence
  source 1..88: mol_type = other RNA
actggggcttctatctgattactctgagacccatgaccagcgactatgtcgtatgggtaaagctccctcttcggagggagcatcagag

SEQ ID NO: 18742 - RNA, 88 nt, synthetic construct
  misc_feature 1..88: note = engineered ribonucleic acid scaffold (ERS) sequence
  source 1..88: mol_type = other RNA
actggggcttctatctgattactctgagacccatccccagcgactatgtcgtatgggtaaagctccctcttcggagggagcatcagag

SEQ ID NO: 18743 - RNA, 89 nt, synthetic construct
  misc_feature 1..89: note = engineered ribonucleic acid scaffold (ERS) sequence
  source 1..89: mol_type = other RNA
actggggcttctatctgattactctgagacccatcgccagcgactatgtcgtatggcgtaaagctccctcttcggagggagcatcagag

SEQ ID NO: 18744 - RNA, 88 nt, synthetic construct
  misc_feature 1..88: note = engineered ribonucleic acid scaffold (ERS) sequence
  source 1..88: mol_type = other RNA
actggggcttctatctgattactctgagacccatcgccagcgactatgtcgtatgggtaaagctccctcttcggagggagcatcagag

SEQ ID NO: 18745 - RNA, 88 nt, synthetic construct
  misc_feature 1..88: note = engineered ribonucleic acid scaffold (ERS) sequence
  source 1..88: mol_type = other RNA
actggggcttctatctgattactctgagacccatctccagcgactatgtcgtatgggtaaagctccctcttcggagggagcatcagag

SEQ ID NO: 18746 - RNA, 88 nt, synthetic construct
  misc_feature 1..88: note = engineered ribonucleic acid scaffold (ERS) sequence
  source 1..88: mol_type = other RNA
actggggcttctatctgattactctgagacccatcacctgcgactatgtcgtaagggtaaagctccctcttcggagggagcatcagag

SEQ ID NO: 18747 - RNA, 88 nt, synthetic construct
  misc_feature 1..88: note = engineered ribonucleic acid scaffold (ERS) sequence
  source 1..88: mol_type = other RNA
actggggcttctatctgattactctgagacccatcaccagagactatgtcttatgggtaaagctccctcttcggagggagcatcagag

SEQ ID NO: 18748 - RNA, 88 nt, synthetic construct
  misc_feature 1..88: note = engineered ribonucleic acid scaffold (ERS) sequence
  source 1..88: mol_type = other RNA
actggggcttctatctgattactctgagacccatcaccagggactatgtcctatgggtaaagctccctcttcggagggagcatcagag

SEQ ID NO: 18749 - RNA, 89 nt, synthetic construct
  misc_feature 1..89: note = engineered ribonucleic acid scaffold (ERS) sequence
  source 1..89: mol_type = other RNA
actggggcttctatctgattactctgagacccatcaccaggcactatgtgctattgggtaaagctccctcttcggagggagcatcagag

SEQ ID NO: 18750 - RNA, 88 nt, synthetic construct
  misc_feature 1..88: note = engineered ribonucleic acid scaffold (ERS) sequence
  source 1..88: mol_type = other RNA
actggggcttctatctgattactctgagacccatcaccagccactatgtggtatgggtaaagctccctcttcggagggagcatcagag

SEQ ID NO: 18751 - RNA, 88 nt, synthetic construct
  misc_feature 1..88: note = engineered ribonucleic acid scaffold (ERS) sequence
  source 1..88: mol_type = other RNA
actggggcttctatctgattactctgagacccatcaccagctactatgtagtatgggtaaagctccctcttcggagggagcatcagag

SEQ ID NO: 18752 - RNA, 88 nt, synthetic construct
  misc_feature 1..88: note = engineered ribonucleic acid scaffold (ERS) sequence
  source 1..88: mol_type = other RNA
actggggcttctatctgattactctgagacccatcaccagcgattatgtcgtatgggtaaagctccctcttcggagggagcatcagag

SEQ ID NO: 18753 - RNA, 88 nt, synthetic construct
  misc_feature 1..88: note = engineered ribonucleic acid scaffold (ERS) sequence
  source 1..88: mol_type = other RNA
actggggcttctatctgattactctgagacccatcaccagcgacgatgtcgtatgggtaaagctccctcttcggagggagcatcagag

SEQ ID NO: 18754 - RNA, 88 nt, synthetic construct
  misc_feature 1..88: note = engineered ribonucleic acid scaffold (ERS) sequence
  source 1..88: mol_type = other RNA
actggggcttctatctgattactctgagacccatcaccagcgactctgtcgtatgggtaaagctccctcttcggagggagcatcagag

SEQ ID NO: 18755 - RNA, 88 nt, synthetic construct
  misc_feature 1..88: note = engineered ribonucleic acid scaffold (ERS) sequence
  source 1..88: mol_type = other RNA
actggggcttctatctgattactctgagacccatcaccagcgactatgtcgtgtgggtaaagctccctcttcggagggagcatcagag

SEQ ID NO: 18756 - RNA, 89 nt, synthetic construct
  misc_feature 1..89: note = engineered ribonucleic acid scaffold (ERS) sequence
  source 1..89: mol_type = other RNA
actggggcttctatctgattactctgagacccatcaccagcgactatgtcgtattgggtaaagctccctcttcggagggagcatcagag

SEQ ID NO: 18757 - RNA, 89 nt, synthetic construct
  misc_feature 1..89: note = engineered ribonucleic acid scaffold (ERS) sequence
  source 1..89: mol_type = other RNA
actggggcttctatctgattactctgagacccatcaccagcgactatgtcgtatggagtaaagctccctcttcggagggagcatcagag

SEQ ID NO: 18758 - RNA, 89 nt, synthetic construct
  misc_feature 1..89: note = engineered ribonucleic acid scaffold (ERS) sequence
  source 1..89: mol_type = other RNA
actggggcttctatctgattactctgagacccatcaccagcgactatgtcgtatggcgtaaagctccctcttcggagggagcatcagag

SEQ ID NO: 18759 - RNA, 89 nt, synthetic construct
  misc_feature 1..89: note = engineered ribonucleic acid scaffold (ERS) sequence
  source 1..89: mol_type = other RNA
actggggcttctatctgattactctgagacccatcaccagcgactatgtcgtatggtgtaaagctccctcttcggagggagcatcagag

SEQ ID NO: 18760 - RNA, 89 nt, synthetic construct
  misc_feature 1..89: note = engineered ribonucleic acid scaffold (ERS) sequence
  source 1..89: mol_type = other RNA
actggggcttctatctgattactctgagacccatcaccagcgactatgtcgtatgggctaaagctccctcttcggagggagcatcagag

SEQ ID NO: 18761 - RNA, 86 nt, synthetic construct
  misc_feature 1..86: note = engineered ribonucleic acid scaffold (ERS) sequence
  source 1..86: mol_type = other RNA
actggggcttctatctgattactctgagacccatcaccagcgactatgtcgtatgggtagctccctcttcggagggagcatcagag

SEQ ID NO: 18762 - RNA, 88 nt, synthetic construct
  misc_feature 1..88: note = engineered ribonucleic acid scaffold (ERS) sequence
  source 1..88: mol_type = other RNA
actggggcttctatctgattactctgagacccatcaccagcgactatgtcgtatgggtgaagctccctcttcggagggagcatcagag

SEQ ID NO: 18763 - RNA, 88 nt, synthetic construct
  misc_feature 1..88: note = engineered ribonucleic acid scaffold (ERS) sequence
  source 1..88: mol_type = other RNA
actggggcttctatctgattactctgagacccatcaccagcgactatgtcgtatgggtagagctccctcttcggagggagcatcagag

SEQ ID NO: 18764 - RNA, 88 nt, synthetic construct
  misc_feature 1..88: note = engineered ribonucleic acid scaffold (ERS) sequence
  source 1..88: mol_type = other RNA
actggtgcttctatctgattactctgagagccaacaccagcgactatgtcgtatgggtaaagctccctcttcggagggagcatcagag

SEQ ID NO: 18765 - RNA, 88 nt, synthetic construct
  misc_feature 1..88: note = engineered ribonucleic acid scaffold (ERS) sequence
  source 1..88: mol_type = other RNA
actggtgcttctatctgattactctgagagccagcaccagcgactatgtcgtatgggtaaagctccctcttcggagggagcatcagag

SEQ ID NO: 18766 - RNA, 88 nt, synthetic construct
  misc_feature 1..88: note = engineered ribonucleic acid scaffold (ERS) sequence
  source 1..88: mol_type = other RNA
actggtgcttctatctgattactctgagagccatgaccagcgactatgtcgtatggctaaagctccctcttcggagggagcatcagag

SEQ ID NO: 18767 - RNA, 89 nt, synthetic construct
  misc_feature 1..89: note = engineered ribonucleic acid scaffold (ERS) sequence
  source 1..89: mol_type = other RNA
actggtgcttctatctgattactctgagagccatgaccagcgactatgtcgtatgggctaaagctccctcttcggagggagcatcagag

SEQ ID NO: 18768 - RNA, 88 nt, synthetic construct
  misc_feature 1..88: note = engineered ribonucleic acid scaffold (ERS) sequence
  source 1..88: mol_type = other RNA
actggtgcttctatctgattactctgagagccatgaccagcgactatgtcgtatgggtaaagctccctcttcggagggagcatcagag

SEQ ID NO: 18769 - RNA, 88 nt, synthetic construct
  misc_feature 1..88: note = engineered ribonucleic acid scaffold (ERS) sequence
  source 1..88: mol_type = other RNA
actggtgcttctatctgattactctgagagccatccccagcgactatgtcgtatgggtaaagctccctcttcggagggagcatcagag

SEQ ID NO: 18770 - RNA, 89 nt, synthetic construct
  misc_feature 1..89: note = engineered ribonucleic acid scaffold (ERS) sequence
  source 1..89: mol_type = other RNA
actggtgcttctatctgattactctgagagccatcgccagcgactatgtcgtatggcgtaaagctccctcttcggagggagcatcagag

SEQ ID NO: 18771 - RNA, 88 nt, synthetic construct
  misc_feature 1..88: note = engineered ribonucleic acid scaffold (ERS) sequence
  source 1..88: mol_type = other RNA
actggtgcttctatctgattactctgagagccatcgccagcgactatgtcgtatgggtaaagctccctcttcggagggagcatcagag

SEQ ID NO: 18772 - RNA, 88 nt, synthetic construct
  misc_feature 1..88: note = engineered ribonucleic acid scaffold (ERS) sequence
  source 1..88: mol_type = other RNA
actggtgcttctatctgattactctgagagccatctccagcgactatgtcgtatgggtaaagctccctcttcggagggagcatcagag

SEQ ID NO: 18773 - RNA, 88 nt, synthetic construct
  misc_feature 1..88: note = engineered ribonucleic acid scaffold (ERS) sequence
  source 1..88: mol_type = other RNA
actggtgcttctatctgattactctgagagccatcacctgcgactatgtcgtaagggtaaagctccctcttcggagggagcatcagag

SEQ ID NO: 18774 - RNA, 88 nt, synthetic construct
  misc_feature 1..88: note = engineered ribonucleic acid scaffold (ERS) sequence
  source 1..88: mol_type = other RNA
actggtgcttctatctgattactctgagagccatcaccagagactatgtcttatgggtaaagctccctcttcggagggagcatcagag

SEQ ID NO: 18775 - RNA, 88 nt, synthetic construct
  misc_feature 1..88: note = engineered ribonucleic acid scaffold (ERS) sequence
  source 1..88: mol_type = other RNA
actggtgcttctatctgattactctgagagccatcaccagggactatgtcctatgggtaaagctccctcttcggagggagcatcagag

SEQ ID NO: 18776 - RNA, 89 nt, synthetic construct
  misc_feature 1..89: note = engineered ribonucleic acid scaffold (ERS) sequence
  source 1..89: mol_type = other RNA
actggtgcttctatctgattactctgagagccatcaccaggcactatgtgctattgggtaaagctccctcttcggagggagcatcagag

SEQ ID NO: 18777 - RNA, 88 nt, synthetic construct
  misc_feature 1..88: note = engineered ribonucleic acid scaffold (ERS) sequence
  source 1..88: mol_type = other RNA
actggtgcttctatctgattactctgagagccatcaccagccactatgtggtatgggtaaagctccctcttcggagggagcatcagag

SEQ ID NO: 18778 - RNA, 88 nt, synthetic construct
  misc_feature 1..88: note = engineered ribonucleic acid scaffold (ERS) sequence
  source 1..88: mol_type = other RNA
actggtgcttctatctgattactctgagagccatcaccagctactatgtagtatgggtaaagctccctcttcggagggagcatcagag

SEQ ID NO: 18779 - RNA, 88 nt, synthetic construct
  misc_feature 1..88: note = engineered ribonucleic acid scaffold (ERS) sequence
  source 1..88: mol_type = other RNA
actggtgcttctatctgattactctgagagccatcaccagcgattatgtcgtatgggtaaagctccctcttcggagggagcatcagag

SEQ ID NO: 18780 - RNA, 88 nt, synthetic construct
  misc_feature 1..88: note = engineered ribonucleic acid scaffold (ERS) sequence
  source 1..88: mol_type = other RNA
actggtgcttctatctgattactctgagagccatcaccagcgacgatgtcgtatgggtaaagctccctcttcggagggagcatcagag

SEQ ID NO: 18781 - RNA, 88 nt, synthetic construct
  misc_feature 1..88: note = engineered ribonucleic acid scaffold (ERS) sequence
  source 1..88: mol_type = other RNA
actggtgcttctatctgattactctgagagccatcaccagcgactctgtcgtatgggtaaagctccctcttcggagggagcatcagag

SEQ ID NO: 18782 - RNA, 88 nt, synthetic construct
  misc_feature 1..88: note = engineered ribonucleic acid scaffold (ERS) sequence
  source 1..88: mol_type = other RNA
actggtgcttctatctgattactctgagagccatcaccagcgactatgtcgtgtgggtaaagctccctcttcggagggagcatcagag

SEQ ID NO: 18783 - RNA, 89 nt, synthetic construct
  misc_feature 1..89: note = engineered ribonucleic acid scaffold (ERS) sequence
  source 1..89: mol_type = other RNA
actggtgcttctatctgattactctgagagccatcaccagcgactatgtcgtattgggtaaagctccctcttcggagggagcatcagag

SEQ ID NO: 18784 - RNA, 89 nt, synthetic construct
  misc_feature 1..89: note = engineered ribonucleic acid scaffold (ERS) sequence
  source 1..89: mol_type = other RNA
actggtgcttctatctgattactctgagagccatcaccagcgactatgtcgtatggagtaaagctccctcttcggagggagcatcagag

SEQ ID NO: 18785 - RNA, 89 nt, synthetic construct
  misc_feature 1..89: note = engineered ribonucleic acid scaffold (ERS) sequence
  source 1..89: mol_type = other RNA
actggtgcttctatctgattactctgagagccatcaccagcgactatgtcgtatggcgtaaagctccctcttcggagggagcatcagag

SEQ ID NO: 18786 - RNA, 89 nt, synthetic construct
  misc_feature 1..89: note = engineered ribonucleic acid scaffold (ERS) sequence
  source 1..89: mol_type = other RNA
actggtgcttctatctgattactctgagagccatcaccagcgactatgtcgtatggtgtaaagctccctcttcggagggagcatcagag

SEQ ID NO: 18787 - RNA, 89 nt, synthetic construct
  misc_feature 1..89: note = engineered ribonucleic acid scaffold (ERS) sequence
  source 1..89: mol_type = other RNA
actggtgcttctatctgattactctgagagccatcaccagcgactatgtcgtatgggctaaagctccctcttcggagggagcatcagag

SEQ ID NO: 18788 - RNA, 86 nt, synthetic construct
  misc_feature 1..86: note = engineered ribonucleic acid scaffold (ERS) sequence
  source 1..86: mol_type = other RNA
actggtgcttctatctgattactctgagagccatcaccagcgactatgtcgtatgggtagctccctcttcggagggagcatcagag

SEQ ID NO: 18789 - RNA, 88 nt, synthetic construct
  misc_feature 1..88: note = engineered ribonucleic acid scaffold (ERS) sequence
  source 1..88: mol_type = other RNA
actggtgcttctatctgattactctgagagccatcaccagcgactatgtcgtatgggtgaagctccctcttcggagggagcatcagag

SEQ ID NO: 18790 - RNA, 88 nt, synthetic construct
  misc_feature 1..88: note = engineered ribonucleic acid scaffold (ERS) sequence
  source 1..88: mol_type = other RNA
actggtgcttctatctgattactctgagagccatcaccagcgactatgtcgtatgggtagagctccctcttcggagggagcatcagag

SEQ ID NO: 18791 - RNA, 88 nt, synthetic construct
  misc_feature 1..88: note = engineered ribonucleic acid scaffold (ERS) sequence
  source 1..88: mol_type = other RNA
actgggccttctatctgattactctgaggcccaacaccagcgactatgtcgtatgggtaaagctccctcttcggagggagcatcagag

SEQ ID NO: 18792 - RNA, 88 nt, synthetic construct
  misc_feature 1..88: note = engineered ribonucleic acid scaffold (ERS) sequence
  source 1..88: mol_type = other RNA
actgggccttctatctgattactctgaggcccagcaccagcgactatgtcgtatgggtaaagctccctcttcggagggagcatcagag

SEQ ID NO: 18793 - RNA, 88 nt, synthetic construct
  misc_feature 1..88: note = engineered ribonucleic acid scaffold (ERS) sequence
  source 1..88: mol_type = other RNA
actgggccttctatctgattactctgaggcccatgaccagcgactatgtcgtatggctaaagctccctcttcggagggagcatcagag

SEQ ID NO: 18794 - RNA, 89 nt, synthetic construct
  misc_feature 1..89: note = engineered ribonucleic acid scaffold (ERS) sequence
  source 1..89: mol_type = other RNA
actgggccttctatctgattactctgaggcccatgaccagcgactatgtcgtatgggctaaagctccctcttcggagggagcatcagag

SEQ ID NO: 18795 - RNA, 88 nt, synthetic construct
  misc_feature 1..88: note = engineered ribonucleic acid scaffold (ERS) sequence
  source 1..88: mol_type = other RNA
actgggccttctatctgattactctgaggcccatgaccagcgactatgtcgtatgggtaaagctccctcttcggagggagcatcagag

SEQ ID NO: 18796 - RNA, 88 nt, synthetic construct
  misc_feature 1..88: note = engineered ribonucleic acid scaffold (ERS) sequence
  source 1..88: mol_type = other RNA
actgggccttctatctgattactctgaggcccatccccagcgactatgtcgtatgggtaaagctccctcttcggagggagcatcagag

SEQ ID NO: 18797 - RNA, 89 nt, synthetic construct
  misc_feature 1..89: note = engineered ribonucleic acid scaffold (ERS) sequence
  source 1..89: mol_type = other RNA
actgggccttctatctgattactctgaggcccatcgccagcgactatgtcgtatggcgtaaagctccctcttcggagggagcatcagag

SEQ ID NO: 18798 - RNA, 88 nt, synthetic construct
  misc_feature 1..88: note = engineered ribonucleic acid scaffold (ERS) sequence
  source 1..88: mol_type = other RNA
actgggccttctatctgattactctgaggcccatcgccagcgactatgtcgtatgggtaaagctccctcttcggagggagcatcagag

SEQ ID NO: 18799 - RNA, 88 nt, synthetic construct
  misc_feature 1..88: note = engineered ribonucleic acid scaffold (ERS) sequence
  source 1..88: mol_type = other RNA
actgggccttctatctgattactctgaggcccatctccagcgactatgtcgtatgggtaaagctccctcttcggagggagcatcagag

SEQ ID NO: 18800 - RNA, 88 nt, synthetic construct
  misc_feature 1..88: note = engineered ribonucleic acid scaffold (ERS) sequence
  source 1..88: mol_type = other RNA
actgggccttctatctgattactctgaggcccatcacctgcgactatgtcgtaagggtaaagctccctcttcggagggagcatcagag

SEQ ID NO: 18801 - RNA, 88 nt, synthetic construct
  misc_feature 1..88: note = engineered ribonucleic acid scaffold (ERS) sequence
  source 1..88: mol_type = other RNA
actgggccttctatctgattactctgaggcccatcaccagagactatgtcttatgggtaaagctccctcttcggagggagcatcagag

SEQ ID NO: 18802 - RNA, 88 nt, synthetic construct
  misc_feature 1..88: note = engineered ribonucleic acid scaffold (ERS) sequence
  source 1..88: mol_type = other RNA
actgggccttctatctgattactctgaggcccatcaccagggactatgtcctatgggtaaagctccctcttcggagggagcatcagag

SEQ ID NO: 18803 - RNA, 89 nt, synthetic construct
  misc_feature 1..89: note = engineered ribonucleic acid scaffold (ERS) sequence
  source 1..89: mol_type = other RNA
actgggccttctatctgattactctgaggcccatcaccaggcactatgtgctattgggtaaagctccctcttcggagggagcatcagag

SEQ ID NO: 18804 - RNA, 88 nt, synthetic construct
  misc_feature 1..88: note = engineered ribonucleic acid scaffold (ERS) sequence
  source 1..88: mol_type = other RNA
actgggccttctatctgattactctgaggcccatcaccagccactatgtggtatgggtaaagctccctcttcggagggagcatcagag

SEQ ID NO: 18805 - RNA, 88 nt, synthetic construct
  misc_feature 1..88: note = engineered ribonucleic acid scaffold (ERS) sequence
  source 1..88: mol_type = other RNA
actgggccttctatctgattactctgaggcccatcaccagctactatgtagtatgggtaaagctccctcttcggagggagcatcagag

SEQ ID NO: 18806 - RNA, 88 nt, synthetic construct
  misc_feature 1..88: note = engineered ribonucleic acid scaffold (ERS) sequence
  source 1..88: mol_type = other RNA
actgggccttctatctgattactctgaggcccatcaccagcgattatgtcgtatgggtaaagctccctcttcggagggagcatcagag

SEQ ID NO: 18807 - RNA, 88 nt, synthetic construct
  misc_feature 1..88: note = engineered ribonucleic acid scaffold (ERS) sequence
  source 1..88: mol_type = other RNA
actgggccttctatctgattactctgaggcccatcaccagcgacgatgtcgtatgggtaaagctccctcttcggagggagcatcagag

SEQ ID NO: 18808 - RNA, 88 nt, synthetic construct
  misc_feature 1..88: note = engineered ribonucleic acid scaffold (ERS) sequence
  source 1..88: mol_type = other RNA
actgggccttctatctgattactctgaggcccatcaccagcgactctgtcgtatgggtaaagctccctcttcggagggagcatcagag

SEQ ID NO: 18809 - RNA, 88 nt, synthetic construct
  misc_feature 1..88: note = engineered ribonucleic acid scaffold (ERS) sequence
  source 1..88: mol_type = other RNA
actgggccttctatctgattactctgaggcccatcaccagcgactatgtcgtgtgggtaaagctccctcttcggagggagcatcagag

SEQ ID NO: 18810 - RNA, 89 nt, synthetic construct
  misc_feature 1..89: note = engineered ribonucleic acid scaffold (ERS) sequence
  source 1..89: mol_type = other RNA
actgggccttctatctgattactctgaggcccatcaccagcgactatgtcgtattgggtaaagctccctcttcggagggagcatcagag

SEQ ID NO: 18811 - RNA, 89 nt, synthetic construct
  misc_feature 1..89: note = engineered ribonucleic acid scaffold (ERS) sequence
  source 1..89: mol_type = other RNA
actgggccttctatctgattactctgaggcccatcaccagcgactatgtcgtatggagtaaagctccctcttcggagggagcatcagag

SEQ ID NO: 18812 - RNA, 89 nt, synthetic construct
  misc_feature 1..89: note = engineered ribonucleic acid scaffold (ERS) sequence
  source 1..89: mol_type = other RNA
actgggccttctatctgattactctgaggcccatcaccagcgactatgtcgtatggcgtaaagctccctcttcggagggagcatcagag

SEQ ID NO: 18813 - RNA, 89 nt, synthetic construct
  misc_feature 1..89: note = engineered ribonucleic acid scaffold (ERS) sequence
  source 1..89: mol_type = other RNA
actgggccttctatctgattactctgaggcccatcaccagcgactatgtcgtatggtgtaaagctccctcttcggagggagcatcagag

SEQ ID NO: 18814 - RNA, 89 nt, synthetic construct
  misc_feature 1..89: note = engineered ribonucleic acid scaffold (ERS) sequence
  source 1..89: mol_type = other RNA
actgggccttctatctgattactctgaggcccatcaccagcgactatgtcgtatgggctaaagctccctcttcggagggagcatcagag

SEQ ID NO: 18815 - RNA, 86 nt, synthetic construct
  misc_feature 1..86: note = engineered ribonucleic acid scaffold (ERS) sequence
  source 1..86: mol_type = other RNA
actgggccttctatctgattactctgaggcccatcaccagcgactatgtcgtatgggtagctccctcttcggagggagcatcagag

SEQ ID NO: 18816 - RNA, 88 nt, synthetic construct
  misc_feature 1..88: note = engineered ribonucleic acid scaffold (ERS) sequence
  source 1..88: mol_type = other RNA
actgggccttctatctgattactctgaggcccatcaccagcgactatgtcgtatgggtgaagctccctcttcggagggagcatcagag

SEQ ID NO: 18817 - RNA, 88 nt, synthetic construct
  misc_feature 1..88: note = engineered ribonucleic acid scaffold (ERS) sequence
  source 1..88: mol_type = other RNA
actgggccttctatctgattactctgaggcccatcaccagcgactatgtcgtatgggtagagctccctcttcggagggagcatcagag

SEQ ID NO: 18818 - RNA, 89 nt, synthetic construct
  misc_feature 1..89: note = engineered ribonucleic acid scaffold (ERS) sequence
  source 1..89: mol_type = other RNA
actggcccttctatctgattactctgaggagccaacaccagcgactatgtcgtatgggtaaagctccctcttcggagggagcatcagag

SEQ ID NO: 18819 - RNA, 89 nt, synthetic construct
  misc_feature 1..89: note = engineered ribonucleic acid scaffold (ERS) sequence
  source 1..89: mol_type = other RNA
actggcccttctatctgattactctgaggagccagcaccagcgactatgtcgtatgggtaaagctccctcttcggagggagcatcagag

SEQ ID NO: 18820 - RNA, 89 nt, synthetic construct
  misc_feature 1..89: note = engineered ribonucleic acid scaffold (ERS) sequence
  source 1..89: mol_type = other RNA
actggcccttctatctgattactctgaggagccatgaccagcgactatgtcgtatggctaaagctccctcttcggagggagcatcagag

SEQ ID NO: 18821 - RNA, 90 nt, synthetic construct
  misc_feature 1..90: note = engineered ribonucleic acid scaffold (ERS) sequence
  source 1..90: mol_type = other RNA
actggcccttctatctgattactctgaggagccatgaccagcgactatgtcgtatgggctaaagctccctcttcggagggagcatcagag

SEQ ID NO: 18822 - RNA, 89 nt, synthetic construct
  misc_feature 1..89: note = engineered ribonucleic acid scaffold (ERS) sequence
  source 1..89: mol_type = other RNA
actggcccttctatctgattactctgaggagccatgaccagcgactatgtcgtatgggtaaagctccctcttcggagggagcatcagag

SEQ ID NO: 18823 - RNA, 89 nt, synthetic construct
  misc_feature 1..89: note = engineered ribonucleic acid scaffold (ERS) sequence
  source 1..89: mol_type = other RNA
actggcccttctatctgattactctgaggagccatccccagcgactatgtcgtatgggtaaagctccctcttcggagggagcatcagag

SEQ ID NO: 18824 - RNA, 90 nt, synthetic construct
  misc_feature 1..90: note = engineered ribonucleic acid scaffold (ERS) sequence
  source 1..90: mol_type = other RNA
actggcccttctatctgattactctgaggagccatcgccagcgactatgtcgtatggcgtaaagctccctcttcggagggagcatcagag

SEQ ID NO: 18825 - RNA, 89 nt, synthetic construct
  misc_feature 1..89: note = engineered ribonucleic acid scaffold (ERS) sequence
  source 1..89: mol_type = other RNA
actggcccttctatctgattactctgaggagccatcgccagcgactatgtcgtatgggtaaagctccctcttcggagggagcatcagag

SEQ ID NO: 18826 - RNA, 89 nt, synthetic construct
  misc_feature 1..89: note = engineered ribonucleic acid scaffold (ERS) sequence
  source 1..89: mol_type = other RNA
actggcccttctatctgattactctgaggagccatctccagcgactatgtcgtatgggtaaagctccctcttcggagggagcatcagag

SEQ ID NO: 18827 - RNA, 89 nt, synthetic construct
  misc_feature 1..89: note = engineered ribonucleic acid scaffold (ERS) sequence
  source 1..89: mol_type = other RNA
actggcccttctatctgattactctgaggagccatcacctgcgactatgtcgtaagggtaaagctccctcttcggagggagcatcagag

SEQ ID NO: 18828 - RNA, 89 nt, synthetic construct
  misc_feature 1..89: note = engineered ribonucleic acid scaffold (ERS) sequence
  source 1..89: mol_type = other RNA
actggcccttctatctgattactctgaggagccatcaccagagactatgtcttatgggtaaagctccctcttcggagggagcatcagag

SEQ ID NO: 18829 - RNA, 89 nt, synthetic construct
  misc_feature 1..89: note = engineered ribonucleic acid scaffold (ERS) sequence
  source 1..89: mol_type = other RNA
actggcccttctatctgattactctgaggagccatcaccagggactatgtcctatgggtaaagctccctcttcggagggagcatcagag

SEQ ID NO: 18830 - RNA, 90 nt, synthetic construct
  misc_feature 1..90: note = engineered ribonucleic acid scaffold (ERS) sequence
  source 1..90: mol_type = other RNA
actggcccttctatctgattactctgaggagccatcaccaggcactatgtgctattgggtaaagctccctcttcggagggagcatcagag

SEQ ID NO: 18831 - RNA, 89 nt, synthetic construct
  misc_feature 1..89: note = engineered ribonucleic acid scaffold (ERS) sequence
  source 1..89: mol_type = other RNA
actggcccttctatctgattactctgaggagccatcaccagccactatgtggtatgggtaaagctccctcttcggagggagcatcagag

SEQ ID NO: 18832 - RNA, 89 nt, synthetic construct
  misc_feature 1..89: note = engineered ribonucleic acid scaffold (ERS) sequence
  source 1..89: mol_type = other RNA
actggcccttctatctgattactctgaggagccatcaccagctactatgtagtatgggtaaagctccctcttcggagggagcatcagag

SEQ ID NO: 18833 - RNA, 89 nt, synthetic construct
  misc_feature 1..89: note = engineered ribonucleic acid scaffold (ERS) sequence
  source 1..89: mol_type = other RNA
actggcccttctatctgattactctgaggagccatcaccagcgattatgtcgtatgggtaaagctccctcttcggagggagcatcagag

SEQ ID NO: 18834 - RNA, 89 nt, synthetic construct
  misc_feature 1..89: note = engineered ribonucleic acid scaffold (ERS) sequence
  source 1..89: mol_type = other RNA
actggcccttctatctgattactctgaggagccatcaccagcgacgatgtcgtatgggtaaagctccctcttcggagggagcatcagag

SEQ ID NO: 18835 - RNA, 89 nt, synthetic construct
  misc_feature 1..89: note = engineered ribonucleic acid scaffold (ERS) sequence
  source 1..89: mol_type = other RNA
actggcccttctatctgattactctgaggagccatcaccagcgactctgtcgtatgggtaaagctccctcttcggagggagcatcagag

SEQ ID NO: 18836 - RNA, 89 nt, synthetic construct
  misc_feature 1..89: note = engineered ribonucleic acid scaffold (ERS) sequence
  source 1..89: mol_type = other RNA
actggcccttctatctgattactctgaggagccatcaccagcgactatgtcgtgtgggtaaagctccctcttcggagggagcatcagag

SEQ ID NO: 18837 - RNA, 90 nt, synthetic construct
  misc_feature 1..90: note = engineered ribonucleic acid scaffold (ERS) sequence
  source 1..90: mol_type = other RNA
actggcccttctatctgattactctgaggagccatcaccagcgactatgtcgtattgggtaaagctccctcttcggagggagcatcagag

SEQ ID NO: 18838 - RNA, 90 nt, synthetic construct
  misc_feature 1..90: note = engineered ribonucleic acid scaffold (ERS) sequence
  source 1..90: mol_type = other RNA
actggcccttctatctgattactctgaggagccatcaccagcgactatgtcgtatggagtaaagctccctcttcggagggagcatcagag

SEQ ID NO: 18839 - RNA, 90 nt, synthetic construct
  misc_feature 1..90: note = engineered ribonucleic acid scaffold (ERS) sequence
  source 1..90: mol_type = other RNA
actggcccttctatctgattactctgaggagccatcaccagcgactatgtcgtatggcgtaaagctccctcttcggagggagcatcagag

SEQ ID NO: 18840 - RNA, 90 nt, synthetic construct
  misc_feature 1..90: note = engineered ribonucleic acid scaffold (ERS) sequence
  source 1..90: mol_type = other RNA
actggcccttctatctgattactctgaggagccatcaccagcgactatgtcgtatggtgtaaagctccctcttcggagggagcatcagag

SEQ ID NO: 18841 - RNA, 90 nt, synthetic construct
  misc_feature 1..90: note = engineered ribonucleic acid scaffold (ERS) sequence
  source 1..90: mol_type = other RNA
actggcccttctatctgattactctgaggagccatcaccagcgactatgtcgtatgggctaaagctccctcttcggagggagcatcagag

SEQ ID NO: 18842 - RNA, 87 nt, synthetic construct
  misc_feature 1..87: note = engineered ribonucleic acid scaffold (ERS) sequence
  source 1..87: mol_type = other RNA
actggcccttctatctgattactctgaggagccatcaccagcgactatgtcgtatgggtagctccctcttcggagggagcatcagag

SEQ ID NO: 18843 - RNA, 89 nt, synthetic construct
  misc_feature 1..89: note = engineered ribonucleic acid scaffold (ERS) sequence
  source 1..89: mol_type = other RNA
actggcccttctatctgattactctgaggagccatcaccagcgactatgtcgtatgggtgaagctccctcttcggagggagcatcagag

SEQ ID NO: 18844 - RNA, 89 nt, synthetic construct
  misc_feature 1..89: note = engineered ribonucleic acid scaffold (ERS) sequence
  source 1..89: mol_type = other RNA
actggcccttctatctgattactctgaggagccatcaccagcgactatgtcgtatgggtagagctccctcttcggagggagcatcagag

SEQ ID NO: 18845 - RNA, 88 nt, synthetic construct
  misc_feature 1..88: note = engineered ribonucleic acid scaffold (ERS) sequence
  source 1..88: mol_type = other RNA
actggcccttctatctgattactctgagggccaacaccagcgactatgtcgtatgggtaaagctccctcttcggagggagcatcagag

SEQ ID NO: 18846 - RNA, 88 nt, synthetic construct
  misc_feature 1..88: note = engineered ribonucleic acid scaffold (ERS) sequence
  source 1..88: mol_type = other RNA
actggcccttctatctgattactctgagggccagcaccagcgactatgtcgtatgggtaaagctccctcttcggagggagcatcagag

SEQ ID NO: 18847 - RNA, 88 nt, synthetic construct
  misc_feature 1..88: note = engineered ribonucleic acid scaffold (ERS) sequence
  source 1..88: mol_type = other RNA
actggcccttctatctgattactctgagggccatgaccagcgactatgtcgtatggctaaagctccctcttcggagggagcatcagag

SEQ ID NO: 18848 - RNA, 89 nt, synthetic construct
  misc_feature 1..89: note = engineered ribonucleic acid scaffold (ERS) sequence
  source 1..89: mol_type = other RNA
actggcccttctatctgattactctgagggccatgaccagcgactatgtcgtatgggctaaagctccctcttcggagggagcatcagag

SEQ ID NO: 18849 - RNA, 88 nt, synthetic construct
  misc_feature 1..88: note = engineered ribonucleic acid scaffold (ERS) sequence
  source 1..88: mol_type = other RNA
actggcccttctatctgattactctgagggccatgaccagcgactatgtcgtatgggtaaagctccctcttcggagggagcatcagag

SEQ ID NO: 18850 - RNA, 88 nt, synthetic construct
  misc_feature 1..88: note = engineered ribonucleic acid scaffold (ERS) sequence
  source 1..88: mol_type = other RNA
actggcccttctatctgattactctgagggccatccccagcgactatgtcgtatgggtaaagctccctcttcggagggagcatcagag

SEQ ID NO: 18851 - RNA, 89 nt, synthetic construct
  misc_feature 1..89: note = engineered ribonucleic acid scaffold (ERS) sequence
  source 1..89: mol_type = other RNA
actggcccttctatctgattactctgagggccatcgccagcgactatgtcgtatggcgtaaagctccctcttcggagggagcatcagag

SEQ ID NO: 18852 - RNA, 88 nt, synthetic construct
  misc_feature 1..88: note = engineered ribonucleic acid scaffold (ERS) sequence
  source 1..88: mol_type = other RNA
actggcccttctatctgattactctgagggccatcgccagcgactatgtcgtatgggtaaagctccctcttcggagggagcatcagag

SEQ ID NO: 18853 - RNA, 88 nt, synthetic construct
  misc_feature 1..88: note = engineered ribonucleic acid scaffold (ERS) sequence
  source 1..88: mol_type = other RNA
actggcccttctatctgattactctgagggccatctccagcgactatgtcgtatgggtaaagctccctcttcggagggagcatcagag

SEQ ID NO: 18854 - RNA, 88 nt, synthetic construct
  misc_feature 1..88: note = engineered ribonucleic acid scaffold (ERS) sequence
  source 1..88: mol_type = other RNA
actggcccttctatctgattactctgagggccatcacctgcgactatgtcgtaagggtaaagctccctcttcggagggagcatcagag

SEQ ID NO: 18855 - RNA, 88 nt, synthetic construct
  misc_feature 1..88: note = engineered ribonucleic acid scaffold (ERS) sequence
  source 1..88: mol_type = other RNA
actggcccttctatctgattactctgagggccatcaccagagactatgtcttatgggtaaagctccctcttcggagggagcatcagag

SEQ ID NO: 18856 - RNA, 88 nt, synthetic construct
  misc_feature 1..88: note = engineered ribonucleic acid scaffold (ERS) sequence
  source 1..88: mol_type = other RNA
actggcccttctatctgattactctgagggccatcaccagggactatgtcctatgggtaaagctccctcttcggagggagcatcagag

SEQ ID NO: 18857 - RNA, 89 nt, synthetic construct
  misc_feature 1..89: note = engineered ribonucleic acid scaffold (ERS) sequence
  source 1..89: mol_type = other RNA
actggcccttctatctgattactctgagggccatcaccaggcactatgtgctattgggtaaagctccctcttcggagggagcatcagag

SEQ ID NO: 18858 - RNA, 88 nt, synthetic construct
  misc_feature 1..88: note = engineered ribonucleic acid scaffold (ERS) sequence
  source 1..88: mol_type = other RNA
actggcccttctatctgattactctgagggccatcaccagccactatgtggtatgggtaaagctccctcttcggagggagcatcagag

SEQ ID NO: 18859 - RNA, 88 nt, synthetic construct
  misc_feature 1..88: note = engineered ribonucleic acid scaffold (ERS) sequence
  source 1..88: mol_type = other RNA
actggcccttctatctgattactctgagggccatcaccagctactatgtagtatgggtaaagctccctcttcggagggagcatcagag

SEQ ID NO: 18860 - RNA, 88 nt, synthetic construct
  misc_feature 1..88: note = engineered ribonucleic acid scaffold (ERS) sequence
  source 1..88: mol_type = other RNA
actggcccttctatctgattactctgagggccatcaccagcgattatgtcgtatgggtaaagctccctcttcggagggagcatcagag

SEQ ID NO: 18861 - RNA, 88 nt, synthetic construct
  misc_feature 1..88: note = engineered ribonucleic acid scaffold (ERS) sequence
  source 1..88: mol_type = other RNA
actggcccttctatctgattactctgagggccatcaccagcgacgatgtcgtatgggtaaagctccctcttcggagggagcatcagag

SEQ ID NO: 18862 - RNA, 88 nt, synthetic construct
  misc_feature 1..88: note = engineered ribonucleic acid scaffold (ERS) sequence
  source 1..88: mol_type = other RNA
actggcccttctatctgattactctgagggccatcaccagcgactctgtcgtatgggtaaagctccctcttcggagggagcatcagag

SEQ ID NO: 18863 - RNA, 88 nt, synthetic construct
  misc_feature 1..88: note = engineered ribonucleic acid scaffold (ERS) sequence
  source 1..88: mol_type = other RNA
actggcccttctatctgattactctgagggccatcaccagcgactatgtcgtgtgggtaaagctccctcttcggagggagcatcagag

SEQ ID NO: 18864 - RNA, 89 nt, synthetic construct
  misc_feature 1..89: note = engineered ribonucleic acid scaffold (ERS) sequence
  source 1..89: mol_type = other RNA
actggcccttctatctgattactctgagggccatcaccagcgactatgtcgtattgggtaaagctccctcttcggagggagcatcagag

SEQ ID NO: 18865 - RNA, 89 nt, synthetic construct
  misc_feature 1..89: note = engineered ribonucleic acid scaffold (ERS) sequence
  source 1..89: mol_type = other RNA
actggcccttctatctgattactctgagggccatcaccagcgactatgtcgtatggagtaaagctccctcttcggagggagcatcagag

SEQ ID NO: 18866 - RNA, 89 nt, synthetic construct
  misc_feature 1..89: note = engineered ribonucleic acid scaffold (ERS) sequence
  source 1..89: mol_type = other RNA
actggcccttctatctgattactctgagggccatcaccagcgactatgtcgtatggcgtaaagctccctcttcggagggagcatcagag

SEQ ID NO: 18867 - RNA, 89 nt, synthetic construct
  misc_feature 1..89: note = engineered ribonucleic acid scaffold (ERS) sequence
  source 1..89: mol_type = other RNA
actggcccttctatctgattactctgagggccatcaccagcgactatgtcgtatggtgtaaagctccctcttcggagggagcatcagag

SEQ ID NO: 18868 - RNA, 89 nt, synthetic construct
  misc_feature 1..89: note = engineered ribonucleic acid scaffold (ERS) sequence
  source 1..89: mol_type = other RNA
actggcccttctatctgattactctgagggccatcaccagcgactatgtcgtatgggctaaagctccctcttcggagggagcatcagag

SEQ ID NO: 18869 - RNA, 86 nt, synthetic construct
  misc_feature 1..86: note = engineered ribonucleic acid scaffold (ERS) sequence
  source 1..86: mol_type = other RNA
actggcccttctatctgattactctgagggccatcaccagcgactatgtcgtatgggtagctccctcttcggagggagcatcagag

SEQ ID NO: 18870 - RNA, 88 nt, synthetic construct
  misc_feature 1..88: note = engineered ribonucleic acid scaffold (ERS) sequence
  source 1..88: mol_type = other RNA
actggcccttctatctgattactctgagggccatcaccagcgactatgtcgtatgggtgaagctccctcttcggagggagcatcagag

SEQ ID NO: 18871 - RNA, 88 nt, synthetic construct
  misc_feature 1..88: note = engineered ribonucleic acid scaffold (ERS) sequence
  source 1..88: mol_type = other RNA
actggcccttctatctgattactctgagggccatcaccagcgactatgtcgtatgggtagagctccctcttcggagggagcatcagag

SEQ ID NO: 18872 - RNA, 88 nt, synthetic construct
  misc_feature 1..88: note = engineered ribonucleic acid scaffold (ERS) sequence
  source 1..88: mol_type = other RNA
actggcccttctatctgattactctgagtgccaacaccagcgactatgtcgtatgggtaaagctccctcttcggagggagcatcagag

SEQ ID NO: 18873 - RNA, 88 nt, synthetic construct
  misc_feature 1..88: note = engineered ribonucleic acid scaffold (ERS) sequence
  source 1..88: mol_type = other RNA
actggcccttctatctgattactctgagtgccagcaccagcgactatgtcgtatgggtaaagctccctcttcggagggagcatcagag

SEQ ID NO: 18874 - RNA, 88 nt, synthetic construct
  misc_feature 1..88: note = engineered ribonucleic acid scaffold (ERS) sequence
  source 1..88: mol_type = other RNA
actggcccttctatctgattactctgagtgccatgaccagcgactatgtcgtatggctaaagctccctcttcggagggagcatcagag

SEQ ID NO: 18875 - RNA, 89 nt, synthetic construct
  misc_feature 1..89: note = engineered ribonucleic acid scaffold (ERS) sequence
  source 1..89: mol_type = other RNA
actggcccttctatctgattactctgagtgccatgaccagcgactatgtcgtatgggctaaagctccctcttcggagggagcatcagag

SEQ ID NO: 18876 - RNA, 88 nt, synthetic construct
  misc_feature 1..88: note = engineered ribonucleic acid scaffold (ERS) sequence
  source 1..88: mol_type = other RNA
actggcccttctatctgattactctgagtgccatgaccagcgactatgtcgtatgggtaaagctccctcttcggagggagcatcagag

SEQ ID NO: 18877 - RNA, 88 nt, synthetic construct
  misc_feature 1..88: note = engineered ribonucleic acid scaffold (ERS) sequence
  source 1..88: mol_type = other RNA
actggcccttctatctgattactctgagtgccatccccagcgactatgtcgtatgggtaaagctccctcttcggagggagcatcagag

SEQ ID NO: 18878 - RNA, 89 nt, synthetic construct
  misc_feature 1..89: note = engineered ribonucleic acid scaffold (ERS) sequence
  source 1..89: mol_type = other RNA
actggcccttctatctgattactctgagtgccatcgccagcgactatgtcgtatggcgtaaagctccctcttcggagggagcatcagag

SEQ ID NO: 18879 - RNA, 88 nt, synthetic construct
  misc_feature 1..88: note = engineered ribonucleic acid scaffold (ERS) sequence
  source 1..88: mol_type = other RNA
actggcccttctatctgattactctgagtgccatcgccagcgactatgtcgtatgggtaaagctccctcttcggagggagcatcagag

SEQ ID NO: 18880 - RNA, 88 nt, synthetic construct
  misc_feature 1..88: note = engineered ribonucleic acid scaffold (ERS) sequence
  source 1..88: mol_type = other RNA
actggcccttctatctgattactctgagtgccatctccagcgactatgtcgtatgggtaaagctccctcttcggagggagcatcagag

SEQ ID NO: 18881 - RNA, 88 nt, synthetic construct
  misc_feature 1..88: note = engineered ribonucleic acid scaffold (ERS) sequence
  source 1..88: mol_type = other RNA
actggcccttctatctgattactctgagtgccatcacctgcgactatgtcgtaagggtaaagctccctcttcggagggagcatcagag

SEQ ID NO: 18882 - RNA, 88 nt, synthetic construct
  misc_feature 1..88: note = engineered ribonucleic acid scaffold (ERS) sequence
  source 1..88: mol_type = other RNA
actggcccttctatctgattactctgagtgccatcaccagagactatgtcttatgggtaaagctccctcttcggagggagcatcagag

SEQ ID NO: 18883 - RNA, 88 nt, synthetic construct
  misc_feature 1..88: note = engineered ribonucleic acid scaffold (ERS) sequence
  source 1..88: mol_type = other RNA
actggcccttctatctgattactctgagtgccatcaccagggactatgtcctatgggtaaagctccctcttcggagggagcatcagag

SEQ ID NO: 18884 - RNA, 89 nt, synthetic construct
  misc_feature 1..89: note = engineered ribonucleic acid scaffold (ERS) sequence
  source 1..89: mol_type = other RNA
actggcccttctatctgattactctgagtgccatcaccaggcactatgtgctattgggtaaagctccctcttcggagggagcatcagag

SEQ ID NO: 18885 - RNA, 88 nt, synthetic construct
  misc_feature 1..88: note = engineered ribonucleic acid scaffold (ERS) sequence
  source 1..88: mol_type = other RNA
actggcccttctatctgattactctgagtgccatcaccagccactatgtggtatgggtaaagctccctcttcggagggagcatcagag

SEQ ID NO: 18886 - RNA, 88 nt, synthetic construct
  misc_feature 1..88: note = engineered ribonucleic acid scaffold (ERS) sequence
  source 1..88: mol_type = other RNA
actggcccttctatctgattactctgagtgccatcaccagctactatgtagtatgggtaaagctccctcttcggagggagcatcagag

SEQ ID NO: 18887 - RNA, 88 nt, synthetic construct
  misc_feature 1..88: note = engineered ribonucleic acid scaffold (ERS) sequence
  source 1..88: mol_type = other RNA
actggcccttctatctgattactctgagtgccatcaccagcgattatgtcgtatgggtaaagctccctcttcggagggagcatcagag

SEQ ID NO: 18888 - RNA, 88 nt, synthetic construct
  misc_feature 1..88: note = engineered ribonucleic acid scaffold (ERS) sequence
  source 1..88: mol_type = other RNA
actggcccttctatctgattactctgagtgccatcaccagcgacgatgtcgtatgggtaaagctccctcttcggagggagcatcagag

SEQ ID NO: 18889 - RNA, 88 nt, synthetic construct
  misc_feature 1..88: note = engineered ribonucleic acid scaffold (ERS) sequence
  source 1..88: mol_type = other RNA
actggcccttctatctgattactctgagtgccatcaccagcgactctgtcgtatgggtaaagctccctcttcggagggagcatcagag

SEQ ID NO: 18890 - RNA, 88 nt, synthetic construct
  misc_feature 1..88: note = engineered ribonucleic acid scaffold (ERS) sequence
  source 1..88: mol_type = other RNA
actggcccttctatctgattactctgagtgccatcaccagcgactatgtcgtgtgggtaaagctccctcttcggagggagcatcagag

SEQ ID NO: 18891 - RNA, 89 nt, synthetic construct
  misc_feature 1..89: note = engineered ribonucleic acid scaffold (ERS) sequence
  source 1..89: mol_type = other RNA
actggcccttctatctgattactctgagtgccatcaccagcgactatgtcgtattgggtaaagctccctcttcggagggagcatcagag

SEQ ID NO: 18892 - RNA, 89 nt, synthetic construct
  misc_feature 1..89: note = engineered ribonucleic acid scaffold (ERS) sequence
  source 1..89: mol_type = other RNA
actggcccttctatctgattactctgagtgccatcaccagcgactatgtcgtatggagtaaagctccctcttcggagggagcatcagag

SEQ ID NO: 18893 - RNA, 89 nt, synthetic construct
  misc_feature 1..89: note = engineered ribonucleic acid scaffold (ERS) sequence
  source 1..89: mol_type = other RNA
actggcccttctatctgattactctgagtgccatcaccagcgactatgtcgtatggcgtaaagctccctcttcggagggagcatcagag

SEQ ID NO: 18894 - RNA, 89 nt, synthetic construct
  misc_feature 1..89: note = engineered ribonucleic acid scaffold (ERS) sequence
  source 1..89: mol_type = other RNA
actggcccttctatctgattactctgagtgccatcaccagcgactatgtcgtatggtgtaaagctccctcttcggagggagcatcagag

SEQ ID NO: 18895 - RNA, 89 nt, synthetic construct
  misc_feature 1..89: note = engineered ribonucleic acid scaffold (ERS) sequence
  source 1..89: mol_type = other RNA
actggcccttctatctgattactctgagtgccatcaccagcgactatgtcgtatgggctaaagctccctcttcggagggagcatcagag

SEQ ID NO: 18896 - RNA, 86 nt, synthetic construct
  misc_feature 1..86: note = engineered ribonucleic acid scaffold (ERS) sequence
  source 1..86: mol_type = other RNA
actggcccttctatctgattactctgagtgccatcaccagcgactatgtcgtatgggtagctccctcttcggagggagcatcagag

SEQ ID NO: 18897 - RNA, 88 nt, synthetic construct
  misc_feature 1..88: note = engineered ribonucleic acid scaffold (ERS) sequence
  source 1..88: mol_type = other RNA
actggcccttctatctgattactctgagtgccatcaccagcgactatgtcgtatgggtgaagctccctcttcggagggagcatcagag

SEQ ID NO: 18898 - RNA, 88 nt, synthetic construct
  misc_feature 1..88: note = engineered ribonucleic acid scaffold (ERS) sequence
  source 1..88: mol_type = other RNA
actggcccttctatctgattactctgagtgccatcaccagcgactatgtcgtatgggtagagctccctcttcggagggagcatcagag

SEQ ID NO: 18899 - RNA, 88 nt, synthetic construct
  misc_feature 1..88: note = engineered ribonucleic acid scaffold (ERS) sequence
  source 1..88: mol_type = other RNA
actggcccttctatctgattactctgagagccaacaccagcgactatgtcgtatgggtaaagctccctcttcggagggagcatcagag

SEQ ID NO: 18900 - RNA, 88 nt, synthetic construct
  misc_feature 1..88: note = engineered ribonucleic acid scaffold (ERS) sequence
  source 1..88: mol_type = other RNA
actggcccttctatctgattactctgagagccagcaccagcgactatgtcgtatgggtaaagctccctcttcggagggagcatcagag

SEQ ID NO: 18901 - RNA, 88 nt, synthetic construct
  misc_feature 1..88: note = engineered ribonucleic acid scaffold (ERS) sequence
  source 1..88: mol_type = other RNA
actggcccttctatctgattactctgagagccatgaccagcgactatgtcgtatggctaaagctccctcttcggagggagcatcagag

SEQ ID NO: 18902 - RNA, 89 nt, synthetic construct
  misc_feature 1..89: note = engineered ribonucleic acid scaffold (ERS) sequence
  source 1..89: mol_type = other RNA
actggcccttctatctgattactctgagagccatgaccagcgactatgtcgtatgggctaaagctccctcttcggagggagcatcagag

SEQ ID NO: 18903 - RNA, 88 nt, synthetic construct
  misc_feature 1..88: note = engineered ribonucleic acid scaffold (ERS) sequence
  source 1..88: mol_type = other RNA
actggcccttctatctgattactctgagagccatgaccagcgactatgtcgtatgggtaaagctccctcttcggagggagcatcagag

SEQ ID NO: 18904 - RNA, 88 nt, synthetic construct
  misc_feature 1..88: note = engineered ribonucleic acid scaffold (ERS) sequence
  source 1..88: mol_type = other RNA
actggcccttctatctgattactctgagagccatccccagcgactatgtcgtatgggtaaagctccctcttcggagggagcatcagag

SEQ ID NO: 18905 - RNA, 89 nt, synthetic construct
  misc_feature 1..89: note = engineered ribonucleic acid scaffold (ERS) sequence
  source 1..89: mol_type = other RNA
actggcccttctatctgattactctgagagccatcgccagcgactatgtcgtatggcgtaaagctccctcttcggagggagcatcagag

SEQ ID NO: 18906 - RNA, 88 nt, synthetic construct
  misc_feature 1..88: note = engineered ribonucleic acid scaffold (ERS) sequence
  source 1..88: mol_type = other RNA
actggcccttctatctgattactctgagagccatcgccagcgactatgtcgtatgggtaaagctccctcttcggagggagcatcagag

SEQ ID NO: 18907 - RNA, 88 nt, synthetic construct
  misc_feature 1..88: note = engineered ribonucleic acid scaffold (ERS) sequence
  source 1..88: mol_type = other RNA
actggcccttctatctgattactctgagagccatctccagcgactatgtcgtatgggtaaagctccctcttcggagggagcatcagag

SEQ ID NO: 18908 - RNA, 88 nt, synthetic construct
  misc_feature 1..88: note = engineered ribonucleic acid scaffold (ERS) sequence
  source 1..88: mol_type = other RNA
actggcccttctatctgattactctgagagccatcacctgcgactatgtcgtaagggtaaagctccctcttcggagggagcatcagag

SEQ ID NO: 18909 - RNA, 88 nt, synthetic construct
  misc_feature 1..88: note = engineered ribonucleic acid scaffold (ERS) sequence
  source 1..88: mol_type = other RNA
actggcccttctatctgattactctgagagccatcaccagagactatgtcttatgggtaaagctccctcttcggagggagcatcagag

SEQ ID NO: 18910 - RNA, 88 nt, synthetic construct
  misc_feature 1..88: note = engineered ribonucleic acid scaffold (ERS) sequence
  source 1..88: mol_type = other RNA
actggcccttctatctgattactctgagagccatcaccagggactatgtcctatgggtaaagctccctcttcggagggagcatcagag

SEQ ID NO: 18911 - RNA, 89 nt, synthetic construct
  misc_feature 1..89: note = engineered ribonucleic acid scaffold (ERS) sequence
  source 1..89: mol_type = other RNA
actggcccttctatctgattactctgagagccatcaccaggcactatgtgctattgggtaaagctccctcttcggagggagcatcagag

SEQ ID NO: 18912 - RNA, 88 nt, synthetic construct
  misc_feature 1..88: note = engineered ribonucleic acid scaffold (ERS) sequence
  source 1..88: mol_type = other RNA
actggcccttctatctgattactctgagagccatcaccagccactatgtggtatgggtaaagctccctcttcggagggagcatcagag

SEQ ID NO: 18913 - RNA, 88 nt, synthetic construct
  misc_feature 1..88: note = engineered ribonucleic acid scaffold (ERS) sequence
  source 1..88: mol_type = other RNA
actggcccttctatctgattactctgagagccatcaccagctactatgtagtatgggtaaagctccctcttcggagggagcatcagag

SEQ ID NO: 18914 - RNA, 88 nt, synthetic construct
  misc_feature 1..88: note = engineered ribonucleic acid scaffold (ERS) sequence
  source 1..88: mol_type = other RNA
actggcccttctatctgattactctgagagccatcaccagcgattatgtcgtatgggtaaagctccctcttcggagggagcatcagag

SEQ ID NO: 18915 - RNA, 88 nt, synthetic construct
  misc_feature 1..88: note = engineered ribonucleic acid scaffold (ERS) sequence
  source 1..88: mol_type = other RNA
actggcccttctatctgattactctgagagccatcaccagcgacgatgtcgtatgggtaaagctccctcttcggagggagcatcagag

SEQ ID NO: 18916 - RNA, 88 nt, synthetic construct
  misc_feature 1..88: note = engineered ribonucleic acid scaffold (ERS) sequence
  source 1..88: mol_type = other RNA
actggcccttctatctgattactctgagagccatcaccagcgactctgtcgtatgggtaaagctccctcttcggagggagcatcagag

SEQ ID NO: 18917 - RNA, 88 nt, synthetic construct
  misc_feature 1..88: note = engineered ribonucleic acid scaffold (ERS) sequence
  source 1..88: mol_type = other RNA
actggcccttctatctgattactctgagagccatcaccagcgactatgtcgtgtgggtaaagctccctcttcggagggagcatcagag

SEQ ID NO: 18918 - RNA, 89 nt, synthetic construct
  misc_feature 1..89: note = engineered ribonucleic acid scaffold (ERS) sequence
  source 1..89: mol_type = other RNA
actggcccttctatctgattactctgagagccatcaccagcgactatgtcgtattgggtaaagctccctcttcggagggagcatcagag

SEQ ID NO: 18919 - RNA, 89 nt, synthetic construct
  misc_feature 1..89: note = engineered ribonucleic acid scaffold (ERS) sequence
  source 1..89: mol_type = other RNA
actggcccttctatctgattactctgagagccatcaccagcgactatgtcgtatggagtaaagctccctcttcggagggagcatcagag

SEQ ID NO: 18920 - RNA, 89 nt, synthetic construct
  misc_feature 1..89: note = engineered ribonucleic acid scaffold (ERS) sequence
  source 1..89: mol_type = other RNA
actggcccttctatctgattactctgagagccatcaccagcgactatgtcgtatggcgtaaagctccctcttcggagggagcatcagag

SEQ ID NO: 18921 - RNA, 89 nt, synthetic construct
  misc_feature 1..89: note = engineered ribonucleic acid scaffold (ERS) sequence
  source 1..89: mol_type = other RNA
actggcccttctatctgattactctgagagccatcaccagcgactatgtcgtatggtgtaaagctccctcttcggagggagcatcagag

SEQ ID NO: 18922 - RNA, 89 nt, synthetic construct
  misc_feature 1..89: note = engineered ribonucleic acid scaffold (ERS) sequence
  source 1..89: mol_type = other RNA
actggcccttctatctgattactctgagagccatcaccagcgactatgtcgtatgggctaaagctccctcttcggagggagcatcagag

SEQ ID NO: 18923 - RNA, 86 nt, synthetic construct
  misc_feature 1..86: note = engineered ribonucleic acid scaffold (ERS) sequence
  source 1..86: mol_type = other RNA
actggcccttctatctgattactctgagagccatcaccagcgactatgtcgtatgggtagctccctcttcggagggagcatcagag

SEQ ID NO: 18924 - RNA, 88 nt, synthetic construct
  misc_feature 1..88: note = engineered ribonucleic acid scaffold (ERS) sequence
  source 1..88: mol_type = other RNA
actggcccttctatctgattactctgagagccatcaccagcgactatgtcgtatgggtgaagctccctcttcggagggagcatcagag

SEQ ID NO: 18925 - RNA, 88 nt, synthetic construct
  misc_feature 1..88: note = engineered ribonucleic acid scaffold (ERS) sequence
  source 1..88: mol_type = other RNA
actggcccttctatctgattactctgagagccatcaccagcgactatgtcgtatgggtagagctccctcttcggagggagcatcagag

SEQ ID NO: 18926 - RNA, 89 nt, synthetic construct
  misc_feature 1..89: note = engineered ribonucleic acid scaffold (ERS) sequence
  source 1..89: mol_type = other RNA
actggcgcttctatctgattactctgagcagccaacaccagcgactatgtcgtatgggtaaagctccctcttcggagggagcatcagag

SEQ ID NO: 18927 - RNA, 89 nt, synthetic construct
  misc_feature 1..89: note = engineered ribonucleic acid scaffold (ERS) sequence
  source 1..89: mol_type = other RNA
actggcgcttctatctgattactctgagcagccagcaccagcgactatgtcgtatgggtaaagctccctcttcggagggagcatcagag

SEQ ID NO: 18928 - RNA, 89 nt, synthetic construct
  misc_feature 1..89: note = engineered ribonucleic acid scaffold (ERS) sequence
  source 1..89: mol_type = other RNA
actggcgcttctatctgattactctgagcagccatgaccagcgactatgtcgtatggctaaagctccctcttcggagggagcatcagag

SEQ ID NO: 18929 - RNA, 90 nt, synthetic construct
  misc_feature 1..90: note = engineered ribonucleic acid scaffold (ERS) sequence
  source 1..90: mol_type = other RNA
actggcgcttctatctgattactctgagcagccatgaccagcgactatgtcgtatgggctaaagctccctcttcggagggagcatcagag

SEQ ID NO: 18930 - RNA, 89 nt, synthetic construct
  misc_feature 1..89: note = engineered ribonucleic acid scaffold (ERS) sequence
  source 1..89: mol_type = other RNA
actggcgcttctatctgattactctgagcagccatgaccagcgactatgtcgtatgggtaaagctccctcttcggagggagcatcagag

SEQ ID NO: 18931 - RNA, 89 nt, synthetic construct
  misc_feature 1..89: note = engineered ribonucleic acid scaffold (ERS) sequence
  source 1..89: mol_type = other RNA
actggcgcttctatctgattactctgagcagccatccccagcgactatgtcgtatgggtaaagctccctcttcggagggagcatcagag

SEQ ID NO: 18932 - RNA, 90 nt, synthetic construct
  misc_feature 1..90: note = engineered ribonucleic acid scaffold (ERS) sequence
  source 1..90: mol_type = other RNA
actggcgcttctatctgattactctgagcagccatcgccagcgactatgtcgtatggcgtaaagctccctcttcggagggagcatcagag

SEQ ID NO: 18933 - RNA, 89 nt, synthetic construct
  misc_feature 1..89: note = engineered ribonucleic acid scaffold (ERS) sequence
  source 1..89: mol_type = other RNA
actggcgcttctatctgattactctgagcagccatcgccagcgactatgtcgtatgggtaaagctccctcttcggagggagcatcagag

SEQ ID NO: 18934 - RNA, 89 nt, synthetic construct
  misc_feature 1..89: note = engineered ribonucleic acid scaffold (ERS) sequence
  source 1..89: mol_type = other RNA
actggcgcttctatctgattactctgagcagccatctccagcgactatgtcgtatgggtaaagctccctcttcggagggagcatcagag

SEQ ID NO: 18935 - RNA, 89 nt, synthetic construct
  misc_feature 1..89: note = engineered ribonucleic acid scaffold (ERS) sequence
  source 1..89: mol_type = other RNA
actggcgcttctatctgattactctgagcagccatcacctgcgactatgtcgtaagggtaaagctccctcttcggagggagcatcagag

SEQ ID NO: 18936 - RNA, 89 nt, synthetic construct
  misc_feature 1..89: note = engineered ribonucleic acid scaffold (ERS) sequence
  source 1..89: mol_type = other RNA
actggcgcttctatctgattactctgagcagccatcaccagagactatgtcttatgggtaaagctccctcttcggagggagcatcagag

SEQ ID NO: 18937 - RNA, 89 nt, synthetic construct
  misc_feature 1..89: note = engineered ribonucleic acid scaffold (ERS) sequence
  source 1..89: mol_type = other RNA
actggcgcttctatctgattactctgagcagccatcaccagggactatgtcctatgggtaaagctccctcttcggagggagcatcagag

SEQ ID NO: 18938 - RNA, 90 nt, synthetic construct
  misc_feature 1..90: note = engineered ribonucleic acid scaffold (ERS) sequence
  source 1..90: mol_type = other RNA
actggcgcttctatctgattactctgagcagccatcaccaggcactatgtgctattgggtaaagctccctcttcggagggagcatcagag

SEQ ID NO: 18939 - RNA, 89 nt, synthetic construct
  misc_feature 1..89: note = engineered ribonucleic acid scaffold (ERS) sequence
  source 1..89: mol_type = other RNA
actggcgcttctatctgattactctgagcagccatcaccagccactatgtggtatgggtaaagctccctcttcggagggagcatcagag

SEQ ID NO: 18940 - RNA, 89 nt, synthetic construct
  misc_feature 1..89: note = engineered ribonucleic acid scaffold (ERS) sequence
  source 1..89: mol_type = other RNA
actggcgcttctatctgattactctgagcagccatcaccagctactatgtagtatgggtaaagctccctcttcggagggagcatcagag

SEQ ID NO: 18941 - RNA, 89 nt, synthetic construct
  misc_feature 1..89: note = engineered ribonucleic acid scaffold (ERS) sequence
  source 1..89: mol_type = other RNA
actggcgcttctatctgattactctgagcagccatcaccagcgattatgtcgtatgggtaaagctccctcttcggagggagcatcagag

SEQ ID NO: 18942 - RNA, 89 nt, synthetic construct
  misc_feature 1..89: note = engineered ribonucleic acid scaffold (ERS) sequence
  source 1..89: mol_type = other RNA
actggcgcttctatctgattactctgagcagccatcaccagcgacgatgtcgtatgggtaaagctccctcttcggagggagcatcagag

SEQ ID NO: 18943 - RNA, 89 nt, synthetic construct
  misc_feature 1..89: note = engineered ribonucleic acid scaffold (ERS) sequence
  source 1..89: mol_type = other RNA
actggcgcttctatctgattactctgagcagccatcaccagcgactctgtcgtatgggtaaagctccctcttcggagggagcatcagag

SEQ ID NO: 18944 - RNA, 89 nt, synthetic construct
  misc_feature 1..89: note = engineered ribonucleic acid scaffold (ERS) sequence
  source 1..89: mol_type = other RNA
actggcgcttctatctgattactctgagcagccatcaccagcgactatgtcgtgtgggtaaagctccctcttcggagggagcatcagag

SEQ ID NO: 18945 - RNA, 90 nt, synthetic construct
  misc_feature 1..90: note = engineered ribonucleic acid scaffold (ERS) sequence
  source 1..90: mol_type = other RNA
actggcgcttctatctgattactctgagcagccatcaccagcgactatgtcgtattgggtaaagctccctcttcggagggagcatcagag

SEQ ID NO: 18946 - RNA, 90 nt, synthetic construct
  misc_feature 1..90: note = engineered ribonucleic acid scaffold (ERS) sequence
  source 1..90: mol_type = other RNA
actggcgcttctatctgattactctgagcagccatcaccagcgactatgtcgtatggagtaaagctccctcttcggagggagcatcagag

SEQ ID NO: 18947 - RNA, 90 nt, synthetic construct
  misc_feature 1..90: note = engineered ribonucleic acid scaffold (ERS) sequence
  source 1..90: mol_type = other RNA
actggcgcttctatctgattactctgagcagccatcaccagcgactatgtcgtatggcgtaaagctccctcttcggagggagcatcagag

SEQ ID NO: 18948 - RNA, 90 nt, synthetic construct
  misc_feature 1..90: note = engineered ribonucleic acid scaffold (ERS) sequence
  source 1..90: mol_type = other RNA
actggcgcttctatctgattactctgagcagccatcaccagcgactatgtcgtatggtgtaaagctccctcttcggagggagcatcagag

SEQ ID NO: 18949 - RNA, 90 nt, synthetic construct
  misc_feature 1..90: note = engineered ribonucleic acid scaffold (ERS) sequence
  source 1..90: mol_type = other RNA
actggcgcttctatctgattactctgagcagccatcaccagcgactatgtcgtatgggctaaagctccctcttcggagggagcatcagag

SEQ ID NO: 18950 - RNA, 87 nt, synthetic construct
  misc_feature 1..87: note = engineered ribonucleic acid scaffold (ERS) sequence
  source 1..87: mol_type = other RNA
actggcgcttctatctgattactctgagcagccatcaccagcgactatgtcgtatgggtagctccctcttcggagggagcatcagag

SEQ ID NO: 18951 - RNA, 89 nt, synthetic construct
  misc_feature 1..89: note = engineered ribonucleic acid scaffold (ERS) sequence
  source 1..89: mol_type = other RNA
actggcgcttctatctgattactctgagcagccatcaccagcgactatgtcgtatgggtgaagctccctcttcggagggagcatcagag

SEQ ID NO: 18952 - RNA, 89 nt, synthetic construct
  misc_feature 1..89: note = engineered ribonucleic acid scaffold (ERS) sequence
  source 1..89: mol_type = other RNA
actggcgcttctatctgattactctgagcagccatcaccagcgactatgtcgtatgggtagagctccctcttcggagggagcatcagag

SEQ ID NO: 18953 - RNA, 88 nt, synthetic construct
  misc_feature 1..88: note = engineered ribonucleic acid scaffold (ERS) sequence
  source 1..88: mol_type = other RNA
actggcgcttctatctgattactctgagtgccaacaccagcgactatgtcgtatgggtaaagctccctcttcggagggagcatcagag

SEQ ID NO: 18954 - RNA, 88 nt, synthetic construct
  misc_feature 1..88: note = engineered ribonucleic acid scaffold (ERS) sequence
  source 1..88: mol_type = other RNA
actggcgcttctatctgattactctgagtgccagcaccagcgactatgtcgtatgggtaaagctccctcttcggagggagcatcagag

SEQ ID NO: 18955 - RNA, 88 nt, synthetic construct
  misc_feature 1..88: note = engineered ribonucleic acid scaffold (ERS) sequence
  source 1..88: mol_type = other RNA
actggcgcttctatctgattactctgagtgccatgaccagcgactatgtcgtatggctaaagctccctcttcggagggagcatcagag

SEQ ID NO: 18956 - RNA, 89 nt, synthetic construct
  misc_feature 1..89: note = engineered ribonucleic acid scaffold (ERS) sequence
  source 1..89: mol_type = other RNA
actggcgcttctatctgattactctgagtgccatgaccagcgactatgtcgtatgggctaaagctccctcttcggagggagcatcagag

SEQ ID NO: 18957 - RNA, 88 nt, synthetic construct
  misc_feature 1..88: note = engineered ribonucleic acid scaffold (ERS) sequence
  source 1..88: mol_type = other RNA
actggcgcttctatctgattactctgagtgccatgaccagcgactatgtcgtatgggtaaagctccctcttcggagggagcatcagag

SEQ ID NO: 18958 - RNA, 88 nt, synthetic construct
  misc_feature 1..88: note = engineered ribonucleic acid scaffold (ERS) sequence
  source 1..88: mol_type = other RNA
actggcgcttctatctgattactctgagtgccatccccagcgactatgtcgtatgggtaaagctccctcttcggagggagcatcagag

SEQ ID NO: 18959 - RNA, 89 nt, synthetic construct
  misc_feature 1..89: note = engineered ribonucleic acid scaffold (ERS) sequence
  source 1..89: mol_type = other RNA
actggcgcttctatctgattactctgagtgccatcgccagcgactatgtcgtatggcgtaaagctccctcttcggagggagcatcagag

SEQ ID NO: 18960 - RNA, 88 nt, synthetic construct
  misc_feature 1..88: note = engineered ribonucleic acid scaffold (ERS) sequence
  source 1..88: mol_type = other RNA
actggcgcttctatctgattactctgagtgccatcgccagcgactatgtcgtatgggtaaagctccctcttcggagggagcatcagag

SEQ ID NO: 18961 - RNA, 88 nt, synthetic construct
  misc_feature 1..88: note = engineered ribonucleic acid scaffold (ERS) sequence
  source 1..88: mol_type = other RNA
actggcgcttctatctgattactctgagtgccatctccagcgactatgtcgtatgggtaaagctccctcttcggagggagcatcagag

SEQ ID NO: 18962 - RNA, 88 nt, synthetic construct
  misc_feature 1..88: note = engineered ribonucleic acid scaffold (ERS) sequence
  source 1..88: mol_type = other RNA
actggcgcttctatctgattactctgagtgccatcacctgcgactatgtcgtaagggtaaagctccctcttcggagggagcatcagag

SEQ ID NO: 18963 - RNA, 88 nt, synthetic construct
  misc_feature 1..88: note = engineered ribonucleic acid scaffold (ERS) sequence
  source 1..88: mol_type = other RNA
actggcgcttctatctgattactctgagtgccatcaccagagactatgtcttatgggtaaagctccctcttcggagggagcatcagag

SEQ ID NO: 18964 - RNA, 88 nt, synthetic construct
  misc_feature 1..88: note = engineered ribonucleic acid scaffold (ERS) sequence
  source 1..88: mol_type = other RNA
actggcgcttctatctgattactctgagtgccatcaccagggactatgtcctatgggtaaagctccctcttcggagggagcatcagag

SEQ ID NO: 18965 - RNA, 89 nt, synthetic construct
  misc_feature 1..89: note = engineered ribonucleic acid scaffold (ERS) sequence
  source 1..89: mol_type = other RNA
actggcgcttctatctgattactctgagtgccatcaccaggcactatgtgctattgggtaaagctccctcttcggagggagcatcagag

SEQ ID NO: 18966 - RNA, 88 nt, synthetic construct
  misc_feature 1..88: note = engineered ribonucleic acid scaffold (ERS) sequence
  source 1..88: mol_type = other RNA
actggcgcttctatctgattactctgagtgccatcaccagccactatgtggtatgggtaaagctccctcttcggagggagcatcagag

SEQ ID NO: 18967 - RNA, 88 nt, synthetic construct
  misc_feature 1..88: note = engineered ribonucleic acid scaffold (ERS) sequence
  source 1..88: mol_type = other RNA
actggcgcttctatctgattactctgagtgccatcaccagctactatgtagtatgggtaaagctccctcttcggagggagcatcagag

SEQ ID NO: 18968 - RNA, 88 nt, synthetic construct
  misc_feature 1..88: note = engineered ribonucleic acid scaffold (ERS) sequence
  source 1..88: mol_type = other RNA
actggcgcttctatctgattactctgagtgccatcaccagcgattatgtcgtatgggtaaagctccctcttcggagggagcatcagag

SEQ ID NO: 18969 - RNA, 88 nt, synthetic construct
  misc_feature 1..88: note = engineered ribonucleic acid scaffold (ERS) sequence
  source 1..88: mol_type = other RNA
actggcgcttctatctgattactctgagtgccatcaccagcgacgatgtcgtatgggtaaagctccctcttcggagggagcatcagag

SEQ ID NO: 18970 - RNA, 88 nt, synthetic construct
  misc_feature 1..88: note = engineered ribonucleic acid scaffold (ERS) sequence
  source 1..88: mol_type = other RNA
actggcgcttctatctgattactctgagtgccatcaccagcgactctgtcgtatgggtaaagctccctcttcggagggagcatcagag

SEQ ID NO: 18971 - RNA, 88 nt, synthetic construct
  misc_feature 1..88: note = engineered ribonucleic acid scaffold (ERS) sequence
  source 1..88: mol_type = other RNA
actggcgcttctatctgattactctgagtgccatcaccagcgactatgtcgtgtgggtaaagctccctcttcggagggagcatcagag

SEQ ID NO: 18972 - RNA, 89 nt, synthetic construct
  misc_feature 1..89: note = engineered ribonucleic acid scaffold (ERS) sequence
  source 1..89: mol_type = other RNA
actggcgcttctatctgattactctgagtgccatcaccagcgactatgtcgtattgggtaaagctccctcttcggagggagcatcagag

SEQ ID NO: 18973 - RNA, 89 nt, synthetic construct
  misc_feature 1..89: note = engineered ribonucleic acid scaffold (ERS) sequence
  source 1..89: mol_type = other RNA
actggcgcttctatctgattactctgagtgccatcaccagcgactatgtcgtatggagtaaagctccctcttcggagggagcatcagag

SEQ ID NO: 18974 - RNA, 89 nt, synthetic construct
  misc_feature 1..89: note = engineered ribonucleic acid scaffold (ERS) sequence
  source 1..89: mol_type = other RNA
actggcgcttctatctgattactctgagtgccatcaccagcgactatgtcgtatggcgtaaagctccctcttcggagggagcatcagag

SEQ ID NO: 18975 - RNA, 89 nt, synthetic construct
  misc_feature 1..89: note = engineered ribonucleic acid scaffold (ERS) sequence
  source 1..89: mol_type = other RNA
actggcgcttctatctgattactctgagtgccatcaccagcgactatgtcgtatggtgtaaagctccctcttcggagggagcatcagag

SEQ ID NO: 18976 - RNA, 89 nt, synthetic construct
  misc_feature 1..89: note = engineered ribonucleic acid scaffold (ERS) sequence
  source 1..89: mol_type = other RNA
actggcgcttctatctgattactctgagtgccatcaccagcgactatgtcgtatgggctaaagctccctcttcggagggagcatcagag

SEQ ID NO: 18977 - RNA, 86 nt, synthetic construct
  misc_feature 1..86: note = engineered ribonucleic acid scaffold (ERS) sequence
  source 1..86: mol_type = other RNA
actggcgcttctatctgattactctgagtgccatcaccagcgactatgtcgtatgggtagctccctcttcggagggagcatcagag

SEQ ID NO: 18978 - RNA, 88 nt, synthetic construct
  misc_feature 1..88: note = engineered ribonucleic acid scaffold (ERS) sequence
  source 1..88: mol_type = other RNA
actggcgcttctatctgattactctgagtgccatcaccagcgactatgtcgtatgggtgaagctccctcttcggagggagcatcagag

SEQ ID NO: 18979 - RNA, 88 nt, synthetic construct
  misc_feature 1..88: note = engineered ribonucleic acid scaffold (ERS) sequence
  source 1..88: mol_type = other RNA
actggcgcttctatctgattactctgagtgccatcaccagcgactatgtcgtatgggtagagctccctcttcggagggagcatcagag

SEQ ID NO: 18980 - RNA, 88 nt, synthetic construct
  misc_feature 1..88: note = engineered ribonucleic acid scaffold (ERS) sequence
  source 1..88: mol_type = other RNA
actggcgcttctatctgattactctgagagccaacaccagcgactatgtcgtatgggtaaagctccctcttcggagggagcatcagag

SEQ ID NO: 18981 - RNA, 88 nt, synthetic construct
  misc_feature 1..88: note = engineered ribonucleic acid scaffold (ERS) sequence
  source 1..88: mol_type = other RNA
actggcgcttctatctgattactctgagagccagcaccagcgactatgtcgtatgggtaaagctccctcttcggagggagcatcagag

SEQ ID NO: 18982 - RNA, 88 nt, synthetic construct
  misc_feature 1..88: note = engineered ribonucleic acid scaffold (ERS) sequence
  source 1..88: mol_type = other RNA
actggcgcttctatctgattactctgagagccatgaccagcgactatgtcgtatggctaaagctccctcttcggagggagcatcagag

SEQ ID NO: 18983 - RNA, 89 nt, synthetic construct
  misc_feature 1..89: note = engineered ribonucleic acid scaffold (ERS) sequence
  source 1..89: mol_type = other RNA
actggcgcttctatctgattactctgagagccatgaccagcgactatgtcgtatgggctaaagctccctcttcggagggagcatcagag

SEQ ID NO: 18984 - RNA, 88 nt, synthetic construct
  misc_feature 1..88: note = engineered ribonucleic acid scaffold (ERS) sequence
  source 1..88: mol_type = other RNA
actggcgcttctatctgattactctgagagccatgaccagcgactatgtcgtatgggtaaagctccctcttcggagggagcatcagag

SEQ ID NO: 18985 - RNA, 88 nt, synthetic construct
  misc_feature 1..88: note = engineered ribonucleic acid scaffold (ERS) sequence
  source 1..88: mol_type = other RNA
actggcgcttctatctgattactctgagagccatccccagcgactatgtcgtatgggtaaagctccctcttcggagggagcatcagag

SEQ ID NO: 18986 - RNA, 89 nt, synthetic construct
  misc_feature 1..89: note = engineered ribonucleic acid scaffold (ERS) sequence
  source 1..89: mol_type = other RNA
actggcgcttctatctgattactctgagagccatcgccagcgactatgtcgtatggcgtaaagctccctcttcggagggagcatcagag

SEQ ID NO: 18987 - RNA, 88 nt, synthetic construct
  misc_feature 1..88: note = engineered ribonucleic acid scaffold (ERS) sequence
  source 1..88: mol_type = other RNA
actggcgcttctatctgattactctgagagccatcgccagcgactatgtcgtatgggtaaagctccctcttcggagggagcatcagag

SEQ ID NO: 18988 - RNA, 88 nt, synthetic construct
  misc_feature 1..88: note = engineered ribonucleic acid scaffold (ERS) sequence
  source 1..88: mol_type = other RNA
actggcgcttctatctgattactctgagagccatctccagcgactatgtcgtatgggtaaagctccctcttcggagggagcatcagag

SEQ ID NO: 18989 - RNA, 88 nt, synthetic construct
  misc_feature 1..88: note = engineered ribonucleic acid scaffold (ERS) sequence
  source 1..88: mol_type = other RNA
actggcgcttctatctgattactctgagagccatcacctgcgactatgtcgtaagggtaaagctccctcttcggagggagcatcagag

SEQ ID NO: 18990 - RNA, 88 nt, synthetic construct
  misc_feature 1..88: note = engineered ribonucleic acid scaffold (ERS) sequence
  source 1..88: mol_type = other RNA
actggcgcttctatctgattactctgagagccatcaccagagactatgtcttatgggtaaagctccctcttcggagggagcatcagag

SEQ ID NO: 18991 - RNA, 88 nt, synthetic construct
  misc_feature 1..88: note = engineered ribonucleic acid scaffold (ERS) sequence
  source 1..88: mol_type = other RNA
actggcgcttctatctgattactctgagagccatcaccagggactatgtcctatgggtaaagctccctcttcggagggagcatcagag

SEQ ID NO: 18992 - RNA, 89 nt, synthetic construct
  misc_feature 1..89: note = engineered ribonucleic acid scaffold (ERS) sequence
  source 1..89: mol_type = other RNA
actggcgcttctatctgattactctgagagccatcaccaggcactatgtgctattgggtaaagctccctcttcggagggagcatcagag

SEQ ID NO: 18993 - RNA, 88 nt, synthetic construct
  misc_feature 1..88: note = engineered ribonucleic acid scaffold (ERS) sequence
  source 1..88: mol_type = other RNA
actggcgcttctatctgattactctgagagccatcaccagccactatgtggtatgggtaaagctccctcttcggagggagcatcagag

SEQ ID NO: 18994 - RNA, 88 nt, synthetic construct
  misc_feature 1..88: note = engineered ribonucleic acid scaffold (ERS) sequence
  source 1..88: mol_type = other RNA
actggcgcttctatctgattactctgagagccatcaccagctactatgtagtatgggtaaagctccctcttcggagggagcatcagag

SEQ ID NO: 18995 - RNA, 88 nt, synthetic construct
  misc_feature 1..88: note = engineered ribonucleic acid scaffold (ERS) sequence
  source 1..88: mol_type = other RNA
actggcgcttctatctgattactctgagagccatcaccagcgattatgtcgtatgggtaaagctccctcttcggagggagcatcagag

SEQ ID NO: 18996 - RNA, 88 nt, synthetic construct
  misc_feature 1..88: note = engineered ribonucleic acid scaffold (ERS) sequence
  source 1..88: mol_type = other RNA
actggcgcttctatctgattactctgagagccatcaccagcgacgatgtcgtatgggtaaagctccctcttcggagggagcatcagag

SEQ ID NO: 18997 - RNA, 88 nt, synthetic construct
  misc_feature 1..88: note = engineered ribonucleic acid scaffold (ERS) sequence
  source 1..88: mol_type = other RNA
actggcgcttctatctgattactctgagagccatcaccagcgactctgtcgtatgggtaaagctccctcttcggagggagcatcagag

SEQ ID NO: 18998 - RNA, 88 nt, synthetic construct
  misc_feature 1..88: note = engineered ribonucleic acid scaffold (ERS) sequence
  source 1..88: mol_type = other RNA
actggcgcttctatctgattactctgagagccatcaccagcgactatgtcgtgtgggtaaagctccctcttcggagggagcatcagag

SEQ ID NO: 18999 - RNA, 89 nt, synthetic construct
  misc_feature 1..89: note = engineered ribonucleic acid scaffold (ERS) sequence
  source 1..89: mol_type = other RNA
actggcgcttctatctgattactctgagagccatcaccagcgactatgtcgtattgggtaaagctccctcttcggagggagcatcagag

SEQ ID NO: 19000 - RNA, 89 nt, synthetic construct
  misc_feature 1..89: note = engineered ribonucleic acid scaffold (ERS) sequence
  source 1..89: mol_type = other RNA
actggcgcttctatctgattactctgagagccatcaccagcgactatgtcgtatggagtaaagctccctcttcggagggagcatcagag

SEQ ID NO: 19001 - RNA, 89 nt, synthetic construct
  misc_feature 1..89: note = engineered ribonucleic acid scaffold (ERS) sequence
  source 1..89: mol_type = other RNA
actggcgcttctatctgattactctgagagccatcaccagcgactatgtcgtatggcgtaaagctccctcttcggagggagcatcagag

SEQ ID NO: 19002 - RNA, 89 nt, synthetic construct
  misc_feature 1..89: note = engineered ribonucleic acid scaffold (ERS) sequence
  source 1..89: mol_type = other RNA
actggcgcttctatctgattactctgagagccatcaccagcgactatgtcgtatggtgtaaagctccctcttcggagggagcatcagag

SEQ ID NO: 19003 - RNA, 89 nt, synthetic construct
  misc_feature 1..89: note = engineered ribonucleic acid scaffold (ERS) sequence
  source 1..89: mol_type = other RNA
actggcgcttctatctgattactctgagagccatcaccagcgactatgtcgtatgggctaaagctccctcttcggagggagcatcagag

SEQ ID NO: 19004 - RNA, 86 nt, synthetic construct
  misc_feature 1..86: note = engineered ribonucleic acid scaffold (ERS) sequence
  source 1..86: mol_type = other RNA
actggcgcttctatctgattactctgagagccatcaccagcgactatgtcgtatgggtagctccctcttcggagggagcatcagag

SEQ ID NO: 19005 - RNA, 88 nt, synthetic construct
  misc_feature 1..88: note = engineered ribonucleic acid scaffold (ERS) sequence
  source 1..88: mol_type = other RNA
actggcgcttctatctgattactctgagagccatcaccagcgactatgtcgtatgggtgaagctccctcttcggagggagcatcagag

SEQ ID NO: 19006 - RNA, 88 nt, synthetic construct
  misc_feature 1..88: note = engineered ribonucleic acid scaffold (ERS) sequence
  source 1..88: mol_type = other RNA
actggcgcttctatctgattactctgagagccatcaccagcgactatgtcgtatgggtagagctccctcttcggagggagcatcagag

SEQ ID NO: 19007 - RNA, 88 nt, synthetic construct
  misc_feature 1..88: note = engineered ribonucleic acid scaffold (ERS) sequence
  source 1..88: mol_type = other RNA
actggctcttctatctgattactctgagcgccaacaccagcgactatgtcgtatgggtaaagctccctcttcggagggagcatcagag

SEQ ID NO: 19008 - RNA, 88 nt, synthetic construct
  misc_feature 1..88: note = engineered ribonucleic acid scaffold (ERS) sequence
  source 1..88: mol_type = other RNA
actggctcttctatctgattactctgagcgccagcaccagcgactatgtcgtatgggtaaagctccctcttcggagggagcatcagag

SEQ ID NO: 19009 - RNA, 88 nt, synthetic construct
  misc_feature 1..88: note = engineered ribonucleic acid scaffold (ERS) sequence
  source 1..88: mol_type = other RNA
actggctcttctatctgattactctgagcgccatgaccagcgactatgtcgtatggctaaagctccctcttcggagggagcatcagag

SEQ ID NO: 19010 - RNA, 89 nt, synthetic construct
  misc_feature 1..89: note = engineered ribonucleic acid scaffold (ERS) sequence
  source 1..89: mol_type = other RNA
actggctcttctatctgattactctgagcgccatgaccagcgactatgtcgtatgggctaaagctccctcttcggagggagcatcagag

SEQ ID NO: 19011 - RNA, 88 nt, synthetic construct
  misc_feature 1..88: note = engineered ribonucleic acid scaffold (ERS) sequence
  source 1..88: mol_type = other RNA
actggctcttctatctgattactctgagcgccatgaccagcgactatgtcgtatgggtaaagctccctcttcggagggagcatcagag

SEQ ID NO: 19012 - RNA, 88 nt, synthetic construct
  misc_feature 1..88: note = engineered ribonucleic acid scaffold (ERS) sequence
  source 1..88: mol_type = other RNA
actggctcttctatctgattactctgagcgccatccccagcgactatgtcgtatgggtaaagctccctcttcggagggagcatcagag

SEQ ID NO: 19013 - RNA, 89 nt, synthetic construct
  misc_feature 1..89: note = engineered ribonucleic acid scaffold (ERS) sequence
  source 1..89: mol_type = other RNA
actggctcttctatctgattactctgagcgccatcgccagcgactatgtcgtatggcgtaaagctccctcttcggagggagcatcagag

SEQ ID NO: 19014 - RNA, 88 nt, synthetic construct
  misc_feature 1..88: note = engineered ribonucleic acid scaffold (ERS) sequence
  source 1..88: mol_type = other RNA
actggctcttctatctgattactctgagcgccatcgccagcgactatgtcgtatgggtaaagctccctcttcggagggagcatcagag

SEQ ID NO: 19015 - RNA, 88 nt, synthetic construct
  misc_feature 1..88: note = engineered ribonucleic acid scaffold (ERS) sequence
  source 1..88: mol_type = other RNA
actggctcttctatctgattactctgagcgccatctccagcgactatgtcgtatgggtaaagctccctcttcggagggagcatcagag

SEQ ID NO: 19016 - RNA, 88 nt, synthetic construct
  misc_feature 1..88: note = engineered ribonucleic acid scaffold (ERS) sequence
  source 1..88: mol_type = other RNA
actggctcttctatctgattactctgagcgccatcacctgcgactatgtcgtaagggtaaagctccctcttcggagggagcatcagag

SEQ ID NO: 19017 - RNA, 88 nt, synthetic construct
  misc_feature 1..88: note = engineered ribonucleic acid scaffold (ERS) sequence
  source 1..88: mol_type = other RNA
actggctcttctatctgattactctgagcgccatcaccagagactatgtcttatgggtaaagctccctcttcggagggagcatcagag

SEQ ID NO: 19018 - RNA, 88 nt, synthetic construct
  misc_feature 1..88: note = engineered ribonucleic acid scaffold (ERS) sequence
  source 1..88: mol_type = other RNA
actggctcttctatctgattactctgagcgccatcaccagggactatgtcctatgggtaaagctccctcttcggagggagcatcagag

SEQ ID NO: 19019 - RNA, 89 nt, synthetic construct
  misc_feature 1..89: note = engineered ribonucleic acid scaffold (ERS) sequence
  source 1..89: mol_type = other RNA
actggctcttctatctgattactctgagcgccatcaccaggcactatgtgctattgggtaaagctccctcttcggagggagcatcagag

SEQ ID NO: 19020 - RNA, 88 nt, synthetic construct
  misc_feature 1..88: note = engineered ribonucleic acid scaffold (ERS) sequence
  source 1..88: mol_type = other RNA
actggctcttctatctgattactctgagcgccatcaccagccactatgtggtatgggtaaagctccctcttcggagggagcatcagag

SEQ ID NO: 19021 - RNA, 88 nt, synthetic construct
  misc_feature 1..88: note = engineered ribonucleic acid scaffold (ERS) sequence
  source 1..88: mol_type = other RNA
actggctcttctatctgattactctgagcgccatcaccagctactatgtagtatgggtaaagctccctcttcggagggagcatcagag

SEQ ID NO: 19022 - RNA, 88 nt, synthetic construct
  misc_feature 1..88: note = engineered ribonucleic acid scaffold (ERS) sequence
  source 1..88: mol_type = other RNA
actggctcttctatctgattactctgagcgccatcaccagcgattatgtcgtatgggtaaagctccctcttcggagggagcatcagag

SEQ ID NO: 19023 - RNA, 88 nt, synthetic construct
  misc_feature 1..88: note = engineered ribonucleic acid scaffold (ERS) sequence
  source 1..88: mol_type = other RNA
actggctcttctatctgattactctgagcgccatcaccagcgacgatgtcgtatgggtaaagctccctcttcggagggagcatcagag

SEQ ID NO: 19024 - RNA, 88 nt, synthetic construct
  misc_feature 1..88: note = engineered ribonucleic acid scaffold (ERS) sequence
  source 1..88: mol_type = other RNA
actggctcttctatctgattactctgagcgccatcaccagcgactctgtcgtatgggtaaagctccctcttcggagggagcatcagag

SEQ ID NO: 19025 - RNA, 88 nt, synthetic construct
  misc_feature 1..88: note = engineered ribonucleic acid scaffold (ERS) sequence
  source 1..88: mol_type = other RNA
actggctcttctatctgattactctgagcgccatcaccagcgactatgtcgtgtgggtaaagctccctcttcggagggagcatcagag

SEQ ID NO: 19026 - RNA, 89 nt, synthetic construct
  misc_feature 1..89: note = engineered ribonucleic acid scaffold (ERS) sequence
  source 1..89: mol_type = other RNA
actggctcttctatctgattactctgagcgccatcaccagcgactatgtcgtattgggtaaagctccctcttcggagggagcatcagag

SEQ ID NO: 19027 - RNA, 89 nt, synthetic construct
  misc_feature 1..89: note = engineered ribonucleic acid scaffold (ERS) sequence
  source 1..89: mol_type = other RNA
actggctcttctatctgattactctgagcgccatcaccagcgactatgtcgtatggagtaaagctccctcttcggagggagcatcagag

SEQ ID NO: 19028 - RNA, 89 nt, synthetic construct
  misc_feature 1..89: note = engineered ribonucleic acid scaffold (ERS) sequence
  source 1..89: mol_type = other RNA
actggctcttctatctgattactctgagcgccatcaccagcgactatgtcgtatggcgtaaagctccctcttcggagggagcatcagag

SEQ ID NO: 19029 - RNA, 89 nt, synthetic construct
  misc_feature 1..89: note = engineered ribonucleic acid scaffold (ERS) sequence
  source 1..89: mol_type = other RNA
actggctcttctatctgattactctgagcgccatcaccagcgactatgtcgtatggtgtaaagctccctcttcggagggagcatcagag

SEQ ID NO: 19030 - RNA, 89 nt, synthetic construct
  misc_feature 1..89: note = engineered ribonucleic acid scaffold (ERS) sequence
  source 1..89: mol_type = other RNA
actggctcttctatctgattactctgagcgccatcaccagcgactatgtcgtatgggctaaagctccctcttcggagggagcatcagag

SEQ ID NO: 19031 - RNA, 86 nt, synthetic construct
  misc_feature 1..86: note = engineered ribonucleic acid scaffold (ERS) sequence
  source 1..86: mol_type = other RNA
actggctcttctatctgattactctgagcgccatcaccagcgactatgtcgtatgggtagctccctcttcggagggagcatcagag

SEQ ID NO: 19032 - RNA, 88 nt, synthetic construct
  misc_feature 1..88: note = engineered ribonucleic acid scaffold (ERS) sequence
  source 1..88: mol_type = other RNA
actggctcttctatctgattactctgagcgccatcaccagcgactatgtcgtatgggtgaagctccctcttcggagggagcatcagag

SEQ ID NO: 19033 - RNA, 88 nt, synthetic construct
  misc_feature 1..88: note = engineered ribonucleic acid scaffold (ERS) sequence
  source 1..88: mol_type = other RNA
actggctcttctatctgattactctgagcgccatcaccagcgactatgtcgtatgggtagagctccctcttcggagggagcatcagag

SEQ ID NO: 19034 - RNA, 88 nt, synthetic construct
  misc_feature 1..88: note = engineered ribonucleic acid scaffold (ERS) sequence
  source 1..88: mol_type = other RNA
actggctcttctatctgattactctgagggccaacaccagcgactatgtcgtatgggtaaagctccctcttcggagggagcatcagag

SEQ ID NO: 19035 - RNA, 88 nt, synthetic construct
  misc_feature 1..88: note = engineered ribonucleic acid scaffold (ERS) sequence
  source 1..88: mol_type = other RNA
actggctcttctatctgattactctgagggccagcaccagcgactatgtcgtatgggtaaagctccctcttcggagggagcatcagag

SEQ ID NO: 19036 - RNA, 88 nt, synthetic construct
  misc_feature 1..88: note = engineered ribonucleic acid scaffold (ERS) sequence
  source 1..88: mol_type = other RNA
actggctcttctatctgattactctgagggccatgaccagcgactatgtcgtatggctaaagctccctcttcggagggagcatcagag

SEQ ID NO: 19037 - RNA, 89 nt, synthetic construct
  misc_feature 1..89: note = engineered ribonucleic acid scaffold (ERS) sequence
  source 1..89: mol_type = other RNA
actggctcttctatctgattactctgagggccatgaccagcgactatgtcgtatgggctaaagctccctcttcggagggagcatcagag

SEQ ID NO: 19038 - RNA, 88 nt, synthetic construct
  misc_feature 1..88: note = engineered ribonucleic acid scaffold (ERS) sequence
  source 1..88: mol_type = other RNA
actggctcttctatctgattactctgagggccatgaccagcgactatgtcgtatgggtaaagctccctcttcggagggagcatcagag

SEQ ID NO: 19039 - RNA, 88 nt, synthetic construct
  misc_feature 1..88: note = engineered ribonucleic acid scaffold (ERS) sequence
  source 1..88: mol_type = other RNA
actggctcttctatctgattactctgagggccatccccagcgactatgtcgtatgggtaaagctccctcttcggagggagcatcagag

SEQ ID NO: 19040 - RNA, 89 nt, synthetic construct
  misc_feature 1..89: note = engineered ribonucleic acid scaffold (ERS) sequence
  source 1..89: mol_type = other RNA
actggctcttctatctgattactctgagggccatcgccagcgactatgtcgtatggcgtaaagctccctcttcggagggagcatcagag

SEQ ID NO: 19041 - RNA, 88 nt, synthetic construct
  misc_feature 1..88: note = engineered ribonucleic acid scaffold (ERS) sequence
  source 1..88: mol_type = other RNA
actggctcttctatctgattactctgagggccatcgccagcgactatgtcgtatgggtaaagctccctcttcggagggagcatcagag

SEQ ID NO: 19042 - RNA, 88 nt, synthetic construct
  misc_feature 1..88: note = engineered ribonucleic acid scaffold (ERS) sequence
  source 1..88: mol_type = other RNA
actggctcttctatctgattactctgagggccatctccagcgactatgtcgtatgggtaaagctccctcttcggagggagcatcagag

SEQ ID NO: 19043 - RNA, 88 nt, synthetic construct
  misc_feature 1..88: note = engineered ribonucleic acid scaffold (ERS) sequence
  source 1..88: mol_type = other RNA
actggctcttctatctgattactctgagggccatcacctgcgactatgtcgtaagggtaaagctccctcttcggagggagcatcagag

SEQ ID NO: 19044 - RNA, 88 nt, synthetic construct
  misc_feature 1..88: note = engineered ribonucleic acid scaffold (ERS) sequence
  source 1..88: mol_type = other RNA
actggctcttctatctgattactctgagggccatcaccagagactatgtcttatgggtaaagctccctcttcggagggagcatcagag

SEQ ID NO: 19045 - RNA, 88 nt, synthetic construct
  misc_feature 1..88: note = engineered ribonucleic acid scaffold (ERS) sequence
  source 1..88: mol_type = other RNA
actggctcttctatctgattactctgagggccatcaccagggactatgtcctatgggtaaagctccctcttcggagggagcatcagag

SEQ ID NO: 19046 - RNA, 89 nt, synthetic construct
  misc_feature 1..89: note = engineered ribonucleic acid scaffold (ERS) sequence
  source 1..89: mol_type = other RNA
actggctcttctatctgattactctgagggccatcaccaggcactatgtgctattgggtaaagctccctcttcggagggagcatcagag

SEQ ID NO: 19047 - RNA, 88 nt, synthetic construct
  misc_feature 1..88: note = engineered ribonucleic acid scaffold (ERS) sequence
  source 1..88: mol_type = other RNA
actggctcttctatctgattactctgagggccatcaccagccactatgtggtatgggtaaagctccctcttcggagggagcatcagag

SEQ ID NO: 19048 - RNA, 88 nt, synthetic construct
  misc_feature 1..88: note = engineered ribonucleic acid scaffold (ERS) sequence
  source 1..88: mol_type = other RNA
actggctcttctatctgattactctgagggccatcaccagctactatgtagtatgggtaaagctccctcttcggagggagcatcagag

SEQ ID NO: 19049 - RNA, 88 nt, synthetic construct
  misc_feature 1..88: note = engineered ribonucleic acid scaffold (ERS) sequence
  source 1..88: mol_type = other RNA
actggctcttctatctgattactctgagggccatcaccagcgattatgtcgtatgggtaaagctccctcttcggagggagcatcagag

SEQ ID NO: 19050 - RNA, 88 nt, synthetic construct
  misc_feature 1..88: note = engineered ribonucleic acid scaffold (ERS) sequence
  source 1..88: mol_type = other RNA
actggctcttctatctgattactctgagggccatcaccagcgacgatgtcgtatgggtaaagctccctcttcggagggagcatcagag

SEQ ID NO: 19051 - RNA, 88 nt, synthetic construct
  misc_feature 1..88: note = engineered ribonucleic acid scaffold (ERS) sequence
  source 1..88: mol_type = other RNA
actggctcttctatctgattactctgagggccatcaccagcgactctgtcgtatgggtaaagctccctcttcggagggagcatcagag

SEQ ID NO: 19052 - RNA, 88 nt, synthetic construct
  misc_feature 1..88: note = engineered ribonucleic acid scaffold (ERS) sequence
  source 1..88: mol_type = other RNA
actggctcttctatctgattactctgagggccatcaccagcgactatgtcgtgtgggtaaagctccctcttcggagggagcatcagag

SEQ ID NO: 19053 - RNA, 89 nt, synthetic construct
  misc_feature 1..89: note = engineered ribonucleic acid scaffold (ERS) sequence
  source 1..89: mol_type = other RNA
actggctcttctatctgattactctgagggccatcaccagcgactatgtcgtattgggtaaagctccctcttcggagggagcatcagag

SEQ ID NO: 19054 - RNA, 89 nt, synthetic construct
  misc_feature 1..89: note = engineered ribonucleic acid scaffold (ERS) sequence
  source 1..89: mol_type = other RNA
actggctcttctatctgattactctgagggccatcaccagcgactatgtcgtatggagtaaagctccctcttcggagggagcatcagag

SEQ ID NO: 19055 - RNA, 89 nt, synthetic construct
  misc_feature 1..89: note = engineered ribonucleic acid scaffold (ERS) sequence
  source 1..89: mol_type = other RNA
actggctcttctatctgattactctgagggccatcaccagcgactatgtcgtatggcgtaaagctccctcttcggagggagcatcagag

SEQ ID NO: 19056 - RNA, 89 nt, synthetic construct
  misc_feature 1..89: note = engineered ribonucleic acid scaffold (ERS) sequence
  source 1..89: mol_type = other RNA
actggctcttctatctgattactctgagggccatcaccagcgactatgtcgtatggtgtaaagctccctcttcggagggagcatcagag

SEQ ID NO: 19057 - RNA, 89 nt, synthetic construct
  misc_feature 1..89: note = engineered ribonucleic acid scaffold (ERS) sequence
  source 1..89: mol_type = other RNA
actggctcttctatctgattactctgagggccatcaccagcgactatgtcgtatgggctaaagctccctcttcggagggagcatcagag

SEQ ID NO: 19058 - RNA, 86 nt, synthetic construct
  misc_feature 1..86: note = engineered ribonucleic acid scaffold (ERS) sequence
  source 1..86: mol_type = other RNA
actggctcttctatctgattactctgagggccatcaccagcgactatgtcgtatgggtagctccctcttcggagggagcatcagag

SEQ ID NO: 19059 - RNA, 88 nt, synthetic construct
  misc_feature 1..88: note = engineered ribonucleic acid scaffold (ERS) sequence
  source 1..88: mol_type = other RNA
actggctcttctatctgattactctgagggccatcaccagcgactatgtcgtatgggtgaagctccctcttcggagggagcatcagag

SEQ ID NO: 19060 - RNA, 88 nt, synthetic construct
  misc_feature 1..88: note = engineered ribonucleic acid scaffold (ERS) sequence
  source 1..88: mol_type = other RNA
actggctcttctatctgattactctgagggccatcaccagcgactatgtcgtatgggtagagctccctcttcggagggagcatcagag

SEQ ID NO: 19061 - RNA, 88 nt, synthetic construct
  misc_feature 1..88: note = engineered ribonucleic acid scaffold (ERS) sequence
  source 1..88: mol_type = other RNA
actggctcttctatctgattactctgagtgccaacaccagcgactatgtcgtatgggtaaagctccctcttcggagggagcatcagag

SEQ ID NO: 19062 - RNA, 88 nt, synthetic construct
  misc_feature 1..88: note = engineered ribonucleic acid scaffold (ERS) sequence
  source 1..88: mol_type = other RNA
actggctcttctatctgattactctgagtgccagcaccagcgactatgtcgtatgggtaaagctccctcttcggagggagcatcagag

SEQ ID NO: 19063 - RNA, 88 nt, synthetic construct
  misc_feature 1..88: note = engineered ribonucleic acid scaffold (ERS) sequence
  source 1..88: mol_type = other RNA
actggctcttctatctgattactctgagtgccatgaccagcgactatgtcgtatggctaaagctccctcttcggagggagcatcagag

SEQ ID NO: 19064 - RNA, 89 nt, synthetic construct
  misc_feature 1..89: note = engineered ribonucleic acid scaffold (ERS) sequence
  source 1..89: mol_type = other RNA
actggctcttctatctgattactctgagtgccatgaccagcgactatgtcgtatgggctaaagctccctcttcggagggagcatcagag

SEQ ID NO: 19065 - RNA, 88 nt, synthetic construct
  misc_feature 1..88: note = engineered ribonucleic acid scaffold (ERS) sequence
  source 1..88: mol_type = other RNA
actggctcttctatctgattactctgagtgccatgaccagcgactatgtcgtatgggtaaagctccctcttcggagggagcatcagag

SEQ ID NO: 19066 - RNA, 88 nt, synthetic construct
  misc_feature 1..88: note = engineered ribonucleic acid scaffold (ERS) sequence
  source 1..88: mol_type = other RNA
actggctcttctatctgattactctgagtgccatccccagcgactatgtcgtatgggtaaagctccctcttcggagggagcatcagag

SEQ ID NO: 19067 - RNA, 89 nt, synthetic construct
  misc_feature 1..89: note = engineered ribonucleic acid scaffold (ERS) sequence
  source 1..89: mol_type = other RNA
actggctcttctatctgattactctgagtgccatcgccagcgactatgtcgtatggcgtaaagctccctcttcggagggagcatcagag

SEQ ID NO: 19068 - RNA, 88 nt, synthetic construct
  misc_feature 1..88: note = engineered ribonucleic acid scaffold (ERS) sequence
  source 1..88: mol_type = other RNA
actggctcttctatctgattactctgagtgccatcgccagcgactatgtcgtatgggtaaagctccctcttcggagggagcatcagag

SEQ ID NO: 19069 - RNA, 88 nt, synthetic construct
  misc_feature 1..88: note = engineered ribonucleic acid scaffold (ERS) sequence
  source 1..88: mol_type = other RNA
actggctcttctatctgattactctgagtgccatctccagcgactatgtcgtatgggtaaagctccctcttcggagggagcatcagag

SEQ ID NO: 19070 - RNA, 88 nt, synthetic construct
  misc_feature 1..88: note = engineered ribonucleic acid scaffold (ERS) sequence
  source 1..88: mol_type = other RNA
actggctcttctatctgattactctgagtgccatcacctgcgactatgtcgtaagggtaaagctccctcttcggagggagcatcagag

SEQ ID NO: 19071 - RNA, 88 nt, synthetic construct
  misc_feature 1..88: note = engineered ribonucleic acid scaffold (ERS) sequence
  source 1..88: mol_type = other RNA
actggctcttctatctgattactctgagtgccatcaccagagactatgtcttatgggtaaagctccctcttcggagggagcatcagag

SEQ ID NO: 19072 - RNA, 88 nt, synthetic construct
  misc_feature 1..88: note = engineered ribonucleic acid scaffold (ERS) sequence
  source 1..88: mol_type = other RNA
actggctcttctatctgattactctgagtgccatcaccagggactatgtcctatgggtaaagctccctcttcggagggagcatcagag

SEQ ID NO: 19073 - RNA, 89 nt, synthetic construct
  misc_feature 1..89: note = engineered ribonucleic acid scaffold (ERS) sequence
  source 1..89: mol_type = other RNA
actggctcttctatctgattactctgagtgccatcaccaggcactatgtgctattgggtaaagctccctcttcggagggagcatcagag

SEQ ID NO: 19074 - RNA, 88 nt, synthetic construct
  misc_feature 1..88: note = engineered ribonucleic acid scaffold (ERS) sequence
  source 1..88: mol_type = other RNA
actggctcttctatctgattactctgagtgccatcaccagccactatgtggtatgggtaaagctccctcttcggagggagcatcagag

SEQ ID NO: 19075 - RNA, 88 nt, synthetic construct
  misc_feature 1..88: note = engineered ribonucleic acid scaffold (ERS) sequence
  source 1..88: mol_type = other RNA
actggctcttctatctgattactctgagtgccatcaccagctactatgtagtatgggtaaagctccctcttcggagggagcatcagag

SEQ ID NO: 19076 - RNA, 88 nt, synthetic construct
  misc_feature 1..88: note = engineered ribonucleic acid scaffold (ERS) sequence
  source 1..88: mol_type = other RNA
actggctcttctatctgattactctgagtgccatcaccagcgattatgtcgtatgggtaaagctccctcttcggagggagcatcagag

SEQ ID NO: 19077 - RNA, 88 nt, synthetic construct
  misc_feature 1..88: note = engineered ribonucleic acid scaffold (ERS) sequence
  source 1..88: mol_type = other RNA
actggctcttctatctgattactctgagtgccatcaccagcgacgatgtcgtatgggtaaagctccctcttcggagggagcatcagag

SEQ ID NO: 19078 - RNA, 88 nt, synthetic construct
  misc_feature 1..88: note = engineered ribonucleic acid scaffold (ERS) sequence
  source 1..88: mol_type = other RNA
actggctcttctatctgattactctgagtgccatcaccagcgactctgtcgtatgggtaaagctccctcttcggagggagcatcagag

SEQ ID NO: 19079 - RNA, 88 nt, synthetic construct
  misc_feature 1..88: note = engineered ribonucleic acid scaffold (ERS) sequence
  source 1..88: mol_type = other RNA
actggctcttctatctgattactctgagtgccatcaccagcgactatgtcgtgtgggtaaagctccctcttcggagggagcatcagag

SEQ ID NO: 19080 - RNA, 89 nt, synthetic construct
  misc_feature 1..89: note = engineered ribonucleic acid scaffold (ERS) sequence
  source 1..89: mol_type = other RNA
actggctcttctatctgattactctgagtgccatcaccagcgactatgtcgtattgggtaaagctccctcttcggagggagcatcagag

SEQ ID NO: 19081 - RNA, 89 nt, synthetic construct
  misc_feature 1..89: note = engineered ribonucleic acid scaffold (ERS) sequence
  source 1..89: mol_type = other RNA
actggctcttctatctgattactctgagtgccatcaccagcgactatgtcgtatggagtaaagctccctcttcggagggagcatcagag

SEQ ID NO: 19082 - RNA, 89 nt, synthetic construct
  misc_feature 1..89: note = engineered ribonucleic acid scaffold (ERS) sequence
  source 1..89: mol_type = other RNA
actggctcttctatctgattactctgagtgccatcaccagcgactatgtcgtatggcgtaaagctccctcttcggagggagcatcagag

SEQ ID NO: 19083 - RNA, 89 nt, synthetic construct
  misc_feature 1..89: note = engineered ribonucleic acid scaffold (ERS) sequence
  source 1..89: mol_type = other RNA
actggctcttctatctgattactctgagtgccatcaccagcgactatgtcgtatggtgtaaagctccctcttcggagggagcatcagag

SEQ ID NO: 19084 - RNA, 89 nt, synthetic construct
  misc_feature 1..89: note = engineered ribonucleic acid scaffold (ERS) sequence
  source 1..89: mol_type = other RNA
actggctcttctatctgattactctgagtgccatcaccagcgactatgtcgtatgggctaaagctccctcttcggagggagcatcagag

SEQ ID NO: 19085 - RNA, 86 nt, synthetic construct
  misc_feature 1..86: note = engineered ribonucleic acid scaffold (ERS) sequence
  source 1..86: mol_type = other RNA
actggctcttctatctgattactctgagtgccatcaccagcgactatgtcgtatgggtagctccctcttcggagggagcatcagag

SEQ ID NO: 19086 - RNA, 88 nt, synthetic construct
  misc_feature 1..88: note = engineered ribonucleic acid scaffold (ERS) sequence
  source 1..88: mol_type = other RNA
actggctcttctatctgattactctgagtgccatcaccagcgactatgtcgtatgggtgaagctccctcttcggagggagcatcagag

SEQ ID NO: 19087 - RNA, 88 nt, synthetic construct
  misc_feature 1..88: note = engineered ribonucleic acid scaffold (ERS) sequence
  source 1..88: mol_type = other RNA
actggctcttctatctgattactctgagtgccatcaccagcgactatgtcgtatgggtagagctccctcttcggagggagcatcagag

SEQ ID NO: 19088 - RNA, 88 nt, synthetic construct
  misc_feature 1..88: note = engineered ribonucleic acid scaffold (ERS) sequence
  source 1..88: mol_type = other RNA
actggctcttctatctgattactctgagagccaacaccagcgactatgtcgtatgggtaaagctccctcttcggagggagcatcagag

SEQ ID NO: 19089 - RNA, 88 nt, synthetic construct
  misc_feature 1..88: note = engineered ribonucleic acid scaffold (ERS) sequence
  source 1..88: mol_type = other RNA
actggctcttctatctgattactctgagagccagcaccagcgactatgtcgtatgggtaaagctccctcttcggagggagcatcagag

SEQ ID NO: 19090 - RNA, 88 nt, synthetic construct
  misc_feature 1..88: note = engineered ribonucleic acid scaffold (ERS) sequence
  source 1..88: mol_type = other RNA
actggctcttctatctgattactctgagagccatgaccagcgactatgtcgtatggctaaagctccctcttcggagggagcatcagag

SEQ ID NO: 19091 - RNA, 89 nt, synthetic construct
  misc_feature 1..89: note = engineered ribonucleic acid scaffold (ERS) sequence
  source 1..89: mol_type = other RNA
actggctcttctatctgattactctgagagccatgaccagcgactatgtcgtatgggctaaagctccctcttcggagggagcatcagag

SEQ ID NO: 19092 - RNA, 88 nt, synthetic construct
  misc_feature 1..88: note = engineered ribonucleic acid scaffold (ERS) sequence
  source 1..88: mol_type = other RNA
actggctcttctatctgattactctgagagccatgaccagcgactatgtcgtatgggtaaagctccctcttcggagggagcatcagag

SEQ ID NO: 19093 - RNA, 88 nt, synthetic construct
  misc_feature 1..88: note = engineered ribonucleic acid scaffold (ERS) sequence
  source 1..88: mol_type = other RNA
actggctcttctatctgattactctgagagccatccccagcgactatgtcgtatgggtaaagctccctcttcggagggagcatcagag

SEQ ID NO: 19094 - RNA, 89 nt, synthetic construct
  misc_feature 1..89: note = engineered ribonucleic acid scaffold (ERS) sequence
  source 1..89: mol_type = other RNA
actggctcttctatctgattactctgagagccatcgccagcgactatgtcgtatggcgtaaagctccctcttcggagggagcatcagag

SEQ ID NO: 19095 - RNA, 88 nt, synthetic construct
  misc_feature 1..88: note = engineered ribonucleic acid scaffold (ERS) sequence
  source 1..88: mol_type = other RNA
actggctcttctatctgattactctgagagccatcgccagcgactatgtcgtatgggtaaagctccctcttcggagggagcatcagag

SEQ ID NO: 19096 - RNA, 88 nt, synthetic construct
  misc_feature 1..88: note = engineered ribonucleic acid scaffold (ERS) sequence
  source 1..88: mol_type = other RNA
actggctcttctatctgattactctgagagccatctccagcgactatgtcgtatgggtaaagctccctcttcggagggagcatcagag

SEQ ID NO: 19097 - RNA, 88 nt, synthetic construct
  misc_feature 1..88: note = engineered ribonucleic acid scaffold (ERS) sequence
  source 1..88: mol_type = other RNA
actggctcttctatctgattactctgagagccatcacctgcgactatgtcgtaagggtaaagctccctcttcggagggagcatcagag

SEQ ID NO: 19098 - RNA, 88 nt, synthetic construct
  misc_feature 1..88: note = engineered ribonucleic acid scaffold (ERS) sequence
  source 1..88: mol_type = other RNA
actggctcttctatctgattactctgagagccatcaccagagactatgtcttatgggtaaagctccctcttcggagggagcatcagag

SEQ ID NO: 19099 - RNA, 88 nt, synthetic construct
  misc_feature 1..88: note = engineered ribonucleic acid scaffold (ERS) sequence
  source 1..88: mol_type = other RNA
actggctcttctatctgattactctgagagccatcaccagggactatgtcctatgggtaaagctccctcttcggagggagcatcagag

SEQ ID NO: 19100 - RNA, 89 nt, synthetic construct
  misc_feature 1..89: note = engineered ribonucleic acid scaffold (ERS) sequence
  source 1..89: mol_type = other RNA
actggctcttctatctgattactctgagagccatcaccaggcactatgtgctattgggtaaagctccctcttcggagggagcatcagag

SEQ ID NO: 19101 - RNA, 88 nt, synthetic construct
  misc_feature 1..88: note = engineered ribonucleic acid scaffold (ERS) sequence
  source 1..88: mol_type = other RNA
actggctcttctatctgattactctgagagccatcaccagccactatgtggtatgggtaaagctccctcttcggagggagcatcagag

SEQ ID NO: 19102 - RNA, 88 nt, synthetic construct
  misc_feature 1..88: note = engineered ribonucleic acid scaffold (ERS) sequence
  source 1..88: mol_type = other RNA
actggctcttctatctgattactctgagagccatcaccagctactatgtagtatgggtaaagctccctcttcggagggagcatcagag

SEQ ID NO: 19103 - RNA, 88 nt, synthetic construct
  misc_feature 1..88: note = engineered ribonucleic acid scaffold (ERS) sequence
  source 1..88: mol_type = other RNA
actggctcttctatctgattactctgagagccatcaccagcgattatgtcgtatgggtaaagctccctcttcggagggagcatcagag

SEQ ID NO: 19104 - RNA, 88 nt, synthetic construct
  misc_feature 1..88: note = engineered ribonucleic acid scaffold (ERS) sequence
  source 1..88: mol_type = other RNA
actggctcttctatctgattactctgagagccatcaccagcgacgatgtcgtatgggtaaagctccctcttcggagggagcatcagag

SEQ ID NO: 19105 - RNA, 88 nt, synthetic construct
  misc_feature 1..88: note = engineered ribonucleic acid scaffold (ERS) sequence
  source 1..88: mol_type = other RNA
actggctcttctatctgattactctgagagccatcaccagcgactctgtcgtatgggtaaagctccctcttcggagggagcatcagag

SEQ ID NO: 19106 - RNA, 88 nt, synthetic construct
  misc_feature 1..88: note = engineered ribonucleic acid scaffold (ERS) sequence
  source 1..88: mol_type = other RNA
actggctcttctatctgattactctgagagccatcaccagcgactatgtcgtgtgggtaaagctccctcttcggagggagcatcagag

SEQ ID NO: 19107 - RNA, 89 nt, synthetic construct
  misc_feature 1..89: note = engineered ribonucleic acid scaffold (ERS) sequence
  source 1..89: mol_type = other RNA
actggctcttctatctgattactctgagagccatcaccagcgactatgtcgtattgggtaaagctccctcttcggagggagcatcagag

SEQ ID NO: 19108 - RNA, 89 nt, synthetic construct
  misc_feature 1..89: note = engineered ribonucleic acid scaffold (ERS) sequence
  source 1..89: mol_type = other RNA
actggctcttctatctgattactctgagagccatcaccagcgactatgtcgtatggagtaaagctccctcttcggagggagcatcagag

SEQ ID NO: 19109 - RNA, 89 nt, synthetic construct
  misc_feature 1..89: note = engineered ribonucleic acid scaffold (ERS) sequence
  source 1..89: mol_type = other RNA
actggctcttctatctgattactctgagagccatcaccagcgactatgtcgtatggcgtaaagctccctcttcggagggagcatcagag

SEQ ID NO: 19110 - RNA, 89 nt, synthetic construct
  misc_feature 1..89: note = engineered ribonucleic acid scaffold (ERS) sequence
  source 1..89: mol_type = other RNA
actggctcttctatctgattactctgagagccatcaccagcgactatgtcgtatggtgtaaagctccctcttcggagggagcatcagag

SEQ ID NO: 19111 - RNA, 89 nt, synthetic construct
  misc_feature 1..89: note = engineered ribonucleic acid scaffold (ERS) sequence
  source 1..89: mol_type = other RNA
actggctcttctatctgattactctgagagccatcaccagcgactatgtcgtatgggctaaagctccctcttcggagggagcatcagag

SEQ ID NO: 19112 - RNA, 86 nt, synthetic construct
  misc_feature 1..86: note = engineered ribonucleic acid scaffold (ERS) sequence
  source 1..86: mol_type = other RNA
actggctcttctatctgattactctgagagccatcaccagcgactatgtcgtatgggtagctccctcttcggagggagcatcagag

SEQ ID NO: 19113 - RNA, 88 nt, synthetic construct
  misc_feature 1..88: note = engineered ribonucleic acid scaffold (ERS) sequence
  source 1..88: mol_type = other RNA
actggctcttctatctgattactctgagagccatcaccagcgactatgtcgtatgggtgaagctccctcttcggagggagcatcagag

SEQ ID NO: 19114 - RNA, 88 nt, synthetic construct
  misc_feature 1..88: note = engineered ribonucleic acid scaffold (ERS) sequence
  source 1..88: mol_type = other RNA
actggctcttctatctgattactctgagagccatcaccagcgactatgtcgtatgggtagagctccctcttcggagggagcatcagag

SEQ ID NO: 19115 - RNA, 88 nt, synthetic construct
  misc_feature 1..88: note = engineered ribonucleic acid scaffold (ERS) sequence
  source 1..88: mol_type = other RNA
actggcggttctatctgattactctgagcgccaacaccagcgactatgtcgtatgggtaaagctccctcttcggagggagcatcagag

SEQ ID NO: 19116 - RNA, 88 nt, synthetic construct
  misc_feature 1..88: note = engineered ribonucleic acid scaffold (ERS) sequence
  source 1..88: mol_type = other RNA
actggcggttctatctgattactctgagcgccagcaccagcgactatgtcgtatgggtaaagctccctcttcggagggagcatcagag

SEQ ID NO: 19117 - RNA, 88 nt, synthetic construct
  misc_feature 1..88: note = engineered ribonucleic acid scaffold (ERS) sequence
  source 1..88: mol_type = other RNA
actggcggttctatctgattactctgagcgccatgaccagcgactatgtcgtatggctaaagctccctcttcggagggagcatcagag

SEQ ID NO: 19118 - RNA, 89 nt, synthetic construct
  misc_feature 1..89: note = engineered ribonucleic acid scaffold (ERS) sequence
  source 1..89: mol_type = other RNA
actggcggttctatctgattactctgagcgccatgaccagcgactatgtcgtatgggctaaagctccctcttcggagggagcatcagag

SEQ ID NO: 19119 - RNA, 88 nt, synthetic construct
  misc_feature 1..88: note = engineered ribonucleic acid scaffold (ERS) sequence
  source 1..88: mol_type = other RNA
actggcggttctatctgattactctgagcgccatgaccagcgactatgtcgtatgggtaaagctccctcttcggagggagcatcagag

SEQ ID NO: 19120 - RNA, 88 nt, synthetic construct
  misc_feature 1..88: note = engineered ribonucleic acid scaffold (ERS) sequence
  source 1..88: mol_type = other RNA
actggcggttctatctgattactctgagcgccatccccagcgactatgtcgtatgggtaaagctccctcttcggagggagcatcagag

SEQ ID NO: 19121 - RNA, 89 nt, synthetic construct
  misc_feature 1..89: note = engineered ribonucleic acid scaffold (ERS) sequence
  source 1..89: mol_type = other RNA
actggcggttctatctgattactctgagcgccatcgccagcgactatgtcgtatggcgtaaagctccctcttcggagggagcatcagag

SEQ ID NO: 19122 - RNA, 88 nt, synthetic construct
  misc_feature 1..88: note = engineered ribonucleic acid scaffold (ERS) sequence
  source 1..88: mol_type = other RNA
actggcggttctatctgattactctgagcgccatcgccagcgactatgtcgtatgggtaaagctccctcttcggagggagcatcagag

SEQ ID NO: 19123 - RNA, 88 nt, synthetic construct
  misc_feature 1..88: note = engineered ribonucleic acid scaffold (ERS) sequence
  source 1..88: mol_type = other RNA
actggcggttctatctgattactctgagcgccatctccagcgactatgtcgtatgggtaaagctccctcttcggagggagcatcagag

SEQ ID NO: 19124 - RNA, 88 nt, synthetic construct
  misc_feature 1..88: note = engineered ribonucleic acid scaffold (ERS) sequence
  source 1..88: mol_type = other RNA
actggcggttctatctgattactctgagcgccatcacctgcgactatgtcgtaagggtaaagctccctcttcggagggagcatcagag

SEQ ID NO: 19125 - RNA, 88 nt, synthetic construct
  misc_feature 1..88: note = engineered ribonucleic acid scaffold (ERS) sequence
  source 1..88: mol_type = other RNA
actggcggttctatctgattactctgagcgccatcaccagagactatgtcttatgggtaaagctccctcttcggagggagcatcagag

SEQ ID NO: 19126 - RNA, 88 nt, synthetic construct
  misc_feature 1..88: note = engineered ribonucleic acid scaffold (ERS) sequence
  source 1..88: mol_type = other RNA
actggcggttctatctgattactctgagcgccatcaccagggactatgtcctatgggtaaagctccctcttcggagggagcatcagag

SEQ ID NO: 19127 - RNA, 89 nt, synthetic construct
  misc_feature 1..89: note = engineered ribonucleic acid scaffold (ERS) sequence
  source 1..89: mol_type = other RNA
actggcggttctatctgattactctgagcgccatcaccaggcactatgtgctattgggtaaagctccctcttcggagggagcatcagag

SEQ ID NO: 19128 - RNA, 88 nt, synthetic construct
  misc_feature 1..88: note = engineered ribonucleic acid scaffold (ERS) sequence
  source 1..88: mol_type = other RNA
actggcggttctatctgattactctgagcgccatcaccagccactatgtggtatgggtaaagctccctcttcggagggagcatcagag

SEQ ID NO: 19129 - RNA, 88 nt, synthetic construct
  misc_feature 1..88: note = engineered ribonucleic acid scaffold (ERS) sequence
  source 1..88: mol_type = other RNA
actggcggttctatctgattactctgagcgccatcaccagctactatgtagtatgggtaaagctccctcttcggagggagcatcagag

SEQ ID NO: 19130 - RNA, 88 nt, synthetic construct
  misc_feature 1..88: note = engineered ribonucleic acid scaffold (ERS) sequence
  source 1..88: mol_type = other RNA
actggcggttctatctgattactctgagcgccatcaccagcgattatgtcgtatgggtaaagctccctcttcggagggagcatcagag

SEQ ID NO: 19131 - RNA, 88 nt, synthetic construct
  misc_feature 1..88: note = engineered ribonucleic acid scaffold (ERS) sequence
  source 1..88: mol_type = other RNA
actggcggttctatctgattactctgagcgccatcaccagcgacgatgtcgtatgggtaaagctccctcttcggagggagcatcagag

SEQ ID NO: 19132 - RNA, 88 nt, synthetic construct
  misc_feature 1..88: note = engineered ribonucleic acid scaffold (ERS) sequence
  source 1..88: mol_type = other RNA
actggcggttctatctgattactctgagcgccatcaccagcgactctgtcgtatgggtaaagctccctcttcggagggagcatcagag

SEQ ID NO: 19133 - RNA, 88 nt, synthetic construct
  misc_feature 1..88: note = engineered ribonucleic acid scaffold (ERS) sequence
  source 1..88: mol_type = other RNA
actggcggttctatctgattactctgagcgccatcaccagcgactatgtcgtgtgggtaaagctccctcttcggagggagcatcagag

SEQ ID NO: 19134 - RNA, 89 nt, synthetic construct
  misc_feature 1..89: note = engineered ribonucleic acid scaffold (ERS) sequence
  source 1..89: mol_type = other RNA
actggcggttctatctgattactctgagcgccatcaccagcgactatgtcgtattgggtaaagctccctcttcggagggagcatcagag

SEQ ID NO: 19135 - RNA, 89 nt, synthetic construct
  misc_feature 1..89: note = engineered ribonucleic acid scaffold (ERS) sequence
  source 1..89: mol_type = other RNA
actggcggttctatctgattactctgagcgccatcaccagcgactatgtcgtatggagtaaagctccctcttcggagggagcatcagag

SEQ ID NO: 19136 - RNA, 89 nt, synthetic construct
  misc_feature 1..89: note = engineered ribonucleic acid scaffold (ERS) sequence
  source 1..89: mol_type = other RNA
actggcggttctatctgattactctgagcgccatcaccagcgactatgtcgtatggcgtaaagctccctcttcggagggagcatcagag

SEQ ID NO: 19137 - RNA, 89 nt, synthetic construct
  misc_feature 1..89: note = engineered ribonucleic acid scaffold (ERS) sequence
  source 1..89: mol_type = other RNA
actggcggttctatctgattactctgagcgccatcaccagcgactatgtcgtatggtgtaaagctccctcttcggagggagcatcagag

SEQ ID NO: 19138 - RNA, 89 nt, synthetic construct
  misc_feature 1..89: note = engineered ribonucleic acid scaffold (ERS) sequence
  source 1..89: mol_type = other RNA
actggcggttctatctgattactctgagcgccatcaccagcgactatgtcgtatgggctaaagctccctcttcggagggagcatcagag

SEQ ID NO: 19139 - RNA, 86 nt, synthetic construct
  misc_feature 1..86: note = engineered ribonucleic acid scaffold (ERS) sequence
  source 1..86: mol_type = other RNA
actggcggttctatctgattactctgagcgccatcaccagcgactatgtcgtatgggtagctccctcttcggagggagcatcagag

SEQ ID NO: 19140 - RNA, 88 nt, synthetic construct
  misc_feature 1..88: note = engineered ribonucleic acid scaffold (ERS) sequence
  source 1..88: mol_type = other RNA
actggcggttctatctgattactctgagcgccatcaccagcgactatgtcgtatgggtgaagctccctcttcggagggagcatcagag

SEQ ID NO: 19141 - RNA, 88 nt, synthetic construct
  misc_feature 1..88: note = engineered ribonucleic acid scaffold (ERS) sequence
  source 1..88: mol_type = other RNA
actggcggttctatctgattactctgagcgccatcaccagcgactatgtcgtatgggtagagctccctcttcggagggagcatcagag

SEQ ID NO: 19142 - RNA, 88 nt, synthetic construct
  misc_feature 1..88: note = engineered ribonucleic acid scaffold (ERS) sequence
  source 1..88: mol_type = other RNA
actggcggttctatctgattactctgagagccaacaccagcgactatgtcgtatgggtaaagctccctcttcggagggagcatcagag

SEQ ID NO: 19143 - RNA, 88 nt, synthetic construct
  misc_feature 1..88: note = engineered ribonucleic acid scaffold (ERS) sequence
  source 1..88: mol_type = other RNA
actggcggttctatctgattactctgagagccagcaccagcgactatgtcgtatgggtaaagctccctcttcggagggagcatcagag

SEQ ID NO: 19144 - RNA, 88 nt, synthetic construct
  misc_feature 1..88: note = engineered ribonucleic acid scaffold (ERS) sequence
  source 1..88: mol_type = other RNA
actggcggttctatctgattactctgagagccatgaccagcgactatgtcgtatggctaaagctccctcttcggagggagcatcagag

SEQ ID NO: 19145 - RNA, 89 nt, synthetic construct
  misc_feature 1..89: note = engineered ribonucleic acid scaffold (ERS) sequence
  source 1..89: mol_type = other RNA
actggcggttctatctgattactctgagagccatgaccagcgactatgtcgtatgggctaaagctccctcttcggagggagcatcagag

SEQ ID NO: 19146 - RNA, 88 nt, synthetic construct
  misc_feature 1..88: note = engineered ribonucleic acid scaffold (ERS) sequence
  source 1..88: mol_type = other RNA
actggcggttctatctgattactctgagagccatgaccagcgactatgtcgtatgggtaaagctccctcttcggagggagcatcagag

SEQ ID NO: 19147 - RNA, 88 nt, synthetic construct
  misc_feature 1..88: note = engineered ribonucleic acid scaffold (ERS) sequence
  source 1..88: mol_type = other RNA
actggcggttctatctgattactctgagagccatccccagcgactatgtcgtatgggtaaagctccctcttcggagggagcatcagag

SEQ ID NO: 19148 - RNA, 89 nt, synthetic construct
  misc_feature 1..89: note = engineered ribonucleic acid scaffold (ERS) sequence
  source 1..89: mol_type = other RNA
actggcggttctatctgattactctgagagccatcgccagcgactatgtcgtatggcgtaaagctccctcttcggagggagcatcagag

SEQ ID NO: 19149 - RNA, 88 nt, synthetic construct
  misc_feature 1..88: note = engineered ribonucleic acid scaffold (ERS) sequence
  source 1..88: mol_type = other RNA
actggcggttctatctgattactctgagagccatcgccagcgactatgtcgtatgggtaaagctccctcttcggagggagcatcagag

SEQ ID NO: 19150 - RNA, 88 nt, synthetic construct
  misc_feature 1..88: note = engineered ribonucleic acid scaffold (ERS) sequence
  source 1..88: mol_type = other RNA
actggcggttctatctgattactctgagagccatctccagcgactatgtcgtatgggtaaagctccctcttcggagggagcatcagag

SEQ ID NO: 19151 - RNA, 88 nt, synthetic construct
  misc_feature 1..88: note = engineered ribonucleic acid scaffold (ERS) sequence
  source 1..88: mol_type = other RNA
actggcggttctatctgattactctgagagccatcacctgcgactatgtcgtaagggtaaagctccctcttcggagggagcatcagag

SEQ ID NO: 19152 - RNA, 88 nt, synthetic construct
  misc_feature 1..88: note = engineered ribonucleic acid scaffold (ERS) sequence
  source 1..88: mol_type = other RNA
actggcggttctatctgattactctgagagccatcaccagagactatgtcttatgggtaaagctccctcttcggagggagcatcagag

SEQ ID NO: 19153 - RNA, 88 nt, synthetic construct
  misc_feature 1..88: note = engineered ribonucleic acid scaffold (ERS) sequence
  source 1..88: mol_type = other RNA
actggcggttctatctgattactctgagagccatcaccagggactatgtcctatgggtaaagctccctcttcggagggagcatcagag

SEQ ID NO: 19154 - RNA, 89 nt, synthetic construct
  misc_feature 1..89: note = engineered ribonucleic acid scaffold (ERS) sequence
  source 1..89: mol_type = other RNA
actggcggttctatctgattactctgagagccatcaccaggcactatgtgctattgggtaaagctccctcttcggagggagcatcagag

SEQ ID NO: 19155 - RNA, 88 nt, synthetic construct
  misc_feature 1..88: note = engineered ribonucleic acid scaffold (ERS) sequence
  source 1..88: mol_type = other RNA
actggcggttctatctgattactctgagagccatcaccagccactatgtggtatgggtaaagctccctcttcggagggagcatcagag

SEQ ID NO: 19156 - RNA, 88 nt, synthetic construct
  misc_feature 1..88: note = engineered ribonucleic acid scaffold (ERS) sequence
  source 1..88: mol_type = other RNA
actggcggttctatctgattactctgagagccatcaccagctactatgtagtatgggtaaagctccctcttcggagggagcatcagag

SEQ ID NO: 19157 - RNA, 88 nt, synthetic construct
  misc_feature 1..88: note = engineered ribonucleic acid scaffold (ERS) sequence
  source 1..88: mol_type = other RNA
actggcggttctatctgattactctgagagccatcaccagcgattatgtcgtatgggtaaagctccctcttcggagggagcatcagag

SEQ ID NO: 19158 - RNA, 88 nt, synthetic construct
  misc_feature 1..88: note = engineered ribonucleic acid scaffold (ERS) sequence
  source 1..88: mol_type = other RNA
actggcggttctatctgattactctgagagccatcaccagcgacgatgtcgtatgggtaaagctccctcttcggagggagcatcagag

SEQ ID NO: 19159 - RNA, 88 nt, synthetic construct
  misc_feature 1..88: note = engineered ribonucleic acid scaffold (ERS) sequence
  source 1..88: mol_type = other RNA
actggcggttctatctgattactctgagagccatcaccagcgactctgtcgtatgggtaaagctccctcttcggagggagcatcagag

SEQ ID NO: 19160 - RNA, 88 nt, synthetic construct
  misc_feature 1..88: note = engineered ribonucleic acid scaffold (ERS) sequence
  source 1..88: mol_type = other RNA
actggcggttctatctgattactctgagagccatcaccagcgactatgtcgtgtgggtaaagctccctcttcggagggagcatcagag

SEQ ID NO: 19161 - RNA, 89 nt, synthetic construct
  misc_feature 1..89: note = engineered ribonucleic acid scaffold (ERS) sequence
  source 1..89: mol_type = other RNA
actggcggttctatctgattactctgagagccatcaccagcgactatgtcgtattgggtaaagctccctcttcggagggagcatcagag

SEQ ID NO: 19162 - RNA, 89 nt, synthetic construct
  misc_feature 1..89: note = engineered ribonucleic acid scaffold (ERS) sequence
  source 1..89: mol_type = other RNA
actggcggttctatctgattactctgagagccatcaccagcgactatgtcgtatggagtaaagctccctcttcggagggagcatcagag

SEQ ID NO: 19163 - RNA, 89 nt, synthetic construct
  misc_feature 1..89: note = engineered ribonucleic acid scaffold (ERS) sequence
  source 1..89: mol_type = other RNA
actggcggttctatctgattactctgagagccatcaccagcgactatgtcgtatggcgtaaagctccctcttcggagggagcatcagag

SEQ ID NO: 19164 - RNA, 89 nt, synthetic construct
  misc_feature 1..89: note = engineered ribonucleic acid scaffold (ERS) sequence
  source 1..89: mol_type = other RNA
actggcggttctatctgattactctgagagccatcaccagcgactatgtcgtatggtgtaaagctccctcttcggagggagcatcagag

SEQ ID NO: 19165 - RNA, 89 nt, synthetic construct
  misc_feature 1..89: note = engineered ribonucleic acid scaffold (ERS) sequence
  source 1..89: mol_type = other RNA
actggcggttctatctgattactctgagagccatcaccagcgactatgtcgtatgggctaaagctccctcttcggagggagcatcagag

SEQ ID NO: 19166 - RNA, 86 nt, synthetic construct
  misc_feature 1..86: note = engineered ribonucleic acid scaffold (ERS) sequence
  source 1..86: mol_type = other RNA
actggcggttctatctgattactctgagagccatcaccagcgactatgtcgtatgggtagctccctcttcggagggagcatcagag

SEQ ID NO: 19167 - RNA, 88 nt, synthetic construct
  misc_feature 1..88: note = engineered ribonucleic acid scaffold (ERS) sequence
  source 1..88: mol_type = other RNA
actggcggttctatctgattactctgagagccatcaccagcgactatgtcgtatgggtgaagctccctcttcggagggagcatcagag

SEQ ID NO: 19168 - RNA, 88 nt, synthetic construct
  misc_feature 1..88: note = engineered ribonucleic acid scaffold (ERS) sequence
  source 1..88: mol_type = other RNA
actggcggttctatctgattactctgagagccatcaccagcgactatgtcgtatgggtagagctccctcttcggagggagcatcagag

SEQ ID NO: 19169 - RNA, 88 nt, synthetic construct
  misc_feature 1..88: note = engineered ribonucleic acid scaffold (ERS) sequence
  source 1..88: mol_type = other RNA
acacacggttctatctgattactctcccgtgttcaccagcgactatgtcgtagtgggtaaagctccctcttcggagggagcatcagac

SEQ ID NO: 19170 - RNA, 88 nt, synthetic construct
  misc_feature 1..88: note = engineered ribonucleic acid scaffold (ERS) sequence
  source 1..88: mol_type = other RNA
acacacggttctatctgattactttgccgtgttcaccagcgactatgtcgtagtgggtaaagctccctcttcggagggagcatcagag

SEQ ID NO: 19171 - RNA, 88 nt, synthetic construct
  misc_feature 1..88: note = engineered ribonucleic acid scaffold (ERS) sequence
  source 1..88: mol_type = other RNA
acacacggttctatctgattactttgccgtgttcaccagcgactatgtcgtagtgggtaaagctccctcttcggagggagcatcaaag

SEQ ID NO: 19172 - RNA, 88 nt, synthetic construct
  misc_feature 1..88: note = engineered ribonucleic acid scaffold (ERS) sequence
  source 1..88: mol_type = other RNA
acacacggttctatctgattagtctcccgtgttcaccagcgactatgtcgtagtgggtaaagctccctcttcggagggagcatgagac

SEQ ID NO: 19173 - RNA, 88 nt, synthetic construct
  misc_feature 1..88: note = engineered ribonucleic acid scaffold (ERS) sequence
  source 1..88: mol_type = other RNA
acacacggttctatctgattagtctgccgtgttcaccagcgactatgtcgtagtgggtaaagctccctcttcggagggagcatcagac

SEQ ID NO: 19174 - RNA, 88 nt, synthetic construct
  misc_feature 1..88: note = engineered ribonucleic acid scaffold (ERS) sequence
  source 1..88: mol_type = other RNA
acacacggttctatctgattactctcccgtgttcaccagcgactatgtcgtagtgggtaaagctccctcttcggagggagcatgagag

SEQ ID NO: 19175 - RNA, 88 nt, synthetic construct
  misc_feature 1..88: note = engineered ribonucleic acid scaffold (ERS) sequence
  source 1..88: mol_type = other RNA
acacacggtcccatctgattaccccgccgtgttcaccagcgactatgtcgtagtgggtaaagctccctcttcggagggagcatcgggg

SEQ ID NO: 19176 - RNA, 88 nt, synthetic construct
  misc_feature 1..88: note = engineered ribonucleic acid scaffold (ERS) sequence
  source 1..88: mol_type = other RNA
acacacggtcctatctgattactccgccgtgttcaccagcgactatgtcgtagtgggtaaagctccctcttcggagggagcatcggag

SEQ ID NO: 19177 - RNA, 88 nt, synthetic construct
  misc_feature 1..88: note = engineered ribonucleic acid scaffold (ERS) sequence
  source 1..88: mol_type = other RNA
acacacggtgggatctgattaccccgccgtgttcaccagcgactatgtcgtagtgggtaaagctccctcttcggagggagcatcgggg

SEQ ID NO: 19178 - RNA, 88 nt, synthetic construct
  misc_feature 1..88: note = engineered ribonucleic acid scaffold (ERS) sequence
  source 1..88: mol_type = other RNA
acacacggtggtatctgattactccgccgtgttcaccagcgactatgtcgtagtgggtaaagctccctcttcggagggagcatcggag

SEQ ID NO: 19179 - RNA, 88 nt, synthetic construct
  misc_feature 1..88: note = engineered ribonucleic acid scaffold (ERS) sequence
  source 1..88: mol_type = other RNA
acacacggttccatctgattaccctgccgtgttcaccagcgactatgtcgtagtgggtaaagctccctcttcggagggagcatcaggg

SEQ ID NO: 19180 - RNA, 88 nt, synthetic construct
  misc_feature 1..88: note = engineered ribonucleic acid scaffold (ERS) sequence
  source 1..88: mol_type = other RNA
acacacggttggatctgattaccctgccgtgttcaccagcgactatgtcgtagtgggtaaagctccctcttcggagggagcatcaggg

SEQ ID NO: 19181 - RNA, 88 nt, synthetic construct
  misc_feature 1..88: note = engineered ribonucleic acid scaffold (ERS) sequence
  source 1..88: mol_type = other RNA
acacacggttgtatctgattactctgccgtgttcaccagcgactatgtcgtagtgggtaaagctccctcttcggagggagcatcagag

SEQ ID NO: 19182 - RNA, 88 nt, synthetic construct
  misc_feature 1..88: note = engineered ribonucleic acid scaffold (ERS) sequence
  source 1..88: mol_type = other RNA
acacacggttttatctgattactttgccgtgttcaccagcgactatgtcgtagtgggtaaagctccctcttcggagggagcatcagag

SEQ ID NO: 19183 - RNA, 88 nt, synthetic construct
  misc_feature 1..88: note = engineered ribonucleic acid scaffold (ERS) sequence
  source 1..88: mol_type = other RNA
acacacggttttatctgattactctgccgtgttcaccagcgactatgtcgtagtgggtaaagctccctcttcggagggagcatcagag

SEQ ID NO: 19184 - RNA, 88 nt, synthetic construct
  misc_feature 1..88: note = engineered ribonucleic acid scaffold (ERS) sequence
  source 1..88: mol_type = other RNA
acacacggttttatctgattactctgccgtgttcaccagcgactatgtcgtagtgggtaaagctccctcttcggagggagcatcaaag

SEQ ID NO: 19185 - RNA, 88 nt, synthetic construct
  misc_feature 1..88: note = engineered ribonucleic acid scaffold (ERS) sequence
  source 1..88: mol_type = other RNA
acacacggttctatctgattactctgccgtgttcaccagcgactatgtcgtagtgggtaaagctccctcttcggagggagcctcagag

SEQ ID NO: 19186 - RNA, 88 nt, synthetic construct
  misc_feature 1..88: note = engineered ribonucleic acid scaffold (ERS) sequence
  source 1..88: mol_type = other RNA
acacacggttctatctgattactctgccgtgttcaccagcgactatgtcgtagtgggtaaagctccctcttcggagggagcgtcagag

SEQ ID NO: 19187 - RNA, 88 nt, synthetic construct
  misc_feature 1..88: note = engineered ribonucleic acid scaffold (ERS) sequence
  source 1..88: mol_type = other RNA
acacacggttctatctgattactctgccgtgttcaccagcgactatgtcgtagtgggtaaagctccctcttcggagggagcatcaaag

SEQ ID NO: 19188 - RNA, 88 nt, synthetic construct
  misc_feature 1..88: note = engineered ribonucleic acid scaffold (ERS) sequence
  source 1..88: mol_type = other RNA
acactggtttctatctgattactctcaccagttcaccagcgactatgtcgtagtgggtaaagctccctcttcggagggagcatcagac

SEQ ID NO: 19189 - RNA, 88 nt, synthetic construct
  misc_feature 1..88: note = engineered ribonucleic acid scaffold (ERS) sequence
  source 1..88: mol_type = other RNA
acactggtttctatctgattactttgaccagttcaccagcgactatgtcgtagtgggtaaagctccctcttcggagggagcatcagag

SEQ ID NO: 19190 - RNA, 88 nt, synthetic construct
  misc_feature 1..88: note = engineered ribonucleic acid scaffold (ERS) sequence
  source 1..88: mol_type = other RNA
acactggtttctatctgattactttgaccagttcaccagcgactatgtcgtagtgggtaaagctccctcttcggagggagcatcaaag

SEQ ID NO: 19191 - RNA, 88 nt, synthetic construct
  misc_feature 1..88: note = engineered ribonucleic acid scaffold (ERS) sequence
  source 1..88: mol_type = other RNA
acactggtttctatctgattagtctcaccagttcaccagcgactatgtcgtagtgggtaaagctccctcttcggagggagcatgagac

SEQ ID NO: 19192 - RNA, 88 nt, synthetic construct
  misc_feature 1..88: note = engineered ribonucleic acid scaffold (ERS) sequence
  source 1..88: mol_type = other RNA
acactggtttctatctgattagtctgaccagttcaccagcgactatgtcgtagtgggtaaagctccctcttcggagggagcatcagac

SEQ ID NO: 19193 - RNA, 88 nt, synthetic construct
  misc_feature 1..88: note = engineered ribonucleic acid scaffold (ERS) sequence
  source 1..88: mol_type = other RNA
acactggtttctatctgattactctcaccagttcaccagcgactatgtcgtagtgggtaaagctccctcttcggagggagcatgagag

SEQ ID NO: 19194 - RNA, 88 nt, synthetic construct
  misc_feature 1..88: note = engineered ribonucleic acid scaffold (ERS) sequence
  source 1..88: mol_type = other RNA
acactggttcccatctgattaccccgaccagttcaccagcgactatgtcgtagtgggtaaagctccctcttcggagggagcatcgggg

SEQ ID NO: 19195 - RNA, 88 nt, synthetic construct
  misc_feature 1..88: note = engineered ribonucleic acid scaffold (ERS) sequence
  source 1..88: mol_type = other RNA
acactggttcctatctgattactccgaccagttcaccagcgactatgtcgtagtgggtaaagctccctcttcggagggagcatcggag

SEQ ID NO: 19196 - RNA, 88 nt, synthetic construct
  misc_feature 1..88: note = engineered ribonucleic acid scaffold (ERS) sequence
  source 1..88: mol_type = other RNA
acactggttgggatctgattaccccgaccagttcaccagcgactatgtcgtagtgggtaaagctccctcttcggagggagcatcgggg

SEQ ID NO: 19197 - RNA, 88 nt, synthetic construct
  misc_feature 1..88: note = engineered ribonucleic acid scaffold (ERS) sequence
  source 1..88: mol_type = other RNA
acactggttggtatctgattactccgaccagttcaccagcgactatgtcgtagtgggtaaagctccctcttcggagggagcatcggag

SEQ ID NO: 19198 - RNA, 88 nt, synthetic construct
  misc_feature 1..88: note = engineered ribonucleic acid scaffold (ERS) sequence
  source 1..88: mol_type = other RNA
acactggtttccatctgattaccctgaccagttcaccagcgactatgtcgtagtgggtaaagctccctcttcggagggagcatcaggg

SEQ ID NO: 19199 - RNA, 88 nt, synthetic construct
  misc_feature 1..88: note = engineered ribonucleic acid scaffold (ERS) sequence
  source 1..88: mol_type = other RNA
acactggtttggatctgattaccctgaccagttcaccagcgactatgtcgtagtgggtaaagctccctcttcggagggagcatcaggg

SEQ ID NO: 19200 - RNA, 88 nt, synthetic construct
  misc_feature 1..88: note = engineered ribonucleic acid scaffold (ERS) sequence
  source 1..88: mol_type = other RNA
acactggtttgtatctgattactctgaccagttcaccagcgactatgtcgtagtgggtaaagctccctcttcggagggagcatcagag

SEQ ID NO: 19201 - RNA, 88 nt, synthetic construct
  misc_feature 1..88: note = engineered ribonucleic acid scaffold (ERS) sequence
  source 1..88: mol_type = other RNA
acactggtttttatctgattactttgaccagttcaccagcgactatgtcgtagtgggtaaagctccctcttcggagggagcatcagag

SEQ ID NO: 19202 - RNA, 88 nt, synthetic construct
  misc_feature 1..88: note = engineered ribonucleic acid scaffold (ERS) sequence
  source 1..88: mol_type = other RNA
acactggtttttatctgattactctgaccagttcaccagcgactatgtcgtagtgggtaaagctccctcttcggagggagcatcagag

SEQ ID NO: 19203 - RNA, 88 nt, synthetic construct
  misc_feature 1..88: note = engineered ribonucleic acid scaffold (ERS) sequence
  source 1..88: mol_type = other RNA
acactggtttttatctgattactctgaccagttcaccagcgactatgtcgtagtgggtaaagctccctcttcggagggagcatcaaag

SEQ ID NO: 19204 - RNA, 88 nt, synthetic construct
  misc_feature 1..88: note = engineered ribonucleic acid scaffold (ERS) sequence
  source 1..88: mol_type = other RNA
acactggtttctatctgattactctgaccagttcaccagcgactatgtcgtagtgggtaaagctccctcttcggagggagcctcagag

SEQ ID NO: 19205 - RNA, 88 nt, synthetic construct
  misc_feature 1..88: note = engineered ribonucleic acid scaffold (ERS) sequence
  source 1..88: mol_type = other RNA
acactggtttctatctgattactctgaccagttcaccagcgactatgtcgtagtgggtaaagctccctcttcggagggagcgtcagag

SEQ ID NO: 19206 - RNA, 88 nt, synthetic construct
  misc_feature 1..88: note = engineered ribonucleic acid scaffold (ERS) sequence
  source 1..88: mol_type = other RNA
acactggtttctatctgattactctgaccagttcaccagcgactatgtcgtagtgggtaaagctccctcttcggagggagcatcaaag

SEQ ID NO: 19207 - RNA, 88 nt, synthetic construct
  misc_feature 1..88: note = engineered ribonucleic acid scaffold (ERS) sequence
  source 1..88: mol_type = other RNA
acaggccgttctatctgattactctccggccttcaccagcgactatgtcgtagtgggtaaagctccctcttcggagggagcatcagac

SEQ ID NO: 19208 - RNA, 88 nt, synthetic construct
  misc_feature 1..88: note = engineered ribonucleic acid scaffold (ERS) sequence
  source 1..88: mol_type = other RNA
acaggccgttctatctgattactttgcggccttcaccagcgactatgtcgtagtgggtaaagctccctcttcggagggagcatcagag

SEQ ID NO: 19209 - RNA, 88 nt, synthetic construct
  misc_feature 1..88: note = engineered ribonucleic acid scaffold (ERS) sequence
  source 1..88: mol_type = other RNA
acaggccgttctatctgattactttgcggccttcaccagcgactatgtcgtagtgggtaaagctccctcttcggagggagcatcaaag

SEQ ID NO: 19210 - RNA, 88 nt, synthetic construct
  misc_feature 1..88: note = engineered ribonucleic acid scaffold (ERS) sequence
  source 1..88: mol_type = other RNA
acaggccgttctatctgattagtctccggccttcaccagcgactatgtcgtagtgggtaaagctccctcttcggagggagcatgagac

SEQ ID NO: 19211 - RNA, 88 nt, synthetic construct
  misc_feature 1..88: note = engineered ribonucleic acid scaffold (ERS) sequence
  source 1..88: mol_type = other RNA
acaggccgttctatctgattagtctgcggccttcaccagcgactatgtcgtagtgggtaaagctccctcttcggagggagcatcagac

SEQ ID NO: 19212 - RNA, 88 nt, synthetic construct
  misc_feature 1..88: note = engineered ribonucleic acid scaffold (ERS) sequence
  source 1..88: mol_type = other RNA
acaggccgttctatctgattactctccggccttcaccagcgactatgtcgtagtgggtaaagctccctcttcggagggagcatgagag

SEQ ID NO: 19213 - RNA, 88 nt, synthetic construct
  misc_feature 1..88: note = engineered ribonucleic acid scaffold (ERS) sequence
  source 1..88: mol_type = other RNA
acaggccgtcccatctgattaccccgcggccttcaccagcgactatgtcgtagtgggtaaagctccctcttcggagggagcatcgggg

SEQ ID NO: 19214 - RNA, 88 nt, synthetic construct
  misc_feature 1..88: note = engineered ribonucleic acid scaffold (ERS) sequence
  source 1..88: mol_type = other RNA
acaggccgtcctatctgattactccgcggccttcaccagcgactatgtcgtagtgggtaaagctccctcttcggagggagcatcggag

SEQ ID NO: 19215 - RNA, 88 nt, synthetic construct
  misc_feature 1..88: note = engineered ribonucleic acid scaffold (ERS) sequence
  source 1..88: mol_type = other RNA
acaggccgtgggatctgattaccccgcggccttcaccagcgactatgtcgtagtgggtaaagctccctcttcggagggagcatcgggg

SEQ ID NO: 19216 - RNA, 88 nt, synthetic construct
  misc_feature 1..88: note = engineered ribonucleic acid scaffold (ERS) sequence
  source 1..88: mol_type = other RNA
acaggccgtggtatctgattactccgcggccttcaccagcgactatgtcgtagtgggtaaagctccctcttcggagggagcatcggag

SEQ ID NO: 19217 - RNA, 88 nt, synthetic construct
  misc_feature 1..88: note = engineered ribonucleic acid scaffold (ERS) sequence
  source 1..88: mol_type = other RNA
acaggccgttccatctgattaccctgcggccttcaccagcgactatgtcgtagtgggtaaagctccctcttcggagggagcatcaggg

SEQ ID NO: 19218 - RNA, 88 nt, synthetic construct
  misc_feature 1..88: note = engineered ribonucleic acid scaffold (ERS) sequence
  source 1..88: mol_type = other RNA
acaggccgttggatctgattaccctgcggccttcaccagcgactatgtcgtagtgggtaaagctccctcttcggagggagcatcaggg

SEQ ID NO: 19219 - RNA, 88 nt, synthetic construct
  misc_feature 1..88: note = engineered ribonucleic acid scaffold (ERS) sequence
  source 1..88: mol_type = other RNA
acaggccgttgtatctgattactctgcggccttcaccagcgactatgtcgtagtgggtaaagctccctcttcggagggagcatcagag

SEQ ID NO: 19220 - RNA, 88 nt, synthetic construct
  misc_feature 1..88: note = engineered ribonucleic acid scaffold (ERS) sequence
  source 1..88: mol_type = other RNA
acaggccgttttatctgattactttgcggccttcaccagcgactatgtcgtagtgggtaaagctccctcttcggagggagcatcagag

SEQ ID NO: 19221 - RNA, 88 nt, synthetic construct
  misc_feature 1..88: note = engineered ribonucleic acid scaffold (ERS) sequence
  source 1..88: mol_type = other RNA
acaggccgttttatctgattactctgcggccttcaccagcgactatgtcgtagtgggtaaagctccctcttcggagggagcatcagag

SEQ ID NO: 19222 - RNA, 88 nt, synthetic construct
  misc_feature 1..88: note = engineered ribonucleic acid scaffold (ERS) sequence
  source 1..88: mol_type = other RNA
acaggccgttttatctgattactctgcggccttcaccagcgactatgtcgtagtgggtaaagctccctcttcggagggagcatcaaag

SEQ ID NO: 19223 - RNA, 88 nt, synthetic construct
  misc_feature 1..88: note = engineered ribonucleic acid scaffold (ERS) sequence
  source 1..88: mol_type = other RNA
acaggccgttctatctgattactctgcggccttcaccagcgactatgtcgtagtgggtaaagctccctcttcggagggagcctcagag

SEQ ID NO: 19224 - RNA, 88 nt, synthetic construct
  misc_feature 1..88: note = engineered ribonucleic acid scaffold (ERS) sequence
  source 1..88: mol_type = other RNA
acaggccgttctatctgattactctgcggccttcaccagcgactatgtcgtagtgggtaaagctccctcttcggagggagcgtcagag

SEQ ID NO: 19225 - RNA, 88 nt, synthetic construct
  misc_feature 1..88: note = engineered ribonucleic acid scaffold (ERS) sequence
  source 1..88: mol_type = other RNA
acaggccgttctatctgattactctgcggccttcaccagcgactatgtcgtagtgggtaaagctccctcttcggagggagcatcaaag

SEQ ID NO: 19226 - RNA, 88 nt, synthetic construct
  misc_feature 1..88: note = engineered ribonucleic acid scaffold (ERS) sequence
  source 1..88: mol_type = other RNA
acaggtccttctatctgattactctcggaccttcaccagcgactatgtcgtagtgggtaaagctccctcttcggagggagcatcagac

SEQ ID NO: 19227 - RNA, 88 nt, synthetic construct
  misc_feature 1..88: note = engineered ribonucleic acid scaffold (ERS) sequence
  source 1..88: mol_type = other RNA
acaggtccttctatctgattactttgggaccttcaccagcgactatgtcgtagtgggtaaagctccctcttcggagggagcatcagag

SEQ ID NO: 19228 - RNA, 88 nt, synthetic construct
  misc_feature 1..88: note = engineered ribonucleic acid scaffold (ERS) sequence
  source 1..88: mol_type = other RNA
acaggtccttctatctgattactttgggaccttcaccagcgactatgtcgtagtgggtaaagctccctcttcggagggagcatcaaag

SEQ ID NO: 19229 - RNA, 88 nt, synthetic construct
  misc_feature 1..88: note = engineered ribonucleic acid scaffold (ERS) sequence
  source 1..88: mol_type = other RNA
acaggtccttctatctgattagtctcggaccttcaccagcgactatgtcgtagtgggtaaagctccctcttcggagggagcatgagac

SEQ ID NO: 19230 - RNA, 88 nt, synthetic construct
  misc_feature 1..88: note = engineered ribonucleic acid scaffold (ERS) sequence
  source 1..88: mol_type = other RNA
acaggtccttctatctgattagtctgggaccttcaccagcgactatgtcgtagtgggtaaagctccctcttcggagggagcatcagac

SEQ ID NO: 19231 - RNA, 88 nt, synthetic construct
  misc_feature 1..88: note = engineered ribonucleic acid scaffold (ERS) sequence
  source 1..88: mol_type = other RNA
acaggtccttctatctgattactctcggaccttcaccagcgactatgtcgtagtgggtaaagctccctcttcggagggagcatgagag

SEQ ID NO: 19232 - RNA, 88 nt, synthetic construct
  misc_feature 1..88: note = engineered ribonucleic acid scaffold (ERS) sequence
  source 1..88: mol_type = other RNA
acaggtcctcccatctgattaccccgggaccttcaccagcgactatgtcgtagtgggtaaagctccctcttcggagggagcatcgggg

SEQ ID NO: 19233 - RNA, 88 nt, synthetic construct
  misc_feature 1..88: note = engineered ribonucleic acid scaffold (ERS) sequence
  source 1..88: mol_type = other RNA
acaggtcctcctatctgattactccgggaccttcaccagcgactatgtcgtagtgggtaaagctccctcttcggagggagcatcggag

SEQ ID NO: 19234 - RNA, 88 nt, synthetic construct
  misc_feature 1..88: note = engineered ribonucleic acid scaffold (ERS) sequence
  source 1..88: mol_type = other RNA
acaggtcctgggatctgattaccccgggaccttcaccagcgactatgtcgtagtgggtaaagctccctcttcggagggagcatcgggg

SEQ ID NO: 19235 - RNA, 88 nt, synthetic construct
  misc_feature 1..88: note = engineered ribonucleic acid scaffold (ERS) sequence
  source 1..88: mol_type = other RNA
acaggtcctggtatctgattactccgggaccttcaccagcgactatgtcgtagtgggtaaagctccctcttcggagggagcatcggag

SEQ ID NO: 19236 - RNA, 88 nt, synthetic construct
  misc_feature 1..88: note = engineered ribonucleic acid scaffold (ERS) sequence
  source 1..88: mol_type = other RNA
acaggtccttccatctgattaccctgggaccttcaccagcgactatgtcgtagtgggtaaagctccctcttcggagggagcatcaggg

SEQ ID NO: 19237 - RNA, 88 nt, synthetic construct
  misc_feature 1..88: note = engineered ribonucleic acid scaffold (ERS) sequence
  source 1..88: mol_type = other RNA
acaggtccttggatctgattaccctgggaccttcaccagcgactatgtcgtagtgggtaaagctccctcttcggagggagcatcaggg

SEQ ID NO: 19238 - RNA, 88 nt, synthetic construct
  misc_feature 1..88: note = engineered ribonucleic acid scaffold (ERS) sequence
  source 1..88: mol_type = other RNA
acaggtccttgtatctgattactctgggaccttcaccagcgactatgtcgtagtgggtaaagctccctcttcggagggagcatcagag

SEQ ID NO: 19239 - RNA, 88 nt, synthetic construct
  misc_feature 1..88: note = engineered ribonucleic acid scaffold (ERS) sequence
  source 1..88: mol_type = other RNA
acaggtccttttatctgattactttgggaccttcaccagcgactatgtcgtagtgggtaaagctccctcttcggagggagcatcagag

SEQ ID NO: 19240 - RNA, 88 nt, synthetic construct
  misc_feature 1..88: note = engineered ribonucleic acid scaffold (ERS) sequence
  source 1..88: mol_type = other RNA
acaggtccttttatctgattactctgggaccttcaccagcgactatgtcgtagtgggtaaagctccctcttcggagggagcatcagag

SEQ ID NO: 19241 - RNA, 88 nt, synthetic construct
  misc_feature 1..88: note = engineered ribonucleic acid scaffold (ERS) sequence
  source 1..88: mol_type = other RNA
acaggtccttttatctgattactctgggaccttcaccagcgactatgtcgtagtgggtaaagctccctcttcggagggagcatcaaag

SEQ ID NO: 19242 - RNA, 88 nt, synthetic construct
  misc_feature 1..88: note = engineered ribonucleic acid scaffold (ERS) sequence
  source 1..88: mol_type = other RNA
acaggtccttctatctgattactctgggaccttcaccagcgactatgtcgtagtgggtaaagctccctcttcggagggagcctcagag

SEQ ID NO: 19243 - RNA, 88 nt, synthetic construct
  misc_feature 1..88: note = engineered ribonucleic acid scaffold (ERS) sequence
  source 1..88: mol_type = other RNA
acaggtccttctatctgattactctgggaccttcaccagcgactatgtcgtagtgggtaaagctccctcttcggagggagcgtcagag

SEQ ID NO: 19244 - RNA, 88 nt, synthetic construct
  misc_feature 1..88: note = engineered ribonucleic acid scaffold (ERS) sequence
  source 1..88: mol_type = other RNA
acaggtccttctatctgattactctgggaccttcaccagcgactatgtcgtagtgggtaaagctccctcttcggagggagcatcaaag

SEQ ID NO: 19245 - RNA, 88 nt, synthetic construct
  misc_feature 1..88: note = engineered ribonucleic acid scaffold (ERS) sequence
  source 1..88: mol_type = other RNA
accagcaattctatctgattactctcttgctgtcaccagcgactatgtcgtagtgggtaaagctccctcttcggagggagcatcagac

SEQ ID NO: 19246 - RNA, 88 nt, synthetic construct
  misc_feature 1..88: note = engineered ribonucleic acid scaffold (ERS) sequence
  source 1..88: mol_type = other RNA
accagcaattctatctgattactttgttgctgtcaccagcgactatgtcgtagtgggtaaagctccctcttcggagggagcatcagag

SEQ ID NO: 19247 - RNA, 88 nt, synthetic construct
  misc_feature 1..88: note = engineered ribonucleic acid scaffold (ERS) sequence
  source 1..88: mol_type = other RNA
accagcaattctatctgattactttgttgctgtcaccagcgactatgtcgtagtgggtaaagctccctcttcggagggagcatcaaag

SEQ ID NO: 19248 - RNA, 88 nt, synthetic construct
  misc_feature 1..88: note = engineered ribonucleic acid scaffold (ERS) sequence
  source 1..88: mol_type = other RNA
accagcaattctatctgattagtctcttgctgtcaccagcgactatgtcgtagtgggtaaagctccctcttcggagggagcatgagac

SEQ ID NO: 19249 - RNA, 88 nt, synthetic construct
  misc_feature 1..88: note = engineered ribonucleic acid scaffold (ERS) sequence
  source 1..88: mol_type = other RNA
accagcaattctatctgattagtctgttgctgtcaccagcgactatgtcgtagtgggtaaagctccctcttcggagggagcatcagac

SEQ ID NO: 19250 - RNA, 88 nt, synthetic construct
  misc_feature 1..88: note = engineered ribonucleic acid scaffold (ERS) sequence
  source 1..88: mol_type = other RNA
accagcaattctatctgattactctcttgctgtcaccagcgactatgtcgtagtgggtaaagctccctcttcggagggagcatgagag

SEQ ID NO: 19251 - RNA, 88 nt, synthetic construct
  misc_feature 1..88: note = engineered ribonucleic acid scaffold (ERS) sequence
  source 1..88: mol_type = other RNA
accagcaatcccatctgattaccccgttgctgtcaccagcgactatgtcgtagtgggtaaagctccctcttcggagggagcatcgggg

SEQ ID NO: 19252 - RNA, 88 nt, synthetic construct
  misc_feature 1..88: note = engineered ribonucleic acid scaffold (ERS) sequence
  source 1..88: mol_type = other RNA
accagcaatcctatctgattactccgttgctgtcaccagcgactatgtcgtagtgggtaaagctccctcttcggagggagcatcggag

SEQ ID NO: 19253 - RNA, 88 nt, synthetic construct
  misc_feature 1..88: note = engineered ribonucleic acid scaffold (ERS) sequence
  source 1..88: mol_type = other RNA
accagcaatgggatctgattaccccgttgctgtcaccagcgactatgtcgtagtgggtaaagctccctcttcggagggagcatcgggg

SEQ ID NO: 19254 - RNA, 88 nt, synthetic construct
  misc_feature 1..88: note = engineered ribonucleic acid scaffold (ERS) sequence
  source 1..88: mol_type = other RNA
accagcaatggtatctgattactccgttgctgtcaccagcgactatgtcgtagtgggtaaagctccctcttcggagggagcatcggag

SEQ ID NO: 19255 - RNA, 88 nt, synthetic construct
  misc_feature 1..88: note = engineered ribonucleic acid scaffold (ERS) sequence
  source 1..88: mol_type = other RNA
accagcaattccatctgattaccctgttgctgtcaccagcgactatgtcgtagtgggtaaagctccctcttcggagggagcatcaggg

SEQ ID NO: 19256 - RNA, 88 nt, synthetic construct
  misc_feature 1..88: note = engineered ribonucleic acid scaffold (ERS) sequence
  source 1..88: mol_type = other RNA
accagcaattggatctgattaccctgttgctgtcaccagcgactatgtcgtagtgggtaaagctccctcttcggagggagcatcaggg

SEQ ID NO: 19257 - RNA, 88 nt, synthetic construct
  misc_feature 1..88: note = engineered ribonucleic acid scaffold (ERS) sequence
  source 1..88: mol_type = other RNA
accagcaattgtatctgattactctgttgctgtcaccagcgactatgtcgtagtgggtaaagctccctcttcggagggagcatcagag

SEQ ID NO: 19258 - RNA, 88 nt, synthetic construct
  misc_feature 1..88: note = engineered ribonucleic acid scaffold (ERS) sequence
  source 1..88: mol_type = other RNA
accagcaattttatctgattactttgttgctgtcaccagcgactatgtcgtagtgggtaaagctccctcttcggagggagcatcagag

SEQ ID NO: 19259 - RNA, 88 nt, synthetic construct
  misc_feature 1..88: note = engineered ribonucleic acid scaffold (ERS) sequence
  source 1..88: mol_type = other RNA
accagcaattttatctgattactctgttgctgtcaccagcgactatgtcgtagtgggtaaagctccctcttcggagggagcatcagag

SEQ ID NO: 19260 - RNA, 88 nt, synthetic construct
  misc_feature 1..88: note = engineered ribonucleic acid scaffold (ERS) sequence
  source 1..88: mol_type = other RNA
accagcaattttatctgattactctgttgctgtcaccagcgactatgtcgtagtgggtaaagctccctcttcggagggagcatcaaag

SEQ ID NO: 19261 - RNA, 88 nt, synthetic construct
  misc_feature 1..88: note = engineered ribonucleic acid scaffold (ERS) sequence
  source 1..88: mol_type = other RNA
accagcaattctatctgattactctgttgctgtcaccagcgactatgtcgtagtgggtaaagctccctcttcggagggagcctcagag

SEQ ID NO: 19262 - RNA, 88 nt, synthetic construct
  misc_feature 1..88: note = engineered ribonucleic acid scaffold (ERS) sequence
  source 1..88: mol_type = other RNA
accagcaattctatctgattactctgttgctgtcaccagcgactatgtcgtagtgggtaaagctccctcttcggagggagcgtcagag

SEQ ID NO: 19263 - RNA, 88 nt, synthetic construct
  misc_feature 1..88: note = engineered ribonucleic acid scaffold (ERS) sequence
  source 1..88: mol_type = other RNA
accagcaattctatctgattactctgttgctgtcaccagcgactatgtcgtagtgggtaaagctccctcttcggagggagcatcaaag

SEQ ID NO: 19264 - RNA, 88 nt, synthetic construct
  misc_feature 1..88: note = engineered ribonucleic acid scaffold (ERS) sequence
  source 1..88: mol_type = other RNA
accgagacttctatctgattactctcggctcgtcaccagcgactatgtcgtagtgggtaaagctccctcttcggagggagcatcagac

SEQ ID NO: 19265 - RNA, 88 nt, synthetic construct
  misc_feature 1..88: note = engineered ribonucleic acid scaffold (ERS) sequence
  source 1..88: mol_type = other RNA
accgagacttctatctgattactttgggctcgtcaccagcgactatgtcgtagtgggtaaagctccctcttcggagggagcatcagag

SEQ ID NO: 19266 - RNA, 88 nt, synthetic construct
  misc_feature 1..88: note = engineered ribonucleic acid scaffold (ERS) sequence
  source 1..88: mol_type = other RNA
accgagacttctatctgattactttgggctcgtcaccagcgactatgtcgtagtgggtaaagctccctcttcggagggagcatcaaag

SEQ ID NO: 19267 - RNA, 88 nt, synthetic construct
  misc_feature 1..88: note = engineered ribonucleic acid scaffold (ERS) sequence
  source 1..88: mol_type = other RNA
accgagacttctatctgattagtctcggctcgtcaccagcgactatgtcgtagtgggtaaagctccctcttcggagggagcatgagac

SEQ ID NO: 19268 - RNA, 88 nt, synthetic construct
  misc_feature 1..88: note = engineered ribonucleic acid scaffold (ERS) sequence
  source 1..88: mol_type = other RNA
accgagacttctatctgattagtctgggctcgtcaccagcgactatgtcgtagtgggtaaagctccctcttcggagggagcatcagac

SEQ ID NO: 19269 - RNA, 88 nt, synthetic construct
  misc_feature 1..88: note = engineered ribonucleic acid scaffold (ERS) sequence
  source 1..88: mol_type = other RNA
accgagacttctatctgattactctcggctcgtcaccagcgactatgtcgtagtgggtaaagctccctcttcggagggagcatgagag

SEQ ID NO: 19270 - RNA, 88 nt, synthetic construct
  misc_feature 1..88: note = engineered ribonucleic acid scaffold (ERS) sequence
  source 1..88: mol_type = other RNA
accgagactcccatctgattaccccgggctcgtcaccagcgactatgtcgtagtgggtaaagctccctcttcggagggagcatcgggg

SEQ ID NO: 19271 - RNA, 88 nt, synthetic construct
  misc_feature 1..88: note = engineered ribonucleic acid scaffold (ERS) sequence
  source 1..88: mol_type = other RNA
accgagactcctatctgattactccgggctcgtcaccagcgactatgtcgtagtgggtaaagctccctcttcggagggagcatcggag

SEQ ID NO: 19272 - RNA, 88 nt, synthetic construct
  misc_feature 1..88: note = engineered ribonucleic acid scaffold (ERS) sequence
  source 1..88: mol_type = other RNA
accgagactgggatctgattaccccgggctcgtcaccagcgactatgtcgtagtgggtaaagctccctcttcggagggagcatcgggg

SEQ ID NO: 19273 - RNA, 88 nt, synthetic construct
  misc_feature 1..88: note = engineered ribonucleic acid scaffold (ERS) sequence
  source 1..88: mol_type = other RNA
accgagactggtatctgattactccgggctcgtcaccagcgactatgtcgtagtgggtaaagctccctcttcggagggagcatcggag

SEQ ID NO: 19274 - RNA, 88 nt, synthetic construct
  misc_feature 1..88: note = engineered ribonucleic acid scaffold (ERS) sequence
  source 1..88: mol_type = other RNA
accgagacttccatctgattaccctgggctcgtcaccagcgactatgtcgtagtgggtaaagctccctcttcggagggagcatcaggg

SEQ ID NO: 19275 - RNA, 88 nt, synthetic construct
  misc_feature 1..88: note = engineered ribonucleic acid scaffold (ERS) sequence
  source 1..88: mol_type = other RNA
accgagacttggatctgattaccctgggctcgtcaccagcgactatgtcgtagtgggtaaagctccctcttcggagggagcatcaggg

SEQ ID NO: 19276 - RNA, 88 nt, synthetic construct
  misc_feature 1..88: note = engineered ribonucleic acid scaffold (ERS) sequence
  source 1..88: mol_type = other RNA
accgagacttgtatctgattactctgggctcgtcaccagcgactatgtcgtagtgggtaaagctccctcttcggagggagcatcagag

SEQ ID NO: 19277 - RNA, 88 nt, synthetic construct
  misc_feature 1..88: note = engineered ribonucleic acid scaffold (ERS) sequence
  source 1..88: mol_type = other RNA
accgagacttttatctgattactttgggctcgtcaccagcgactatgtcgtagtgggtaaagctccctcttcggagggagcatcagag

SEQ ID NO: 19278 - RNA, 88 nt, synthetic construct
  misc_feature 1..88: note = engineered ribonucleic acid scaffold (ERS) sequence
  source 1..88: mol_type = other RNA
accgagacttttatctgattactctgggctcgtcaccagcgactatgtcgtagtgggtaaagctccctcttcggagggagcatcagag

SEQ ID NO: 19279 - RNA, 88 nt, synthetic construct
  misc_feature 1..88: note = engineered ribonucleic acid scaffold (ERS) sequence
  source 1..88: mol_type = other RNA
accgagacttttatctgattactctgggctcgtcaccagcgactatgtcgtagtgggtaaagctccctcttcggagggagcatcaaag

SEQ ID NO: 19280 - RNA, 88 nt, synthetic construct
  misc_feature 1..88: note = engineered ribonucleic acid scaffold (ERS) sequence
  source 1..88: mol_type = other RNA
accgagacttctatctgattactctgggctcgtcaccagcgactatgtcgtagtgggtaaagctccctcttcggagggagcctcagag

SEQ ID NO: 19281 - RNA, 88 nt, synthetic construct
  misc_feature 1..88: note = engineered ribonucleic acid scaffold (ERS) sequence
  source 1..88: mol_type = other RNA
accgagacttctatctgattactctgggctcgtcaccagcgactatgtcgtagtgggtaaagctccctcttcggagggagcgtcagag

SEQ ID NO: 19282 - RNA, 88 nt, synthetic construct
  misc_feature 1..88: note = engineered ribonucleic acid scaffold (ERS) sequence
  source 1..88: mol_type = other RNA
accgagacttctatctgattactctgggctcgtcaccagcgactatgtcgtagtgggtaaagctccctcttcggagggagcatcaaag

SEQ ID NO: 19283 - RNA, 88 nt, synthetic construct
  misc_feature 1..88: note = engineered ribonucleic acid scaffold (ERS) sequence
  source 1..88: mol_type = other RNA
acctgtagttctatctgattactctcctacagtcaccagcgactatgtcgtagtgggtaaagctccctcttcggagggagcatcagac

SEQ ID NO: 19284 - RNA, 88 nt, synthetic construct
  misc_feature 1..88: note = engineered ribonucleic acid scaffold (ERS) sequence
  source 1..88: mol_type = other RNA
acctgtagttctatctgattactttgctacagtcaccagcgactatgtcgtagtgggtaaagctccctcttcggagggagcatcagag

SEQ ID NO: 19285 - RNA, 88 nt, synthetic construct
  misc_feature 1..88: note = engineered ribonucleic acid scaffold (ERS) sequence
  source 1..88: mol_type = other RNA
acctgtagttctatctgattactttgctacagtcaccagcgactatgtcgtagtgggtaaagctccctcttcggagggagcatcaaag

SEQ ID NO: 19286 - RNA, 88 nt, synthetic construct
  misc_feature 1..88: note = engineered ribonucleic acid scaffold (ERS) sequence
  source 1..88: mol_type = other RNA
acctgtagttctatctgattagtctcctacagtcaccagcgactatgtcgtagtgggtaaagctccctcttcggagggagcatgagac

SEQ ID NO: 19287 - RNA, 88 nt, synthetic construct
  misc_feature 1..88: note = engineered ribonucleic acid scaffold (ERS) sequence
  source 1..88: mol_type = other RNA
acctgtagttctatctgattagtctgctacagtcaccagcgactatgtcgtagtgggtaaagctccctcttcggagggagcatcagac

SEQ ID NO: 19288 - RNA, 88 nt, synthetic construct
  misc_feature 1..88: note = engineered ribonucleic acid scaffold (ERS) sequence
  source 1..88: mol_type = other RNA
acctgtagttctatctgattactctcctacagtcaccagcgactatgtcgtagtgggtaaagctccctcttcggagggagcatgagag

SEQ ID NO: 19289 - RNA, 88 nt, synthetic construct
  misc_feature 1..88: note = engineered ribonucleic acid scaffold (ERS) sequence
  source 1..88: mol_type = other RNA
acctgtagtcccatctgattaccccgctacagtcaccagcgactatgtcgtagtgggtaaagctccctcttcggagggagcatcgggg

SEQ ID NO: 19290 - RNA, 88 nt, synthetic construct
  misc_feature 1..88: note = engineered ribonucleic acid scaffold (ERS) sequence
  source 1..88: mol_type = other RNA
acctgtagtcctatctgattactccgctacagtcaccagcgactatgtcgtagtgggtaaagctccctcttcggagggagcatcggag

SEQ ID NO: 19291 - RNA, 88 nt, synthetic construct
  misc_feature 1..88: note = engineered ribonucleic acid scaffold (ERS) sequence
  source 1..88: mol_type = other RNA
acctgtagtgggatctgattaccccgctacagtcaccagcgactatgtcgtagtgggtaaagctccctcttcggagggagcatcgggg

SEQ ID NO: 19292 - RNA, 88 nt, synthetic construct
  misc_feature 1..88: note = engineered ribonucleic acid scaffold (ERS) sequence
  source 1..88: mol_type = other RNA
acctgtagtggtatctgattactccgctacagtcaccagcgactatgtcgtagtgggtaaagctccctcttcggagggagcatcggag

SEQ ID NO: 19293 - RNA, 88 nt, synthetic construct
  misc_feature 1..88: note = engineered ribonucleic acid scaffold (ERS) sequence
  source 1..88: mol_type = other RNA
acctgtagttccatctgattaccctgctacagtcaccagcgactatgtcgtagtgggtaaagctccctcttcggagggagcatcaggg

SEQ ID NO: 19294 - RNA, 88 nt, synthetic construct
  misc_feature 1..88: note = engineered ribonucleic acid scaffold (ERS) sequence
  source 1..88: mol_type = other RNA
acctgtagttggatctgattaccctgctacagtcaccagcgactatgtcgtagtgggtaaagctccctcttcggagggagcatcaggg

SEQ ID NO: 19295 - RNA, 88 nt, synthetic construct
  misc_feature 1..88: note = engineered ribonucleic acid scaffold (ERS) sequence
  source 1..88: mol_type = other RNA
acctgtagttgtatctgattactctgctacagtcaccagcgactatgtcgtagtgggtaaagctccctcttcggagggagcatcagag

SEQ ID NO: 19296 - RNA, 88 nt, synthetic construct
  misc_feature 1..88: note = engineered ribonucleic acid scaffold (ERS) sequence
  source 1..88: mol_type = other RNA
acctgtagttttatctgattactttgctacagtcaccagcgactatgtcgtagtgggtaaagctccctcttcggagggagcatcagag

SEQ ID NO: 19297 - RNA, 88 nt, synthetic construct
  misc_feature 1..88: note = engineered ribonucleic acid scaffold (ERS) sequence
  source 1..88: mol_type = other RNA
acctgtagttttatctgattactctgctacagtcaccagcgactatgtcgtagtgggtaaagctccctcttcggagggagcatcagag

SEQ ID NO: 19298 - RNA, 88 nt, synthetic construct
  misc_feature 1..88: note = engineered ribonucleic acid scaffold (ERS) sequence
  source 1..88: mol_type = other RNA
acctgtagttttatctgattactctgctacagtcaccagcgactatgtcgtagtgggtaaagctccctcttcggagggagcatcaaag

SEQ ID NO: 19299 - RNA, 88 nt, synthetic construct
  misc_feature 1..88: note = engineered ribonucleic acid scaffold (ERS) sequence
  source 1..88: mol_type = other RNA
acctgtagttctatctgattactctgctacagtcaccagcgactatgtcgtagtgggtaaagctccctcttcggagggagcctcagag

SEQ ID NO: 19300 - RNA, 88 nt, synthetic construct
  misc_feature 1..88: note = engineered ribonucleic acid scaffold (ERS) sequence
  source 1..88: mol_type = other RNA
acctgtagttctatctgattactctgctacagtcaccagcgactatgtcgtagtgggtaaagctccctcttcggagggagcgtcagag

SEQ ID NO: 19301 - RNA, 88 nt, synthetic construct
  misc_feature 1..88: note = engineered ribonucleic acid scaffold (ERS) sequence
  source 1..88: mol_type = other RNA
acctgtagttctatctgattactctgctacagtcaccagcgactatgtcgtagtgggtaaagctccctcttcggagggagcatcaaag

SEQ ID NO: 19302 - RNA, 88 nt, synthetic construct
  misc_feature 1..88: note = engineered ribonucleic acid scaffold (ERS) sequence
  source 1..88: mol_type = other RNA
acgagcacttctatctgattactctcgggctctcaccagcgactatgtcgtagtgggtaaagctccctcttcggagggagcatcagac

SEQ ID NO: 19303 - RNA, 88 nt, synthetic construct
  misc_feature 1..88: note = engineered ribonucleic acid scaffold (ERS) sequence
  source 1..88: mol_type = other RNA
acgagcacttctatctgattactttggggctctcaccagcgactatgtcgtagtgggtaaagctccctcttcggagggagcatcagag

SEQ ID NO: 19304 - RNA, 88 nt, synthetic construct
  misc_feature 1..88: note = engineered ribonucleic acid scaffold (ERS) sequence
  source 1..88: mol_type = other RNA
acgagcacttctatctgattactttggggctctcaccagcgactatgtcgtagtgggtaaagctccctcttcggagggagcatcaaag

SEQ ID NO: 19305 - RNA, 88 nt, synthetic construct
  misc_feature 1..88: note = engineered ribonucleic acid scaffold (ERS) sequence
  source 1..88: mol_type = other RNA
acgagcacttctatctgattagtctcgggctctcaccagcgactatgtcgtagtgggtaaagctccctcttcggagggagcatgagac

SEQ ID NO: 19306 - RNA, 88 nt, synthetic construct
  misc_feature 1..88: note = engineered ribonucleic acid scaffold (ERS) sequence
  source 1..88: mol_type = other RNA
acgagcacttctatctgattagtctggggctctcaccagcgactatgtcgtagtgggtaaagctccctcttcggagggagcatcagac

SEQ ID NO: 19307 - RNA, 88 nt, synthetic construct
  misc_feature 1..88: note = engineered ribonucleic acid scaffold (ERS) sequence
  source 1..88: mol_type = other RNA
acgagcacttctatctgattactctcgggctctcaccagcgactatgtcgtagtgggtaaagctccctcttcggagggagcatgagag

SEQ ID NO: 19308 - RNA, 88 nt, synthetic construct
  misc_feature 1..88: note = engineered ribonucleic acid scaffold (ERS) sequence
  source 1..88: mol_type = other RNA
acgagcactcccatctgattaccccggggctctcaccagcgactatgtcgtagtgggtaaagctccctcttcggagggagcatcgggg

SEQ ID NO: 19309 - RNA, 88 nt, synthetic construct
  misc_feature 1..88: note = engineered ribonucleic acid scaffold (ERS) sequence
  source 1..88: mol_type = other RNA
acgagcactcctatctgattactccggggctctcaccagcgactatgtcgtagtgggtaaagctccctcttcggagggagcatcggag

SEQ ID NO: 19310 - RNA, 88 nt, synthetic construct
  misc_feature 1..88: note = engineered ribonucleic acid scaffold (ERS) sequence
  source 1..88: mol_type = other RNA
acgagcactgggatctgattaccccggggctctcaccagcgactatgtcgtagtgggtaaagctccctcttcggagggagcatcgggg

SEQ ID NO: 19311 - RNA, 88 nt, synthetic construct
  misc_feature 1..88: note = engineered ribonucleic acid scaffold (ERS) sequence
  source 1..88: mol_type = other RNA
acgagcactggtatctgattactccggggctctcaccagcgactatgtcgtagtgggtaaagctccctcttcggagggagcatcggag

SEQ ID NO: 19312 - RNA, 88 nt, synthetic construct
  misc_feature 1..88: note = engineered ribonucleic acid scaffold (ERS) sequence
  source 1..88: mol_type = other RNA
acgagcacttccatctgattaccctggggctctcaccagcgactatgtcgtagtgggtaaagctccctcttcggagggagcatcaggg

SEQ ID NO: 19313 - RNA, 88 nt, synthetic construct
  misc_feature 1..88: note = engineered ribonucleic acid scaffold (ERS) sequence
  source 1..88: mol_type = other RNA
acgagcacttggatctgattaccctggggctctcaccagcgactatgtcgtagtgggtaaagctccctcttcggagggagcatcaggg

SEQ ID NO: 19314 - RNA, 88 nt, synthetic construct
  misc_feature 1..88: note = engineered ribonucleic acid scaffold (ERS) sequence
  source 1..88: mol_type = other RNA
acgagcacttgtatctgattactctggggctctcaccagcgactatgtcgtagtgggtaaagctccctcttcggagggagcatcagag

SEQ ID NO: 19315 - RNA, 88 nt, synthetic construct
  misc_feature 1..88: note = engineered ribonucleic acid scaffold (ERS) sequence
  source 1..88: mol_type = other RNA
acgagcacttttatctgattactttggggctctcaccagcgactatgtcgtagtgggtaaagctccctcttcggagggagcatcagag

SEQ ID NO: 19316 - RNA, 88 nt, synthetic construct
  misc_feature 1..88: note = engineered ribonucleic acid scaffold (ERS) sequence
  source 1..88: mol_type = other RNA
acgagcacttttatctgattactctggggctctcaccagcgactatgtcgtagtgggtaaagctccctcttcggagggagcatcagag

SEQ ID NO: 19317 - RNA, 88 nt, synthetic construct
  misc_feature 1..88: note = engineered ribonucleic acid scaffold (ERS) sequence
  source 1..88: mol_type = other RNA
acgagcacttttatctgattactctggggctctcaccagcgactatgtcgtagtgggtaaagctccctcttcggagggagcatcaaag

SEQ ID NO: 19318 - RNA, 88 nt, synthetic construct
  misc_feature 1..88: note = engineered ribonucleic acid scaffold (ERS) sequence
  source 1..88: mol_type = other RNA
acgagcacttctatctgattactctggggctctcaccagcgactatgtcgtagtgggtaaagctccctcttcggagggagcctcagag

SEQ ID NO: 19319 - RNA, 88 nt, synthetic construct
  misc_feature 1..88: note = engineered ribonucleic acid scaffold (ERS) sequence
  source 1..88: mol_type = other RNA
acgagcacttctatctgattactctggggctctcaccagcgactatgtcgtagtgggtaaagctccctcttcggagggagcgtcagag

SEQ ID NO: 19320 - RNA, 88 nt, synthetic construct
  misc_feature 1..88: note = engineered ribonucleic acid scaffold (ERS) sequence
  source 1..88: mol_type = other RNA
acgagcacttctatctgattactctggggctctcaccagcgactatgtcgtagtgggtaaagctccctcttcggagggagcatcaaag

SEQ ID NO: 19321 - RNA, 88 nt, synthetic construct
  misc_feature 1..88: note = engineered ribonucleic acid scaffold (ERS) sequence
  source 1..88: mol_type = other RNA
acgaggtgttctatctgattactctccacctctcaccagcgactatgtcgtagtgggtaaagctccctcttcggagggagcatcagac

SEQ ID NO: 19322 - RNA, 88 nt, synthetic construct
  misc_feature 1..88: note = engineered ribonucleic acid scaffold (ERS) sequence
  source 1..88: mol_type = other RNA
acgaggtgttctatctgattactttgcacctctcaccagcgactatgtcgtagtgggtaaagctccctcttcggagggagcatcagag

SEQ ID NO: 19323 - RNA, 88 nt, synthetic construct
  misc_feature 1..88: note = engineered ribonucleic acid scaffold (ERS) sequence
  source 1..88: mol_type = other RNA
acgaggtgttctatctgattactttgcacctctcaccagcgactatgtcgtagtgggtaaagctccctcttcggagggagcatcaaag

SEQ ID NO: 19324 - RNA, 88 nt, synthetic construct
  misc_feature 1..88: note = engineered ribonucleic acid scaffold (ERS) sequence
  source 1..88: mol_type = other RNA
acgaggtgttctatctgattagtctccacctctcaccagcgactatgtcgtagtgggtaaagctccctcttcggagggagcatgagac

SEQ ID NO: 19325 - RNA, 88 nt, synthetic construct
  misc_feature 1..88: note = engineered ribonucleic acid scaffold (ERS) sequence
  source 1..88: mol_type = other RNA
acgaggtgttctatctgattagtctgcacctctcaccagcgactatgtcgtagtgggtaaagctccctcttcggagggagcatcagac

SEQ ID NO: 19326 - RNA, 88 nt, synthetic construct
  misc_feature 1..88: note = engineered ribonucleic acid scaffold (ERS) sequence
  source 1..88: mol_type = other RNA
acgaggtgttctatctgattactctccacctctcaccagcgactatgtcgtagtgggtaaagctccctcttcggagggagcatgagag

SEQ ID NO: 19327 - RNA, 88 nt, synthetic construct
  misc_feature 1..88: note = engineered ribonucleic acid scaffold (ERS) sequence
  source 1..88: mol_type = other RNA
acgaggtgtcccatctgattaccccgcacctctcaccagcgactatgtcgtagtgggtaaagctccctcttcggagggagcatcgggg

SEQ ID NO: 19328 - RNA, 88 nt, synthetic construct
  misc_feature 1..88: note = engineered ribonucleic acid scaffold (ERS) sequence
  source 1..88: mol_type = other RNA
acgaggtgtcctatctgattactccgcacctctcaccagcgactatgtcgtagtgggtaaagctccctcttcggagggagcatcggag

SEQ ID NO: 19329 - RNA, 88 nt, synthetic construct
  misc_feature 1..88: note = engineered ribonucleic acid scaffold (ERS) sequence
  source 1..88: mol_type = other RNA
acgaggtgtgggatctgattaccccgcacctctcaccagcgactatgtcgtagtgggtaaagctccctcttcggagggagcatcgggg

SEQ ID NO: 19330 - RNA, 88 nt, synthetic construct
  misc_feature 1..88: note = engineered ribonucleic acid scaffold (ERS) sequence
  source 1..88: mol_type = other RNA
acgaggtgtggtatctgattactccgcacctctcaccagcgactatgtcgtagtgggtaaagctccctcttcggagggagcatcggag

SEQ ID NO: 19331 - RNA, 88 nt, synthetic construct
  misc_feature 1..88: note = engineered ribonucleic acid scaffold (ERS) sequence
  source 1..88: mol_type = other RNA
acgaggtgttccatctgattaccctgcacctctcaccagcgactatgtcgtagtgggtaaagctccctcttcggagggagcatcaggg

SEQ ID NO: 19332 - RNA, 88 nt, synthetic construct
  misc_feature 1..88: note = engineered ribonucleic acid scaffold (ERS) sequence
  source 1..88: mol_type = other RNA
acgaggtgttggatctgattaccctgcacctctcaccagcgactatgtcgtagtgggtaaagctccctcttcggagggagcatcaggg

SEQ ID NO: 19333 - RNA, 88 nt, synthetic construct
  misc_feature 1..88: note = engineered ribonucleic acid scaffold (ERS) sequence
  source 1..88: mol_type = other RNA
acgaggtgttgtatctgattactctgcacctctcaccagcgactatgtcgtagtgggtaaagctccctcttcggagggagcatcagag

SEQ ID NO: 19334 - RNA, 88 nt, synthetic construct
  misc_feature 1..88: note = engineered ribonucleic acid scaffold (ERS) sequence
  source 1..88: mol_type = other RNA
acgaggtgttttatctgattactttgcacctctcaccagcgactatgtcgtagtgggtaaagctccctcttcggagggagcatcagag

SEQ ID NO: 19335 - RNA, 88 nt, synthetic construct
  misc_feature 1..88: note = engineered ribonucleic acid scaffold (ERS) sequence
  source 1..88: mol_type = other RNA
acgaggtgttttatctgattactctgcacctctcaccagcgactatgtcgtagtgggtaaagctccctcttcggagggagcatcagag

SEQ ID NO: 19336 - RNA, 88 nt, synthetic construct
  misc_feature 1..88: note = engineered ribonucleic acid scaffold (ERS) sequence
  source 1..88: mol_type = other RNA
acgaggtgttttatctgattactctgcacctctcaccagcgactatgtcgtagtgggtaaagctccctcttcggagggagcatcaaag

SEQ ID NO: 19337 - RNA, 88 nt, synthetic construct
  misc_feature 1..88: note = engineered ribonucleic acid scaffold (ERS) sequence
  source 1..88: mol_type = other RNA
acgaggtgttctatctgattactctgcacctctcaccagcgactatgtcgtagtgggtaaagctccctcttcggagggagcctcagag

SEQ ID NO: 19338 - RNA, 88 nt, synthetic construct
  misc_feature 1..88: note = engineered ribonucleic acid scaffold (ERS) sequence
  source 1..88: mol_type = other RNA
acgaggtgttctatctgattactctgcacctctcaccagcgactatgtcgtagtgggtaaagctccctcttcggagggagcgtcagag

SEQ ID NO: 19339 - RNA, 88 nt, synthetic construct
  misc_feature 1..88: note = engineered ribonucleic acid scaffold (ERS) sequence
  source 1..88: mol_type = other RNA
acgaggtgttctatctgattactctgcacctctcaccagcgactatgtcgtagtgggtaaagctccctcttcggagggagcatcaaag

SEQ ID NO: 19340 - RNA, 88 nt, synthetic construct
  misc_feature 1..88: note = engineered ribonucleic acid scaffold (ERS) sequence
  source 1..88: mol_type = other RNA
acgggactttctatctgattactctcagtccctcaccagcgactatgtcgtagtgggtaaagctccctcttcggagggagcatcagac

SEQ ID NO: 19341 - RNA, 88 nt, synthetic construct
  misc_feature 1..88: note = engineered ribonucleic acid scaffold (ERS) sequence
  source 1..88: mol_type = other RNA
acgggactttctatctgattactttgagtccctcaccagcgactatgtcgtagtgggtaaagctccctcttcggagggagcatcagag

SEQ ID NO: 19342 - RNA, 88 nt, synthetic construct
  misc_feature 1..88: note = engineered ribonucleic acid scaffold (ERS) sequence
  source 1..88: mol_type = other RNA
acgggactttctatctgattactttgagtccctcaccagcgactatgtcgtagtgggtaaagctccctcttcggagggagcatcaaag

SEQ ID NO: 19343 - RNA, 88 nt, synthetic construct
  misc_feature 1..88: note = engineered ribonucleic acid scaffold (ERS) sequence
  source 1..88: mol_type = other RNA
acgggactttctatctgattagtctcagtccctcaccagcgactatgtcgtagtgggtaaagctccctcttcggagggagcatgagac

SEQ ID NO: 19344 - RNA, 88 nt, synthetic construct
  misc_feature 1..88: note = engineered ribonucleic acid scaffold (ERS) sequence
  source 1..88: mol_type = other RNA
acgggactttctatctgattagtctgagtccctcaccagcgactatgtcgtagtgggtaaagctccctcttcggagggagcatcagac

SEQ ID NO: 19345 - RNA, 88 nt, synthetic construct
  misc_feature 1..88: note = engineered ribonucleic acid scaffold (ERS) sequence
  source 1..88: mol_type = other RNA
acgggactttctatctgattactctcagtccctcaccagcgactatgtcgtagtgggtaaagctccctcttcggagggagcatgagag

SEQ ID NO: 19346 - RNA, 88 nt, synthetic construct
  misc_feature 1..88: note = engineered ribonucleic acid scaffold (ERS) sequence
  source 1..88: mol_type = other RNA
acgggacttcccatctgattaccccgagtccctcaccagcgactatgtcgtagtgggtaaagctccctcttcggagggagcatcgggg

SEQ ID NO: 19347 - RNA, 88 nt, synthetic construct
  misc_feature 1..88: note = engineered ribonucleic acid scaffold (ERS) sequence
  source 1..88: mol_type = other RNA
acgggacttcctatctgattactccgagtccctcaccagcgactatgtcgtagtgggtaaagctccctcttcggagggagcatcggag

SEQ ID NO: 19348 - RNA, 88 nt, synthetic construct
  misc_feature 1..88: note = engineered ribonucleic acid scaffold (ERS) sequence
  source 1..88: mol_type = other RNA
acgggacttgggatctgattaccccgagtccctcaccagcgactatgtcgtagtgggtaaagctccctcttcggagggagcatcgggg

SEQ ID NO: 19349 - RNA, 88 nt, synthetic construct
  misc_feature 1..88: note = engineered ribonucleic acid scaffold (ERS) sequence
  source 1..88: mol_type = other RNA
acgggacttggtatctgattactccgagtccctcaccagcgactatgtcgtagtgggtaaagctccctcttcggagggagcatcggag

SEQ ID NO: 19350 - RNA, 88 nt, synthetic construct
  misc_feature 1..88: note = engineered ribonucleic acid scaffold (ERS) sequence
  source 1..88: mol_type = other RNA
acgggactttccatctgattaccctgagtccctcaccagcgactatgtcgtagtgggtaaagctccctcttcggagggagcatcaggg

SEQ ID NO: 19351 - RNA, 88 nt, synthetic construct
  misc_feature 1..88: note = engineered ribonucleic acid scaffold (ERS) sequence
  source 1..88: mol_type = other RNA
acgggactttggatctgattaccctgagtccctcaccagcgactatgtcgtagtgggtaaagctccctcttcggagggagcatcaggg

SEQ ID NO: 19352 - RNA, 88 nt, synthetic construct
  misc_feature 1..88: note = engineered ribonucleic acid scaffold (ERS) sequence
  source 1..88: mol_type = other RNA
acgggactttgtatctgattactctgagtccctcaccagcgactatgtcgtagtgggtaaagctccctcttcggagggagcatcagag

SEQ ID NO: 19353 - RNA, 88 nt, synthetic construct
  misc_feature 1..88: note = engineered ribonucleic acid scaffold (ERS) sequence
  source 1..88: mol_type = other RNA
acgggactttttatctgattactttgagtccctcaccagcgactatgtcgtagtgggtaaagctccctcttcggagggagcatcagag

SEQ ID NO: 19354 - RNA, 88 nt, synthetic construct
  misc_feature 1..88: note = engineered ribonucleic acid scaffold (ERS) sequence
  source 1..88: mol_type = other RNA
acgggactttttatctgattactctgagtccctcaccagcgactatgtcgtagtgggtaaagctccctcttcggagggagcatcagag

SEQ ID NO: 19355 - RNA, 88 nt, synthetic construct
  misc_feature 1..88: note = engineered ribonucleic acid scaffold (ERS) sequence
  source 1..88: mol_type = other RNA
acgggactttttatctgattactctgagtccctcaccagcgactatgtcgtagtgggtaaagctccctcttcggagggagcatcaaag

SEQ ID NO: 19356 - RNA, 88 nt, synthetic construct
  misc_feature 1..88: note = engineered ribonucleic acid scaffold (ERS) sequence
  source 1..88: mol_type = other RNA
acgggactttctatctgattactctgagtccctcaccagcgactatgtcgtagtgggtaaagctccctcttcggagggagcctcagag

SEQ ID NO: 19357 - RNA, 88 nt, synthetic construct
  misc_feature 1..88: note = engineered ribonucleic acid scaffold (ERS) sequence
  source 1..88: mol_type = other RNA
acgggactttctatctgattactctgagtccctcaccagcgactatgtcgtagtgggtaaagctccctcttcggagggagcgtcagag

SEQ ID NO: 19358 - RNA, 88 nt, synthetic construct
  misc_feature 1..88: note = engineered ribonucleic acid scaffold (ERS) sequence
  source 1..88: mol_type = other RNA
acgggactttctatctgattactctgagtccctcaccagcgactatgtcgtagtgggtaaagctccctcttcggagggagcatcaaag

SEQ ID NO: 19359 - RNA, 88 nt, synthetic construct
  misc_feature 1..88: note = engineered ribonucleic acid scaffold (ERS) sequence
  source 1..88: mol_type = other RNA
acgggcaattctatctgattactctcttgccctcaccagcgactatgtcgtagtgggtaaagctccctcttcggagggagcatcagac

SEQ ID NO: 19360 - RNA, 88 nt, synthetic construct
  misc_feature 1..88: note = engineered ribonucleic acid scaffold (ERS) sequence
  source 1..88: mol_type = other RNA
acgggcaattctatctgattactttgttgccctcaccagcgactatgtcgtagtgggtaaagctccctcttcggagggagcatcagag

SEQ ID NO: 19361 - RNA, 88 nt, synthetic construct
  misc_feature 1..88: note = engineered ribonucleic acid scaffold (ERS) sequence
  source 1..88: mol_type = other RNA
acgggcaattctatctgattactttgttgccctcaccagcgactatgtcgtagtgggtaaagctccctcttcggagggagcatcaaag

SEQ ID NO: 19362 - RNA, 88 nt, synthetic construct
  misc_feature 1..88: note = engineered ribonucleic acid scaffold (ERS) sequence
  source 1..88: mol_type = other RNA
acgggcaattctatctgattagtctcttgccctcaccagcgactatgtcgtagtgggtaaagctccctcttcggagggagcatgagac

SEQ ID NO: 19363 - RNA, 88 nt, synthetic construct
  misc_feature 1..88: note = engineered ribonucleic acid scaffold (ERS) sequence
  source 1..88: mol_type = other RNA
acgggcaattctatctgattagtctgttgccctcaccagcgactatgtcgtagtgggtaaagctccctcttcggagggagcatcagac

SEQ ID NO: 19364 - RNA, 88 nt, synthetic construct
  misc_feature 1..88: note = engineered ribonucleic acid scaffold (ERS) sequence
  source 1..88: mol_type = other RNA
acgggcaattctatctgattactctcttgccctcaccagcgactatgtcgtagtgggtaaagctccctcttcggagggagcatgagag

SEQ ID NO: 19365 - RNA, 88 nt, synthetic construct
  misc_feature 1..88: note = engineered ribonucleic acid scaffold (ERS) sequence
  source 1..88: mol_type = other RNA
acgggcaatcccatctgattaccccgttgccctcaccagcgactatgtcgtagtgggtaaagctccctcttcggagggagcatcgggg

SEQ ID NO: 19366 - RNA, 88 nt, synthetic construct
  misc_feature 1..88: note = engineered ribonucleic acid scaffold (ERS) sequence
  source 1..88: mol_type = other RNA
acgggcaatcctatctgattactccgttgccctcaccagcgactatgtcgtagtgggtaaagctccctcttcggagggagcatcggag

SEQ ID NO: 19367 - RNA, 88 nt, synthetic construct
  misc_feature 1..88: note = engineered ribonucleic acid scaffold (ERS) sequence
  source 1..88: mol_type = other RNA
acgggcaatgggatctgattaccccgttgccctcaccagcgactatgtcgtagtgggtaaagctccctcttcggagggagcatcgggg

SEQ ID NO: 19368 - RNA, 88 nt, synthetic construct
  misc_feature 1..88: note = engineered ribonucleic acid scaffold (ERS) sequence
  source 1..88: mol_type = other RNA
acgggcaatggtatctgattactccgttgccctcaccagcgactatgtcgtagtgggtaaagctccctcttcggagggagcatcggag

SEQ ID NO: 19369 - RNA, 88 nt, synthetic construct
  misc_feature 1..88: note = engineered ribonucleic acid scaffold (ERS) sequence
  source 1..88: mol_type = other RNA
acgggcaattccatctgattaccctgttgccctcaccagcgactatgtcgtagtgggtaaagctccctcttcggagggagcatcaggg

SEQ ID NO: 19370 - RNA, 88 nt, synthetic construct
  misc_feature 1..88: note = engineered ribonucleic acid scaffold (ERS) sequence
  source 1..88: mol_type = other RNA
acgggcaattggatctgattaccctgttgccctcaccagcgactatgtcgtagtgggtaaagctccctcttcggagggagcatcaggg

SEQ ID NO: 19371 - RNA, 88 nt, synthetic construct
  misc_feature 1..88: note = engineered ribonucleic acid scaffold (ERS) sequence
  source 1..88: mol_type = other RNA
acgggcaattgtatctgattactctgttgccctcaccagcgactatgtcgtagtgggtaaagctccctcttcggagggagcatcagag

SEQ ID NO: 19372 - RNA, 88 nt, synthetic construct
  misc_feature 1..88: note = engineered ribonucleic acid scaffold (ERS) sequence
  source 1..88: mol_type = other RNA
acgggcaattttatctgattactttgttgccctcaccagcgactatgtcgtagtgggtaaagctccctcttcggagggagcatcagag

SEQ ID NO: 19373 - RNA, 88 nt, synthetic construct
  misc_feature 1..88: note = engineered ribonucleic acid scaffold (ERS) sequence
  source 1..88: mol_type = other RNA
acgggcaattttatctgattactctgttgccctcaccagcgactatgtcgtagtgggtaaagctccctcttcggagggagcatcagag

SEQ ID NO: 19374 - RNA, 88 nt, synthetic construct
  misc_feature 1..88: note = engineered ribonucleic acid scaffold (ERS) sequence
  source 1..88: mol_type = other RNA
acgggcaattttatctgattactctgttgccctcaccagcgactatgtcgtagtgggtaaagctccctcttcggagggagcatcaaag

SEQ ID NO: 19375 - RNA, 88 nt, synthetic construct
  misc_feature 1..88: note = engineered ribonucleic acid scaffold (ERS) sequence
  source 1..88: mol_type = other RNA
acgggcaattctatctgattactctgttgccctcaccagcgactatgtcgtagtgggtaaagctccctcttcggagggagcctcagag

SEQ ID NO: 19376 - RNA, 88 nt, synthetic construct
  misc_feature 1..88: note = engineered ribonucleic acid scaffold (ERS) sequence
  source 1..88: mol_type = other RNA
acgggcaattctatctgattactctgttgccctcaccagcgactatgtcgtagtgggtaaagctccctcttcggagggagcgtcagag

SEQ ID NO: 19377 - RNA, 88 nt, synthetic construct
  misc_feature 1..88: note = engineered ribonucleic acid scaffold (ERS) sequence
  source 1..88: mol_type = other RNA
acgggcaattctatctgattactctgttgccctcaccagcgactatgtcgtagtgggtaaagctccctcttcggagggagcatcaaag

SEQ ID NO: 19378 - RNA, 88 nt, synthetic construct
  misc_feature 1..88: note = engineered ribonucleic acid scaffold (ERS) sequence
  source 1..88: mol_type = other RNA
actgtgcgttctatctgattactctccgcacatcaccagcgactatgtcgtagtgggtaaagctccctcttcggagggagcatcagac

SEQ ID NO: 19379 - RNA, 88 nt, synthetic construct
  misc_feature 1..88: note = engineered ribonucleic acid scaffold (ERS) sequence
  source 1..88: mol_type = other RNA
actgtgcgttctatctgattactttgcgcacatcaccagcgactatgtcgtagtgggtaaagctccctcttcggagggagcatcagag

SEQ ID NO: 19380 - RNA, 88 nt, synthetic construct
  misc_feature 1..88: note = engineered ribonucleic acid scaffold (ERS) sequence
  source 1..88: mol_type = other RNA
actgtgcgttctatctgattactttgcgcacatcaccagcgactatgtcgtagtgggtaaagctccctcttcggagggagcatcaaag

SEQ ID NO: 19381 - RNA, 88 nt, synthetic construct
  misc_feature 1..88: note = engineered ribonucleic acid scaffold (ERS) sequence
  source 1..88: mol_type = other RNA
actgtgcgttctatctgattagtctccgcacatcaccagcgactatgtcgtagtgggtaaagctccctcttcggagggagcatgagac

SEQ ID NO: 19382 - RNA, 88 nt, synthetic construct
  misc_feature 1..88: note = engineered ribonucleic acid scaffold (ERS) sequence
  source 1..88: mol_type = other RNA
actgtgcgttctatctgattagtctgcgcacatcaccagcgactatgtcgtagtgggtaaagctccctcttcggagggagcatcagac

SEQ ID NO: 19383 - RNA, 88 nt, synthetic construct
  misc_feature 1..88: note = engineered ribonucleic acid scaffold (ERS) sequence
  source 1..88: mol_type = other RNA
actgtgcgttctatctgattactctccgcacatcaccagcgactatgtcgtagtgggtaaagctccctcttcggagggagcatgagag

SEQ ID NO: 19384 - RNA, 88 nt, synthetic construct
  misc_feature 1..88: note = engineered ribonucleic acid scaffold (ERS) sequence
  source 1..88: mol_type = other RNA
actgtgcgtcccatctgattaccccgcgcacatcaccagcgactatgtcgtagtgggtaaagctccctcttcggagggagcatcgggg

SEQ ID NO: 19385 - RNA, 88 nt, synthetic construct
  misc_feature 1..88: note = engineered ribonucleic acid scaffold (ERS) sequence
  source 1..88: mol_type = other RNA
actgtgcgtcctatctgattactccgcgcacatcaccagcgactatgtcgtagtgggtaaagctccctcttcggagggagcatcggag

SEQ ID NO: 19386 - RNA, 88 nt, synthetic construct
  misc_feature 1..88: note = engineered ribonucleic acid scaffold (ERS) sequence
  source 1..88: mol_type = other RNA
actgtgcgtgggatctgattaccccgcgcacatcaccagcgactatgtcgtagtgggtaaagctccctcttcggagggagcatcgggg

SEQ ID NO: 19387 - RNA, 88 nt, synthetic construct
  misc_feature 1..88: note = engineered ribonucleic acid scaffold (ERS) sequence
  source 1..88: mol_type = other RNA
actgtgcgtggtatctgattactccgcgcacatcaccagcgactatgtcgtagtgggtaaagctccctcttcggagggagcatcggag

SEQ ID NO: 19388 - RNA, 88 nt, synthetic construct
  misc_feature 1..88: note = engineered ribonucleic acid scaffold (ERS) sequence
  source 1..88: mol_type = other RNA
actgtgcgttccatctgattaccctgcgcacatcaccagcgactatgtcgtagtgggtaaagctccctcttcggagggagcatcaggg

SEQ ID NO: 19389 - RNA, 88 nt, synthetic construct
  misc_feature 1..88: note = engineered ribonucleic acid scaffold (ERS) sequence
  source 1..88: mol_type = other RNA
actgtgcgttggatctgattaccctgcgcacatcaccagcgactatgtcgtagtgggtaaagctccctcttcggagggagcatcaggg

SEQ ID NO: 19390 - RNA, 88 nt, synthetic construct
  misc_feature 1..88: note = engineered ribonucleic acid scaffold (ERS) sequence
  source 1..88: mol_type = other RNA
actgtgcgttgtatctgattactctgcgcacatcaccagcgactatgtcgtagtgggtaaagctccctcttcggagggagcatcagag

SEQ ID NO: 19391 - RNA, 88 nt, synthetic construct
  misc_feature 1..88: note = engineered ribonucleic acid scaffold (ERS) sequence
  source 1..88: mol_type = other RNA
actgtgcgttttatctgattactttgcgcacatcaccagcgactatgtcgtagtgggtaaagctccctcttcggagggagcatcagag

SEQ ID NO: 19392 - RNA, 88 nt, synthetic construct
  misc_feature 1..88: note = engineered ribonucleic acid scaffold (ERS) sequence
  source 1..88: mol_type = other RNA
actgtgcgttttatctgattactctgcgcacatcaccagcgactatgtcgtagtgggtaaagctccctcttcggagggagcatcagag

SEQ ID NO: 19393 - RNA, 88 nt, synthetic construct
  misc_feature 1..88: note = engineered ribonucleic acid scaffold (ERS) sequence
  source 1..88: mol_type = other RNA
actgtgcgttttatctgattactctgcgcacatcaccagcgactatgtcgtagtgggtaaagctccctcttcggagggagcatcaaag

SEQ ID NO: 19394 - RNA, 88 nt, synthetic construct
  misc_feature 1..88: note = engineered ribonucleic acid scaffold (ERS) sequence
  source 1..88: mol_type = other RNA
actgtgcgttctatctgattactctgcgcacatcaccagcgactatgtcgtagtgggtaaagctccctcttcggagggagcctcagag

SEQ ID NO: 19395 - RNA, 88 nt, synthetic construct
  misc_feature 1..88: note = engineered ribonucleic acid scaffold (ERS) sequence
  source 1..88: mol_type = other RNA
actgtgcgttctatctgattactctgcgcacatcaccagcgactatgtcgtagtgggtaaagctccctcttcggagggagcgtcagag

SEQ ID NO: 19396 - RNA, 88 nt, synthetic construct
  misc_feature 1..88: note = engineered ribonucleic acid scaffold (ERS) sequence
  source 1..88: mol_type = other RNA
actgtgcgttctatctgattactctgcgcacatcaccagcgactatgtcgtagtgggtaaagctccctcttcggagggagcatcaaag

SEQ ID NO: 19397 - RNA, 89 nt, synthetic construct
  misc_feature 1..89: note = engineered ribonucleic acid scaffold (ERS) sequence
  source 1..89: mol_type = other RNA
actggcgcttctatctgattactctcggcgccatcaccagcgactatgtcgtagtgggtaaagctccctcttcggagggagcatcagac

SEQ ID NO: 19398 - RNA, 89 nt, synthetic construct
  misc_feature 1..89: note = engineered ribonucleic acid scaffold (ERS) sequence
  source 1..89: mol_type = other RNA
actggcgcttctatctgattactttgggcgccatcaccagcgactatgtcgtagtgggtaaagctccctcttcggagggagcatcagag

SEQ ID NO: 19399 - RNA, 89 nt, synthetic construct
  misc_feature 1..89: note = engineered ribonucleic acid scaffold (ERS) sequence
  source 1..89: mol_type = other RNA
actggcgcttctatctgattactttgggcgccatcaccagcgactatgtcgtagtgggtaaagctccctcttcggagggagcatcaaag

SEQ ID NO: 19400 - RNA, 89 nt, synthetic construct
  misc_feature 1..89: note = engineered ribonucleic acid scaffold (ERS) sequence
  source 1..89: mol_type = other RNA
actggcgcttctatctgattagtctcggcgccatcaccagcgactatgtcgtagtgggtaaagctccctcttcggagggagcatgagac

SEQ ID NO: 19401 - RNA, 89 nt, synthetic construct
  misc_feature 1..89: note = engineered ribonucleic acid scaffold (ERS) sequence
  source 1..89: mol_type = other RNA
actggcgcttctatctgattagtctgggcgccatcaccagcgactatgtcgtagtgggtaaagctccctcttcggagggagcatcagac

SEQ ID NO: 19402 - RNA, 89 nt, synthetic construct
  misc_feature 1..89: note = engineered ribonucleic acid scaffold (ERS) sequence
  source 1..89: mol_type = other RNA
actggcgcttctatctgattactctcggcgccatcaccagcgactatgtcgtagtgggtaaagctccctcttcggagggagcatgagag

SEQ ID NO: 19403 - RNA, 89 nt, synthetic construct
  misc_feature 1..89: note = engineered ribonucleic acid scaffold (ERS) sequence
  source 1..89: mol_type = other RNA
actggcgctcccatctgattaccccgggcgccatcaccagcgactatgtcgtagtgggtaaagctccctcttcggagggagcatcgggg

SEQ ID NO: 19404 - RNA, 89 nt, synthetic construct
  misc_feature 1..89: note = engineered ribonucleic acid scaffold (ERS) sequence
  source 1..89: mol_type = other RNA
actggcgctcctatctgattactccgggcgccatcaccagcgactatgtcgtagtgggtaaagctccctcttcggagggagcatcggag

SEQ ID NO: 19405 - RNA, 89 nt, synthetic construct
  misc_feature 1..89: note = engineered ribonucleic acid scaffold (ERS) sequence
  source 1..89: mol_type = other RNA
actggcgctgggatctgattaccccgggcgccatcaccagcgactatgtcgtagtgggtaaagctccctcttcggagggagcatcgggg

SEQ ID NO: 19406 - RNA, 89 nt, synthetic construct
  misc_feature 1..89: note = engineered ribonucleic acid scaffold (ERS) sequence
  source 1..89: mol_type = other RNA
actggcgctggtatctgattactccgggcgccatcaccagcgactatgtcgtagtgggtaaagctccctcttcggagggagcatcggag

SEQ ID NO: 19407 - RNA, 89 nt, synthetic construct
  misc_feature 1..89: note = engineered ribonucleic acid scaffold (ERS) sequence
  source 1..89: mol_type = other RNA
actggcgcttccatctgattaccctgggcgccatcaccagcgactatgtcgtagtgggtaaagctccctcttcggagggagcatcaggg

SEQ ID NO: 19408 - RNA, 89 nt, synthetic construct
  misc_feature 1..89: note = engineered ribonucleic acid scaffold (ERS) sequence
  source 1..89: mol_type = other RNA
actggcgcttggatctgattaccctgggcgccatcaccagcgactatgtcgtagtgggtaaagctccctcttcggagggagcatcaggg

SEQ ID NO: 19409 - RNA, 89 nt, synthetic construct
  misc_feature 1..89: note = engineered ribonucleic acid scaffold (ERS) sequence
  source 1..89: mol_type = other RNA
actggcgcttgtatctgattactctgggcgccatcaccagcgactatgtcgtagtgggtaaagctccctcttcggagggagcatcagag

SEQ ID NO: 19410 - RNA, 89 nt, synthetic construct
  misc_feature 1..89: note = engineered ribonucleic acid scaffold (ERS) sequence
  source 1..89: mol_type = other RNA
actggcgcttttatctgattactttgggcgccatcaccagcgactatgtcgtagtgggtaaagctccctcttcggagggagcatcagag

SEQ ID NO: 19411 - RNA, 89 nt, synthetic construct
  misc_feature 1..89: note = engineered ribonucleic acid scaffold (ERS) sequence
  source 1..89: mol_type = other RNA
actggcgcttttatctgattactctgggcgccatcaccagcgactatgtcgtagtgggtaaagctccctcttcggagggagcatcagag

SEQ ID NO: 19412 - RNA, 89 nt, synthetic construct
  misc_feature 1..89: note = engineered ribonucleic acid scaffold (ERS) sequence
  source 1..89: mol_type = other RNA
actggcgcttttatctgattactctgggcgccatcaccagcgactatgtcgtagtgggtaaagctccctcttcggagggagcatcaaag

SEQ ID NO: 19413 - RNA, 89 nt, synthetic construct
  misc_feature 1..89: note = engineered ribonucleic acid scaffold (ERS) sequence
  source 1..89: mol_type = other RNA
actggcgcttctatctgattactctgggcgccatcaccagcgactatgtcgtagtgggtaaagctccctcttcggagggagcctcagag

SEQ ID NO: 19414 - RNA, 89 nt, synthetic construct
  misc_feature 1..89: note = engineered ribonucleic acid scaffold (ERS) sequence
  source 1..89: mol_type = other RNA
actggcgcttctatctgattactctgggcgccatcaccagcgactatgtcgtagtgggtaaagctccctcttcggagggagcgtcagag

SEQ ID NO: 19415 - RNA, 89 nt, synthetic construct
  misc_feature 1..89: note = engineered ribonucleic acid scaffold (ERS) sequence
  source 1..89: mol_type = other RNA
actggcgcttctatctgattactctgggcgccatcaccagcgactatgtcgtagtgggtaaagctccctcttcggagggagcatcaaag

SEQ ID NO: 19416 - RNA, 89 nt, synthetic construct
  misc_feature 1..89: note = engineered ribonucleic acid scaffold (ERS) sequence
  source 1..89: mol_type = other RNA
actggcgcttctatctgattactctcggagccatcaccagcgactatgtcgtagtgggtaaagctccctcttcggagggagcatcagac

SEQ ID NO: 19417 - RNA, 89 nt, synthetic construct
  misc_feature 1..89: note = engineered ribonucleic acid scaffold (ERS) sequence
  source 1..89: mol_type = other RNA
actggcgcttctatctgattactttgggagccatcaccagcgactatgtcgtagtgggtaaagctccctcttcggagggagcatcagag

SEQ ID NO: 19418 - RNA, 89 nt, synthetic construct
  misc_feature 1..89: note = engineered ribonucleic acid scaffold (ERS) sequence
  source 1..89: mol_type = other RNA
actggcgcttctatctgattactttgggagccatcaccagcgactatgtcgtagtgggtaaagctccctcttcggagggagcatcaaag

SEQ ID NO: 19419 - RNA, 89 nt, synthetic construct
  misc_feature 1..89: note = engineered ribonucleic acid scaffold (ERS) sequence
  source 1..89: mol_type = other RNA
actggcgcttctatctgattagtctcggagccatcaccagcgactatgtcgtagtgggtaaagctccctcttcggagggagcatgagac

SEQ ID NO: 19420 - RNA, 89 nt, synthetic construct
  misc_feature 1..89: note = engineered ribonucleic acid scaffold (ERS) sequence
  source 1..89: mol_type = other RNA
actggcgcttctatctgattagtctgggagccatcaccagcgactatgtcgtagtgggtaaagctccctcttcggagggagcatcagac

SEQ ID NO: 19421 - RNA, 89 nt, synthetic construct
  misc_feature 1..89: note = engineered ribonucleic acid scaffold (ERS) sequence
  source 1..89: mol_type = other RNA
actggcgcttctatctgattactctcggagccatcaccagcgactatgtcgtagtgggtaaagctccctcttcggagggagcatgagag

SEQ ID NO: 19422 - RNA, 89 nt, synthetic construct
  misc_feature 1..89: note = engineered ribonucleic acid scaffold (ERS) sequence
  source 1..89: mol_type = other RNA
actggcgctcccatctgattaccccgggagccatcaccagcgactatgtcgtagtgggtaaagctccctcttcggagggagcatcgggg

SEQ ID NO: 19423 - RNA, 89 nt, synthetic construct
  misc_feature 1..89: note = engineered ribonucleic acid scaffold (ERS) sequence
  source 1..89: mol_type = other RNA
actggcgctcctatctgattactccgggagccatcaccagcgactatgtcgtagtgggtaaagctccctcttcggagggagcatcggag

SEQ ID NO: 19424 - RNA, 89 nt, synthetic construct
  misc_feature 1..89: note = engineered ribonucleic acid scaffold (ERS) sequence
  source 1..89: mol_type = other RNA
actggcgctgggatctgattaccccgggagccatcaccagcgactatgtcgtagtgggtaaagctccctcttcggagggagcatcgggg

SEQ ID NO: 19425 - RNA, 89 nt, synthetic construct
  misc_feature 1..89: note = engineered ribonucleic acid scaffold (ERS) sequence
  source 1..89: mol_type = other RNA
actggcgctggtatctgattactccgggagccatcaccagcgactatgtcgtagtgggtaaagctccctcttcggagggagcatcggag

SEQ ID NO: 19426 - RNA, 89 nt, synthetic construct
  misc_feature 1..89: note = engineered ribonucleic acid scaffold (ERS) sequence
  source 1..89: mol_type = other RNA
actggcgcttccatctgattaccctgggagccatcaccagcgactatgtcgtagtgggtaaagctccctcttcggagggagcatcaggg

SEQ ID NO: 19427 - RNA, 89 nt, synthetic construct
  misc_feature 1..89: note = engineered ribonucleic acid scaffold (ERS) sequence
  source 1..89: mol_type = other RNA
actggcgcttggatctgattaccctgggagccatcaccagcgactatgtcgtagtgggtaaagctccctcttcggagggagcatcaggg

SEQ ID NO: 19428 - RNA, 89 nt, synthetic construct
  misc_feature 1..89: note = engineered ribonucleic acid scaffold (ERS) sequence
  source 1..89: mol_type = other RNA
actggcgcttgtatctgattactctgggagccatcaccagcgactatgtcgtagtgggtaaagctccctcttcggagggagcatcagag

SEQ ID NO: 19429 - RNA, 89 nt, synthetic construct
  misc_feature 1..89: note = engineered ribonucleic acid scaffold (ERS) sequence
  source 1..89: mol_type = other RNA
actggcgcttttatctgattactttgggagccatcaccagcgactatgtcgtagtgggtaaagctccctcttcggagggagcatcagag

SEQ ID NO: 19430 - RNA, 89 nt, synthetic construct
  misc_feature 1..89: note = engineered ribonucleic acid scaffold (ERS) sequence
  source 1..89: mol_type = other RNA
actggcgcttttatctgattactctgggagccatcaccagcgactatgtcgtagtgggtaaagctccctcttcggagggagcatcagag

SEQ ID NO: 19431 - RNA, 89 nt, synthetic construct
  misc_feature 1..89: note = engineered ribonucleic acid scaffold (ERS) sequence
  source 1..89: mol_type = other RNA
actggcgcttttatctgattactctgggagccatcaccagcgactatgtcgtagtgggtaaagctccctcttcggagggagcatcaaag

SEQ ID NO: 19432 - RNA, 89 nt, synthetic construct
  misc_feature 1..89: note = engineered ribonucleic acid scaffold (ERS) sequence
  source 1..89: mol_type = other RNA
actggcgcttctatctgattactctgggagccatcaccagcgactatgtcgtagtgggtaaagctccctcttcggagggagcctcagag

SEQ ID NO: 19433 - RNA, 89 nt, synthetic construct
  misc_feature 1..89: note = engineered ribonucleic acid scaffold (ERS) sequence
  source 1..89: mol_type = other RNA
actggcgcttctatctgattactctgggagccatcaccagcgactatgtcgtagtgggtaaagctccctcttcggagggagcgtcagag

SEQ ID NO: 19434 - RNA, 89 nt, synthetic construct
  misc_feature 1..89: note = engineered ribonucleic acid scaffold (ERS) sequence
  source 1..89: mol_type = other RNA
actggcgcttctatctgattactctgggagccatcaccagcgactatgtcgtagtgggtaaagctccctcttcggagggagcatcaaag

SEQ ID NO: 19435 - RNA, 89 nt, synthetic construct
  misc_feature 1..89: note = engineered ribonucleic acid scaffold (ERS) sequence
  source 1..89: mol_type = other RNA
actggcgcttctatctgattactctctgagccatcaccagcgactatgtcgtagtgggtaaagctccctcttcggagggagcatcagac

SEQ ID NO: 19436 - RNA, 89 nt, synthetic construct
  misc_feature 1..89: note = engineered ribonucleic acid scaffold (ERS) sequence
  source 1..89: mol_type = other RNA
actggcgcttctatctgattactttgtgagccatcaccagcgactatgtcgtagtgggtaaagctccctcttcggagggagcatcagag

SEQ ID NO: 19437 - RNA, 89 nt, synthetic construct
  misc_feature 1..89: note = engineered ribonucleic acid scaffold (ERS) sequence
  source 1..89: mol_type = other RNA
actggcgcttctatctgattactttgtgagccatcaccagcgactatgtcgtagtgggtaaagctccctcttcggagggagcatcaaag

SEQ ID NO: 19438 - RNA, 89 nt, synthetic construct
  misc_feature 1..89: note = engineered ribonucleic acid scaffold (ERS) sequence
  source 1..89: mol_type = other RNA
actggcgcttctatctgattagtctctgagccatcaccagcgactatgtcgtagtgggtaaagctccctcttcggagggagcatgagac

SEQ ID NO: 19439 - RNA, 89 nt, synthetic construct
  misc_feature 1..89: note = engineered ribonucleic acid scaffold (ERS) sequence
  source 1..89: mol_type = other RNA
actggcgcttctatctgattagtctgtgagccatcaccagcgactatgtcgtagtgggtaaagctccctcttcggagggagcatcagac

SEQ ID NO: 19440 - RNA, 89 nt, synthetic construct
  misc_feature 1..89: note = engineered ribonucleic acid scaffold (ERS) sequence
  source 1..89: mol_type = other RNA
actggcgcttctatctgattactctctgagccatcaccagcgactatgtcgtagtgggtaaagctccctcttcggagggagcatgagag

SEQ ID NO: 19441 - RNA, 89 nt, synthetic construct
  misc_feature 1..89: note = engineered ribonucleic acid scaffold (ERS) sequence
  source 1..89: mol_type = other RNA
actggcgctcccatctgattaccccgtgagccatcaccagcgactatgtcgtagtgggtaaagctccctcttcggagggagcatcgggg

SEQ ID NO: 19442 - RNA, 89 nt, synthetic construct
  misc_feature 1..89: note = engineered ribonucleic acid scaffold (ERS) sequence
  source 1..89: mol_type = other RNA
actggcgctcctatctgattactccgtgagccatcaccagcgactatgtcgtagtgggtaaagctccctcttcggagggagcatcggag

SEQ ID NO: 19443 - RNA, 89 nt, synthetic construct
  misc_feature 1..89: note = engineered ribonucleic acid scaffold (ERS) sequence
  source 1..89: mol_type = other RNA
actggcgctgggatctgattaccccgtgagccatcaccagcgactatgtcgtagtgggtaaagctccctcttcggagggagcatcgggg

SEQ ID NO: 19444 - RNA, 89 nt, synthetic construct
  misc_feature 1..89: note = engineered ribonucleic acid scaffold (ERS) sequence
  source 1..89: mol_type = other RNA
actggcgctggtatctgattactccgtgagccatcaccagcgactatgtcgtagtgggtaaagctccctcttcggagggagcatcggag

SEQ ID NO: 19445 - RNA, 89 nt, synthetic construct
  misc_feature 1..89: note = engineered ribonucleic acid scaffold (ERS) sequence
  source 1..89: mol_type = other RNA
actggcgcttccatctgattaccctgtgagccatcaccagcgactatgtcgtagtgggtaaagctccctcttcggagggagcatcaggg

SEQ ID NO: 19446 - RNA, 89 nt, synthetic construct
  misc_feature 1..89: note = engineered ribonucleic acid scaffold (ERS) sequence
  source 1..89: mol_type = other RNA
actggcgcttggatctgattaccctgtgagccatcaccagcgactatgtcgtagtgggtaaagctccctcttcggagggagcatcaggg

SEQ ID NO: 19447 - RNA, 89 nt, synthetic construct
  misc_feature 1..89: note = engineered ribonucleic acid scaffold (ERS) sequence
  source 1..89: mol_type = other RNA
actggcgcttgtatctgattactctgtgagccatcaccagcgactatgtcgtagtgggtaaagctccctcttcggagggagcatcagag

SEQ ID NO: 19448 - RNA, 89 nt, synthetic construct
  misc_feature 1..89: note = engineered ribonucleic acid scaffold (ERS) sequence
  source 1..89: mol_type = other RNA
actggcgcttttatctgattactttgtgagccatcaccagcgactatgtcgtagtgggtaaagctccctcttcggagggagcatcagag

SEQ ID NO: 19449 - RNA, 89 nt, synthetic construct
  misc_feature 1..89: note = engineered ribonucleic acid scaffold (ERS) sequence
  source 1..89: mol_type = other RNA
actggcgcttttatctgattactctgtgagccatcaccagcgactatgtcgtagtgggtaaagctccctcttcggagggagcatcagag

SEQ ID NO: 19450 - RNA, 89 nt, synthetic construct
  misc_feature 1..89: note = engineered ribonucleic acid scaffold (ERS) sequence
  source 1..89: mol_type = other RNA
actggcgcttttatctgattactctgtgagccatcaccagcgactatgtcgtagtgggtaaagctccctcttcggagggagcatcaaag

SEQ ID NO: 19451 - RNA, 89 nt, synthetic construct
  misc_feature 1..89: note = engineered ribonucleic acid scaffold (ERS) sequence
  source 1..89: mol_type = other RNA
actggcgcttctatctgattactctgtgagccatcaccagcgactatgtcgtagtgggtaaagctccctcttcggagggagcctcagag

SEQ ID NO: 19452 - RNA, 89 nt, synthetic construct
  misc_feature 1..89: note = engineered ribonucleic acid scaffold (ERS) sequence
  source 1..89: mol_type = other RNA
actggcgcttctatctgattactctgtgagccatcaccagcgactatgtcgtagtgggtaaagctccctcttcggagggagcgtcagag

SEQ ID NO: 19453 - RNA, 89 nt, synthetic construct
  misc_feature 1..89: note = engineered ribonucleic acid scaffold (ERS) sequence
  source 1..89: mol_type = other RNA
actggcgcttctatctgattactctgtgagccatcaccagcgactatgtcgtagtgggtaaagctccctcttcggagggagcatcaaag

SEQ ID NO: 19454 - RNA, 90 nt, synthetic construct
  misc_feature 1..90: note = engineered ribonucleic acid scaffold (ERS) sequence
  source 1..90: mol_type = other RNA
actggcgcttctatctgattactctcaggagccatcaccagcgactatgtcgtagtgggtaaagctccctcttcggagggagcatcagac

SEQ ID NO: 19455 - RNA, 90 nt, synthetic construct
  misc_feature 1..90: note = engineered ribonucleic acid scaffold (ERS) sequence
  source 1..90: mol_type = other RNA
actggcgcttctatctgattactttgaggagccatcaccagcgactatgtcgtagtgggtaaagctccctcttcggagggagcatcagag

SEQ ID NO: 19456 - RNA, 90 nt, synthetic construct
  misc_feature 1..90: note = engineered ribonucleic acid scaffold (ERS) sequence
  source 1..90: mol_type = other RNA
actggcgcttctatctgattactttgaggagccatcaccagcgactatgtcgtagtgggtaaagctccctcttcggagggagcatcaaag

SEQ ID NO: 19457 - RNA, 90 nt, synthetic construct
  misc_feature 1..90: note = engineered ribonucleic acid scaffold (ERS) sequence
  source 1..90: mol_type = other RNA
actggcgcttctatctgattagtctcaggagccatcaccagcgactatgtcgtagtgggtaaagctccctcttcggagggagcatgagac

SEQ ID NO: 19458 - RNA, 90 nt, synthetic construct
  misc_feature 1..90: note = engineered ribonucleic acid scaffold (ERS) sequence
  source 1..90: mol_type = other RNA
actggcgcttctatctgattagtctgaggagccatcaccagcgactatgtcgtagtgggtaaagctccctcttcggagggagcatcagac

SEQ ID NO: 19459 - RNA, 90 nt, synthetic construct
  misc_feature 1..90: note = engineered ribonucleic acid scaffold (ERS) sequence
  source 1..90: mol_type = other RNA
actggcgcttctatctgattactctcaggagccatcaccagcgactatgtcgtagtgggtaaagctccctcttcggagggagcatgagag

SEQ ID NO: 19460 - RNA, 90 nt, synthetic construct
  misc_feature 1..90: note = engineered ribonucleic acid scaffold (ERS) sequence
  source 1..90: mol_type = other RNA
actggcgctcccatctgattaccccgaggagccatcaccagcgactatgtcgtagtgggtaaagctccctcttcggagggagcatcgggg

SEQ ID NO: 19461 - RNA, 90 nt, synthetic construct
  misc_feature 1..90: note = engineered ribonucleic acid scaffold (ERS) sequence
  source 1..90: mol_type = other RNA
actggcgctcctatctgattactccgaggagccatcaccagcgactatgtcgtagtgggtaaagctccctcttcggagggagcatcggag

SEQ ID NO: 19462 - RNA, 90 nt, synthetic construct
  misc_feature 1..90: note = engineered ribonucleic acid scaffold (ERS) sequence
  source 1..90: mol_type = other RNA
actggcgctgggatctgattaccccgaggagccatcaccagcgactatgtcgtagtgggtaaagctccctcttcggagggagcatcgggg

SEQ ID NO: 19463 - RNA, 90 nt, synthetic construct
  misc_feature 1..90: note = engineered ribonucleic acid scaffold (ERS) sequence
  source 1..90: mol_type = other RNA
actggcgctggtatctgattactccgaggagccatcaccagcgactatgtcgtagtgggtaaagctccctcttcggagggagcatcggag

SEQ ID NO: 19464 - RNA, 90 nt, synthetic construct
  misc_feature 1..90: note = engineered ribonucleic acid scaffold (ERS) sequence
  source 1..90: mol_type = other RNA
actggcgcttccatctgattaccctgaggagccatcaccagcgactatgtcgtagtgggtaaagctccctcttcggagggagcatcaggg

SEQ ID NO: 19465 - RNA, 90 nt, synthetic construct
  misc_feature 1..90: note = engineered ribonucleic acid scaffold (ERS) sequence
  source 1..90: mol_type = other RNA
actggcgcttggatctgattaccctgaggagccatcaccagcgactatgtcgtagtgggtaaagctccctcttcggagggagcatcaggg

SEQ ID NO: 19466 - RNA, 90 nt, synthetic construct
  misc_feature 1..90: note = engineered ribonucleic acid scaffold (ERS) sequence
  source 1..90: mol_type = other RNA
actggcgcttgtatctgattactctgaggagccatcaccagcgactatgtcgtagtgggtaaagctccctcttcggagggagcatcagag

SEQ ID NO: 19467 - RNA, 90 nt, synthetic construct
  misc_feature 1..90: note = engineered ribonucleic acid scaffold (ERS) sequence
  source 1..90: mol_type = other RNA
actggcgcttttatctgattactttgaggagccatcaccagcgactatgtcgtagtgggtaaagctccctcttcggagggagcatcagag

SEQ ID NO: 19468 - RNA, 90 nt, synthetic construct
  misc_feature 1..90: note = engineered ribonucleic acid scaffold (ERS) sequence
  source 1..90: mol_type = other RNA
actggcgcttttatctgattactctgaggagccatcaccagcgactatgtcgtagtgggtaaagctccctcttcggagggagcatcagag

SEQ ID NO: 19469 - RNA, 90 nt, synthetic construct
  misc_feature 1..90: note = engineered ribonucleic acid scaffold (ERS) sequence
  source 1..90: mol_type = other RNA
actggcgcttttatctgattactctgaggagccatcaccagcgactatgtcgtagtgggtaaagctccctcttcggagggagcatcaaag

SEQ ID NO: 19470 - RNA, 90 nt, synthetic construct
  misc_feature 1..90: note = engineered ribonucleic acid scaffold (ERS) sequence
  source 1..90: mol_type = other RNA
actggcgcttctatctgattactctgaggagccatcaccagcgactatgtcgtagtgggtaaagctccctcttcggagggagcctcagag

SEQ ID NO: 19471 - RNA, 90 nt, synthetic construct
  misc_feature 1..90: note = engineered ribonucleic acid scaffold (ERS) sequence
  source 1..90: mol_type = other RNA
actggcgcttctatctgattactctgaggagccatcaccagcgactatgtcgtagtgggtaaagctccctcttcggagggagcgtcagag

SEQ ID NO: 19472 - RNA, 90 nt, synthetic construct
  misc_feature 1..90: note = engineered ribonucleic acid scaffold (ERS) sequence
  source 1..90: mol_type = other RNA
actggcgcttctatctgattactctgaggagccatcaccagcgactatgtcgtagtgggtaaagctccctcttcggagggagcatcaaag

SEQ ID NO: 19473 - RNA, 89 nt, synthetic construct
  misc_feature 1..89: note = engineered ribonucleic acid scaffold (ERS) sequence
  source 1..89: mol_type = other RNA
actggcgcttctatctgattactctcatagccatcaccagcgactatgtcgtagtgggtaaagctccctcttcggagggagcatcagac

SEQ ID NO: 19474 - RNA, 89 nt, synthetic construct
  misc_feature 1..89: note = engineered ribonucleic acid scaffold (ERS) sequence
  source 1..89: mol_type = other RNA
actggcgcttctatctgattactttgatagccatcaccagcgactatgtcgtagtgggtaaagctccctcttcggagggagcatcagag

SEQ ID NO: 19475 - RNA, 89 nt, synthetic construct
  misc_feature 1..89: note = engineered ribonucleic acid scaffold (ERS) sequence
  source 1..89: mol_type = other RNA
actggcgcttctatctgattactttgatagccatcaccagcgactatgtcgtagtgggtaaagctccctcttcggagggagcatcaaag

SEQ ID NO: 19476 - RNA, 89 nt, synthetic construct
  misc_feature 1..89: note = engineered ribonucleic acid scaffold (ERS) sequence
  source 1..89: mol_type = other RNA
actggcgcttctatctgattagtctcatagccatcaccagcgactatgtcgtagtgggtaaagctccctcttcggagggagcatgagac

SEQ ID NO: 19477 - RNA, 89 nt, synthetic construct
  misc_feature 1..89: note = engineered ribonucleic acid scaffold (ERS) sequence
  source 1..89: mol_type = other RNA
actggcgcttctatctgattagtctgatagccatcaccagcgactatgtcgtagtgggtaaagctccctcttcggagggagcatcagac

SEQ ID NO: 19478 - RNA, 89 nt, synthetic construct
  misc_feature 1..89: note = engineered ribonucleic acid scaffold (ERS) sequence
  source 1..89: mol_type = other RNA
actggcgcttctatctgattactctcatagccatcaccagcgactatgtcgtagtgggtaaagctccctcttcggagggagcatgagag

SEQ ID NO: 19479 - RNA, 89 nt, synthetic construct
  misc_feature 1..89: note = engineered ribonucleic acid scaffold (ERS) sequence
  source 1..89: mol_type = other RNA
actggcgctcccatctgattaccccgatagccatcaccagcgactatgtcgtagtgggtaaagctccctcttcggagggagcatcgggg

SEQ ID NO: 19480 - RNA, 89 nt, synthetic construct
  misc_feature 1..89: note = engineered ribonucleic acid scaffold (ERS) sequence
  source 1..89: mol_type = other RNA
actggcgctcctatctgattactccgatagccatcaccagcgactatgtcgtagtgggtaaagctccctcttcggagggagcatcggag

SEQ ID NO: 19481 - RNA, 89 nt, synthetic construct
  misc_feature 1..89: note = engineered ribonucleic acid scaffold (ERS) sequence
  source 1..89: mol_type = other RNA
actggcgctgggatctgattaccccgatagccatcaccagcgactatgtcgtagtgggtaaagctccctcttcggagggagcatcgggg

SEQ ID NO: 19482 - RNA, 89 nt, synthetic construct
  misc_feature 1..89: note = engineered ribonucleic acid scaffold (ERS) sequence
  source 1..89: mol_type = other RNA
actggcgctggtatctgattactccgatagccatcaccagcgactatgtcgtagtgggtaaagctccctcttcggagggagcatcggag

SEQ ID NO: 19483 - RNA, 89 nt, synthetic construct
  misc_feature 1..89: note = engineered ribonucleic acid scaffold (ERS) sequence
  source 1..89: mol_type = other RNA
actggcgcttccatctgattaccctgatagccatcaccagcgactatgtcgtagtgggtaaagctccctcttcggagggagcatcaggg

SEQ ID NO: 19484 - RNA, 89 nt, synthetic construct
  misc_feature 1..89: note = engineered ribonucleic acid scaffold (ERS) sequence
  source 1..89: mol_type = other RNA
actggcgcttggatctgattaccctgatagccatcaccagcgactatgtcgtagtgggtaaagctccctcttcggagggagcatcaggg

SEQ ID NO: 19485 - RNA, 89 nt, synthetic construct
  misc_feature 1..89: note = engineered ribonucleic acid scaffold (ERS) sequence
  source 1..89: mol_type = other RNA
actggcgcttgtatctgattactctgatagccatcaccagcgactatgtcgtagtgggtaaagctccctcttcggagggagcatcagag

SEQ ID NO: 19486 - RNA, 89 nt, synthetic construct
  misc_feature 1..89: note = engineered ribonucleic acid scaffold (ERS) sequence
  source 1..89: mol_type = other RNA
actggcgcttttatctgattactttgatagccatcaccagcgactatgtcgtagtgggtaaagctccctcttcggagggagcatcagag

SEQ ID NO: 19487 - RNA, 89 nt, synthetic construct
  misc_feature 1..89: note = engineered ribonucleic acid scaffold (ERS) sequence
  source 1..89: mol_type = other RNA
actggcgcttttatctgattactctgatagccatcaccagcgactatgtcgtagtgggtaaagctccctcttcggagggagcatcagag

SEQ ID NO: 19488 - RNA, 89 nt, synthetic construct
  misc_feature 1..89: note = engineered ribonucleic acid scaffold (ERS) sequence
  source 1..89: mol_type = other RNA
actggcgcttttatctgattactctgatagccatcaccagcgactatgtcgtagtgggtaaagctccctcttcggagggagcatcaaag

SEQ ID NO: 19489 - RNA, 89 nt, synthetic construct
  misc_feature 1..89: note = engineered ribonucleic acid scaffold (ERS) sequence
  source 1..89: mol_type = other RNA
actggcgcttctatctgattactctgatagccatcaccagcgactatgtcgtagtgggtaaagctccctcttcggagggagcctcagag

SEQ ID NO: 19490 - RNA, 89 nt, synthetic construct
  misc_feature 1..89: note = engineered ribonucleic acid scaffold (ERS) sequence
  source 1..89: mol_type = other RNA
actggcgcttctatctgattactctgatagccatcaccagcgactatgtcgtagtgggtaaagctccctcttcggagggagcgtcagag

SEQ ID NO: 19491 - RNA, 89 nt, synthetic construct
  misc_feature 1..89: note = engineered ribonucleic acid scaffold (ERS) sequence
  source 1..89: mol_type = other RNA
actggcgcttctatctgattactctgatagccatcaccagcgactatgtcgtagtgggtaaagctccctcttcggagggagcatcaaag

SEQ ID NO: 19492 - RNA, 90 nt, synthetic construct
  misc_feature 1..90: note = engineered ribonucleic acid scaffold (ERS) sequence
  source 1..90: mol_type = other RNA
actggcgcttctatctgattactctcagctgccatcaccagcgactatgtcgtagtgggtaaagctccctcttcggagggagcatcagac

SEQ ID NO: 19493 - RNA, 90 nt, synthetic construct
  misc_feature 1..90: note = engineered ribonucleic acid scaffold (ERS) sequence
  source 1..90: mol_type = other RNA
actggcgcttctatctgattactttgagctgccatcaccagcgactatgtcgtagtgggtaaagctccctcttcggagggagcatcagag

SEQ ID NO: 19494 - RNA, 90 nt, synthetic construct
  misc_feature 1..90: note = engineered ribonucleic acid scaffold (ERS) sequence
  source 1..90: mol_type = other RNA
actggcgcttctatctgattactttgagctgccatcaccagcgactatgtcgtagtgggtaaagctccctcttcggagggagcatcaaag

SEQ ID NO: 19495 - RNA, 90 nt, synthetic construct
  misc_feature 1..90: note = engineered ribonucleic acid scaffold (ERS) sequence
  source 1..90: mol_type = other RNA
actggcgcttctatctgattagtctcagctgccatcaccagcgactatgtcgtagtgggtaaagctccctcttcggagggagcatgagac

SEQ ID NO: 19496 - RNA, 90 nt, synthetic construct
  misc_feature 1..90: note = engineered ribonucleic acid scaffold (ERS) sequence
  source 1..90: mol_type = other RNA
actggcgcttctatctgattagtctgagctgccatcaccagcgactatgtcgtagtgggtaaagctccctcttcggagggagcatcagac

SEQ ID NO: 19497 - RNA, 90 nt, synthetic construct
  misc_feature 1..90: note = engineered ribonucleic acid scaffold (ERS) sequence
  source 1..90: mol_type = other RNA
actggcgcttctatctgattactctcagctgccatcaccagcgactatgtcgtagtgggtaaagctccctcttcggagggagcatgagag

SEQ ID NO: 19498 - RNA, 90 nt, synthetic construct
  misc_feature 1..90: note = engineered ribonucleic acid scaffold (ERS) sequence
  source 1..90: mol_type = other RNA
actggcgctcccatctgattaccccgagctgccatcaccagcgactatgtcgtagtgggtaaagctccctcttcggagggagcatcgggg

SEQ ID NO: 19499 - RNA, 90 nt, synthetic construct
  misc_feature 1..90: note = engineered ribonucleic acid scaffold (ERS) sequence
  source 1..90: mol_type = other RNA
actggcgctcctatctgattactccgagctgccatcaccagcgactatgtcgtagtgggtaaagctccctcttcggagggagcatcggag

SEQ ID NO: 19500 - RNA, 90 nt, synthetic construct
  misc_feature 1..90: note = engineered ribonucleic acid scaffold (ERS) sequence
  source 1..90: mol_type = other RNA
actggcgctgggatctgattaccccgagctgccatcaccagcgactatgtcgtagtgggtaaagctccctcttcggagggagcatcgggg

SEQ ID NO: 19501 - RNA, 90 nt, synthetic construct
  misc_feature 1..90: note = engineered ribonucleic acid scaffold (ERS) sequence
  source 1..90: mol_type = other RNA
actggcgctggtatctgattactccgagctgccatcaccagcgactatgtcgtagtgggtaaagctccctcttcggagggagcatcggag

SEQ ID NO: 19502 - RNA, 90 nt, synthetic construct
  misc_feature 1..90: note = engineered ribonucleic acid scaffold (ERS) sequence
  source 1..90: mol_type = other RNA
actggcgcttccatctgattaccctgagctgccatcaccagcgactatgtcgtagtgggtaaagctccctcttcggagggagcatcaggg

SEQ ID NO: 19503 - RNA, 90 nt, synthetic construct
  misc_feature 1..90: note = engineered ribonucleic acid scaffold (ERS) sequence
  source 1..90: mol_type = other RNA
actggcgcttggatctgattaccctgagctgccatcaccagcgactatgtcgtagtgggtaaagctccctcttcggagggagcatcaggg

SEQ ID NO: 19504 - RNA, 90 nt, synthetic construct
  misc_feature 1..90: note = engineered ribonucleic acid scaffold (ERS) sequence
  source 1..90: mol_type = other RNA
actggcgcttgtatctgattactctgagctgccatcaccagcgactatgtcgtagtgggtaaagctccctcttcggagggagcatcagag

SEQ ID NO: 19505 - RNA, 90 nt, synthetic construct
  misc_feature 1..90: note = engineered ribonucleic acid scaffold (ERS) sequence
  source 1..90: mol_type = other RNA
actggcgcttttatctgattactttgagctgccatcaccagcgactatgtcgtagtgggtaaagctccctcttcggagggagcatcagag

SEQ ID NO: 19506 - RNA, 90 nt, synthetic construct
  misc_feature 1..90: note = engineered ribonucleic acid scaffold (ERS) sequence
  source 1..90: mol_type = other RNA
actggcgcttttatctgattactctgagctgccatcaccagcgactatgtcgtagtgggtaaagctccctcttcggagggagcatcagag

SEQ ID NO: 19507 - RNA, 90 nt, synthetic construct
  misc_feature 1..90: note = engineered ribonucleic acid scaffold (ERS) sequence
  source 1..90: mol_type = other RNA
actggcgcttttatctgattactctgagctgccatcaccagcgactatgtcgtagtgggtaaagctccctcttcggagggagcatcaaag

SEQ ID NO: 19508 - RNA, 90 nt, synthetic construct
  misc_feature 1..90: note = engineered ribonucleic acid scaffold (ERS) sequence
  source 1..90: mol_type = other RNA
actggcgcttctatctgattactctgagctgccatcaccagcgactatgtcgtagtgggtaaagctccctcttcggagggagcctcagag

SEQ ID NO: 19509 - RNA, 90 nt, synthetic construct
  misc_feature 1..90: note = engineered ribonucleic acid scaffold (ERS) sequence
  source 1..90: mol_type = other RNA
actggcgcttctatctgattactctgagctgccatcaccagcgactatgtcgtagtgggtaaagctccctcttcggagggagcgtcagag

SEQ ID NO: 19510 - RNA, 90 nt, synthetic construct
  misc_feature 1..90: note = engineered ribonucleic acid scaffold (ERS) sequence
  source 1..90: mol_type = other RNA
actggcgcttctatctgattactctgagctgccatcaccagcgactatgtcgtagtgggtaaagctccctcttcggagggagcatcaaag

SEQ ID NO: 19511 - RNA, 90 nt, synthetic construct
  misc_feature 1..90: note = engineered ribonucleic acid scaffold (ERS) sequence
  source 1..90: mol_type = other RNA
actggcacttctatctgattactctcagtagccatcaccagcgactatgtcgtagtgggtaaagctccctcttcggagggagcatcagac

SEQ ID NO: 19512 - RNA, 90 nt, synthetic construct
  misc_feature 1..90: note = engineered ribonucleic acid scaffold (ERS) sequence
  source 1..90: mol_type = other RNA
actggcacttctatctgattactttgagtagccatcaccagcgactatgtcgtagtgggtaaagctccctcttcggagggagcatcagag

SEQ ID NO: 19513 - RNA, 90 nt, synthetic construct
  misc_feature 1..90: note = engineered ribonucleic acid scaffold (ERS) sequence
  source 1..90: mol_type = other RNA
actggcacttctatctgattactttgagtagccatcaccagcgactatgtcgtagtgggtaaagctccctcttcggagggagcatcaaag

SEQ ID NO: 19514 - RNA, 90 nt, synthetic construct
  misc_feature 1..90: note = engineered ribonucleic acid scaffold (ERS) sequence
  source 1..90: mol_type = other RNA
actggcacttctatctgattagtctcagtagccatcaccagcgactatgtcgtagtgggtaaagctccctcttcggagggagcatgagac

SEQ ID NO: 19515 - RNA, 90 nt, synthetic construct
  misc_feature 1..90: note = engineered ribonucleic acid scaffold (ERS) sequence
  source 1..90: mol_type = other RNA
actggcacttctatctgattagtctgagtagccatcaccagcgactatgtcgtagtgggtaaagctccctcttcggagggagcatcagac

SEQ ID NO: 19516 - RNA, 90 nt, synthetic construct
  misc_feature 1..90: note = engineered ribonucleic acid scaffold (ERS) sequence
  source 1..90: mol_type = other RNA
actggcacttctatctgattactctcagtagccatcaccagcgactatgtcgtagtgggtaaagctccctcttcggagggagcatgagag

SEQ ID NO: 19517 - RNA, 90 nt, synthetic construct
  misc_feature 1..90: note = engineered ribonucleic acid scaffold (ERS) sequence
  source 1..90: mol_type = other RNA
actggcgcttctatctgattactctcagtagccatcaccagcgactatgtcgtagtgggtaaagctccctcttcggagggagcatcagac

SEQ ID NO: 19518 - RNA, 90 nt, synthetic construct
  misc_feature 1..90: note = engineered ribonucleic acid scaffold (ERS) sequence
  source 1..90: mol_type = other RNA
actggcgcttctatctgattactttgagtagccatcaccagcgactatgtcgtagtgggtaaagctccctcttcggagggagcatcagag

SEQ ID NO: 19519 - RNA, 90 nt, synthetic construct
  misc_feature 1..90: note = engineered ribonucleic acid scaffold (ERS) sequence
  source 1..90: mol_type = other RNA
actggcgcttctatctgattactttgagtagccatcaccagcgactatgtcgtagtgggtaaagctccctcttcggagggagcatcaaag

SEQ ID NO: 19520 - RNA, 90 nt, synthetic construct
  misc_feature 1..90: note = engineered ribonucleic acid scaffold (ERS) sequence
  source 1..90: mol_type = other RNA
actggcgcttctatctgattagtctcagtagccatcaccagcgactatgtcgtagtgggtaaagctccctcttcggagggagcatgagac

SEQ ID NO: 19521 - RNA, 90 nt, synthetic construct
  misc_feature 1..90: note = engineered ribonucleic acid scaffold (ERS) sequence
  source 1..90: mol_type = other RNA
actggcgcttctatctgattagtctgagtagccatcaccagcgactatgtcgtagtgggtaaagctccctcttcggagggagcatcagac

SEQ ID NO: 19522 - RNA, 90 nt, synthetic construct
  misc_feature 1..90: note = engineered ribonucleic acid scaffold (ERS) sequence
  source 1..90: mol_type = other RNA
actggcgcttctatctgattactctcagtagccatcaccagcgactatgtcgtagtgggtaaagctccctcttcggagggagcatgagag

SEQ ID NO: 19523 - RNA, 90 nt, synthetic construct
  misc_feature 1..90: note = engineered ribonucleic acid scaffold (ERS) sequence
  source 1..90: mol_type = other RNA
actggcgctcccatctgattaccccgagtagccatcaccagcgactatgtcgtagtgggtaaagctccctcttcggagggagcatcgggg

SEQ ID NO: 19524 - RNA, 90 nt, synthetic construct
  misc_feature 1..90: note = engineered ribonucleic acid scaffold (ERS) sequence
  source 1..90: mol_type = other RNA
actggcgctcctatctgattactccgagtagccatcaccagcgactatgtcgtagtgggtaaagctccctcttcggagggagcatcggag

SEQ ID NO: 19525 - RNA, 90 nt, synthetic construct
  misc_feature 1..90: note = engineered ribonucleic acid scaffold (ERS) sequence
  source 1..90: mol_type = other RNA
actggcgctgggatctgattaccccgagtagccatcaccagcgactatgtcgtagtgggtaaagctccctcttcggagggagcatcgggg

SEQ ID NO: 19526 - RNA, 90 nt, synthetic construct
  misc_feature 1..90: note = engineered ribonucleic acid scaffold (ERS) sequence
  source 1..90: mol_type = other RNA
actggcgctggtatctgattactccgagtagccatcaccagcgactatgtcgtagtgggtaaagctccctcttcggagggagcatcggag

SEQ ID NO: 19527 - RNA, 90 nt, synthetic construct
  misc_feature 1..90: note = engineered ribonucleic acid scaffold (ERS) sequence
  source 1..90: mol_type = other RNA
actggcgcttccatctgattaccctgagtagccatcaccagcgactatgtcgtagtgggtaaagctccctcttcggagggagcatcaggg

SEQ ID NO: 19528 - RNA, 90 nt, synthetic construct
  misc_feature 1..90: note = engineered ribonucleic acid scaffold (ERS) sequence
  source 1..90: mol_type = other RNA
actggcgcttggatctgattaccctgagtagccatcaccagcgactatgtcgtagtgggtaaagctccctcttcggagggagcatcaggg

SEQ ID NO: 19529 - RNA, 90 nt, synthetic construct
  misc_feature 1..90: note = engineered ribonucleic acid scaffold (ERS) sequence
  source 1..90: mol_type = other RNA
actggcgcttgtatctgattactctgagtagccatcaccagcgactatgtcgtagtgggtaaagctccctcttcggagggagcatcagag

SEQ ID NO: 19530 - RNA, 90 nt, synthetic construct
  misc_feature 1..90: note = engineered ribonucleic acid scaffold (ERS) sequence
  source 1..90: mol_type = other RNA
actggcgcttttatctgattactttgagtagccatcaccagcgactatgtcgtagtgggtaaagctccctcttcggagggagcatcagag

SEQ ID NO: 19531 - RNA, 90 nt, synthetic construct
  misc_feature 1..90: note = engineered ribonucleic acid scaffold (ERS) sequence
  source 1..90: mol_type = other RNA
actggcgcttttatctgattactctgagtagccatcaccagcgactatgtcgtagtgggtaaagctccctcttcggagggagcatcagag

SEQ ID NO: 19532 - RNA, 90 nt, synthetic construct
  misc_feature 1..90: note = engineered ribonucleic acid scaffold (ERS) sequence
  source 1..90: mol_type = other RNA
actggcgcttttatctgattactctgagtagccatcaccagcgactatgtcgtagtgggtaaagctccctcttcggagggagcatcaaag

SEQ ID NO: 19533 - RNA, 90 nt, synthetic construct
  misc_feature 1..90: note = engineered ribonucleic acid scaffold (ERS) sequence
  source 1..90: mol_type = other RNA
actggcgcttctatctgattactctgagtagccatcaccagcgactatgtcgtagtgggtaaagctccctcttcggagggagcctcagag

SEQ ID NO: 19534 - RNA, 90 nt, synthetic construct
  misc_feature 1..90: note = engineered ribonucleic acid scaffold (ERS) sequence
  source 1..90: mol_type = other RNA
actggcgcttctatctgattactctgagtagccatcaccagcgactatgtcgtagtgggtaaagctccctcttcggagggagcgtcagag

SEQ ID NO: 19535 - RNA, 90 nt, synthetic construct
  misc_feature 1..90: note = engineered ribonucleic acid scaffold (ERS) sequence
  source 1..90: mol_type = other RNA
actggcgcttctatctgattactctgagtagccatcaccagcgactatgtcgtagtgggtaaagctccctcttcggagggagcatcaaag

SEQ ID NO: 19536 - RNA, 90 nt, synthetic construct
  misc_feature 1..90: note = engineered ribonucleic acid scaffold (ERS) sequence
  source 1..90: mol_type = other RNA
actggcactcccatctgattaccccgagtagccatcaccagcgactatgtcgtagtgggtaaagctccctcttcggagggagcatcgggg

SEQ ID NO: 19537 - RNA, 90 nt, synthetic construct
  misc_feature 1..90: note = engineered ribonucleic acid scaffold (ERS) sequence
  source 1..90: mol_type = other RNA
actggcactcctatctgattactccgagtagccatcaccagcgactatgtcgtagtgggtaaagctccctcttcggagggagcatcggag

SEQ ID NO: 19538 - RNA, 90 nt, synthetic construct
  misc_feature 1..90: note = engineered ribonucleic acid scaffold (ERS) sequence
  source 1..90: mol_type = other RNA
actggcactgggatctgattaccccgagtagccatcaccagcgactatgtcgtagtgggtaaagctccctcttcggagggagcatcgggg

SEQ ID NO: 19539 - RNA, 90 nt, synthetic construct
  misc_feature 1..90: note = engineered ribonucleic acid scaffold (ERS) sequence
  source 1..90: mol_type = other RNA
actggcactggtatctgattactccgagtagccatcaccagcgactatgtcgtagtgggtaaagctccctcttcggagggagcatcggag

SEQ ID NO: 19540 - RNA, 90 nt, synthetic construct
  misc_feature 1..90: note = engineered ribonucleic acid scaffold (ERS) sequence
  source 1..90: mol_type = other RNA
actggcacttccatctgattaccctgagtagccatcaccagcgactatgtcgtagtgggtaaagctccctcttcggagggagcatcaggg

SEQ ID NO: 19541 - RNA, 90 nt, synthetic construct
  misc_feature 1..90: note = engineered ribonucleic acid scaffold (ERS) sequence
  source 1..90: mol_type = other RNA
actggcacttggatctgattaccctgagtagccatcaccagcgactatgtcgtagtgggtaaagctccctcttcggagggagcatcaggg

SEQ ID NO: 19542 - RNA, 90 nt, synthetic construct
  misc_feature 1..90: note = engineered ribonucleic acid scaffold (ERS) sequence
  source 1..90: mol_type = other RNA
actggcacttgtatctgattactctgagtagccatcaccagcgactatgtcgtagtgggtaaagctccctcttcggagggagcatcagag

SEQ ID NO: 19543 - RNA, 90 nt, synthetic construct
  misc_feature 1..90: note = engineered ribonucleic acid scaffold (ERS) sequence
  source 1..90: mol_type = other RNA
actggcacttttatctgattactttgagtagccatcaccagcgactatgtcgtagtgggtaaagctccctcttcggagggagcatcagag

SEQ ID NO: 19544 - RNA, 90 nt, synthetic construct
  misc_feature 1..90: note = engineered ribonucleic acid scaffold (ERS) sequence
  source 1..90: mol_type = other RNA
actggcacttttatctgattactctgagtagccatcaccagcgactatgtcgtagtgggtaaagctccctcttcggagggagcatcagag

SEQ ID NO: 19545 - RNA, 90 nt, synthetic construct
  misc_feature 1..90: note = engineered ribonucleic acid scaffold (ERS) sequence
  source 1..90: mol_type = other RNA
actggcacttttatctgattactctgagtagccatcaccagcgactatgtcgtagtgggtaaagctccctcttcggagggagcatcaaag

SEQ ID NO: 19546 - RNA, 90 nt, synthetic construct
  misc_feature 1..90: note = engineered ribonucleic acid scaffold (ERS) sequence
  source 1..90: mol_type = other RNA
actggcacttctatctgattactctgagtagccatcaccagcgactatgtcgtagtgggtaaagctccctcttcggagggagcctcagag

SEQ ID NO: 19547 - RNA, 90 nt, synthetic construct
  misc_feature 1..90: note = engineered ribonucleic acid scaffold (ERS) sequence
  source 1..90: mol_type = other RNA
actggcacttctatctgattactctgagtagccatcaccagcgactatgtcgtagtgggtaaagctccctcttcggagggagcgtcagag

SEQ ID NO: 19548 - RNA, 90 nt, synthetic construct
  misc_feature 1..90: note = engineered ribonucleic acid scaffold (ERS) sequence
  source 1..90: mol_type = other RNA
actggcacttctatctgattactctgagtagccatcaccagcgactatgtcgtagtgggtaaagctccctcttcggagggagcatcaaag

SEQ ID NO: 19549 - RNA, 89 nt, synthetic construct
  misc_feature 1..89: note = engineered ribonucleic acid scaffold (ERS) sequence
  source 1..89: mol_type = other RNA
actggcacttctatctgattactctcagcgccatcaccagcgactatgtcgtagtgggtaaagctccctcttcggagggagcatcagac

SEQ ID NO: 19550 - RNA, 89 nt, synthetic construct
  misc_feature 1..89: note = engineered ribonucleic acid scaffold (ERS) sequence
  source 1..89: mol_type = other RNA
actggcacttctatctgattactttgagcgccatcaccagcgactatgtcgtagtgggtaaagctccctcttcggagggagcatcagag

SEQ ID NO: 19551 - RNA, 89 nt, synthetic construct
  misc_feature 1..89: note = engineered ribonucleic acid scaffold (ERS) sequence
  source 1..89: mol_type = other RNA
actggcacttctatctgattactttgagcgccatcaccagcgactatgtcgtagtgggtaaagctccctcttcggagggagcatcaaag

SEQ ID NO: 19552 - RNA, 89 nt, synthetic construct
  misc_feature 1..89: note = engineered ribonucleic acid scaffold (ERS) sequence
  source 1..89: mol_type = other RNA
actggcacttctatctgattagtctcagcgccatcaccagcgactatgtcgtagtgggtaaagctccctcttcggagggagcatgagac

SEQ ID NO: 19553 - RNA, 89 nt, synthetic construct
  misc_feature 1..89: note = engineered ribonucleic acid scaffold (ERS) sequence
  source 1..89: mol_type = other RNA
actggcacttctatctgattagtctgagcgccatcaccagcgactatgtcgtagtgggtaaagctccctcttcggagggagcatcagac

SEQ ID NO: 19554 - RNA, 89 nt, synthetic construct
  misc_feature 1..89: note = engineered ribonucleic acid scaffold (ERS) sequence
  source 1..89: mol_type = other RNA
actggcacttctatctgattactctcagcgccatcaccagcgactatgtcgtagtgggtaaagctccctcttcggagggagcatgagag

SEQ ID NO: 19555 - RNA, 89 nt, synthetic construct
  misc_feature 1..89: note = engineered ribonucleic acid scaffold (ERS) sequence
  source 1..89: mol_type = other RNA
actggcgcttctatctgattactctcagcaccatcaccagcgactatgtcgtagtgggtaaagctccctcttcggagggagcatcagac

SEQ ID NO: 19556 - RNA, 89 nt, synthetic construct
  misc_feature 1..89: note = engineered ribonucleic acid scaffold (ERS) sequence
  source 1..89: mol_type = other RNA
actggcgcttctatctgattactttgagcaccatcaccagcgactatgtcgtagtgggtaaagctccctcttcggagggagcatcagag

SEQ ID NO: 19557 - RNA, 89 nt, synthetic construct
  misc_feature 1..89: note = engineered ribonucleic acid scaffold (ERS) sequence
  source 1..89: mol_type = other RNA
actggcgcttctatctgattactttgagcaccatcaccagcgactatgtcgtagtgggtaaagctccctcttcggagggagcatcaaag

SEQ ID NO: 19558 - RNA, 89 nt, synthetic construct
  misc_feature 1..89: note = engineered ribonucleic acid scaffold (ERS) sequence
  source 1..89: mol_type = other RNA
actggcgcttctatctgattagtctcagcaccatcaccagcgactatgtcgtagtgggtaaagctccctcttcggagggagcatgagac

SEQ ID NO: 19559 - RNA, 89 nt, synthetic construct
  misc_feature 1..89: note = engineered ribonucleic acid scaffold (ERS) sequence
  source 1..89: mol_type = other RNA
actggcgcttctatctgattagtctgagcaccatcaccagcgactatgtcgtagtgggtaaagctccctcttcggagggagcatcagac

SEQ ID NO: 19560 - RNA, 89 nt, synthetic construct
  misc_feature 1..89: note = engineered ribonucleic acid scaffold (ERS) sequence
  source 1..89: mol_type = other RNA
actggcgcttctatctgattactctcagcaccatcaccagcgactatgtcgtagtgggtaaagctccctcttcggagggagcatgagag

SEQ ID NO: 19561 - RNA, 89 nt, synthetic construct
  misc_feature 1..89: note = engineered ribonucleic acid scaffold (ERS) sequence
  source 1..89: mol_type = other RNA
actggcgctcccatctgattaccccgagcaccatcaccagcgactatgtcgtagtgggtaaagctccctcttcggagggagcatcgggg

SEQ ID NO: 19562 - RNA, 89 nt, synthetic construct
  misc_feature 1..89: note = engineered ribonucleic acid scaffold (ERS) sequence
  source 1..89: mol_type = other RNA
actggcgctcctatctgattactccgagcaccatcaccagcgactatgtcgtagtgggtaaagctccctcttcggagggagcatcggag

SEQ ID NO: 19563 - RNA, 89 nt, synthetic construct
  misc_feature 1..89: note = engineered ribonucleic acid scaffold (ERS) sequence
  source 1..89: mol_type = other RNA
actggcgctgggatctgattaccccgagcaccatcaccagcgactatgtcgtagtgggtaaagctccctcttcggagggagcatcgggg

SEQ ID NO: 19564 - RNA, 89 nt, synthetic construct
  misc_feature 1..89: note = engineered ribonucleic acid scaffold (ERS) sequence
  source 1..89: mol_type = other RNA
actggcgctggtatctgattactccgagcaccatcaccagcgactatgtcgtagtgggtaaagctccctcttcggagggagcatcggag

SEQ ID NO: 19565 - RNA, 89 nt, synthetic construct
  misc_feature 1..89: note = engineered ribonucleic acid scaffold (ERS) sequence
  source 1..89: mol_type = other RNA
actggcgcttccatctgattaccctgagcaccatcaccagcgactatgtcgtagtgggtaaagctccctcttcggagggagcatcaggg

SEQ ID NO: 19566 - RNA, 89 nt, synthetic construct
  misc_feature 1..89: note = engineered ribonucleic acid scaffold (ERS) sequence
  source 1..89: mol_type = other RNA
actggcgcttggatctgattaccctgagcaccatcaccagcgactatgtcgtagtgggtaaagctccctcttcggagggagcatcaggg

SEQ ID NO: 19567 - RNA, 89 nt, synthetic construct
  misc_feature 1..89: note = engineered ribonucleic acid scaffold (ERS) sequence
  source 1..89: mol_type = other RNA
actggcgcttgtatctgattactctgagcaccatcaccagcgactatgtcgtagtgggtaaagctccctcttcggagggagcatcagag

SEQ ID NO: 19568 - RNA, 89 nt, synthetic construct
  misc_feature 1..89: note = engineered ribonucleic acid scaffold (ERS) sequence
  source 1..89: mol_type = other RNA
actggcgcttttatctgattactttgagcaccatcaccagcgactatgtcgtagtgggtaaagctccctcttcggagggagcatcagag

SEQ ID NO: 19569 - RNA, 89 nt, synthetic construct
  misc_feature 1..89: note = engineered ribonucleic acid scaffold (ERS) sequence
  source 1..89: mol_type = other RNA
actggcgcttttatctgattactctgagcaccatcaccagcgactatgtcgtagtgggtaaagctccctcttcggagggagcatcagag

SEQ ID NO: 19570 - RNA, 89 nt, synthetic construct
  misc_feature 1..89: note = engineered ribonucleic acid scaffold (ERS) sequence
  source 1..89: mol_type = other RNA
actggcgcttttatctgattactctgagcaccatcaccagcgactatgtcgtagtgggtaaagctccctcttcggagggagcatcaaag

SEQ ID NO: 19571 - RNA, 89 nt, synthetic construct
  misc_feature 1..89: note = engineered ribonucleic acid scaffold (ERS) sequence
  source 1..89: mol_type = other RNA
actggcgcttctatctgattactctgagcaccatcaccagcgactatgtcgtagtgggtaaagctccctcttcggagggagcctcagag

SEQ ID NO: 19572 - RNA, 89 nt, synthetic construct
  misc_feature 1..89: note = engineered ribonucleic acid scaffold (ERS) sequence
  source 1..89: mol_type = other RNA
actggcgcttctatctgattactctgagcaccatcaccagcgactatgtcgtagtgggtaaagctccctcttcggagggagcgtcagag

SEQ ID NO: 19573 - RNA, 89 nt, synthetic construct
  misc_feature 1..89: note = engineered ribonucleic acid scaffold (ERS) sequence
  source 1..89: mol_type = other RNA
actggcgcttctatctgattactctgagcaccatcaccagcgactatgtcgtagtgggtaaagctccctcttcggagggagcatcaaag

SEQ ID NO: 19574 - RNA, 89 nt, synthetic construct
  misc_feature 1..89: note = engineered ribonucleic acid scaffold (ERS) sequence
  source 1..89: mol_type = other RNA
actggcactcccatctgattaccccgagcgccatcaccagcgactatgtcgtagtgggtaaagctccctcttcggagggagcatcgggg

SEQ ID NO: 19575 - RNA, 89 nt, synthetic construct
  misc_feature 1..89: note = engineered ribonucleic acid scaffold (ERS) sequence
  source 1..89: mol_type = other RNA
actggcactcctatctgattactccgagcgccatcaccagcgactatgtcgtagtgggtaaagctccctcttcggagggagcatcggag

SEQ ID NO: 19576 - RNA, 89 nt, synthetic construct
  misc_feature 1..89: note = engineered ribonucleic acid scaffold (ERS) sequence
  source 1..89: mol_type = other RNA
actggcactgggatctgattaccccgagcgccatcaccagcgactatgtcgtagtgggtaaagctccctcttcggagggagcatcgggg

SEQ ID NO: 19577 - RNA, 89 nt, synthetic construct
  misc_feature 1..89: note = engineered ribonucleic acid scaffold (ERS) sequence
  source 1..89: mol_type = other RNA
actggcactggtatctgattactccgagcgccatcaccagcgactatgtcgtagtgggtaaagctccctcttcggagggagcatcggag

SEQ ID NO: 19578 - RNA, 89 nt, synthetic construct
  misc_feature 1..89: note = engineered ribonucleic acid scaffold (ERS) sequence
  source 1..89: mol_type = other RNA
actggcacttccatctgattaccctgagcgccatcaccagcgactatgtcgtagtgggtaaagctccctcttcggagggagcatcaggg

SEQ ID NO: 19579 - RNA, 89 nt, synthetic construct
  misc_feature 1..89: note = engineered ribonucleic acid scaffold (ERS) sequence
  source 1..89: mol_type = other RNA
actggcacttggatctgattaccctgagcgccatcaccagcgactatgtcgtagtgggtaaagctccctcttcggagggagcatcaggg

SEQ ID NO: 19580 - RNA, 89 nt, synthetic construct
  misc_feature 1..89: note = engineered ribonucleic acid scaffold (ERS) sequence
  source 1..89: mol_type = other RNA
actggcacttgtatctgattactctgagcgccatcaccagcgactatgtcgtagtgggtaaagctccctcttcggagggagcatcagag

SEQ ID NO: 19581 - RNA, 89 nt, synthetic construct
  misc_feature 1..89: note = engineered ribonucleic acid scaffold (ERS) sequence
  source 1..89: mol_type = other RNA
actggcacttttatctgattactttgagcgccatcaccagcgactatgtcgtagtgggtaaagctccctcttcggagggagcatcagag

SEQ ID NO: 19582 - RNA, 89 nt, synthetic construct
  misc_feature 1..89: note = engineered ribonucleic acid scaffold (ERS) sequence
  source 1..89: mol_type = other RNA
actggcacttttatctgattactctgagcgccatcaccagcgactatgtcgtagtgggtaaagctccctcttcggagggagcatcagag

SEQ ID NO: 19583 - RNA, 89 nt, synthetic construct
  misc_feature 1..89: note = engineered ribonucleic acid scaffold (ERS) sequence
  source 1..89: mol_type = other RNA
actggcacttttatctgattactctgagcgccatcaccagcgactatgtcgtagtgggtaaagctccctcttcggagggagcatcaaag

SEQ ID NO: 19584 - RNA, 89 nt, synthetic construct
  misc_feature 1..89: note = engineered ribonucleic acid scaffold (ERS) sequence
  source 1..89: mol_type = other RNA
actggcacttctatctgattactctgagcgccatcaccagcgactatgtcgtagtgggtaaagctccctcttcggagggagcctcagag

SEQ ID NO: 19585 - RNA, 89 nt, synthetic construct
  misc_feature 1..89: note = engineered ribonucleic acid scaffold (ERS) sequence
  source 1..89: mol_type = other RNA
actggcacttctatctgattactctgagcgccatcaccagcgactatgtcgtagtgggtaaagctccctcttcggagggagcgtcagag

SEQ ID NO: 19586 - RNA, 89 nt, synthetic construct
  misc_feature 1..89: note = engineered ribonucleic acid scaffold (ERS) sequence
  source 1..89: mol_type = other RNA
actggcacttctatctgattactctgagcgccatcaccagcgactatgtcgtagtgggtaaagctccctcttcggagggagcatcaaag

SEQ ID NO: 19587 - RNA, 89 nt, synthetic construct
  misc_feature 1..89: note = engineered ribonucleic acid scaffold (ERS) sequence
  source 1..89: mol_type = other RNA
actggcgcttctatctgattactctcagggccatcaccagcgactatgtcgtagtgggtaaagctccctcttcggagggagcatcagac

SEQ ID NO: 19588 - RNA, 89 nt, synthetic construct
  misc_feature 1..89: note = engineered ribonucleic acid scaffold (ERS) sequence
  source 1..89: mol_type = other RNA
actggcgcttctatctgattactttgagggccatcaccagcgactatgtcgtagtgggtaaagctccctcttcggagggagcatcagag

SEQ ID NO: 19589 - RNA, 89 nt, synthetic construct
  misc_feature 1..89: note = engineered ribonucleic acid scaffold (ERS) sequence
  source 1..89: mol_type = other RNA
actggcgcttctatctgattactttgagggccatcaccagcgactatgtcgtagtgggtaaagctccctcttcggagggagcatcaaag

SEQ ID NO: 19590 - RNA, 89 nt, synthetic construct
  misc_feature 1..89: note = engineered ribonucleic acid scaffold (ERS) sequence
  source 1..89: mol_type = other RNA
actggcgcttctatctgattagtctcagggccatcaccagcgactatgtcgtagtgggtaaagctccctcttcggagggagcatgagac

SEQ ID NO: 19591 - RNA, 89 nt, synthetic construct
  misc_feature 1..89: note = engineered ribonucleic acid scaffold (ERS) sequence
  source 1..89: mol_type = other RNA
actggcgcttctatctgattagtctgagggccatcaccagcgactatgtcgtagtgggtaaagctccctcttcggagggagcatcagac

SEQ ID NO: 19592 - RNA, 89 nt, synthetic construct
  misc_feature 1..89: note = engineered ribonucleic acid scaffold (ERS) sequence
  source 1..89: mol_type = other RNA
actggcgcttctatctgattactctcagggccatcaccagcgactatgtcgtagtgggtaaagctccctcttcggagggagcatgagag

SEQ ID NO: 19593 - RNA, 89 nt, synthetic construct
  misc_feature 1..89: note = engineered ribonucleic acid scaffold (ERS) sequence
  source 1..89: mol_type = other RNA
actggcgctcccatctgattaccccgagggccatcaccagcgactatgtcgtagtgggtaaagctccctcttcggagggagcatcgggg

SEQ ID NO: 19594 - RNA, 89 nt, synthetic construct
  misc_feature 1..89: note = engineered ribonucleic acid scaffold (ERS) sequence
  source 1..89: mol_type = other RNA
actggcgctcctatctgattactccgagggccatcaccagcgactatgtcgtagtgggtaaagctccctcttcggagggagcatcggag

SEQ ID NO: 19595 - RNA, 89 nt, synthetic construct
  misc_feature 1..89: note = engineered ribonucleic acid scaffold (ERS) sequence
  source 1..89: mol_type = other RNA
actggcgctgggatctgattaccccgagggccatcaccagcgactatgtcgtagtgggtaaagctccctcttcggagggagcatcgggg

SEQ ID NO: 19596 - RNA, 89 nt, synthetic construct
  misc_feature 1..89: note = engineered ribonucleic acid scaffold (ERS) sequence
  source 1..89: mol_type = other RNA
actggcgctggtatctgattactccgagggccatcaccagcgactatgtcgtagtgggtaaagctccctcttcggagggagcatcggag

SEQ ID NO: 19597 - RNA, 89 nt, synthetic construct
  misc_feature 1..89: note = engineered ribonucleic acid scaffold (ERS) sequence
  source 1..89: mol_type = other RNA
actggcgcttccatctgattaccctgagggccatcaccagcgactatgtcgtagtgggtaaagctccctcttcggagggagcatcaggg

SEQ ID NO: 19598 - RNA, 89 nt, synthetic construct
  misc_feature 1..89: note = engineered ribonucleic acid scaffold (ERS) sequence
  source 1..89: mol_type = other RNA
actggcgcttggatctgattaccctgagggccatcaccagcgactatgtcgtagtgggtaaagctccctcttcggagggagcatcaggg

SEQ ID NO: 19599 - RNA, 89 nt, synthetic construct
  misc_feature 1..89: note = engineered ribonucleic acid scaffold (ERS) sequence
  source 1..89: mol_type = other RNA
actggcgcttgtatctgattactctgagggccatcaccagcgactatgtcgtagtgggtaaagctccctcttcggagggagcatcagag

SEQ ID NO: 19600 - RNA, 89 nt, synthetic construct
  misc_feature 1..89: note = engineered ribonucleic acid scaffold (ERS) sequence
  source 1..89: mol_type = other RNA
actggcgcttttatctgattactttgagggccatcaccagcgactatgtcgtagtgggtaaagctccctcttcggagggagcatcagag

SEQ ID NO: 19601 - RNA, 89 nt, synthetic construct
  misc_feature 1..89: note = engineered ribonucleic acid scaffold (ERS) sequence
  source 1..89: mol_type = other RNA
actggcgcttttatctgattactctgagggccatcaccagcgactatgtcgtagtgggtaaagctccctcttcggagggagcatcagag

SEQ ID NO: 19602 - RNA, 89 nt, synthetic construct
  misc_feature 1..89: note = engineered ribonucleic acid scaffold (ERS) sequence
  source 1..89: mol_type = other RNA
actggcgcttttatctgattactctgagggccatcaccagcgactatgtcgtagtgggtaaagctccctcttcggagggagcatcaaag

SEQ ID NO: 19603 - RNA, 89 nt, synthetic construct
  misc_feature 1..89: note = engineered ribonucleic acid scaffold (ERS) sequence
  source 1..89: mol_type = other RNA
actggcgcttctatctgattactctgagggccatcaccagcgactatgtcgtagtgggtaaagctccctcttcggagggagcctcagag

SEQ ID NO: 19604 - RNA, 89 nt, synthetic construct
  misc_feature 1..89: note = engineered ribonucleic acid scaffold (ERS) sequence
  source 1..89: mol_type = other RNA
actggcgcttctatctgattactctgagggccatcaccagcgactatgtcgtagtgggtaaagctccctcttcggagggagcgtcagag

SEQ ID NO: 19605 - RNA, 89 nt, synthetic construct
  misc_feature 1..89: note = engineered ribonucleic acid scaffold (ERS) sequence
  source 1..89: mol_type = other RNA
actggcgcttctatctgattactctgagggccatcaccagcgactatgtcgtagtgggtaaagctccctcttcggagggagcatcaaag

SEQ ID NO: 19606 - RNA, 89 nt, synthetic construct
  misc_feature 1..89: note = engineered ribonucleic acid scaffold (ERS) sequence
  source 1..89: mol_type = other RNA
actggcacttctatctgattactctcagtgccatcaccagcgactatgtcgtagtgggtaaagctccctcttcggagggagcatcagac

SEQ ID NO: 19607 - RNA, 89 nt, synthetic construct
  misc_feature 1..89: note = engineered ribonucleic acid scaffold (ERS) sequence
  source 1..89: mol_type = other RNA
actggcacttctatctgattactttgagtgccatcaccagcgactatgtcgtagtgggtaaagctccctcttcggagggagcatcagag

SEQ ID NO: 19608 - RNA, 89 nt, synthetic construct
  misc_feature 1..89: note = engineered ribonucleic acid scaffold (ERS) sequence
  source 1..89: mol_type = other RNA
actggcacttctatctgattactttgagtgccatcaccagcgactatgtcgtagtgggtaaagctccctcttcggagggagcatcaaag

SEQ ID NO: 19609 - RNA, 89 nt, synthetic construct
  misc_feature 1..89: note = engineered ribonucleic acid scaffold (ERS) sequence
  source 1..89: mol_type = other RNA
actggcacttctatctgattagtctcagtgccatcaccagcgactatgtcgtagtgggtaaagctccctcttcggagggagcatgagac

SEQ ID NO: 19610 - RNA, 89 nt, synthetic construct
  misc_feature 1..89: note = engineered ribonucleic acid scaffold (ERS) sequence
  source 1..89: mol_type = other RNA
actggcacttctatctgattagtctgagtgccatcaccagcgactatgtcgtagtgggtaaagctccctcttcggagggagcatcagac

SEQ ID NO: 19611 - RNA, 89 nt, synthetic construct
  misc_feature 1..89: note = engineered ribonucleic acid scaffold (ERS) sequence
  source 1..89: mol_type = other RNA
actggcacttctatctgattactctcagtgccatcaccagcgactatgtcgtagtgggtaaagctccctcttcggagggagcatgagag

SEQ ID NO: 19612 - RNA, 89 nt, synthetic construct
  misc_feature 1..89: note = engineered ribonucleic acid scaffold (ERS) sequence
  source 1..89: mol_type = other RNA
actggcgcttctatctgattactctcagtgccgtcaccagcgactatgtcgtagtgggtaaagctccctcttcggagggagcatcagac

SEQ ID NO: 19613 - RNA, 89 nt, synthetic construct
  misc_feature 1..89: note = engineered ribonucleic acid scaffold (ERS) sequence
  source 1..89: mol_type = other RNA
actggcgcttctatctgattactttgagtgccgtcaccagcgactatgtcgtagtgggtaaagctccctcttcggagggagcatcagag

SEQ ID NO: 19614 - RNA, 89 nt, synthetic construct
  misc_feature 1..89: note = engineered ribonucleic acid scaffold (ERS) sequence
  source 1..89: mol_type = other RNA
actggcgcttctatctgattactttgagtgccgtcaccagcgactatgtcgtagtgggtaaagctccctcttcggagggagcatcaaag

SEQ ID NO: 19615 - RNA, 89 nt, synthetic construct
  misc_feature 1..89: note = engineered ribonucleic acid scaffold (ERS) sequence
  source 1..89: mol_type = other RNA
actggcgcttctatctgattagtctcagtgccgtcaccagcgactatgtcgtagtgggtaaagctccctcttcggagggagcatgagac

SEQ ID NO: 19616 - RNA, 89 nt, synthetic construct
  misc_feature 1..89: note = engineered ribonucleic acid scaffold (ERS) sequence
  source 1..89: mol_type = other RNA
actggcgcttctatctgattagtctgagtgccgtcaccagcgactatgtcgtagtgggtaaagctccctcttcggagggagcatcagac

SEQ ID NO: 19617 - RNA, 89 nt, synthetic construct
  misc_feature 1..89: note = engineered ribonucleic acid scaffold (ERS) sequence
  source 1..89: mol_type = other RNA
actggcgcttctatctgattactctcagtgccgtcaccagcgactatgtcgtagtgggtaaagctccctcttcggagggagcatgagag

SEQ ID NO: 19618 - RNA, 89 nt, synthetic construct
  misc_feature 1..89: note = engineered ribonucleic acid scaffold (ERS) sequence
  source 1..89: mol_type = other RNA
actggcgctcccatctgattaccccgagtgccgtcaccagcgactatgtcgtagtgggtaaagctccctcttcggagggagcatcgggg

SEQ ID NO: 19619 - RNA, 89 nt, synthetic construct
  misc_feature 1..89: note = engineered ribonucleic acid scaffold (ERS) sequence
  source 1..89: mol_type = other RNA
actggcgctcctatctgattactccgagtgccgtcaccagcgactatgtcgtagtgggtaaagctccctcttcggagggagcatcggag

SEQ ID NO: 19620 - RNA, 89 nt, synthetic construct
  misc_feature 1..89: note = engineered ribonucleic acid scaffold (ERS) sequence
  source 1..89: mol_type = other RNA
actggcgctgggatctgattaccccgagtgccgtcaccagcgactatgtcgtagtgggtaaagctccctcttcggagggagcatcgggg

SEQ ID NO: 19621 - RNA, 89 nt, synthetic construct
  misc_feature 1..89: note = engineered ribonucleic acid scaffold (ERS) sequence
  source 1..89: mol_type = other RNA
actggcgctggtatctgattactccgagtgccgtcaccagcgactatgtcgtagtgggtaaagctccctcttcggagggagcatcggag

SEQ ID NO: 19622 - RNA, 89 nt, synthetic construct
  misc_feature 1..89: note = engineered ribonucleic acid scaffold (ERS) sequence
  source 1..89: mol_type = other RNA
actggcgcttccatctgattaccctgagtgccgtcaccagcgactatgtcgtagtgggtaaagctccctcttcggagggagcatcaggg

SEQ ID NO: 19623 - RNA, 89 nt, synthetic construct
  misc_feature 1..89: note = engineered ribonucleic acid scaffold (ERS) sequence
  source 1..89: mol_type = other RNA
actggcgcttggatctgattaccctgagtgccgtcaccagcgactatgtcgtagtgggtaaagctccctcttcggagggagcatcaggg

SEQ ID NO: 19624 - RNA, 89 nt, synthetic construct
  misc_feature 1..89: note = engineered ribonucleic acid scaffold (ERS) sequence
  source 1..89: mol_type = other RNA
actggcgcttgtatctgattactctgagtgccgtcaccagcgactatgtcgtagtgggtaaagctccctcttcggagggagcatcagag

SEQ ID NO: 19625 - RNA, 89 nt, synthetic construct
  misc_feature 1..89: note = engineered ribonucleic acid scaffold (ERS) sequence
  source 1..89: mol_type = other RNA
actggcgcttttatctgattactttgagtgccgtcaccagcgactatgtcgtagtgggtaaagctccctcttcggagggagcatcagag

SEQ ID NO: 19626 - RNA, 89 nt, synthetic construct
  misc_feature 1..89: note = engineered ribonucleic acid scaffold (ERS) sequence
  source 1..89: mol_type = other RNA
actggcgcttttatctgattactctgagtgccgtcaccagcgactatgtcgtagtgggtaaagctccctcttcggagggagcatcagag

SEQ ID NO: 19627 - RNA, 89 nt, synthetic construct
  misc_feature 1..89: note = engineered ribonucleic acid scaffold (ERS) sequence
  source 1..89: mol_type = other RNA
actggcgcttttatctgattactctgagtgccgtcaccagcgactatgtcgtagtgggtaaagctccctcttcggagggagcatcaaag

SEQ ID NO: 19628 - RNA, 89 nt, synthetic construct
  misc_feature 1..89: note = engineered ribonucleic acid scaffold (ERS) sequence
  source 1..89: mol_type = other RNA
actggcgcttctatctgattactctgagtgccgtcaccagcgactatgtcgtagtgggtaaagctccctcttcggagggagcctcagag

SEQ ID NO: 19629 - RNA, 89 nt, synthetic construct
  misc_feature 1..89: note = engineered ribonucleic acid scaffold (ERS) sequence
  source 1..89: mol_type = other RNA
actggcgcttctatctgattactctgagtgccgtcaccagcgactatgtcgtagtgggtaaagctccctcttcggagggagcgtcagag

SEQ ID NO: 19630 - RNA, 89 nt, synthetic construct
  misc_feature 1..89: note = engineered ribonucleic acid scaffold (ERS) sequence
  source 1..89: mol_type = other RNA
actggcgcttctatctgattactctgagtgccgtcaccagcgactatgtcgtagtgggtaaagctccctcttcggagggagcatcaaag

SEQ ID NO: 19631 - RNA, 89 nt, synthetic construct
  misc_feature 1..89: note = engineered ribonucleic acid scaffold (ERS) sequence
  source 1..89: mol_type = other RNA
actggcactcccatctgattaccccgagtgccatcaccagcgactatgtcgtagtgggtaaagctccctcttcggagggagcatcgggg

SEQ ID NO: 19632 - RNA, 89 nt, synthetic construct
  misc_feature 1..89: note = engineered ribonucleic acid scaffold (ERS) sequence
  source 1..89: mol_type = other RNA
actggcactcctatctgattactccgagtgccatcaccagcgactatgtcgtagtgggtaaagctccctcttcggagggagcatcggag

SEQ ID NO: 19633 - RNA, 89 nt, synthetic construct
  misc_feature 1..89: note = engineered ribonucleic acid scaffold (ERS) sequence
  source 1..89: mol_type = other RNA
actggcactgggatctgattaccccgagtgccatcaccagcgactatgtcgtagtgggtaaagctccctcttcggagggagcatcgggg

SEQ ID NO: 19634 - RNA, 89 nt, synthetic construct
  misc_feature 1..89: note = engineered ribonucleic acid scaffold (ERS) sequence
  source 1..89: mol_type = other RNA
actggcactggtatctgattactccgagtgccatcaccagcgactatgtcgtagtgggtaaagctccctcttcggagggagcatcggag

SEQ ID NO: 19635 - RNA, 89 nt, synthetic construct
  misc_feature 1..89: note = engineered ribonucleic acid scaffold (ERS) sequence
  source 1..89: mol_type = other RNA
actggcacttccatctgattaccctgagtgccatcaccagcgactatgtcgtagtgggtaaagctccctcttcggagggagcatcaggg

SEQ ID NO: 19636 - RNA, 89 nt, synthetic construct
  misc_feature 1..89: note = engineered ribonucleic acid scaffold (ERS) sequence
  source 1..89: mol_type = other RNA
actggcacttggatctgattaccctgagtgccatcaccagcgactatgtcgtagtgggtaaagctccctcttcggagggagcatcaggg

SEQ ID NO: 19637 - RNA, 89 nt, synthetic construct
  misc_feature 1..89: note = engineered ribonucleic acid scaffold (ERS) sequence
  source 1..89: mol_type = other RNA
actggcacttgtatctgattactctgagtgccatcaccagcgactatgtcgtagtgggtaaagctccctcttcggagggagcatcagag

SEQ ID NO: 19638 - RNA, 89 nt, synthetic construct
  misc_feature 1..89: note = engineered ribonucleic acid scaffold (ERS) sequence
  source 1..89: mol_type = other RNA
actggcacttttatctgattactttgagtgccatcaccagcgactatgtcgtagtgggtaaagctccctcttcggagggagcatcagag

SEQ ID NO: 19639 - RNA, 89 nt, synthetic construct
  misc_feature 1..89: note = engineered ribonucleic acid scaffold (ERS) sequence
  source 1..89: mol_type = other RNA
actggcacttttatctgattactctgagtgccatcaccagcgactatgtcgtagtgggtaaagctccctcttcggagggagcatcagag

SEQ ID NO: 19640 - RNA, 89 nt, synthetic construct
  misc_feature 1..89: note = engineered ribonucleic acid scaffold (ERS) sequence
  source 1..89: mol_type = other RNA
actggcacttttatctgattactctgagtgccatcaccagcgactatgtcgtagtgggtaaagctccctcttcggagggagcatcaaag

SEQ ID NO: 19641 - RNA, 89 nt, synthetic construct
  misc_feature 1..89: note = engineered ribonucleic acid scaffold (ERS) sequence
  source 1..89: mol_type = other RNA
actggcacttctatctgattactctgagtgccatcaccagcgactatgtcgtagtgggtaaagctccctcttcggagggagcctcagag

SEQ ID NO: 19642 - RNA, 89 nt, synthetic construct
  misc_feature 1..89: note = engineered ribonucleic acid scaffold (ERS) sequence
  source 1..89: mol_type = other RNA
actggcacttctatctgattactctgagtgccatcaccagcgactatgtcgtagtgggtaaagctccctcttcggagggagcgtcagag

SEQ ID NO: 19643 - RNA, 89 nt, synthetic construct
  misc_feature 1..89: note = engineered ribonucleic acid scaffold (ERS) sequence
  source 1..89: mol_type = other RNA
actggcacttctatctgattactctgagtgccatcaccagcgactatgtcgtagtgggtaaagctccctcttcggagggagcatcaaag

SEQ ID NO: 19644 - RNA, 89 nt, synthetic construct
  misc_feature 1..89: note = engineered ribonucleic acid scaffold (ERS) sequence
  source 1..89: mol_type = other RNA
actggcgcttctatctgattactctcagaaccatcaccagcgactatgtcgtagtgggtaaagctccctcttcggagggagcatcagac

SEQ ID NO: 19645 - RNA, 89 nt, synthetic construct
  misc_feature 1..89: note = engineered ribonucleic acid scaffold (ERS) sequence
  source 1..89: mol_type = other RNA
actggcgcttctatctgattactttgagaaccatcaccagcgactatgtcgtagtgggtaaagctccctcttcggagggagcatcagag

SEQ ID NO: 19646 - RNA, 89 nt, synthetic construct
  misc_feature 1..89: note = engineered ribonucleic acid scaffold (ERS) sequence
  source 1..89: mol_type = other RNA
actggcgcttctatctgattactttgagaaccatcaccagcgactatgtcgtagtgggtaaagctccctcttcggagggagcatcaaag

SEQ ID NO: 19647 - RNA, 89 nt, synthetic construct
  misc_feature 1..89: note = engineered ribonucleic acid scaffold (ERS) sequence
  source 1..89: mol_type = other RNA
actggcgcttctatctgattagtctcagaaccatcaccagcgactatgtcgtagtgggtaaagctccctcttcggagggagcatgagac

SEQ ID NO: 19648 - RNA, 89 nt, synthetic construct
  misc_feature 1..89: note = engineered ribonucleic acid scaffold (ERS) sequence
  source 1..89: mol_type = other RNA
actggcgcttctatctgattagtctgagaaccatcaccagcgactatgtcgtagtgggtaaagctccctcttcggagggagcatcagac

SEQ ID NO: 19649 - RNA, 89 nt, synthetic construct
  misc_feature 1..89: note = engineered ribonucleic acid scaffold (ERS) sequence
  source 1..89: mol_type = other RNA
actggcgcttctatctgattactctcagaaccatcaccagcgactatgtcgtagtgggtaaagctccctcttcggagggagcatgagag

SEQ ID NO: 19650 - RNA, 89 nt, synthetic construct
  misc_feature 1..89: note = engineered ribonucleic acid scaffold (ERS) sequence
  source 1..89: mol_type = other RNA
actggcgctcccatctgattaccccgagaaccatcaccagcgactatgtcgtagtgggtaaagctccctcttcggagggagcatcgggg

SEQ ID NO: 19651 - RNA, 89 nt, synthetic construct
  misc_feature 1..89: note = engineered ribonucleic acid scaffold (ERS) sequence
  source 1..89: mol_type = other RNA
actggcgctcctatctgattactccgagaaccatcaccagcgactatgtcgtagtgggtaaagctccctcttcggagggagcatcggag

SEQ ID NO: 19652 - RNA, 89 nt, synthetic construct
  misc_feature 1..89: note = engineered ribonucleic acid scaffold (ERS) sequence
  source 1..89: mol_type = other RNA
actggcgctgggatctgattaccccgagaaccatcaccagcgactatgtcgtagtgggtaaagctccctcttcggagggagcatcgggg

SEQ ID NO: 19653 - RNA, 89 nt, synthetic construct
  misc_feature 1..89: note = engineered ribonucleic acid scaffold (ERS) sequence
  source 1..89: mol_type = other RNA
actggcgctggtatctgattactccgagaaccatcaccagcgactatgtcgtagtgggtaaagctccctcttcggagggagcatcggag

SEQ ID NO: 19654 - RNA, 89 nt, synthetic construct
  misc_feature 1..89: note = engineered ribonucleic acid scaffold (ERS) sequence
  source 1..89: mol_type = other RNA
actggcgcttccatctgattaccctgagaaccatcaccagcgactatgtcgtagtgggtaaagctccctcttcggagggagcatcaggg

SEQ ID NO: 19655 - RNA, 89 nt, synthetic construct
  misc_feature 1..89: note = engineered ribonucleic acid scaffold (ERS) sequence
  source 1..89: mol_type = other RNA
actggcgcttggatctgattaccctgagaaccatcaccagcgactatgtcgtagtgggtaaagctccctcttcggagggagcatcaggg

SEQ ID NO: 19656 - RNA, 89 nt, synthetic construct
  misc_feature 1..89: note = engineered ribonucleic acid scaffold (ERS) sequence
  source 1..89: mol_type = other RNA
actggcgcttgtatctgattactctgagaaccatcaccagcgactatgtcgtagtgggtaaagctccctcttcggagggagcatcagag

SEQ ID NO: 19657 - RNA, 89 nt, synthetic construct
  misc_feature 1..89: note = engineered ribonucleic acid scaffold (ERS) sequence
  source 1..89: mol_type = other RNA
actggcgcttttatctgattactttgagaaccatcaccagcgactatgtcgtagtgggtaaagctccctcttcggagggagcatcagag

SEQ ID NO: 19658 - RNA, 89 nt, synthetic construct
  misc_feature 1..89: note = engineered ribonucleic acid scaffold (ERS) sequence
  source 1..89: mol_type = other RNA
actggcgcttttatctgattactctgagaaccatcaccagcgactatgtcgtagtgggtaaagctccctcttcggagggagcatcagag

SEQ ID NO: 19659 - RNA, 89 nt, synthetic construct
  misc_feature 1..89: note = engineered ribonucleic acid scaffold (ERS) sequence
  source 1..89: mol_type = other RNA
actggcgcttttatctgattactctgagaaccatcaccagcgactatgtcgtagtgggtaaagctccctcttcggagggagcatcaaag

SEQ ID NO: 19660 - RNA, 89 nt, synthetic construct
  misc_feature 1..89: note = engineered ribonucleic acid scaffold (ERS) sequence
  source 1..89: mol_type = other RNA
actggcgcttctatctgattactctgagaaccatcaccagcgactatgtcgtagtgggtaaagctccctcttcggagggagcctcagag

SEQ ID NO: 19661 - RNA, 89 nt, synthetic construct
  misc_feature 1..89: note = engineered ribonucleic acid scaffold (ERS) sequence
  source 1..89: mol_type = other RNA
actggcgcttctatctgattactctgagaaccatcaccagcgactatgtcgtagtgggtaaagctccctcttcggagggagcgtcagag

SEQ ID NO: 19662 - RNA, 89 nt, synthetic construct
  misc_feature 1..89: note = engineered ribonucleic acid scaffold (ERS) sequence
  source 1..89: mol_type = other RNA
actggcgcttctatctgattactctgagaaccatcaccagcgactatgtcgtagtgggtaaagctccctcttcggagggagcatcaaag

SEQ ID NO: 19663 - RNA, 89 nt, synthetic construct
  misc_feature 1..89: note = engineered ribonucleic acid scaffold (ERS) sequence
  source 1..89: mol_type = other RNA
actggcgcttctatctgattactctcagagccgtcaccagcgactatgtcgtagtgggtaaagctccctcttcggagggagcatcagac

SEQ ID NO: 19664 - RNA, 89 nt, synthetic construct
  misc_feature 1..89: note = engineered ribonucleic acid scaffold (ERS) sequence
  source 1..89: mol_type = other RNA
actggcgcttctatctgattactttgagagccgtcaccagcgactatgtcgtagtgggtaaagctccctcttcggagggagcatcagag

SEQ ID NO: 19665 - RNA, 89 nt, synthetic construct
  misc_feature 1..89: note = engineered ribonucleic acid scaffold (ERS) sequence
  source 1..89: mol_type = other RNA
actggcgcttctatctgattactttgagagccgtcaccagcgactatgtcgtagtgggtaaagctccctcttcggagggagcatcaaag

SEQ ID NO: 19666 - RNA, 89 nt, synthetic construct
  misc_feature 1..89: note = engineered ribonucleic acid scaffold (ERS) sequence
  source 1..89: mol_type = other RNA
actggcgcttctatctgattagtctcagagccgtcaccagcgactatgtcgtagtgggtaaagctccctcttcggagggagcatgagac

SEQ ID NO: 19667 - RNA, 89 nt, synthetic construct
  misc_feature 1..89: note = engineered ribonucleic acid scaffold (ERS) sequence
  source 1..89: mol_type = other RNA
actggcgcttctatctgattagtctgagagccgtcaccagcgactatgtcgtagtgggtaaagctccctcttcggagggagcatcagac

SEQ ID NO: 19668 - RNA, 89 nt, synthetic construct
  misc_feature 1..89: note = engineered ribonucleic acid scaffold (ERS) sequence
  source 1..89: mol_type = other RNA
actggcgcttctatctgattactctcagagccgtcaccagcgactatgtcgtagtgggtaaagctccctcttcggagggagcatgagag

SEQ ID NO: 19669 - RNA, 89 nt, synthetic construct
  misc_feature 1..89: note = engineered ribonucleic acid scaffold (ERS) sequence
  source 1..89: mol_type = other RNA
actggcgctcccatctgattaccccgagagccgtcaccagcgactatgtcgtagtgggtaaagctccctcttcggagggagcatcgggg

SEQ ID NO: 19670 - RNA, 89 nt, synthetic construct
  misc_feature 1..89: note = engineered ribonucleic acid scaffold (ERS) sequence
  source 1..89: mol_type = other RNA
actggcgctcctatctgattactccgagagccgtcaccagcgactatgtcgtagtgggtaaagctccctcttcggagggagcatcggag

SEQ ID NO: 19671 - RNA, 89 nt, synthetic construct
  misc_feature 1..89: note = engineered ribonucleic acid scaffold (ERS) sequence
  source 1..89: mol_type = other RNA
actggcgctgggatctgattaccccgagagccgtcaccagcgactatgtcgtagtgggtaaagctccctcttcggagggagcatcgggg

SEQ ID NO: 19672 - RNA, 89 nt, synthetic construct
  misc_feature 1..89: note = engineered ribonucleic acid scaffold (ERS) sequence
  source 1..89: mol_type = other RNA
actggcgctggtatctgattactccgagagccgtcaccagcgactatgtcgtagtgggtaaagctccctcttcggagggagcatcggag

SEQ ID NO: 19673 - RNA, 89 nt, synthetic construct
  misc_feature 1..89: note = engineered ribonucleic acid scaffold (ERS) sequence
  source 1..89: mol_type = other RNA
actggcgcttccatctgattaccctgagagccgtcaccagcgactatgtcgtagtgggtaaagctccctcttcggagggagcatcaggg

SEQ ID NO: 19674 - RNA, 89 nt, synthetic construct
  misc_feature 1..89: note = engineered ribonucleic acid scaffold (ERS) sequence
  source 1..89: mol_type = other RNA
actggcgcttggatctgattaccctgagagccgtcaccagcgactatgtcgtagtgggtaaagctccctcttcggagggagcatcaggg

SEQ ID NO: 19675 - RNA, 89 nt, synthetic construct
  misc_feature 1..89: note = engineered ribonucleic acid scaffold (ERS) sequence
  source 1..89: mol_type = other RNA
actggcgcttgtatctgattactctgagagccgtcaccagcgactatgtcgtagtgggtaaagctccctcttcggagggagcatcagag

SEQ ID NO: 19676 - RNA, 89 nt, synthetic construct
  misc_feature 1..89: note = engineered ribonucleic acid scaffold (ERS) sequence
  source 1..89: mol_type = other RNA
actggcgcttttatctgattactttgagagccgtcaccagcgactatgtcgtagtgggtaaagctccctcttcggagggagcatcagag

SEQ ID NO: 19677 - RNA, 89 nt, synthetic construct
  misc_feature 1..89: note = engineered ribonucleic acid scaffold (ERS) sequence
  source 1..89: mol_type = other RNA
actggcgcttttatctgattactctgagagccgtcaccagcgactatgtcgtagtgggtaaagctccctcttcggagggagcatcagag

SEQ ID NO: 19678 - RNA, 89 nt, synthetic construct
  misc_feature 1..89: note = engineered ribonucleic acid scaffold (ERS) sequence
  source 1..89: mol_type = other RNA
actggcgcttttatctgattactctgagagccgtcaccagcgactatgtcgtagtgggtaaagctccctcttcggagggagcatcaaag

SEQ ID NO: 19679 - RNA, 89 nt, synthetic construct
  misc_feature 1..89: note = engineered ribonucleic acid scaffold (ERS) sequence
  source 1..89: mol_type = other RNA
actggcgcttctatctgattactctgagagccgtcaccagcgactatgtcgtagtgggtaaagctccctcttcggagggagcctcagag

SEQ ID NO: 19680 - RNA, 89 nt, synthetic construct
  misc_feature 1..89: note = engineered ribonucleic acid scaffold (ERS) sequence
  source 1..89: mol_type = other RNA
actggcgcttctatctgattactctgagagccgtcaccagcgactatgtcgtagtgggtaaagctccctcttcggagggagcgtcagag

SEQ ID NO: 19681 - RNA, 89 nt, synthetic construct
  misc_feature 1..89: note = engineered ribonucleic acid scaffold (ERS) sequence
  source 1..89: mol_type = other RNA
actggcgcttctatctgattactctgagagccgtcaccagcgactatgtcgtagtgggtaaagctccctcttcggagggagcatcaaag

SEQ ID NO: 19682 - RNA, 89 nt, synthetic construct
  misc_feature 1..89: note = engineered ribonucleic acid scaffold (ERS) sequence
  source 1..89: mol_type = other RNA
actggcgcttctatctgattactctcagagccttcaccagcgactatgtcgtagtgggtaaagctccctcttcggagggagcatcagac

SEQ ID NO: 19683 - RNA, 89 nt, synthetic construct
  misc_feature 1..89: note = engineered ribonucleic acid scaffold (ERS) sequence
  source 1..89: mol_type = other RNA
actggcgcttctatctgattactttgagagccttcaccagcgactatgtcgtagtgggtaaagctccctcttcggagggagcatcagag

SEQ ID NO: 19684 - RNA, 89 nt, synthetic construct
  misc_feature 1..89: note = engineered ribonucleic acid scaffold (ERS) sequence
  source 1..89: mol_type = other RNA
actggcgcttctatctgattactttgagagccttcaccagcgactatgtcgtagtgggtaaagctccctcttcggagggagcatcaaag

SEQ ID NO: 19685 - RNA, 89 nt, synthetic construct
  misc_feature 1..89: note = engineered ribonucleic acid scaffold (ERS) sequence
  source 1..89: mol_type = other RNA
actggcgcttctatctgattagtctcagagccttcaccagcgactatgtcgtagtgggtaaagctccctcttcggagggagcatgagac

SEQ ID NO: 19686 - RNA, 89 nt, synthetic construct
  misc_feature 1..89: note = engineered ribonucleic acid scaffold (ERS) sequence
  source 1..89: mol_type = other RNA
actggcgcttctatctgattagtctgagagccttcaccagcgactatgtcgtagtgggtaaagctccctcttcggagggagcatcagac

SEQ ID NO: 19687 - RNA, 89 nt, synthetic construct
  misc_feature 1..89: note = engineered ribonucleic acid scaffold (ERS) sequence
  source 1..89: mol_type = other RNA
actggcgcttctatctgattactctcagagccttcaccagcgactatgtcgtagtgggtaaagctccctcttcggagggagcatgagag

SEQ ID NO: 19688 - RNA, 89 nt, synthetic construct
  misc_feature 1..89: note = engineered ribonucleic acid scaffold (ERS) sequence
  source 1..89: mol_type = other RNA
actggcgctcccatctgattaccccgagagccttcaccagcgactatgtcgtagtgggtaaagctccctcttcggagggagcatcgggg

SEQ ID NO: 19689 - RNA, 89 nt, synthetic construct
  misc_feature 1..89: note = engineered ribonucleic acid scaffold (ERS) sequence
  source 1..89: mol_type = other RNA
actggcgctcctatctgattactccgagagccttcaccagcgactatgtcgtagtgggtaaagctccctcttcggagggagcatcggag

SEQ ID NO: 19690 - RNA, 89 nt, synthetic construct
  misc_feature 1..89: note = engineered ribonucleic acid scaffold (ERS) sequence
  source 1..89: mol_type = other RNA
actggcgctgggatctgattaccccgagagccttcaccagcgactatgtcgtagtgggtaaagctccctcttcggagggagcatcgggg

SEQ ID NO: 19691 - RNA, 89 nt, synthetic construct
  misc_feature 1..89: note = engineered ribonucleic acid scaffold (ERS) sequence
  source 1..89: mol_type = other RNA
actggcgctggtatctgattactccgagagccttcaccagcgactatgtcgtagtgggtaaagctccctcttcggagggagcatcggag

SEQ ID NO: 19692 - RNA, 89 nt, synthetic construct
  misc_feature 1..89: note = engineered ribonucleic acid scaffold (ERS) sequence
  source 1..89: mol_type = other RNA
actggcgcttccatctgattaccctgagagccttcaccagcgactatgtcgtagtgggtaaagctccctcttcggagggagcatcaggg

SEQ ID NO: 19693 - RNA, 89 nt, synthetic construct
  misc_feature 1..89: note = engineered ribonucleic acid scaffold (ERS) sequence
  source 1..89: mol_type = other RNA
actggcgcttggatctgattaccctgagagccttcaccagcgactatgtcgtagtgggtaaagctccctcttcggagggagcatcaggg

SEQ ID NO: 19694 - RNA, 89 nt, synthetic construct
  misc_feature 1..89: note = engineered ribonucleic acid scaffold (ERS) sequence
  source 1..89: mol_type = other RNA
actggcgcttgtatctgattactctgagagccttcaccagcgactatgtcgtagtgggtaaagctccctcttcggagggagcatcagag

SEQ ID NO: 19695 - RNA, 89 nt, synthetic construct
  misc_feature 1..89: note = engineered ribonucleic acid scaffold (ERS) sequence
  source 1..89: mol_type = other RNA
actggcgcttttatctgattactttgagagccttcaccagcgactatgtcgtagtgggtaaagctccctcttcggagggagcatcagag

SEQ ID NO: 19696 - RNA, 89 nt, synthetic construct
  misc_feature 1..89: note = engineered ribonucleic acid scaffold (ERS) sequence
  source 1..89: mol_type = other RNA
actggcgcttttatctgattactctgagagccttcaccagcgactatgtcgtagtgggtaaagctccctcttcggagggagcatcagag

SEQ ID NO: 19697 - RNA, 89 nt, synthetic construct
  misc_feature 1..89: note = engineered ribonucleic acid scaffold (ERS) sequence
  source 1..89: mol_type = other RNA
actggcgcttttatctgattactctgagagccttcaccagcgactatgtcgtagtgggtaaagctccctcttcggagggagcatcaaag

SEQ ID NO: 19698 - RNA, 89 nt, synthetic construct
  misc_feature 1..89: note = engineered ribonucleic acid scaffold (ERS) sequence
  source 1..89: mol_type = other RNA
actggcgcttctatctgattactctgagagccttcaccagcgactatgtcgtagtgggtaaagctccctcttcggagggagcctcagag

SEQ ID NO: 19699 - RNA, 89 nt, synthetic construct
  misc_feature 1..89: note = engineered ribonucleic acid scaffold (ERS) sequence
  source 1..89: mol_type = other RNA
actggcgcttctatctgattactctgagagccttcaccagcgactatgtcgtagtgggtaaagctccctcttcggagggagcgtcagag

SEQ ID NO: 19700 - RNA, 89 nt, synthetic construct
  misc_feature 1..89: note = engineered ribonucleic acid scaffold (ERS) sequence
  source 1..89: mol_type = other RNA
actggcgcttctatctgattactctgagagccttcaccagcgactatgtcgtagtgggtaaagctccctcttcggagggagcatcaaag

SEQ ID NO: 19701 - RNA, 89 nt, synthetic construct
  misc_feature 1..89: note = engineered ribonucleic acid scaffold (ERS) sequence
  source 1..89: mol_type = other RNA
actggggcttctatctgattactctcagacccatcaccagcgactatgtcgtagtgggtaaagctccctcttcggagggagcatcagac

SEQ ID NO: 19702 - RNA, 89 nt, synthetic construct
  misc_feature 1..89: note = engineered ribonucleic acid scaffold (ERS) sequence
  source 1..89: mol_type = other RNA
actggggcttctatctgattactttgagacccatcaccagcgactatgtcgtagtgggtaaagctccctcttcggagggagcatcagag

SEQ ID NO: 19703 - RNA, 89 nt, synthetic construct
  misc_feature 1..89: note = engineered ribonucleic acid scaffold (ERS) sequence
  source 1..89: mol_type = other RNA
actggggcttctatctgattactttgagacccatcaccagcgactatgtcgtagtgggtaaagctccctcttcggagggagcatcaaag

SEQ ID NO: 19704 - RNA, 89 nt, synthetic construct
  misc_feature 1..89: note = engineered ribonucleic acid scaffold (ERS) sequence
  source 1..89: mol_type = other RNA
actggggcttctatctgattagtctcagacccatcaccagcgactatgtcgtagtgggtaaagctccctcttcggagggagcatgagac

SEQ ID NO: 19705 - RNA, 89 nt, synthetic construct
  misc_feature 1..89: note = engineered ribonucleic acid scaffold (ERS) sequence
  source 1..89: mol_type = other RNA
actggggcttctatctgattagtctgagacccatcaccagcgactatgtcgtagtgggtaaagctccctcttcggagggagcatcagac

SEQ ID NO: 19706 - RNA, 89 nt, synthetic construct
  misc_feature 1..89: note = engineered ribonucleic acid scaffold (ERS) sequence
  source 1..89: mol_type = other RNA
actggggcttctatctgattactctcagacccatcaccagcgactatgtcgtagtgggtaaagctccctcttcggagggagcatgagag

SEQ ID NO: 19707 - RNA, 89 nt, synthetic construct
  misc_feature 1..89: note = engineered ribonucleic acid scaffold (ERS) sequence
  source 1..89: mol_type = other RNA
actggggctcccatctgattaccccgagacccatcaccagcgactatgtcgtagtgggtaaagctccctcttcggagggagcatcgggg

SEQ ID NO: 19708 - RNA, 89 nt, synthetic construct
  misc_feature 1..89: note = engineered ribonucleic acid scaffold (ERS) sequence
  source 1..89: mol_type = other RNA
actggggctcctatctgattactccgagacccatcaccagcgactatgtcgtagtgggtaaagctccctcttcggagggagcatcggag

SEQ ID NO: 19709 - RNA, 89 nt, synthetic construct
  misc_feature 1..89: note = engineered ribonucleic acid scaffold (ERS) sequence
  source 1..89: mol_type = other RNA
actggggctgggatctgattaccccgagacccatcaccagcgactatgtcgtagtgggtaaagctccctcttcggagggagcatcgggg

SEQ ID NO: 19710 - RNA, 89 nt, synthetic construct
  misc_feature 1..89: note = engineered ribonucleic acid scaffold (ERS) sequence
  source 1..89: mol_type = other RNA
actggggctggtatctgattactccgagacccatcaccagcgactatgtcgtagtgggtaaagctccctcttcggagggagcatcggag

SEQ ID NO: 19711 - RNA, 89 nt, synthetic construct
  misc_feature 1..89: note = engineered ribonucleic acid scaffold (ERS) sequence
  source 1..89: mol_type = other RNA
actggggcttccatctgattaccctgagacccatcaccagcgactatgtcgtagtgggtaaagctccctcttcggagggagcatcaggg

SEQ ID NO: 19712 - RNA, 89 nt, synthetic construct
  misc_feature 1..89: note = engineered ribonucleic acid scaffold (ERS) sequence
  source 1..89: mol_type = other RNA
actggggcttggatctgattaccctgagacccatcaccagcgactatgtcgtagtgggtaaagctccctcttcggagggagcatcaggg

SEQ ID NO: 19713 - RNA, 89 nt, synthetic construct
  misc_feature 1..89: note = engineered ribonucleic acid scaffold (ERS) sequence
  source 1..89: mol_type = other RNA
actggggcttgtatctgattactctgagacccatcaccagcgactatgtcgtagtgggtaaagctccctcttcggagggagcatcagag

SEQ ID NO: 19714 - RNA, 89 nt, synthetic construct
  misc_feature 1..89: note = engineered ribonucleic acid scaffold (ERS) sequence
  source 1..89: mol_type = other RNA
actggggcttttatctgattactttgagacccatcaccagcgactatgtcgtagtgggtaaagctccctcttcggagggagcatcagag

SEQ ID NO: 19715 - RNA, 89 nt, synthetic construct
  misc_feature 1..89: note = engineered ribonucleic acid scaffold (ERS) sequence
  source 1..89: mol_type = other RNA
actggggcttttatctgattactctgagacccatcaccagcgactatgtcgtagtgggtaaagctccctcttcggagggagcatcagag

SEQ ID NO: 19716 - RNA, 89 nt, synthetic construct
  misc_feature 1..89: note = engineered ribonucleic acid scaffold (ERS) sequence
  source 1..89: mol_type = other RNA
actggggcttttatctgattactctgagacccatcaccagcgactatgtcgtagtgggtaaagctccctcttcggagggagcatcaaag

SEQ ID NO: 19717 - RNA, 89 nt, synthetic construct
  misc_feature 1..89: note = engineered ribonucleic acid scaffold (ERS) sequence
  source 1..89: mol_type = other RNA
actggggcttctatctgattactctgagacccatcaccagcgactatgtcgtagtgggtaaagctccctcttcggagggagcctcagag

SEQ ID NO: 19718 - RNA, 89 nt, synthetic construct
  misc_feature 1..89: note = engineered ribonucleic acid scaffold (ERS) sequence
  source 1..89: mol_type = other RNA
actggggcttctatctgattactctgagacccatcaccagcgactatgtcgtagtgggtaaagctccctcttcggagggagcgtcagag

SEQ ID NO: 19719 - RNA, 89 nt, synthetic construct
  misc_feature 1..89: note = engineered ribonucleic acid scaffold (ERS) sequence
  source 1..89: mol_type = other RNA
actggggcttctatctgattactctgagacccatcaccagcgactatgtcgtagtgggtaaagctccctcttcggagggagcatcaaag

SEQ ID NO: 19720 - RNA, 89 nt, synthetic construct
  misc_feature 1..89: note = engineered ribonucleic acid scaffold (ERS) sequence
  source 1..89: mol_type = other RNA
actggtgcttctatctgattactctcagagccatcaccagcgactatgtcgtagtgggtaaagctccctcttcggagggagcatcagac

SEQ ID NO: 19721 - RNA, 89 nt, synthetic construct
  misc_feature 1..89: note = engineered ribonucleic acid scaffold (ERS) sequence
  source 1..89: mol_type = other RNA
actggtgcttctatctgattactttgagagccatcaccagcgactatgtcgtagtgggtaaagctccctcttcggagggagcatcagag

SEQ ID NO: 19722 - RNA, 89 nt, synthetic construct
  misc_feature 1..89: note = engineered ribonucleic acid scaffold (ERS) sequence
  source 1..89: mol_type = other RNA
actggtgcttctatctgattactttgagagccatcaccagcgactatgtcgtagtgggtaaagctccctcttcggagggagcatcaaag

SEQ ID NO: 19723 - RNA, 89 nt, synthetic construct
  misc_feature 1..89: note = engineered ribonucleic acid scaffold (ERS) sequence
  source 1..89: mol_type = other RNA
actggtgcttctatctgattagtctcagagccatcaccagcgactatgtcgtagtgggtaaagctccctcttcggagggagcatgagac

SEQ ID NO: 19724 - RNA, 89 nt, synthetic construct
  misc_feature 1..89: note = engineered ribonucleic acid scaffold (ERS) sequence
  source 1..89: mol_type = other RNA
actggtgcttctatctgattagtctgagagccatcaccagcgactatgtcgtagtgggtaaagctccctcttcggagggagcatcagac

SEQ ID NO: 19725 - RNA, 89 nt, synthetic construct
  misc_feature 1..89: note = engineered ribonucleic acid scaffold (ERS) sequence
  source 1..89: mol_type = other RNA
actggtgcttctatctgattactctcagagccatcaccagcgactatgtcgtagtgggtaaagctccctcttcggagggagcatgagag

SEQ ID NO: 19726 - RNA, 89 nt, synthetic construct
  misc_feature 1..89: note = engineered ribonucleic acid scaffold (ERS) sequence
  source 1..89: mol_type = other RNA
actggtgctcccatctgattaccccgagagccatcaccagcgactatgtcgtagtgggtaaagctccctcttcggagggagcatcgggg

SEQ ID NO: 19727 - RNA, 89 nt, synthetic construct
  misc_feature 1..89: note = engineered ribonucleic acid scaffold (ERS) sequence
  source 1..89: mol_type = other RNA
actggtgctcctatctgattactccgagagccatcaccagcgactatgtcgtagtgggtaaagctccctcttcggagggagcatcggag

SEQ ID NO: 19728 - RNA, 89 nt, synthetic construct
  misc_feature 1..89: note = engineered ribonucleic acid scaffold (ERS) sequence
  source 1..89: mol_type = other RNA
actggtgctgggatctgattaccccgagagccatcaccagcgactatgtcgtagtgggtaaagctccctcttcggagggagcatcgggg

SEQ ID NO: 19729 - RNA, 89 nt, synthetic construct
  misc_feature 1..89: note = engineered ribonucleic acid scaffold (ERS) sequence
  source 1..89: mol_type = other RNA
actggtgctggtatctgattactccgagagccatcaccagcgactatgtcgtagtgggtaaagctccctcttcggagggagcatcggag

SEQ ID NO: 19730 - RNA, 89 nt, synthetic construct
  misc_feature 1..89: note = engineered ribonucleic acid scaffold (ERS) sequence
  source 1..89: mol_type = other RNA
actggtgcttccatctgattaccctgagagccatcaccagcgactatgtcgtagtgggtaaagctccctcttcggagggagcatcaggg

SEQ ID NO: 19731 - RNA, 89 nt, synthetic construct
  misc_feature 1..89: note = engineered ribonucleic acid scaffold (ERS) sequence
  source 1..89: mol_type = other RNA
actggtgcttggatctgattaccctgagagccatcaccagcgactatgtcgtagtgggtaaagctccctcttcggagggagcatcaggg

SEQ ID NO: 19732 - RNA, 89 nt, synthetic construct
  misc_feature 1..89: note = engineered ribonucleic acid scaffold (ERS) sequence
  source 1..89: mol_type = other RNA
actggtgcttgtatctgattactctgagagccatcaccagcgactatgtcgtagtgggtaaagctccctcttcggagggagcatcagag

SEQ ID NO: 19733 - RNA, 89 nt, synthetic construct
  misc_feature 1..89: note = engineered ribonucleic acid scaffold (ERS) sequence
  source 1..89: mol_type = other RNA
actggtgcttttatctgattactttgagagccatcaccagcgactatgtcgtagtgggtaaagctccctcttcggagggagcatcagag

SEQ ID NO: 19734 - RNA, 89 nt, synthetic construct
  misc_feature 1..89: note = engineered ribonucleic acid scaffold (ERS) sequence
  source 1..89: mol_type = other RNA
actggtgcttttatctgattactctgagagccatcaccagcgactatgtcgtagtgggtaaagctccctcttcggagggagcatcagag

SEQ ID NO: 19735 - RNA, 89 nt, synthetic construct
  misc_feature 1..89: note = engineered ribonucleic acid scaffold (ERS) sequence
  source 1..89: mol_type = other RNA
actggtgcttttatctgattactctgagagccatcaccagcgactatgtcgtagtgggtaaagctccctcttcggagggagcatcaaag

SEQ ID NO: 19736 - RNA, 89 nt, synthetic construct
  misc_feature 1..89: note = engineered ribonucleic acid scaffold (ERS) sequence
  source 1..89: mol_type = other RNA
actggtgcttctatctgattactctgagagccatcaccagcgactatgtcgtagtgggtaaagctccctcttcggagggagcctcagag

SEQ ID NO: 19737 - RNA, 89 nt, synthetic construct
  misc_feature 1..89: note = engineered ribonucleic acid scaffold (ERS) sequence
  source 1..89: mol_type = other RNA
actggtgcttctatctgattactctgagagccatcaccagcgactatgtcgtagtgggtaaagctccctcttcggagggagcgtcagag

SEQ ID NO: 19738 - RNA, 89 nt, synthetic construct
  misc_feature 1..89: note = engineered ribonucleic acid scaffold (ERS) sequence
  source 1..89: mol_type = other RNA
actggtgcttctatctgattactctgagagccatcaccagcgactatgtcgtagtgggtaaagctccctcttcggagggagcatcaaag

SEQ ID NO: 19739 - RNA, 89 nt, synthetic construct
  misc_feature 1..89: note = engineered ribonucleic acid scaffold (ERS) sequence
  source 1..89: mol_type = other RNA
actgggccttctatctgattactctcaggcccatcaccagcgactatgtcgtagtgggtaaagctccctcttcggagggagcatcagac

SEQ ID NO: 19740 - RNA, 89 nt, synthetic construct
  misc_feature 1..89: note = engineered ribonucleic acid scaffold (ERS) sequence
  source 1..89: mol_type = other RNA
actgggccttctatctgattactttgaggcccatcaccagcgactatgtcgtagtgggtaaagctccctcttcggagggagcatcagag

SEQ ID NO: 19741 - RNA, 89 nt, synthetic construct
  misc_feature 1..89: note = engineered ribonucleic acid scaffold (ERS) sequence
  source 1..89: mol_type = other RNA
actgggccttctatctgattactttgaggcccatcaccagcgactatgtcgtagtgggtaaagctccctcttcggagggagcatcaaag

SEQ ID NO: 19742 - RNA, 89 nt, synthetic construct
  misc_feature 1..89: note = engineered ribonucleic acid scaffold (ERS) sequence
  source 1..89: mol_type = other RNA
actgggccttctatctgattagtctcaggcccatcaccagcgactatgtcgtagtgggtaaagctccctcttcggagggagcatgagac

SEQ ID NO: 19743 - RNA, 89 nt, synthetic construct
  misc_feature 1..89: note = engineered ribonucleic acid scaffold (ERS) sequence
  source 1..89: mol_type = other RNA
actgggccttctatctgattagtctgaggcccatcaccagcgactatgtcgtagtgggtaaagctccctcttcggagggagcatcagac

SEQ ID NO: 19744 - RNA, 89 nt, synthetic construct
  misc_feature 1..89: note = engineered ribonucleic acid scaffold (ERS) sequence
  source 1..89: mol_type = other RNA
actgggccttctatctgattactctcaggcccatcaccagcgactatgtcgtagtgggtaaagctccctcttcggagggagcatgagag

SEQ ID NO: 19745 - RNA, 89 nt, synthetic construct
  misc_feature 1..89: note = engineered ribonucleic acid scaffold (ERS) sequence
  source 1..89: mol_type = other RNA
actgggcctcccatctgattaccccgaggcccatcaccagcgactatgtcgtagtgggtaaagctccctcttcggagggagcatcgggg

SEQ ID NO: 19746 - RNA, 89 nt, synthetic construct
  misc_feature 1..89: note = engineered ribonucleic acid scaffold (ERS) sequence
  source 1..89: mol_type = other RNA
actgggcctcctatctgattactccgaggcccatcaccagcgactatgtcgtagtgggtaaagctccctcttcggagggagcatcggag

SEQ ID NO: 19747 - RNA, 89 nt, synthetic construct
  misc_feature 1..89: note = engineered ribonucleic acid scaffold (ERS) sequence
  source 1..89: mol_type = other RNA
actgggcctgggatctgattaccccgaggcccatcaccagcgactatgtcgtagtgggtaaagctccctcttcggagggagcatcgggg

SEQ ID NO: 19748 - RNA, 89 nt, synthetic construct
  misc_feature 1..89: note = engineered ribonucleic acid scaffold (ERS) sequence
  source 1..89: mol_type = other RNA
actgggcctggtatctgattactccgaggcccatcaccagcgactatgtcgtagtgggtaaagctccctcttcggagggagcatcggag

SEQ ID NO: 19749 - RNA, 89 nt, synthetic construct
  misc_feature 1..89: note = engineered ribonucleic acid scaffold (ERS) sequence
  source 1..89: mol_type = other RNA
actgggccttccatctgattaccctgaggcccatcaccagcgactatgtcgtagtgggtaaagctccctcttcggagggagcatcaggg

SEQ ID NO: 19750 - RNA, 89 nt, synthetic construct
  misc_feature 1..89: note = engineered ribonucleic acid scaffold (ERS) sequence
  source 1..89: mol_type = other RNA
actgggccttggatctgattaccctgaggcccatcaccagcgactatgtcgtagtgggtaaagctccctcttcggagggagcatcaggg

SEQ ID NO: 19751 - RNA, 89 nt, synthetic construct
  misc_feature 1..89: note = engineered ribonucleic acid scaffold (ERS) sequence
  source 1..89: mol_type = other RNA
actgggccttgtatctgattactctgaggcccatcaccagcgactatgtcgtagtgggtaaagctccctcttcggagggagcatcagag

SEQ ID NO: 19752 - RNA, 89 nt, synthetic construct
  misc_feature 1..89: note = engineered ribonucleic acid scaffold (ERS) sequence
  source 1..89: mol_type = other RNA
actgggccttttatctgattactttgaggcccatcaccagcgactatgtcgtagtgggtaaagctccctcttcggagggagcatcagag

SEQ ID NO: 19753 - RNA, 89 nt, synthetic construct
  misc_feature 1..89: note = engineered ribonucleic acid scaffold (ERS) sequence
  source 1..89: mol_type = other RNA
actgggccttttatctgattactctgaggcccatcaccagcgactatgtcgtagtgggtaaagctccctcttcggagggagcatcagag

SEQ ID NO: 19754 - RNA, 89 nt, synthetic construct
  misc_feature 1..89: note = engineered ribonucleic acid scaffold (ERS) sequence
  source 1..89: mol_type = other RNA
actgggccttttatctgattactctgaggcccatcaccagcgactatgtcgtagtgggtaaagctccctcttcggagggagcatcaaag

SEQ ID NO: 19755 - RNA, 89 nt, synthetic construct
  misc_feature 1..89: note = engineered ribonucleic acid scaffold (ERS) sequence
  source 1..89: mol_type = other RNA
actgggccttctatctgattactctgaggcccatcaccagcgactatgtcgtagtgggtaaagctccctcttcggagggagcctcagag

SEQ ID NO: 19756 - RNA, 89 nt, synthetic construct
  misc_feature 1..89: note = engineered ribonucleic acid scaffold (ERS) sequence
  source 1..89: mol_type = other RNA
actgggccttctatctgattactctgaggcccatcaccagcgactatgtcgtagtgggtaaagctccctcttcggagggagcgtcagag

SEQ ID NO: 19757 - RNA, 89 nt, synthetic construct
  misc_feature 1..89: note = engineered ribonucleic acid scaffold (ERS) sequence
  source 1..89: mol_type = other RNA
actgggccttctatctgattactctgaggcccatcaccagcgactatgtcgtagtgggtaaagctccctcttcggagggagcatcaaag

SEQ ID NO: 19758 - RNA, 89 nt, synthetic construct
  misc_feature 1..89: note = engineered ribonucleic acid scaffold (ERS) sequence
  source 1..89: mol_type = other RNA
actggcccttctatctgattactctcagagccatcaccagcgactatgtcgtagtgggtaaagctccctcttcggagggagcatcagac

SEQ ID NO: 19759 - RNA, 89 nt, synthetic construct
  misc_feature 1..89: note = engineered ribonucleic acid scaffold (ERS) sequence
  source 1..89: mol_type = other RNA
actggcccttctatctgattactttgagagccatcaccagcgactatgtcgtagtgggtaaagctccctcttcggagggagcatcagag

SEQ ID NO: 19760 - RNA, 89 nt, synthetic construct
  misc_feature 1..89: note = engineered ribonucleic acid scaffold (ERS) sequence
  source 1..89: mol_type = other RNA
actggcccttctatctgattactttgagagccatcaccagcgactatgtcgtagtgggtaaagctccctcttcggagggagcatcaaag

SEQ ID NO: 19761 - RNA, 89 nt, synthetic construct
  misc_feature 1..89: note = engineered ribonucleic acid scaffold (ERS) sequence
  source 1..89: mol_type = other RNA
actggcccttctatctgattagtctcagagccatcaccagcgactatgtcgtagtgggtaaagctccctcttcggagggagcatgagac

SEQ ID NO: 19762 - RNA, 89 nt, synthetic construct
  misc_feature 1..89: note = engineered ribonucleic acid scaffold (ERS) sequence
  source 1..89: mol_type = other RNA
actggcccttctatctgattagtctgagagccatcaccagcgactatgtcgtagtgggtaaagctccctcttcggagggagcatcagac

SEQ ID NO: 19763 - RNA, 89 nt, synthetic construct
  misc_feature 1..89: note = engineered ribonucleic acid scaffold (ERS) sequence
  source 1..89: mol_type = other RNA
actggcccttctatctgattactctcagagccatcaccagcgactatgtcgtagtgggtaaagctccctcttcggagggagcatgagag

SEQ ID NO: 19764 - RNA, 90 nt, synthetic construct
  misc_feature 1..90: note = engineered ribonucleic acid scaffold (ERS) sequence
  source 1..90: mol_type = other RNA
actggcccttctatctgattactctcaggagccatcaccagcgactatgtcgtagtgggtaaagctccctcttcggagggagcatcagac

SEQ ID NO: 19765 - RNA, 90 nt, synthetic construct
  misc_feature 1..90: note = engineered ribonucleic acid scaffold (ERS) sequence
  source 1..90: mol_type = other RNA
actggcccttctatctgattactttgaggagccatcaccagcgactatgtcgtagtgggtaaagctccctcttcggagggagcatcagag

SEQ ID NO: 19766 - RNA, 90 nt, synthetic construct
  misc_feature 1..90: note = engineered ribonucleic acid scaffold (ERS) sequence
  source 1..90: mol_type = other RNA
actggcccttctatctgattactttgaggagccatcaccagcgactatgtcgtagtgggtaaagctccctcttcggagggagcatcaaag

SEQ ID NO: 19767 - RNA, 90 nt, synthetic construct
  misc_feature 1..90: note = engineered ribonucleic acid scaffold (ERS) sequence
  source 1..90: mol_type = other RNA
actggcccttctatctgattagtctcaggagccatcaccagcgactatgtcgtagtgggtaaagctccctcttcggagggagcatgagac

SEQ ID NO: 19768 - RNA, 90 nt, synthetic construct
  misc_feature 1..90: note = engineered ribonucleic acid scaffold (ERS) sequence
  source 1..90: mol_type = other RNA
actggcccttctatctgattagtctgaggagccatcaccagcgactatgtcgtagtgggtaaagctccctcttcggagggagcatcagac

SEQ ID NO: 19769 - RNA, 90 nt, synthetic construct
  misc_feature 1..90: note = engineered ribonucleic acid scaffold (ERS) sequence
  source 1..90: mol_type = other RNA
actggcccttctatctgattactctcaggagccatcaccagcgactatgtcgtagtgggtaaagctccctcttcggagggagcatgagag

SEQ ID NO: 19770 - RNA, 90 nt, synthetic construct
  misc_feature 1..90: note = engineered ribonucleic acid scaffold (ERS) sequence
  source 1..90: mol_type = other RNA
actggccctcccatctgattaccccgaggagccatcaccagcgactatgtcgtagtgggtaaagctccctcttcggagggagcatcgggg

SEQ ID NO: 19771 - RNA, 90 nt, synthetic construct
  misc_feature 1..90: note = engineered ribonucleic acid scaffold (ERS) sequence
  source 1..90: mol_type = other RNA
actggccctcctatctgattactccgaggagccatcaccagcgactatgtcgtagtgggtaaagctccctcttcggagggagcatcggag

SEQ ID NO: 19772 - RNA, 90 nt, synthetic construct
  misc_feature 1..90: note = engineered ribonucleic acid scaffold (ERS) sequence
  source 1..90: mol_type = other RNA
actggccctgggatctgattaccccgaggagccatcaccagcgactatgtcgtagtgggtaaagctccctcttcggagggagcatcgggg

SEQ ID NO: 19773 - RNA, 90 nt, synthetic construct
  misc_feature 1..90: note = engineered ribonucleic acid scaffold (ERS) sequence
  source 1..90: mol_type = other RNA
actggccctggtatctgattactccgaggagccatcaccagcgactatgtcgtagtgggtaaagctccctcttcggagggagcatcggag

SEQ ID NO: 19774 - RNA, 90 nt, synthetic construct
  misc_feature 1..90: note = engineered ribonucleic acid scaffold (ERS) sequence
  source 1..90: mol_type = other RNA
actggcccttccatctgattaccctgaggagccatcaccagcgactatgtcgtagtgggtaaagctccctcttcggagggagcatcaggg

SEQ ID NO: 19775 - RNA, 90 nt, synthetic construct
  misc_feature 1..90: note = engineered ribonucleic acid scaffold (ERS) sequence
  source 1..90: mol_type = other RNA
actggcccttggatctgattaccctgaggagccatcaccagcgactatgtcgtagtgggtaaagctccctcttcggagggagcatcaggg

SEQ ID NO: 19776 - RNA, 90 nt, synthetic construct
  misc_feature 1..90: note = engineered ribonucleic acid scaffold (ERS) sequence
  source 1..90: mol_type = other RNA
actggcccttgtatctgattactctgaggagccatcaccagcgactatgtcgtagtgggtaaagctccctcttcggagggagcatcagag

SEQ ID NO: 19777 - RNA, 90 nt, synthetic construct
  misc_feature 1..90: note = engineered ribonucleic acid scaffold (ERS) sequence
  source 1..90: mol_type = other RNA
actggcccttttatctgattactttgaggagccatcaccagcgactatgtcgtagtgggtaaagctccctcttcggagggagcatcagag

SEQ ID NO: 19778 - RNA, 90 nt, synthetic construct
  misc_feature 1..90: note = engineered ribonucleic acid scaffold (ERS) sequence
  source 1..90: mol_type = other RNA
actggcccttttatctgattactctgaggagccatcaccagcgactatgtcgtagtgggtaaagctccctcttcggagggagcatcagag

SEQ ID NO: 19779 - RNA, 90 nt, synthetic construct
  misc_feature 1..90: note = engineered ribonucleic acid scaffold (ERS) sequence
  source 1..90: mol_type = other RNA
actggcccttttatctgattactctgaggagccatcaccagcgactatgtcgtagtgggtaaagctccctcttcggagggagcatcaaag

SEQ ID NO: 19780 - RNA, 90 nt, synthetic construct
  misc_feature 1..90: note = engineered ribonucleic acid scaffold (ERS) sequence
  source 1..90: mol_type = other RNA
actggcccttctatctgattactctgaggagccatcaccagcgactatgtcgtagtgggtaaagctccctcttcggagggagcctcagag

SEQ ID NO: 19781 - RNA, 90 nt, synthetic construct
  misc_feature 1..90: note = engineered ribonucleic acid scaffold (ERS) sequence
  source 1..90: mol_type = other RNA
actggcccttctatctgattactctgaggagccatcaccagcgactatgtcgtagtgggtaaagctccctcttcggagggagcgtcagag

SEQ ID NO: 19782 - RNA, 90 nt, synthetic construct
  misc_feature 1..90: note = engineered ribonucleic acid scaffold (ERS) sequence
  source 1..90: mol_type = other RNA
actggcccttctatctgattactctgaggagccatcaccagcgactatgtcgtagtgggtaaagctccctcttcggagggagcatcaaag

SEQ ID NO: 19783 - RNA, 89 nt, synthetic construct
  misc_feature 1..89: note = engineered ribonucleic acid scaffold (ERS) sequence
  source 1..89: mol_type = other RNA
actggcccttctatctgattactctcagggccatcaccagcgactatgtcgtagtgggtaaagctccctcttcggagggagcatcagac

SEQ ID NO: 19784 - RNA, 89 nt, synthetic construct
  misc_feature 1..89: note = engineered ribonucleic acid scaffold (ERS) sequence
  source 1..89: mol_type = other RNA
actggcccttctatctgattactttgagggccatcaccagcgactatgtcgtagtgggtaaagctccctcttcggagggagcatcagag

SEQ ID NO: 19785 - RNA, 89 nt, synthetic construct
  misc_feature 1..89: note = engineered ribonucleic acid scaffold (ERS) sequence
  source 1..89: mol_type = other RNA
actggcccttctatctgattactttgagggccatcaccagcgactatgtcgtagtgggtaaagctccctcttcggagggagcatcaaag

SEQ ID NO: 19786 - RNA, 89 nt, synthetic construct
  misc_feature 1..89: note = engineered ribonucleic acid scaffold (ERS) sequence
  source 1..89: mol_type = other RNA
actggcccttctatctgattagtctcagggccatcaccagcgactatgtcgtagtgggtaaagctccctcttcggagggagcatgagac

SEQ ID NO: 19787 - RNA, 89 nt, synthetic construct
  misc_feature 1..89: note = engineered ribonucleic acid scaffold (ERS) sequence
  source 1..89: mol_type = other RNA
actggcccttctatctgattagtctgagggccatcaccagcgactatgtcgtagtgggtaaagctccctcttcggagggagcatcagac

SEQ ID NO: 19788 - RNA, 89 nt, synthetic construct
  misc_feature 1..89: note = engineered ribonucleic acid scaffold (ERS) sequence
  source 1..89: mol_type = other RNA
actggcccttctatctgattactctcagggccatcaccagcgactatgtcgtagtgggtaaagctccctcttcggagggagcatgagag

SEQ ID NO: 19789 - RNA, 89 nt, synthetic construct
  misc_feature 1..89: note = engineered ribonucleic acid scaffold (ERS) sequence
  source 1..89: mol_type = other RNA
actggccctcccatctgattaccccgagggccatcaccagcgactatgtcgtagtgggtaaagctccctcttcggagggagcatcgggg

SEQ ID NO: 19790 - RNA, 89 nt, synthetic construct
  misc_feature 1..89: note = engineered ribonucleic acid scaffold (ERS) sequence
  source 1..89: mol_type = other RNA
actggccctcctatctgattactccgagggccatcaccagcgactatgtcgtagtgggtaaagctccctcttcggagggagcatcggag

SEQ ID NO: 19791 - RNA, 89 nt, synthetic construct
  misc_feature 1..89: note = engineered ribonucleic acid scaffold (ERS) sequence
  source 1..89: mol_type = other RNA
actggccctgggatctgattaccccgagggccatcaccagcgactatgtcgtagtgggtaaagctccctcttcggagggagcatcgggg

SEQ ID NO: 19792 - RNA, 89 nt, synthetic construct
  misc_feature 1..89: note = engineered ribonucleic acid scaffold (ERS) sequence
  source 1..89: mol_type = other RNA
actggccctggtatctgattactccgagggccatcaccagcgactatgtcgtagtgggtaaagctccctcttcggagggagcatcggag

SEQ ID NO: 19793 - RNA, 89 nt, synthetic construct
  misc_feature 1..89: note = engineered ribonucleic acid scaffold (ERS) sequence
  source 1..89: mol_type = other RNA
actggcccttccatctgattaccctgagggccatcaccagcgactatgtcgtagtgggtaaagctccctcttcggagggagcatcaggg

SEQ ID NO: 19794 - RNA, 89 nt, synthetic construct
  misc_feature 1..89: note = engineered ribonucleic acid scaffold (ERS) sequence
  source 1..89: mol_type = other RNA
actggcccttggatctgattaccctgagggccatcaccagcgactatgtcgtagtgggtaaagctccctcttcggagggagcatcaggg

SEQ ID NO: 19795 - RNA, 89 nt, synthetic construct
  misc_feature 1..89: note = engineered ribonucleic acid scaffold (ERS) sequence
  source 1..89: mol_type = other RNA
actggcccttgtatctgattactctgagggccatcaccagcgactatgtcgtagtgggtaaagctccctcttcggagggagcatcagag

SEQ ID NO: 19796 - RNA, 89 nt, synthetic construct
  misc_feature 1..89: note = engineered ribonucleic acid scaffold (ERS) sequence
  source 1..89: mol_type = other RNA
actggcccttttatctgattactttgagggccatcaccagcgactatgtcgtagtgggtaaagctccctcttcggagggagcatcagag

SEQ ID NO: 19797 - RNA, 89 nt, synthetic construct
  misc_feature 1..89: note = engineered ribonucleic acid scaffold (ERS) sequence
  source 1..89: mol_type = other RNA
actggcccttttatctgattactctgagggccatcaccagcgactatgtcgtagtgggtaaagctccctcttcggagggagcatcagag

SEQ ID NO: 19798 - RNA, 89 nt, synthetic construct
  misc_feature 1..89: note = engineered ribonucleic acid scaffold (ERS) sequence
  source 1..89: mol_type = other RNA
actggcccttttatctgattactctgagggccatcaccagcgactatgtcgtagtgggtaaagctccctcttcggagggagcatcaaag

SEQ ID NO: 19799 - RNA, 89 nt, synthetic construct
  misc_feature 1..89: note = engineered ribonucleic acid scaffold (ERS) sequence
  source 1..89: mol_type = other RNA
actggcccttctatctgattactctgagggccatcaccagcgactatgtcgtagtgggtaaagctccctcttcggagggagcctcagag

SEQ ID NO: 19800 - RNA, 89 nt, synthetic construct
  misc_feature 1..89: note = engineered ribonucleic acid scaffold (ERS) sequence
  source 1..89: mol_type = other RNA
actggcccttctatctgattactctgagggccatcaccagcgactatgtcgtagtgggtaaagctccctcttcggagggagcgtcagag

SEQ ID NO: 19801 - RNA, 89 nt, synthetic construct
  misc_feature 1..89: note = engineered ribonucleic acid scaffold (ERS) sequence
  source 1..89: mol_type = other RNA
actggcccttctatctgattactctgagggccatcaccagcgactatgtcgtagtgggtaaagctccctcttcggagggagcatcaaag

SEQ ID NO: 19802 - RNA, 89 nt, synthetic construct
  misc_feature 1..89: note = engineered ribonucleic acid scaffold (ERS) sequence
  source 1..89: mol_type = other RNA
actggcccttctatctgattactctcagtgccatcaccagcgactatgtcgtagtgggtaaagctccctcttcggagggagcatcagac

SEQ ID NO: 19803 - RNA, 89 nt, synthetic construct
  misc_feature 1..89: note = engineered ribonucleic acid scaffold (ERS) sequence
  source 1..89: mol_type = other RNA
actggcccttctatctgattactttgagtgccatcaccagcgactatgtcgtagtgggtaaagctccctcttcggagggagcatcagag

SEQ ID NO: 19804 - RNA, 89 nt, synthetic construct
  misc_feature 1..89: note = engineered ribonucleic acid scaffold (ERS) sequence
  source 1..89: mol_type = other RNA
actggcccttctatctgattactttgagtgccatcaccagcgactatgtcgtagtgggtaaagctccctcttcggagggagcatcaaag

SEQ ID NO: 19805 - RNA, 89 nt, synthetic construct
  misc_feature 1..89: note = engineered ribonucleic acid scaffold (ERS) sequence
  source 1..89: mol_type = other RNA
actggcccttctatctgattagtctcagtgccatcaccagcgactatgtcgtagtgggtaaagctccctcttcggagggagcatgagac

SEQ ID NO: 19806 - RNA, 89 nt, synthetic construct
  misc_feature 1..89: note = engineered ribonucleic acid scaffold (ERS) sequence
  source 1..89: mol_type = other RNA
actggcccttctatctgattagtctgagtgccatcaccagcgactatgtcgtagtgggtaaagctccctcttcggagggagcatcagac

SEQ ID NO: 19807 - RNA, 89 nt, synthetic construct
  misc_feature 1..89: note = engineered ribonucleic acid scaffold (ERS) sequence
  source 1..89: mol_type = other RNA
actggcccttctatctgattactctcagtgccatcaccagcgactatgtcgtagtgggtaaagctccctcttcggagggagcatgagag

SEQ ID NO: 19808 - RNA, 89 nt, synthetic construct
  misc_feature 1..89: note = engineered ribonucleic acid scaffold (ERS) sequence
  source 1..89: mol_type = other RNA
actggccctcccatctgattaccccgagtgccatcaccagcgactatgtcgtagtgggtaaagctccctcttcggagggagcatcgggg

SEQ ID NO: 19809 - RNA, 89 nt, synthetic construct
  misc_feature 1..89: note = engineered ribonucleic acid scaffold (ERS) sequence
  source 1..89: mol_type = other RNA
actggccctcctatctgattactccgagtgccatcaccagcgactatgtcgtagtgggtaaagctccctcttcggagggagcatcggag

SEQ ID NO: 19810 - RNA, 89 nt, synthetic construct
  misc_feature 1..89: note = engineered ribonucleic acid scaffold (ERS) sequence
  source 1..89: mol_type = other RNA
actggccctgggatctgattaccccgagtgccatcaccagcgactatgtcgtagtgggtaaagctccctcttcggagggagcatcgggg

SEQ ID NO: 19811 - RNA, 89 nt, synthetic construct
  misc_feature 1..89: note = engineered ribonucleic acid scaffold (ERS) sequence
  source 1..89: mol_type = other RNA
actggccctggtatctgattactccgagtgccatcaccagcgactatgtcgtagtgggtaaagctccctcttcggagggagcatcggag

SEQ ID NO: 19812 - RNA, 89 nt, synthetic construct
  misc_feature 1..89: note = engineered ribonucleic acid scaffold (ERS) sequence
  source 1..89: mol_type = other RNA
actggcccttccatctgattaccctgagtgccatcaccagcgactatgtcgtagtgggtaaagctccctcttcggagggagcatcaggg

SEQ ID NO: 19813 - RNA, 89 nt, synthetic construct
  misc_feature 1..89: note = engineered ribonucleic acid scaffold (ERS) sequence
  source 1..89: mol_type = other RNA
actggcccttggatctgattaccctgagtgccatcaccagcgactatgtcgtagtgggtaaagctccctcttcggagggagcatcaggg

SEQ ID NO: 19814 - RNA, 89 nt, synthetic construct
  misc_feature 1..89: note = engineered ribonucleic acid scaffold (ERS) sequence
  source 1..89: mol_type = other RNA
actggcccttgtatctgattactctgagtgccatcaccagcgactatgtcgtagtgggtaaagctccctcttcggagggagcatcagag

SEQ ID NO: 19815 - RNA, 89 nt, synthetic construct
  misc_feature 1..89: note = engineered ribonucleic acid scaffold (ERS) sequence
  source 1..89: mol_type = other RNA
actggcccttttatctgattactttgagtgccatcaccagcgactatgtcgtagtgggtaaagctccctcttcggagggagcatcagag

SEQ ID NO: 19816 - RNA, 89 nt, synthetic construct
  misc_feature 1..89: note = engineered ribonucleic acid scaffold (ERS) sequence
  source 1..89: mol_type = other RNA
actggcccttttatctgattactctgagtgccatcaccagcgactatgtcgtagtgggtaaagctccctcttcggagggagcatcagag

SEQ ID NO: 19817 - RNA, 89 nt, synthetic construct
  misc_feature 1..89: note = engineered ribonucleic acid scaffold (ERS) sequence
  source 1..89: mol_type = other RNA
actggcccttttatctgattactctgagtgccatcaccagcgactatgtcgtagtgggtaaagctccctcttcggagggagcatcaaag

SEQ ID NO: 19818 - RNA, 89 nt, synthetic construct
  misc_feature 1..89: note = engineered ribonucleic acid scaffold (ERS) sequence
  source 1..89: mol_type = other RNA
actggcccttctatctgattactctgagtgccatcaccagcgactatgtcgtagtgggtaaagctccctcttcggagggagcctcagag

SEQ ID NO: 19819 - RNA, 89 nt, synthetic construct
  misc_feature 1..89: note = engineered ribonucleic acid scaffold (ERS) sequence
  source 1..89: mol_type = other RNA
actggcccttctatctgattactctgagtgccatcaccagcgactatgtcgtagtgggtaaagctccctcttcggagggagcgtcagag

SEQ ID NO: 19820 - RNA, 89 nt, synthetic construct
  misc_feature 1..89: note = engineered ribonucleic acid scaffold (ERS) sequence
  source 1..89: mol_type = other RNA
actggcccttctatctgattactctgagtgccatcaccagcgactatgtcgtagtgggtaaagctccctcttcggagggagcatcaaag

SEQ ID NO: 19821 - RNA, 89 nt, synthetic construct
  misc_feature 1..89: note = engineered ribonucleic acid scaffold (ERS) sequence
  source 1..89: mol_type = other RNA
actggccctcccatctgattaccccgagagccatcaccagcgactatgtcgtagtgggtaaagctccctcttcggagggagcatcgggg

SEQ ID NO: 19822 - RNA, 89 nt, synthetic construct
  misc_feature 1..89: note = engineered ribonucleic acid scaffold (ERS) sequence
  source 1..89: mol_type = other RNA
actggccctcctatctgattactccgagagccatcaccagcgactatgtcgtagtgggtaaagctccctcttcggagggagcatcggag

SEQ ID NO: 19823 - RNA, 89 nt, synthetic construct
  misc_feature 1..89: note = engineered ribonucleic acid scaffold (ERS) sequence
  source 1..89: mol_type = other RNA
actggccctgggatctgattaccccgagagccatcaccagcgactatgtcgtagtgggtaaagctccctcttcggagggagcatcgggg

SEQ ID NO: 19824 - RNA, 89 nt, synthetic construct
  misc_feature 1..89: note = engineered ribonucleic acid scaffold (ERS) sequence
  source 1..89: mol_type = other RNA
actggccctggtatctgattactccgagagccatcaccagcgactatgtcgtagtgggtaaagctccctcttcggagggagcatcggag

SEQ ID NO: 19825 - RNA, 89 nt, synthetic construct
  misc_feature 1..89: note = engineered ribonucleic acid scaffold (ERS) sequence
  source 1..89: mol_type = other RNA
actggcccttccatctgattaccctgagagccatcaccagcgactatgtcgtagtgggtaaagctccctcttcggagggagcatcaggg

SEQ ID NO: 19826 - RNA, 89 nt, synthetic construct
  misc_feature 1..89: note = engineered ribonucleic acid scaffold (ERS) sequence
  source 1..89: mol_type = other RNA
actggcccttggatctgattaccctgagagccatcaccagcgactatgtcgtagtgggtaaagctccctcttcggagggagcatcaggg

SEQ ID NO: 19827 - RNA, 89 nt, synthetic construct
  misc_feature 1..89: note = engineered ribonucleic acid scaffold (ERS) sequence
  source 1..89: mol_type = other RNA
actggcccttgtatctgattactctgagagccatcaccagcgactatgtcgtagtgggtaaagctccctcttcggagggagcatcagag

SEQ ID NO: 19828 - RNA, 89 nt, synthetic construct
  misc_feature 1..89: note = engineered ribonucleic acid scaffold (ERS) sequence
  source 1..89: mol_type = other RNA
actggcccttttatctgattactttgagagccatcaccagcgactatgtcgtagtgggtaaagctccctcttcggagggagcatcagag

SEQ ID NO: 19829 - RNA, 89 nt, synthetic construct
  misc_feature 1..89: note = engineered ribonucleic acid scaffold (ERS) sequence
  source 1..89: mol_type = other RNA
actggcccttttatctgattactctgagagccatcaccagcgactatgtcgtagtgggtaaagctccctcttcggagggagcatcagag

SEQ ID NO: 19830 - RNA, 89 nt, synthetic construct
  misc_feature 1..89: note = engineered ribonucleic acid scaffold (ERS) sequence
  source 1..89: mol_type = other RNA
actggcccttttatctgattactctgagagccatcaccagcgactatgtcgtagtgggtaaagctccctcttcggagggagcatcaaag

SEQ ID NO: 19831 - RNA, 89 nt, synthetic construct
  misc_feature 1..89: note = engineered ribonucleic acid scaffold (ERS) sequence
  source 1..89: mol_type = other RNA
actggcccttctatctgattactctgagagccatcaccagcgactatgtcgtagtgggtaaagctccctcttcggagggagcctcagag

SEQ ID NO: 19832 - RNA, 89 nt, synthetic construct
  misc_feature 1..89: note = engineered ribonucleic acid scaffold (ERS) sequence
  source 1..89: mol_type = other RNA
actggcccttctatctgattactctgagagccatcaccagcgactatgtcgtagtgggtaaagctccctcttcggagggagcgtcagag

SEQ ID NO: 19833 - RNA, 89 nt, synthetic construct
  misc_feature 1..89: note = engineered ribonucleic acid scaffold (ERS) sequence
  source 1..89: mol_type = other RNA
actggcccttctatctgattactctgagagccatcaccagcgactatgtcgtagtgggtaaagctccctcttcggagggagcatcaaag

SEQ ID NO: 19834 - RNA, 89 nt, synthetic construct
  misc_feature 1..89: note = engineered ribonucleic acid scaffold (ERS) sequence
  source 1..89: mol_type = other RNA
actggcgcttctatctgattactctcagagccatcaccagcgactatgtcgtagtgggtaaagctccctcttcggagggagcatcagac

SEQ ID NO: 19835 - RNA, 89 nt, synthetic construct
  misc_feature 1..89: note = engineered ribonucleic acid scaffold (ERS) sequence
  source 1..89: mol_type = other RNA
actggcgcttctatctgattactttgagagccatcaccagcgactatgtcgtagtgggtaaagctccctcttcggagggagcatcagag

SEQ ID NO: 19836 - RNA, 89 nt, synthetic construct
  misc_feature 1..89: note = engineered ribonucleic acid scaffold (ERS) sequence
  source 1..89: mol_type = other RNA
actggcgcttctatctgattactttgagagccatcaccagcgactatgtcgtagtgggtaaagctccctcttcggagggagcatcaaag

SEQ ID NO: 19837 - RNA, 89 nt, synthetic construct
  misc_feature 1..89: note = engineered ribonucleic acid scaffold (ERS) sequence
  source 1..89: mol_type = other RNA
actggcgcttctatctgattagtctcagagccatcaccagcgactatgtcgtagtgggtaaagctccctcttcggagggagcatgagac

SEQ ID NO: 19838 - RNA, 89 nt, synthetic construct
  misc_feature 1..89: note = engineered ribonucleic acid scaffold (ERS) sequence
  source 1..89: mol_type = other RNA
actggcgcttctatctgattagtctgagagccatcaccagcgactatgtcgtagtgggtaaagctccctcttcggagggagcatcagac

SEQ ID NO: 19839 - RNA, 89 nt, synthetic construct
  misc_feature 1..89: note = engineered ribonucleic acid scaffold (ERS) sequence
  source 1..89: mol_type = other RNA
actggcgcttctatctgattactctcagagccatcaccagcgactatgtcgtagtgggtaaagctccctcttcggagggagcatgagag

SEQ ID NO: 19840 - RNA, 90 nt, synthetic construct
  misc_feature 1..90: note = engineered ribonucleic acid scaffold (ERS) sequence
  source 1..90: mol_type = other RNA
actggcgcttctatctgattactctcagcagccatcaccagcgactatgtcgtagtgggtaaagctccctcttcggagggagcatcagac

SEQ ID NO: 19841 - RNA, 90 nt, synthetic construct
  misc_feature 1..90: note = engineered ribonucleic acid scaffold (ERS) sequence
  source 1..90: mol_type = other RNA
actggcgcttctatctgattactttgagcagccatcaccagcgactatgtcgtagtgggtaaagctccctcttcggagggagcatcagag

SEQ ID NO: 19842 - RNA, 90 nt, synthetic construct
  misc_feature 1..90: note = engineered ribonucleic acid scaffold (ERS) sequence
  source 1..90: mol_type = other RNA
actggcgcttctatctgattactttgagcagccatcaccagcgactatgtcgtagtgggtaaagctccctcttcggagggagcatcaaag

SEQ ID NO: 19843 - RNA, 90 nt, synthetic construct
  misc_feature 1..90: note = engineered ribonucleic acid scaffold (ERS) sequence
  source 1..90: mol_type = other RNA
actggcgcttctatctgattagtctcagcagccatcaccagcgactatgtcgtagtgggtaaagctccctcttcggagggagcatgagac

SEQ ID NO: 19844 - RNA, 90 nt, synthetic construct
  misc_feature 1..90: note = engineered ribonucleic acid scaffold (ERS) sequence
  source 1..90: mol_type = other RNA
actggcgcttctatctgattagtctgagcagccatcaccagcgactatgtcgtagtgggtaaagctccctcttcggagggagcatcagac

SEQ ID NO: 19845 - RNA, 90 nt, synthetic construct
  misc_feature 1..90: note = engineered ribonucleic acid scaffold (ERS) sequence
  source 1..90: mol_type = other RNA
actggcgcttctatctgattactctcagcagccatcaccagcgactatgtcgtagtgggtaaagctccctcttcggagggagcatgagag

SEQ ID NO: 19846 - RNA, 90 nt, synthetic construct
  misc_feature 1..90: note = engineered ribonucleic acid scaffold (ERS) sequence
  source 1..90: mol_type = other RNA
actggcgctcccatctgattaccccgagcagccatcaccagcgactatgtcgtagtgggtaaagctccctcttcggagggagcatcgggg

SEQ ID NO: 19847 - RNA, 90 nt, synthetic construct
  misc_feature 1..90: note = engineered ribonucleic acid scaffold (ERS) sequence
  source 1..90: mol_type = other RNA
actggcgctcctatctgattactccgagcagccatcaccagcgactatgtcgtagtgggtaaagctccctcttcggagggagcatcggag

SEQ ID NO: 19848 - RNA, 90 nt, synthetic construct
  misc_feature 1..90: note = engineered ribonucleic acid scaffold (ERS) sequence
  source 1..90: mol_type = other RNA
actggcgctgggatctgattaccccgagcagccatcaccagcgactatgtcgtagtgggtaaagctccctcttcggagggagcatcgggg

SEQ ID NO: 19849 - RNA, 90 nt, synthetic construct
  misc_feature 1..90: note = engineered ribonucleic acid scaffold (ERS) sequence
  source 1..90: mol_type = other RNA
actggcgctggtatctgattactccgagcagccatcaccagcgactatgtcgtagtgggtaaagctccctcttcggagggagcatcggag

SEQ ID NO: 19850 - RNA, 90 nt, synthetic construct
  misc_feature 1..90: note = engineered ribonucleic acid scaffold (ERS) sequence
  source 1..90: mol_type = other RNA
actggcgcttccatctgattaccctgagcagccatcaccagcgactatgtcgtagtgggtaaagctccctcttcggagggagcatcaggg

SEQ ID NO: 19851 - RNA, 90 nt, synthetic construct
  misc_feature 1..90: note = engineered ribonucleic acid scaffold (ERS) sequence
  source 1..90: mol_type = other RNA
actggcgcttggatctgattaccctgagcagccatcaccagcgactatgtcgtagtgggtaaagctccctcttcggagggagcatcaggg

SEQ ID NO: 19852 - RNA, 90 nt, synthetic construct
  misc_feature 1..90: note = engineered ribonucleic acid scaffold (ERS) sequence
  source 1..90: mol_type = other RNA
actggcgcttgtatctgattactctgagcagccatcaccagcgactatgtcgtagtgggtaaagctccctcttcggagggagcatcagag

SEQ ID NO: 19853 - RNA, 90 nt, synthetic construct
  misc_feature 1..90: note = engineered ribonucleic acid scaffold (ERS) sequence
  source 1..90: mol_type = other RNA
actggcgcttttatctgattactttgagcagccatcaccagcgactatgtcgtagtgggtaaagctccctcttcggagggagcatcagag

SEQ ID NO: 19854 - RNA, 90 nt, synthetic construct
  misc_feature 1..90: note = engineered ribonucleic acid scaffold (ERS) sequence
  source 1..90: mol_type = other RNA
actggcgcttttatctgattactctgagcagccatcaccagcgactatgtcgtagtgggtaaagctccctcttcggagggagcatcagag

SEQ ID NO: 19855 - RNA, 90 nt, synthetic construct
  misc_feature 1..90: note = engineered ribonucleic acid scaffold (ERS) sequence
  source 1..90: mol_type = other RNA
actggcgcttttatctgattactctgagcagccatcaccagcgactatgtcgtagtgggtaaagctccctcttcggagggagcatcaaag

SEQ ID NO: 19856 - RNA, 90 nt, synthetic construct
  misc_feature 1..90: note = engineered ribonucleic acid scaffold (ERS) sequence
  source 1..90: mol_type = other RNA
actggcgcttctatctgattactctgagcagccatcaccagcgactatgtcgtagtgggtaaagctccctcttcggagggagcctcagag

SEQ ID NO: 19857 - RNA, 90 nt, synthetic construct
  misc_feature 1..90: note = engineered ribonucleic acid scaffold (ERS) sequence
  source 1..90: mol_type = other RNA
actggcgcttctatctgattactctgagcagccatcaccagcgactatgtcgtagtgggtaaagctccctcttcggagggagcgtcagag

SEQ ID NO: 19858 - RNA, 90 nt, synthetic construct
  misc_feature 1..90: note = engineered ribonucleic acid scaffold (ERS) sequence
  source 1..90: mol_type = other RNA
actggcgcttctatctgattactctgagcagccatcaccagcgactatgtcgtagtgggtaaagctccctcttcggagggagcatcaaag

SEQ ID NO: 19859 - RNA, 89 nt, synthetic construct
  misc_feature 1..89: note = engineered ribonucleic acid scaffold (ERS) sequence
  source 1..89: mol_type = other RNA
actggcgcttctatctgattactctcagtgccatcaccagcgactatgtcgtagtgggtaaagctccctcttcggagggagcatcagac

SEQ ID NO: 19860 - RNA, 89 nt, synthetic construct
  misc_feature 1..89: note = engineered ribonucleic acid scaffold (ERS) sequence
  source 1..89: mol_type = other RNA
actggcgcttctatctgattactttgagtgccatcaccagcgactatgtcgtagtgggtaaagctccctcttcggagggagcatcagag

SEQ ID NO: 19861 - RNA, 89 nt, synthetic construct
  misc_feature 1..89: note = engineered ribonucleic acid scaffold (ERS) sequence
  source 1..89: mol_type = other RNA
actggcgcttctatctgattactttgagtgccatcaccagcgactatgtcgtagtgggtaaagctccctcttcggagggagcatcaaag

SEQ ID NO: 19862 - RNA, 89 nt, synthetic construct
  misc_feature 1..89: note = engineered ribonucleic acid scaffold (ERS) sequence
  source 1..89: mol_type = other RNA
actggcgcttctatctgattagtctcagtgccatcaccagcgactatgtcgtagtgggtaaagctccctcttcggagggagcatgagac

SEQ ID NO: 19863 - RNA, 89 nt, synthetic construct
  misc_feature 1..89: note = engineered ribonucleic acid scaffold (ERS) sequence
  source 1..89: mol_type = other RNA
actggcgcttctatctgattagtctgagtgccatcaccagcgactatgtcgtagtgggtaaagctccctcttcggagggagcatcagac

SEQ ID NO: 19864 - RNA, 89 nt, synthetic construct
  misc_feature 1..89: note = engineered ribonucleic acid scaffold (ERS) sequence
  source 1..89: mol_type = other RNA
actggcgcttctatctgattactctcagtgccatcaccagcgactatgtcgtagtgggtaaagctccctcttcggagggagcatgagag

SEQ ID NO: 19865 - RNA, 89 nt, synthetic construct
  misc_feature 1..89: note = engineered ribonucleic acid scaffold (ERS) sequence
  source 1..89: mol_type = other RNA
actggcgctcccatctgattaccccgagtgccatcaccagcgactatgtcgtagtgggtaaagctccctcttcggagggagcatcgggg

SEQ ID NO: 19866 - RNA, 89 nt, synthetic construct
  misc_feature 1..89: note = engineered ribonucleic acid scaffold (ERS) sequence
  source 1..89: mol_type = other RNA
actggcgctcctatctgattactccgagtgccatcaccagcgactatgtcgtagtgggtaaagctccctcttcggagggagcatcggag

SEQ ID NO: 19867 - RNA, 89 nt, synthetic construct
  misc_feature 1..89: note = engineered ribonucleic acid scaffold (ERS) sequence
  source 1..89: mol_type = other RNA
actggcgctgggatctgattaccccgagtgccatcaccagcgactatgtcgtagtgggtaaagctccctcttcggagggagcatcgggg

SEQ ID NO: 19868 - RNA, 89 nt, synthetic construct
  misc_feature 1..89: note = engineered ribonucleic acid scaffold (ERS) sequence
  source 1..89: mol_type = other RNA
actggcgctggtatctgattactccgagtgccatcaccagcgactatgtcgtagtgggtaaagctccctcttcggagggagcatcggag

SEQ ID NO: 19869 - RNA, 89 nt, synthetic construct
  misc_feature 1..89: note = engineered ribonucleic acid scaffold (ERS) sequence
  source 1..89: mol_type = other RNA
actggcgcttccatctgattaccctgagtgccatcaccagcgactatgtcgtagtgggtaaagctccctcttcggagggagcatcaggg

SEQ ID NO: 19870 - RNA, 89 nt, synthetic construct
  misc_feature 1..89: note = engineered ribonucleic acid scaffold (ERS) sequence
  source 1..89: mol_type = other RNA
actggcgcttggatctgattaccctgagtgccatcaccagcgactatgtcgtagtgggtaaagctccctcttcggagggagcatcaggg

SEQ ID NO: 19871 - RNA, 89 nt, synthetic construct
  misc_feature 1..89: note = engineered ribonucleic acid scaffold (ERS) sequence
  source 1..89: mol_type = other RNA
actggcgcttgtatctgattactctgagtgccatcaccagcgactatgtcgtagtgggtaaagctccctcttcggagggagcatcagag

SEQ ID NO: 19872 - RNA, 89 nt, synthetic construct
  misc_feature 1..89: note = engineered ribonucleic acid scaffold (ERS) sequence
  source 1..89: mol_type = other RNA
actggcgcttttatctgattactttgagtgccatcaccagcgactatgtcgtagtgggtaaagctccctcttcggagggagcatcagag

SEQ ID NO: 19873 - RNA, 89 nt, synthetic construct
  misc_feature 1..89: note = engineered ribonucleic acid scaffold (ERS) sequence
  source 1..89: mol_type = other RNA
actggcgcttttatctgattactctgagtgccatcaccagcgactatgtcgtagtgggtaaagctccctcttcggagggagcatcagag

SEQ ID NO: 19874 - RNA, 89 nt, synthetic construct
  misc_feature 1..89: note = engineered ribonucleic acid scaffold (ERS) sequence
  source 1..89: mol_type = other RNA
actggcgcttttatctgattactctgagtgccatcaccagcgactatgtcgtagtgggtaaagctccctcttcggagggagcatcaaag

SEQ ID NO: 19875 - RNA, 89 nt, synthetic construct
  misc_feature 1..89: note = engineered ribonucleic acid scaffold (ERS) sequence
  source 1..89: mol_type = other RNA
actggcgcttctatctgattactctgagtgccatcaccagcgactatgtcgtagtgggtaaagctccctcttcggagggagcctcagag

SEQ ID NO: 19876 - RNA, 89 nt, synthetic construct
  misc_feature 1..89: note = engineered ribonucleic acid scaffold (ERS) sequence
  source 1..89: mol_type = other RNA
actggcgcttctatctgattactctgagtgccatcaccagcgactatgtcgtagtgggtaaagctccctcttcggagggagcgtcagag

SEQ ID NO: 19877 - RNA, 89 nt, synthetic construct
  misc_feature 1..89: note = engineered ribonucleic acid scaffold (ERS) sequence
  source 1..89: mol_type = other RNA
actggcgcttctatctgattactctgagtgccatcaccagcgactatgtcgtagtgggtaaagctccctcttcggagggagcatcaaag

SEQ ID NO: 19878 - RNA, 89 nt, synthetic construct
  misc_feature 1..89: note = engineered ribonucleic acid scaffold (ERS) sequence
  source 1..89: mol_type = other RNA
actggcgctcccatctgattaccccgagagccatcaccagcgactatgtcgtagtgggtaaagctccctcttcggagggagcatcgggg

SEQ ID NO: 19879 - RNA, 89 nt, synthetic construct
  misc_feature 1..89: note = engineered ribonucleic acid scaffold (ERS) sequence
  source 1..89: mol_type = other RNA
actggcgctcctatctgattactccgagagccatcaccagcgactatgtcgtagtgggtaaagctccctcttcggagggagcatcggag

SEQ ID NO: 19880 - RNA, 89 nt, synthetic construct
  misc_feature 1..89: note = engineered ribonucleic acid scaffold (ERS) sequence
  source 1..89: mol_type = other RNA
actggcgctgggatctgattaccccgagagccatcaccagcgactatgtcgtagtgggtaaagctccctcttcggagggagcatcgggg

SEQ ID NO: 19881 - RNA, 89 nt, synthetic construct
  misc_feature 1..89: note = engineered ribonucleic acid scaffold (ERS) sequence
  source 1..89: mol_type = other RNA
actggcgctggtatctgattactccgagagccatcaccagcgactatgtcgtagtgggtaaagctccctcttcggagggagcatcggag

SEQ ID NO: 19882 - RNA, 89 nt, synthetic construct
  misc_feature 1..89: note = engineered ribonucleic acid scaffold (ERS) sequence
  source 1..89: mol_type = other RNA
actggcgcttccatctgattaccctgagagccatcaccagcgactatgtcgtagtgggtaaagctccctcttcggagggagcatcaggg

SEQ ID NO: 19883 - RNA, 89 nt, synthetic construct
  misc_feature 1..89: note = engineered ribonucleic acid scaffold (ERS) sequence
  source 1..89: mol_type = other RNA
actggcgcttggatctgattaccctgagagccatcaccagcgactatgtcgtagtgggtaaagctccctcttcggagggagcatcaggg

SEQ ID NO: 19884 - RNA, 89 nt, synthetic construct; identical to SEQ ID NO: 54
  misc_feature 1..89: note = engineered ribonucleic acid scaffold (ERS) sequence
  source 1..89: mol_type = other RNA

SEQ ID NO: 19885 - RNA, 89 nt, synthetic construct
  misc_feature 1..89: note = engineered ribonucleic acid scaffold (ERS) sequence
  source 1..89: mol_type = other RNA
actggcgcttttatctgattactttgagagccatcaccagcgactatgtcgtagtgggtaaagctccctcttcggagggagcatcagag

SEQ ID NO: 19886 - RNA, 89 nt, synthetic construct
  misc_feature 1..89: note = engineered ribonucleic acid scaffold (ERS) sequence
  source 1..89: mol_type = other RNA
actggcgcttttatctgattactctgagagccatcaccagcgactatgtcgtagtgggtaaagctccctcttcggagggagcatcagag

SEQ ID NO: 19887 - RNA, 89 nt, synthetic construct
  misc_feature 1..89: note = engineered ribonucleic acid scaffold (ERS) sequence
  source 1..89: mol_type = other RNA
actggcgcttttatctgattactctgagagccatcaccagcgactatgtcgtagtgggtaaagctccctcttcggagggagcatcaaag

SEQ ID NO: 19888 - RNA, 89 nt, synthetic construct
  misc_feature 1..89: note = engineered ribonucleic acid scaffold (ERS) sequence
  source 1..89: mol_type = other RNA
actggcgcttctatctgattactctgagagccatcaccagcgactatgtcgtagtgggtaaagctccctcttcggagggagcctcagag

SEQ ID NO: 19889 - RNA, 89 nt, synthetic construct
  misc_feature 1..89: note = engineered ribonucleic acid scaffold (ERS) sequence
  source 1..89: mol_type = other RNA
actggcgcttctatctgattactctgagagccatcaccagcgactatgtcgtagtgggtaaagctccctcttcggagggagcgtcagag

SEQ ID NO: 19890 - RNA, 89 nt, synthetic construct
  misc_feature 1..89: note = engineered ribonucleic acid scaffold (ERS) sequence
  source 1..89: mol_type = other RNA
actggcgcttctatctgattactctgagagccatcaccagcgactatgtcgtagtgggtaaagctccctcttcggagggagcatcaaag

SEQ ID NO: 19891 - RNA, 89 nt, synthetic construct
  misc_feature 1..89: note = engineered ribonucleic acid scaffold (ERS) sequence
  source 1..89: mol_type = other RNA
actggctcttctatctgattactctcagagccatcaccagcgactatgtcgtagtgggtaaagctccctcttcggagggagcatcagac

SEQ ID NO: 19892 - RNA, 89 nt, synthetic construct
  misc_feature 1..89: note = engineered ribonucleic acid scaffold (ERS) sequence
  source 1..89: mol_type = other RNA
actggctcttctatctgattactttgagagccatcaccagcgactatgtcgtagtgggtaaagctccctcttcggagggagcatcagag

SEQ ID NO: 19893 - RNA, 89 nt, synthetic construct
  misc_feature 1..89: note = engineered ribonucleic acid scaffold (ERS) sequence
  source 1..89: mol_type = other RNA
actggctcttctatctgattactttgagagccatcaccagcgactatgtcgtagtgggtaaagctccctcttcggagggagcatcaaag

SEQ ID NO: 19894 - RNA, 89 nt, synthetic construct
  misc_feature 1..89: note = engineered ribonucleic acid scaffold (ERS) sequence
  source 1..89: mol_type = other RNA
actggctcttctatctgattagtctcagagccatcaccagcgactatgtcgtagtgggtaaagctccctcttcggagggagcatgagac

SEQ ID NO: 19895 - RNA, 89 nt, synthetic construct
  misc_feature 1..89: note = engineered ribonucleic acid scaffold (ERS) sequence
  source 1..89: mol_type = other RNA
actggctcttctatctgattagtctgagagccatcaccagcgactatgtcgtagtgggtaaagctccctcttcggagggagcatcagac

SEQ ID NO: 19896 - RNA, 89 nt, synthetic construct
  misc_feature 1..89: note = engineered ribonucleic acid scaffold (ERS) sequence
  source 1..89: mol_type = other RNA
actggctcttctatctgattactctcagagccatcaccagcgactatgtcgtagtgggtaaagctccctcttcggagggagcatgagag

SEQ ID NO: 19897 - RNA, 89 nt, synthetic construct
  misc_feature 1..89: note = engineered ribonucleic acid scaffold (ERS) sequence
  source 1..89: mol_type = other RNA
actggctcttctatctgattactctcagcgccatcaccagcgactatgtcgtagtgggtaaagctccctcttcggagggagcatcagac

SEQ ID NO: 19898 - RNA, 89 nt, synthetic construct
  misc_feature 1..89: note = engineered ribonucleic acid scaffold (ERS) sequence
  source 1..89: mol_type = other RNA
actggctcttctatctgattactttgagcgccatcaccagcgactatgtcgtagtgggtaaagctccctcttcggagggagcatcagag

SEQ ID NO: 19899 - RNA, 89 nt, synthetic construct
  misc_feature 1..89: note = engineered ribonucleic acid scaffold (ERS) sequence
  source 1..89: mol_type = other RNA
actggctcttctatctgattactttgagcgccatcaccagcgactatgtcgtagtgggtaaagctccctcttcggagggagcatcaaag

SEQ ID NO: 19900 - RNA, 89 nt, synthetic construct
  misc_feature 1..89: note = engineered ribonucleic acid scaffold (ERS) sequence
  source 1..89: mol_type = other RNA
actggctcttctatctgattagtctcagcgccatcaccagcgactatgtcgtagtgggtaaagctccctcttcggagggagcatgagac

SEQ ID NO: 19901 - RNA, 89 nt, synthetic construct
  misc_feature 1..89: note = engineered ribonucleic acid scaffold (ERS) sequence
  source 1..89: mol_type = other RNA
actggctcttctatctgattagtctgagcgccatcaccagcgactatgtcgtagtgggtaaagctccctcttcggagggagcatcagac

SEQ ID NO: 19902 - RNA, 89 nt, synthetic construct
  misc_feature 1..89: note = engineered ribonucleic acid scaffold (ERS) sequence
  source 1..89: mol_type = other RNA
actggctcttctatctgattactctcagcgccatcaccagcgactatgtcgtagtgggtaaagctccctcttcggagggagcatgagag

SEQ ID NO: 19903 - RNA, 89 nt, synthetic construct
  misc_feature 1..89: note = engineered ribonucleic acid scaffold (ERS) sequence
  source 1..89: mol_type = other RNA
actggctctcccatctgattaccccgagcgccatcaccagcgactatgtcgtagtgggtaaagctccctcttcggagggagcatcgggg

SEQ ID NO: 19904 - RNA, 89 nt, synthetic construct
  misc_feature 1..89: note = engineered ribonucleic acid scaffold (ERS) sequence
  source 1..89: mol_type = other RNA
actggctctcctatctgattactccgagcgccatcaccagcgactatgtcgtagtgggtaaagctccctcttcggagggagcatcggag

SEQ ID NO: 19905 - RNA, 89 nt, synthetic construct
  misc_feature 1..89: note = engineered ribonucleic acid scaffold (ERS) sequence
  source 1..89: mol_type = other RNA
actggctctgggatctgattaccccgagcgccatcaccagcgactatgtcgtagtgggtaaagctccctcttcggagggagcatcgggg

SEQ ID NO: 19906 - RNA, 89 nt, synthetic construct
  misc_feature 1..89: note = engineered ribonucleic acid scaffold (ERS) sequence
  source 1..89: mol_type = other RNA
actggctctggtatctgattactccgagcgccatcaccagcgactatgtcgtagtgggtaaagctccctcttcggagggagcatcggag

SEQ ID NO: 19907 - RNA, 89 nt, synthetic construct
  misc_feature 1..89: note = engineered ribonucleic acid scaffold (ERS) sequence
  source 1..89: mol_type = other RNA
actggctcttccatctgattaccctgagcgccatcaccagcgactatgtcgtagtgggtaaagctccctcttcggagggagcatcaggg

SEQ ID NO: 19908 - RNA, 89 nt, synthetic construct
  misc_feature 1..89: note = engineered ribonucleic acid scaffold (ERS) sequence
  source 1..89: mol_type = other RNA
actggctcttggatctgattaccctgagcgccatcaccagcgactatgtcgtagtgggtaaagctccctcttcggagggagcatcaggg

SEQ ID NO: 19909 - RNA, 89 nt, synthetic construct
  misc_feature 1..89: note = engineered ribonucleic acid scaffold (ERS) sequence
  source 1..89: mol_type = other RNA
actggctcttgtatctgattactctgagcgccatcaccagcgactatgtcgtagtgggtaaagctccctcttcggagggagcatcagag

SEQ ID NO: 19910 - RNA, 89 nt, synthetic construct
  misc_feature 1..89: note = engineered ribonucleic acid scaffold (ERS) sequence
  source 1..89: mol_type = other RNA
actggctcttttatctgattactttgagcgccatcaccagcgactatgtcgtagtgggtaaagctccctcttcggagggagcatcagag

SEQ ID NO: 19911 - RNA, 89 nt, synthetic construct
  misc_feature 1..89: note = engineered ribonucleic acid scaffold (ERS) sequence
  source 1..89: mol_type = other RNA
actggctcttttatctgattactctgagcgccatcaccagcgactatgtcgtagtgggtaaagctccctcttcggagggagcatcagag

SEQ ID NO: 19912 - RNA, 89 nt, synthetic construct
  misc_feature 1..89: note = engineered ribonucleic acid scaffold (ERS) sequence
  source 1..89: mol_type = other RNA
actggctcttttatctgattactctgagcgccatcaccagcgactatgtcgtagtgggtaaagctccctcttcggagggagcatcaaag

SEQ ID NO: 19913 - RNA, 89 nt, synthetic construct
  misc_feature 1..89: note = engineered ribonucleic acid scaffold (ERS) sequence
  source 1..89: mol_type = other RNA
actggctcttctatctgattactctgagcgccatcaccagcgactatgtcgtagtgggtaaagctccctcttcggagggagcctcagag

SEQ ID NO: 19914 - RNA, 89 nt, synthetic construct
  misc_feature 1..89: note = engineered ribonucleic acid scaffold (ERS) sequence
  source 1..89: mol_type = other RNA
actggctcttctatctgattactctgagcgccatcaccagcgactatgtcgtagtgggtaaagctccctcttcggagggagcgtcagag

SEQ ID NO: 19915 - RNA, 89 nt, synthetic construct
  misc_feature 1..89: note = engineered ribonucleic acid scaffold (ERS) sequence
  source 1..89: mol_type = other RNA
actggctcttctatctgattactctgagcgccatcaccagcgactatgtcgtagtgggtaaagctccctcttcggagggagcatcaaag

SEQ ID NO: 19916 - RNA, 89 nt, synthetic construct
  misc_feature 1..89: note = engineered ribonucleic acid scaffold (ERS) sequence
  source 1..89: mol_type = other RNA
actggctcttctatctgattactctcagggccatcaccagcgactatgtcgtagtgggtaaagctccctcttcggagggagcatcagac

SEQ ID NO: 19917 - RNA, 89 nt, synthetic construct
  misc_feature 1..89: note = engineered ribonucleic acid scaffold (ERS) sequence
  source 1..89: mol_type = other RNA
actggctcttctatctgattactttgagggccatcaccagcgactatgtcgtagtgggtaaagctccctcttcggagggagcatcagag

SEQ ID NO: 19918 - RNA, 89 nt, synthetic construct
  misc_feature 1..89: note = engineered ribonucleic acid scaffold (ERS) sequence
  source 1..89: mol_type = other RNA
actggctcttctatctgattactttgagggccatcaccagcgactatgtcgtagtgggtaaagctccctcttcggagggagcatcaaag

SEQ ID NO: 19919 - RNA, 89 nt, synthetic construct
  misc_feature 1..89: note = engineered ribonucleic acid scaffold (ERS) sequence
  source 1..89: mol_type = other RNA
actggctcttctatctgattagtctcagggccatcaccagcgactatgtcgtagtgggtaaagctccctcttcggagggagcatgagac

SEQ ID NO: 19920 - RNA, 89 nt, synthetic construct
  misc_feature 1..89: note = engineered ribonucleic acid scaffold (ERS) sequence
  source 1..89: mol_type = other RNA
actggctcttctatctgattagtctgagggccatcaccagcgactatgtcgtagtgggtaaagctccctcttcggagggagcatcagac

SEQ ID NO: 19921 - RNA, 89 nt, synthetic construct
  misc_feature 1..89: note = engineered ribonucleic acid scaffold (ERS) sequence
  source 1..89: mol_type = other RNA
actggctcttctatctgattactctcagggccatcaccagcgactatgtcgtagtgggtaaagctccctcttcggagggagcatgagag

SEQ ID NO: 19922 - RNA, 89 nt, synthetic construct
  misc_feature 1..89: note = engineered ribonucleic acid scaffold (ERS) sequence
  source 1..89: mol_type = other RNA
actggctctcccatctgattaccccgagggccatcaccagcgactatgtcgtagtgggtaaagctccctcttcggagggagcatcgggg

SEQ ID NO: 19923 - RNA, 89 nt, synthetic construct
  misc_feature 1..89: note = engineered ribonucleic acid scaffold (ERS) sequence
  source 1..89: mol_type = other RNA
actggctctcctatctgattactccgagggccatcaccagcgactatgtcgtagtgggtaaagctccctcttcggagggagcatcggag

SEQ ID NO: 19924 - RNA, 89 nt, synthetic construct
  misc_feature 1..89: note = engineered ribonucleic acid scaffold (ERS) sequence
  source 1..89: mol_type = other RNA
actggctctgggatctgattaccccgagggccatcaccagcgactatgtcgtagtgggtaaagctccctcttcggagggagcatcgggg

SEQ ID NO: 19925 - RNA, 89 nt, synthetic construct
  misc_feature 1..89: note = engineered ribonucleic acid scaffold (ERS) sequence
  source 1..89: mol_type = other RNA
actggctctggtatctgattactccgagggccatcaccagcgactatgtcgtagtgggtaaagctccctcttcggagggagcatcggag

SEQ ID NO: 19926 - RNA, 89 nt, synthetic construct
  misc_feature 1..89: note = engineered ribonucleic acid scaffold (ERS) sequence
  source 1..89: mol_type = other RNA
actggctcttccatctgattaccctgagggccatcaccagcgactatgtcgtagtgggtaaagctccctcttcggagggagcatcaggg

SEQ ID NO: 19927 - RNA, 89 nt, synthetic construct
  misc_feature 1..89: note = engineered ribonucleic acid scaffold (ERS) sequence
  source 1..89: mol_type = other RNA
actggctcttggatctgattaccctgagggccatcaccagcgactatgtcgtagtgggtaaagctccctcttcggagggagcatcaggg

SEQ ID NO: 19928 - RNA, 89 nt, synthetic construct
  misc_feature 1..89: note = engineered ribonucleic acid scaffold (ERS) sequence
  source 1..89: mol_type = other RNA
actggctcttgtatctgattactctgagggccatcaccagcgactatgtcgtagtgggtaaagctccctcttcggagggagcatcagag

SEQ ID NO: 19929 - RNA, 89 nt, synthetic construct
  misc_feature 1..89: note = engineered ribonucleic acid scaffold (ERS) sequence
  source 1..89: mol_type = other RNA
actggctcttttatctgattactttgagggccatcaccagcgactatgtcgtagtgggtaaagctccctcttcggagggagcatcagag

SEQ ID NO: 19930 - RNA, 89 nt, synthetic construct
  misc_feature 1..89: note = engineered ribonucleic acid scaffold (ERS) sequence
  source 1..89: mol_type = other RNA
actggctcttttatctgattactctgagggccatcaccagcgactatgtcgtagtgggtaaagctccctcttcggagggagcatcagag

SEQ ID NO: 19931 - RNA, 89 nt, synthetic construct
  misc_feature 1..89: note = engineered ribonucleic acid scaffold (ERS) sequence
  source 1..89: mol_type = other RNA
actggctcttttatctgattactctgagggccatcaccagcgactatgtcgtagtgggtaaagctccctcttcggagggagcatcaaag

SEQ ID NO: 19932 - RNA, 89 nt, synthetic construct
  misc_feature 1..89: note = engineered ribonucleic acid scaffold (ERS) sequence
  source 1..89: mol_type = other RNA
actggctcttctatctgattactctgagggccatcaccagcgactatgtcgtagtgggtaaagctccctcttcggagggagcctcagag

SEQ ID NO: 19933 - RNA, 89 nt, synthetic construct
  misc_feature 1..89: note = engineered ribonucleic acid scaffold (ERS) sequence
  source 1..89: mol_type = other RNA
actggctcttctatctgattactctgagggccatcaccagcgactatgtcgtagtgggtaaagctccctcttcggagggagcgtcagag

SEQ ID NO: 19934 - RNA, 89 nt, synthetic construct
  misc_feature 1..89: note = engineered ribonucleic acid scaffold (ERS) sequence
  source 1..89: mol_type = other RNA
actggctcttctatctgattactctgagggccatcaccagcgactatgtcgtagtgggtaaagctccctcttcggagggagcatcaaag

SEQ ID NO: 19935 - RNA, 89 nt, synthetic construct
  misc_feature 1..89: note = engineered ribonucleic acid scaffold (ERS) sequence
  source 1..89: mol_type = other RNA
actggctcttctatctgattactctcagtgccatcaccagcgactatgtcgtagtgggtaaagctccctcttcggagggagcatcagac

SEQ ID NO: 19936 - RNA, 89 nt, synthetic construct
  misc_feature 1..89: note = engineered ribonucleic acid scaffold (ERS) sequence
  source 1..89: mol_type = other RNA
actggctcttctatctgattactttgagtgccatcaccagcgactatgtcgtagtgggtaaagctccctcttcggagggagcatcagag

SEQ ID NO: 19937 - RNA, 89 nt, synthetic construct
  misc_feature 1..89: note = engineered ribonucleic acid scaffold (ERS) sequence
  source 1..89: mol_type = other RNA
actggctcttctatctgattactttgagtgccatcaccagcgactatgtcgtagtgggtaaagctccctcttcggagggagcatcaaag

SEQ ID NO: 19938 - RNA, 89 nt, synthetic construct
  misc_feature 1..89: note = engineered ribonucleic acid scaffold (ERS) sequence
  source 1..89: mol_type = other RNA
actggctcttctatctgattagtctcagtgccatcaccagcgactatgtcgtagtgggtaaagctccctcttcggagggagcatgagac

SEQ ID NO: 19939 - RNA, 89 nt, synthetic construct
  misc_feature 1..89: note = engineered ribonucleic acid scaffold (ERS) sequence
  source 1..89: mol_type = other RNA
actggctcttctatctgattagtctgagtgccatcaccagcgactatgtcgtagtgggtaaagctccctcttcggagggagcatcagac

SEQ ID NO: 19940 - RNA, 89 nt, synthetic construct
  misc_feature 1..89: note = engineered ribonucleic acid scaffold (ERS) sequence
  source 1..89: mol_type = other RNA
actggctcttctatctgattactctcagtgccatcaccagcgactatgtcgtagtgggtaaagctccctcttcggagggagcatgagag

SEQ ID NO: 19941 - RNA, 89 nt, synthetic construct
  misc_feature 1..89: note = engineered ribonucleic acid scaffold (ERS) sequence
  source 1..89: mol_type = other RNA
actggctctcccatctgattaccccgagtgccatcaccagcgactatgtcgtagtgggtaaagctccctcttcggagggagcatcgggg

SEQ ID NO: 19942 - RNA, 89 nt, synthetic construct
  misc_feature 1..89: note = engineered ribonucleic acid scaffold (ERS) sequence
  source 1..89: mol_type = other RNA
actggctctcctatctgattactccgagtgccatcaccagcgactatgtcgtagtgggtaaagctccctcttcggagggagcatcggag

SEQ ID NO: 19943 - RNA, 89 nt, synthetic construct
  misc_feature 1..89: note = engineered ribonucleic acid scaffold (ERS) sequence
  source 1..89: mol_type = other RNA
actggctctgggatctgattaccccgagtgccatcaccagcgactatgtcgtagtgggtaaagctccctcttcggagggagcatcgggg

SEQ ID NO: 19944 - RNA, 89 nt, synthetic construct
  misc_feature 1..89: note = engineered ribonucleic acid scaffold (ERS) sequence
  source 1..89: mol_type = other RNA
actggctctggtatctgattactccgagtgccatcaccagcgactatgtcgtagtgggtaaagctccctcttcggagggagcatcggag

SEQ ID NO: 19945 - RNA, 89 nt, synthetic construct
  misc_feature 1..89: note = engineered ribonucleic acid scaffold (ERS) sequence
  source 1..89: mol_type = other RNA
actggctcttccatctgattaccctgagtgccatcaccagcgactatgtcgtagtgggtaaagctccctcttcggagggagcatcaggg

SEQ ID NO: 19946 - RNA, 89 nt, synthetic construct
  misc_feature 1..89: note = engineered ribonucleic acid scaffold (ERS) sequence
  source 1..89: mol_type = other RNA
actggctcttggatctgattaccctgagtgccatcaccagcgactatgtcgtagtgggtaaagctccctcttcggagggagcatcaggg

SEQ ID NO: 19947 - RNA, 89 nt, synthetic construct
  misc_feature 1..89: note = engineered ribonucleic acid scaffold (ERS) sequence
  source 1..89: mol_type = other RNA
actggctcttgtatctgattactctgagtgccatcaccagcgactatgtcgtagtgggtaaagctccctcttcggagggagcatcagag

SEQ ID NO: 19948 - RNA, 89 nt, synthetic construct
  misc_feature 1..89: note = engineered ribonucleic acid scaffold (ERS) sequence
  source 1..89: mol_type = other RNA
actggctcttttatctgattactttgagtgccatcaccagcgactatgtcgtagtgggtaaagctccctcttcggagggagcatcagag

SEQ ID NO: 19949 - RNA, 89 nt, synthetic construct
  misc_feature 1..89: note = engineered ribonucleic acid scaffold (ERS) sequence
  source 1..89: mol_type = other RNA
actggctcttttatctgattactctgagtgccatcaccagcgactatgtcgtagtgggtaaagctccctcttcggagggagcatcagag

SEQ ID NO: 19950 - RNA, 89 nt, synthetic construct
  misc_feature 1..89: note = engineered ribonucleic acid scaffold (ERS) sequence
  source 1..89: mol_type = other RNA
actggctcttttatctgattactctgagtgccatcaccagcgactatgtcgtagtgggtaaagctccctcttcggagggagcatcaaag

SEQ ID NO: 19951 - RNA, 89 nt, synthetic construct
  misc_feature 1..89: note = engineered ribonucleic acid scaffold (ERS) sequence
  source 1..89: mol_type = other RNA
actggctcttctatctgattactctgagtgccatcaccagcgactatgtcgtagtgggtaaagctccctcttcggagggagcctcagag

SEQ ID NO: 19952 - RNA, 89 nt, synthetic construct
  misc_feature 1..89: note = engineered ribonucleic acid scaffold (ERS) sequence
  source 1..89: mol_type = other RNA
actggctcttctatctgattactctgagtgccatcaccagcgactatgtcgtagtgggtaaagctccctcttcggagggagcgtcagag

SEQ ID NO: 19953 - RNA, 89 nt, synthetic construct
  misc_feature 1..89: note = engineered ribonucleic acid scaffold (ERS) sequence
  source 1..89: mol_type = other RNA
actggctcttctatctgattactctgagtgccatcaccagcgactatgtcgtagtgggtaaagctccctcttcggagggagcatcaaag

SEQ ID NO: 19954 - RNA, 89 nt, synthetic construct
  misc_feature 1..89: note = engineered ribonucleic acid scaffold (ERS) sequence
  source 1..89: mol_type = other RNA
actggctctcccatctgattaccccgagagccatcaccagcgactatgtcgtagtgggtaaagctccctcttcggagggagcatcgggg

SEQ ID NO: 19955 - RNA, 89 nt, synthetic construct
  misc_feature 1..89: note = engineered ribonucleic acid scaffold (ERS) sequence
  source 1..89: mol_type = other RNA
actggctctcctatctgattactccgagagccatcaccagcgactatgtcgtagtgggtaaagctccctcttcggagggagcatcggag

SEQ ID NO: 19956 - RNA, 89 nt, synthetic construct
  misc_feature 1..89: note = engineered ribonucleic acid scaffold (ERS) sequence
  source 1..89: mol_type = other RNA
actggctctgggatctgattaccccgagagccatcaccagcgactatgtcgtagtgggtaaagctccctcttcggagggagcatcgggg

SEQ ID NO: 19957 - RNA, 89 nt, synthetic construct
  misc_feature 1..89: note = engineered ribonucleic acid scaffold (ERS) sequence
  source 1..89: mol_type = other RNA
actggctctggtatctgattactccgagagccatcaccagcgactatgtcgtagtgggtaaagctccctcttcggagggagcatcggag

SEQ ID NO: 19958 - RNA, 89 nt, synthetic construct
  misc_feature 1..89: note = engineered ribonucleic acid scaffold (ERS) sequence
  source 1..89: mol_type = other RNA
actggctcttccatctgattaccctgagagccatcaccagcgactatgtcgtagtgggtaaagctccctcttcggagggagcatcaggg

SEQ ID NO: 19959 - RNA, 89 nt, synthetic construct
  misc_feature 1..89: note = engineered ribonucleic acid scaffold (ERS) sequence
  source 1..89: mol_type = other RNA
actggctcttggatctgattaccctgagagccatcaccagcgactatgtcgtagtgggtaaagctccctcttcggagggagcatcaggg

SEQ ID NO: 19960 - RNA, 89 nt, synthetic construct
  misc_feature 1..89: note = engineered ribonucleic acid scaffold (ERS) sequence
  source 1..89: mol_type = other RNA
actggctcttgtatctgattactctgagagccatcaccagcgactatgtcgtagtgggtaaagctccctcttcggagggagcatcagag

SEQ ID NO: 19961 - RNA, 89 nt, synthetic construct
  misc_feature 1..89: note = engineered ribonucleic acid scaffold (ERS) sequence
  source 1..89: mol_type = other RNA
actggctcttttatctgattactttgagagccatcaccagcgactatgtcgtagtgggtaaagctccctcttcggagggagcatcagag

SEQ ID NO: 19962 - RNA, 89 nt, synthetic construct
  misc_feature 1..89: note = engineered ribonucleic acid scaffold (ERS) sequence
  source 1..89: mol_type = other RNA
actggctcttttatctgattactctgagagccatcaccagcgactatgtcgtagtgggtaaagctccctcttcggagggagcatcagag

SEQ ID NO: 19963 - RNA, 89 nt, synthetic construct
  misc_feature 1..89: note = engineered ribonucleic acid scaffold (ERS) sequence
  source 1..89: mol_type = other RNA
actggctcttttatctgattactctgagagccatcaccagcgactatgtcgtagtgggtaaagctccctcttcggagggagcatcaaag

SEQ ID NO: 19964 - RNA, 89 nt, synthetic construct
  misc_feature 1..89: note = engineered ribonucleic acid scaffold (ERS) sequence
  source 1..89: mol_type = other RNA
actggctcttctatctgattactctgagagccatcaccagcgactatgtcgtagtgggtaaagctccctcttcggagggagcctcagag

SEQ ID NO: 19965 - RNA, 89 nt, synthetic construct
  misc_feature 1..89: note = engineered ribonucleic acid scaffold (ERS) sequence
  source 1..89: mol_type = other RNA
actggctcttctatctgattactctgagagccatcaccagcgactatgtcgtagtgggtaaagctccctcttcggagggagcgtcagag

SEQ ID NO: 19966 - RNA, 89 nt, synthetic construct
  misc_feature 1..89: note = engineered ribonucleic acid scaffold (ERS) sequence
  source 1..89: mol_type = other RNA
actggctcttctatctgattactctgagagccatcaccagcgactatgtcgtagtgggtaaagctccctcttcggagggagcatcaaag

SEQ ID NO: 19967 - RNA, 89 nt, synthetic construct
  misc_feature 1..89: note = engineered ribonucleic acid scaffold (ERS) sequence
  source 1..89: mol_type = other RNA
actggcggttctatctgattactctcagcgccatcaccagcgactatgtcgtagtgggtaaagctccctcttcggagggagcatcagac

SEQ ID NO: 19968 - RNA, 89 nt, synthetic construct
  misc_feature 1..89: note = engineered ribonucleic acid scaffold (ERS) sequence
  source 1..89: mol_type = other RNA
actggcggttctatctgattactttgagcgccatcaccagcgactatgtcgtagtgggtaaagctccctcttcggagggagcatcagag

SEQ ID NO: 19969 - RNA, 89 nt, synthetic construct
  misc_feature 1..89: note = engineered ribonucleic acid scaffold (ERS) sequence
  source 1..89: mol_type = other RNA
actggcggttctatctgattactttgagcgccatcaccagcgactatgtcgtagtgggtaaagctccctcttcggagggagcatcaaag

SEQ ID NO: 19970 - RNA, 89 nt, synthetic construct
  misc_feature 1..89: note = engineered ribonucleic acid scaffold (ERS) sequence
  source 1..89: mol_type = other RNA
actggcggttctatctgattagtctcagcgccatcaccagcgactatgtcgtagtgggtaaagctccctcttcggagggagcatgagac

SEQ ID NO: 19971 - RNA, 89 nt, synthetic construct
  misc_feature 1..89: note = engineered ribonucleic acid scaffold (ERS) sequence
  source 1..89: mol_type = other RNA
actggcggttctatctgattagtctgagcgccatcaccagcgactatgtcgtagtgggtaaagctccctcttcggagggagcatcagac

SEQ ID NO: 19972 - RNA, 89 nt, synthetic construct
  misc_feature 1..89: note = engineered ribonucleic acid scaffold (ERS) sequence
  source 1..89: mol_type = other RNA
actggcggttctatctgattactctcagcgccatcaccagcgactatgtcgtagtgggtaaagctccctcttcggagggagcatgagag

SEQ ID NO: 19973 - RNA, 89 nt, synthetic construct
  misc_feature 1..89: note = engineered ribonucleic acid scaffold (ERS) sequence
  source 1..89: mol_type = other RNA
actggcggtcccatctgattaccccgagcgccatcaccagcgactatgtcgtagtgggtaaagctccctcttcggagggagcatcgggg

SEQ ID NO: 19974 - RNA, 89 nt, synthetic construct
  misc_feature 1..89: note = engineered ribonucleic acid scaffold (ERS) sequence
  source 1..89: mol_type = other RNA
actggcggtcctatctgattactccgagcgccatcaccagcgactatgtcgtagtgggtaaagctccctcttcggagggagcatcggag

SEQ ID NO: 19975 - RNA, 89 nt, synthetic construct
  misc_feature 1..89: note = engineered ribonucleic acid scaffold (ERS) sequence
  source 1..89: mol_type = other RNA
actggcggtgggatctgattaccccgagcgccatcaccagcgactatgtcgtagtgggtaaagctccctcttcggagggagcatcgggg

SEQ ID NO: 19976 - RNA, 89 nt, synthetic construct
  misc_feature 1..89: note = engineered ribonucleic acid scaffold (ERS) sequence
  source 1..89: mol_type = other RNA
actggcggtggtatctgattactccgagcgccatcaccagcgactatgtcgtagtgggtaaagctccctcttcggagggagcatcggag

SEQ ID NO: 19977 - RNA, 89 nt, synthetic construct
  misc_feature 1..89: note = engineered ribonucleic acid scaffold (ERS) sequence
  source 1..89: mol_type = other RNA
actggcggttccatctgattaccctgagcgccatcaccagcgactatgtcgtagtgggtaaagctccctcttcggagggagcatcaggg

SEQ ID NO: 19978 - RNA, 89 nt, synthetic construct
  misc_feature 1..89: note = engineered ribonucleic acid scaffold (ERS) sequence
  source 1..89: mol_type = other RNA
actggcggttggatctgattaccctgagcgccatcaccagcgactatgtcgtagtgggtaaagctccctcttcggagggagcatcaggg

SEQ ID NO: 19979 - RNA, 89 nt, synthetic construct
  misc_feature 1..89: note = engineered ribonucleic acid scaffold (ERS) sequence
  source 1..89: mol_type = other RNA
actggcggttgtatctgattactctgagcgccatcaccagcgactatgtcgtagtgggtaaagctccctcttcggagggagcatcagag

SEQ ID NO: 19980 - RNA, 89 nt, synthetic construct
  misc_feature 1..89: note = engineered ribonucleic acid scaffold (ERS) sequence
  source 1..89: mol_type = other RNA
actggcggttttatctgattactttgagcgccatcaccagcgactatgtcgtagtgggtaaagctccctcttcggagggagcatcagag

SEQ ID NO: 19981 - RNA, 89 nt, synthetic construct
  misc_feature 1..89: note = engineered ribonucleic acid scaffold (ERS) sequence
  source 1..89: mol_type = other RNA
actggcggttttatctgattactctgagcgccatcaccagcgactatgtcgtagtgggtaaagctccctcttcggagggagcatcagag

SEQ ID NO: 19982 - RNA, 89 nt, synthetic construct
  misc_feature 1..89: note = engineered ribonucleic acid scaffold (ERS) sequence
  source 1..89: mol_type = other RNA
actggcggttttatctgattactctgagcgccatcaccagcgactatgtcgtagtgggtaaagctccctcttcggagggagcatcaaag

SEQ ID NO: 19983 - RNA, 89 nt, synthetic construct
  misc_feature 1..89: note = engineered ribonucleic acid scaffold (ERS) sequence
  source 1..89: mol_type = other RNA
actggcggttctatctgattactctgagcgccatcaccagcgactatgtcgtagtgggtaaagctccctcttcggagggagcctcagag

SEQ ID NO: 19984 - RNA, 89 nt, synthetic construct
  misc_feature 1..89: note = engineered ribonucleic acid scaffold (ERS) sequence
  source 1..89: mol_type = other RNA
actggcggttctatctgattactctgagcgccatcaccagcgactatgtcgtagtgggtaaagctccctcttcggagggagcgtcagag

SEQ ID NO: 19985 - RNA, 89 nt, synthetic construct
  misc_feature 1..89: note = engineered ribonucleic acid scaffold (ERS) sequence
  source 1..89: mol_type = other RNA
actggcggttctatctgattactctgagcgccatcaccagcgactatgtcgtagtgggtaaagctccctcttcggagggagcatcaaag

SEQ ID NO: 19986 - RNA, 89 nt, synthetic construct
  misc_feature 1..89: note = engineered ribonucleic acid scaffold (ERS) sequence
  source 1..89: mol_type = other RNA
actggcggttctatctgattactctcagagccatcaccagcgactatgtcgtagtgggtaaagctccctcttcggagggagcatcagac

SEQ ID NO: 19987 - RNA, 89 nt, synthetic construct
  misc_feature 1..89: note = engineered ribonucleic acid scaffold (ERS) sequence
  source 1..89: mol_type = other RNA
actggcggttctatctgattactttgagagccatcaccagcgactatgtcgtagtgggtaaagctccctcttcggagggagcatcagag

SEQ ID NO: 19988 - RNA, 89 nt, synthetic construct
  misc_feature 1..89: note = engineered ribonucleic acid scaffold (ERS) sequence
  source 1..89: mol_type = other RNA
actggcggttctatctgattactttgagagccatcaccagcgactatgtcgtagtgggtaaagctccctcttcggagggagcatcaaag

SEQ ID NO: 19989 - RNA, 89 nt, synthetic construct
  misc_feature 1..89: note = engineered ribonucleic acid scaffold (ERS) sequence
  source 1..89: mol_type = other RNA
actggcggttctatctgattagtctcagagccatcaccagcgactatgtcgtagtgggtaaagctccctcttcggagggagcatgagac

SEQ ID NO: 19990 - RNA, 89 nt, synthetic construct
  misc_feature 1..89: note = engineered ribonucleic acid scaffold (ERS) sequence
  source 1..89: mol_type = other RNA
actggcggttctatctgattagtctgagagccatcaccagcgactatgtcgtagtgggtaaagctccctcttcggagggagcatcagac

SEQ ID NO: 19991 - RNA, 89 nt, synthetic construct
  misc_feature 1..89: note = engineered ribonucleic acid scaffold (ERS) sequence
  source 1..89: mol_type = other RNA
actggcggttctatctgattactctcagagccatcaccagcgactatgtcgtagtgggtaaagctccctcttcggagggagcatgagag

SEQ ID NO: 19992 - RNA, 89 nt, synthetic construct
  misc_feature 1..89: note = engineered ribonucleic acid scaffold (ERS) sequence
  source 1..89: mol_type = other RNA
actggcggtcccatctgattaccccgagagccatcaccagcgactatgtcgtagtgggtaaagctccctcttcggagggagcatcgggg

SEQ ID NO: 19993 - RNA, 89 nt, synthetic construct
  misc_feature 1..89: note = engineered ribonucleic acid scaffold (ERS) sequence
  source 1..89: mol_type = other RNA
actggcggtcctatctgattactccgagagccatcaccagcgactatgtcgtagtgggtaaagctccctcttcggagggagcatcggag

SEQ ID NO: 19994 - RNA, 89 nt, synthetic construct
  misc_feature 1..89: note = engineered ribonucleic acid scaffold (ERS) sequence
  source 1..89: mol_type = other RNA
actggcggtgggatctgattaccccgagagccatcaccagcgactatgtcgtagtgggtaaagctccctcttcggagggagcatcgggg

SEQ ID NO: 19995 - RNA, 89 nt, synthetic construct
  misc_feature 1..89: note = engineered ribonucleic acid scaffold (ERS) sequence
  source 1..89: mol_type = other RNA
actggcggtggtatctgattactccgagagccatcaccagcgactatgtcgtagtgggtaaagctccctcttcggagggagcatcggag

SEQ ID NO: 19996 - RNA, 89 nt, synthetic construct
  misc_feature 1..89: note = engineered ribonucleic acid scaffold (ERS) sequence
  source 1..89: mol_type = other RNA
actggcggttccatctgattaccctgagagccatcaccagcgactatgtcgtagtgggtaaagctccctcttcggagggagcatcaggg

SEQ ID NO: 19997 - RNA, 89 nt, synthetic construct
  misc_feature 1..89: note = engineered ribonucleic acid scaffold (ERS) sequence
  source 1..89: mol_type = other RNA
actggcggttggatctgattaccctgagagccatcaccagcgactatgtcgtagtgggtaaagctccctcttcggagggagcatcaggg

SEQ ID NO: 19998 - RNA, 89 nt, synthetic construct
  misc_feature 1..89: note = engineered ribonucleic acid scaffold (ERS) sequence
  source 1..89: mol_type = other RNA
actggcggttgtatctgattactctgagagccatcaccagcgactatgtcgtagtgggtaaagctccctcttcggagggagcatcagag

SEQ ID NO: 19999 - RNA, 89 nt, synthetic construct
  misc_feature 1..89: note = engineered ribonucleic acid scaffold (ERS) sequence
  source 1..89: mol_type = other RNA
actggcggttttatctgattactttgagagccatcaccagcgactatgtcgtagtgggtaaagctccctcttcggagggagcatcagag

SEQ ID NO: 20000 - RNA, 89 nt, synthetic construct
  misc_feature 1..89: note = engineered ribonucleic acid scaffold (ERS) sequence
  source 1..89: mol_type = other RNA
actggcggttttatctgattactctgagagccatcaccagcgactatgtcgtagtgggtaaagctccctcttcggagggagcatcagag

SEQ ID NO: 20001 - RNA, 89 nt, synthetic construct
  misc_feature 1..89: note = engineered ribonucleic acid scaffold (ERS) sequence
  source 1..89: mol_type = other RNA
actggcggttttatctgattactctgagagccatcaccagcgactatgtcgtagtgggtaaagctccctcttcggagggagcatcaaag

SEQ ID NO: 20002 - RNA, 89 nt, synthetic construct
  misc_feature 1..89: note = engineered ribonucleic acid scaffold (ERS) sequence
  source 1..89: mol_type = other RNA
actggcggttctatctgattactctgagagccatcaccagcgactatgtcgtagtgggtaaagctccctcttcggagggagcctcagag

SEQ ID NO: 20003 - RNA, 89 nt, synthetic construct
  misc_feature 1..89: note = engineered ribonucleic acid scaffold (ERS) sequence
  source 1..89: mol_type = other RNA
actggcggttctatctgattactctgagagccatcaccagcgactatgtcgtagtgggtaaagctccctcttcggagggagcgtcagag

SEQ ID NO: 20004 - RNA, 89 nt, synthetic construct
  misc_feature 1..89: note = engineered ribonucleic acid scaffold (ERS) sequence
  source 1..89: mol_type = other RNA
actggcggttctatctgattactctgagagccatcaccagcgactatgtcgtagtgggtaaagctccctcttcggagggagcatcaaag

SEQ ID NO: 20005 - RNA, 90 nt, synthetic construct
  misc_feature 1..90: note = engineered ribonucleic acid scaffold (ERS) sequence
  source 1..90: mol_type = other RNA
acacacggttctatatctgattactctgccgtgttcaccagcgactatgtcgtagtgggtaaagctccctcttcggagggagcatcagag

SEQ ID NO: 20006 - RNA, 89 nt, synthetic construct
  misc_feature 1..89: note = engineered ribonucleic acid scaffold (ERS) sequence
  source 1..89: mol_type = other RNA
acacacggttctaatctgattactctgccgtgttcaccagcgactatgtcgtagtgggtaaagctccctcttcggagggagcatcagag

SEQ ID NO: 20007 - RNA, 87 nt, synthetic construct
  misc_feature 1..87: note = engineered ribonucleic acid scaffold (ERS) sequence
  source 1..87: mol_type = other RNA
acacacggttctactgattactctgccgtgttcaccagcgactatgtcgtagtgggtaaagctccctcttcggagggagcatcagag

SEQ ID NO: 20008 - RNA, 88 nt, synthetic construct
  misc_feature 1..88: note = engineered ribonucleic acid scaffold (ERS) sequence
  source 1..88: mol_type = other RNA
acacacggttctaactgattactctgccgtgttcaccagcgactatgtcgtagtgggtaaagctccctcttcggagggagcatcagag

SEQ ID NO: 20009 - RNA, 88 nt, synthetic construct
  misc_feature 1..88: note = engineered ribonucleic acid scaffold (ERS) sequence
  source 1..88: mol_type = other RNA
acacacggttctacctgattactctgccgtgttcaccagcgactatgtcgtagtgggtaaagctccctcttcggagggagcatcagag

SEQ ID NO: 20010 - RNA, 88 nt, synthetic construct
  misc_feature 1..88: note = engineered ribonucleic acid scaffold (ERS) sequence
  source 1..88: mol_type = other RNA
acacacggttctagctgattactctgccgtgttcaccagcgactatgtcgtagtgggtaaagctccctcttcggagggagcatcagag

SEQ ID NO: 20011 - RNA, 90 nt, synthetic construct
  misc_feature 1..90: note = engineered ribonucleic acid scaffold (ERS) sequence
  source 1..90: mol_type = other RNA
acacacggttctattactgattactctgccgtgttcaccagcgactatgtcgtagtgggtaaagctccctcttcggagggagcatcagag

SEQ ID NO: 20012 - RNA, 88 nt, synthetic construct
  misc_feature 1..88: note = engineered ribonucleic acid scaffold (ERS) sequence
  source 1..88: mol_type = other RNA
acacacggttctatatgattactctgccgtgttcaccagcgactatgtcgtagtgggtaaagctccctcttcggagggagcatcagag

SEQ ID NO: 20013 - RNA, 88 nt, synthetic construct
  misc_feature 1..88: note = engineered ribonucleic acid scaffold (ERS) sequence
  source 1..88: mol_type = other RNA
acacacggttctatgtgattactctgccgtgttcaccagcgactatgtcgtagtgggtaaagctccctcttcggagggagcatcagag

SEQ ID NO: 20014 - RNA, 88 nt, synthetic construct
  misc_feature 1..88: note = engineered ribonucleic acid scaffold (ERS) sequence
  source 1..88: mol_type = other RNA
acacacggttctatttgattactctgccgtgttcaccagcgactatgtcgtagtgggtaaagctccctcttcggagggagcatcagag

SEQ ID NO: 20015 - RNA, 89 nt, synthetic construct
  misc_feature 1..89: note = engineered ribonucleic acid scaffold (ERS) sequence
  source 1..89: mol_type = other RNA
acacacggttctatcttgattactctgccgtgttcaccagcgactatgtcgtagtgggtaaagctccctcttcggagggagcatcagag

SEQ ID NO: 20016 - RNA, 88 nt, synthetic construct
  misc_feature 1..88: note = engineered ribonucleic acid scaffold (ERS) sequence
  source 1..88: mol_type = other RNA
acacacggttctatcagattactctgccgtgttcaccagcgactatgtcgtagtgggtaaagctccctcttcggagggagcatcagag

SEQ ID NO: 20017 - RNA, 88 nt, synthetic construct
  misc_feature 1..88: note = engineered ribonucleic acid scaffold (ERS) sequence
  source 1..88: mol_type = other RNA
acacacggttctatcggattactctgccgtgttcaccagcgactatgtcgtagtgggtaaagctccctcttcggagggagcatcagag

SEQ ID NO: 20018 - RNA, 89 nt, synthetic construct
  misc_feature 1..89: note = engineered ribonucleic acid scaffold (ERS) sequence
  source 1..89: mol_type = other RNA
acacacggttctatctgaattactctgccgtgttcaccagcgactatgtcgtagtgggtaaagctccctcttcggagggagcatcagag

SEQ ID NO: 20019 - RNA, 89 nt, synthetic construct
  misc_feature 1..89: note = engineered ribonucleic acid scaffold (ERS) sequence
  source 1..89: mol_type = other RNA
acacacggttctatctgtattactctgccgtgttcaccagcgactatgtcgtagtgggtaaagctccctcttcggagggagcatcagag

SEQ ID NO: 20020 - RNA, 88 nt, synthetic construct
  misc_feature 1..88: note = engineered ribonucleic acid scaffold (ERS) sequence
  source 1..88: mol_type = other RNA
acacacggttctatctggttactctgccgtgttcaccagcgactatgtcgtagtgggtaaagctccctcttcggagggagcatcagag

SEQ ID NO: 20021 - RNA, 88 nt, synthetic construct
  misc_feature 1..88: note = engineered ribonucleic acid scaffold (ERS) sequence
  source 1..88: mol_type = other RNA
acacacggttctatctgtttactctgccgtgttcaccagcgactatgtcgtagtgggtaaagctccctcttcggagggagcatcagag

SEQ ID NO: 20022 - RNA, 89 nt, synthetic construct
  misc_feature 1..89: note = engineered ribonucleic acid scaffold (ERS) sequence
  source 1..89: mol_type = other RNA
acacacggttctatctgatttactctgccgtgttcaccagcgactatgtcgtagtgggtaaagctccctcttcggagggagcatcagag

SEQ ID NO: 20023 - RNA, 88 nt, synthetic construct
  misc_feature 1..88: note = engineered ribonucleic acid scaffold (ERS) sequence
  source 1..88: mol_type = other RNA
acacacggttctatctgattgctctgccgtgttcaccagcgactatgtcgtagtgggtaaagctccctcttcggagggagcatcagag

SEQ ID NO: 20024 - RNA, 90 nt, synthetic construct
  misc_feature 1..90: note = engineered ribonucleic acid scaffold (ERS) sequence
  source 1..90: mol_type = other RNA
acactggtttctatatctgattactctgaccagttcaccagcgactatgtcgtagtgggtaaagctccctcttcggagggagcatcagag

SEQ ID NO: 20025 - RNA, 89 nt, synthetic construct
  misc_feature 1..89: note = engineered ribonucleic acid scaffold (ERS) sequence
  source 1..89: mol_type = other RNA
acactggtttctaatctgattactctgaccagttcaccagcgactatgtcgtagtgggtaaagctccctcttcggagggagcatcagag

SEQ ID NO: 20026 - RNA, 87 nt, synthetic construct
  misc_feature 1..87: note = engineered ribonucleic acid scaffold (ERS) sequence
  source 1..87: mol_type = other RNA
acactggtttctactgattactctgaccagttcaccagcgactatgtcgtagtgggtaaagctccctcttcggagggagcatcagag

SEQ ID NO: 20027 - RNA, 88 nt, synthetic construct
  misc_feature 1..88: note = engineered ribonucleic acid scaffold (ERS) sequence
  source 1..88: mol_type = other RNA
acactggtttctaactgattactctgaccagttcaccagcgactatgtcgtagtgggtaaagctccctcttcggagggagcatcagag

SEQ ID NO: 20028 - RNA, 88 nt, synthetic construct
  misc_feature 1..88: note = engineered ribonucleic acid scaffold (ERS) sequence
  source 1..88: mol_type = other RNA
acactggtttctacctgattactctgaccagttcaccagcgactatgtcgtagtgggtaaagctccctcttcggagggagcatcagag

SEQ ID NO: 20029 - RNA, 88 nt, synthetic construct
  misc_feature 1..88: note = engineered ribonucleic acid scaffold (ERS) sequence
  source 1..88: mol_type = other RNA
acactggtttctagctgattactctgaccagttcaccagcgactatgtcgtagtgggtaaagctccctcttcggagggagcatcagag

SEQ ID NO: 20030 - RNA, 90 nt, synthetic construct
  misc_feature 1..90: note = engineered ribonucleic acid scaffold (ERS) sequence
  source 1..90: mol_type = other RNA
acactggtttctattactgattactctgaccagttcaccagcgactatgtcgtagtgggtaaagctccctcttcggagggagcatcagag

SEQ ID NO: 20031 - RNA, 88 nt, synthetic construct
  misc_feature 1..88: note = engineered ribonucleic acid scaffold (ERS) sequence
  source 1..88: mol_type = other RNA
acactggtttctatatgattactctgaccagttcaccagcgactatgtcgtagtgggtaaagctccctcttcggagggagcatcagag

SEQ ID NO: 20032 - RNA, 88 nt, synthetic construct
  misc_feature 1..88: note = engineered ribonucleic acid scaffold (ERS) sequence
  source 1..88: mol_type = other RNA
acactggtttctatgtgattactctgaccagttcaccagcgactatgtcgtagtgggtaaagctccctcttcggagggagcatcagag

SEQ ID NO: 20033 - RNA, 88 nt, synthetic construct
  misc_feature 1..88: note = engineered ribonucleic acid scaffold (ERS) sequence
  source 1..88: mol_type = other RNA
acactggtttctatttgattactctgaccagttcaccagcgactatgtcgtagtgggtaaagctccctcttcggagggagcatcagag

SEQ ID NO: 20034 - RNA, 89 nt, synthetic construct
  misc_feature 1..89: note = engineered ribonucleic acid scaffold (ERS) sequence
  source 1..89: mol_type = other RNA
acactggtttctatcttgattactctgaccagttcaccagcgactatgtcgtagtgggtaaagctccctcttcggagggagcatcagag

SEQ ID NO: 20035 - RNA, 88 nt, synthetic construct
  misc_feature 1..88: note = engineered ribonucleic acid scaffold (ERS) sequence
  source 1..88: mol_type = other RNA
acactggtttctatcagattactctgaccagttcaccagcgactatgtcgtagtgggtaaagctccctcttcggagggagcatcagag

SEQ ID NO: 20036 - RNA, 88 nt, synthetic construct
  misc_feature 1..88: note = engineered ribonucleic acid scaffold (ERS) sequence
  source 1..88: mol_type = other RNA
acactggtttctatcggattactctgaccagttcaccagcgactatgtcgtagtgggtaaagctccctcttcggagggagcatcagag

SEQ ID NO: 20037 - RNA, 89 nt, synthetic construct
  misc_feature 1..89: note = engineered ribonucleic acid scaffold (ERS) sequence
  source 1..89: mol_type = other RNA
acactggtttctatctgaattactctgaccagttcaccagcgactatgtcgtagtgggtaaagctccctcttcggagggagcatcagag

SEQ ID NO: 20038 - RNA, 89 nt, synthetic construct
  misc_feature 1..89: note = engineered ribonucleic acid scaffold (ERS) sequence
  source 1..89: mol_type = other RNA
acactggtttctatctgtattactctgaccagttcaccagcgactatgtcgtagtgggtaaagctccctcttcggagggagcatcagag

SEQ ID NO: 20039 - RNA, 88 nt, synthetic construct
  misc_feature 1..88: note = engineered ribonucleic acid scaffold (ERS) sequence
  source 1..88: mol_type = other RNA
acactggtttctatctggttactctgaccagttcaccagcgactatgtcgtagtgggtaaagctccctcttcggagggagcatcagag

SEQ ID NO: 20040 - RNA, 88 nt, synthetic construct
  misc_feature 1..88: note = engineered ribonucleic acid scaffold (ERS) sequence
  source 1..88: mol_type = other RNA
acactggtttctatctgtttactctgaccagttcaccagcgactatgtcgtagtgggtaaagctccctcttcggagggagcatcagag

SEQ ID NO: 20041 - RNA, 89 nt, synthetic construct
  misc_feature 1..89: note = engineered ribonucleic acid scaffold (ERS) sequence
  source 1..89: mol_type = other RNA
acactggtttctatctgatttactctgaccagttcaccagcgactatgtcgtagtgggtaaagctccctcttcggagggagcatcagag

SEQ ID NO: 20042 - RNA, 88 nt, synthetic construct
  misc_feature 1..88: note = engineered ribonucleic acid scaffold (ERS) sequence
  source 1..88: mol_type = other RNA
acactggtttctatctgattgctctgaccagttcaccagcgactatgtcgtagtgggtaaagctccctcttcggagggagcatcagag

SEQ ID NO: 20043 - RNA, 90 nt, synthetic construct
  misc_feature 1..90: note = engineered ribonucleic acid scaffold (ERS) sequence
  source 1..90: mol_type = other RNA
acaggccgttctatatctgattactctgcggccttcaccagcgactatgtcgtagtgggtaaagctccctcttcggagggagcatcagag

SEQ ID NO: 20044 - RNA, 89 nt, synthetic construct
  misc_feature 1..89: note = engineered ribonucleic acid scaffold (ERS) sequence
  source 1..89: mol_type = other RNA
acaggccgttctaatctgattactctgcggccttcaccagcgactatgtcgtagtgggtaaagctccctcttcggagggagcatcagag

SEQ ID NO: 20045 - RNA, 87 nt, synthetic construct
  misc_feature 1..87: note = engineered ribonucleic acid scaffold (ERS) sequence
  source 1..87: mol_type = other RNA
acaggccgttctactgattactctgcggccttcaccagcgactatgtcgtagtgggtaaagctccctcttcggagggagcatcagag

SEQ ID NO: 20046 - RNA, 88 nt, synthetic construct
  misc_feature 1..88: note = engineered ribonucleic acid scaffold (ERS) sequence
  source 1..88: mol_type = other RNA
acaggccgttctaactgattactctgcggccttcaccagcgactatgtcgtagtgggtaaagctccctcttcggagggagcatcagag

SEQ ID NO: 20047 - RNA, 88 nt, synthetic construct
  misc_feature 1..88: note = engineered ribonucleic acid scaffold (ERS) sequence
  source 1..88: mol_type = other RNA
acaggccgttctacctgattactctgcggccttcaccagcgactatgtcgtagtgggtaaagctccctcttcggagggagcatcagag

SEQ ID NO: 20048 - RNA, 88 nt, synthetic construct
  misc_feature 1..88: note = engineered ribonucleic acid scaffold (ERS) sequence
  source 1..88: mol_type = other RNA
acaggccgttctagctgattactctgcggccttcaccagcgactatgtcgtagtgggtaaagctccctcttcggagggagcatcagag

SEQ ID NO: 20049 - RNA, 90 nt, synthetic construct
  misc_feature 1..90: note = engineered ribonucleic acid scaffold (ERS) sequence
  source 1..90: mol_type = other RNA
acaggccgttctattactgattactctgcggccttcaccagcgactatgtcgtagtgggtaaagctccctcttcggagggagcatcagag

SEQ ID NO: 20050 - RNA, 88 nt, synthetic construct
  misc_feature 1..88: note = engineered ribonucleic acid scaffold (ERS) sequence
  source 1..88: mol_type = other RNA
acaggccgttctatatgattactctgcggccttcaccagcgactatgtcgtagtgggtaaagctccctcttcggagggagcatcagag

SEQ ID NO: 20051 - RNA, 88 nt, synthetic construct
  misc_feature 1..88: note = engineered ribonucleic acid scaffold (ERS) sequence
  source 1..88: mol_type = other RNA
acaggccgttctatgtgattactctgcggccttcaccagcgactatgtcgtagtgggtaaagctccctcttcggagggagcatcagag

SEQ ID NO: 20052 - RNA, 88 nt, synthetic construct
  misc_feature 1..88: note = engineered ribonucleic acid scaffold (ERS) sequence
  source 1..88: mol_type = other RNA
acaggccgttctatttgattactctgcggccttcaccagcgactatgtcgtagtgggtaaagctccctcttcggagggagcatcagag

SEQ ID NO: 20053 - RNA, 89 nt, synthetic construct
  misc_feature 1..89: note = engineered ribonucleic acid scaffold (ERS) sequence
  source 1..89: mol_type = other RNA
acaggccgttctatcttgattactctgcggccttcaccagcgactatgtcgtagtgggtaaagctccctcttcggagggagcatcagag

SEQ ID NO: 20054 - RNA, 88 nt, synthetic construct
  misc_feature 1..88: note = engineered ribonucleic acid scaffold (ERS) sequence
  source 1..88: mol_type = other RNA
acaggccgttctatcagattactctgcggccttcaccagcgactatgtcgtagtgggtaaagctccctcttcggagggagcatcagag

SEQ ID NO: 20055 - RNA, 88 nt, synthetic construct
  misc_feature 1..88: note = engineered ribonucleic acid scaffold (ERS) sequence
  source 1..88: mol_type = other RNA
acaggccgttctatcggattactctgcggccttcaccagcgactatgtcgtagtgggtaaagctccctcttcggagggagcatcagag

SEQ ID NO: 20056 - RNA, 89 nt, synthetic construct
  misc_feature 1..89: note = engineered ribonucleic acid scaffold (ERS) sequence
  source 1..89: mol_type = other RNA
acaggccgttctatctgaattactctgcggccttcaccagcgactatgtcgtagtgggtaaagctccctcttcggagggagcatcagag

SEQ ID NO: 20057 - RNA, 89 nt, synthetic construct
  misc_feature 1..89: note = engineered ribonucleic acid scaffold (ERS) sequence
  source 1..89: mol_type = other RNA
acaggccgttctatctgtattactctgcggccttcaccagcgactatgtcgtagtgggtaaagctccctcttcggagggagcatcagag

SEQ ID NO: 20058 - RNA, 88 nt, synthetic construct
  misc_feature 1..88: note = engineered ribonucleic acid scaffold (ERS) sequence
  source 1..88: mol_type = other RNA
acaggccgttctatctggttactctgcggccttcaccagcgactatgtcgtagtgggtaaagctccctcttcggagggagcatcagag

SEQ ID NO: 20059 - RNA, 88 nt, synthetic construct
  misc_feature 1..88: note = engineered ribonucleic acid scaffold (ERS) sequence
  source 1..88: mol_type = other RNA
acaggccgttctatctgtttactctgcggccttcaccagcgactatgtcgtagtgggtaaagctccctcttcggagggagcatcagag

SEQ ID NO: 20060 - RNA, 89 nt, synthetic construct
  misc_feature 1..89: note = engineered ribonucleic acid scaffold (ERS) sequence
  source 1..89: mol_type = other RNA
acaggccgttctatctgatttactctgcggccttcaccagcgactatgtcgtagtgggtaaagctccctcttcggagggagcatcagag

SEQ ID NO: 20061 - RNA, 88 nt, synthetic construct
  misc_feature 1..88: note = engineered ribonucleic acid scaffold (ERS) sequence
  source 1..88: mol_type = other RNA
acaggccgttctatctgattgctctgcggccttcaccagcgactatgtcgtagtgggtaaagctccctcttcggagggagcatcagag

SEQ ID NO: 20062 - RNA, 90 nt, synthetic construct
  misc_feature 1..90: note = engineered ribonucleic acid scaffold (ERS) sequence
  source 1..90: mol_type = other RNA
acaggtccttctatatctgattactctgggaccttcaccagcgactatgtcgtagtgggtaaagctccctcttcggagggagcatcagag

SEQ ID NO: 20063 - RNA, 89 nt, synthetic construct
  misc_feature 1..89: note = engineered ribonucleic acid scaffold (ERS) sequence
  source 1..89: mol_type = other RNA
acaggtccttctaatctgattactctgggaccttcaccagcgactatgtcgtagtgggtaaagctccctcttcggagggagcatcagag

SEQ ID NO: 20064 - RNA, 87 nt, synthetic construct
  misc_feature 1..87: note = engineered ribonucleic acid scaffold (ERS) sequence
  source 1..87: mol_type = other RNA
acaggtccttctactgattactctgggaccttcaccagcgactatgtcgtagtgggtaaagctccctcttcggagggagcatcagag

SEQ ID NO: 20065 - RNA, 88 nt, synthetic construct
  misc_feature 1..88: note = engineered ribonucleic acid scaffold (ERS) sequence
  source 1..88: mol_type = other RNA
acaggtccttctaactgattactctgggaccttcaccagcgactatgtcgtagtgggtaaagctccctcttcggagggagcatcagag

SEQ ID NO: 20066 - RNA, 88 nt, synthetic construct
  misc_feature 1..88: note = engineered ribonucleic acid scaffold (ERS) sequence
  source 1..88: mol_type = other RNA
acaggtccttctacctgattactctgggaccttcaccagcgactatgtcgtagtgggtaaagctccctcttcggagggagcatcagag

SEQ ID NO: 20067 - RNA, 88 nt, synthetic construct
  misc_feature 1..88: note = engineered ribonucleic acid scaffold (ERS) sequence
  source 1..88: mol_type = other RNA
acaggtccttctagctgattactctgggaccttcaccagcgactatgtcgtagtgggtaaagctccctcttcggagggagcatcagag

SEQ ID NO: 20068 - RNA, 90 nt, synthetic construct
  misc_feature 1..90: note = engineered ribonucleic acid scaffold (ERS) sequence
  source 1..90: mol_type = other RNA
acaggtccttctattactgattactctgggaccttcaccagcgactatgtcgtagtgggtaaagctccctcttcggagggagcatcagag

SEQ ID NO: 20069 - RNA, 88 nt, synthetic construct
  misc_feature 1..88: note = engineered ribonucleic acid scaffold (ERS) sequence
  source 1..88: mol_type = other RNA
acaggtccttctatatgattactctgggaccttcaccagcgactatgtcgtagtgggtaaagctccctcttcggagggagcatcagag

SEQ ID NO: 20070 - RNA, 88 nt, synthetic construct
  misc_feature 1..88: note = engineered ribonucleic acid scaffold (ERS) sequence
  source 1..88: mol_type = other RNA
acaggtccttctatgtgattactctgggaccttcaccagcgactatgtcgtagtgggtaaagctccctcttcggagggagcatcagag

SEQ ID NO: 20071 - RNA, 88 nt, synthetic construct
  misc_feature 1..88: note = engineered ribonucleic acid scaffold (ERS) sequence
  source 1..88: mol_type = other RNA
acaggtccttctatttgattactctgggaccttcaccagcgactatgtcgtagtgggtaaagctccctcttcggagggagcatcagag

SEQ ID NO: 20072 - RNA, 89 nt, synthetic construct
  misc_feature 1..89: note = engineered ribonucleic acid scaffold (ERS) sequence
  source 1..89: mol_type = other RNA
acaggtccttctatcttgattactctgggaccttcaccagcgactatgtcgtagtgggtaaagctccctcttcggagggagcatcagag

SEQ ID NO: 20073 - RNA, 88 nt, synthetic construct
  misc_feature 1..88: note = engineered ribonucleic acid scaffold (ERS) sequence
  source 1..88: mol_type = other RNA
acaggtccttctatcagattactctgggaccttcaccagcgactatgtcgtagtgggtaaagctccctcttcggagggagcatcagag

SEQ ID NO: 20074 - RNA, 88 nt, synthetic construct
  misc_feature 1..88: note = engineered ribonucleic acid scaffold (ERS) sequence
  source 1..88: mol_type = other RNA
acaggtccttctatcggattactctgggaccttcaccagcgactatgtcgtagtgggtaaagctccctcttcggagggagcatcagag

SEQ ID NO: 20075 - RNA, 89 nt, synthetic construct
  misc_feature 1..89: note = engineered ribonucleic acid scaffold (ERS) sequence
  source 1..89: mol_type = other RNA
acaggtccttctatctgaattactctgggaccttcaccagcgactatgtcgtagtgggtaaagctccctcttcggagggagcatcagag

SEQ ID NO: 20076 - RNA, 89 nt, synthetic construct
  misc_feature 1..89: note = engineered ribonucleic acid scaffold (ERS) sequence
  source 1..89: mol_type = other RNA
acaggtccttctatctgtattactctgggaccttcaccagcgactatgtcgtagtgggtaaagctccctcttcggagggagcatcagag

SEQ ID NO: 20077 - RNA, 88 nt, synthetic construct
  misc_feature 1..88: note = engineered ribonucleic acid scaffold (ERS) sequence
  source 1..88: mol_type = other RNA
acaggtccttctatctggttactctgggaccttcaccagcgactatgtcgtagtgggtaaagctccctcttcggagggagcatcagag

SEQ ID NO: 20078 - RNA, 88 nt, synthetic construct
  misc_feature 1..88: note = engineered ribonucleic acid scaffold (ERS) sequence
  source 1..88: mol_type = other RNA
acaggtccttctatctgtttactctgggaccttcaccagcgactatgtcgtagtgggtaaagctccctcttcggagggagcatcagag

SEQ ID NO: 20079 - RNA, 89 nt, synthetic construct
  misc_feature 1..89: note = engineered ribonucleic acid scaffold (ERS) sequence
  source 1..89: mol_type = other RNA
acaggtccttctatctgatttactctgggaccttcaccagcgactatgtcgtagtgggtaaagctccctcttcggagggagcatcagag

SEQ ID NO: 20080 - RNA, 88 nt, synthetic construct
  misc_feature 1..88: note = engineered ribonucleic acid scaffold (ERS) sequence
  source 1..88: mol_type = other RNA
acaggtccttctatctgattgctctgggaccttcaccagcgactatgtcgtagtgggtaaagctccctcttcggagggagcatcagag

SEQ ID NO: 20081 - RNA, 90 nt, synthetic construct
  misc_feature 1..90: note = engineered ribonucleic acid scaffold (ERS) sequence
  source 1..90: mol_type = other RNA
accagcaattctatatctgattactctgttgctgtcaccagcgactatgtcgtagtgggtaaagctccctcttcggagggagcatcagag

SEQ ID NO: 20082 - RNA, 89 nt, synthetic construct
  misc_feature 1..89: note = engineered ribonucleic acid scaffold (ERS) sequence
  source 1..89: mol_type = other RNA
accagcaattctaatctgattactctgttgctgtcaccagcgactatgtcgtagtgggtaaagctccctcttcggagggagcatcagag

SEQ ID NO: 20083 - RNA, 87 nt, synthetic construct
  misc_feature 1..87: note = engineered ribonucleic acid scaffold (ERS) sequence
  source 1..87: mol_type = other RNA
accagcaattctactgattactctgttgctgtcaccagcgactatgtcgtagtgggtaaagctccctcttcggagggagcatcagag

SEQ ID NO: 20084 - RNA, 88 nt, synthetic construct
  misc_feature 1..88: note = engineered ribonucleic acid scaffold (ERS) sequence
  source 1..88: mol_type = other RNA
accagcaattctaactgattactctgttgctgtcaccagcgactatgtcgtagtgggtaaagctccctcttcggagggagcatcagag

SEQ ID NO: 20085 - RNA, 88 nt, synthetic construct
  misc_feature 1..88: note = engineered ribonucleic acid scaffold (ERS) sequence
  source 1..88: mol_type = other RNA
accagcaattctacctgattactctgttgctgtcaccagcgactatgtcgtagtgggtaaagctccctcttcggagggagcatcagag

SEQ ID NO: 20086 - RNA, 88 nt, synthetic construct
  misc_feature 1..88: note = engineered ribonucleic acid scaffold (ERS) sequence
  source 1..88: mol_type = other RNA
accagcaattctagctgattactctgttgctgtcaccagcgactatgtcgtagtgggtaaagctccctcttcggagggagcatcagag

SEQ ID NO: 20087 - RNA, 90 nt, synthetic construct
  misc_feature 1..90: note = engineered ribonucleic acid scaffold (ERS) sequence
  source 1..90: mol_type = other RNA
accagcaattctattactgattactctgttgctgtcaccagcgactatgtcgtagtgggtaaagctccctcttcggagggagcatcagag

SEQ ID NO: 20088 - RNA, 88 nt, synthetic construct
  misc_feature 1..88: note = engineered ribonucleic acid scaffold (ERS) sequence
  source 1..88: mol_type = other RNA
accagcaattctatatgattactctgttgctgtcaccagcgactatgtcgtagtgggtaaagctccctcttcggagggagcatcagag

SEQ ID NO: 20089 - RNA, 88 nt, synthetic construct
  misc_feature 1..88: note = engineered ribonucleic acid scaffold (ERS) sequence
  source 1..88: mol_type = other RNA
accagcaattctatgtgattactctgttgctgtcaccagcgactatgtcgtagtgggtaaagctccctcttcggagggagcatcagag

SEQ ID NO: 20090 - RNA, 88 nt, synthetic construct
  misc_feature 1..88: note = engineered ribonucleic acid scaffold (ERS) sequence
  source 1..88: mol_type = other RNA
accagcaattctatttgattactctgttgctgtcaccagcgactatgtcgtagtgggtaaagctccctcttcggagggagcatcagag

SEQ ID NO: 20091 - RNA, 89 nt, synthetic construct
  misc_feature 1..89: note = engineered ribonucleic acid scaffold (ERS) sequence
  source 1..89: mol_type = other RNA
accagcaattctatcttgattactctgttgctgtcaccagcgactatgtcgtagtgggtaaagctccctcttcggagggagcatcagag

SEQ ID NO: 20092 - RNA, 88 nt, synthetic construct
  misc_feature 1..88: note = engineered ribonucleic acid scaffold (ERS) sequence
  source 1..88: mol_type = other RNA
accagcaattctatcagattactctgttgctgtcaccagcgactatgtcgtagtgggtaaagctccctcttcggagggagcatcagag

SEQ ID NO: 20093 - RNA, 88 nt, synthetic construct
  misc_feature 1..88: note = engineered ribonucleic acid scaffold (ERS) sequence
  source 1..88: mol_type = other RNA
accagcaattctatcggattactctgttgctgtcaccagcgactatgtcgtagtgggtaaagctccctcttcggagggagcatcagag

SEQ ID NO: 20094 - RNA, 89 nt, synthetic construct
  misc_feature 1..89: note = engineered ribonucleic acid scaffold (ERS) sequence
  source 1..89: mol_type = other RNA
accagcaattctatctgaattactctgttgctgtcaccagcgactatgtcgtagtgggtaaagctccctcttcggagggagcatcagag

SEQ ID NO: 20095 - RNA, 89 nt, synthetic construct
  misc_feature 1..89: note = engineered ribonucleic acid scaffold (ERS) sequence
  source 1..89: mol_type = other RNA
accagcaattctatctgtattactctgttgctgtcaccagcgactatgtcgtagtgggtaaagctccctcttcggagggagcatcagag

SEQ ID NO: 20096 - RNA, 88 nt, synthetic construct
  misc_feature 1..88: note = engineered ribonucleic acid scaffold (ERS) sequence
  source 1..88: mol_type = other RNA
accagcaattctatctggttactctgttgctgtcaccagcgactatgtcgtagtgggtaaagctccctcttcggagggagcatcagag

SEQ ID NO: 20097 - RNA, 88 nt, synthetic construct
  misc_feature 1..88: note = engineered ribonucleic acid scaffold (ERS) sequence
  source 1..88: mol_type = other RNA
accagcaattctatctgtttactctgttgctgtcaccagcgactatgtcgtagtgggtaaagctccctcttcggagggagcatcagag

SEQ ID NO: 20098 - RNA, 89 nt, synthetic construct
  misc_feature 1..89: note = engineered ribonucleic acid scaffold (ERS) sequence
  source 1..89: mol_type = other RNA
accagcaattctatctgatttactctgttgctgtcaccagcgactatgtcgtagtgggtaaagctccctcttcggagggagcatcagag

SEQ ID NO: 20099 - RNA, 88 nt, synthetic construct
  misc_feature 1..88: note = engineered ribonucleic acid scaffold (ERS) sequence
  source 1..88: mol_type = other RNA
accagcaattctatctgattgctctgttgctgtcaccagcgactatgtcgtagtgggtaaagctccctcttcggagggagcatcagag

SEQ ID NO: 20100 - RNA, 90 nt, synthetic construct
  misc_feature 1..90: note = engineered ribonucleic acid scaffold (ERS) sequence
  source 1..90: mol_type = other RNA
accgagacttctatatctgattactctgggctcgtcaccagcgactatgtcgtagtgggtaaagctccctcttcggagggagcatcagag

SEQ ID NO: 20101 - RNA, 89 nt, synthetic construct
  misc_feature 1..89: note = engineered ribonucleic acid scaffold (ERS) sequence
  source 1..89: mol_type = other RNA
accgagacttctaatctgattactctgggctcgtcaccagcgactatgtcgtagtgggtaaagctccctcttcggagggagcatcagag

SEQ ID NO: 20102 - RNA, 87 nt, synthetic construct
  misc_feature 1..87: note = engineered ribonucleic acid scaffold (ERS) sequence
  source 1..87: mol_type = other RNA
accgagacttctactgattactctgggctcgtcaccagcgactatgtcgtagtgggtaaagctccctcttcggagggagcatcagag

SEQ ID NO: 20103 - RNA, 88 nt, synthetic construct
  misc_feature 1..88: note = engineered ribonucleic acid scaffold (ERS) sequence
  source 1..88: mol_type = other RNA
accgagacttctaactgattactctgggctcgtcaccagcgactatgtcgtagtgggtaaagctccctcttcggagggagcatcagag

SEQ ID NO: 20104 - RNA, 88 nt, synthetic construct
  misc_feature 1..88: note = engineered ribonucleic acid scaffold (ERS) sequence
  source 1..88: mol_type = other RNA
accgagacttctacctgattactctgggctcgtcaccagcgactatgtcgtagtgggtaaagctccctcttcggagggagcatcagag

SEQ ID NO: 20105 - RNA, 88 nt, synthetic construct
  misc_feature 1..88: note = engineered ribonucleic acid scaffold (ERS) sequence
  source 1..88: mol_type = other RNA
accgagacttctagctgattactctgggctcgtcaccagcgactatgtcgtagtgggtaaagctccctcttcggagggagcatcagag

SEQ ID NO: 20106 - RNA, 90 nt, synthetic construct
  misc_feature 1..90: note = engineered ribonucleic acid scaffold (ERS) sequence
  source 1..90: mol_type = other RNA
accgagacttctattactgattactctgggctcgtcaccagcgactatgtcgtagtgggtaaagctccctcttcggagggagcatcagag

SEQ ID NO: 20107 - RNA, 88 nt, synthetic construct
  misc_feature 1..88: note = engineered ribonucleic acid scaffold (ERS) sequence
  source 1..88: mol_type = other RNA
accgagacttctatatgattactctgggctcgtcaccagcgactatgtcgtagtgggtaaagctccctcttcggagggagcatcagag

SEQ ID NO: 20108 - RNA, 88 nt, synthetic construct
  misc_feature 1..88: note = engineered ribonucleic acid scaffold (ERS) sequence
  source 1..88: mol_type = other RNA
accgagacttctatgtgattactctgggctcgtcaccagcgactatgtcgtagtgggtaaagctccctcttcggagggagcatcagag

SEQ ID NO: 20109 - RNA, 88 nt, synthetic construct
  misc_feature 1..88: note = engineered ribonucleic acid scaffold (ERS) sequence
  source 1..88: mol_type = other RNA
accgagacttctatttgattactctgggctcgtcaccagcgactatgtcgtagtgggtaaagctccctcttcggagggagcatcagag

SEQ ID NO: 20110 - RNA, 89 nt, synthetic construct
  misc_feature 1..89: note = engineered ribonucleic acid scaffold (ERS) sequence
  source 1..89: mol_type = other RNA
accgagacttctatcttgattactctgggctcgtcaccagcgactatgtcgtagtgggtaaagctccctcttcggagggagcatcagag

SEQ ID NO: 20111 - RNA, 88 nt, synthetic construct
  misc_feature 1..88: note = engineered ribonucleic acid scaffold (ERS) sequence
  source 1..88: mol_type = other RNA
accgagacttctatcagattactctgggctcgtcaccagcgactatgtcgtagtgggtaaagctccctcttcggagggagcatcagag

SEQ ID NO: 20112 - RNA, 88 nt, synthetic construct
  misc_feature 1..88: note = engineered ribonucleic acid scaffold (ERS) sequence
  source 1..88: mol_type = other RNA
accgagacttctatcggattactctgggctcgtcaccagcgactatgtcgtagtgggtaaagctccctcttcggagggagcatcagag

SEQ ID NO: 20113 - RNA, 89 nt, synthetic construct
  misc_feature 1..89: note = engineered ribonucleic acid scaffold (ERS) sequence
  source 1..89: mol_type = other RNA
accgagacttctatctgaattactctgggctcgtcaccagcgactatgtcgtagtgggtaaagctccctcttcggagggagcatcagag

SEQ ID NO: 20114 - RNA, 89 nt, synthetic construct
  misc_feature 1..89: note = engineered ribonucleic acid scaffold (ERS) sequence
  source 1..89: mol_type = other RNA
accgagacttctatctgtattactctgggctcgtcaccagcgactatgtcgtagtgggtaaagctccctcttcggagggagcatcagag

SEQ ID NO: 20115 - RNA, 88 nt, synthetic construct
  misc_feature 1..88: note = engineered ribonucleic acid scaffold (ERS) sequence
  source 1..88: mol_type = other RNA
accgagacttctatctggttactctgggctcgtcaccagcgactatgtcgtagtgggtaaagctccctcttcggagggagcatcagag

SEQ ID NO: 20116 - RNA, 88 nt, synthetic construct
  misc_feature 1..88: note = engineered ribonucleic acid scaffold (ERS) sequence
  source 1..88: mol_type = other RNA
accgagacttctatctgtttactctgggctcgtcaccagcgactatgtcgtagtgggtaaagctccctcttcggagggagcatcagag

SEQ ID NO: 20117 - RNA, 89 nt, synthetic construct
  misc_feature 1..89: note = engineered ribonucleic acid scaffold (ERS) sequence
  source 1..89: mol_type = other RNA
accgagacttctatctgatttactctgggctcgtcaccagcgactatgtcgtagtgggtaaagctccctcttcggagggagcatcagag

SEQ ID NO: 20118 - RNA, 88 nt, synthetic construct
  misc_feature 1..88: note = engineered ribonucleic acid scaffold (ERS) sequence
  source 1..88: mol_type = other RNA
accgagacttctatctgattgctctgggctcgtcaccagcgactatgtcgtagtgggtaaagctccctcttcggagggagcatcagag

SEQ ID NO: 20119 - RNA, 90 nt, synthetic construct
  misc_feature 1..90: note = engineered ribonucleic acid scaffold (ERS) sequence
  source 1..90: mol_type = other RNA
acctgtagttctatatctgattactctgctacagtcaccagcgactatgtcgtagtgggtaaagctccctcttcggagggagcatcagag

SEQ ID NO: 20120 - RNA, 89 nt, synthetic construct
  misc_feature 1..89: note = engineered ribonucleic acid scaffold (ERS) sequence
  source 1..89: mol_type = other RNA
acctgtagttctaatctgattactctgctacagtcaccagcgactatgtcgtagtgggtaaagctccctcttcggagggagcatcagag

SEQ ID NO: 20121 - RNA, 87 nt, synthetic construct
  misc_feature 1..87: note = engineered ribonucleic acid scaffold (ERS) sequence
  source 1..87: mol_type = other RNA
acctgtagttctactgattactctgctacagtcaccagcgactatgtcgtagtgggtaaagctccctcttcggagggagcatcagag

SEQ ID NO: 20122 - RNA, 88 nt, synthetic construct
  misc_feature 1..88: note = engineered ribonucleic acid scaffold (ERS) sequence
  source 1..88: mol_type = other RNA
acctgtagttctaactgattactctgctacagtcaccagcgactatgtcgtagtgggtaaagctccctcttcggagggagcatcagag

SEQ ID NO: 20123 - RNA, 88 nt, synthetic construct
  misc_feature 1..88: note = engineered ribonucleic acid scaffold (ERS) sequence
  source 1..88: mol_type = other RNA
acctgtagttctacctgattactctgctacagtcaccagcgactatgtcgtagtgggtaaagctccctcttcggagggagcatcagag

SEQ ID NO: 20124 - RNA, 88 nt, synthetic construct
  misc_feature 1..88: note = engineered ribonucleic acid scaffold (ERS) sequence
  source 1..88: mol_type = other RNA
acctgtagttctagctgattactctgctacagtcaccagcgactatgtcgtagtgggtaaagctccctcttcggagggagcatcagag

SEQ ID NO: 20125 - RNA, 90 nt, synthetic construct
  misc_feature 1..90: note = engineered ribonucleic acid scaffold (ERS) sequence
  source 1..90: mol_type = other RNA
acctgtagttctattactgattactctgctacagtcaccagcgactatgtcgtagtgggtaaagctccctcttcggagggagcatcagag

SEQ ID NO: 20126 - RNA, 88 nt, synthetic construct
  misc_feature 1..88: note = engineered ribonucleic acid scaffold (ERS) sequence
  source 1..88: mol_type = other RNA
acctgtagttctatatgattactctgctacagtcaccagcgactatgtcgtagtgggtaaagctccctcttcggagggagcatcagag

SEQ ID NO: 20127 - RNA, 88 nt, synthetic construct
  misc_feature 1..88: note = engineered ribonucleic acid scaffold (ERS) sequence
  source 1..88: mol_type = other RNA
acctgtagttctatgtgattactctgctacagtcaccagcgactatgtcgtagtgggtaaagctccctcttcggagggagcatcagag

SEQ ID NO: 20128 - RNA, 88 nt, synthetic construct
  misc_feature 1..88: note = engineered ribonucleic acid scaffold (ERS) sequence
  source 1..88: mol_type = other RNA
acctgtagttctatttgattactctgctacagtcaccagcgactatgtcgtagtgggtaaagctccctcttcggagggagcatcagag

SEQ ID NO: 20129 - RNA, 89 nt, synthetic construct
  misc_feature 1..89: note = engineered ribonucleic acid scaffold (ERS) sequence
  source 1..89: mol_type = other RNA
acctgtagttctatcttgattactctgctacagtcaccagcgactatgtcgtagtgggtaaagctccctcttcggagggagcatcagag

SEQ ID NO: 20130 - RNA, 88 nt, synthetic construct
  misc_feature 1..88: note = engineered ribonucleic acid scaffold (ERS) sequence
  source 1..88: mol_type = other RNA
acctgtagttctatcagattactctgctacagtcaccagcgactatgtcgtagtgggtaaagctccctcttcggagggagcatcagag

SEQ ID NO: 20131 - RNA, 88 nt, synthetic construct
  misc_feature 1..88: note = engineered ribonucleic acid scaffold (ERS) sequence
  source 1..88: mol_type = other RNA
acctgtagttctatcggattactctgctacagtcaccagcgactatgtcgtagtgggtaaagctccctcttcggagggagcatcagag

SEQ ID NO: 20132 - RNA, 89 nt, synthetic construct
  misc_feature 1..89: note = engineered ribonucleic acid scaffold (ERS) sequence
  source 1..89: mol_type = other RNA
acctgtagttctatctgaattactctgctacagtcaccagcgactatgtcgtagtgggtaaagctccctcttcggagggagcatcagag

SEQ ID NO: 20133 - RNA, 89 nt, synthetic construct
  misc_feature 1..89: note = engineered ribonucleic acid scaffold (ERS) sequence
  source 1..89: mol_type = other RNA
acctgtagttctatctgtattactctgctacagtcaccagcgactatgtcgtagtgggtaaagctccctcttcggagggagcatcagag

SEQ ID NO: 20134 - RNA, 88 nt, synthetic construct
  misc_feature 1..88: note = engineered ribonucleic acid scaffold (ERS) sequence
  source 1..88: mol_type = other RNA
acctgtagttctatctggttactctgctacagtcaccagcgactatgtcgtagtgggtaaagctccctcttcggagggagcatcagag

SEQ ID NO: 20135 - RNA, 88 nt, synthetic construct
  misc_feature 1..88: note = engineered ribonucleic acid scaffold (ERS) sequence
  source 1..88: mol_type = other RNA
acctgtagttctatctgtttactctgctacagtcaccagcgactatgtcgtagtgggtaaagctccctcttcggagggagcatcagag

SEQ ID NO: 20136 - RNA, 89 nt, synthetic construct
  misc_feature 1..89: note = engineered ribonucleic acid scaffold (ERS) sequence
  source 1..89: mol_type = other RNA
acctgtagttctatctgatttactctgctacagtcaccagcgactatgtcgtagtgggtaaagctccctcttcggagggagcatcagag

SEQ ID NO: 20137 - RNA, 88 nt, synthetic construct
  misc_feature 1..88: note = engineered ribonucleic acid scaffold (ERS) sequence
  source 1..88: mol_type = other RNA
acctgtagttctatctgattgctctgctacagtcaccagcgactatgtcgtagtgggtaaagctccctcttcggagggagcatcagag

SEQ ID NO: 20138 - RNA, 90 nt, synthetic construct
  misc_feature 1..90: note = engineered ribonucleic acid scaffold (ERS) sequence
  source 1..90: mol_type = other RNA
acgagcacttctatatctgattactctggggctctcaccagcgactatgtcgtagtgggtaaagctccctcttcggagggagcatcagag

SEQ ID NO: 20139 - RNA, 89 nt, synthetic construct
  misc_feature 1..89: note = engineered ribonucleic acid scaffold (ERS) sequence
  source 1..89: mol_type = other RNA
acgagcacttctaatctgattactctggggctctcaccagcgactatgtcgtagtgggtaaagctccctcttcggagggagcatcagag

SEQ ID NO: 20140 - RNA, 87 nt, synthetic construct
  misc_feature 1..87: note = engineered ribonucleic acid scaffold (ERS) sequence
  source 1..87: mol_type = other RNA
acgagcacttctactgattactctggggctctcaccagcgactatgtcgtagtgggtaaagctccctcttcggagggagcatcagag

SEQ ID NO: 20141 - RNA, 88 nt, synthetic construct
  misc_feature 1..88: note = engineered ribonucleic acid scaffold (ERS) sequence
  source 1..88: mol_type = other RNA
acgagcacttctaactgattactctggggctctcaccagcgactatgtcgtagtgggtaaagctccctcttcggagggagcatcagag

SEQ ID NO: 20142 - RNA, 88 nt, synthetic construct
  misc_feature 1..88: note = engineered ribonucleic acid scaffold (ERS) sequence
  source 1..88: mol_type = other RNA
acgagcacttctacctgattactctggggctctcaccagcgactatgtcgtagtgggtaaagctccctcttcggagggagcatcagag

SEQ ID NO: 20143 - RNA, 88 nt, synthetic construct
  misc_feature 1..88: note = engineered ribonucleic acid scaffold (ERS) sequence
  source 1..88: mol_type = other RNA
acgagcacttctagctgattactctggggctctcaccagcgactatgtcgtagtgggtaaagctccctcttcggagggagcatcagag

SEQ ID NO: 20144 - RNA, 90 nt, synthetic construct
  misc_feature 1..90: note = engineered ribonucleic acid scaffold (ERS) sequence
  source 1..90: mol_type = other RNA
acgagcacttctattactgattactctggggctctcaccagcgactatgtcgtagtgggtaaagctccctcttcggagggagcatcagag

SEQ ID NO: 20145 - RNA, 88 nt, synthetic construct
  misc_feature 1..88: note = engineered ribonucleic acid scaffold (ERS) sequence
  source 1..88: mol_type = other RNA
acgagcacttctatatgattactctggggctctcaccagcgactatgtcgtagtgggtaaagctccctcttcggagggagcatcagag

SEQ ID NO: 20146 - RNA, 88 nt, synthetic construct
  misc_feature 1..88: note = engineered ribonucleic acid scaffold (ERS) sequence
  source 1..88: mol_type = other RNA
acgagcacttctatgtgattactctggggctctcaccagcgactatgtcgtagtgggtaaagctccctcttcggagggagcatcagag

SEQ ID NO: 20147 - RNA, 88 nt, synthetic construct
  misc_feature 1..88: note = engineered ribonucleic acid scaffold (ERS) sequence
  source 1..88: mol_type = other RNA
acgagcacttctatttgattactctggggctctcaccagcgactatgtcgtagtgggtaaagctccctcttcggagggagcatcagag

SEQ ID NO: 20148 - RNA, 89 nt, synthetic construct
  misc_feature 1..89: note = engineered ribonucleic acid scaffold (ERS) sequence
  source 1..89: mol_type = other RNA
acgagcacttctatcttgattactctggggctctcaccagcgactatgtcgtagtgggtaaagctccctcttcggagggagcatcagag

SEQ ID NO: 20149 - RNA, 88 nt, synthetic construct
  misc_feature 1..88: note = engineered ribonucleic acid scaffold (ERS) sequence
  source 1..88: mol_type = other RNA
acgagcacttctatcagattactctggggctctcaccagcgactatgtcgtagtgggtaaagctccctcttcggagggagcatcagag

SEQ ID NO: 20150 - RNA, 88 nt, synthetic construct
  misc_feature 1..88: note = engineered ribonucleic acid scaffold (ERS) sequence
  source 1..88: mol_type = other RNA
acgagcacttctatcggattactctggggctctcaccagcgactatgtcgtagtgggtaaagctccctcttcggagggagcatcagag

SEQ ID NO: 20151 - RNA, 89 nt, synthetic construct
  misc_feature 1..89: note = engineered ribonucleic acid scaffold (ERS) sequence
  source 1..89: mol_type = other RNA
acgagcacttctatctgaattactctggggctctcaccagcgactatgtcgtagtgggtaaagctccctcttcggagggagcatcagag

SEQ ID NO: 20152 - RNA, 89 nt, synthetic construct
  misc_feature 1..89: note = engineered ribonucleic acid scaffold (ERS) sequence
  source 1..89: mol_type = other RNA
acgagcacttctatctgtattactctggggctctcaccagcgactatgtcgtagtgggtaaagctccctcttcggagggagcatcagag

SEQ ID NO: 20153 - RNA, 88 nt, synthetic construct
  misc_feature 1..88: note = engineered ribonucleic acid scaffold (ERS) sequence
  source 1..88: mol_type = other RNA
acgagcacttctatctggttactctggggctctcaccagcgactatgtcgtagtgggtaaagctccctcttcggagggagcatcagag

SEQ ID NO: 20154 - RNA, 88 nt, synthetic construct
  misc_feature 1..88: note = engineered ribonucleic acid scaffold (ERS) sequence
  source 1..88: mol_type = other RNA
acgagcacttctatctgtttactctggggctctcaccagcgactatgtcgtagtgggtaaagctccctcttcggagggagcatcagag

SEQ ID NO: 20155 - RNA, 89 nt, synthetic construct
  misc_feature 1..89: note = engineered ribonucleic acid scaffold (ERS) sequence
  source 1..89: mol_type = other RNA
acgagcacttctatctgatttactctggggctctcaccagcgactatgtcgtagtgggtaaagctccctcttcggagggagcatcagag

SEQ ID NO: 20156 - RNA, 88 nt, synthetic construct
  misc_feature 1..88: note = engineered ribonucleic acid scaffold (ERS) sequence
  source 1..88: mol_type = other RNA
acgagcacttctatctgattgctctggggctctcaccagcgactatgtcgtagtgggtaaagctccctcttcggagggagcatcagag

SEQ ID NO: 20157 - RNA, 90 nt, synthetic construct
  misc_feature 1..90: note = engineered ribonucleic acid scaffold (ERS) sequence
  source 1..90: mol_type = other RNA
acgaggtgttctatatctgattactctgcacctctcaccagcgactatgtcgtagtgggtaaagctccctcttcggagggagcatcagag

SEQ ID NO: 20158 - RNA, 89 nt, synthetic construct
  misc_feature 1..89: note = engineered ribonucleic acid scaffold (ERS) sequence
  source 1..89: mol_type = other RNA
acgaggtgttctaatctgattactctgcacctctcaccagcgactatgtcgtagtgggtaaagctccctcttcggagggagcatcagag

SEQ ID NO: 20159 - RNA, 87 nt, synthetic construct
  misc_feature 1..87: note = engineered ribonucleic acid scaffold (ERS) sequence
  source 1..87: mol_type = other RNA
acgaggtgttctactgattactctgcacctctcaccagcgactatgtcgtagtgggtaaagctccctcttcggagggagcatcagag

SEQ ID NO: 20160 - RNA, 88 nt, synthetic construct
  misc_feature 1..88: note = engineered ribonucleic acid scaffold (ERS) sequence
  source 1..88: mol_type = other RNA
acgaggtgttctaactgattactctgcacctctcaccagcgactatgtcgtagtgggtaaagctccctcttcggagggagcatcagag

SEQ ID NO: 20161 - RNA, 88 nt, synthetic construct
  misc_feature 1..88: note = engineered ribonucleic acid scaffold (ERS) sequence
  source 1..88: mol_type = other RNA
acgaggtgttctacctgattactctgcacctctcaccagcgactatgtcgtagtgggtaaagctccctcttcggagggagcatcagag

SEQ ID NO: 20162 - RNA, 88 nt, synthetic construct
  misc_feature 1..88: note = engineered ribonucleic acid scaffold (ERS) sequence
  source 1..88: mol_type = other RNA
acgaggtgttctagctgattactctgcacctctcaccagcgactatgtcgtagtgggtaaagctccctcttcggagggagcatcagag

SEQ ID NO: 20163 - RNA, 90 nt, synthetic construct
  misc_feature 1..90: note = engineered ribonucleic acid scaffold (ERS) sequence
  source 1..90: mol_type = other RNA
acgaggtgttctattactgattactctgcacctctcaccagcgactatgtcgtagtgggtaaagctccctcttcggagggagcatcagag

SEQ ID NO: 20164 - RNA, 88 nt, synthetic construct
  misc_feature 1..88: note = engineered ribonucleic acid scaffold (ERS) sequence
  source 1..88: mol_type = other RNA
acgaggtgttctatatgattactctgcacctctcaccagcgactatgtcgtagtgggtaaagctccctcttcggagggagcatcagag

SEQ ID NO: 20165 - RNA, 88 nt, synthetic construct
  misc_feature 1..88: note = engineered ribonucleic acid scaffold (ERS) sequence
  source 1..88: mol_type = other RNA
acgaggtgttctatgtgattactctgcacctctcaccagcgactatgtcgtagtgggtaaagctccctcttcggagggagcatcagag

SEQ ID NO: 20166 - RNA, 88 nt, synthetic construct
  misc_feature 1..88: note = engineered ribonucleic acid scaffold (ERS) sequence
  source 1..88: mol_type = other RNA
acgaggtgttctatttgattactctgcacctctcaccagcgactatgtcgtagtgggtaaagctccctcttcggagggagcatcagag

SEQ ID NO: 20167 - RNA, 89 nt, synthetic construct
  misc_feature 1..89: note = engineered ribonucleic acid scaffold (ERS) sequence
  source 1..89: mol_type = other RNA
acgaggtgttctatcttgattactctgcacctctcaccagcgactatgtcgtagtgggtaaagctccctcttcggagggagcatcagag

SEQ ID NO: 20168 - RNA, 88 nt, synthetic construct
  misc_feature 1..88: note = engineered ribonucleic acid scaffold (ERS) sequence
  source 1..88: mol_type = other RNA
acgaggtgttctatcagattactctgcacctctcaccagcgactatgtcgtagtgggtaaagctccctcttcggagggagcatcagag

SEQ ID NO: 20169 - RNA, 88 nt, synthetic construct
  misc_feature 1..88: note = engineered ribonucleic acid scaffold (ERS) sequence
  source 1..88: mol_type = other RNA
acgaggtgttctatcggattactctgcacctctcaccagcgactatgtcgtagtgggtaaagctccctcttcggagggagcatcagag

SEQ ID NO: 20170 - RNA, 89 nt, synthetic construct
  misc_feature 1..89: note = engineered ribonucleic acid scaffold (ERS) sequence
  source 1..89: mol_type = other RNA
acgaggtgttctatctgaattactctgcacctctcaccagcgactatgtcgtagtgggtaaagctccctcttcggagggagcatcagag

SEQ ID NO: 20171 - RNA, 89 nt, synthetic construct
  misc_feature 1..89: note = engineered ribonucleic acid scaffold (ERS) sequence
  source 1..89: mol_type = other RNA
acgaggtgttctatctgtattactctgcacctctcaccagcgactatgtcgtagtgggtaaagctccctcttcggagggagcatcagag

SEQ ID NO: 20172 - RNA, 88 nt, synthetic construct
  misc_feature 1..88: note = engineered ribonucleic acid scaffold (ERS) sequence
  source 1..88: mol_type = other RNA
acgaggtgttctatctggttactctgcacctctcaccagcgactatgtcgtagtgggtaaagctccctcttcggagggagcatcagag

SEQ ID NO: 20173 - RNA, 88 nt, synthetic construct
  misc_feature 1..88: note = engineered ribonucleic acid scaffold (ERS) sequence
  source 1..88: mol_type = other RNA
acgaggtgttctatctgtttactctgcacctctcaccagcgactatgtcgtagtgggtaaagctccctcttcggagggagcatcagag

SEQ ID NO: 20174 - RNA, 89 nt, synthetic construct
  misc_feature 1..89: note = engineered ribonucleic acid scaffold (ERS) sequence
  source 1..89: mol_type = other RNA
acgaggtgttctatctgatttactctgcacctctcaccagcgactatgtcgtagtgggtaaagctccctcttcggagggagcatcagag

SEQ ID NO: 20175 - RNA, 88 nt, synthetic construct
  misc_feature 1..88: note = engineered ribonucleic acid scaffold (ERS) sequence
  source 1..88: mol_type = other RNA
acgaggtgttctatctgattgctctgcacctctcaccagcgactatgtcgtagtgggtaaagctccctcttcggagggagcatcagag

SEQ ID NO: 20176 - RNA, 90 nt, synthetic construct
  misc_feature 1..90: note = engineered ribonucleic acid scaffold (ERS) sequence
  source 1..90: mol_type = other RNA
acgggactttctatatctgattactctgagtccctcaccagcgactatgtcgtagtgggtaaagctccctcttcggagggagcatcagag

SEQ ID NO: 20177 - RNA, 89 nt, synthetic construct
  misc_feature 1..89: note = engineered ribonucleic acid scaffold (ERS) sequence
  source 1..89: mol_type = other RNA
acgggactttctaatctgattactctgagtccctcaccagcgactatgtcgtagtgggtaaagctccctcttcggagggagcatcagag

SEQ ID NO: 20178 - RNA, 87 nt, synthetic construct
  misc_feature 1..87: note = engineered ribonucleic acid scaffold (ERS) sequence
  source 1..87: mol_type = other RNA
acgggactttctactgattactctgagtccctcaccagcgactatgtcgtagtgggtaaagctccctcttcggagggagcatcagag

SEQ ID NO: 20179 - RNA, 88 nt, synthetic construct
  misc_feature 1..88: note = engineered ribonucleic acid scaffold (ERS) sequence
  source 1..88: mol_type = other RNA
acgggactttctaactgattactctgagtccctcaccagcgactatgtcgtagtgggtaaagctccctcttcggagggagcatcagag

SEQ ID NO: 20180 - RNA, 88 nt, synthetic construct
  misc_feature 1..88: note = engineered ribonucleic acid scaffold (ERS) sequence
  source 1..88: mol_type = other RNA
acgggactttctacctgattactctgagtccctcaccagcgactatgtcgtagtgggtaaagctccctcttcggagggagcatcagag

SEQ ID NO: 20181 - RNA, 88 nt, synthetic construct
  misc_feature 1..88: note = engineered ribonucleic acid scaffold (ERS) sequence
  source 1..88: mol_type = other RNA
acgggactttctagctgattactctgagtccctcaccagcgactatgtcgtagtgggtaaagctccctcttcggagggagcatcagag

SEQ ID NO: 20182 - RNA, 90 nt, synthetic construct
  misc_feature 1..90: note = engineered ribonucleic acid scaffold (ERS) sequence
  source 1..90: mol_type = other RNA
acgggactttctattactgattactctgagtccctcaccagcgactatgtcgtagtgggtaaagctccctcttcggagggagcatcagag

SEQ ID NO: 20183 - RNA, 88 nt, synthetic construct
  misc_feature 1..88: note = engineered ribonucleic acid scaffold (ERS) sequence
  source 1..88: mol_type = other RNA
acgggactttctatatgattactctgagtccctcaccagcgactatgtcgtagtgggtaaagctccctcttcggagggagcatcagag

SEQ ID NO: 20184 - RNA, 88 nt, synthetic construct
  misc_feature 1..88: note = engineered ribonucleic acid scaffold (ERS) sequence
  source 1..88: mol_type = other RNA
acgggactttctatgtgattactctgagtccctcaccagcgactatgtcgtagtgggtaaagctccctcttcggagggagcatcagag

SEQ ID NO: 20185 - RNA, 88 nt, synthetic construct
  misc_feature 1..88: note = engineered ribonucleic acid scaffold (ERS) sequence
  source 1..88: mol_type = other RNA
acgggactttctatttgattactctgagtccctcaccagcgactatgtcgtagtgggtaaagctccctcttcggagggagcatcagag

SEQ ID NO: 20186 - RNA, 89 nt, synthetic construct
  misc_feature 1..89: note = engineered ribonucleic acid scaffold (ERS) sequence
  source 1..89: mol_type = other RNA
acgggactttctatcttgattactctgagtccctcaccagcgactatgtcgtagtgggtaaagctccctcttcggagggagcatcagag

SEQ ID NO: 20187 - RNA, 88 nt, synthetic construct
  misc_feature 1..88: note = engineered ribonucleic acid scaffold (ERS) sequence
  source 1..88: mol_type = other RNA
acgggactttctatcagattactctgagtccctcaccagcgactatgtcgtagtgggtaaagctccctcttcggagggagcatcagag

SEQ ID NO: 20188 - RNA, 88 nt, synthetic construct
  misc_feature 1..88: note = engineered ribonucleic acid scaffold (ERS) sequence
  source 1..88: mol_type = other RNA
acgggactttctatcggattactctgagtccctcaccagcgactatgtcgtagtgggtaaagctccctcttcggagggagcatcagag

SEQ ID NO: 20189 - RNA, 89 nt, synthetic construct
  misc_feature 1..89: note = engineered ribonucleic acid scaffold (ERS) sequence
  source 1..89: mol_type = other RNA
acgggactttctatctgaattactctgagtccctcaccagcgactatgtcgtagtgggtaaagctccctcttcggagggagcatcagag

SEQ ID NO: 20190 - RNA, 89 nt, synthetic construct
  misc_feature 1..89: note = engineered ribonucleic acid scaffold (ERS) sequence
  source 1..89: mol_type = other RNA
acgggactttctatctgtattactctgagtccctcaccagcgactatgtcgtagtgggtaaagctccctcttcggagggagcatcagag

SEQ ID NO: 20191 - RNA, 88 nt, synthetic construct
  misc_feature 1..88: note = engineered ribonucleic acid scaffold (ERS) sequence
  source 1..88: mol_type = other RNA
acgggactttctatctggttactctgagtccctcaccagcgactatgtcgtagtgggtaaagctccctcttcggagggagcatcagag

SEQ ID NO: 20192 - RNA, 88 nt, synthetic construct
  misc_feature 1..88: note = engineered ribonucleic acid scaffold (ERS) sequence
  source 1..88: mol_type = other RNA
acgggactttctatctgtttactctgagtccctcaccagcgactatgtcgtagtgggtaaagctccctcttcggagggagcatcagag

SEQ ID NO: 20193 - RNA, 89 nt, synthetic construct
  misc_feature 1..89: note = engineered ribonucleic acid scaffold (ERS) sequence
  source 1..89: mol_type = other RNA
acgggactttctatctgatttactctgagtccctcaccagcgactatgtcgtagtgggtaaagctccctcttcggagggagcatcagag

SEQ ID NO: 20194 - RNA, 88 nt, synthetic construct
  misc_feature 1..88: note = engineered ribonucleic acid scaffold (ERS) sequence
  source 1..88: mol_type = other RNA
acgggactttctatctgattgctctgagtccctcaccagcgactatgtcgtagtgggtaaagctccctcttcggagggagcatcagag

SEQ ID NO: 20195 - RNA, 90 nt, synthetic construct
  misc_feature 1..90: note = engineered ribonucleic acid scaffold (ERS) sequence
  source 1..90: mol_type = other RNA
acgggcaattctatatctgattactctgttgccctcaccagcgactatgtcgtagtgggtaaagctccctcttcggagggagcatcagag

SEQ ID NO: 20196 - RNA, 89 nt, synthetic construct
  misc_feature 1..89: note = engineered ribonucleic acid scaffold (ERS) sequence
  source 1..89: mol_type = other RNA
acgggcaattctaatctgattactctgttgccctcaccagcgactatgtcgtagtgggtaaagctccctcttcggagggagcatcagag

SEQ ID NO: 20197 - RNA, 87 nt, synthetic construct
  misc_feature 1..87: note = engineered ribonucleic acid scaffold (ERS) sequence
  source 1..87: mol_type = other RNA
acgggcaattctactgattactctgttgccctcaccagcgactatgtcgtagtgggtaaagctccctcttcggagggagcatcagag

SEQ ID NO: 20198 - RNA, 88 nt, synthetic construct
  misc_feature 1..88: note = engineered ribonucleic acid scaffold (ERS) sequence
  source 1..88: mol_type = other RNA
acgggcaattctaactgattactctgttgccctcaccagcgactatgtcgtagtgggtaaagctccctcttcggagggagcatcagag

SEQ ID NO: 20199 - RNA, 88 nt, synthetic construct
  misc_feature 1..88: note = engineered ribonucleic acid scaffold (ERS) sequence
  source 1..88: mol_type = other RNA
acgggcaattctacctgattactctgttgccctcaccagcgactatgtcgtagtgggtaaagctccctcttcggagggagcatcagag

SEQ ID NO: 20200 - RNA, 88 nt, synthetic construct
  misc_feature 1..88: note = engineered ribonucleic acid scaffold (ERS) sequence
  source 1..88: mol_type = other RNA
acgggcaattctagctgattactctgttgccctcaccagcgactatgtcgtagtgggtaaagctccctcttcggagggagcatcagag

SEQ ID NO: 20201 - RNA, 90 nt, synthetic construct
  misc_feature 1..90: note = engineered ribonucleic acid scaffold (ERS) sequence
  source 1..90: mol_type = other RNA
acgggcaattctattactgattactctgttgccctcaccagcgactatgtcgtagtgggtaaagctccctcttcggagggagcatcagag

SEQ ID NO: 20202 - RNA, 88 nt, synthetic construct
  misc_feature 1..88: note = engineered ribonucleic acid scaffold (ERS) sequence
  source 1..88: mol_type = other RNA
acgggcaattctatatgattactctgttgccctcaccagcgactatgtcgtagtgggtaaagctccctcttcggagggagcatcagag

SEQ ID NO: 20203 - RNA, 88 nt, synthetic construct
  misc_feature 1..88: note = engineered ribonucleic acid scaffold (ERS) sequence
  source 1..88: mol_type = other RNA
acgggcaattctatgtgattactctgttgccctcaccagcgactatgtcgtagtgggtaaagctccctcttcggagggagcatcagag

SEQ ID NO: 20204 - RNA, 88 nt, synthetic construct
  misc_feature 1..88: note = engineered ribonucleic acid scaffold (ERS) sequence
  source 1..88: mol_type = other RNA
acgggcaattctatttgattactctgttgccctcaccagcgactatgtcgtagtgggtaaagctccctcttcggagggagcatcagag

SEQ ID NO: 20205 - RNA, 89 nt, synthetic construct
  misc_feature 1..89: note = engineered ribonucleic acid scaffold (ERS) sequence
  source 1..89: mol_type = other RNA
acgggcaattctatcttgattactctgttgccctcaccagcgactatgtcgtagtgggtaaagctccctcttcggagggagcatcagag

SEQ ID NO: 20206 - RNA, 88 nt, synthetic construct
  misc_feature 1..88: note = engineered ribonucleic acid scaffold (ERS) sequence
  source 1..88: mol_type = other RNA
acgggcaattctatcagattactctgttgccctcaccagcgactatgtcgtagtgggtaaagctccctcttcggagggagcatcagag

SEQ ID NO: 20207 - RNA, 88 nt, synthetic construct
  misc_feature 1..88: note = engineered ribonucleic acid scaffold (ERS) sequence
  source 1..88: mol_type = other RNA
acgggcaattctatcggattactctgttgccctcaccagcgactatgtcgtagtgggtaaagctccctcttcggagggagcatcagag

SEQ ID NO: 20208 - RNA, 89 nt, synthetic construct
  misc_feature 1..89: note = engineered ribonucleic acid scaffold (ERS) sequence
  source 1..89: mol_type = other RNA
acgggcaattctatctgaattactctgttgccctcaccagcgactatgtcgtagtgggtaaagctccctcttcggagggagcatcagag

SEQ ID NO: 20209 - RNA, 89 nt, synthetic construct
  misc_feature 1..89: note = engineered ribonucleic acid scaffold (ERS) sequence
  source 1..89: mol_type = other RNA
acgggcaattctatctgtattactctgttgccctcaccagcgactatgtcgtagtgggtaaagctccctcttcggagggagcatcagag

SEQ ID NO: 20210 - RNA, 88 nt, synthetic construct
  misc_feature 1..88: note = engineered ribonucleic acid scaffold (ERS) sequence
  source 1..88: mol_type = other RNA
acgggcaattctatctggttactctgttgccctcaccagcgactatgtcgtagtgggtaaagctccctcttcggagggagcatcagag

SEQ ID NO: 20211 - RNA, 88 nt, synthetic construct
  misc_feature 1..88: note = engineered ribonucleic acid scaffold (ERS) sequence
  source 1..88: mol_type = other RNA
acgggcaattctatctgtttactctgttgccctcaccagcgactatgtcgtagtgggtaaagctccctcttcggagggagcatcagag

SEQ ID NO: 20212 - RNA, 89 nt, synthetic construct
  misc_feature 1..89: note = engineered ribonucleic acid scaffold (ERS) sequence
  source 1..89: mol_type = other RNA
acgggcaattctatctgatttactctgttgccctcaccagcgactatgtcgtagtgggtaaagctccctcttcggagggagcatcagag

SEQ ID NO: 20213 - RNA, 88 nt, synthetic construct
  misc_feature 1..88: note = engineered ribonucleic acid scaffold (ERS) sequence
  source 1..88: mol_type = other RNA
acgggcaattctatctgattgctctgttgccctcaccagcgactatgtcgtagtgggtaaagctccctcttcggagggagcatcagag

SEQ ID NO: 20214 - RNA, 90 nt, synthetic construct
  misc_feature 1..90: note = engineered ribonucleic acid scaffold (ERS) sequence
  source 1..90: mol_type = other RNA
actgtgcgttctatatctgattactctgcgcacatcaccagcgactatgtcgtagtgggtaaagctccctcttcggagggagcatcagag

SEQ ID NO: 20215 - RNA, 89 nt, synthetic construct
  misc_feature 1..89: note = engineered ribonucleic acid scaffold (ERS) sequence
  source 1..89: mol_type = other RNA
actgtgcgttctaatctgattactctgcgcacatcaccagcgactatgtcgtagtgggtaaagctccctcttcggagggagcatcagag

SEQ ID NO: 20216 - RNA, 87 nt, synthetic construct
  misc_feature 1..87: note = engineered ribonucleic acid scaffold (ERS) sequence
  source 1..87: mol_type = other RNA
actgtgcgttctactgattactctgcgcacatcaccagcgactatgtcgtagtgggtaaagctccctcttcggagggagcatcagag

SEQ ID NO: 20217 - RNA, 88 nt, synthetic construct
  misc_feature 1..88: note = engineered ribonucleic acid scaffold (ERS) sequence
  source 1..88: mol_type = other RNA
actgtgcgttctaactgattactctgcgcacatcaccagcgactatgtcgtagtgggtaaagctccctcttcggagggagcatcagag

SEQ ID NO: 20218 - RNA, 88 nt, synthetic construct
  misc_feature 1..88: note = engineered ribonucleic acid scaffold (ERS) sequence
  source 1..88: mol_type = other RNA
actgtgcgttctacctgattactctgcgcacatcaccagcgactatgtcgtagtgggtaaagctccctcttcggagggagcatcagag

SEQ ID NO: 20219 - RNA, 88 nt, synthetic construct
  misc_feature 1..88: note = engineered ribonucleic acid scaffold (ERS) sequence
  source 1..88: mol_type = other RNA
actgtgcgttctagctgattactctgcgcacatcaccagcgactatgtcgtagtgggtaaagctccctcttcggagggagcatcagag

SEQ ID NO: 20220 - RNA, 90 nt, synthetic construct
  misc_feature 1..90: note = engineered ribonucleic acid scaffold (ERS) sequence
  source 1..90: mol_type = other RNA
actgtgcgttctattactgattactctgcgcacatcaccagcgactatgtcgtagtgggtaaagctccctcttcggagggagcatcagag

SEQ ID NO: 20221 - RNA, 88 nt, synthetic construct
  misc_feature 1..88: note = engineered ribonucleic acid scaffold (ERS) sequence
  source 1..88: mol_type = other RNA
actgtgcgttctatatgattactctgcgcacatcaccagcgactatgtcgtagtgggtaaagctccctcttcggagggagcatcagag

SEQ ID NO: 20222 - RNA, 88 nt, synthetic construct
  misc_feature 1..88: note = engineered ribonucleic acid scaffold (ERS) sequence
  source 1..88: mol_type = other RNA
actgtgcgttctatgtgattactctgcgcacatcaccagcgactatgtcgtagtgggtaaagctccctcttcggagggagcatcagag

SEQ ID NO: 20223 - RNA, 88 nt, synthetic construct
  misc_feature 1..88: note = engineered ribonucleic acid scaffold (ERS) sequence
  source 1..88: mol_type = other RNA
actgtgcgttctatttgattactctgcgcacatcaccagcgactatgtcgtagtgggtaaagctccctcttcggagggagcatcagag

SEQ ID NO: 20224 - RNA, 89 nt, synthetic construct
  misc_feature 1..89: note = engineered ribonucleic acid scaffold (ERS) sequence
  source 1..89: mol_type = other RNA
actgtgcgttctatcttgattactctgcgcacatcaccagcgactatgtcgtagtgggtaaagctccctcttcggagggagcatcagag

SEQ ID NO: 20225 - RNA, 88 nt, synthetic construct
  misc_feature 1..88: note = engineered ribonucleic acid scaffold (ERS) sequence
  source 1..88: mol_type = other RNA
actgtgcgttctatcagattactctgcgcacatcaccagcgactatgtcgtagtgggtaaagctccctcttcggagggagcatcagag

SEQ ID NO: 20226 - RNA, 88 nt, synthetic construct
  misc_feature 1..88: note = engineered ribonucleic acid scaffold (ERS) sequence
  source 1..88: mol_type = other RNA
actgtgcgttctatcggattactctgcgcacatcaccagcgactatgtcgtagtgggtaaagctccctcttcggagggagcatcagag

SEQ ID NO: 20227 - RNA, 89 nt, synthetic construct
  misc_feature 1..89: note = engineered ribonucleic acid scaffold (ERS) sequence
  source 1..89: mol_type = other RNA
actgtgcgttctatctgaattactctgcgcacatcaccagcgactatgtcgtagtgggtaaagctccctcttcggagggagcatcagag

SEQ ID NO: 20228 - RNA, 89 nt, synthetic construct
  misc_feature 1..89: note = engineered ribonucleic acid scaffold (ERS) sequence
  source 1..89: mol_type = other RNA
actgtgcgttctatctgtattactctgcgcacatcaccagcgactatgtcgtagtgggtaaagctccctcttcggagggagcatcagag

SEQ ID NO: 20229 - RNA, 88 nt, synthetic construct
  misc_feature 1..88: note = engineered ribonucleic acid scaffold (ERS) sequence
  source 1..88: mol_type = other RNA
actgtgcgttctatctggttactctgcgcacatcaccagcgactatgtcgtagtgggtaaagctccctcttcggagggagcatcagag

SEQ ID NO: 20230 - RNA, 88 nt, synthetic construct
  misc_feature 1..88: note = engineered ribonucleic acid scaffold (ERS) sequence
  source 1..88: mol_type = other RNA
actgtgcgttctatctgtttactctgcgcacatcaccagcgactatgtcgtagtgggtaaagctccctcttcggagggagcatcagag

SEQ ID NO: 20231 - RNA, 89 nt, synthetic construct
  misc_feature 1..89: note = engineered ribonucleic acid scaffold (ERS) sequence
  source 1..89: mol_type = other RNA
actgtgcgttctatctgatttactctgcgcacatcaccagcgactatgtcgtagtgggtaaagctccctcttcggagggagcatcagag

SEQ ID NO: 20232 - RNA, 88 nt, synthetic construct
  misc_feature 1..88: note = engineered ribonucleic acid scaffold (ERS) sequence
  source 1..88: mol_type = other RNA
actgtgcgttctatctgattgctctgcgcacatcaccagcgactatgtcgtagtgggtaaagctccctcttcggagggagcatcagag

SEQ ID NO: 20233 - RNA, 91 nt, synthetic construct
  misc_feature 1..91: note = engineered ribonucleic acid scaffold (ERS) sequence
  source 1..91: mol_type = other RNA
actggcgcttctatatctgattactctgggcgccatcaccagcgactatgtcgtagtgggtaaagctccctcttcggagggagcatcagag

SEQ ID NO: 20234 - RNA, 90 nt, synthetic construct
  misc_feature 1..90: note = engineered ribonucleic acid scaffold (ERS) sequence
  source 1..90: mol_type = other RNA
actggcgcttctaatctgattactctgggcgccatcaccagcgactatgtcgtagtgggtaaagctccctcttcggagggagcatcagag

SEQ ID NO: 20235 - RNA, 88 nt, synthetic construct
  misc_feature 1..88: note = engineered ribonucleic acid scaffold (ERS) sequence
  source 1..88: mol_type = other RNA
actggcgcttctactgattactctgggcgccatcaccagcgactatgtcgtagtgggtaaagctccctcttcggagggagcatcagag

SEQ ID NO: 20236 - RNA, 89 nt, synthetic construct
  misc_feature 1..89: note = engineered ribonucleic acid scaffold (ERS) sequence
  source 1..89: mol_type = other RNA
actggcgcttctaactgattactctgggcgccatcaccagcgactatgtcgtagtgggtaaagctccctcttcggagggagcatcagag

SEQ ID NO: 20237 - RNA, 89 nt, synthetic construct
  misc_feature 1..89: note = engineered ribonucleic acid scaffold (ERS) sequence
  source 1..89: mol_type = other RNA
actggcgcttctacctgattactctgggcgccatcaccagcgactatgtcgtagtgggtaaagctccctcttcggagggagcatcagag

SEQ ID NO: 20238 - RNA, 89 nt, synthetic construct
  misc_feature 1..89: note = engineered ribonucleic acid scaffold (ERS) sequence
  source 1..89: mol_type = other RNA
actggcgcttctagctgattactctgggcgccatcaccagcgactatgtcgtagtgggtaaagctccctcttcggagggagcatcagag

SEQ ID NO: 20239 - RNA, 91 nt, synthetic construct
  misc_feature 1..91: note = engineered ribonucleic acid scaffold (ERS) sequence
  source 1..91: mol_type = other RNA
actggcgcttctattactgattactctgggcgccatcaccagcgactatgtcgtagtgggtaaagctccctcttcggagggagcatcagag

SEQ ID NO: 20240 - RNA, 89 nt, synthetic construct
  misc_feature 1..89: note = engineered ribonucleic acid scaffold (ERS) sequence
  source 1..89: mol_type = other RNA
actggcgcttctatatgattactctgggcgccatcaccagcgactatgtcgtagtgggtaaagctccctcttcggagggagcatcagag

SEQ ID NO: 20241 - RNA, 89 nt, synthetic construct
  misc_feature 1..89: note = engineered ribonucleic acid scaffold (ERS) sequence
  source 1..89: mol_type = other RNA
actggcgcttctatgtgattactctgggcgccatcaccagcgactatgtcgtagtgggtaaagctccctcttcggagggagcatcagag

SEQ ID NO: 20242 - RNA, 89 nt, synthetic construct
  misc_feature 1..89: note = engineered ribonucleic acid scaffold (ERS) sequence
  source 1..89: mol_type = other RNA
actggcgcttctatttgattactctgggcgccatcaccagcgactatgtcgtagtgggtaaagctccctcttcggagggagcatcagag

SEQ ID NO: 20243 - RNA, 90 nt, synthetic construct
  misc_feature 1..90: note = engineered ribonucleic acid scaffold (ERS) sequence
  source 1..90: mol_type = other RNA
actggcgcttctatcttgattactctgggcgccatcaccagcgactatgtcgtagtgggtaaagctccctcttcggagggagcatcagag

SEQ ID NO: 20244 - RNA, 89 nt, synthetic construct
  misc_feature 1..89: note = engineered ribonucleic acid scaffold (ERS) sequence
  source 1..89: mol_type = other RNA
actggcgcttctatcagattactctgggcgccatcaccagcgactatgtcgtagtgggtaaagctccctcttcggagggagcatcagag

SEQ ID NO: 20245 - RNA, 89 nt, synthetic construct
  misc_feature 1..89: note = engineered ribonucleic acid scaffold (ERS) sequence
  source 1..89: mol_type = other RNA
actggcgcttctatcggattactctgggcgccatcaccagcgactatgtcgtagtgggtaaagctccctcttcggagggagcatcagag

SEQ ID NO: 20246 - RNA, 90 nt, synthetic construct
  misc_feature 1..90: note = engineered ribonucleic acid scaffold (ERS) sequence
  source 1..90: mol_type = other RNA
actggcgcttctatctgaattactctgggcgccatcaccagcgactatgtcgtagtgggtaaagctccctcttcggagggagcatcagag

SEQ ID NO: 20247 - RNA, 90 nt, synthetic construct
  misc_feature 1..90: note = engineered ribonucleic acid scaffold (ERS) sequence
  source 1..90: mol_type = other RNA
actggcgcttctatctgtattactctgggcgccatcaccagcgactatgtcgtagtgggtaaagctccctcttcggagggagcatcagag

SEQ ID NO: 20248 - RNA, 89 nt, synthetic construct
  misc_feature 1..89: note = engineered ribonucleic acid scaffold (ERS) sequence
  source 1..89: mol_type = other RNA
actggcgcttctatctggttactctgggcgccatcaccagcgactatgtcgtagtgggtaaagctccctcttcggagggagcatcagag

SEQ ID NO: 20249 - RNA, 89 nt, synthetic construct
  misc_feature 1..89: note = engineered ribonucleic acid scaffold (ERS) sequence
  source 1..89: mol_type = other RNA
actggcgcttctatctgtttactctgggcgccatcaccagcgactatgtcgtagtgggtaaagctccctcttcggagggagcatcagag

SEQ ID NO: 20250 - RNA, 90 nt, synthetic construct
  misc_feature 1..90: note = engineered ribonucleic acid scaffold (ERS) sequence
  source 1..90: mol_type = other RNA
actggcgcttctatctgatttactctgggcgccatcaccagcgactatgtcgtagtgggtaaagctccctcttcggagggagcatcagag

SEQ ID NO: 20251 - RNA, 89 nt, synthetic construct
  misc_feature 1..89: note = engineered ribonucleic acid scaffold (ERS) sequence
  source 1..89: mol_type = other RNA
actggcgcttctatctgattgctctgggcgccatcaccagcgactatgtcgtagtgggtaaagctccctcttcggagggagcatcagag

SEQ ID NO: 20252 - RNA, 91 nt, synthetic construct
  misc_feature 1..91: note = engineered ribonucleic acid scaffold (ERS) sequence
  source 1..91: mol_type = other RNA
actggcgcttctatatctgattactctgggagccatcaccagcgactatgtcgtagtgggtaaagctccctcttcggagggagcatcagag

SEQ ID NO: 20253 - RNA, 90 nt, synthetic construct
  misc_feature 1..90: note = engineered ribonucleic acid scaffold (ERS) sequence
  source 1..90: mol_type = other RNA
actggcgcttctaatctgattactctgggagccatcaccagcgactatgtcgtagtgggtaaagctccctcttcggagggagcatcagag

SEQ ID NO: 20254 - RNA, 88 nt, synthetic construct
  misc_feature 1..88: note = engineered ribonucleic acid scaffold (ERS) sequence
  source 1..88: mol_type = other RNA
actggcgcttctactgattactctgggagccatcaccagcgactatgtcgtagtgggtaaagctccctcttcggagggagcatcagag

SEQ ID NO: 20255 - RNA, 89 nt, synthetic construct
  misc_feature 1..89: note = engineered ribonucleic acid scaffold (ERS) sequence
  source 1..89: mol_type = other RNA
actggcgcttctaactgattactctgggagccatcaccagcgactatgtcgtagtgggtaaagctccctcttcggagggagcatcagag

SEQ ID NO: 20256 - RNA, 89 nt, synthetic construct
  misc_feature 1..89: note = engineered ribonucleic acid scaffold (ERS) sequence
  source 1..89: mol_type = other RNA
actggcgcttctacctgattactctgggagccatcaccagcgactatgtcgtagtgggtaaagctccctcttcggagggagcatcagag

SEQ ID NO: 20257 - RNA, 89 nt, synthetic construct
  misc_feature 1..89: note = engineered ribonucleic acid scaffold (ERS) sequence
  source 1..89: mol_type = other RNA
actggcgcttctagctgattactctgggagccatcaccagcgactatgtcgtagtgggtaaagctccctcttcggagggagcatcagag

SEQ ID NO: 20258 - RNA, 91 nt, synthetic construct
  misc_feature 1..91: note = engineered ribonucleic acid scaffold (ERS) sequence
  source 1..91: mol_type = other RNA
actggcgcttctattactgattactctgggagccatcaccagcgactatgtcgtagtgggtaaagctccctcttcggagggagcatcagag

SEQ ID NO: 20259 - RNA, 89 nt, synthetic construct
  misc_feature 1..89: note = engineered ribonucleic acid scaffold (ERS) sequence
  source 1..89: mol_type = other RNA
actggcgcttctatatgattactctgggagccatcaccagcgactatgtcgtagtgggtaaagctccctcttcggagggagcatcagag

SEQ ID NO: 20260 - RNA, 89 nt, synthetic construct
  misc_feature 1..89: note = engineered ribonucleic acid scaffold (ERS) sequence
  source 1..89: mol_type = other RNA
actggcgcttctatgtgattactctgggagccatcaccagcgactatgtcgtagtgggtaaagctccctcttcggagggagcatcagag

SEQ ID NO: 20261 - RNA, 89 nt, synthetic construct
  misc_feature 1..89: note = engineered ribonucleic acid scaffold (ERS) sequence
  source 1..89: mol_type = other RNA
actggcgcttctatttgattactctgggagccatcaccagcgactatgtcgtagtgggtaaagctccctcttcggagggagcatcagag

SEQ ID NO: 20262 - RNA, 90 nt, synthetic construct
  misc_feature 1..90: note = engineered ribonucleic acid scaffold (ERS) sequence
  source 1..90: mol_type = other RNA
actggcgcttctatcttgattactctgggagccatcaccagcgactatgtcgtagtgggtaaagctccctcttcggagggagcatcagag

SEQ ID NO: 20263 - RNA, 89 nt, synthetic construct
  misc_feature 1..89: note = engineered ribonucleic acid scaffold (ERS) sequence
  source 1..89: mol_type = other RNA
actggcgcttctatcagattactctgggagccatcaccagcgactatgtcgtagtgggtaaagctccctcttcggagggagcatcagag

SEQ ID NO: 20264 - RNA, 89 nt, synthetic construct
  misc_feature 1..89: note = engineered ribonucleic acid scaffold (ERS) sequence
  source 1..89: mol_type = other RNA
actggcgcttctatcggattactctgggagccatcaccagcgactatgtcgtagtgggtaaagctccctcttcggagggagcatcagag

SEQ ID NO: 20265 - RNA, 90 nt, synthetic construct
  misc_feature 1..90: note = engineered ribonucleic acid scaffold (ERS) sequence
  source 1..90: mol_type = other RNA
actggcgcttctatctgaattactctgggagccatcaccagcgactatgtcgtagtgggtaaagctccctcttcggagggagcatcagag

SEQ ID NO: 20266 - RNA, 90 nt, synthetic construct
  misc_feature 1..90: note = engineered ribonucleic acid scaffold (ERS) sequence
  source 1..90: mol_type = other RNA
actggcgcttctatctgtattactctgggagccatcaccagcgactatgtcgtagtgggtaaagctccctcttcggagggagcatcagag

SEQ ID NO: 20267 - RNA, 89 nt, synthetic construct
  misc_feature 1..89: note = engineered ribonucleic acid scaffold (ERS) sequence
  source 1..89: mol_type = other RNA
actggcgcttctatctggttactctgggagccatcaccagcgactatgtcgtagtgggtaaagctccctcttcggagggagcatcagag

SEQ ID NO: 20268 - RNA, 89 nt, synthetic construct
  misc_feature 1..89: note = engineered ribonucleic acid scaffold (ERS) sequence
  source 1..89: mol_type = other RNA
actggcgcttctatctgtttactctgggagccatcaccagcgactatgtcgtagtgggtaaagctccctcttcggagggagcatcagag

SEQ ID NO: 20269 - RNA, 90 nt, synthetic construct
  misc_feature 1..90: note = engineered ribonucleic acid scaffold (ERS) sequence
  source 1..90: mol_type = other RNA
actggcgcttctatctgatttactctgggagccatcaccagcgactatgtcgtagtgggtaaagctccctcttcggagggagcatcagag

SEQ ID NO: 20270 - RNA, 89 nt, synthetic construct
  misc_feature 1..89: note = engineered ribonucleic acid scaffold (ERS) sequence
  source 1..89: mol_type = other RNA
actggcgcttctatctgattgctctgggagccatcaccagcgactatgtcgtagtgggtaaagctccctcttcggagggagcatcagag

SEQ ID NO: 20271 - RNA, 91 nt, synthetic construct
  misc_feature 1..91: note = engineered ribonucleic acid scaffold (ERS) sequence
  source 1..91: mol_type = other RNA
actggcgcttctatatctgattactctgtgagccatcaccagcgactatgtcgtagtgggtaaagctccctcttcggagggagcatcagag

SEQ ID NO: 20272 - RNA, 90 nt, synthetic construct
  misc_feature 1..90: note = engineered ribonucleic acid scaffold (ERS) sequence
  source 1..90: mol_type = other RNA
actggcgcttctaatctgattactctgtgagccatcaccagcgactatgtcgtagtgggtaaagctccctcttcggagggagcatcagag

SEQ ID NO: 20273 - RNA, 88 nt, synthetic construct
  misc_feature 1..88: note = engineered ribonucleic acid scaffold (ERS) sequence
  source 1..88: mol_type = other RNA
actggcgcttctactgattactctgtgagccatcaccagcgactatgtcgtagtgggtaaagctccctcttcggagggagcatcagag

SEQ ID NO: 20274 - RNA, 89 nt, synthetic construct
  misc_feature 1..89: note = engineered ribonucleic acid scaffold (ERS) sequence
  source 1..89: mol_type = other RNA
actggcgcttctaactgattactctgtgagccatcaccagcgactatgtcgtagtgggtaaagctccctcttcggagggagcatcagag

SEQ ID NO: 20275 - RNA, 89 nt, synthetic construct
  misc_feature 1..89: note = engineered ribonucleic acid scaffold (ERS) sequence
  source 1..89: mol_type = other RNA
actggcgcttctacctgattactctgtgagccatcaccagcgactatgtcgtagtgggtaaagctccctcttcggagggagcatcagag

SEQ ID NO: 20276 - RNA, 89 nt, synthetic construct
  misc_feature 1..89: note = engineered ribonucleic acid scaffold (ERS) sequence
  source 1..89: mol_type = other RNA
actggcgcttctagctgattactctgtgagccatcaccagcgactatgtcgtagtgggtaaagctccctcttcggagggagcatcagag

SEQ ID NO: 20277 - RNA, 91 nt, synthetic construct
  misc_feature 1..91: note = engineered ribonucleic acid scaffold (ERS) sequence
  source 1..91: mol_type = other RNA
actggcgcttctattactgattactctgtgagccatcaccagcgactatgtcgtagtgggtaaagctccctcttcggagggagcatcagag

SEQ ID NO: 20278 - RNA, 89 nt, synthetic construct
  misc_feature 1..89: note = engineered ribonucleic acid scaffold (ERS) sequence
  source 1..89: mol_type = other RNA
actggcgcttctatatgattactctgtgagccatcaccagcgactatgtcgtagtgggtaaagctccctcttcggagggagcatcagag

SEQ ID NO: 20279 - RNA, 89 nt, synthetic construct
  misc_feature 1..89: note = engineered ribonucleic acid scaffold (ERS) sequence
  source 1..89: mol_type = other RNA
actggcgcttctatgtgattactctgtgagccatcaccagcgactatgtcgtagtgggtaaagctccctcttcggagggagcatcagag

SEQ ID NO: 20280 - RNA, 89 nt, synthetic construct
  misc_feature 1..89: note = engineered ribonucleic acid scaffold (ERS) sequence
  source 1..89: mol_type = other RNA
actggcgcttctatttgattactctgtgagccatcaccagcgactatgtcgtagtgggtaaagctccctcttcggagggagcatcagag

SEQ ID NO: 20281 - RNA, 90 nt, synthetic construct
  misc_feature 1..90: note = engineered ribonucleic acid scaffold (ERS) sequence
  source 1..90: mol_type = other RNA
actggcgcttctatcttgattactctgtgagccatcaccagcgactatgtcgtagtgggtaaagctccctcttcggagggagcatcagag

SEQ ID NO: 20282 - RNA, 89 nt, synthetic construct
  misc_feature 1..89: note = engineered ribonucleic acid scaffold (ERS) sequence
  source 1..89: mol_type = other RNA
actggcgcttctatcagattactctgtgagccatcaccagcgactatgtcgtagtgggtaaagctccctcttcggagggagcatcagag

SEQ ID NO: 20283 - RNA, 89 nt, synthetic construct
  misc_feature 1..89: note = engineered ribonucleic acid scaffold (ERS) sequence
  source 1..89: mol_type = other RNA
actggcgcttctatcggattactctgtgagccatcaccagcgactatgtcgtagtgggtaaagctccctcttcggagggagcatcagag

SEQ ID NO: 20284 - RNA, 90 nt, synthetic construct
  misc_feature 1..90: note = engineered ribonucleic acid scaffold (ERS) sequence
  source 1..90: mol_type = other RNA
actggcgcttctatctgaattactctgtgagccatcaccagcgactatgtcgtagtgggtaaagctccctcttcggagggagcatcagag

SEQ ID NO: 20285 - RNA, 90 nt, synthetic construct
  misc_feature 1..90: note = engineered ribonucleic acid scaffold (ERS) sequence
  source 1..90: mol_type = other RNA
actggcgcttctatctgtattactctgtgagccatcaccagcgactatgtcgtagtgggtaaagctccctcttcggagggagcatcagag

SEQ ID NO: 20286 - RNA, 89 nt, synthetic construct
  misc_feature 1..89: note = engineered ribonucleic acid scaffold (ERS) sequence
  source 1..89: mol_type = other RNA
actggcgcttctatctggttactctgtgagccatcaccagcgactatgtcgtagtgggtaaagctccctcttcggagggagcatcagag

SEQ ID NO: 20287 - RNA, 89 nt, synthetic construct
  misc_feature 1..89: note = engineered ribonucleic acid scaffold (ERS) sequence
  source 1..89: mol_type = other RNA
actggcgcttctatctgtttactctgtgagccatcaccagcgactatgtcgtagtgggtaaagctccctcttcggagggagcatcagag

SEQ ID NO: 20288 - RNA, 90 nt, synthetic construct
  misc_feature 1..90: note = engineered ribonucleic acid scaffold (ERS) sequence
  source 1..90: mol_type = other RNA
actggcgcttctatctgatttactctgtgagccatcaccagcgactatgtcgtagtgggtaaagctccctcttcggagggagcatcagag

SEQ ID NO: 20289 - RNA, 89 nt, synthetic construct
  misc_feature 1..89: note = engineered ribonucleic acid scaffold (ERS) sequence
  source 1..89: mol_type = other RNA
actggcgcttctatctgattgctctgtgagccatcaccagcgactatgtcgtagtgggtaaagctccctcttcggagggagcatcagag

SEQ ID NO: 20290 - RNA, 92 nt, synthetic construct
  misc_feature 1..92: note = engineered ribonucleic acid scaffold (ERS) sequence
  source 1..92: mol_type = other RNA
actggcgcttctatatctgattactctgaggagccatcaccagcgactatgtcgtagtgggtaaagctccctcttcggagggagcatcagag

SEQ ID NO: 20291 - RNA, 91 nt, synthetic construct
  misc_feature 1..91: note = engineered ribonucleic acid scaffold (ERS) sequence
  source 1..91: mol_type = other RNA
actggcgcttctaatctgattactctgaggagccatcaccagcgactatgtcgtagtgggtaaagctccctcttcggagggagcatcagag

SEQ ID NO: 20292 - RNA, 89 nt, synthetic construct
  misc_feature 1..89: note = engineered ribonucleic acid scaffold (ERS) sequence
  source 1..89: mol_type = other RNA
actggcgcttctactgattactctgaggagccatcaccagcgactatgtcgtagtgggtaaagctccctcttcggagggagcatcagag

SEQ ID NO: 20293 - RNA, 90 nt, synthetic construct
  misc_feature 1..90: note = engineered ribonucleic acid scaffold (ERS) sequence
  source 1..90: mol_type = other RNA
actggcgcttctaactgattactctgaggagccatcaccagcgactatgtcgtagtgggtaaagctccctcttcggagggagcatcagag

SEQ ID NO: 20294 - RNA, 90 nt, synthetic construct
  misc_feature 1..90: note = engineered ribonucleic acid scaffold (ERS) sequence
  source 1..90: mol_type = other RNA
actggcgcttctacctgattactctgaggagccatcaccagcgactatgtcgtagtgggtaaagctccctcttcggagggagcatcagag

SEQ ID NO: 20295 - RNA, 90 nt, synthetic construct
  misc_feature 1..90: note = engineered ribonucleic acid scaffold (ERS) sequence
  source 1..90: mol_type = other RNA
actggcgcttctagctgattactctgaggagccatcaccagcgactatgtcgtagtgggtaaagctccctcttcggagggagcatcagag

SEQ ID NO: 20296 - RNA, 92 nt, synthetic construct
  misc_feature 1..92: note = engineered ribonucleic acid scaffold (ERS) sequence
  source 1..92: mol_type = other RNA
actggcgcttctattactgattactctgaggagccatcaccagcgactatgtcgtagtgggtaaagctccctcttcggagggagcatcagag

SEQ ID NO: 20297 - RNA, 90 nt, synthetic construct
  misc_feature 1..90: note = engineered ribonucleic acid scaffold (ERS) sequence
  source 1..90: mol_type = other RNA
actggcgcttctatatgattactctgaggagccatcaccagcgactatgtcgtagtgggtaaagctccctcttcggagggagcatcagag

SEQ ID NO: 20298 - RNA, 90 nt, synthetic construct
  misc_feature 1..90: note = engineered ribonucleic acid scaffold (ERS) sequence
  source 1..90: mol_type = other RNA
actggcgcttctatgtgattactctgaggagccatcaccagcgactatgtcgtagtgggtaaagctccctcttcggagggagcatcagag

SEQ ID NO: 20299 - RNA, 90 nt, synthetic construct
  misc_feature 1..90: note = engineered ribonucleic acid scaffold (ERS) sequence
  source 1..90: mol_type = other RNA
actggcgcttctatttgattactctgaggagccatcaccagcgactatgtcgtagtgggtaaagctccctcttcggagggagcatcagag

SEQ ID NO: 20300 - RNA, 91 nt, synthetic construct
  misc_feature 1..91: note = engineered ribonucleic acid scaffold (ERS) sequence
  source 1..91: mol_type = other RNA
actggcgcttctatcttgattactctgaggagccatcaccagcgactatgtcgtagtgggtaaagctccctcttcggagggagcatcagag

SEQ ID NO: 20301 - RNA, 90 nt, synthetic construct
  misc_feature 1..90: note = engineered ribonucleic acid scaffold (ERS) sequence
  source 1..90: mol_type = other RNA
actggcgcttctatcagattactctgaggagccatcaccagcgactatgtcgtagtgggtaaagctccctcttcggagggagcatcagag

SEQ ID NO: 20302 - RNA, 90 nt, synthetic construct
  misc_feature 1..90: note = engineered ribonucleic acid scaffold (ERS) sequence
  source 1..90: mol_type = other RNA
actggcgcttctatcggattactctgaggagccatcaccagcgactatgtcgtagtgggtaaagctccctcttcggagggagcatcagag

SEQ ID NO: 20303 - RNA, 91 nt, synthetic construct
  misc_feature 1..91: note = engineered ribonucleic acid scaffold (ERS) sequence
  source 1..91: mol_type = other RNA
actggcgcttctatctgaattactctgaggagccatcaccagcgactatgtcgtagtgggtaaagctccctcttcggagggagcatcagag

SEQ ID NO: 20304 - RNA, 91 nt, synthetic construct
  misc_feature 1..91: note = engineered ribonucleic acid scaffold (ERS) sequence
  source 1..91: mol_type = other RNA
actggcgcttctatctgtattactctgaggagccatcaccagcgactatgtcgtagtgggtaaagctccctcttcggagggagcatcagag

SEQ ID NO: 20305 - RNA, 90 nt, synthetic construct
  misc_feature 1..90: note = engineered ribonucleic acid scaffold (ERS) sequence
  source 1..90: mol_type = other RNA
actggcgcttctatctggttactctgaggagccatcaccagcgactatgtcgtagtgggtaaagctccctcttcggagggagcatcagag

SEQ ID NO: 20306 - RNA, 90 nt, synthetic construct
  misc_feature 1..90: note = engineered ribonucleic acid scaffold (ERS) sequence
  source 1..90: mol_type = other RNA
actggcgcttctatctgtttactctgaggagccatcaccagcgactatgtcgtagtgggtaaagctccctcttcggagggagcatcagag

SEQ ID NO: 20307 - RNA, 91 nt, synthetic construct
  misc_feature 1..91: note = engineered ribonucleic acid scaffold (ERS) sequence
  source 1..91: mol_type = other RNA
actggcgcttctatctgatttactctgaggagccatcaccagcgactatgtcgtagtgggtaaagctccctcttcggagggagcatcagag

SEQ ID NO: 20308 - RNA, 90 nt, synthetic construct
  misc_feature 1..90: note = engineered ribonucleic acid scaffold (ERS) sequence
  source 1..90: mol_type = other RNA
actggcgcttctatctgattgctctgaggagccatcaccagcgactatgtcgtagtgggtaaagctccctcttcggagggagcatcagag

SEQ ID NO: 20309 - RNA, 91 nt, synthetic construct
  misc_feature 1..91: note = engineered ribonucleic acid scaffold (ERS) sequence
  source 1..91: mol_type = other RNA
actggcgcttctatatctgattactctgatagccatcaccagcgactatgtcgtagtgggtaaagctccctcttcggagggagcatcagag

SEQ ID NO: 20310 - RNA, 90 nt, synthetic construct
  misc_feature 1..90: note = engineered ribonucleic acid scaffold (ERS) sequence
  source 1..90: mol_type = other RNA
actggcgcttctaatctgattactctgatagccatcaccagcgactatgtcgtagtgggtaaagctccctcttcggagggagcatcagag

SEQ ID NO: 20311 - RNA, 88 nt, synthetic construct
  misc_feature 1..88: note = engineered ribonucleic acid scaffold (ERS) sequence
  source 1..88: mol_type = other RNA
actggcgcttctactgattactctgatagccatcaccagcgactatgtcgtagtgggtaaagctccctcttcggagggagcatcagag

SEQ ID NO: 20312 - RNA, 89 nt, synthetic construct
  misc_feature 1..89: note = engineered ribonucleic acid scaffold (ERS) sequence
  source 1..89: mol_type = other RNA
actggcgcttctaactgattactctgatagccatcaccagcgactatgtcgtagtgggtaaagctccctcttcggagggagcatcagag

SEQ ID NO: 20313 - RNA, 89 nt, synthetic construct
  misc_feature 1..89: note = engineered ribonucleic acid scaffold (ERS) sequence
  source 1..89: mol_type = other RNA
actggcgcttctacctgattactctgatagccatcaccagcgactatgtcgtagtgggtaaagctccctcttcggagggagcatcagag

SEQ ID NO: 20314 - RNA, 89 nt, synthetic construct
  misc_feature 1..89: note = engineered ribonucleic acid scaffold (ERS) sequence
  source 1..89: mol_type = other RNA
actggcgcttctagctgattactctgatagccatcaccagcgactatgtcgtagtgggtaaagctccctcttcggagggagcatcagag

SEQ ID NO: 20315 - RNA, 91 nt, synthetic construct
  misc_feature 1..91: note = engineered ribonucleic acid scaffold (ERS) sequence
  source 1..91: mol_type = other RNA
actggcgcttctattactgattactctgatagccatcaccagcgactatgtcgtagtgggtaaagctccctcttcggagggagcatcagag

SEQ ID NO: 20316 - RNA, 89 nt, synthetic construct
  misc_feature 1..89: note = engineered ribonucleic acid scaffold (ERS) sequence
  source 1..89: mol_type = other RNA
actggcgcttctatatgattactctgatagccatcaccagcgactatgtcgtagtgggtaaagctccctcttcggagggagcatcagag

SEQ ID NO: 20317 - RNA, 89 nt, synthetic construct
  misc_feature 1..89: note = engineered ribonucleic acid scaffold (ERS) sequence
  source 1..89: mol_type = other RNA
actggcgcttctatgtgattactctgatagccatcaccagcgactatgtcgtagtgggtaaagctccctcttcggagggagcatcagag

SEQ ID NO: 20318 - RNA, 89 nt, synthetic construct
  misc_feature 1..89: note = engineered ribonucleic acid scaffold (ERS) sequence
  source 1..89: mol_type = other RNA
actggcgcttctatttgattactctgatagccatcaccagcgactatgtcgtagtgggtaaagctccctcttcggagggagcatcagag

SEQ ID NO: 20319 - RNA, 90 nt, synthetic construct
  misc_feature 1..90: note = engineered ribonucleic acid scaffold (ERS) sequence
  source 1..90: mol_type = other RNA
actggcgcttctatcttgattactctgatagccatcaccagcgactatgtcgtagtgggtaaagctccctcttcggagggagcatcagag

SEQ ID NO: 20320 - RNA, 89 nt, synthetic construct
  misc_feature 1..89: note = engineered ribonucleic acid scaffold (ERS) sequence
  source 1..89: mol_type = other RNA
actggcgcttctatcagattactctgatagccatcaccagcgactatgtcgtagtgggtaaagctccctcttcggagggagcatcagag

SEQ ID NO: 20321 - RNA, 89 nt, synthetic construct
  misc_feature 1..89: note = engineered ribonucleic acid scaffold (ERS) sequence
  source 1..89: mol_type = other RNA
actggcgcttctatcggattactctgatagccatcaccagcgactatgtcgtagtgggtaaagctccctcttcggagggagcatcagag

SEQ ID NO: 20322 - RNA, 90 nt, synthetic construct
  misc_feature 1..90: note = engineered ribonucleic acid scaffold (ERS) sequence
  source 1..90: mol_type = other RNA
actggcgcttctatctgaattactctgatagccatcaccagcgactatgtcgtagtgggtaaagctccctcttcggagggagcatcagag

SEQ ID NO: 20323 - RNA, 90 nt, synthetic construct
  misc_feature 1..90: note = engineered ribonucleic acid scaffold (ERS) sequence
  source 1..90: mol_type = other RNA
actggcgcttctatctgtattactctgatagccatcaccagcgactatgtcgtagtgggtaaagctccctcttcggagggagcatcagag

SEQ ID NO: 20324 - RNA, 89 nt, synthetic construct
  misc_feature 1..89: note = engineered ribonucleic acid scaffold (ERS) sequence
  source 1..89: mol_type = other RNA
actggcgcttctatctggttactctgatagccatcaccagcgactatgtcgtagtgggtaaagctccctcttcggagggagcatcagag

SEQ ID NO: 20325 - RNA, 89 nt, synthetic construct
  misc_feature 1..89: note = engineered ribonucleic acid scaffold (ERS) sequence
  source 1..89: mol_type = other RNA
actggcgcttctatctgtttactctgatagccatcaccagcgactatgtcgtagtgggtaaagctccctcttcggagggagcatcagag

SEQ ID NO: 20326 - RNA, 90 nt, synthetic construct
  misc_feature 1..90: note = engineered ribonucleic acid scaffold (ERS) sequence
  source 1..90: mol_type = other RNA
actggcgcttctatctgatttactctgatagccatcaccagcgactatgtcgtagtgggtaaagctccctcttcggagggagcatcagag

SEQ ID NO: 20327 - RNA, 89 nt, synthetic construct
  misc_feature 1..89: note = engineered ribonucleic acid scaffold (ERS) sequence
  source 1..89: mol_type = other RNA
actggcgcttctatctgattgctctgatagccatcaccagcgactatgtcgtagtgggtaaagctccctcttcggagggagcatcagag

SEQ ID NO: 20328 - RNA, 92 nt, synthetic construct
  misc_feature 1..92: note = engineered ribonucleic acid scaffold (ERS) sequence
  source 1..92: mol_type = other RNA
actggcgcttctatatctgattactctgagctgccatcaccagcgactatgtcgtagtgggtaaagctccctcttcggagggagcatcagag

SEQ ID NO: 20329 - RNA, 91 nt, synthetic construct
  misc_feature 1..91: note = engineered ribonucleic acid scaffold (ERS) sequence
  source 1..91: mol_type = other RNA
actggcgcttctaatctgattactctgagctgccatcaccagcgactatgtcgtagtgggtaaagctccctcttcggagggagcatcagag

SEQ ID NO: 20330 - RNA, 89 nt, synthetic construct
  misc_feature 1..89: note = engineered ribonucleic acid scaffold (ERS) sequence
  source 1..89: mol_type = other RNA
actggcgcttctactgattactctgagctgccatcaccagcgactatgtcgtagtgggtaaagctccctcttcggagggagcatcagag

SEQ ID NO: 20331 - RNA, 90 nt, synthetic construct
  misc_feature 1..90: note = engineered ribonucleic acid scaffold (ERS) sequence
  source 1..90: mol_type = other RNA
actggcgcttctaactgattactctgagctgccatcaccagcgactatgtcgtagtgggtaaagctccctcttcggagggagcatcagag

SEQ ID NO: 20332 - RNA, 90 nt, synthetic construct
  misc_feature 1..90: note = engineered ribonucleic acid scaffold (ERS) sequence
  source 1..90: mol_type = other RNA
actggcgcttctacctgattactctgagctgccatcaccagcgactatgtcgtagtgggtaaagctccctcttcggagggagcatcagag

SEQ ID NO: 20333 - RNA, 90 nt, synthetic construct
  misc_feature 1..90: note = engineered ribonucleic acid scaffold (ERS) sequence
  source 1..90: mol_type = other RNA
actggcgcttctagctgattactctgagctgccatcaccagcgactatgtcgtagtgggtaaagctccctcttcggagggagcatcagag

SEQ ID NO: 20334 - RNA, 92 nt, synthetic construct
  misc_feature 1..92: note = engineered ribonucleic acid scaffold (ERS) sequence
  source 1..92: mol_type = other RNA
actggcgcttctattactgattactctgagctgccatcaccagcgactatgtcgtagtgggtaaagctccctcttcggagggagcatcagag

SEQ ID NO: 20335 - RNA, 90 nt, synthetic construct
  misc_feature 1..90: note = engineered ribonucleic acid scaffold (ERS) sequence
  source 1..90: mol_type = other RNA
actggcgcttctatatgattactctgagctgccatcaccagcgactatgtcgtagtgggtaaagctccctcttcggagggagcatcagag

SEQ ID NO: 20336 - RNA, 90 nt, synthetic construct
  misc_feature 1..90: note = engineered ribonucleic acid scaffold (ERS) sequence
  source 1..90: mol_type = other RNA
actggcgcttctatgtgattactctgagctgccatcaccagcgactatgtcgtagtgggtaaagctccctcttcggagggagcatcagag

SEQ ID NO: 20337 - RNA, 90 nt, synthetic construct
  misc_feature 1..90: note = engineered ribonucleic acid scaffold (ERS) sequence
  source 1..90: mol_type = other RNA
actggcgcttctatttgattactctgagctgccatcaccagcgactatgtcgtagtgggtaaagctccctcttcggagggagcatcagag

SEQ ID NO: 20338 - RNA, 91 nt, synthetic construct
  misc_feature 1..91: note = engineered ribonucleic acid scaffold (ERS) sequence
  source 1..91: mol_type = other RNA
actggcgcttctatcttgattactctgagctgccatcaccagcgactatgtcgtagtgggtaaagctccctcttcggagggagcatcagag

SEQ ID NO: 20339 - RNA, 90 nt, synthetic construct
  misc_feature 1..90: note = engineered ribonucleic acid scaffold (ERS) sequence
  source 1..90: mol_type = other RNA
actggcgcttctatcagattactctgagctgccatcaccagcgactatgtcgtagtgggtaaagctccctcttcggagggagcatcagag

SEQ ID NO: 20340 - RNA, 90 nt, synthetic construct
  misc_feature 1..90: note = engineered ribonucleic acid scaffold (ERS) sequence
  source 1..90: mol_type = other RNA
actggcgcttctatcggattactctgagctgccatcaccagcgactatgtcgtagtgggtaaagctccctcttcggagggagcatcagag

SEQ ID NO: 20341 - RNA, 91 nt, synthetic construct
  misc_feature 1..91: note = engineered ribonucleic acid scaffold (ERS) sequence
  source 1..91: mol_type = other RNA
actggcgcttctatctgaattactctgagctgccatcaccagcgactatgtcgtagtgggtaaagctccctcttcggagggagcatcagag

SEQ ID NO: 20342 - RNA, 91 nt, synthetic construct
  misc_feature 1..91: note = engineered ribonucleic acid scaffold (ERS) sequence
  source 1..91: mol_type = other RNA
actggcgcttctatctgtattactctgagctgccatcaccagcgactatgtcgtagtgggtaaagctccctcttcggagggagcatcagag

SEQ ID NO: 20343 - RNA, 90 nt, synthetic construct
  misc_feature 1..90: note = engineered ribonucleic acid scaffold (ERS) sequence
  source 1..90: mol_type = other RNA
actggcgcttctatctggttactctgagctgccatcaccagcgactatgtcgtagtgggtaaagctccctcttcggagggagcatcagag

SEQ ID NO: 20344 - RNA, 90 nt, synthetic construct
  misc_feature 1..90: note = engineered ribonucleic acid scaffold (ERS) sequence
  source 1..90: mol_type = other RNA
actggcgcttctatctgtttactctgagctgccatcaccagcgactatgtcgtagtgggtaaagctccctcttcggagggagcatcagag

SEQ ID NO: 20345 - RNA, 91 nt, synthetic construct
  misc_feature 1..91: note = engineered ribonucleic acid scaffold (ERS) sequence
  source 1..91: mol_type = other RNA
actggcgcttctatctgatttactctgagctgccatcaccagcgactatgtcgtagtgggtaaagctccctcttcggagggagcatcagag

SEQ ID NO: 20346 - RNA, 90 nt, synthetic construct
  misc_feature 1..90: note = engineered ribonucleic acid scaffold (ERS) sequence
  source 1..90: mol_type = other RNA
actggcgcttctatctgattgctctgagctgccatcaccagcgactatgtcgtagtgggtaaagctccctcttcggagggagcatcagag

SEQ ID NO: 20347 - RNA, 92 nt, synthetic construct
  misc_feature 1..92: note = engineered ribonucleic acid scaffold (ERS) sequence
  source 1..92: mol_type = other RNA
actggcacttctatatctgattactctgagtagccatcaccagcgactatgtcgtagtgggtaaagctccctcttcggagggagcatcagag

SEQ ID NO: 20348 - RNA, 91 nt, synthetic construct
  misc_feature 1..91: note = engineered ribonucleic acid scaffold (ERS) sequence
  source 1..91: mol_type = other RNA
actggcacttctaatctgattactctgagtagccatcaccagcgactatgtcgtagtgggtaaagctccctcttcggagggagcatcagag

SEQ ID NO: 20349 - RNA, 89 nt, synthetic construct
  misc_feature 1..89: note = engineered ribonucleic acid scaffold (ERS) sequence
  source 1..89: mol_type = other RNA
actggcacttctactgattactctgagtagccatcaccagcgactatgtcgtagtgggtaaagctccctcttcggagggagcatcagag

SEQ ID NO: 20350 - RNA, 90 nt, synthetic construct
  misc_feature 1..90: note = engineered ribonucleic acid scaffold (ERS) sequence
  source 1..90: mol_type = other RNA
actggcacttctaactgattactctgagtagccatcaccagcgactatgtcgtagtgggtaaagctccctcttcggagggagcatcagag

SEQ ID NO: 20351 - RNA, 90 nt, synthetic construct
  misc_feature 1..90: note = engineered ribonucleic acid scaffold (ERS) sequence
  source 1..90: mol_type = other RNA
actggcacttctacctgattactctgagtagccatcaccagcgactatgtcgtagtgggtaaagctccctcttcggagggagcatcagag

SEQ ID NO: 20352 - RNA, 90 nt, synthetic construct
  misc_feature 1..90: note = engineered ribonucleic acid scaffold (ERS) sequence
  source 1..90: mol_type = other RNA
actggcacttctagctgattactctgagtagccatcaccagcgactatgtcgtagtgggtaaagctccctcttcggagggagcatcagag

SEQ ID NO: 20353 - RNA, 92 nt, synthetic construct
  misc_feature 1..92: note = engineered ribonucleic acid scaffold (ERS) sequence
  source 1..92: mol_type = other RNA
actggcacttctattactgattactctgagtagccatcaccagcgactatgtcgtagtgggtaaagctccctcttcggagggagcatcagag

SEQ ID NO: 20354 - RNA, 90 nt, synthetic construct
  misc_feature 1..90: note = engineered ribonucleic acid scaffold (ERS) sequence
  source 1..90: mol_type = other RNA
actggcacttctatatgattactctgagtagccatcaccagcgactatgtcgtagtgggtaaagctccctcttcggagggagcatcagag

SEQ ID NO: 20355 - RNA, 90 nt, synthetic construct
  misc_feature 1..90: note = engineered ribonucleic acid scaffold (ERS) sequence
  source 1..90: mol_type = other RNA
actggcacttctatgtgattactctgagtagccatcaccagcgactatgtcgtagtgggtaaagctccctcttcggagggagcatcagag

SEQ ID NO: 20356 - RNA, 90 nt, synthetic construct
  misc_feature 1..90: note = engineered ribonucleic acid scaffold (ERS) sequence
  source 1..90: mol_type = other RNA
actggcacttctatttgattactctgagtagccatcaccagcgactatgtcgtagtgggtaaagctccctcttcggagggagcatcagag

SEQ ID NO: 20357 - RNA, 91 nt, synthetic construct
  misc_feature 1..91: note = engineered ribonucleic acid scaffold (ERS) sequence
  source 1..91: mol_type = other RNA
actggcacttctatcttgattactctgagtagccatcaccagcgactatgtcgtagtgggtaaagctccctcttcggagggagcatcagag

SEQ ID NO: 20358 - RNA, 90 nt, synthetic construct
  misc_feature 1..90: note = engineered ribonucleic acid scaffold (ERS) sequence
  source 1..90: mol_type = other RNA
actggcacttctatcagattactctgagtagccatcaccagcgactatgtcgtagtgggtaaagctccctcttcggagggagcatcagag

SEQ ID NO: 20359 - RNA, 90 nt, synthetic construct
  misc_feature 1..90: note = engineered ribonucleic acid scaffold (ERS) sequence
  source 1..90: mol_type = other RNA
actggcacttctatcggattactctgagtagccatcaccagcgactatgtcgtagtgggtaaagctccctcttcggagggagcatcagag

SEQ ID NO: 20360 - RNA, 91 nt, synthetic construct
  misc_feature 1..91: note = engineered ribonucleic acid scaffold (ERS) sequence
  source 1..91: mol_type = other RNA
actggcacttctatctgaattactctgagtagccatcaccagcgactatgtcgtagtgggtaaagctccctcttcggagggagcatcagag

SEQ ID NO: 20361 - RNA, 91 nt, synthetic construct
  misc_feature 1..91: note = engineered ribonucleic acid scaffold (ERS) sequence
  source 1..91: mol_type = other RNA
actggcacttctatctgtattactctgagtagccatcaccagcgactatgtcgtagtgggtaaagctccctcttcggagggagcatcagag

SEQ ID NO: 20362 - RNA, 90 nt, synthetic construct
  misc_feature 1..90: note = engineered ribonucleic acid scaffold (ERS) sequence
  source 1..90: mol_type = other RNA
actggcacttctatctggttactctgagtagccatcaccagcgactatgtcgtagtgggtaaagctccctcttcggagggagcatcagag

SEQ ID NO: 20363 - RNA, 90 nt, synthetic construct
  misc_feature 1..90: note = engineered ribonucleic acid scaffold (ERS) sequence
  source 1..90: mol_type = other RNA
actggcacttctatctgtttactctgagtagccatcaccagcgactatgtcgtagtgggtaaagctccctcttcggagggagcatcagag

SEQ ID NO: 20364 - RNA, 91 nt, synthetic construct
  misc_feature 1..91: note = engineered ribonucleic acid scaffold (ERS) sequence
  source 1..91: mol_type = other RNA
actggcacttctatctgatttactctgagtagccatcaccagcgactatgtcgtagtgggtaaagctccctcttcggagggagcatcagag

SEQ ID NO: 20365 - RNA, 90 nt, synthetic construct
  misc_feature 1..90: note = engineered ribonucleic acid scaffold (ERS) sequence
  source 1..90: mol_type = other RNA
actggcacttctatctgattgctctgagtagccatcaccagcgactatgtcgtagtgggtaaagctccctcttcggagggagcatcagag

SEQ ID NO: 20366 - RNA, 92 nt, synthetic construct
  misc_feature 1..92: note = engineered ribonucleic acid scaffold (ERS) sequence
  source 1..92: mol_type = other RNA
actggcgcttctatatctgattactctgagtagccatcaccagcgactatgtcgtagtgggtaaagctccctcttcggagggagcatcagag

SEQ ID NO: 20367 - RNA, 91 nt, synthetic construct
  misc_feature 1..91: note = engineered ribonucleic acid scaffold (ERS) sequence
  source 1..91: mol_type = other RNA
actggcgcttctaatctgattactctgagtagccatcaccagcgactatgtcgtagtgggtaaagctccctcttcggagggagcatcagag

SEQ ID NO: 20368 - RNA, 89 nt, synthetic construct
  misc_feature 1..89: note = engineered ribonucleic acid scaffold (ERS) sequence
  source 1..89: mol_type = other RNA
actggcgcttctactgattactctgagtagccatcaccagcgactatgtcgtagtgggtaaagctccctcttcggagggagcatcagag

SEQ ID NO: 20369 - RNA, 90 nt, synthetic construct
  misc_feature 1..90: note = engineered ribonucleic acid scaffold (ERS) sequence
  source 1..90: mol_type = other RNA
actggcgcttctaactgattactctgagtagccatcaccagcgactatgtcgtagtgggtaaagctccctcttcggagggagcatcagag

SEQ ID NO: 20370 - RNA, 90 nt, synthetic construct
  misc_feature 1..90: note = engineered ribonucleic acid scaffold (ERS) sequence
  source 1..90: mol_type = other RNA
actggcgcttctacctgattactctgagtagccatcaccagcgactatgtcgtagtgggtaaagctccctcttcggagggagcatcagag

SEQ ID NO: 20371 - RNA, 90 nt, synthetic construct
  misc_feature 1..90: note = engineered ribonucleic acid scaffold (ERS) sequence
  source 1..90: mol_type = other RNA
actggcgcttctagctgattactctgagtagccatcaccagcgactatgtcgtagtgggtaaagctccctcttcggagggagcatcagag

SEQ ID NO: 20372 - RNA, 92 nt, synthetic construct
  misc_feature 1..92: note = engineered ribonucleic acid scaffold (ERS) sequence
  source 1..92: mol_type = other RNA
actggcgcttctattactgattactctgagtagccatcaccagcgactatgtcgtagtgggtaaagctccctcttcggagggagcatcagag

SEQ ID NO: 20373 - RNA, 90 nt, synthetic construct
  misc_feature 1..90: note = engineered ribonucleic acid scaffold (ERS) sequence
  source 1..90: mol_type = other RNA
actggcgcttctatatgattactctgagtagccatcaccagcgactatgtcgtagtgggtaaagctccctcttcggagggagcatcagag

SEQ ID NO: 20374 - RNA, 90 nt, synthetic construct
  misc_feature 1..90: note = engineered ribonucleic acid scaffold (ERS) sequence
  source 1..90: mol_type = other RNA
actggcgcttctatgtgattactctgagtagccatcaccagcgactatgtcgtagtgggtaaagctccctcttcggagggagcatcagag

SEQ ID NO: 20375 - RNA, 90 nt, synthetic construct
  misc_feature 1..90: note = engineered ribonucleic acid scaffold (ERS) sequence
  source 1..90: mol_type = other RNA
actggcgcttctatttgattactctgagtagccatcaccagcgactatgtcgtagtgggtaaagctccctcttcggagggagcatcagag

SEQ ID NO: 20376 - RNA, 91 nt, synthetic construct
  misc_feature 1..91: note = engineered ribonucleic acid scaffold (ERS) sequence
  source 1..91: mol_type = other RNA
actggcgcttctatcttgattactctgagtagccatcaccagcgactatgtcgtagtgggtaaagctccctcttcggagggagcatcagag

SEQ ID NO: 20377 - RNA, 90 nt, synthetic construct
  misc_feature 1..90: note = engineered ribonucleic acid scaffold (ERS) sequence
  source 1..90: mol_type = other RNA
actggcgcttctatcagattactctgagtagccatcaccagcgactatgtcgtagtgggtaaagctccctcttcggagggagcatcagag

SEQ ID NO: 20378 - RNA, 90 nt, synthetic construct
  misc_feature 1..90: note = engineered ribonucleic acid scaffold (ERS) sequence
  source 1..90: mol_type = other RNA
actggcgcttctatcggattactctgagtagccatcaccagcgactatgtcgtagtgggtaaagctccctcttcggagggagcatcagag

SEQ ID NO: 20379 - RNA, 91 nt, synthetic construct
  misc_feature 1..91: note = engineered ribonucleic acid scaffold (ERS) sequence
  source 1..91: mol_type = other RNA
actggcgcttctatctgaattactctgagtagccatcaccagcgactatgtcgtagtgggtaaagctccctcttcggagggagcatcagag

SEQ ID NO: 20380 - RNA, 91 nt, synthetic construct
  misc_feature 1..91: note = engineered ribonucleic acid scaffold (ERS) sequence
  source 1..91: mol_type = other RNA
actggcgcttctatctgtattactctgagtagccatcaccagcgactatgtcgtagtgggtaaagctccctcttcggagggagcatcagag

SEQ ID NO: 20381 - RNA, 90 nt, synthetic construct
  misc_feature 1..90: note = engineered ribonucleic acid scaffold (ERS) sequence
  source 1..90: mol_type = other RNA
actggcgcttctatctggttactctgagtagccatcaccagcgactatgtcgtagtgggtaaagctccctcttcggagggagcatcagag

SEQ ID NO: 20382 - RNA, 90 nt, synthetic construct
  misc_feature 1..90: note = engineered ribonucleic acid scaffold (ERS) sequence
  source 1..90: mol_type = other RNA
actggcgcttctatctgtttactctgagtagccatcaccagcgactatgtcgtagtgggtaaagctccctcttcggagggagcatcagag

SEQ ID NO: 20383 - RNA, 91 nt, synthetic construct
  misc_feature 1..91: note = engineered ribonucleic acid scaffold (ERS) sequence
  source 1..91: mol_type = other RNA
actggcgcttctatctgatttactctgagtagccatcaccagcgactatgtcgtagtgggtaaagctccctcttcggagggagcatcagag

SEQ ID NO: 20384 - RNA, 90 nt, synthetic construct
  misc_feature 1..90: note = engineered ribonucleic acid scaffold (ERS) sequence
  source 1..90: mol_type = other RNA
actggcgcttctatctgattgctctgagtagccatcaccagcgactatgtcgtagtgggtaaagctccctcttcggagggagcatcagag

SEQ ID NO: 20385 - RNA, 91 nt, synthetic construct
  misc_feature 1..91: note = engineered ribonucleic acid scaffold (ERS) sequence
  source 1..91: mol_type = other RNA
actggcacttctatatctgattactctgagcgccatcaccagcgactatgtcgtagtgggtaaagctccctcttcggagggagcatcagag

SEQ ID NO: 20386 - RNA, 90 nt, synthetic construct
  misc_feature 1..90: note = engineered ribonucleic acid scaffold (ERS) sequence
  source 1..90: mol_type = other RNA
actggcacttctaatctgattactctgagcgccatcaccagcgactatgtcgtagtgggtaaagctccctcttcggagggagcatcagag

SEQ ID NO: 20387 - RNA, 88 nt, synthetic construct
  misc_feature 1..88: note = engineered ribonucleic acid scaffold (ERS) sequence
  source 1..88: mol_type = other RNA
actggcacttctactgattactctgagcgccatcaccagcgactatgtcgtagtgggtaaagctccctcttcggagggagcatcagag

SEQ ID NO: 20388 - RNA, 89 nt, synthetic construct
  misc_feature 1..89: note = engineered ribonucleic acid scaffold (ERS) sequence
  source 1..89: mol_type = other RNA
actggcacttctaactgattactctgagcgccatcaccagcgactatgtcgtagtgggtaaagctccctcttcggagggagcatcagag

SEQ ID NO: 20389 - RNA, 89 nt, synthetic construct
  misc_feature 1..89: note = engineered ribonucleic acid scaffold (ERS) sequence
  source 1..89: mol_type = other RNA
actggcacttctacctgattactctgagcgccatcaccagcgactatgtcgtagtgggtaaagctccctcttcggagggagcatcagag

SEQ ID NO: 20390 - RNA, 89 nt, synthetic construct
  misc_feature 1..89: note = engineered ribonucleic acid scaffold (ERS) sequence
  source 1..89: mol_type = other RNA
actggcacttctagctgattactctgagcgccatcaccagcgactatgtcgtagtgggtaaagctccctcttcggagggagcatcagag

SEQ ID NO: 20391 - RNA, 91 nt, synthetic construct
  misc_feature 1..91: note = engineered ribonucleic acid scaffold (ERS) sequence
  source 1..91: mol_type = other RNA
actggcacttctattactgattactctgagcgccatcaccagcgactatgtcgtagtgggtaaagctccctcttcggagggagcatcagag

SEQ ID NO: 20392 - RNA, 89 nt, synthetic construct
  misc_feature 1..89: note = engineered ribonucleic acid scaffold (ERS) sequence
  source 1..89: mol_type = other RNA
actggcacttctatatgattactctgagcgccatcaccagcgactatgtcgtagtgggtaaagctccctcttcggagggagcatcagag

SEQ ID NO: 20393 - RNA, 89 nt, synthetic construct
  misc_feature 1..89: note = engineered ribonucleic acid scaffold (ERS) sequence
  source 1..89: mol_type = other RNA
actggcacttctatgtgattactctgagcgccatcaccagcgactatgtcgtagtgggtaaagctccctcttcggagggagcatcagag

SEQ ID NO: 20394 - RNA, 89 nt, synthetic construct
  misc_feature 1..89: note = engineered ribonucleic acid scaffold (ERS) sequence
  source 1..89: mol_type = other RNA
actggcacttctatttgattactctgagcgccatcaccagcgactatgtcgtagtgggtaaagctccctcttcggagggagcatcagag

SEQ ID NO: 20395 - RNA, 90 nt, synthetic construct
  misc_feature 1..90: note = engineered ribonucleic acid scaffold (ERS) sequence
  source 1..90: mol_type = other RNA
actggcacttctatcttgattactctgagcgccatcaccagcgactatgtcgtagtgggtaaagctccctcttcggagggagcatcagag

SEQ ID NO: 20396 - RNA, 89 nt, synthetic construct
  misc_feature 1..89: note = engineered ribonucleic acid scaffold (ERS) sequence
  source 1..89: mol_type = other RNA
actggcacttctatcagattactctgagcgccatcaccagcgactatgtcgtagtgggtaaagctccctcttcggagggagcatcagag

SEQ ID NO: 20397 - RNA, 89 nt, synthetic construct
  misc_feature 1..89: note = engineered ribonucleic acid scaffold (ERS) sequence
  source 1..89: mol_type = other RNA
actggcacttctatcggattactctgagcgccatcaccagcgactatgtcgtagtgggtaaagctccctcttcggagggagcatcagag

SEQ ID NO: 20398 - RNA, 90 nt, synthetic construct
  misc_feature 1..90: note = engineered ribonucleic acid scaffold (ERS) sequence
  source 1..90: mol_type = other RNA
actggcacttctatctgaattactctgagcgccatcaccagcgactatgtcgtagtgggtaaagctccctcttcggagggagcatcagag

SEQ ID NO: 20399 - RNA, 90 nt, synthetic construct
  misc_feature 1..90: note = engineered ribonucleic acid scaffold (ERS) sequence
  source 1..90: mol_type = other RNA
actggcacttctatctgtattactctgagcgccatcaccagcgactatgtcgtagtgggtaaagctccctcttcggagggagcatcagag

SEQ ID NO: 20400 - RNA, 89 nt, synthetic construct
  misc_feature 1..89: note = engineered ribonucleic acid scaffold (ERS) sequence
  source 1..89: mol_type = other RNA
actggcacttctatctggttactctgagcgccatcaccagcgactatgtcgtagtgggtaaagctccctcttcggagggagcatcagag

SEQ ID NO: 20401 - RNA, 89 nt, synthetic construct
  misc_feature 1..89: note = engineered ribonucleic acid scaffold (ERS) sequence
  source 1..89: mol_type = other RNA
actggcacttctatctgtttactctgagcgccatcaccagcgactatgtcgtagtgggtaaagctccctcttcggagggagcatcagag

SEQ ID NO: 20402 - RNA, 90 nt, synthetic construct
  misc_feature 1..90: note = engineered ribonucleic acid scaffold (ERS) sequence
  source 1..90: mol_type = other RNA
actggcacttctatctgatttactctgagcgccatcaccagcgactatgtcgtagtgggtaaagctccctcttcggagggagcatcagag

SEQ ID NO: 20403 - RNA, 89 nt, synthetic construct
  misc_feature 1..89: note = engineered ribonucleic acid scaffold (ERS) sequence
  source 1..89: mol_type = other RNA
actggcacttctatctgattgctctgagcgccatcaccagcgactatgtcgtagtgggtaaagctccctcttcggagggagcatcagag

SEQ ID NO: 20404 - RNA, 91 nt, synthetic construct
  misc_feature 1..91: note = engineered ribonucleic acid scaffold (ERS) sequence
  source 1..91: mol_type = other RNA
actggcgcttctatatctgattactctgagcaccatcaccagcgactatgtcgtagtgggtaaagctccctcttcggagggagcatcagag

SEQ ID NO: 20405 - RNA, 90 nt, synthetic construct
  misc_feature 1..90: note = engineered ribonucleic acid scaffold (ERS) sequence
  source 1..90: mol_type = other RNA
actggcgcttctaatctgattactctgagcaccatcaccagcgactatgtcgtagtgggtaaagctccctcttcggagggagcatcagag

SEQ ID NO: 20406 - RNA, 88 nt, synthetic construct
  misc_feature 1..88: note = engineered ribonucleic acid scaffold (ERS) sequence
  source 1..88: mol_type = other RNA
actggcgcttctactgattactctgagcaccatcaccagcgactatgtcgtagtgggtaaagctccctcttcggagggagcatcagag

SEQ ID NO: 20407 - RNA, 89 nt, synthetic construct
  misc_feature 1..89: note = engineered ribonucleic acid scaffold (ERS) sequence
  source 1..89: mol_type = other RNA
actggcgcttctaactgattactctgagcaccatcaccagcgactatgtcgtagtgggtaaagctccctcttcggagggagcatcagag

SEQ ID NO: 20408 - RNA, 89 nt, synthetic construct
  misc_feature 1..89: note = engineered ribonucleic acid scaffold (ERS) sequence
  source 1..89: mol_type = other RNA
actggcgcttctacctgattactctgagcaccatcaccagcgactatgtcgtagtgggtaaagctccctcttcggagggagcatcagag

SEQ ID NO: 20409 - RNA, 89 nt, synthetic construct
  misc_feature 1..89: note = engineered ribonucleic acid scaffold (ERS) sequence
  source 1..89: mol_type = other RNA
actggcgcttctagctgattactctgagcaccatcaccagcgactatgtcgtagtgggtaaagctccctcttcggagggagcatcagag

SEQ ID NO: 20410 - RNA, 91 nt, synthetic construct
  misc_feature 1..91: note = engineered ribonucleic acid scaffold (ERS) sequence
  source 1..91: mol_type = other RNA
actggcgcttctattactgattactctgagcaccatcaccagcgactatgtcgtagtgggtaaagctccctcttcggagggagcatcagag

SEQ ID NO: 20411 - RNA, 89 nt, synthetic construct
  misc_feature 1..89: note = engineered ribonucleic acid scaffold (ERS) sequence
  source 1..89: mol_type = other RNA
actggcgcttctatatgattactctgagcaccatcaccagcgactatgtcgtagtgggtaaagctccctcttcggagggagcatcagag

SEQ ID NO: 20412 - RNA, 89 nt, synthetic construct
  misc_feature 1..89: note = engineered ribonucleic acid scaffold (ERS) sequence
  source 1..89: mol_type = other RNA
actggcgcttctatgtgattactctgagcaccatcaccagcgactatgtcgtagtgggtaaagctccctcttcggagggagcatcagag

SEQ ID NO: 20413 - RNA, 89 nt, synthetic construct
  misc_feature 1..89: note = engineered ribonucleic acid scaffold (ERS) sequence
  source 1..89: mol_type = other RNA
actggcgcttctatttgattactctgagcaccatcaccagcgactatgtcgtagtgggtaaagctccctcttcggagggagcatcagag

SEQ ID NO: 20414 - RNA, 90 nt, synthetic construct
  misc_feature 1..90: note = engineered ribonucleic acid scaffold (ERS) sequence
  source 1..90: mol_type = other RNA
actggcgcttctatcttgattactctgagcaccatcaccagcgactatgtcgtagtgggtaaagctccctcttcggagggagcatcagag

SEQ ID NO: 20415 - RNA, 89 nt, synthetic construct
  misc_feature 1..89: note = engineered ribonucleic acid scaffold (ERS) sequence
  source 1..89: mol_type = other RNA
actggcgcttctatcagattactctgagcaccatcaccagcgactatgtcgtagtgggtaaagctccctcttcggagggagcatcagag

SEQ ID NO: 20416 - RNA, 89 nt, synthetic construct
  misc_feature 1..89: note = engineered ribonucleic acid scaffold (ERS) sequence
  source 1..89: mol_type = other RNA
actggcgcttctatcggattactctgagcaccatcaccagcgactatgtcgtagtgggtaaagctccctcttcggagggagcatcagag

SEQ ID NO: 20417 - RNA, 90 nt, synthetic construct
  misc_feature 1..90: note = engineered ribonucleic acid scaffold (ERS) sequence
  source 1..90: mol_type = other RNA
actggcgcttctatctgaattactctgagcaccatcaccagcgactatgtcgtagtgggtaaagctccctcttcggagggagcatcagag

SEQ ID NO: 20418 - RNA, 90 nt, synthetic construct
  misc_feature 1..90: note = engineered ribonucleic acid scaffold (ERS) sequence
  source 1..90: mol_type = other RNA
actggcgcttctatctgtattactctgagcaccatcaccagcgactatgtcgtagtgggtaaagctccctcttcggagggagcatcagag

SEQ ID NO: 20419 - RNA, 89 nt, synthetic construct
  misc_feature 1..89: note = engineered ribonucleic acid scaffold (ERS) sequence
  source 1..89: mol_type = other RNA
actggcgcttctatctggttactctgagcaccatcaccagcgactatgtcgtagtgggtaaagctccctcttcggagggagcatcagag

SEQ ID NO: 20420 - RNA, 89 nt, synthetic construct
  misc_feature 1..89: note = engineered ribonucleic acid scaffold (ERS) sequence
  source 1..89: mol_type = other RNA
actggcgcttctatctgtttactctgagcaccatcaccagcgactatgtcgtagtgggtaaagctccctcttcggagggagcatcagag

SEQ ID NO: 20421 - RNA, 90 nt, synthetic construct
  misc_feature 1..90: note = engineered ribonucleic acid scaffold (ERS) sequence
  source 1..90: mol_type = other RNA
actggcgcttctatctgatttactctgagcaccatcaccagcgactatgtcgtagtgggtaaagctccctcttcggagggagcatcagag

SEQ ID NO: 20422 - RNA, 89 nt, synthetic construct
  misc_feature 1..89: note = engineered ribonucleic acid scaffold (ERS) sequence
  source 1..89: mol_type = other RNA
actggcgcttctatctgattgctctgagcaccatcaccagcgactatgtcgtagtgggtaaagctccctcttcggagggagcatcagag

SEQ ID NO: 20423 - RNA, 91 nt, synthetic construct
  misc_feature 1..91: note = engineered ribonucleic acid scaffold (ERS) sequence
  source 1..91: mol_type = other RNA
actggcgcttctatatctgattactctgagggccatcaccagcgactatgtcgtagtgggtaaagctccctcttcggagggagcatcagag

SEQ ID NO: 20424 - RNA, 90 nt, synthetic construct
  misc_feature 1..90: note = engineered ribonucleic acid scaffold (ERS) sequence
  source 1..90: mol_type = other RNA
actggcgcttctaatctgattactctgagggccatcaccagcgactatgtcgtagtgggtaaagctccctcttcggagggagcatcagag

SEQ ID NO: 20425 - RNA, 88 nt, synthetic construct
  misc_feature 1..88: note = engineered ribonucleic acid scaffold (ERS) sequence
  source 1..88: mol_type = other RNA
actggcgcttctactgattactctgagggccatcaccagcgactatgtcgtagtgggtaaagctccctcttcggagggagcatcagag

SEQ ID NO: 20426 - RNA, 89 nt, synthetic construct
  misc_feature 1..89: note = engineered ribonucleic acid scaffold (ERS) sequence
  source 1..89: mol_type = other RNA
actggcgcttctaactgattactctgagggccatcaccagcgactatgtcgtagtgggtaaagctccctcttcggagggagcatcagag

SEQ ID NO: 20427 - RNA, 89 nt, synthetic construct
  misc_feature 1..89: note = engineered ribonucleic acid scaffold (ERS) sequence
  source 1..89: mol_type = other RNA
actggcgcttctacctgattactctgagggccatcaccagcgactatgtcgtagtgggtaaagctccctcttcggagggagcatcagag

SEQ ID NO: 20428 - RNA, 89 nt, synthetic construct
  misc_feature 1..89: note = engineered ribonucleic acid scaffold (ERS) sequence
  source 1..89: mol_type = other RNA
actggcgcttctagctgattactctgagggccatcaccagcgactatgtcgtagtgggtaaagctccctcttcggagggagcatcagag

SEQ ID NO: 20429 - RNA, 91 nt, synthetic construct
  misc_feature 1..91: note = engineered ribonucleic acid scaffold (ERS) sequence
  source 1..91: mol_type = other RNA
actggcgcttctattactgattactctgagggccatcaccagcgactatgtcgtagtgggtaaagctccctcttcggagggagcatcagag

SEQ ID NO: 20430 - RNA, 89 nt, synthetic construct
  misc_feature 1..89: note = engineered ribonucleic acid scaffold (ERS) sequence
  source 1..89: mol_type = other RNA
actggcgcttctatatgattactctgagggccatcaccagcgactatgtcgtagtgggtaaagctccctcttcggagggagcatcagag

SEQ ID NO: 20431 - RNA, 89 nt, synthetic construct
  misc_feature 1..89: note = engineered ribonucleic acid scaffold (ERS) sequence
  source 1..89: mol_type = other RNA
actggcgcttctatgtgattactctgagggccatcaccagcgactatgtcgtagtgggtaaagctccctcttcggagggagcatcagag

SEQ ID NO: 20432 - RNA, 89 nt, synthetic construct
  misc_feature 1..89: note = engineered ribonucleic acid scaffold (ERS) sequence
  source 1..89: mol_type = other RNA
actggcgcttctatttgattactctgagggccatcaccagcgactatgtcgtagtgggtaaagctccctcttcggagggagcatcagag

SEQ ID NO: 20433 - RNA, 90 nt, synthetic construct
  misc_feature 1..90: note = engineered ribonucleic acid scaffold (ERS) sequence
  source 1..90: mol_type = other RNA
actggcgcttctatcttgattactctgagggccatcaccagcgactatgtcgtagtgggtaaagctccctcttcggagggagcatcagag

SEQ ID NO: 20434 - RNA, 89 nt, synthetic construct
  misc_feature 1..89: note = engineered ribonucleic acid scaffold (ERS) sequence
  source 1..89: mol_type = other RNA
actggcgcttctatcagattactctgagggccatcaccagcgactatgtcgtagtgggtaaagctccctcttcggagggagcatcagag

SEQ ID NO: 20435 - RNA, 89 nt, synthetic construct
  misc_feature 1..89: note = engineered ribonucleic acid scaffold (ERS) sequence
  source 1..89: mol_type = other RNA
actggcgcttctatcggattactctgagggccatcaccagcgactatgtcgtagtgggtaaagctccctcttcggagggagcatcagag

SEQ ID NO: 20436 - RNA, 90 nt, synthetic construct
  misc_feature 1..90: note = engineered ribonucleic acid scaffold (ERS) sequence
  source 1..90: mol_type = other RNA
actggcgcttctatctgaattactctgagggccatcaccagcgactatgtcgtagtgggtaaagctccctcttcggagggagcatcagag

SEQ ID NO: 20437 - RNA, 90 nt, synthetic construct
  misc_feature 1..90: note = engineered ribonucleic acid scaffold (ERS) sequence
  source 1..90: mol_type = other RNA
actggcgcttctatctgtattactctgagggccatcaccagcgactatgtcgtagtgggtaaagctccctcttcggagggagcatcagag

SEQ ID NO: 20438 - RNA, 89 nt, synthetic construct
  misc_feature 1..89: note = engineered ribonucleic acid scaffold (ERS) sequence
  source 1..89: mol_type = other RNA
actggcgcttctatctggttactctgagggccatcaccagcgactatgtcgtagtgggtaaagctccctcttcggagggagcatcagag

SEQ ID NO: 20439 - RNA, 89 nt, synthetic construct
  misc_feature 1..89: note = engineered ribonucleic acid scaffold (ERS) sequence
  source 1..89: mol_type = other RNA
actggcgcttctatctgtttactctgagggccatcaccagcgactatgtcgtagtgggtaaagctccctcttcggagggagcatcagag

SEQ ID NO: 20440 - RNA, 90 nt, synthetic construct
  misc_feature 1..90: note = engineered ribonucleic acid scaffold (ERS) sequence
  source 1..90: mol_type = other RNA
actggcgcttctatctgatttactctgagggccatcaccagcgactatgtcgtagtgggtaaagctccctcttcggagggagcatcagag

SEQ ID NO: 20441 - RNA, 89 nt, synthetic construct
  misc_feature 1..89: note = engineered ribonucleic acid scaffold (ERS) sequence
  source 1..89: mol_type = other RNA
actggcgcttctatctgattgctctgagggccatcaccagcgactatgtcgtagtgggtaaagctccctcttcggagggagcatcagag

SEQ ID NO: 20442 - RNA, 91 nt, synthetic construct
  misc_feature 1..91: note = engineered ribonucleic acid scaffold (ERS) sequence
  source 1..91: mol_type = other RNA
actggcacttctatatctgattactctgagtgccatcaccagcgactatgtcgtagtgggtaaagctccctcttcggagggagcatcagag

SEQ ID NO: 20443 - RNA, 90 nt, synthetic construct
  misc_feature 1..90: note = engineered ribonucleic acid scaffold (ERS) sequence
  source 1..90: mol_type = other RNA
actggcacttctaatctgattactctgagtgccatcaccagcgactatgtcgtagtgggtaaagctccctcttcggagggagcatcagag

SEQ ID NO: 20444 - RNA, 88 nt, synthetic construct
  misc_feature 1..88: note = engineered ribonucleic acid scaffold (ERS) sequence
  source 1..88: mol_type = other RNA
actggcacttctactgattactctgagtgccatcaccagcgactatgtcgtagtgggtaaagctccctcttcggagggagcatcagag

SEQ ID NO: 20445 - RNA, 89 nt, synthetic construct
  misc_feature 1..89: note = engineered ribonucleic acid scaffold (ERS) sequence
  source 1..89: mol_type = other RNA
actggcacttctaactgattactctgagtgccatcaccagcgactatgtcgtagtgggtaaagctccctcttcggagggagcatcagag

SEQ ID NO: 20446 - RNA, 89 nt, synthetic construct
  misc_feature 1..89: note = engineered ribonucleic acid scaffold (ERS) sequence
  source 1..89: mol_type = other RNA
actggcacttctacctgattactctgagtgccatcaccagcgactatgtcgtagtgggtaaagctccctcttcggagggagcatcagag

SEQ ID NO: 20447 - RNA, 89 nt, synthetic construct
  misc_feature 1..89: note = engineered ribonucleic acid scaffold (ERS) sequence
  source 1..89: mol_type = other RNA
actggcacttctagctgattactctgagtgccatcaccagcgactatgtcgtagtgggtaaagctccctcttcggagggagcatcagag

SEQ ID NO: 20448 - RNA, 91 nt, synthetic construct
  misc_feature 1..91: note = engineered ribonucleic acid scaffold (ERS) sequence
  source 1..91: mol_type = other RNA
actggcacttctattactgattactctgagtgccatcaccagcgactatgtcgtagtgggtaaagctccctcttcggagggagcatcagag

SEQ ID NO: 20449 - RNA, 89 nt, synthetic construct
  misc_feature 1..89: note = engineered ribonucleic acid scaffold (ERS) sequence
  source 1..89: mol_type = other RNA
actggcacttctatatgattactctgagtgccatcaccagcgactatgtcgtagtgggtaaagctccctcttcggagggagcatcagag

SEQ ID NO: 20450 - RNA, 89 nt, synthetic construct
  misc_feature 1..89: note = engineered ribonucleic acid scaffold (ERS) sequence
  source 1..89: mol_type = other RNA
actggcacttctatgtgattactctgagtgccatcaccagcgactatgtcgtagtgggtaaagctccctcttcggagggagcatcagag

SEQ ID NO: 20451 - RNA, 89 nt, synthetic construct
  misc_feature 1..89: note = engineered ribonucleic acid scaffold (ERS) sequence
  source 1..89: mol_type = other RNA
actggcacttctatttgattactctgagtgccatcaccagcgactatgtcgtagtgggtaaagctccctcttcggagggagcatcagag

SEQ ID NO: 20452 - RNA, 90 nt, synthetic construct
  misc_feature 1..90: note = engineered ribonucleic acid scaffold (ERS) sequence
  source 1..90: mol_type = other RNA
actggcacttctatcttgattactctgagtgccatcaccagcgactatgtcgtagtgggtaaagctccctcttcggagggagcatcagag

SEQ ID NO: 20453 - RNA, 89 nt, synthetic construct
  misc_feature 1..89: note = engineered ribonucleic acid scaffold (ERS) sequence
  source 1..89: mol_type = other RNA
actggcacttctatcagattactctgagtgccatcaccagcgactatgtcgtagtgggtaaagctccctcttcggagggagcatcagag

SEQ ID NO: 20454 - RNA, 89 nt, synthetic construct
  misc_feature 1..89: note = engineered ribonucleic acid scaffold (ERS) sequence
  source 1..89: mol_type = other RNA
actggcacttctatcggattactctgagtgccatcaccagcgactatgtcgtagtgggtaaagctccctcttcggagggagcatcagag

SEQ ID NO: 20455 - RNA, 90 nt, synthetic construct
  misc_feature 1..90: note = engineered ribonucleic acid scaffold (ERS) sequence
  source 1..90: mol_type = other RNA
actggcacttctatctgaattactctgagtgccatcaccagcgactatgtcgtagtgggtaaagctccctcttcggagggagcatcagag

SEQ ID NO: 20456 - RNA, 90 nt, synthetic construct
  misc_feature 1..90: note = engineered ribonucleic acid scaffold (ERS) sequence
  source 1..90: mol_type = other RNA
actggcacttctatctgtattactctgagtgccatcaccagcgactatgtcgtagtgggtaaagctccctcttcggagggagcatcagag

SEQ ID NO: 20457 - RNA, 89 nt, synthetic construct
  misc_feature 1..89: note = engineered ribonucleic acid scaffold (ERS) sequence
  source 1..89: mol_type = other RNA
actggcacttctatctggttactctgagtgccatcaccagcgactatgtcgtagtgggtaaagctccctcttcggagggagcatcagag

SEQ ID NO: 20458 - RNA, 89 nt, synthetic construct
  misc_feature 1..89: note = engineered ribonucleic acid scaffold (ERS) sequence
  source 1..89: mol_type = other RNA
actggcacttctatctgtttactctgagtgccatcaccagcgactatgtcgtagtgggtaaagctccctcttcggagggagcatcagag

SEQ ID NO: 20459 - RNA, 90 nt, synthetic construct
  misc_feature 1..90: note = engineered ribonucleic acid scaffold (ERS) sequence
  source 1..90: mol_type = other RNA
actggcacttctatctgatttactctgagtgccatcaccagcgactatgtcgtagtgggtaaagctccctcttcggagggagcatcagag

SEQ ID NO: 20460 - RNA, 89 nt, synthetic construct
  misc_feature 1..89: note = engineered ribonucleic acid scaffold (ERS) sequence
  source 1..89: mol_type = other RNA
actggcacttctatctgattgctctgagtgccatcaccagcgactatgtcgtagtgggtaaagctccctcttcggagggagcatcagag

SEQ ID NO: 20461 - RNA, 91 nt, synthetic construct
  misc_feature 1..91: note = engineered ribonucleic acid scaffold (ERS) sequence
  source 1..91: mol_type = other RNA
actggcgcttctatatctgattactctgagtgccgtcaccagcgactatgtcgtagtgggtaaagctccctcttcggagggagcatcagag

SEQ ID NO: 20462 - RNA, 90 nt, synthetic construct
  misc_feature 1..90: note = engineered ribonucleic acid scaffold (ERS) sequence
  source 1..90: mol_type = other RNA
actggcgcttctaatctgattactctgagtgccgtcaccagcgactatgtcgtagtgggtaaagctccctcttcggagggagcatcagag

SEQ ID NO: 20463 - RNA, 88 nt, synthetic construct
  misc_feature 1..88: note = engineered ribonucleic acid scaffold (ERS) sequence
  source 1..88: mol_type = other RNA
actggcgcttctactgattactctgagtgccgtcaccagcgactatgtcgtagtgggtaaagctccctcttcggagggagcatcagag

SEQ ID NO: 20464 - RNA, 89 nt, synthetic construct
  misc_feature 1..89: note = engineered ribonucleic acid scaffold (ERS) sequence
  source 1..89: mol_type = other RNA
actggcgcttctaactgattactctgagtgccgtcaccagcgactatgtcgtagtgggtaaagctccctcttcggagggagcatcagag

SEQ ID NO: 20465 - RNA, 89 nt, synthetic construct
  misc_feature 1..89: note = engineered ribonucleic acid scaffold (ERS) sequence
  source 1..89: mol_type = other RNA
actggcgcttctacctgattactctgagtgccgtcaccagcgactatgtcgtagtgggtaaagctccctcttcggagggagcatcagag

SEQ ID NO: 20466 - RNA, 89 nt, synthetic construct
  misc_feature 1..89: note = engineered ribonucleic acid scaffold (ERS) sequence
  source 1..89: mol_type = other RNA
actggcgcttctagctgattactctgagtgccgtcaccagcgactatgtcgtagtgggtaaagctccctcttcggagggagcatcagag

SEQ ID NO: 20467 - RNA, 91 nt, synthetic construct
  misc_feature 1..91: note = engineered ribonucleic acid scaffold (ERS) sequence
  source 1..91: mol_type = other RNA
actggcgcttctattactgattactctgagtgccgtcaccagcgactatgtcgtagtgggtaaagctccctcttcggagggagcatcagag

SEQ ID NO: 20468 - RNA, 89 nt, synthetic construct
  misc_feature 1..89: note = engineered ribonucleic acid scaffold (ERS) sequence
  source 1..89: mol_type = other RNA
actggcgcttctatatgattactctgagtgccgtcaccagcgactatgtcgtagtgggtaaagctccctcttcggagggagcatcagag

SEQ ID NO: 20469 - RNA, 89 nt, synthetic construct
  misc_feature 1..89: note = engineered ribonucleic acid scaffold (ERS) sequence
  source 1..89: mol_type = other RNA
actggcgcttctatgtgattactctgagtgccgtcaccagcgactatgtcgtagtgggtaaagctccctcttcggagggagcatcagag

SEQ ID NO: 20470 - RNA, 89 nt, synthetic construct
  misc_feature 1..89: note = engineered ribonucleic acid scaffold (ERS) sequence
  source 1..89: mol_type = other RNA
actggcgcttctatttgattactctgagtgccgtcaccagcgactatgtcgtagtgggtaaagctccctcttcggagggagcatcagag

SEQ ID NO: 20471 - RNA, 90 nt, synthetic construct
  misc_feature 1..90: note = engineered ribonucleic acid scaffold (ERS) sequence
  source 1..90: mol_type = other RNA
actggcgcttctatcttgattactctgagtgccgtcaccagcgactatgtcgtagtgggtaaagctccctcttcggagggagcatcagag

SEQ ID NO: 20472 - RNA, 89 nt, synthetic construct
  misc_feature 1..89: note = engineered ribonucleic acid scaffold (ERS) sequence
  source 1..89: mol_type = other RNA
actggcgcttctatcagattactctgagtgccgtcaccagcgactatgtcgtagtgggtaaagctccctcttcggagggagcatcagag

SEQ ID NO: 20473 - RNA, 89 nt, synthetic construct
  misc_feature 1..89: note = engineered ribonucleic acid scaffold (ERS) sequence
  source 1..89: mol_type = other RNA
actggcgcttctatcggattactctgagtgccgtcaccagcgactatgtcgtagtgggtaaagctccctcttcggagggagcatcagag

SEQ ID NO: 20474 - RNA, 90 nt, synthetic construct
  misc_feature 1..90: note = engineered ribonucleic acid scaffold (ERS) sequence
  source 1..90: mol_type = other RNA
actggcgcttctatctgaattactctgagtgccgtcaccagcgactatgtcgtagtgggtaaagctccctcttcggagggagcatcagag

SEQ ID NO: 20475 - RNA, 90 nt, synthetic construct
  misc_feature 1..90: note = engineered ribonucleic acid scaffold (ERS) sequence
  source 1..90: mol_type = other RNA
actggcgcttctatctgtattactctgagtgccgtcaccagcgactatgtcgtagtgggtaaagctccctcttcggagggagcatcagag

SEQ ID NO: 20476 - RNA, 89 nt, synthetic construct
  misc_feature 1..89: note = engineered ribonucleic acid scaffold (ERS) sequence
  source 1..89: mol_type = other RNA
actggcgcttctatctggttactctgagtgccgtcaccagcgactatgtcgtagtgggtaaagctccctcttcggagggagcatcagag

SEQ ID NO: 20477 - RNA, 89 nt, synthetic construct
  misc_feature 1..89: note = engineered ribonucleic acid scaffold (ERS) sequence
  source 1..89: mol_type = other RNA
actggcgcttctatctgtttactctgagtgccgtcaccagcgactatgtcgtagtgggtaaagctccctcttcggagggagcatcagag

SEQ ID NO: 20478 - RNA, 90 nt, synthetic construct
  misc_feature 1..90: note = engineered ribonucleic acid scaffold (ERS) sequence
  source 1..90: mol_type = other RNA
actggcgcttctatctgatttactctgagtgccgtcaccagcgactatgtcgtagtgggtaaagctccctcttcggagggagcatcagag

SEQ ID NO: 20479 - RNA, 89 nt, synthetic construct
  misc_feature 1..89: note = engineered ribonucleic acid scaffold (ERS) sequence
  source 1..89: mol_type = other RNA
actggcgcttctatctgattgctctgagtgccgtcaccagcgactatgtcgtagtgggtaaagctccctcttcggagggagcatcagag

SEQ ID NO: 20480 - RNA, 91 nt, synthetic construct
  misc_feature 1..91: note = engineered ribonucleic acid scaffold (ERS) sequence
  source 1..91: mol_type = other RNA
actggcgcttctatatctgattactctgagaaccatcaccagcgactatgtcgtagtgggtaaagctccctcttcggagggagcatcagag

SEQ ID NO: 20481 - RNA, 90 nt, synthetic construct
  misc_feature 1..90: note = engineered ribonucleic acid scaffold (ERS) sequence
  source 1..90: mol_type = other RNA
actggcgcttctaatctgattactctgagaaccatcaccagcgactatgtcgtagtgggtaaagctccctcttcggagggagcatcagag

SEQ ID NO: 20482 - RNA, 88 nt, synthetic construct
  misc_feature 1..88: note = engineered ribonucleic acid scaffold (ERS) sequence
  source 1..88: mol_type = other RNA
actggcgcttctactgattactctgagaaccatcaccagcgactatgtcgtagtgggtaaagctccctcttcggagggagcatcagag

SEQ ID NO: 20483 - RNA, 89 nt, synthetic construct
  misc_feature 1..89: note = engineered ribonucleic acid scaffold (ERS) sequence
  source 1..89: mol_type = other RNA
actggcgcttctaactgattactctgagaaccatcaccagcgactatgtcgtagtgggtaaagctccctcttcggagggagcatcagag

SEQ ID NO: 20484 - RNA, 89 nt, synthetic construct
  misc_feature 1..89: note = engineered ribonucleic acid scaffold (ERS) sequence
  source 1..89: mol_type = other RNA
actggcgcttctacctgattactctgagaaccatcaccagcgactatgtcgtagtgggtaaagctccctcttcggagggagcatcagag

SEQ ID NO: 20485 - RNA, 89 nt, synthetic construct
  misc_feature 1..89: note = engineered ribonucleic acid scaffold (ERS) sequence
  source 1..89: mol_type = other RNA
actggcgcttctagctgattactctgagaaccatcaccagcgactatgtcgtagtgggtaaagctccctcttcggagggagcatcagag

SEQ ID NO: 20486 - RNA, 91 nt, synthetic construct
  misc_feature 1..91: note = engineered ribonucleic acid scaffold (ERS) sequence
  source 1..91: mol_type = other RNA
actggcgcttctattactgattactctgagaaccatcaccagcgactatgtcgtagtgggtaaagctccctcttcggagggagcatcagag

SEQ ID NO: 20487 - RNA, 89 nt, synthetic construct
  misc_feature 1..89: note = engineered ribonucleic acid scaffold (ERS) sequence
  source 1..89: mol_type = other RNA
actggcgcttctatatgattactctgagaaccatcaccagcgactatgtcgtagtgggtaaagctccctcttcggagggagcatcagag

SEQ ID NO: 20488 - RNA, 89 nt, synthetic construct
  misc_feature 1..89: note = engineered ribonucleic acid scaffold (ERS) sequence
  source 1..89: mol_type = other RNA
actggcgcttctatgtgattactctgagaaccatcaccagcgactatgtcgtagtgggtaaagctccctcttcggagggagcatcagag

SEQ ID NO: 20489 - RNA, 89 nt, synthetic construct
  misc_feature 1..89: note = engineered ribonucleic acid scaffold (ERS) sequence
  source 1..89: mol_type = other RNA
actggcgcttctatttgattactctgagaaccatcaccagcgactatgtcgtagtgggtaaagctccctcttcggagggagcatcagag

SEQ ID NO: 20490 - RNA, 90 nt, synthetic construct
  misc_feature 1..90: note = engineered ribonucleic acid scaffold (ERS) sequence
  source 1..90: mol_type = other RNA
actggcgcttctatcttgattactctgagaaccatcaccagcgactatgtcgtagtgggtaaagctccctcttcggagggagcatcagag

SEQ ID NO: 20491 - RNA, 89 nt, synthetic construct
  misc_feature 1..89: note = engineered ribonucleic acid scaffold (ERS) sequence
  source 1..89: mol_type = other RNA
actggcgcttctatcagattactctgagaaccatcaccagcgactatgtcgtagtgggtaaagctccctcttcggagggagcatcagag

SEQ ID NO: 20492 - RNA, 89 nt, synthetic construct
  misc_feature 1..89: note = engineered ribonucleic acid scaffold (ERS) sequence
  source 1..89: mol_type = other RNA
actggcgcttctatcggattactctgagaaccatcaccagcgactatgtcgtagtgggtaaagctccctcttcggagggagcatcagag

SEQ ID NO: 20493 - RNA, 90 nt, synthetic construct
  misc_feature 1..90: note = engineered ribonucleic acid scaffold (ERS) sequence
  source 1..90: mol_type = other RNA
actggcgcttctatctgaattactctgagaaccatcaccagcgactatgtcgtagtgggtaaagctccctcttcggagggagcatcagag

SEQ ID NO: 20494 - RNA, 90 nt, synthetic construct
  misc_feature 1..90: note = engineered ribonucleic acid scaffold (ERS) sequence
  source 1..90: mol_type = other RNA
actggcgcttctatctgtattactctgagaaccatcaccagcgactatgtcgtagtgggtaaagctccctcttcggagggagcatcagag

SEQ ID NO: 20495 - RNA, 89 nt, synthetic construct
  misc_feature 1..89: note = engineered ribonucleic acid scaffold (ERS) sequence
  source 1..89: mol_type = other RNA
actggcgcttctatctggttactctgagaaccatcaccagcgactatgtcgtagtgggtaaagctccctcttcggagggagcatcagag

SEQ ID NO: 20496 - RNA, 89 nt, synthetic construct
  misc_feature 1..89: note = engineered ribonucleic acid scaffold (ERS) sequence
  source 1..89: mol_type = other RNA
actggcgcttctatctgtttactctgagaaccatcaccagcgactatgtcgtagtgggtaaagctccctcttcggagggagcatcagag

SEQ ID NO: 20497 - RNA, 90 nt, synthetic construct
  misc_feature 1..90: note = engineered ribonucleic acid scaffold (ERS) sequence
  source 1..90: mol_type = other RNA
actggcgcttctatctgatttactctgagaaccatcaccagcgactatgtcgtagtgggtaaagctccctcttcggagggagcatcagag

SEQ ID NO: 20498 - RNA, 89 nt, synthetic construct
  misc_feature 1..89: note = engineered ribonucleic acid scaffold (ERS) sequence
  source 1..89: mol_type = other RNA
actggcgcttctatctgattgctctgagaaccatcaccagcgactatgtcgtagtgggtaaagctccctcttcggagggagcatcagag

SEQ ID NO: 20499 - RNA, 91 nt, synthetic construct
  misc_feature 1..91: note = engineered ribonucleic acid scaffold (ERS) sequence
  source 1..91: mol_type = other RNA
actggcgcttctatatctgattactctgagagccgtcaccagcgactatgtcgtagtgggtaaagctccctcttcggagggagcatcagag

SEQ ID NO: 20500 - RNA, 90 nt, synthetic construct
  misc_feature 1..90: note = engineered ribonucleic acid scaffold (ERS) sequence
  source 1..90: mol_type = other RNA
actggcgcttctaatctgattactctgagagccgtcaccagcgactatgtcgtagtgggtaaagctccctcttcggagggagcatcagag

SEQ ID NO: 20501 - RNA, 88 nt, synthetic construct
  misc_feature 1..88: note = engineered ribonucleic acid scaffold (ERS) sequence
  source 1..88: mol_type = other RNA
actggcgcttctactgattactctgagagccgtcaccagcgactatgtcgtagtgggtaaagctccctcttcggagggagcatcagag

SEQ ID NO: 20502 - RNA, 89 nt, synthetic construct
  misc_feature 1..89: note = engineered ribonucleic acid scaffold (ERS) sequence
  source 1..89: mol_type = other RNA
actggcgcttctaactgattactctgagagccgtcaccagcgactatgtcgtagtgggtaaagctccctcttcggagggagcatcagag

SEQ ID NO: 20503 - RNA, 89 nt, synthetic construct
  misc_feature 1..89: note = engineered ribonucleic acid scaffold (ERS) sequence
  source 1..89: mol_type = other RNA
actggcgcttctacctgattactctgagagccgtcaccagcgactatgtcgtagtgggtaaagctccctcttcggagggagcatcagag

SEQ ID NO: 20504 - RNA, 89 nt, synthetic construct
  misc_feature 1..89: note = engineered ribonucleic acid scaffold (ERS) sequence
  source 1..89: mol_type = other RNA
actggcgcttctagctgattactctgagagccgtcaccagcgactatgtcgtagtgggtaaagctccctcttcggagggagcatcagag

SEQ ID NO: 20505 - RNA, 91 nt, synthetic construct
  misc_feature 1..91: note = engineered ribonucleic acid scaffold (ERS) sequence
  source 1..91: mol_type = other RNA
actggcgcttctattactgattactctgagagccgtcaccagcgactatgtcgtagtgggtaaagctccctcttcggagggagcatcagag

SEQ ID NO: 20506 - RNA, 89 nt, synthetic construct
  misc_feature 1..89: note = engineered ribonucleic acid scaffold (ERS) sequence
  source 1..89: mol_type = other RNA
actggcgcttctatatgattactctgagagccgtcaccagcgactatgtcgtagtgggtaaagctccctcttcggagggagcatcagag

SEQ ID NO: 20507 - RNA, 89 nt, synthetic construct
  misc_feature 1..89: note = engineered ribonucleic acid scaffold (ERS) sequence
  source 1..89: mol_type = other RNA
actggcgcttctatgtgattactctgagagccgtcaccagcgactatgtcgtagtgggtaaagctccctcttcggagggagcatcagag

SEQ ID NO: 20508 - RNA, 89 nt, synthetic construct
  misc_feature 1..89: note = engineered ribonucleic acid scaffold (ERS) sequence
  source 1..89: mol_type = other RNA
actggcgcttctatttgattactctgagagccgtcaccagcgactatgtcgtagtgggtaaagctccctcttcggagggagcatcagag

SEQ ID NO: 20509 - RNA, 90 nt, synthetic construct
  misc_feature 1..90: note = engineered ribonucleic acid scaffold (ERS) sequence
  source 1..90: mol_type = other RNA
actggcgcttctatcttgattactctgagagccgtcaccagcgactatgtcgtagtgggtaaagctccctcttcggagggagcatcagag

SEQ ID NO: 20510 - RNA, 89 nt, synthetic construct
  misc_feature 1..89: note = engineered ribonucleic acid scaffold (ERS) sequence
  source 1..89: mol_type = other RNA
actggcgcttctatcagattactctgagagccgtcaccagcgactatgtcgtagtgggtaaagctccctcttcggagggagcatcagag

SEQ ID NO: 20511 - RNA, 89 nt, synthetic construct
  misc_feature 1..89: note = engineered ribonucleic acid scaffold (ERS) sequence
  source 1..89: mol_type = other RNA
actggcgcttctatcggattactctgagagccgtcaccagcgactatgtcgtagtgggtaaagctccctcttcggagggagcatcagag

SEQ ID NO: 20512 - RNA, 90 nt, synthetic construct
  misc_feature 1..90: note = engineered ribonucleic acid scaffold (ERS) sequence
  source 1..90: mol_type = other RNA
actggcgcttctatctgaattactctgagagccgtcaccagcgactatgtcgtagtgggtaaagctccctcttcggagggagcatcagag

SEQ ID NO: 20513 - RNA, 90 nt, synthetic construct
  misc_feature 1..90: note = engineered ribonucleic acid scaffold (ERS) sequence
  source 1..90: mol_type = other RNA
actggcgcttctatctgtattactctgagagccgtcaccagcgactatgtcgtagtgggtaaagctccctcttcggagggagcatcagag

SEQ ID NO: 20514 - RNA, 89 nt, synthetic construct
  misc_feature 1..89: note = engineered ribonucleic acid scaffold (ERS) sequence
  source 1..89: mol_type = other RNA
actggcgcttctatctggttactctgagagccgtcaccagcgactatgtcgtagtgggtaaagctccctcttcggagggagcatcagag

SEQ ID NO: 20515 - RNA, 89 nt, synthetic construct
  misc_feature 1..89: note = engineered ribonucleic acid scaffold (ERS) sequence
  source 1..89: mol_type = other RNA
actggcgcttctatctgtttactctgagagccgtcaccagcgactatgtcgtagtgggtaaagctccctcttcggagggagcatcagag

SEQ ID NO: 20516 - RNA, 90 nt, synthetic construct
  misc_feature 1..90: note = engineered ribonucleic acid scaffold (ERS) sequence
  source 1..90: mol_type = other RNA
actggcgcttctatctgatttactctgagagccgtcaccagcgactatgtcgtagtgggtaaagctccctcttcggagggagcatcagag

SEQ ID NO: 20517 - RNA, 89 nt, synthetic construct
  misc_feature 1..89: note = engineered ribonucleic acid scaffold (ERS) sequence
  source 1..89: mol_type = other RNA
actggcgcttctatctgattgctctgagagccgtcaccagcgactatgtcgtagtgggtaaagctccctcttcggagggagcatcagag

SEQ ID NO: 20518 - RNA, 91 nt, synthetic construct
  misc_feature 1..91: note = engineered ribonucleic acid scaffold (ERS) sequence
  source 1..91: mol_type = other RNA
actggcgcttctatatctgattactctgagagccttcaccagcgactatgtcgtagtgggtaaagctccctcttcggagggagcatcagag

SEQ ID NO: 20519 - RNA, 90 nt, synthetic construct
  misc_feature 1..90: note = engineered ribonucleic acid scaffold (ERS) sequence
  source 1..90: mol_type = other RNA
actggcgcttctaatctgattactctgagagccttcaccagcgactatgtcgtagtgggtaaagctccctcttcggagggagcatcagag

SEQ ID NO: 20520 - RNA, 88 nt, synthetic construct
  misc_feature 1..88: note = engineered ribonucleic acid scaffold (ERS) sequence
  source 1..88: mol_type = other RNA
actggcgcttctactgattactctgagagccttcaccagcgactatgtcgtagtgggtaaagctccctcttcggagggagcatcagag

SEQ ID NO: 20521 - RNA, 89 nt, synthetic construct
  misc_feature 1..89: note = engineered ribonucleic acid scaffold (ERS) sequence
  source 1..89: mol_type = other RNA
actggcgcttctaactgattactctgagagccttcaccagcgactatgtcgtagtgggtaaagctccctcttcggagggagcatcagag

SEQ ID NO: 20522 - RNA, 89 nt, synthetic construct
  misc_feature 1..89: note = engineered ribonucleic acid scaffold (ERS) sequence
  source 1..89: mol_type = other RNA
actggcgcttctacctgattactctgagagccttcaccagcgactatgtcgtagtgggtaaagctccctcttcggagggagcatcagag

SEQ ID NO: 20523 - RNA, 89 nt, synthetic construct
  misc_feature 1..89: note = engineered ribonucleic acid scaffold (ERS) sequence
  source 1..89: mol_type = other RNA
actggcgcttctagctgattactctgagagccttcaccagcgactatgtcgtagtgggtaaagctccctcttcggagggagcatcagag

SEQ ID NO: 20524 - RNA, 91 nt, synthetic construct
  misc_feature 1..91: note = engineered ribonucleic acid scaffold (ERS) sequence
  source 1..91: mol_type = other RNA
actggcgcttctattactgattactctgagagccttcaccagcgactatgtcgtagtgggtaaagctccctcttcggagggagcatcagag

SEQ ID NO: 20525 - RNA, 89 nt, synthetic construct
  misc_feature 1..89: note = engineered ribonucleic acid scaffold (ERS) sequence
  source 1..89: mol_type = other RNA
actggcgcttctatatgattactctgagagccttcaccagcgactatgtcgtagtgggtaaagctccctcttcggagggagcatcagag

SEQ ID NO: 20526 - RNA, 89 nt, synthetic construct
  misc_feature 1..89: note = engineered ribonucleic acid scaffold (ERS) sequence
  source 1..89: mol_type = other RNA
actggcgcttctatgtgattactctgagagccttcaccagcgactatgtcgtagtgggtaaagctccctcttcggagggagcatcagag

SEQ ID NO: 20527 - RNA, 89 nt, synthetic construct
  misc_feature 1..89: note = engineered ribonucleic acid scaffold (ERS) sequence
  source 1..89: mol_type = other RNA
actggcgcttctatttgattactctgagagccttcaccagcgactatgtcgtagtgggtaaagctccctcttcggagggagcatcagag

SEQ ID NO: 20528 - RNA, 90 nt, synthetic construct
  misc_feature 1..90: note = engineered ribonucleic acid scaffold (ERS) sequence
  source 1..90: mol_type = other RNA
actggcgcttctatcttgattactctgagagccttcaccagcgactatgtcgtagtgggtaaagctccctcttcggagggagcatcagag

SEQ ID NO: 20529 - RNA, 89 nt, synthetic construct
  misc_feature 1..89: note = engineered ribonucleic acid scaffold (ERS) sequence
  source 1..89: mol_type = other RNA
actggcgcttctatcagattactctgagagccttcaccagcgactatgtcgtagtgggtaaagctccctcttcggagggagcatcagag

SEQ ID NO: 20530 - RNA, 89 nt, synthetic construct
  misc_feature 1..89: note = engineered ribonucleic acid scaffold (ERS) sequence
  source 1..89: mol_type = other RNA
actggcgcttctatcggattactctgagagccttcaccagcgactatgtcgtagtgggtaaagctccctcttcggagggagcatcagag

SEQ ID NO: 20531 - RNA, 90 nt, synthetic construct
  misc_feature 1..90: note = engineered ribonucleic acid scaffold (ERS) sequence
  source 1..90: mol_type = other RNA
actggcgcttctatctgaattactctgagagccttcaccagcgactatgtcgtagtgggtaaagctccctcttcggagggagcatcagag

SEQ ID NO: 20532 - RNA, 90 nt, synthetic construct
  misc_feature 1..90: note = engineered ribonucleic acid scaffold (ERS) sequence
  source 1..90: mol_type = other RNA
actggcgcttctatctgtattactctgagagccttcaccagcgactatgtcgtagtgggtaaagctccctcttcggagggagcatcagag

SEQ ID NO: 20533 - RNA, 89 nt, synthetic construct
  misc_feature 1..89: note = engineered ribonucleic acid scaffold (ERS) sequence
  source 1..89: mol_type = other RNA
actggcgcttctatctggttactctgagagccttcaccagcgactatgtcgtagtgggtaaagctccctcttcggagggagcatcagag

SEQ ID NO: 20534 - RNA, 89 nt, synthetic construct
  misc_feature 1..89: note = engineered ribonucleic acid scaffold (ERS) sequence
  source 1..89: mol_type = other RNA
actggcgcttctatctgtttactctgagagccttcaccagcgactatgtcgtagtgggtaaagctccctcttcggagggagcatcagag

SEQ ID NO: 20535 - RNA, 90 nt, synthetic construct
  misc_feature 1..90: note = engineered ribonucleic acid scaffold (ERS) sequence
  source 1..90: mol_type = other RNA
actggcgcttctatctgatttactctgagagccttcaccagcgactatgtcgtagtgggtaaagctccctcttcggagggagcatcagag

SEQ ID NO: 20536 - RNA, 89 nt, synthetic construct
  misc_feature 1..89: note = engineered ribonucleic acid scaffold (ERS) sequence
  source 1..89: mol_type = other RNA
actggcgcttctatctgattgctctgagagccttcaccagcgactatgtcgtagtgggtaaagctccctcttcggagggagcatcagag

SEQ ID NO: 20537 - RNA, 91 nt, synthetic construct
  misc_feature 1..91: note = engineered ribonucleic acid scaffold (ERS) sequence
  source 1..91: mol_type = other RNA
actggggcttctatatctgattactctgagacccatcaccagcgactatgtcgtagtgggtaaagctccctcttcggagggagcatcagag

SEQ ID NO: 20538 - RNA, 90 nt, synthetic construct
  misc_feature 1..90: note = engineered ribonucleic acid scaffold (ERS) sequence
  source 1..90: mol_type = other RNA
actggggcttctaatctgattactctgagacccatcaccagcgactatgtcgtagtgggtaaagctccctcttcggagggagcatcagag

SEQ ID NO: 20539 - RNA, 88 nt, synthetic construct
  misc_feature 1..88: note = engineered ribonucleic acid scaffold (ERS) sequence
  source 1..88: mol_type = other RNA
actggggcttctactgattactctgagacccatcaccagcgactatgtcgtagtgggtaaagctccctcttcggagggagcatcagag

SEQ ID NO: 20540 - RNA, 89 nt, synthetic construct
  misc_feature 1..89: note = engineered ribonucleic acid scaffold (ERS) sequence
  source 1..89: mol_type = other RNA
actggggcttctaactgattactctgagacccatcaccagcgactatgtcgtagtgggtaaagctccctcttcggagggagcatcagag

SEQ ID NO: 20541 - RNA, 89 nt, synthetic construct
  misc_feature 1..89: note = engineered ribonucleic acid scaffold (ERS) sequence
  source 1..89: mol_type = other RNA
actggggcttctacctgattactctgagacccatcaccagcgactatgtcgtagtgggtaaagctccctcttcggagggagcatcagag

SEQ ID NO: 20542 - RNA, 89 nt, synthetic construct
  misc_feature 1..89: note = engineered ribonucleic acid scaffold (ERS) sequence
  source 1..89: mol_type = other RNA
actggggcttctagctgattactctgagacccatcaccagcgactatgtcgtagtgggtaaagctccctcttcggagggagcatcagag

SEQ ID NO: 20543 - RNA, 91 nt, synthetic construct
  misc_feature 1..91: note = engineered ribonucleic acid scaffold (ERS) sequence
  source 1..91: mol_type = other RNA
actggggcttctattactgattactctgagacccatcaccagcgactatgtcgtagtgggtaaagctccctcttcggagggagcatcagag

SEQ ID NO: 20544 - RNA, 89 nt, synthetic construct
  misc_feature 1..89: note = engineered ribonucleic acid scaffold (ERS) sequence
  source 1..89: mol_type = other RNA
actggggcttctatatgattactctgagacccatcaccagcgactatgtcgtagtgggtaaagctccctcttcggagggagcatcagag

SEQ ID NO: 20545 - RNA, 89 nt, synthetic construct
  misc_feature 1..89: note = engineered ribonucleic acid scaffold (ERS) sequence
  source 1..89: mol_type = other RNA
actggggcttctatgtgattactctgagacccatcaccagcgactatgtcgtagtgggtaaagctccctcttcggagggagcatcagag

SEQ ID NO: 20546 - RNA, 89 nt, synthetic construct
  misc_feature 1..89: note = engineered ribonucleic acid scaffold (ERS) sequence
  source 1..89: mol_type = other RNA
actggggcttctatttgattactctgagacccatcaccagcgactatgtcgtagtgggtaaagctccctcttcggagggagcatcagag

SEQ ID NO: 20547 - RNA, 90 nt, synthetic construct
  misc_feature 1..90: note = engineered ribonucleic acid scaffold (ERS) sequence
  source 1..90: mol_type = other RNA
actggggcttctatcttgattactctgagacccatcaccagcgactatgtcgtagtgggtaaagctccctcttcggagggagcatcagag

SEQ ID NO: 20548 - RNA, 89 nt, synthetic construct
  misc_feature 1..89: note = engineered ribonucleic acid scaffold (ERS) sequence
  source 1..89: mol_type = other RNA
actggggcttctatcagattactctgagacccatcaccagcgactatgtcgtagtgggtaaagctccctcttcggagggagcatcagag

SEQ ID NO: 20549 - RNA, 89 nt, synthetic construct
  misc_feature 1..89: note = engineered ribonucleic acid scaffold (ERS) sequence
  source 1..89: mol_type = other RNA
actggggcttctatcggattactctgagacccatcaccagcgactatgtcgtagtgggtaaagctccctcttcggagggagcatcagag

SEQ ID NO: 20550 - RNA, 90 nt, synthetic construct
  misc_feature 1..90: note = engineered ribonucleic acid scaffold (ERS) sequence
  source 1..90: mol_type = other RNA
actggggcttctatctgaattactctgagacccatcaccagcgactatgtcgtagtgggtaaagctccctcttcggagggagcatcagag

SEQ ID NO: 20551 - RNA, 90 nt, synthetic construct
  misc_feature 1..90: note = engineered ribonucleic acid scaffold (ERS) sequence
  source 1..90: mol_type = other RNA
actggggcttctatctgtattactctgagacccatcaccagcgactatgtcgtagtgggtaaagctccctcttcggagggagcatcagag

SEQ ID NO: 20552 - RNA, 89 nt, synthetic construct
  misc_feature 1..89: note = engineered ribonucleic acid scaffold (ERS) sequence
  source 1..89: mol_type = other RNA
actggggcttctatctggttactctgagacccatcaccagcgactatgtcgtagtgggtaaagctccctcttcggagggagcatcagag

SEQ ID NO: 20553 - RNA, 89 nt, synthetic construct
  misc_feature 1..89: note = engineered ribonucleic acid scaffold (ERS) sequence
  source 1..89: mol_type = other RNA
actggggcttctatctgtttactctgagacccatcaccagcgactatgtcgtagtgggtaaagctccctcttcggagggagcatcagag

SEQ ID NO: 20554 - RNA, 90 nt, synthetic construct
  misc_feature 1..90: note = engineered ribonucleic acid scaffold (ERS) sequence
  source 1..90: mol_type = other RNA
actggggcttctatctgatttactctgagacccatcaccagcgactatgtcgtagtgggtaaagctccctcttcggagggagcatcagag

SEQ ID NO: 20555 - RNA, 89 nt, synthetic construct
  misc_feature 1..89: note = engineered ribonucleic acid scaffold (ERS) sequence
  source 1..89: mol_type = other RNA
actggggcttctatctgattgctctgagacccatcaccagcgactatgtcgtagtgggtaaagctccctcttcggagggagcatcagag

SEQ ID NO: 20556 - RNA, 91 nt, synthetic construct
  misc_feature 1..91: note = engineered ribonucleic acid scaffold (ERS) sequence
  source 1..91: mol_type = other RNA
actggtgcttctatatctgattactctgagagccatcaccagcgactatgtcgtagtgggtaaagctccctcttcggagggagcatcagag

SEQ ID NO: 20557 - RNA, 90 nt, synthetic construct
  misc_feature 1..90: note = engineered ribonucleic acid scaffold (ERS) sequence
  source 1..90: mol_type = other RNA
actggtgcttctaatctgattactctgagagccatcaccagcgactatgtcgtagtgggtaaagctccctcttcggagggagcatcagag

SEQ ID NO: 20558 - RNA, 88 nt, synthetic construct
  misc_feature 1..88: note = engineered ribonucleic acid scaffold (ERS) sequence
  source 1..88: mol_type = other RNA
actggtgcttctactgattactctgagagccatcaccagcgactatgtcgtagtgggtaaagctccctcttcggagggagcatcagag

SEQ ID NO: 20559 - RNA, 89 nt, synthetic construct
  misc_feature 1..89: note = engineered ribonucleic acid scaffold (ERS) sequence
  source 1..89: mol_type = other RNA
actggtgcttctaactgattactctgagagccatcaccagcgactatgtcgtagtgggtaaagctccctcttcggagggagcatcagag

SEQ ID NO: 20560 - RNA, 89 nt, synthetic construct
  misc_feature 1..89: note = engineered ribonucleic acid scaffold (ERS) sequence
  source 1..89: mol_type = other RNA
actggtgcttctacctgattactctgagagccatcaccagcgactatgtcgtagtgggtaaagctccctcttcggagggagcatcagag

SEQ ID NO: 20561 - RNA, 89 nt, synthetic construct
  misc_feature 1..89: note = engineered ribonucleic acid scaffold (ERS) sequence
  source 1..89: mol_type = other RNA
actggtgcttctagctgattactctgagagccatcaccagcgactatgtcgtagtgggtaaagctccctcttcggagggagcatcagag

SEQ ID NO: 20562 - RNA, 91 nt, synthetic construct
  misc_feature 1..91: note = engineered ribonucleic acid scaffold (ERS) sequence
  source 1..91: mol_type = other RNA
actggtgcttctattactgattactctgagagccatcaccagcgactatgtcgtagtgggtaaagctccctcttcggagggagcatcagag

SEQ ID NO: 20563 - RNA, 89 nt, synthetic construct
  misc_feature 1..89: note = engineered ribonucleic acid scaffold (ERS) sequence
  source 1..89: mol_type = other RNA
actggtgcttctatatgattactctgagagccatcaccagcgactatgtcgtagtgggtaaagctccctcttcggagggagcatcagag

SEQ ID NO: 20564 - RNA, 89 nt, synthetic construct
  misc_feature 1..89: note = engineered ribonucleic acid scaffold (ERS) sequence
  source 1..89: mol_type = other RNA
actggtgcttctatgtgattactctgagagccatcaccagcgactatgtcgtagtgggtaaagctccctcttcggagggagcatcagag

SEQ ID NO: 20565 - RNA, 89 nt, synthetic construct
  misc_feature 1..89: note = engineered ribonucleic acid scaffold (ERS) sequence
  source 1..89: mol_type = other RNA
actggtgcttctatttgattactctgagagccatcaccagcgactatgtcgtagtgggtaaagctccctcttcggagggagcatcagag

SEQ ID NO: 20566 - RNA, 90 nt, synthetic construct
  misc_feature 1..90: note = engineered ribonucleic acid scaffold (ERS) sequence
  source 1..90: mol_type = other RNA
actggtgcttctatcttgattactctgagagccatcaccagcgactatgtcgtagtgggtaaagctccctcttcggagggagcatcagag

SEQ ID NO: 20567 - RNA, 89 nt, synthetic construct
  misc_feature 1..89: note = engineered ribonucleic acid scaffold (ERS) sequence
  source 1..89: mol_type = other RNA
actggtgcttctatcagattactctgagagccatcaccagcgactatgtcgtagtgggtaaagctccctcttcggagggagcatcagag

SEQ ID NO: 20568 - RNA, 89 nt, synthetic construct
  misc_feature 1..89: note = engineered ribonucleic acid scaffold (ERS) sequence
  source 1..89: mol_type = other RNA
actggtgcttctatcggattactctgagagccatcaccagcgactatgtcgtagtgggtaaagctccctcttcggagggagcatcagag

SEQ ID NO: 20569 - RNA, 90 nt, synthetic construct
  misc_feature 1..90: note = engineered ribonucleic acid scaffold (ERS) sequence
  source 1..90: mol_type = other RNA
actggtgcttctatctgaattactctgagagccatcaccagcgactatgtcgtagtgggtaaagctccctcttcggagggagcatcagag

SEQ ID NO: 20570 - RNA, 90 nt, synthetic construct
  misc_feature 1..90: note = engineered ribonucleic acid scaffold (ERS) sequence
  source 1..90: mol_type = other RNA
actggtgcttctatctgtattactctgagagccatcaccagcgactatgtcgtagtgggtaaagctccctcttcggagggagcatcagag

SEQ ID NO: 20571 - RNA, 89 nt, synthetic construct
  misc_feature 1..89: note = engineered ribonucleic acid scaffold (ERS) sequence
  source 1..89: mol_type = other RNA
actggtgcttctatctggttactctgagagccatcaccagcgactatgtcgtagtgggtaaagctccctcttcggagggagcatcagag

SEQ ID NO: 20572 - RNA, 89 nt, synthetic construct
  misc_feature 1..89: note = engineered ribonucleic acid scaffold (ERS) sequence
  source 1..89: mol_type = other RNA
actggtgcttctatctgtttactctgagagccatcaccagcgactatgtcgtagtgggtaaagctccctcttcggagggagcatcagag

SEQ ID NO: 20573 - RNA, 90 nt, synthetic construct
  misc_feature 1..90: note = engineered ribonucleic acid scaffold (ERS) sequence
  source 1..90: mol_type = other RNA
actggtgcttctatctgatttactctgagagccatcaccagcgactatgtcgtagtgggtaaagctccctcttcggagggagcatcagag

SEQ ID NO: 20574 - RNA, 89 nt, synthetic construct
  misc_feature 1..89: note = engineered ribonucleic acid scaffold (ERS) sequence
  source 1..89: mol_type = other RNA
actggtgcttctatctgattgctctgagagccatcaccagcgactatgtcgtagtgggtaaagctccctcttcggagggagcatcagag

SEQ ID NO: 20575 - RNA, 91 nt, synthetic construct
  misc_feature 1..91: note = engineered ribonucleic acid scaffold (ERS) sequence
  source 1..91: mol_type = other RNA
actgggccttctatatctgattactctgaggcccatcaccagcgactatgtcgtagtgggtaaagctccctcttcggagggagcatcagag

SEQ ID NO: 20576 - RNA, 90 nt, synthetic construct
  misc_feature 1..90: note = engineered ribonucleic acid scaffold (ERS) sequence
  source 1..90: mol_type = other RNA
actgggccttctaatctgattactctgaggcccatcaccagcgactatgtcgtagtgggtaaagctccctcttcggagggagcatcagag

SEQ ID NO: 20577 - RNA, 88 nt, synthetic construct
  misc_feature 1..88: note = engineered ribonucleic acid scaffold (ERS) sequence
  source 1..88: mol_type = other RNA
actgggccttctactgattactctgaggcccatcaccagcgactatgtcgtagtgggtaaagctccctcttcggagggagcatcagag

SEQ ID NO: 20578 - RNA, 89 nt, synthetic construct
  misc_feature 1..89: note = engineered ribonucleic acid scaffold (ERS) sequence
  source 1..89: mol_type = other RNA
actgggccttctaactgattactctgaggcccatcaccagcgactatgtcgtagtgggtaaagctccctcttcggagggagcatcagag

SEQ ID NO: 20579 - RNA, 89 nt, synthetic construct
  misc_feature 1..89: note = engineered ribonucleic acid scaffold (ERS) sequence
  source 1..89: mol_type = other RNA
actgggccttctacctgattactctgaggcccatcaccagcgactatgtcgtagtgggtaaagctccctcttcggagggagcatcagag

SEQ ID NO: 20580 - RNA, 89 nt, synthetic construct
  misc_feature 1..89: note = engineered ribonucleic acid scaffold (ERS) sequence
  source 1..89: mol_type = other RNA
actgggccttctagctgattactctgaggcccatcaccagcgactatgtcgtagtgggtaaagctccctcttcggagggagcatcagag

SEQ ID NO: 20581 - RNA, 91 nt, synthetic construct
  misc_feature 1..91: note = engineered ribonucleic acid scaffold (ERS) sequence
  source 1..91: mol_type = other RNA
actgggccttctattactgattactctgaggcccatcaccagcgactatgtcgtagtgggtaaagctccctcttcggagggagcatcagag

SEQ ID NO: 20582 - RNA, 89 nt, synthetic construct
  misc_feature 1..89: note = engineered ribonucleic acid scaffold (ERS) sequence
  source 1..89: mol_type = other RNA
actgggccttctatatgattactctgaggcccatcaccagcgactatgtcgtagtgggtaaagctccctcttcggagggagcatcagag

SEQ ID NO: 20583 - RNA, 89 nt, synthetic construct
  misc_feature 1..89: note = engineered ribonucleic acid scaffold (ERS) sequence
  source 1..89: mol_type = other RNA
actgggccttctatgtgattactctgaggcccatcaccagcgactatgtcgtagtgggtaaagctccctcttcggagggagcatcagag

SEQ ID NO: 20584 - RNA, 89 nt, synthetic construct
  misc_feature 1..89: note = engineered ribonucleic acid scaffold (ERS) sequence
  source 1..89: mol_type = other RNA
actgggccttctatttgattactctgaggcccatcaccagcgactatgtcgtagtgggtaaagctccctcttcggagggagcatcagag

SEQ ID NO: 20585 - RNA, 90 nt, synthetic construct
  misc_feature 1..90: note = engineered ribonucleic acid scaffold (ERS) sequence
  source 1..90: mol_type = other RNA
actgggccttctatcttgattactctgaggcccatcaccagcgactatgtcgtagtgggtaaagctccctcttcggagggagcatcagag

SEQ ID NO: 20586 - RNA, 89 nt, synthetic construct
  misc_feature 1..89: note = engineered ribonucleic acid scaffold (ERS) sequence
  source 1..89: mol_type = other RNA
actgggccttctatcagattactctgaggcccatcaccagcgactatgtcgtagtgggtaaagctccctcttcggagggagcatcagag

SEQ ID NO: 20587 - RNA, 89 nt, synthetic construct
  misc_feature 1..89: note = engineered ribonucleic acid scaffold (ERS) sequence
  source 1..89: mol_type = other RNA
actgggccttctatcggattactctgaggcccatcaccagcgactatgtcgtagtgggtaaagctccctcttcggagggagcatcagag

SEQ ID NO: 20588 - RNA, 90 nt, synthetic construct
  misc_feature 1..90: note = engineered ribonucleic acid scaffold (ERS) sequence
  source 1..90: mol_type = other RNA
actgggccttctatctgaattactctgaggcccatcaccagcgactatgtcgtagtgggtaaagctccctcttcggagggagcatcagag

SEQ ID NO: 20589 - RNA, 90 nt, synthetic construct
  misc_feature 1..90: note = engineered ribonucleic acid scaffold (ERS) sequence
  source 1..90: mol_type = other RNA
actgggccttctatctgtattactctgaggcccatcaccagcgactatgtcgtagtgggtaaagctccctcttcggagggagcatcagag

SEQ ID NO: 20590 - RNA, 89 nt, synthetic construct
  misc_feature 1..89: note = engineered ribonucleic acid scaffold (ERS) sequence
  source 1..89: mol_type = other RNA
actgggccttctatctggttactctgaggcccatcaccagcgactatgtcgtagtgggtaaagctccctcttcggagggagcatcagag

SEQ ID NO: 20591 - RNA, 89 nt, synthetic construct
  misc_feature 1..89: note = engineered ribonucleic acid scaffold (ERS) sequence
  source 1..89: mol_type = other RNA
actgggccttctatctgtttactctgaggcccatcaccagcgactatgtcgtagtgggtaaagctccctcttcggagggagcatcagag

SEQ ID NO: 20592 - RNA, 90 nt, synthetic construct
  misc_feature 1..90: note = engineered ribonucleic acid scaffold (ERS) sequence
  source 1..90: mol_type = other RNA
actgggccttctatctgatttactctgaggcccatcaccagcgactatgtcgtagtgggtaaagctccctcttcggagggagcatcagag

SEQ ID NO: 20593 - RNA, 89 nt, synthetic construct
  misc_feature 1..89: note = engineered ribonucleic acid scaffold (ERS) sequence
  source 1..89: mol_type = other RNA
actgggccttctatctgattgctctgaggcccatcaccagcgactatgtcgtagtgggtaaagctccctcttcggagggagcatcagag

SEQ ID NO: 20594 - RNA, 91 nt, synthetic construct
  misc_feature 1..91: note = engineered ribonucleic acid scaffold (ERS) sequence
  source 1..91: mol_type = other RNA
actggcccttctatatctgattactctgagagccatcaccagcgactatgtcgtagtgggtaaagctccctcttcggagggagcatcagag

SEQ ID NO: 20595 - RNA, 90 nt, synthetic construct
  misc_feature 1..90: note = engineered ribonucleic acid scaffold (ERS) sequence
  source 1..90: mol_type = other RNA
actggcccttctaatctgattactctgagagccatcaccagcgactatgtcgtagtgggtaaagctccctcttcggagggagcatcagag

SEQ ID NO: 20596 - RNA, 88 nt, synthetic construct
  misc_feature 1..88: note = engineered ribonucleic acid scaffold (ERS) sequence
  source 1..88: mol_type = other RNA
actggcccttctactgattactctgagagccatcaccagcgactatgtcgtagtgggtaaagctccctcttcggagggagcatcagag

SEQ ID NO: 20597 - RNA, 89 nt, synthetic construct
  misc_feature 1..89: note = engineered ribonucleic acid scaffold (ERS) sequence
  source 1..89: mol_type = other RNA
actggcccttctaactgattactctgagagccatcaccagcgactatgtcgtagtgggtaaagctccctcttcggagggagcatcagag

SEQ ID NO: 20598 - RNA, 89 nt, synthetic construct
  misc_feature 1..89: note = engineered ribonucleic acid scaffold (ERS) sequence
  source 1..89: mol_type = other RNA
actggcccttctacctgattactctgagagccatcaccagcgactatgtcgtagtgggtaaagctccctcttcggagggagcatcagag

SEQ ID NO: 20599 - RNA, 89 nt, synthetic construct
  misc_feature 1..89: note = engineered ribonucleic acid scaffold (ERS) sequence
  source 1..89: mol_type = other RNA
actggcccttctagctgattactctgagagccatcaccagcgactatgtcgtagtgggtaaagctccctcttcggagggagcatcagag

SEQ ID NO: 20600 - RNA, 91 nt, synthetic construct
  misc_feature 1..91: note = engineered ribonucleic acid scaffold (ERS) sequence
  source 1..91: mol_type = other RNA
actggcccttctattactgattactctgagagccatcaccagcgactatgtcgtagtgggtaaagctccctcttcggagggagcatcagag

SEQ ID NO: 20601 - RNA, 89 nt, synthetic construct
  misc_feature 1..89: note = engineered ribonucleic acid scaffold (ERS) sequence
  source 1..89: mol_type = other RNA
actggcccttctatatgattactctgagagccatcaccagcgactatgtcgtagtgggtaaagctccctcttcggagggagcatcagag

SEQ ID NO: 20602 - RNA, 89 nt, synthetic construct
  misc_feature 1..89: note = engineered ribonucleic acid scaffold (ERS) sequence
  source 1..89: mol_type = other RNA
actggcccttctatgtgattactctgagagccatcaccagcgactatgtcgtagtgggtaaagctccctcttcggagggagcatcagag

SEQ ID NO: 20603 - RNA, 89 nt, synthetic construct
  misc_feature 1..89: note = engineered ribonucleic acid scaffold (ERS) sequence
  source 1..89: mol_type = other RNA
actggcccttctatttgattactctgagagccatcaccagcgactatgtcgtagtgggtaaagctccctcttcggagggagcatcagag

SEQ ID NO: 20604 - RNA, 90 nt, synthetic construct
  misc_feature 1..90: note = engineered ribonucleic acid scaffold (ERS) sequence
  source 1..90: mol_type = other RNA
actggcccttctatcttgattactctgagagccatcaccagcgactatgtcgtagtgggtaaagctccctcttcggagggagcatcagag

SEQ ID NO: 20605 - RNA, 89 nt, synthetic construct
  misc_feature 1..89: note = engineered ribonucleic acid scaffold (ERS) sequence
  source 1..89: mol_type = other RNA
actggcccttctatcagattactctgagagccatcaccagcgactatgtcgtagtgggtaaagctccctcttcggagggagcatcagag

SEQ ID NO: 20606 - RNA, 89 nt, synthetic construct
  misc_feature 1..89: note = engineered ribonucleic acid scaffold (ERS) sequence
  source 1..89: mol_type = other RNA
actggcccttctatcggattactctgagagccatcaccagcgactatgtcgtagtgggtaaagctccctcttcggagggagcatcagag

SEQ ID NO: 20607 - RNA, 90 nt, synthetic construct
  misc_feature 1..90: note = engineered ribonucleic acid scaffold (ERS) sequence
  source 1..90: mol_type = other RNA
actggcccttctatctgaattactctgagagccatcaccagcgactatgtcgtagtgggtaaagctccctcttcggagggagcatcagag

SEQ ID NO: 20608 - RNA, 90 nt, synthetic construct
  misc_feature 1..90: note = engineered ribonucleic acid scaffold (ERS) sequence
  source 1..90: mol_type = other RNA
actggcccttctatctgtattactctgagagccatcaccagcgactatgtcgtagtgggtaaagctccctcttcggagggagcatcagag

SEQ ID NO: 20609 - RNA, 89 nt, synthetic construct
  misc_feature 1..89: note = engineered ribonucleic acid scaffold (ERS) sequence
  source 1..89: mol_type = other RNA
actggcccttctatctggttactctgagagccatcaccagcgactatgtcgtagtgggtaaagctccctcttcggagggagcatcagag

SEQ ID NO: 20610 - RNA, 89 nt, synthetic construct
  misc_feature 1..89: note = engineered ribonucleic acid scaffold (ERS) sequence
  source 1..89: mol_type = other RNA
actggcccttctatctgtttactctgagagccatcaccagcgactatgtcgtagtgggtaaagctccctcttcggagggagcatcagag

SEQ ID NO: 20611 - RNA, 90 nt, synthetic construct
  misc_feature 1..90: note = engineered ribonucleic acid scaffold (ERS) sequence
  source 1..90: mol_type = other RNA
actggcccttctatctgatttactctgagagccatcaccagcgactatgtcgtagtgggtaaagctccctcttcggagggagcatcagag

SEQ ID NO: 20612 - RNA, 89 nt, synthetic construct
  misc_feature 1..89: note = engineered ribonucleic acid scaffold (ERS) sequence
  source 1..89: mol_type = other RNA
actggcccttctatctgattgctctgagagccatcaccagcgactatgtcgtagtgggtaaagctccctcttcggagggagcatcagag

SEQ ID NO: 20613 - RNA, 92 nt, synthetic construct
  misc_feature 1..92: note = engineered ribonucleic acid scaffold (ERS) sequence
  source 1..92: mol_type = other RNA
actggcccttctatatctgattactctgaggagccatcaccagcgactatgtcgtagtgggtaaagctccctcttcggagggagcatcagag

SEQ ID NO: 20614 - RNA, 91 nt, synthetic construct
  misc_feature 1..91: note = engineered ribonucleic acid scaffold (ERS) sequence
  source 1..91: mol_type = other RNA
actggcccttctaatctgattactctgaggagccatcaccagcgactatgtcgtagtgggtaaagctccctcttcggagggagcatcagag

SEQ ID NO: 20615 - RNA, 89 nt, synthetic construct
  misc_feature 1..89: note = engineered ribonucleic acid scaffold (ERS) sequence
  source 1..89: mol_type = other RNA
actggcccttctactgattactctgaggagccatcaccagcgactatgtcgtagtgggtaaagctccctcttcggagggagcatcagag

SEQ ID NO: 20616 - RNA, 90 nt, synthetic construct
  misc_feature 1..90: note = engineered ribonucleic acid scaffold (ERS) sequence
  source 1..90: mol_type = other RNA
actggcccttctaactgattactctgaggagccatcaccagcgactatgtcgtagtgggtaaagctccctcttcggagggagcatcagag

SEQ ID NO: 20617 - RNA, 90 nt, synthetic construct
  misc_feature 1..90: note = engineered ribonucleic acid scaffold (ERS) sequence
  source 1..90: mol_type = other RNA
actggcccttctacctgattactctgaggagccatcaccagcgactatgtcgtagtgggtaaagctccctcttcggagggagcatcagag

SEQ ID NO: 20618 - RNA, 90 nt, synthetic construct
  misc_feature 1..90: note = engineered ribonucleic acid scaffold (ERS) sequence
  source 1..90: mol_type = other RNA
actggcccttctagctgattactctgaggagccatcaccagcgactatgtcgtagtgggtaaagctccctcttcggagggagcatcagag

SEQ ID NO: 20619 - RNA, 92 nt, synthetic construct
  misc_feature 1..92: note = engineered ribonucleic acid scaffold (ERS) sequence
  source 1..92: mol_type = other RNA
actggcccttctattactgattactctgaggagccatcaccagcgactatgtcgtagtgggtaaagctccctcttcggagggagcatcagag

SEQ ID NO: 20620 - RNA, 90 nt, synthetic construct
  misc_feature 1..90: note = engineered ribonucleic acid scaffold (ERS) sequence
  source 1..90: mol_type = other RNA
actggcccttctatatgattactctgaggagccatcaccagcgactatgtcgtagtgggtaaagctccctcttcggagggagcatcagag

SEQ ID NO: 20621 - RNA, 90 nt, synthetic construct
  misc_feature 1..90: note = engineered ribonucleic acid scaffold (ERS) sequence
  source 1..90: mol_type = other RNA
actggcccttctatgtgattactctgaggagccatcaccagcgactatgtcgtagtgggtaaagctccctcttcggagggagcatcagag

SEQ ID NO: 20622 - RNA, 90 nt, synthetic construct
  misc_feature 1..90: note = engineered ribonucleic acid scaffold (ERS) sequence
  source 1..90: mol_type = other RNA
actggcccttctatttgattactctgaggagccatcaccagcgactatgtcgtagtgggtaaagctccctcttcggagggagcatcagag

SEQ ID NO: 20623 - RNA, 91 nt, synthetic construct
  misc_feature 1..91: note = engineered ribonucleic acid scaffold (ERS) sequence
  source 1..91: mol_type = other RNA
actggcccttctatcttgattactctgaggagccatcaccagcgactatgtcgtagtgggtaaagctccctcttcggagggagcatcagag

SEQ ID NO: 20624 - RNA, 90 nt, synthetic construct
  misc_feature 1..90: note = engineered ribonucleic acid scaffold (ERS) sequence
  source 1..90: mol_type = other RNA
actggcccttctatcagattactctgaggagccatcaccagcgactatgtcgtagtgggtaaagctccctcttcggagggagcatcagag

SEQ ID NO: 20625 - RNA, 90 nt, synthetic construct
  misc_feature 1..90: note = engineered ribonucleic acid scaffold (ERS) sequence
  source 1..90: mol_type = other RNA
actggcccttctatcggattactctgaggagccatcaccagcgactatgtcgtagtgggtaaagctccctcttcggagggagcatcagag

SEQ ID NO: 20626 - RNA, 91 nt, synthetic construct
  misc_feature 1..91: note = engineered ribonucleic acid scaffold (ERS) sequence
  source 1..91: mol_type = other RNA
actggcccttctatctgaattactctgaggagccatcaccagcgactatgtcgtagtgggtaaagctccctcttcggagggagcatcagag

SEQ ID NO: 20627 - RNA, 91 nt, synthetic construct
  misc_feature 1..91: note = engineered ribonucleic acid scaffold (ERS) sequence
  source 1..91: mol_type = other RNA
actggcccttctatctgtattactctgaggagccatcaccagcgactatgtcgtagtgggtaaagctccctcttcggagggagcatcagag

SEQ ID NO: 20628 - RNA, 90 nt, synthetic construct
  misc_feature 1..90: note = engineered ribonucleic acid scaffold (ERS) sequence
  source 1..90: mol_type = other RNA
actggcccttctatctggttactctgaggagccatcaccagcgactatgtcgtagtgggtaaagctccctcttcggagggagcatcagag

SEQ ID NO: 20629 - RNA, 90 nt, synthetic construct
  misc_feature 1..90: note = engineered ribonucleic acid scaffold (ERS) sequence
  source 1..90: mol_type = other RNA
actggcccttctatctgtttactctgaggagccatcaccagcgactatgtcgtagtgggtaaagctccctcttcggagggagcatcagag

SEQ ID NO: 20630 - RNA, 91 nt, synthetic construct
  misc_feature 1..91: note = engineered ribonucleic acid scaffold (ERS) sequence
  source 1..91: mol_type = other RNA
actggcccttctatctgatttactctgaggagccatcaccagcgactatgtcgtagtgggtaaagctccctcttcggagggagcatcagag

SEQ ID NO: 20631 - RNA, 90 nt, synthetic construct
  misc_feature 1..90: note = engineered ribonucleic acid scaffold (ERS) sequence
  source 1..90: mol_type = other RNA
actggcccttctatctgattgctctgaggagccatcaccagcgactatgtcgtagtgggtaaagctccctcttcggagggagcatcagag

SEQ ID NO: 20632 - RNA, 91 nt, synthetic construct
  misc_feature 1..91: note = engineered ribonucleic acid scaffold (ERS) sequence
  source 1..91: mol_type = other RNA
actggcccttctatatctgattactctgagggccatcaccagcgactatgtcgtagtgggtaaagctccctcttcggagggagcatcagag

SEQ ID NO: 20633 - RNA, 90 nt, synthetic construct
  misc_feature 1..90: note = engineered ribonucleic acid scaffold (ERS) sequence
  source 1..90: mol_type = other RNA
actggcccttctaatctgattactctgagggccatcaccagcgactatgtcgtagtgggtaaagctccctcttcggagggagcatcagag

SEQ ID NO: 20634 - RNA, 88 nt, synthetic construct
  misc_feature 1..88: note = engineered ribonucleic acid scaffold (ERS) sequence
  source 1..88: mol_type = other RNA
actggcccttctactgattactctgagggccatcaccagcgactatgtcgtagtgggtaaagctccctcttcggagggagcatcagag

SEQ ID NO: 20635 - RNA, 89 nt, synthetic construct
  misc_feature 1..89: note = engineered ribonucleic acid scaffold (ERS) sequence
  source 1..89: mol_type = other RNA
actggcccttctaactgattactctgagggccatcaccagcgactatgtcgtagtgggtaaagctccctcttcggagggagcatcagag

SEQ ID NO: 20636 - RNA, 89 nt, synthetic construct
  misc_feature 1..89: note = engineered ribonucleic acid scaffold (ERS) sequence
  source 1..89: mol_type = other RNA
actggcccttctacctgattactctgagggccatcaccagcgactatgtcgtagtgggtaaagctccctcttcggagggagcatcagag

SEQ ID NO: 20637 - RNA, 89 nt, synthetic construct
  misc_feature 1..89: note = engineered ribonucleic acid scaffold (ERS) sequence
  source 1..89: mol_type = other RNA
actggcccttctagctgattactctgagggccatcaccagcgactatgtcgtagtgggtaaagctccctcttcggagggagcatcagag

SEQ ID NO: 20638 - RNA, 91 nt, synthetic construct
  misc_feature 1..91: note = engineered ribonucleic acid scaffold (ERS) sequence
  source 1..91: mol_type = other RNA
actggcccttctattactgattactctgagggccatcaccagcgactatgtcgtagtgggtaaagctccctcttcggagggagcatcagag

SEQ ID NO: 20639 - RNA, 89 nt, synthetic construct
  misc_feature 1..89: note = engineered ribonucleic acid scaffold (ERS) sequence
  source 1..89: mol_type = other RNA
actggcccttctatatgattactctgagggccatcaccagcgactatgtcgtagtgggtaaagctccctcttcggagggagcatcagag

SEQ ID NO: 20640 - RNA, 89 nt, synthetic construct
  misc_feature 1..89: note = engineered ribonucleic acid scaffold (ERS) sequence
  source 1..89: mol_type = other RNA
actggcccttctatgtgattactctgagggccatcaccagcgactatgtcgtagtgggtaaagctccctcttcggagggagcatcagag

SEQ ID NO: 20641 - RNA, 89 nt, synthetic construct
  misc_feature 1..89: note = engineered ribonucleic acid scaffold (ERS) sequence
  source 1..89: mol_type = other RNA
actggcccttctatttgattactctgagggccatcaccagcgactatgtcgtagtgggtaaagctccctcttcggagggagcatcagag

SEQ ID NO: 20642 - RNA, 90 nt, synthetic construct
  misc_feature 1..90: note = engineered ribonucleic acid scaffold (ERS) sequence
  source 1..90: mol_type = other RNA
actggcccttctatcttgattactctgagggccatcaccagcgactatgtcgtagtgggtaaagctccctcttcggagggagcatcagag

SEQ ID NO: 20643 - RNA, 89 nt, synthetic construct
  misc_feature 1..89: note = engineered ribonucleic acid scaffold (ERS) sequence
  source 1..89: mol_type = other RNA
actggcccttctatcagattactctgagggccatcaccagcgactatgtcgtagtgggtaaagctccctcttcggagggagcatcagag

SEQ ID NO: 20644 - RNA, 89 nt, synthetic construct
  misc_feature 1..89: note = engineered ribonucleic acid scaffold (ERS) sequence
  source 1..89: mol_type = other RNA
actggcccttctatcggattactctgagggccatcaccagcgactatgtcgtagtgggtaaagctccctcttcggagggagcatcagag

SEQ ID NO: 20645 - RNA, 90 nt, synthetic construct
  misc_feature 1..90: note = engineered ribonucleic acid scaffold (ERS) sequence
  source 1..90: mol_type = other RNA
actggcccttctatctgaattactctgagggccatcaccagcgactatgtcgtagtgggtaaagctccctcttcggagggagcatcagag

SEQ ID NO: 20646 - RNA, 90 nt, synthetic construct
  misc_feature 1..90: note = engineered ribonucleic acid scaffold (ERS) sequence
  source 1..90: mol_type = other RNA
actggcccttctatctgtattactctgagggccatcaccagcgactatgtcgtagtgggtaaagctccctcttcggagggagcatcagag

SEQ ID NO: 20647 - RNA, 89 nt, synthetic construct
  misc_feature 1..89: note = engineered ribonucleic acid scaffold (ERS) sequence
  source 1..89: mol_type = other RNA
actggcccttctatctggttactctgagggccatcaccagcgactatgtcgtagtgggtaaagctccctcttcggagggagcatcagag

SEQ ID NO: 20648 - RNA, 89 nt, synthetic construct
  misc_feature 1..89: note = engineered ribonucleic acid scaffold (ERS) sequence
  source 1..89: mol_type = other RNA
actggcccttctatctgtttactctgagggccatcaccagcgactatgtcgtagtgggtaaagctccctcttcggagggagcatcagag

SEQ ID NO: 20649 - RNA, 90 nt, synthetic construct
  misc_feature 1..90: note = engineered ribonucleic acid scaffold (ERS) sequence
  source 1..90: mol_type = other RNA
actggcccttctatctgatttactctgagggccatcaccagcgactatgtcgtagtgggtaaagctccctcttcggagggagcatcagag

SEQ ID NO: 20650 - RNA, 89 nt, synthetic construct
  misc_feature 1..89: note = engineered ribonucleic acid scaffold (ERS) sequence
  source 1..89: mol_type = other RNA
actggcccttctatctgattgctctgagggccatcaccagcgactatgtcgtagtgggtaaagctccctcttcggagggagcatcagag

SEQ ID NO: 20651 - RNA, 91 nt, synthetic construct
  misc_feature 1..91: note = engineered ribonucleic acid scaffold (ERS) sequence
  source 1..91: mol_type = other RNA
actggcccttctatatctgattactctgagtgccatcaccagcgactatgtcgtagtgggtaaagctccctcttcggagggagcatcagag

SEQ ID NO: 20652 - RNA, 90 nt, synthetic construct
  misc_feature 1..90: note = engineered ribonucleic acid scaffold (ERS) sequence
  source 1..90: mol_type = other RNA
actggcccttctaatctgattactctgagtgccatcaccagcgactatgtcgtagtgggtaaagctccctcttcggagggagcatcagag

SEQ ID NO: 20653 - RNA, 88 nt, synthetic construct
  misc_feature 1..88: note = engineered ribonucleic acid scaffold (ERS) sequence
  source 1..88: mol_type = other RNA
actggcccttctactgattactctgagtgccatcaccagcgactatgtcgtagtgggtaaagctccctcttcggagggagcatcagag

SEQ ID NO: 20654 - RNA, 89 nt, synthetic construct
  misc_feature 1..89: note = engineered ribonucleic acid scaffold (ERS) sequence
  source 1..89: mol_type = other RNA
actggcccttctaactgattactctgagtgccatcaccagcgactatgtcgtagtgggtaaagctccctcttcggagggagcatcagag

SEQ ID NO: 20655 - RNA, 89 nt, synthetic construct
  misc_feature 1..89: note = engineered ribonucleic acid scaffold (ERS) sequence
  source 1..89: mol_type = other RNA
actggcccttctacctgattactctgagtgccatcaccagcgactatgtcgtagtgggtaaagctccctcttcggagggagcatcagag

SEQ ID NO: 20656 - RNA, 89 nt, synthetic construct
  misc_feature 1..89: note = engineered ribonucleic acid scaffold (ERS) sequence
  source 1..89: mol_type = other RNA
actggcccttctagctgattactctgagtgccatcaccagcgactatgtcgtagtgggtaaagctccctcttcggagggagcatcagag

SEQ ID NO: 20657 - RNA, 91 nt, synthetic construct
  misc_feature 1..91: note = engineered ribonucleic acid scaffold (ERS) sequence
  source 1..91: mol_type = other RNA
actggcccttctattactgattactctgagtgccatcaccagcgactatgtcgtagtgggtaaagctccctcttcggagggagcatcagag

SEQ ID NO: 20658 - RNA, 89 nt, synthetic construct
  misc_feature 1..89: note = engineered ribonucleic acid scaffold (ERS) sequence
  source 1..89: mol_type = other RNA
actggcccttctatatgattactctgagtgccatcaccagcgactatgtcgtagtgggtaaagctccctcttcggagggagcatcagag

SEQ ID NO: 20659 - RNA, 89 nt, synthetic construct
  misc_feature 1..89: note = engineered ribonucleic acid scaffold (ERS) sequence
  source 1..89: mol_type = other RNA
actggcccttctatgtgattactctgagtgccatcaccagcgactatgtcgtagtgggtaaagctccctcttcggagggagcatcagag

SEQ ID NO: 20660 - RNA, 89 nt, synthetic construct
  misc_feature 1..89: note = engineered ribonucleic acid scaffold (ERS) sequence
  source 1..89: mol_type = other RNA
actggcccttctatttgattactctgagtgccatcaccagcgactatgtcgtagtgggtaaagctccctcttcggagggagcatcagag

SEQ ID NO: 20661 - RNA, 90 nt, synthetic construct
  misc_feature 1..90: note = engineered ribonucleic acid scaffold (ERS) sequence
  source 1..90: mol_type = other RNA
actggcccttctatcttgattactctgagtgccatcaccagcgactatgtcgtagtgggtaaagctccctcttcggagggagcatcagag

SEQ ID NO: 20662 - RNA, 89 nt, synthetic construct
  misc_feature 1..89: note = engineered ribonucleic acid scaffold (ERS) sequence
  source 1..89: mol_type = other RNA
actggcccttctatcagattactctgagtgccatcaccagcgactatgtcgtagtgggtaaagctccctcttcggagggagcatcagag

SEQ ID NO: 20663 - RNA, 89 nt, synthetic construct
  misc_feature 1..89: note = engineered ribonucleic acid scaffold (ERS) sequence
  source 1..89: mol_type = other RNA
actggcccttctatcggattactctgagtgccatcaccagcgactatgtcgtagtgggtaaagctccctcttcggagggagcatcagag

SEQ ID NO: 20664 - RNA, 90 nt, synthetic construct
  misc_feature 1..90: note = engineered ribonucleic acid scaffold (ERS) sequence
  source 1..90: mol_type = other RNA
actggcccttctatctgaattactctgagtgccatcaccagcgactatgtcgtagtgggtaaagctccctcttcggagggagcatcagag

SEQ ID NO: 20665 - RNA, 90 nt, synthetic construct
  misc_feature 1..90: note = engineered ribonucleic acid scaffold (ERS) sequence
  source 1..90: mol_type = other RNA
actggcccttctatctgtattactctgagtgccatcaccagcgactatgtcgtagtgggtaaagctccctcttcggagggagcatcagag

SEQ ID NO: 20666 - RNA, 89 nt, synthetic construct
  misc_feature 1..89: note = engineered ribonucleic acid scaffold (ERS) sequence
  source 1..89: mol_type = other RNA
actggcccttctatctggttactctgagtgccatcaccagcgactatgtcgtagtgggtaaagctccctcttcggagggagcatcagag

SEQ ID NO: 20667 - RNA, 89 nt, synthetic construct
  misc_feature 1..89: note = engineered ribonucleic acid scaffold (ERS) sequence
  source 1..89: mol_type = other RNA
actggcccttctatctgtttactctgagtgccatcaccagcgactatgtcgtagtgggtaaagctccctcttcggagggagcatcagag

SEQ ID NO: 20668 - RNA, 90 nt, synthetic construct
  misc_feature 1..90: note = engineered ribonucleic acid scaffold (ERS) sequence
  source 1..90: mol_type = other RNA
actggcccttctatctgatttactctgagtgccatcaccagcgactatgtcgtagtgggtaaagctccctcttcggagggagcatcagag

SEQ ID NO: 20669 - RNA, 89 nt, synthetic construct
  misc_feature 1..89: note = engineered ribonucleic acid scaffold (ERS) sequence
  source 1..89: mol_type = other RNA
actggcccttctatctgattgctctgagtgccatcaccagcgactatgtcgtagtgggtaaagctccctcttcggagggagcatcagag

SEQ ID NO: 20670 - RNA, 91 nt, synthetic construct
  misc_feature 1..91: note = engineered ribonucleic acid scaffold (ERS) sequence
  source 1..91: mol_type = other RNA
actggcgcttctatatctgattactctgagagccatcaccagcgactatgtcgtagtgggtaaagctccctcttcggagggagcatcagag

SEQ ID NO: 20671 - RNA, 90 nt, synthetic construct
  misc_feature 1..90: note = engineered ribonucleic acid scaffold (ERS) sequence
  source 1..90: mol_type = other RNA
actggcgcttctaatctgattactctgagagccatcaccagcgactatgtcgtagtgggtaaagctccctcttcggagggagcatcagag

SEQ ID NO: 20672 - RNA, 88 nt, synthetic construct
  misc_feature 1..88: note = engineered ribonucleic acid scaffold (ERS) sequence
  source 1..88: mol_type = other RNA
actggcgcttctactgattactctgagagccatcaccagcgactatgtcgtagtgggtaaagctccctcttcggagggagcatcagag

SEQ ID NO: 20673 - RNA, 89 nt, synthetic construct
  misc_feature 1..89: note = engineered ribonucleic acid scaffold (ERS) sequence
  source 1..89: mol_type = other RNA
actggcgcttctaactgattactctgagagccatcaccagcgactatgtcgtagtgggtaaagctccctcttcggagggagcatcagag

SEQ ID NO: 20674 - RNA, 89 nt, synthetic construct
  misc_feature 1..89: note = engineered ribonucleic acid scaffold (ERS) sequence
  source 1..89: mol_type = other RNA
actggcgcttctacctgattactctgagagccatcaccagcgactatgtcgtagtgggtaaagctccctcttcggagggagcatcagag

SEQ ID NO: 20675 - RNA, 89 nt, synthetic construct
  misc_feature 1..89: note = engineered ribonucleic acid scaffold (ERS) sequence
  source 1..89: mol_type = other RNA
actggcgcttctagctgattactctgagagccatcaccagcgactatgtcgtagtgggtaaagctccctcttcggagggagcatcagag

SEQ ID NO: 20676 - RNA, 91 nt, synthetic construct
  misc_feature 1..91: note = engineered ribonucleic acid scaffold (ERS) sequence
  source 1..91: mol_type = other RNA
actggcgcttctattactgattactctgagagccatcaccagcgactatgtcgtagtgggtaaagctccctcttcggagggagcatcagag

SEQ ID NO: 20677 - RNA, 89 nt, synthetic construct
  misc_feature 1..89: note = engineered ribonucleic acid scaffold (ERS) sequence
  source 1..89: mol_type = other RNA
actggcgcttctatatgattactctgagagccatcaccagcgactatgtcgtagtgggtaaagctccctcttcggagggagcatcagag

SEQ ID NO: 20678 - RNA, 89 nt, synthetic construct
  misc_feature 1..89: note = engineered ribonucleic acid scaffold (ERS) sequence
  source 1..89: mol_type = other RNA
actggcgcttctatgtgattactctgagagccatcaccagcgactatgtcgtagtgggtaaagctccctcttcggagggagcatcagag

SEQ ID NO: 20679 - RNA, 89 nt, synthetic construct
  misc_feature 1..89: note = engineered ribonucleic acid scaffold (ERS) sequence
  source 1..89: mol_type = other RNA
actggcgcttctatttgattactctgagagccatcaccagcgactatgtcgtagtgggtaaagctccctcttcggagggagcatcagag

SEQ ID NO: 20680 - RNA, 90 nt, synthetic construct
  misc_feature 1..90: note = engineered ribonucleic acid scaffold (ERS) sequence
  source 1..90: mol_type = other RNA
actggcgcttctatcttgattactctgagagccatcaccagcgactatgtcgtagtgggtaaagctccctcttcggagggagcatcagag

SEQ ID NO: 20681 - RNA, 89 nt, synthetic construct
  misc_feature 1..89: note = engineered ribonucleic acid scaffold (ERS) sequence
  source 1..89: mol_type = other RNA
actggcgcttctatcagattactctgagagccatcaccagcgactatgtcgtagtgggtaaagctccctcttcggagggagcatcagag

SEQ ID NO: 20682 - RNA, 89 nt, synthetic construct
  misc_feature 1..89: note = engineered ribonucleic acid scaffold (ERS) sequence
  source 1..89: mol_type = other RNA
actggcgcttctatcggattactctgagagccatcaccagcgactatgtcgtagtgggtaaagctccctcttcggagggagcatcagag

SEQ ID NO: 20683 - RNA, 90 nt, synthetic construct
  misc_feature 1..90: note = engineered ribonucleic acid scaffold (ERS) sequence
  source 1..90: mol_type = other RNA
actggcgcttctatctgaattactctgagagccatcaccagcgactatgtcgtagtgggtaaagctccctcttcggagggagcatcagag

SEQ ID NO: 20684 - RNA, 90 nt, synthetic construct
  misc_feature 1..90: note = engineered ribonucleic acid scaffold (ERS) sequence
  source 1..90: mol_type = other RNA
actggcgcttctatctgtattactctgagagccatcaccagcgactatgtcgtagtgggtaaagctccctcttcggagggagcatcagag

SEQ ID NO: 20685 - RNA, 89 nt, synthetic construct
  misc_feature 1..89: note = engineered ribonucleic acid scaffold (ERS) sequence
  source 1..89: mol_type = other RNA
actggcgcttctatctggttactctgagagccatcaccagcgactatgtcgtagtgggtaaagctccctcttcggagggagcatcagag

SEQ ID NO: 20686 - RNA, 89 nt, synthetic construct
  misc_feature 1..89: note = engineered ribonucleic acid scaffold (ERS) sequence
  source 1..89: mol_type = other RNA
actggcgcttctatctgtttactctgagagccatcaccagcgactatgtcgtagtgggtaaagctccctcttcggagggagcatcagag

SEQ ID NO: 20687 - RNA, 90 nt, synthetic construct
  misc_feature 1..90: note = engineered ribonucleic acid scaffold (ERS) sequence
  source 1..90: mol_type = other RNA
actggcgcttctatctgatttactctgagagccatcaccagcgactatgtcgtagtgggtaaagctccctcttcggagggagcatcagag

SEQ ID NO: 20688 - RNA, 89 nt, synthetic construct
  misc_feature 1..89: note = engineered ribonucleic acid scaffold (ERS) sequence
  source 1..89: mol_type = other RNA
actggcgcttctatctgattgctctgagagccatcaccagcgactatgtcgtagtgggtaaagctccctcttcggagggagcatcagag

SEQ ID NO: 20689 - RNA, 92 nt, synthetic construct
  misc_feature 1..92: note = engineered ribonucleic acid scaffold (ERS) sequence
  source 1..92: mol_type = other RNA
actggcgcttctatatctgattactctgagcagccatcaccagcgactatgtcgtagtgggtaaagctccctcttcggagggagcatcagag

SEQ ID NO: 20690 - RNA, 91 nt, synthetic construct
  misc_feature 1..91: note = engineered ribonucleic acid scaffold (ERS) sequence
  source 1..91: mol_type = other RNA
actggcgcttctaatctgattactctgagcagccatcaccagcgactatgtcgtagtgggtaaagctccctcttcggagggagcatcagag

SEQ ID NO: 20691 - RNA, 89 nt, synthetic construct
  misc_feature 1..89: note = engineered ribonucleic acid scaffold (ERS) sequence
  source 1..89: mol_type = other RNA
actggcgcttctactgattactctgagcagccatcaccagcgactatgtcgtagtgggtaaagctccctcttcggagggagcatcagag

SEQ ID NO: 20692 - RNA, 90 nt, synthetic construct
  misc_feature 1..90: note = engineered ribonucleic acid scaffold (ERS) sequence
  source 1..90: mol_type = other RNA
actggcgcttctaactgattactctgagcagccatcaccagcgactatgtcgtagtgggtaaagctccctcttcggagggagcatcagag

SEQ ID NO: 20693 - RNA, 90 nt, synthetic construct
  misc_feature 1..90: note = engineered ribonucleic acid scaffold (ERS) sequence
  source 1..90: mol_type = other RNA
actggcgcttctacctgattactctgagcagccatcaccagcgactatgtcgtagtgggtaaagctccctcttcggagggagcatcagag

SEQ ID NO: 20694 - RNA, 90 nt, synthetic construct
  misc_feature 1..90: note = engineered ribonucleic acid scaffold (ERS) sequence
  source 1..90: mol_type = other RNA
actggcgcttctagctgattactctgagcagccatcaccagcgactatgtcgtagtgggtaaagctccctcttcggagggagcatcagag

SEQ ID NO: 20695 - RNA, 92 nt, synthetic construct
  misc_feature 1..92: note = engineered ribonucleic acid scaffold (ERS) sequence
  source 1..92: mol_type = other RNA
actggcgcttctattactgattactctgagcagccatcaccagcgactatgtcgtagtgggtaaagctccctcttcggagggagcatcagag

SEQ ID NO: 20696 - RNA, 90 nt, synthetic construct
  misc_feature 1..90: note = engineered ribonucleic acid scaffold (ERS) sequence
  source 1..90: mol_type = other RNA
actggcgcttctatatgattactctgagcagccatcaccagcgactatgtcgtagtgggtaaagctccctcttcggagggagcatcagag

SEQ ID NO: 20697 - RNA, 90 nt, synthetic construct
  misc_feature 1..90: note = engineered ribonucleic acid scaffold (ERS) sequence
  source 1..90: mol_type = other RNA
actggcgcttctatgtgattactctgagcagccatcaccagcgactatgtcgtagtgggtaaagctccctcttcggagggagcatcagag

SEQ ID NO: 20698 - RNA, 90 nt, synthetic construct
  misc_feature 1..90: note = engineered ribonucleic acid scaffold (ERS) sequence
  source 1..90: mol_type = other RNA
actggcgcttctatttgattactctgagcagccatcaccagcgactatgtcgtagtgggtaaagctccctcttcggagggagcatcagag

SEQ ID NO: 20699 - RNA, 91 nt, synthetic construct
  misc_feature 1..91: note = engineered ribonucleic acid scaffold (ERS) sequence
  source 1..91: mol_type = other RNA
actggcgcttctatcttgattactctgagcagccatcaccagcgactatgtcgtagtgggtaaagctccctcttcggagggagcatcagag

SEQ ID NO: 20700 - RNA, 90 nt, synthetic construct
  misc_feature 1..90: note = engineered ribonucleic acid scaffold (ERS) sequence
  source 1..90: mol_type = other RNA
actggcgcttctatcagattactctgagcagccatcaccagcgactatgtcgtagtgggtaaagctccctcttcggagggagcatcagag

SEQ ID NO: 20701 - RNA, 90 nt, synthetic construct
  misc_feature 1..90: note = engineered ribonucleic acid scaffold (ERS) sequence
  source 1..90: mol_type = other RNA
actggcgcttctatcggattactctgagcagccatcaccagcgactatgtcgtagtgggtaaagctccctcttcggagggagcatcagag

SEQ ID NO: 20702 - RNA, 91 nt, synthetic construct
  misc_feature 1..91: note = engineered ribonucleic acid scaffold (ERS) sequence
  source 1..91: mol_type = other RNA
actggcgcttctatctgaattactctgagcagccatcaccagcgactatgtcgtagtgggtaaagctccctcttcggagggagcatcagag

SEQ ID NO: 20703 - RNA, 91 nt, synthetic construct
  misc_feature 1..91: note = engineered ribonucleic acid scaffold (ERS) sequence
  source 1..91: mol_type = other RNA
actggcgcttctatctgtattactctgagcagccatcaccagcgactatgtcgtagtgggtaaagctccctcttcggagggagcatcagag

SEQ ID NO: 20704 - RNA, 90 nt, synthetic construct
  misc_feature 1..90: note = engineered ribonucleic acid scaffold (ERS) sequence
  source 1..90: mol_type = other RNA
actggcgcttctatctggttactctgagcagccatcaccagcgactatgtcgtagtgggtaaagctccctcttcggagggagcatcagag

SEQ ID NO: 20705 - RNA, 90 nt, synthetic construct
  misc_feature 1..90: note = engineered ribonucleic acid scaffold (ERS) sequence
  source 1..90: mol_type = other RNA
actggcgcttctatctgtttactctgagcagccatcaccagcgactatgtcgtagtgggtaaagctccctcttcggagggagcatcagag

SEQ ID NO: 20706 - RNA, 91 nt, synthetic construct
  misc_feature 1..91: note = engineered ribonucleic acid scaffold (ERS) sequence
  source 1..91: mol_type = other RNA
actggcgcttctatctgatttactctgagcagccatcaccagcgactatgtcgtagtgggtaaagctccctcttcggagggagcatcagag

SEQ ID NO: 20707 - RNA, 90 nt, synthetic construct
  misc_feature 1..90: note = engineered ribonucleic acid scaffold (ERS) sequence
  source 1..90: mol_type = other RNA
actggcgcttctatctgattgctctgagcagccatcaccagcgactatgtcgtagtgggtaaagctccctcttcggagggagcatcagag

SEQ ID NO: 20708 - RNA, 91 nt, synthetic construct
  misc_feature 1..91: note = engineered ribonucleic acid scaffold (ERS) sequence
  source 1..91: mol_type = other RNA
actggcgcttctatatctgattactctgagtgccatcaccagcgactatgtcgtagtgggtaaagctccctcttcggagggagcatcagag

SEQ ID NO: 20709 - RNA, 90 nt, synthetic construct
  misc_feature 1..90: note = engineered ribonucleic acid scaffold (ERS) sequence
  source 1..90: mol_type = other RNA
actggcgcttctaatctgattactctgagtgccatcaccagcgactatgtcgtagtgggtaaagctccctcttcggagggagcatcagag

SEQ ID NO: 20710 - RNA, 88 nt, synthetic construct
  misc_feature 1..88: note = engineered ribonucleic acid scaffold (ERS) sequence
  source 1..88: mol_type = other RNA
actggcgcttctactgattactctgagtgccatcaccagcgactatgtcgtagtgggtaaagctccctcttcggagggagcatcagag

SEQ ID NO: 20711 - RNA, 89 nt, synthetic construct
  misc_feature 1..89: note = engineered ribonucleic acid scaffold (ERS) sequence
  source 1..89: mol_type = other RNA
actggcgcttctaactgattactctgagtgccatcaccagcgactatgtcgtagtgggtaaagctccctcttcggagggagcatcagag

SEQ ID NO: 20712 - RNA, 89 nt, synthetic construct
  misc_feature 1..89: note = engineered ribonucleic acid scaffold (ERS) sequence
  source 1..89: mol_type = other RNA
actggcgcttctacctgattactctgagtgccatcaccagcgactatgtcgtagtgggtaaagctccctcttcggagggagcatcagag

SEQ ID NO: 20713 - RNA, 89 nt, synthetic construct
  misc_feature 1..89: note = engineered ribonucleic acid scaffold (ERS) sequence
  source 1..89: mol_type = other RNA
actggcgcttctagctgattactctgagtgccatcaccagcgactatgtcgtagtgggtaaagctccctcttcggagggagcatcagag

SEQ ID NO: 20714 - RNA, 91 nt, synthetic construct
  misc_feature 1..91: note = engineered ribonucleic acid scaffold (ERS) sequence
  source 1..91: mol_type = other RNA
actggcgcttctattactgattactctgagtgccatcaccagcgactatgtcgtagtgggtaaagctccctcttcggagggagcatcagag

SEQ ID NO: 20715 - RNA, 89 nt, synthetic construct
  misc_feature 1..89: note = engineered ribonucleic acid scaffold (ERS) sequence
  source 1..89: mol_type = other RNA
actggcgcttctatatgattactctgagtgccatcaccagcgactatgtcgtagtgggtaaagctccctcttcggagggagcatcagag

SEQ ID NO: 20716 - RNA, 89 nt, synthetic construct
  misc_feature 1..89: note = engineered ribonucleic acid scaffold (ERS) sequence
  source 1..89: mol_type = other RNA
actggcgcttctatgtgattactctgagtgccatcaccagcgactatgtcgtagtgggtaaagctccctcttcggagggagcatcagag

SEQ ID NO: 20717 - RNA, 89 nt, synthetic construct
  misc_feature 1..89: note = engineered ribonucleic acid scaffold (ERS) sequence
  source 1..89: mol_type = other RNA
actggcgcttctatttgattactctgagtgccatcaccagcgactatgtcgtagtgggtaaagctccctcttcggagggagcatcagag

SEQ ID NO: 20718 - RNA, 90 nt, synthetic construct
  misc_feature 1..90: note = engineered ribonucleic acid scaffold (ERS) sequence
  source 1..90: mol_type = other RNA
actggcgcttctatcttgattactctgagtgccatcaccagcgactatgtcgtagtgggtaaagctccctcttcggagggagcatcagag

SEQ ID NO: 20719 - RNA, 89 nt, synthetic construct
  misc_feature 1..89: note = engineered ribonucleic acid scaffold (ERS) sequence
  source 1..89: mol_type = other RNA
actggcgcttctatcagattactctgagtgccatcaccagcgactatgtcgtagtgggtaaagctccctcttcggagggagcatcagag

SEQ ID NO: 20720 - RNA, 89 nt, synthetic construct
  misc_feature 1..89: note = engineered ribonucleic acid scaffold (ERS) sequence
  source 1..89: mol_type = other RNA
actggcgcttctatcggattactctgagtgccatcaccagcgactatgtcgtagtgggtaaagctccctcttcggagggagcatcagag

SEQ ID NO: 20721 - RNA, 90 nt, synthetic construct
  misc_feature 1..90: note = engineered ribonucleic acid scaffold (ERS) sequence
  source 1..90: mol_type = other RNA
actggcgcttctatctgaattactctgagtgccatcaccagcgactatgtcgtagtgggtaaagctccctcttcggagggagcatcagag

SEQ ID NO: 20722 - RNA, 90 nt, synthetic construct
  misc_feature 1..90: note = engineered ribonucleic acid scaffold (ERS) sequence
  source 1..90: mol_type = other RNA
actggcgcttctatctgtattactctgagtgccatcaccagcgactatgtcgtagtgggtaaagctccctcttcggagggagcatcagag

SEQ ID NO: 20723 - RNA, 89 nt, synthetic construct
  misc_feature 1..89: note = engineered ribonucleic acid scaffold (ERS) sequence
  source 1..89: mol_type = other RNA
actggcgcttctatctggttactctgagtgccatcaccagcgactatgtcgtagtgggtaaagctccctcttcggagggagcatcagag

SEQ ID NO: 20724 - RNA, 89 nt, synthetic construct
  misc_feature 1..89: note = engineered ribonucleic acid scaffold (ERS) sequence
  source 1..89: mol_type = other RNA
actggcgcttctatctgtttactctgagtgccatcaccagcgactatgtcgtagtgggtaaagctccctcttcggagggagcatcagag

SEQ ID NO: 20725 - RNA, 90 nt, synthetic construct
  misc_feature 1..90: note = engineered ribonucleic acid scaffold (ERS) sequence
  source 1..90: mol_type = other RNA
actggcgcttctatctgatttactctgagtgccatcaccagcgactatgtcgtagtgggtaaagctccctcttcggagggagcatcagag

SEQ ID NO: 20726 - RNA, 89 nt, synthetic construct
  misc_feature 1..89: note = engineered ribonucleic acid scaffold (ERS) sequence
  source 1..89: mol_type = other RNA
actggcgcttctatctgattgctctgagtgccatcaccagcgactatgtcgtagtgggtaaagctccctcttcggagggagcatcagag

SEQ ID NO: 20727 - RNA, 91 nt, synthetic construct
  misc_feature 1..91: note = engineered ribonucleic acid scaffold (ERS) sequence
  source 1..91: mol_type = other RNA
actggctcttctatatctgattactctgagagccatcaccagcgactatgtcgtagtgggtaaagctccctcttcggagggagcatcagag

SEQ ID NO: 20728 - RNA, 90 nt, synthetic construct
  misc_feature 1..90: note = engineered ribonucleic acid scaffold (ERS) sequence
  source 1..90: mol_type = other RNA
actggctcttctaatctgattactctgagagccatcaccagcgactatgtcgtagtgggtaaagctccctcttcggagggagcatcagag

SEQ ID NO: 20729 - RNA, 88 nt, synthetic construct
  misc_feature 1..88: note = engineered ribonucleic acid scaffold (ERS) sequence
  source 1..88: mol_type = other RNA
actggctcttctactgattactctgagagccatcaccagcgactatgtcgtagtgggtaaagctccctcttcggagggagcatcagag

SEQ ID NO: 20730 - RNA, 89 nt, synthetic construct
  misc_feature 1..89: note = engineered ribonucleic acid scaffold (ERS) sequence
  source 1..89: mol_type = other RNA
actggctcttctaactgattactctgagagccatcaccagcgactatgtcgtagtgggtaaagctccctcttcggagggagcatcagag

SEQ ID NO: 20731 - RNA, 89 nt, synthetic construct
  misc_feature 1..89: note = engineered ribonucleic acid scaffold (ERS) sequence
  source 1..89: mol_type = other RNA
actggctcttctacctgattactctgagagccatcaccagcgactatgtcgtagtgggtaaagctccctcttcggagggagcatcagag

SEQ ID NO: 20732 - RNA, 89 nt, synthetic construct
  misc_feature 1..89: note = engineered ribonucleic acid scaffold (ERS) sequence
  source 1..89: mol_type = other RNA
actggctcttctagctgattactctgagagccatcaccagcgactatgtcgtagtgggtaaagctccctcttcggagggagcatcagag

SEQ ID NO: 20733 - RNA, 91 nt, synthetic construct
  misc_feature 1..91: note = engineered ribonucleic acid scaffold (ERS) sequence
  source 1..91: mol_type = other RNA
actggctcttctattactgattactctgagagccatcaccagcgactatgtcgtagtgggtaaagctccctcttcggagggagcatcagag

SEQ ID NO: 20734 - RNA, 89 nt, synthetic construct
  misc_feature 1..89: note = engineered ribonucleic acid scaffold (ERS) sequence
  source 1..89: mol_type = other RNA
actggctcttctatatgattactctgagagccatcaccagcgactatgtcgtagtgggtaaagctccctcttcggagggagcatcagag

SEQ ID NO: 20735 - RNA, 89 nt, synthetic construct
  misc_feature 1..89: note = engineered ribonucleic acid scaffold (ERS) sequence
  source 1..89: mol_type = other RNA
actggctcttctatgtgattactctgagagccatcaccagcgactatgtcgtagtgggtaaagctccctcttcggagggagcatcagag

SEQ ID NO: 20736 - RNA, 89 nt, synthetic construct
  misc_feature 1..89: note = engineered ribonucleic acid scaffold (ERS) sequence
  source 1..89: mol_type = other RNA
actggctcttctatttgattactctgagagccatcaccagcgactatgtcgtagtgggtaaagctccctcttcggagggagcatcagag

SEQ ID NO: 20737 - RNA, 90 nt, synthetic construct
  misc_feature 1..90: note = engineered ribonucleic acid scaffold (ERS) sequence
  source 1..90: mol_type = other RNA
actggctcttctatcttgattactctgagagccatcaccagcgactatgtcgtagtgggtaaagctccctcttcggagggagcatcagag

SEQ ID NO: 20738 - RNA, 89 nt, synthetic construct
  misc_feature 1..89: note = engineered ribonucleic acid scaffold (ERS) sequence
  source 1..89: mol_type = other RNA
actggctcttctatcagattactctgagagccatcaccagcgactatgtcgtagtgggtaaagctccctcttcggagggagcatcagag

SEQ ID NO: 20739 - RNA, 89 nt, synthetic construct
  misc_feature 1..89: note = engineered ribonucleic acid scaffold (ERS) sequence
  source 1..89: mol_type = other RNA
actggctcttctatcggattactctgagagccatcaccagcgactatgtcgtagtgggtaaagctccctcttcggagggagcatcagag

SEQ ID NO: 20740 - RNA, 90 nt, synthetic construct
  misc_feature 1..90: note = engineered ribonucleic acid scaffold (ERS) sequence
  source 1..90: mol_type = other RNA
actggctcttctatctgaattactctgagagccatcaccagcgactatgtcgtagtgggtaaagctccctcttcggagggagcatcagag

SEQ ID NO: 20741 - RNA, 90 nt, synthetic construct
  misc_feature 1..90: note = engineered ribonucleic acid scaffold (ERS) sequence
  source 1..90: mol_type = other RNA
actggctcttctatctgtattactctgagagccatcaccagcgactatgtcgtagtgggtaaagctccctcttcggagggagcatcagag

SEQ ID NO: 20742 - RNA, 89 nt, synthetic construct
  misc_feature 1..89: note = engineered ribonucleic acid scaffold (ERS) sequence
  source 1..89: mol_type = other RNA
actggctcttctatctggttactctgagagccatcaccagcgactatgtcgtagtgggtaaagctccctcttcggagggagcatcagag

SEQ ID NO: 20743 - RNA, 89 nt, synthetic construct
  misc_feature 1..89: note = engineered ribonucleic acid scaffold (ERS) sequence
  source 1..89: mol_type = other RNA
actggctcttctatctgtttactctgagagccatcaccagcgactatgtcgtagtgggtaaagctccctcttcggagggagcatcagag

SEQ ID NO: 20744 - RNA, 90 nt, synthetic construct
  misc_feature 1..90: note = engineered ribonucleic acid scaffold (ERS) sequence
  source 1..90: mol_type = other RNA
actggctcttctatctgatttactctgagagccatcaccagcgactatgtcgtagtgggtaaagctccctcttcggagggagcatcagag

SEQ ID NO: 20745 - RNA, 89 nt, synthetic construct
  misc_feature 1..89: note = engineered ribonucleic acid scaffold (ERS) sequence
  source 1..89: mol_type = other RNA
actggctcttctatctgattgctctgagagccatcaccagcgactatgtcgtagtgggtaaagctccctcttcggagggagcatcagag

SEQ ID NO: 20746 - RNA, 91 nt, synthetic construct
  misc_feature 1..91: note = engineered ribonucleic acid scaffold (ERS) sequence
  source 1..91: mol_type = other RNA
actggctcttctatatctgattactctgagcgccatcaccagcgactatgtcgtagtgggtaaagctccctcttcggagggagcatcagag

SEQ ID NO: 20747 - RNA, 90 nt, synthetic construct
  misc_feature 1..90: note = engineered ribonucleic acid scaffold (ERS) sequence
  source 1..90: mol_type = other RNA
actggctcttctaatctgattactctgagcgccatcaccagcgactatgtcgtagtgggtaaagctccctcttcggagggagcatcagag

SEQ ID NO: 20748 - RNA, 88 nt, synthetic construct
  misc_feature 1..88: note = engineered ribonucleic acid scaffold (ERS) sequence
  source 1..88: mol_type = other RNA
actggctcttctactgattactctgagcgccatcaccagcgactatgtcgtagtgggtaaagctccctcttcggagggagcatcagag

SEQ ID NO: 20749 - RNA, 89 nt, synthetic construct
  misc_feature 1..89: note = engineered ribonucleic acid scaffold (ERS) sequence
  source 1..89: mol_type = other RNA
actggctcttctaactgattactctgagcgccatcaccagcgactatgtcgtagtgggtaaagctccctcttcggagggagcatcagag

SEQ ID NO: 20750 - RNA, 89 nt, synthetic construct
  misc_feature 1..89: note = engineered ribonucleic acid scaffold (ERS) sequence
  source 1..89: mol_type = other RNA
actggctcttctacctgattactctgagcgccatcaccagcgactatgtcgtagtgggtaaagctccctcttcggagggagcatcagag

SEQ ID NO: 20751 - RNA, 89 nt, synthetic construct
  misc_feature 1..89: note = engineered ribonucleic acid scaffold (ERS) sequence
  source 1..89: mol_type = other RNA
actggctcttctagctgattactctgagcgccatcaccagcgactatgtcgtagtgggtaaagctccctcttcggagggagcatcagag

SEQ ID NO: 20752 - RNA, 91 nt, synthetic construct
  misc_feature 1..91: note = engineered ribonucleic acid scaffold (ERS) sequence
  source 1..91: mol_type = other RNA
actggctcttctattactgattactctgagcgccatcaccagcgactatgtcgtagtgggtaaagctccctcttcggagggagcatcagag

SEQ ID NO: 20753 - RNA, 89 nt, synthetic construct
  misc_feature 1..89: note = engineered ribonucleic acid scaffold (ERS) sequence
  source 1..89: mol_type = other RNA
actggctcttctatatgattactctgagcgccatcaccagcgactatgtcgtagtgggtaaagctccctcttcggagggagcatcagag

SEQ ID NO: 20754 - RNA, 89 nt, synthetic construct
  misc_feature 1..89: note = engineered ribonucleic acid scaffold (ERS) sequence
  source 1..89: mol_type = other RNA
actggctcttctatgtgattactctgagcgccatcaccagcgactatgtcgtagtgggtaaagctccctcttcggagggagcatcagag

SEQ ID NO: 20755 - RNA, 89 nt, synthetic construct
  misc_feature 1..89: note = engineered ribonucleic acid scaffold (ERS) sequence
  source 1..89: mol_type = other RNA
actggctcttctatttgattactctgagcgccatcaccagcgactatgtcgtagtgggtaaagctccctcttcggagggagcatcagag

SEQ ID NO: 20756 - RNA, 90 nt, synthetic construct
  misc_feature 1..90: note = engineered ribonucleic acid scaffold (ERS) sequence
  source 1..90: mol_type = other RNA
actggctcttctatcttgattactctgagcgccatcaccagcgactatgtcgtagtgggtaaagctccctcttcggagggagcatcagag

SEQ ID NO: 20757 - RNA, 89 nt, synthetic construct
  misc_feature 1..89: note = engineered ribonucleic acid scaffold (ERS) sequence
  source 1..89: mol_type = other RNA
actggctcttctatcagattactctgagcgccatcaccagcgactatgtcgtagtgggtaaagctccctcttcggagggagcatcagag

SEQ ID NO: 20758 - RNA, 89 nt, synthetic construct
  misc_feature 1..89: note = engineered ribonucleic acid scaffold (ERS) sequence
  source 1..89: mol_type = other RNA
actggctcttctatcggattactctgagcgccatcaccagcgactatgtcgtagtgggtaaagctccctcttcggagggagcatcagag

SEQ ID NO: 20759 - RNA, 90 nt, synthetic construct
  misc_feature 1..90: note = engineered ribonucleic acid scaffold (ERS) sequence
  source 1..90: mol_type = other RNA
actggctcttctatctgaattactctgagcgccatcaccagcgactatgtcgtagtgggtaaagctccctcttcggagggagcatcagag

SEQ ID NO: 20760 - RNA, 90 nt, synthetic construct
  misc_feature 1..90: note = engineered ribonucleic acid scaffold (ERS) sequence
  source 1..90: mol_type = other RNA
actggctcttctatctgtattactctgagcgccatcaccagcgactatgtcgtagtgggtaaagctccctcttcggagggagcatcagag

SEQ ID NO: 20761 - RNA, 89 nt, synthetic construct
  misc_feature 1..89: note = engineered ribonucleic acid scaffold (ERS) sequence
  source 1..89: mol_type = other RNA
actggctcttctatctggttactctgagcgccatcaccagcgactatgtcgtagtgggtaaagctccctcttcggagggagcatcagag

SEQ ID NO: 20762 - RNA, 89 nt, synthetic construct
  misc_feature 1..89: note = engineered ribonucleic acid scaffold (ERS) sequence
  source 1..89: mol_type = other RNA
actggctcttctatctgtttactctgagcgccatcaccagcgactatgtcgtagtgggtaaagctccctcttcggagggagcatcagag

SEQ ID NO: 20763 - RNA, 90 nt, synthetic construct
  misc_feature 1..90: note = engineered ribonucleic acid scaffold (ERS) sequence
  source 1..90: mol_type = other RNA
actggctcttctatctgatttactctgagcgccatcaccagcgactatgtcgtagtgggtaaagctccctcttcggagggagcatcagag

SEQ ID NO: 20764 - RNA, 89 nt, synthetic construct
  misc_feature 1..89: note = engineered ribonucleic acid scaffold (ERS) sequence
  source 1..89: mol_type = other RNA
actggctcttctatctgattgctctgagcgccatcaccagcgactatgtcgtagtgggtaaagctccctcttcggagggagcatcagag

SEQ ID NO: 20765 - RNA, 91 nt, synthetic construct
  misc_feature 1..91: note = engineered ribonucleic acid scaffold (ERS) sequence
  source 1..91: mol_type = other RNA
actggctcttctatatctgattactctgagggccatcaccagcgactatgtcgtagtgggtaaagctccctcttcggagggagcatcagag

SEQ ID NO: 20766 - RNA, 90 nt, synthetic construct
  misc_feature 1..90: note = engineered ribonucleic acid scaffold (ERS) sequence
  source 1..90: mol_type = other RNA
actggctcttctaatctgattactctgagggccatcaccagcgactatgtcgtagtgggtaaagctccctcttcggagggagcatcagag

SEQ ID NO: 20767 - RNA, 88 nt, synthetic construct
  misc_feature 1..88: note = engineered ribonucleic acid scaffold (ERS) sequence
  source 1..88: mol_type = other RNA
actggctcttctactgattactctgagggccatcaccagcgactatgtcgtagtgggtaaagctccctcttcggagggagcatcagag

SEQ ID NO: 20768 - RNA, 89 nt, synthetic construct
  misc_feature 1..89: note = engineered ribonucleic acid scaffold (ERS) sequence
  source 1..89: mol_type = other RNA
actggctcttctaactgattactctgagggccatcaccagcgactatgtcgtagtgggtaaagctccctcttcggagggagcatcagag

SEQ ID NO: 20769 - RNA, 89 nt, synthetic construct
  misc_feature 1..89: note = engineered ribonucleic acid scaffold (ERS) sequence
  source 1..89: mol_type = other RNA
actggctcttctacctgattactctgagggccatcaccagcgactatgtcgtagtgggtaaagctccctcttcggagggagcatcagag

SEQ ID NO: 20770 - RNA, 89 nt, synthetic construct
  misc_feature 1..89: note = engineered ribonucleic acid scaffold (ERS) sequence
  source 1..89: mol_type = other RNA
actggctcttctagctgattactctgagggccatcaccagcgactatgtcgtagtgggtaaagctccctcttcggagggagcatcagag

SEQ ID NO: 20771 - RNA, 91 nt, synthetic construct
  misc_feature 1..91: note = engineered ribonucleic acid scaffold (ERS) sequence
  source 1..91: mol_type = other RNA
actggctcttctattactgattactctgagggccatcaccagcgactatgtcgtagtgggtaaagctccctcttcggagggagcatcagag

SEQ ID NO: 20772 - RNA, 89 nt, synthetic construct
  misc_feature 1..89: note = engineered ribonucleic acid scaffold (ERS) sequence
  source 1..89: mol_type = other RNA
actggctcttctatatgattactctgagggccatcaccagcgactatgtcgtagtgggtaaagctccctcttcggagggagcatcagag

SEQ ID NO: 20773 - RNA, 89 nt, synthetic construct
  misc_feature 1..89: note = engineered ribonucleic acid scaffold (ERS) sequence
  source 1..89: mol_type = other RNA
actggctcttctatgtgattactctgagggccatcaccagcgactatgtcgtagtgggtaaagctccctcttcggagggagcatcagag

SEQ ID NO: 20774 - RNA, 89 nt, synthetic construct
  misc_feature 1..89: note = engineered ribonucleic acid scaffold (ERS) sequence
  source 1..89: mol_type = other RNA
actggctcttctatttgattactctgagggccatcaccagcgactatgtcgtagtgggtaaagctccctcttcggagggagcatcagag

SEQ ID NO: 20775 - RNA, 90 nt, synthetic construct
  misc_feature 1..90: note = engineered ribonucleic acid scaffold (ERS) sequence
  source 1..90: mol_type = other RNA
actggctcttctatcttgattactctgagggccatcaccagcgactatgtcgtagtgggtaaagctccctcttcggagggagcatcagag

SEQ ID NO: 20776 - RNA, 89 nt, synthetic construct
  misc_feature 1..89: note = engineered ribonucleic acid scaffold (ERS) sequence
  source 1..89: mol_type = other RNA
actggctcttctatcagattactctgagggccatcaccagcgactatgtcgtagtgggtaaagctccctcttcggagggagcatcagag

SEQ ID NO: 20777 - RNA, 89 nt, synthetic construct
  misc_feature 1..89: note = engineered ribonucleic acid scaffold (ERS) sequence
  source 1..89: mol_type = other RNA
actggctcttctatcggattactctgagggccatcaccagcgactatgtcgtagtgggtaaagctccctcttcggagggagcatcagag

SEQ ID NO: 20778 - RNA, 90 nt, synthetic construct
  misc_feature 1..90: note = engineered ribonucleic acid scaffold (ERS) sequence
  source 1..90: mol_type = other RNA
actggctcttctatctgaattactctgagggccatcaccagcgactatgtcgtagtgggtaaagctccctcttcggagggagcatcagag

SEQ ID NO: 20779 - RNA, 90 nt, synthetic construct
  misc_feature 1..90: note = engineered ribonucleic acid scaffold (ERS) sequence
  source 1..90: mol_type = other RNA
actggctcttctatctgtattactctgagggccatcaccagcgactatgtcgtagtgggtaaagctccctcttcggagggagcatcagag

SEQ ID NO: 20780 - RNA, 89 nt, synthetic construct
  misc_feature 1..89: note = engineered ribonucleic acid scaffold (ERS) sequence
  source 1..89: mol_type = other RNA
actggctcttctatctggttactctgagggccatcaccagcgactatgtcgtagtgggtaaagctccctcttcggagggagcatcagag

SEQ ID NO: 20781 - RNA, 89 nt, synthetic construct
  misc_feature 1..89: note = engineered ribonucleic acid scaffold (ERS) sequence
  source 1..89: mol_type = other RNA
actggctcttctatctgtttactctgagggccatcaccagcgactatgtcgtagtgggtaaagctccctcttcggagggagcatcagag

SEQ ID NO: 20782 - RNA, 90 nt, synthetic construct
  misc_feature 1..90: note = engineered ribonucleic acid scaffold (ERS) sequence
  source 1..90: mol_type = other RNA
actggctcttctatctgatttactctgagggccatcaccagcgactatgtcgtagtgggtaaagctccctcttcggagggagcatcagag

SEQ ID NO: 20783 - RNA, 89 nt, synthetic construct
  misc_feature 1..89: note = engineered ribonucleic acid scaffold (ERS) sequence
  source 1..89: mol_type = other RNA
actggctcttctatctgattgctctgagggccatcaccagcgactatgtcgtagtgggtaaagctccctcttcggagggagcatcagag

SEQ ID NO: 20784 - RNA, 91 nt, synthetic construct
  misc_feature 1..91: note = engineered ribonucleic acid scaffold (ERS) sequence
  source 1..91: mol_type = other RNA
actggctcttctatatctgattactctgagtgccatcaccagcgactatgtcgtagtgggtaaagctccctcttcggagggagcatcagag

SEQ ID NO: 20785 - RNA, 90 nt, synthetic construct
  misc_feature 1..90: note = engineered ribonucleic acid scaffold (ERS) sequence
  source 1..90: mol_type = other RNA
actggctcttctaatctgattactctgagtgccatcaccagcgactatgtcgtagtgggtaaagctccctcttcggagggagcatcagag

SEQ ID NO: 20786 - RNA, 88 nt, synthetic construct
  misc_feature 1..88: note = engineered ribonucleic acid scaffold (ERS) sequence
  source 1..88: mol_type = other RNA
actggctcttctactgattactctgagtgccatcaccagcgactatgtcgtagtgggtaaagctccctcttcggagggagcatcagag

SEQ ID NO: 20787 - RNA, 89 nt, synthetic construct
  misc_feature 1..89: note = engineered ribonucleic acid scaffold (ERS) sequence
  source 1..89: mol_type = other RNA
actggctcttctaactgattactctgagtgccatcaccagcgactatgtcgtagtgggtaaagctccctcttcggagggagcatcagag

SEQ ID NO: 20788 - RNA, 89 nt, synthetic construct
  misc_feature 1..89: note = engineered ribonucleic acid scaffold (ERS) sequence
  source 1..89: mol_type = other RNA
actggctcttctacctgattactctgagtgccatcaccagcgactatgtcgtagtgggtaaagctccctcttcggagggagcatcagag

SEQ ID NO: 20789 - RNA, 89 nt, synthetic construct
  misc_feature 1..89: note = engineered ribonucleic acid scaffold (ERS) sequence
  source 1..89: mol_type = other RNA
actggctcttctagctgattactctgagtgccatcaccagcgactatgtcgtagtgggtaaagctccctcttcggagggagcatcagag

SEQ ID NO: 20790 - RNA, 91 nt, synthetic construct
  misc_feature 1..91: note = engineered ribonucleic acid scaffold (ERS) sequence
  source 1..91: mol_type = other RNA
actggctcttctattactgattactctgagtgccatcaccagcgactatgtcgtagtgggtaaagctccctcttcggagggagcatcagag

SEQ ID NO: 20791 - RNA, 89 nt, synthetic construct
  misc_feature 1..89: note = engineered ribonucleic acid scaffold (ERS) sequence
  source 1..89: mol_type = other RNA
actggctcttctatatgattactctgagtgccatcaccagcgactatgtcgtagtgggtaaagctccctcttcggagggagcatcagag

SEQ ID NO: 20792 - RNA, 89 nt, synthetic construct
  misc_feature 1..89: note = engineered ribonucleic acid scaffold (ERS) sequence
  source 1..89: mol_type = other RNA
actggctcttctatgtgattactctgagtgccatcaccagcgactatgtcgtagtgggtaaagctccctcttcggagggagcatcagag

SEQ ID NO: 20793 - RNA, 89 nt, synthetic construct
  misc_feature 1..89: note = engineered ribonucleic acid scaffold (ERS) sequence
  source 1..89: mol_type = other RNA
actggctcttctatttgattactctgagtgccatcaccagcgactatgtcgtagtgggtaaagctccctcttcggagggagcatcagag

SEQ ID NO: 20794 - RNA, 90 nt, synthetic construct
  misc_feature 1..90: note = engineered ribonucleic acid scaffold (ERS) sequence
  source 1..90: mol_type = other RNA
actggctcttctatcttgattactctgagtgccatcaccagcgactatgtcgtagtgggtaaagctccctcttcggagggagcatcagag

SEQ ID NO: 20795 - RNA, 89 nt, synthetic construct
  misc_feature 1..89: note = engineered ribonucleic acid scaffold (ERS) sequence
  source 1..89: mol_type = other RNA
actggctcttctatcagattactctgagtgccatcaccagcgactatgtcgtagtgggtaaagctccctcttcggagggagcatcagag

SEQ ID NO: 20796 - RNA, 89 nt, synthetic construct
  misc_feature 1..89: note = engineered ribonucleic acid scaffold (ERS) sequence
  source 1..89: mol_type = other RNA
actggctcttctatcggattactctgagtgccatcaccagcgactatgtcgtagtgggtaaagctccctcttcggagggagcatcagag

SEQ ID NO: 20797 - RNA, 90 nt, synthetic construct
  misc_feature 1..90: note = engineered ribonucleic acid scaffold (ERS) sequence
  source 1..90: mol_type = other RNA
actggctcttctatctgaattactctgagtgccatcaccagcgactatgtcgtagtgggtaaagctccctcttcggagggagcatcagag

SEQ ID NO: 20798 - RNA, 90 nt, synthetic construct
  misc_feature 1..90: note = engineered ribonucleic acid scaffold (ERS) sequence
  source 1..90: mol_type = other RNA
actggctcttctatctgtattactctgagtgccatcaccagcgactatgtcgtagtgggtaaagctccctcttcggagggagcatcagag

SEQ ID NO: 20799 - RNA, 89 nt, synthetic construct
  misc_feature 1..89: note = engineered ribonucleic acid scaffold (ERS) sequence
  source 1..89: mol_type = other RNA
actggctcttctatctggttactctgagtgccatcaccagcgactatgtcgtagtgggtaaagctccctcttcggagggagcatcagag

SEQ ID NO: 20800 - RNA, 89 nt, synthetic construct
  misc_feature 1..89: note = engineered ribonucleic acid scaffold (ERS) sequence
  source 1..89: mol_type = other RNA
actggctcttctatctgtttactctgagtgccatcaccagcgactatgtcgtagtgggtaaagctccctcttcggagggagcatcagag

SEQ ID NO: 20801 - RNA, 90 nt, synthetic construct
  misc_feature 1..90: note = engineered ribonucleic acid scaffold (ERS) sequence
  source 1..90: mol_type = other RNA
actggctcttctatctgatttactctgagtgccatcaccagcgactatgtcgtagtgggtaaagctccctcttcggagggagcatcagag

SEQ ID NO: 20802 - RNA, 89 nt, synthetic construct
  misc_feature 1..89: note = engineered ribonucleic acid scaffold (ERS) sequence
  source 1..89: mol_type = other RNA
actggctcttctatctgattgctctgagtgccatcaccagcgactatgtcgtagtgggtaaagctccctcttcggagggagcatcagag

SEQ ID NO: 20803 - RNA, 91 nt, synthetic construct
  misc_feature 1..91: note = engineered ribonucleic acid scaffold (ERS) sequence
  source 1..91: mol_type = other RNA
actggcggttctatatctgattactctgagcgccatcaccagcgactatgtcgtagtgggtaaagctccctcttcggagggagcatcagag

SEQ ID NO: 20804 - RNA, 90 nt, synthetic construct
  misc_feature 1..90: note = engineered ribonucleic acid scaffold (ERS) sequence
  source 1..90: mol_type = other RNA
actggcggttctaatctgattactctgagcgccatcaccagcgactatgtcgtagtgggtaaagctccctcttcggagggagcatcagag

SEQ ID NO: 20805 - RNA, 88 nt, synthetic construct
  misc_feature 1..88: note = engineered ribonucleic acid scaffold (ERS) sequence
  source 1..88: mol_type = other RNA
actggcggttctactgattactctgagcgccatcaccagcgactatgtcgtagtgggtaaagctccctcttcggagggagcatcagag

SEQ ID NO: 20806 - RNA, 89 nt, synthetic construct
  misc_feature 1..89: note = engineered ribonucleic acid scaffold (ERS) sequence
  source 1..89: mol_type = other RNA
actggcggttctaactgattactctgagcgccatcaccagcgactatgtcgtagtgggtaaagctccctcttcggagggagcatcagag

SEQ ID NO: 20807 - RNA, 89 nt, synthetic construct
  misc_feature 1..89: note = engineered ribonucleic acid scaffold (ERS) sequence
  source 1..89: mol_type = other RNA
actggcggttctacctgattactctgagcgccatcaccagcgactatgtcgtagtgggtaaagctccctcttcggagggagcatcagag

SEQ ID NO: 20808 - RNA, 89 nt, synthetic construct
  misc_feature 1..89: note = engineered ribonucleic acid scaffold (ERS) sequence
  source 1..89: mol_type = other RNA
actggcggttctagctgattactctgagcgccatcaccagcgactatgtcgtagtgggtaaagctccctcttcggagggagcatcagag

SEQ ID NO: 20809 - RNA, 91 nt, synthetic construct
  misc_feature 1..91: note = engineered ribonucleic acid scaffold (ERS) sequence
  source 1..91: mol_type = other RNA
actggcggttctattactgattactctgagcgccatcaccagcgactatgtcgtagtgggtaaagctccctcttcggagggagcatcagag

SEQ ID NO: 20810 - RNA, 89 nt, synthetic construct
  misc_feature 1..89: note = engineered ribonucleic acid scaffold (ERS) sequence
  source 1..89: mol_type = other RNA
actggcggttctatatgattactctgagcgccatcaccagcgactatgtcgtagtgggtaaagctccctcttcggagggagcatcagag

SEQ ID NO: 20811 - RNA, 89 nt, synthetic construct
  misc_feature 1..89: note = engineered ribonucleic acid scaffold (ERS) sequence
  source 1..89: mol_type = other RNA
actggcggttctatgtgattactctgagcgccatcaccagcgactatgtcgtagtgggtaaagctccctcttcggagggagcatcagag

SEQ ID NO: 20812 - RNA, 89 nt, synthetic construct
  misc_feature 1..89: note = engineered ribonucleic acid scaffold (ERS) sequence
  source 1..89: mol_type = other RNA
actggcggttctatttgattactctgagcgccatcaccagcgactatgtcgtagtgggtaaagctccctcttcggagggagcatcagag

SEQ ID NO: 20813 - RNA, 90 nt, synthetic construct
  misc_feature 1..90: note = engineered ribonucleic acid scaffold (ERS) sequence
  source 1..90: mol_type = other RNA
actggcggttctatcttgattactctgagcgccatcaccagcgactatgtcgtagtgggtaaagctccctcttcggagggagcatcagag

SEQ ID NO: 20814 - RNA, 89 nt, synthetic construct
  misc_feature 1..89: note = engineered ribonucleic acid scaffold (ERS) sequence
  source 1..89: mol_type = other RNA
actggcggttctatcagattactctgagcgccatcaccagcgactatgtcgtagtgggtaaagctccctcttcggagggagcatcagag

SEQ ID NO: 20815 - RNA, 89 nt, synthetic construct
  misc_feature 1..89: note = engineered ribonucleic acid scaffold (ERS) sequence
  source 1..89: mol_type = other RNA
actggcggttctatcggattactctgagcgccatcaccagcgactatgtcgtagtgggtaaagctccctcttcggagggagcatcagag

SEQ ID NO: 20816 - RNA, 90 nt, synthetic construct
  misc_feature 1..90: note = engineered ribonucleic acid scaffold (ERS) sequence
  source 1..90: mol_type = other RNA
actggcggttctatctgaattactctgagcgccatcaccagcgactatgtcgtagtgggtaaagctccctcttcggagggagcatcagag

SEQ ID NO: 20817 - RNA, 90 nt, synthetic construct
  misc_feature 1..90: note = engineered ribonucleic acid scaffold (ERS) sequence
  source 1..90: mol_type = other RNA
actggcggttctatctgtattactctgagcgccatcaccagcgactatgtcgtagtgggtaaagctccctcttcggagggagcatcagag

SEQ ID NO: 20818 - RNA, 89 nt, synthetic construct
  misc_feature 1..89: note = engineered ribonucleic acid scaffold (ERS) sequence
  source 1..89: mol_type = other RNA
actggcggttctatctggttactctgagcgccatcaccagcgactatgtcgtagtgggtaaagctccctcttcggagggagcatcagag

SEQ ID NO: 20819 - RNA, 89 nt, synthetic construct
  misc_feature 1..89: note = engineered ribonucleic acid scaffold (ERS) sequence
  source 1..89: mol_type = other RNA
actggcggttctatctgtttactctgagcgccatcaccagcgactatgtcgtagtgggtaaagctccctcttcggagggagcatcagag

SEQ ID NO: 20820 - RNA, 90 nt, synthetic construct
  misc_feature 1..90: note = engineered ribonucleic acid scaffold (ERS) sequence
  source 1..90: mol_type = other RNA
actggcggttctatctgatttactctgagcgccatcaccagcgactatgtcgtagtgggtaaagctccctcttcggagggagcatcagag

SEQ ID NO: 20821 - RNA, 89 nt, synthetic construct
  misc_feature 1..89: note = engineered ribonucleic acid scaffold (ERS) sequence
  source 1..89: mol_type = other RNA
actggcggttctatctgattgctctgagcgccatcaccagcgactatgtcgtagtgggtaaagctccctcttcggagggagcatcagag

SEQ ID NO: 20822 - RNA, 91 nt, synthetic construct
  misc_feature 1..91: note = engineered ribonucleic acid scaffold (ERS) sequence
  source 1..91: mol_type = other RNA
actggcggttctatatctgattactctgagagccatcaccagcgactatgtcgtagtgggtaaagctccctcttcggagggagcatcagag

SEQ ID NO: 20823 - RNA, 90 nt, synthetic construct
  misc_feature 1..90: note = engineered ribonucleic acid scaffold (ERS) sequence
  source 1..90: mol_type = other RNA
actggcggttctaatctgattactctgagagccatcaccagcgactatgtcgtagtgggtaaagctccctcttcggagggagcatcagag

SEQ ID NO: 20824 - RNA, 88 nt, synthetic construct
  misc_feature 1..88: note = engineered ribonucleic acid scaffold (ERS) sequence
  source 1..88: mol_type = other RNA
actggcggttctactgattactctgagagccatcaccagcgactatgtcgtagtgggtaaagctccctcttcggagggagcatcagag

SEQ ID NO: 20825 - RNA, 89 nt, synthetic construct
  misc_feature 1..89: note = engineered ribonucleic acid scaffold (ERS) sequence
  source 1..89: mol_type = other RNA
actggcggttctaactgattactctgagagccatcaccagcgactatgtcgtagtgggtaaagctccctcttcggagggagcatcagag

SEQ ID NO: 20826 - RNA, 89 nt, synthetic construct
  misc_feature 1..89: note = engineered ribonucleic acid scaffold (ERS) sequence
  source 1..89: mol_type = other RNA
actggcggttctacctgattactctgagagccatcaccagcgactatgtcgtagtgggtaaagctccctcttcggagggagcatcagag

SEQ ID NO: 20827 - RNA, 89 nt, synthetic construct
  misc_feature 1..89: note = engineered ribonucleic acid scaffold (ERS) sequence
  source 1..89: mol_type = other RNA
actggcggttctagctgattactctgagagccatcaccagcgactatgtcgtagtgggtaaagctccctcttcggagggagcatcagag

SEQ ID NO: 20828 - RNA, 91 nt, synthetic construct
  misc_feature 1..91: note = engineered ribonucleic acid scaffold (ERS) sequence
  source 1..91: mol_type = other RNA
actggcggttctattactgattactctgagagccatcaccagcgactatgtcgtagtgggtaaagctccctcttcggagggagcatcagag

SEQ ID NO: 20829 - RNA, 89 nt, synthetic construct
  misc_feature 1..89: note = engineered ribonucleic acid scaffold (ERS) sequence
  source 1..89: mol_type = other RNA
actggcggttctatatgattactctgagagccatcaccagcgactatgtcgtagtgggtaaagctccctcttcggagggagcatcagag

SEQ ID NO: 20830 - RNA, 89 nt, synthetic construct
  misc_feature 1..89: note = engineered ribonucleic acid scaffold (ERS) sequence
  source 1..89: mol_type = other RNA
actggcggttctatgtgattactctgagagccatcaccagcgactatgtcgtagtgggtaaagctccctcttcggagggagcatcagag

SEQ ID NO: 20831 - RNA, 89 nt, synthetic construct
  misc_feature 1..89: note = engineered ribonucleic acid scaffold (ERS) sequence
  source 1..89: mol_type = other RNA
actggcggttctatttgattactctgagagccatcaccagcgactatgtcgtagtgggtaaagctccctcttcggagggagcatcagag

SEQ ID NO: 20832 - RNA, 90 nt, synthetic construct
  misc_feature 1..90: note = engineered ribonucleic acid scaffold (ERS) sequence
  source 1..90: mol_type = other RNA
actggcggttctatcttgattactctgagagccatcaccagcgactatgtcgtagtgggtaaagctccctcttcggagggagcatcagag

SEQ ID NO: 20833 - RNA, 89 nt, synthetic construct
  misc_feature 1..89: note = engineered ribonucleic acid scaffold (ERS) sequence
  source 1..89: mol_type = other RNA
actggcggttctatcagattactctgagagccatcaccagcgactatgtcgtagtgggtaaagctccctcttcggagggagcatcagag

SEQ ID NO: 20834 - RNA, 89 nt, synthetic construct
  misc_feature 1..89: note = engineered ribonucleic acid scaffold (ERS) sequence
  source 1..89: mol_type = other RNA
actggcggttctatcggattactctgagagccatcaccagcgactatgtcgtagtgggtaaagctccctcttcggagggagcatcagag

SEQ ID NO: 20835 - RNA, 90 nt, synthetic construct
  misc_feature 1..90: note = engineered ribonucleic acid scaffold (ERS) sequence
  source 1..90: mol_type = other RNA
actggcggttctatctgaattactctgagagccatcaccagcgactatgtcgtagtgggtaaagctccctcttcggagggagcatcagag

SEQ ID NO: 20836 - RNA, 90 nt, synthetic construct
  misc_feature 1..90: note = engineered ribonucleic acid scaffold (ERS) sequence
  source 1..90: mol_type = other RNA
actggcggttctatctgtattactctgagagccatcaccagcgactatgtcgtagtgggtaaagctccctcttcggagggagcatcagag

SEQ ID NO: 20837 - RNA, 89 nt, synthetic construct
  misc_feature 1..89: note = engineered ribonucleic acid scaffold (ERS) sequence
  source 1..89: mol_type = other RNA
actggcggttctatctggttactctgagagccatcaccagcgactatgtcgtagtgggtaaagctccctcttcggagggagcatcagag

SEQ ID NO: 20838 - RNA, 89 nt, synthetic construct
  misc_feature 1..89: note = engineered ribonucleic acid scaffold (ERS) sequence
  source 1..89: mol_type = other RNA
actggcggttctatctgtttactctgagagccatcaccagcgactatgtcgtagtgggtaaagctccctcttcggagggagcatcagag

SEQ ID NO: 20839 - RNA, 90 nt, synthetic construct
  misc_feature 1..90: note = engineered ribonucleic acid scaffold (ERS) sequence
  source 1..90: mol_type = other RNA
actggcggttctatctgatttactctgagagccatcaccagcgactatgtcgtagtgggtaaagctccctcttcggagggagcatcagag

SEQ ID NO: 20840 - RNA, 89 nt, synthetic construct
  misc_feature 1..89: note = engineered ribonucleic acid scaffold (ERS) sequence
  source 1..89: mol_type = other RNA
actggcggttctatctgattgctctgagagccatcaccagcgactatgtcgtagtgggtaaagctccctcttcggagggagcatcagag

SEQ ID NO: 20841 - RNA, 88 nt, synthetic construct
  misc_feature 1..88: note = engineered ribonucleic acid scaffold (ERS) sequence
  source 1..88: mol_type = other RNA
actggcgcttctatctgattactctcagcgccaacaccagcgactatgtcgtatgggtaaagctccctcttcggagggagcatcagac

SEQ ID NO: 20842 - RNA, 88 nt, synthetic construct
  misc_feature 1..88: note = engineered ribonucleic acid scaffold (ERS) sequence
  source 1..88: mol_type = other RNA
actggcgcttctatctgattactttgagcgccaacaccagcgactatgtcgtatgggtaaagctccctcttcggagggagcatcagag

SEQ ID NO: 20843 - RNA, 88 nt, synthetic construct
  misc_feature 1..88: note = engineered ribonucleic acid scaffold (ERS) sequence
  source 1..88: mol_type = other RNA
actggcgcttctatctgattactttgagcgccaacaccagcgactatgtcgtatgggtaaagctccctcttcggagggagcatcaaag

SEQ ID NO: 20844 - RNA, 88 nt, synthetic construct
  misc_feature 1..88: note = engineered ribonucleic acid scaffold (ERS) sequence
  source 1..88: mol_type = other RNA
actggcgcttctatctgattagtctcagcgccaacaccagcgactatgtcgtatgggtaaagctccctcttcggagggagcatgagac

SEQ ID NO: 20845 - RNA, 88 nt, synthetic construct
  misc_feature 1..88: note = engineered ribonucleic acid scaffold (ERS) sequence
  source 1..88: mol_type = other RNA
actggcgcttctatctgattagtctgagcgccaacaccagcgactatgtcgtatgggtaaagctccctcttcggagggagcatcagac

SEQ ID NO: 20846 - RNA, 88 nt, synthetic construct
  misc_feature 1..88: note = engineered ribonucleic acid scaffold (ERS) sequence
  source 1..88: mol_type = other RNA
actggcgcttctatctgattactctcagcgccaacaccagcgactatgtcgtatgggtaaagctccctcttcggagggagcatgagag

SEQ ID NO: 20847 - RNA, 88 nt, synthetic construct
  misc_feature 1..88: note = engineered ribonucleic acid scaffold (ERS) sequence
  source 1..88: mol_type = other RNA
actggcgctcccatctgattaccccgagcgccaacaccagcgactatgtcgtatgggtaaagctccctcttcggagggagcatcgggg

SEQ ID NO: 20848 - RNA, 88 nt, synthetic construct
  misc_feature 1..88: note = engineered ribonucleic acid scaffold (ERS) sequence
  source 1..88: mol_type = other RNA
actggcgctcctatctgattactccgagcgccaacaccagcgactatgtcgtatgggtaaagctccctcttcggagggagcatcggag

SEQ ID NO: 20849 - RNA, 88 nt, synthetic construct
  misc_feature 1..88: note = engineered ribonucleic acid scaffold (ERS) sequence
  source 1..88: mol_type = other RNA
actggcgctgggatctgattaccccgagcgccaacaccagcgactatgtcgtatgggtaaagctccctcttcggagggagcatcgggg

SEQ ID NO: 20850 - RNA, 88 nt, synthetic construct
  misc_feature 1..88: note = engineered ribonucleic acid scaffold (ERS) sequence
  source 1..88: mol_type = other RNA
actggcgctggtatctgattactccgagcgccaacaccagcgactatgtcgtatgggtaaagctccctcttcggagggagcatcggag

SEQ ID NO: 20851 - RNA, 88 nt, synthetic construct
  misc_feature 1..88: note = engineered ribonucleic acid scaffold (ERS) sequence
  source 1..88: mol_type = other RNA
actggcgcttccatctgattaccctgagcgccaacaccagcgactatgtcgtatgggtaaagctccctcttcggagggagcatcaggg

SEQ ID NO: 20852 - RNA, 88 nt, synthetic construct
  misc_feature 1..88: note = engineered ribonucleic acid scaffold (ERS) sequence
  source 1..88: mol_type = other RNA
actggcgcttggatctgattaccctgagcgccaacaccagcgactatgtcgtatgggtaaagctccctcttcggagggagcatcaggg

SEQ ID NO: 20853 - RNA, 88 nt, synthetic construct
  misc_feature 1..88: note = engineered ribonucleic acid scaffold (ERS) sequence
  source 1..88: mol_type = other RNA
actggcgcttgtatctgattactctgagcgccaacaccagcgactatgtcgtatgggtaaagctccctcttcggagggagcatcagag

SEQ ID NO: 20854 - RNA, 88 nt, synthetic construct
  misc_feature 1..88: note = engineered ribonucleic acid scaffold (ERS) sequence
  source 1..88: mol_type = other RNA
actggcgcttttatctgattactttgagcgccaacaccagcgactatgtcgtatgggtaaagctccctcttcggagggagcatcagag

SEQ ID NO: 20855 - RNA, 88 nt, synthetic construct
  misc_feature 1..88: note = engineered ribonucleic acid scaffold (ERS) sequence
  source 1..88: mol_type = other RNA
actggcgcttttatctgattactctgagcgccaacaccagcgactatgtcgtatgggtaaagctccctcttcggagggagcatcagag

SEQ ID NO: 20856 - RNA, 88 nt, synthetic construct
  misc_feature 1..88: note = engineered ribonucleic acid scaffold (ERS) sequence
  source 1..88: mol_type = other RNA
actggcgcttttatctgattactctgagcgccaacaccagcgactatgtcgtatgggtaaagctccctcttcggagggagcatcaaag

SEQ ID NO: 20857 - RNA, 88 nt, synthetic construct
  misc_feature 1..88: note = engineered ribonucleic acid scaffold (ERS) sequence
  source 1..88: mol_type = other RNA
actggcgcttctatctgattactctgagcgccaacaccagcgactatgtcgtatgggtaaagctccctcttcggagggagcctcagag

SEQ ID NO: 20858 - RNA, 88 nt, synthetic construct
  misc_feature 1..88: note = engineered ribonucleic acid scaffold (ERS) sequence
  source 1..88: mol_type = other RNA
actggcgcttctatctgattactctgagcgccaacaccagcgactatgtcgtatgggtaaagctccctcttcggagggagcgtcagag

SEQ ID NO: 20859 - RNA, 88 nt, synthetic construct
  misc_feature 1..88: note = engineered ribonucleic acid scaffold (ERS) sequence
  source 1..88: mol_type = other RNA
actggcgcttctatctgattactctgagcgccaacaccagcgactatgtcgtatgggtaaagctccctcttcggagggagcatcaaag

SEQ ID NO: 20860 - RNA, 88 nt, synthetic construct
  misc_feature 1..88: note = engineered ribonucleic acid scaffold (ERS) sequence
  source 1..88: mol_type = other RNA
actggcgcttctatctgattactctcagcgccagcaccagcgactatgtcgtatgggtaaagctccctcttcggagggagcatcagac

SEQ ID NO: 20861 - RNA, 88 nt, synthetic construct
  misc_feature 1..88: note = engineered ribonucleic acid scaffold (ERS) sequence
  source 1..88: mol_type = other RNA
actggcgcttctatctgattactttgagcgccagcaccagcgactatgtcgtatgggtaaagctccctcttcggagggagcatcagag

SEQ ID NO: 20862 - RNA, 88 nt, synthetic construct
  misc_feature 1..88: note = engineered ribonucleic acid scaffold (ERS) sequence
  source 1..88: mol_type = other RNA
actggcgcttctatctgattactttgagcgccagcaccagcgactatgtcgtatgggtaaagctccctcttcggagggagcatcaaag

SEQ ID NO: 20863 - RNA, 88 nt, synthetic construct
  misc_feature 1..88: note = engineered ribonucleic acid scaffold (ERS) sequence
  source 1..88: mol_type = other RNA
actggcgcttctatctgattagtctcagcgccagcaccagcgactatgtcgtatgggtaaagctccctcttcggagggagcatgagac

SEQ ID NO: 20864 - RNA, 88 nt, synthetic construct
  misc_feature 1..88: note = engineered ribonucleic acid scaffold (ERS) sequence
  source 1..88: mol_type = other RNA
actggcgcttctatctgattagtctgagcgccagcaccagcgactatgtcgtatgggtaaagctccctcttcggagggagcatcagac

SEQ ID NO: 20865 - RNA, 88 nt, synthetic construct
  misc_feature 1..88: note = engineered ribonucleic acid scaffold (ERS) sequence
  source 1..88: mol_type = other RNA
actggcgcttctatctgattactctcagcgccagcaccagcgactatgtcgtatgggtaaagctccctcttcggagggagcatgagag

SEQ ID NO: 20866 - RNA, 88 nt, synthetic construct
  misc_feature 1..88: note = engineered ribonucleic acid scaffold (ERS) sequence
  source 1..88: mol_type = other RNA
actggcgctcccatctgattaccccgagcgccagcaccagcgactatgtcgtatgggtaaagctccctcttcggagggagcatcgggg

SEQ ID NO: 20867 - RNA, 88 nt, synthetic construct
  misc_feature 1..88: note = engineered ribonucleic acid scaffold (ERS) sequence
  source 1..88: mol_type = other RNA
actggcgctcctatctgattactccgagcgccagcaccagcgactatgtcgtatgggtaaagctccctcttcggagggagcatcggag

SEQ ID NO: 20868 - RNA, 88 nt, synthetic construct
  misc_feature 1..88: note = engineered ribonucleic acid scaffold (ERS) sequence
  source 1..88: mol_type = other RNA
actggcgctgggatctgattaccccgagcgccagcaccagcgactatgtcgtatgggtaaagctccctcttcggagggagcatcgggg

SEQ ID NO: 20869 - RNA, 88 nt, synthetic construct
  misc_feature 1..88: note = engineered ribonucleic acid scaffold (ERS) sequence
  source 1..88: mol_type = other RNA
actggcgctggtatctgattactccgagcgccagcaccagcgactatgtcgtatgggtaaagctccctcttcggagggagcatcggag

SEQ ID NO: 20870 - RNA, 88 nt, synthetic construct
  misc_feature 1..88: note = engineered ribonucleic acid scaffold (ERS) sequence
  source 1..88: mol_type = other RNA
actggcgcttccatctgattaccctgagcgccagcaccagcgactatgtcgtatgggtaaagctccctcttcggagggagcatcaggg

SEQ ID NO: 20871 - RNA, 88 nt, synthetic construct
  misc_feature 1..88: note = engineered ribonucleic acid scaffold (ERS) sequence
  source 1..88: mol_type = other RNA
actggcgcttggatctgattaccctgagcgccagcaccagcgactatgtcgtatgggtaaagctccctcttcggagggagcatcaggg

SEQ ID NO: 20872 - RNA, 88 nt, synthetic construct
  misc_feature 1..88: note = engineered ribonucleic acid scaffold (ERS) sequence
  source 1..88: mol_type = other RNA
actggcgcttgtatctgattactctgagcgccagcaccagcgactatgtcgtatgggtaaagctccctcttcggagggagcatcagag

SEQ ID NO: 20873 - RNA, 88 nt, synthetic construct
  misc_feature 1..88: note = engineered ribonucleic acid scaffold (ERS) sequence
  source 1..88: mol_type = other RNA
actggcgcttttatctgattactttgagcgccagcaccagcgactatgtcgtatgggtaaagctccctcttcggagggagcatcagag

SEQ ID NO: 20874 - RNA, 88 nt, synthetic construct
  misc_feature 1..88: note = engineered ribonucleic acid scaffold (ERS) sequence
  source 1..88: mol_type = other RNA
actggcgcttttatctgattactctgagcgccagcaccagcgactatgtcgtatgggtaaagctccctcttcggagggagcatcagag

SEQ ID NO: 20875 - RNA, 88 nt, synthetic construct
  misc_feature 1..88: note = engineered ribonucleic acid scaffold (ERS) sequence
  source 1..88: mol_type = other RNA
actggcgcttttatctgattactctgagcgccagcaccagcgactatgtcgtatgggtaaagctccctcttcggagggagcatcaaag

SEQ ID NO: 20876 - RNA, 88 nt, synthetic construct
  misc_feature 1..88: note = engineered ribonucleic acid scaffold (ERS) sequence
  source 1..88: mol_type = other RNA
actggcgcttctatctgattactctgagcgccagcaccagcgactatgtcgtatgggtaaagctccctcttcggagggagcctcagag

SEQ ID NO: 20877 - RNA, 88 nt, synthetic construct
  misc_feature 1..88: note = engineered ribonucleic acid scaffold (ERS) sequence
  source 1..88: mol_type = other RNA
actggcgcttctatctgattactctgagcgccagcaccagcgactatgtcgtatgggtaaagctccctcttcggagggagcgtcagag

SEQ ID NO: 20878 - RNA, 88 nt, synthetic construct
  misc_feature 1..88: note = engineered ribonucleic acid scaffold (ERS) sequence
  source 1..88: mol_type = other RNA
actggcgcttctatctgattactctgagcgccagcaccagcgactatgtcgtatgggtaaagctccctcttcggagggagcatcaaag

SEQ ID NO: 20879 - RNA, 88 nt, synthetic construct
  misc_feature 1..88: note = engineered ribonucleic acid scaffold (ERS) sequence
  source 1..88: mol_type = other RNA
actggcgcttctatctgattactctcagcgccatgaccagcgactatgtcgtatgggtaaagctccctcttcggagggagcatcagac

SEQ ID NO: 20880 - RNA, 88 nt, synthetic construct
  misc_feature 1..88: note = engineered ribonucleic acid scaffold (ERS) sequence
  source 1..88: mol_type = other RNA
actggcgcttctatctgattactttgagcgccatgaccagcgactatgtcgtatgggtaaagctccctcttcggagggagcatcagag

SEQ ID NO: 20881 - RNA, 88 nt, synthetic construct
  misc_feature 1..88: note = engineered ribonucleic acid scaffold (ERS) sequence
  source 1..88: mol_type = other RNA
actggcgcttctatctgattactttgagcgccatgaccagcgactatgtcgtatgggtaaagctccctcttcggagggagcatcaaag

SEQ ID NO: 20882 - RNA, 88 nt, synthetic construct
  misc_feature 1..88: note = engineered ribonucleic acid scaffold (ERS) sequence
  source 1..88: mol_type = other RNA
actggcgcttctatctgattagtctcagcgccatgaccagcgactatgtcgtatgggtaaagctccctcttcggagggagcatgagac

SEQ ID NO: 20883 - RNA, 88 nt, synthetic construct
  misc_feature 1..88: note = engineered ribonucleic acid scaffold (ERS) sequence
  source 1..88: mol_type = other RNA
actggcgcttctatctgattagtctgagcgccatgaccagcgactatgtcgtatgggtaaagctccctcttcggagggagcatcagac

SEQ ID NO: 20884 - RNA, 88 nt, synthetic construct
  misc_feature 1..88: note = engineered ribonucleic acid scaffold (ERS) sequence
  source 1..88: mol_type = other RNA
actggcgcttctatctgattactctcagcgccatgaccagcgactatgtcgtatgggtaaagctccctcttcggagggagcatgagag

SEQ ID NO: 20885 - RNA, 88 nt, synthetic construct
  misc_feature 1..88: note = engineered ribonucleic acid scaffold (ERS) sequence
  source 1..88: mol_type = other RNA
actggcgcttctatctgattactctcagcgccatgaccagcgactatgtcgtatggctaaagctccctcttcggagggagcatcagac

SEQ ID NO: 20886 - RNA, 88 nt, synthetic construct
  misc_feature 1..88: note = engineered ribonucleic acid scaffold (ERS) sequence
  source 1..88: mol_type = other RNA
actggcgcttctatctgattactttgagcgccatgaccagcgactatgtcgtatggctaaagctccctcttcggagggagcatcagag

SEQ ID NO: 20887 - RNA, 88 nt, synthetic construct
  misc_feature 1..88: note = engineered ribonucleic acid scaffold (ERS) sequence
  source 1..88: mol_type = other RNA
actggcgcttctatctgattactttgagcgccatgaccagcgactatgtcgtatggctaaagctccctcttcggagggagcatcaaag

SEQ ID NO: 20888 - RNA, 88 nt, synthetic construct
  misc_feature 1..88: note = engineered ribonucleic acid scaffold (ERS) sequence
  source 1..88: mol_type = other RNA
actggcgcttctatctgattagtctcagcgccatgaccagcgactatgtcgtatggctaaagctccctcttcggagggagcatgagac

SEQ ID NO: 20889 - RNA, 88 nt, synthetic construct
  misc_feature 1..88: note = engineered ribonucleic acid scaffold (ERS) sequence
  source 1..88: mol_type = other RNA
actggcgcttctatctgattagtctgagcgccatgaccagcgactatgtcgtatggctaaagctccctcttcggagggagcatcagac

SEQ ID NO: 20890 - RNA, 88 nt, synthetic construct
  misc_feature 1..88: note = engineered ribonucleic acid scaffold (ERS) sequence
  source 1..88: mol_type = other RNA
actggcgcttctatctgattactctcagcgccatgaccagcgactatgtcgtatggctaaagctccctcttcggagggagcatgagag

SEQ ID NO: 20891 - RNA, 88 nt, synthetic construct
  misc_feature 1..88: note = engineered ribonucleic acid scaffold (ERS) sequence
  source 1..88: mol_type = other RNA
actggcgctcccatctgattaccccgagcgccatgaccagcgactatgtcgtatggctaaagctccctcttcggagggagcatcgggg

SEQ ID NO: 20892 - RNA, 88 nt, synthetic construct
  misc_feature 1..88: note = engineered ribonucleic acid scaffold (ERS) sequence
  source 1..88: mol_type = other RNA
actggcgctcctatctgattactccgagcgccatgaccagcgactatgtcgtatggctaaagctccctcttcggagggagcatcggag

SEQ ID NO: 20893 - RNA, 88 nt, synthetic construct
  misc_feature 1..88: note = engineered ribonucleic acid scaffold (ERS) sequence
  source 1..88: mol_type = other RNA
actggcgctgggatctgattaccccgagcgccatgaccagcgactatgtcgtatggctaaagctccctcttcggagggagcatcgggg

SEQ ID NO: 20894 - RNA, 88 nt, synthetic construct
  misc_feature 1..88: note = engineered ribonucleic acid scaffold (ERS) sequence
  source 1..88: mol_type = other RNA
actggcgctggtatctgattactccgagcgccatgaccagcgactatgtcgtatggctaaagctccctcttcggagggagcatcggag

SEQ ID NO: 20895 - RNA, 88 nt, synthetic construct
  misc_feature 1..88: note = engineered ribonucleic acid scaffold (ERS) sequence
  source 1..88: mol_type = other RNA
actggcgcttccatctgattaccctgagcgccatgaccagcgactatgtcgtatggctaaagctccctcttcggagggagcatcaggg

SEQ ID NO: 20896 - RNA, 88 nt, synthetic construct
  misc_feature 1..88: note = engineered ribonucleic acid scaffold (ERS) sequence
  source 1..88: mol_type = other RNA
actggcgcttggatctgattaccctgagcgccatgaccagcgactatgtcgtatggctaaagctccctcttcggagggagcatcaggg

SEQ ID NO: 20897 - RNA, 88 nt, synthetic construct
  misc_feature 1..88: note = engineered ribonucleic acid scaffold (ERS) sequence
  source 1..88: mol_type = other RNA
actggcgcttgtatctgattactctgagcgccatgaccagcgactatgtcgtatggctaaagctccctcttcggagggagcatcagag

SEQ ID NO: 20898 - RNA, 88 nt, synthetic construct
  misc_feature 1..88: note = engineered ribonucleic acid scaffold (ERS) sequence
  source 1..88: mol_type = other RNA
actggcgcttttatctgattactttgagcgccatgaccagcgactatgtcgtatggctaaagctccctcttcggagggagcatcagag

SEQ ID NO: 20899 - RNA, 88 nt, synthetic construct
  misc_feature 1..88: note = engineered ribonucleic acid scaffold (ERS) sequence
  source 1..88: mol_type = other RNA
actggcgcttttatctgattactctgagcgccatgaccagcgactatgtcgtatggctaaagctccctcttcggagggagcatcagag

SEQ ID NO: 20900 - RNA, 88 nt, synthetic construct
  misc_feature 1..88: note = engineered ribonucleic acid scaffold (ERS) sequence
  source 1..88: mol_type = other RNA
actggcgcttttatctgattactctgagcgccatgaccagcgactatgtcgtatggctaaagctccctcttcggagggagcatcaaag

SEQ ID NO: 20901 - RNA, 88 nt, synthetic construct
  misc_feature 1..88: note = engineered ribonucleic acid scaffold (ERS) sequence
  source 1..88: mol_type = other RNA
actggcgcttctatctgattactctgagcgccatgaccagcgactatgtcgtatggctaaagctccctcttcggagggagcctcagag

SEQ ID NO: 20902 - RNA, 88 nt, synthetic construct
  misc_feature 1..88: note = engineered ribonucleic acid scaffold (ERS) sequence
  source 1..88: mol_type = other RNA
actggcgcttctatctgattactctgagcgccatgaccagcgactatgtcgtatggctaaagctccctcttcggagggagcgtcagag

SEQ ID NO: 20903 - RNA, 88 nt, synthetic construct
  misc_feature 1..88: note = engineered ribonucleic acid scaffold (ERS) sequence
  source 1..88: mol_type = other RNA
actggcgcttctatctgattactctgagcgccatgaccagcgactatgtcgtatggctaaagctccctcttcggagggagcatcaaag

SEQ ID NO: 20904 - RNA, 89 nt, synthetic construct
  misc_feature 1..89: note = engineered ribonucleic acid scaffold (ERS) sequence
  source 1..89: mol_type = other RNA
actggcgcttctatctgattactctcagcgccatgaccagcgactatgtcgtatgggctaaagctccctcttcggagggagcatcagac

SEQ ID NO: 20905 - RNA, 89 nt, synthetic construct
  misc_feature 1..89: note = engineered ribonucleic acid scaffold (ERS) sequence
  source 1..89: mol_type = other RNA
actggcgcttctatctgattactttgagcgccatgaccagcgactatgtcgtatgggctaaagctccctcttcggagggagcatcagag

SEQ ID NO: 20906 - RNA, 89 nt, synthetic construct
  misc_feature 1..89: note = engineered ribonucleic acid scaffold (ERS) sequence
  source 1..89: mol_type = other RNA
actggcgcttctatctgattactttgagcgccatgaccagcgactatgtcgtatgggctaaagctccctcttcggagggagcatcaaag

SEQ ID NO: 20907 - RNA, 89 nt, synthetic construct
  misc_feature 1..89: note = engineered ribonucleic acid scaffold (ERS) sequence
  source 1..89: mol_type = other RNA
actggcgcttctatctgattagtctcagcgccatgaccagcgactatgtcgtatgggctaaagctccctcttcggagggagcatgagac

SEQ ID NO: 20908 - RNA, 89 nt, synthetic construct
  misc_feature 1..89: note = engineered ribonucleic acid scaffold (ERS) sequence
  source 1..89: mol_type = other RNA
actggcgcttctatctgattagtctgagcgccatgaccagcgactatgtcgtatgggctaaagctccctcttcggagggagcatcagac

SEQ ID NO: 20909 - RNA, 89 nt, synthetic construct
  misc_feature 1..89: note = engineered ribonucleic acid scaffold (ERS) sequence
  source 1..89: mol_type = other RNA
actggcgcttctatctgattactctcagcgccatgaccagcgactatgtcgtatgggctaaagctccctcttcggagggagcatgagag

SEQ ID NO: 20910 - RNA, 89 nt, synthetic construct
  misc_feature 1..89: note = engineered ribonucleic acid scaffold (ERS) sequence
  source 1..89: mol_type = other RNA
actggcgctcccatctgattaccccgagcgccatgaccagcgactatgtcgtatgggctaaagctccctcttcggagggagcatcgggg

SEQ ID NO: 20911 - RNA, 89 nt, synthetic construct
  misc_feature 1..89: note = engineered ribonucleic acid scaffold (ERS) sequence
  source 1..89: mol_type = other RNA
actggcgctcctatctgattactccgagcgccatgaccagcgactatgtcgtatgggctaaagctccctcttcggagggagcatcggag

SEQ ID NO: 20912 - RNA, 89 nt, synthetic construct
  misc_feature 1..89: note = engineered ribonucleic acid scaffold (ERS) sequence
  source 1..89: mol_type = other RNA
actggcgctgggatctgattaccccgagcgccatgaccagcgactatgtcgtatgggctaaagctccctcttcggagggagcatcgggg

SEQ ID NO: 20913 - RNA, 89 nt, synthetic construct
  misc_feature 1..89: note = engineered ribonucleic acid scaffold (ERS) sequence
  source 1..89: mol_type = other RNA
actggcgctggtatctgattactccgagcgccatgaccagcgactatgtcgtatgggctaaagctccctcttcggagggagcatcggag

SEQ ID NO: 20914 - RNA, 89 nt, synthetic construct
  misc_feature 1..89: note = engineered ribonucleic acid scaffold (ERS) sequence
  source 1..89: mol_type = other RNA
actggcgcttccatctgattaccctgagcgccatgaccagcgactatgtcgtatgggctaaagctccctcttcggagggagcatcaggg

SEQ ID NO: 20915 - RNA, 89 nt, synthetic construct
  misc_feature 1..89: note = engineered ribonucleic acid scaffold (ERS) sequence
  source 1..89: mol_type = other RNA
actggcgcttggatctgattaccctgagcgccatgaccagcgactatgtcgtatgggctaaagctccctcttcggagggagcatcaggg

SEQ ID NO: 20916 - RNA, 89 nt, synthetic construct
  misc_feature 1..89: note = engineered ribonucleic acid scaffold (ERS) sequence
  source 1..89: mol_type = other RNA
actggcgcttgtatctgattactctgagcgccatgaccagcgactatgtcgtatgggctaaagctccctcttcggagggagcatcagag

SEQ ID NO: 20917 - RNA, 89 nt, synthetic construct
  misc_feature 1..89: note = engineered ribonucleic acid scaffold (ERS) sequence
  source 1..89: mol_type = other RNA
actggcgcttttatctgattactttgagcgccatgaccagcgactatgtcgtatgggctaaagctccctcttcggagggagcatcagag

SEQ ID NO: 20918 - RNA, 89 nt, synthetic construct
  misc_feature 1..89: note = engineered ribonucleic acid scaffold (ERS) sequence
  source 1..89: mol_type = other RNA
actggcgcttttatctgattactctgagcgccatgaccagcgactatgtcgtatgggctaaagctccctcttcggagggagcatcagag

SEQ ID NO: 20919 - RNA, 89 nt, synthetic construct
  misc_feature 1..89: note = engineered ribonucleic acid scaffold (ERS) sequence
  source 1..89: mol_type = other RNA
actggcgcttttatctgattactctgagcgccatgaccagcgactatgtcgtatgggctaaagctccctcttcggagggagcatcaaag

SEQ ID NO: 20920 - RNA, 89 nt, synthetic construct
  misc_feature 1..89: note = engineered ribonucleic acid scaffold (ERS) sequence
  source 1..89: mol_type = other RNA
actggcgcttctatctgattactctgagcgccatgaccagcgactatgtcgtatgggctaaagctccctcttcggagggagcctcagag

SEQ ID NO: 20921 - RNA, 89 nt, synthetic construct
  misc_feature 1..89: note = engineered ribonucleic acid scaffold (ERS) sequence
  source 1..89: mol_type = other RNA
actggcgcttctatctgattactctgagcgccatgaccagcgactatgtcgtatgggctaaagctccctcttcggagggagcgtcagag

SEQ ID NO: 20922 - RNA, 89 nt, synthetic construct
  misc_feature 1..89: note = engineered ribonucleic acid scaffold (ERS) sequence
  source 1..89: mol_type = other RNA
actggcgcttctatctgattactctgagcgccatgaccagcgactatgtcgtatgggctaaagctccctcttcggagggagcatcaaag

SEQ ID NO: 20923 - RNA, 88 nt, synthetic construct
  misc_feature 1..88: note = engineered ribonucleic acid scaffold (ERS) sequence
  source 1..88: mol_type = other RNA
actggcgctcccatctgattaccccgagcgccatgaccagcgactatgtcgtatgggtaaagctccctcttcggagggagcatcgggg

SEQ ID NO: 20924 - RNA, 88 nt, synthetic construct
  misc_feature 1..88: note = engineered ribonucleic acid scaffold (ERS) sequence
  source 1..88: mol_type = other RNA
actggcgctcctatctgattactccgagcgccatgaccagcgactatgtcgtatgggtaaagctccctcttcggagggagcatcggag

SEQ ID NO: 20925 - RNA, 88 nt, synthetic construct
  misc_feature 1..88: note = engineered ribonucleic acid scaffold (ERS) sequence
  source 1..88: mol_type = other RNA
actggcgctgggatctgattaccccgagcgccatgaccagcgactatgtcgtatgggtaaagctccctcttcggagggagcatcgggg

SEQ ID NO: 20926 - RNA, 88 nt, synthetic construct
  misc_feature 1..88: note = engineered ribonucleic acid scaffold (ERS) sequence
  source 1..88: mol_type = other RNA
actggcgctggtatctgattactccgagcgccatgaccagcgactatgtcgtatgggtaaagctccctcttcggagggagcatcggag

SEQ ID NO: 20927 - RNA, 88 nt, synthetic construct
  misc_feature 1..88: note = engineered ribonucleic acid scaffold (ERS) sequence
  source 1..88: mol_type = other RNA
actggcgcttccatctgattaccctgagcgccatgaccagcgactatgtcgtatgggtaaagctccctcttcggagggagcatcaggg

SEQ ID NO: 20928 - RNA, 88 nt, synthetic construct
  misc_feature 1..88: note = engineered ribonucleic acid scaffold (ERS) sequence
  source 1..88: mol_type = other RNA
actggcgcttggatctgattaccctgagcgccatgaccagcgactatgtcgtatgggtaaagctccctcttcggagggagcatcaggg

SEQ ID NO: 20929 - RNA, 88 nt, synthetic construct
  misc_feature 1..88: note = engineered ribonucleic acid scaffold (ERS) sequence
  source 1..88: mol_type = other RNA
actggcgcttgtatctgattactctgagcgccatgaccagcgactatgtcgtatgggtaaagctccctcttcggagggagcatcagag

SEQ ID NO: 20930 - RNA, 88 nt, synthetic construct
  misc_feature 1..88: note = engineered ribonucleic acid scaffold (ERS) sequence
  source 1..88: mol_type = other RNA
actggcgcttttatctgattactttgagcgccatgaccagcgactatgtcgtatgggtaaagctccctcttcggagggagcatcagag

SEQ ID NO: 20931 - RNA, 88 nt, synthetic construct
  misc_feature 1..88: note = engineered ribonucleic acid scaffold (ERS) sequence
  source 1..88: mol_type = other RNA
actggcgcttttatctgattactctgagcgccatgaccagcgactatgtcgtatgggtaaagctccctcttcggagggagcatcagag

SEQ ID NO: 20932 - RNA, 88 nt, synthetic construct
  misc_feature 1..88: note = engineered ribonucleic acid scaffold (ERS) sequence
  source 1..88: mol_type = other RNA
actggcgcttttatctgattactctgagcgccatgaccagcgactatgtcgtatgggtaaagctccctcttcggagggagcatcaaag

SEQ ID NO: 20933 - RNA, 88 nt, synthetic construct
  misc_feature 1..88: note = engineered ribonucleic acid scaffold (ERS) sequence
  source 1..88: mol_type = other RNA
actggcgcttctatctgattactctgagcgccatgaccagcgactatgtcgtatgggtaaagctccctcttcggagggagcctcagag

SEQ ID NO: 20934 - RNA, 88 nt, synthetic construct
  misc_feature 1..88: note = engineered ribonucleic acid scaffold (ERS) sequence
  source 1..88: mol_type = other RNA
actggcgcttctatctgattactctgagcgccatgaccagcgactatgtcgtatgggtaaagctccctcttcggagggagcgtcagag

SEQ ID NO: 20935 - RNA, 88 nt, synthetic construct
  misc_feature 1..88: note = engineered ribonucleic acid scaffold (ERS) sequence
  source 1..88: mol_type = other RNA
actggcgcttctatctgattactctgagcgccatgaccagcgactatgtcgtatgggtaaagctccctcttcggagggagcatcaaag

SEQ ID NO: 20936 - RNA, 88 nt, synthetic construct
  misc_feature 1..88: note = engineered ribonucleic acid scaffold (ERS) sequence
  source 1..88: mol_type = other RNA
actggcgcttctatctgattactctcagcgccatccccagcgactatgtcgtatgggtaaagctccctcttcggagggagcatcagac

SEQ ID NO: 20937 - RNA, 88 nt, synthetic construct
  misc_feature 1..88: note = engineered ribonucleic acid scaffold (ERS) sequence
  source 1..88: mol_type = other RNA
actggcgcttctatctgattactttgagcgccatccccagcgactatgtcgtatgggtaaagctccctcttcggagggagcatcagag

SEQ ID NO: 20938 - RNA, 88 nt, synthetic construct
  misc_feature 1..88: note = engineered ribonucleic acid scaffold (ERS) sequence
  source 1..88: mol_type = other RNA
actggcgcttctatctgattactttgagcgccatccccagcgactatgtcgtatgggtaaagctccctcttcggagggagcatcaaag

SEQ ID NO: 20939 - RNA, 88 nt, synthetic construct
  misc_feature 1..88: note = engineered ribonucleic acid scaffold (ERS) sequence
  source 1..88: mol_type = other RNA
actggcgcttctatctgattagtctcagcgccatccccagcgactatgtcgtatgggtaaagctccctcttcggagggagcatgagac

SEQ ID NO: 20940 - RNA, 88 nt, synthetic construct
  misc_feature 1..88: note = engineered ribonucleic acid scaffold (ERS) sequence
  source 1..88: mol_type = other RNA
actggcgcttctatctgattagtctgagcgccatccccagcgactatgtcgtatgggtaaagctccctcttcggagggagcatcagac

SEQ ID NO: 20941 - RNA, 88 nt, synthetic construct
  misc_feature 1..88: note = engineered ribonucleic acid scaffold (ERS) sequence
  source 1..88: mol_type = other RNA
actggcgcttctatctgattactctcagcgccatccccagcgactatgtcgtatgggtaaagctccctcttcggagggagcatgagag

SEQ ID NO: 20942 - RNA, 88 nt, synthetic construct
  misc_feature 1..88: note = engineered ribonucleic acid scaffold (ERS) sequence
  source 1..88: mol_type = other RNA
actggcgctcccatctgattaccccgagcgccatccccagcgactatgtcgtatgggtaaagctccctcttcggagggagcatcgggg

SEQ ID NO: 20943 - RNA, 88 nt, synthetic construct
  misc_feature 1..88: note = engineered ribonucleic acid scaffold (ERS) sequence
  source 1..88: mol_type = other RNA
actggcgctcctatctgattactccgagcgccatccccagcgactatgtcgtatgggtaaagctccctcttcggagggagcatcggag

SEQ ID NO: 20944 - RNA, 88 nt, synthetic construct
  misc_feature 1..88: note = engineered ribonucleic acid scaffold (ERS) sequence
  source 1..88: mol_type = other RNA
actggcgctgggatctgattaccccgagcgccatccccagcgactatgtcgtatgggtaaagctccctcttcggagggagcatcgggg

SEQ ID NO: 20945 - RNA, 88 nt, synthetic construct
  misc_feature 1..88: note = engineered ribonucleic acid scaffold (ERS) sequence
  source 1..88: mol_type = other RNA
actggcgctggtatctgattactccgagcgccatccccagcgactatgtcgtatgggtaaagctccctcttcggagggagcatcggag

SEQ ID NO: 20946 - RNA, 88 nt, synthetic construct
  misc_feature 1..88: note = engineered ribonucleic acid scaffold (ERS) sequence
  source 1..88: mol_type = other RNA
actggcgcttccatctgattaccctgagcgccatccccagcgactatgtcgtatgggtaaagctccctcttcggagggagcatcaggg

SEQ ID NO: 20947 - RNA, 88 nt, synthetic construct
  misc_feature 1..88: note = engineered ribonucleic acid scaffold (ERS) sequence
  source 1..88: mol_type = other RNA
actggcgcttggatctgattaccctgagcgccatccccagcgactatgtcgtatgggtaaagctccctcttcggagggagcatcaggg

SEQ ID NO: 20948 - RNA, 88 nt, synthetic construct
  misc_feature 1..88: note = engineered ribonucleic acid scaffold (ERS) sequence
  source 1..88: mol_type = other RNA
actggcgcttgtatctgattactctgagcgccatccccagcgactatgtcgtatgggtaaagctccctcttcggagggagcatcagag

SEQ ID NO: 20949 - RNA, 88 nt, synthetic construct
  misc_feature 1..88: note = engineered ribonucleic acid scaffold (ERS) sequence
  source 1..88: mol_type = other RNA
actggcgcttttatctgattactttgagcgccatccccagcgactatgtcgtatgggtaaagctccctcttcggagggagcatcagag

SEQ ID NO: 20950 - RNA, 88 nt, synthetic construct
  misc_feature 1..88: note = engineered ribonucleic acid scaffold (ERS) sequence
  source 1..88: mol_type = other RNA
actggcgcttttatctgattactctgagcgccatccccagcgactatgtcgtatgggtaaagctccctcttcggagggagcatcagag

SEQ ID NO: 20951 - RNA, 88 nt, synthetic construct
  misc_feature 1..88: note = engineered ribonucleic acid scaffold (ERS) sequence
  source 1..88: mol_type = other RNA
actggcgcttttatctgattactctgagcgccatccccagcgactatgtcgtatgggtaaagctccctcttcggagggagcatcaaag

SEQ ID NO: 20952 - RNA, 88 nt, synthetic construct
  misc_feature 1..88: note = engineered ribonucleic acid scaffold (ERS) sequence
  source 1..88: mol_type = other RNA
actggcgcttctatctgattactctgagcgccatccccagcgactatgtcgtatgggtaaagctccctcttcggagggagcctcagag

SEQ ID NO: 20953 - RNA, 88 nt, synthetic construct
  misc_feature 1..88: note = engineered ribonucleic acid scaffold (ERS) sequence
  source 1..88: mol_type = other RNA
actggcgcttctatctgattactctgagcgccatccccagcgactatgtcgtatgggtaaagctccctcttcggagggagcgtcagag

SEQ ID NO: 20954 - RNA, 88 nt, synthetic construct
  misc_feature 1..88: note = engineered ribonucleic acid scaffold (ERS) sequence
  source 1..88: mol_type = other RNA
actggcgcttctatctgattactctgagcgccatccccagcgactatgtcgtatgggtaaagctccctcttcggagggagcatcaaag

SEQ ID NO: 20955 - RNA, 88 nt, synthetic construct
  misc_feature 1..88: note = engineered ribonucleic acid scaffold (ERS) sequence
  source 1..88: mol_type = other RNA
actggcgcttctatctgattactctcagcgccatcgccagcgactatgtcgtatgggtaaagctccctcttcggagggagcatcagac

SEQ ID NO: 20956 - RNA, 88 nt, synthetic construct
  misc_feature 1..88: note = engineered ribonucleic acid scaffold (ERS) sequence
  source 1..88: mol_type = other RNA
actggcgcttctatctgattactttgagcgccatcgccagcgactatgtcgtatgggtaaagctccctcttcggagggagcatcagag

SEQ ID NO: 20957 - RNA, 88 nt, synthetic construct
  misc_feature 1..88: note = engineered ribonucleic acid scaffold (ERS) sequence
  source 1..88: mol_type = other RNA
actggcgcttctatctgattactttgagcgccatcgccagcgactatgtcgtatgggtaaagctccctcttcggagggagcatcaaag

SEQ ID NO: 20958 - RNA, 88 nt, synthetic construct
  misc_feature 1..88: note = engineered ribonucleic acid scaffold (ERS) sequence
  source 1..88: mol_type = other RNA
actggcgcttctatctgattagtctcagcgccatcgccagcgactatgtcgtatgggtaaagctccctcttcggagggagcatgagac

SEQ ID NO: 20959 - RNA, 88 nt, synthetic construct
  misc_feature 1..88: note = engineered ribonucleic acid scaffold (ERS) sequence
  source 1..88: mol_type = other RNA
actggcgcttctatctgattagtctgagcgccatcgccagcgactatgtcgtatgggtaaagctccctcttcggagggagcatcagac

SEQ ID NO: 20960 - RNA, 88 nt, synthetic construct
  misc_feature 1..88: note = engineered ribonucleic acid scaffold (ERS) sequence
  source 1..88: mol_type = other RNA
actggcgcttctatctgattactctcagcgccatcgccagcgactatgtcgtatgggtaaagctccctcttcggagggagcatgagag

SEQ ID NO: 20961 - RNA, 89 nt, synthetic construct
  misc_feature 1..89: note = engineered ribonucleic acid scaffold (ERS) sequence
  source 1..89: mol_type = other RNA
actggcgcttctatctgattactctcagcgccatcgccagcgactatgtcgtatggcgtaaagctccctcttcggagggagcatcagac

SEQ ID NO: 20962 - RNA, 89 nt, synthetic construct
  misc_feature 1..89: note = engineered ribonucleic acid scaffold (ERS) sequence
  source 1..89: mol_type = other RNA
actggcgcttctatctgattactttgagcgccatcgccagcgactatgtcgtatggcgtaaagctccctcttcggagggagcatcagag

SEQ ID NO: 20963 - RNA, 89 nt, synthetic construct
  misc_feature 1..89: note = engineered ribonucleic acid scaffold (ERS) sequence
  source 1..89: mol_type = other RNA
actggcgcttctatctgattactttgagcgccatcgccagcgactatgtcgtatggcgtaaagctccctcttcggagggagcatcaaag

SEQ ID NO: 20964 - RNA, 89 nt, synthetic construct
  misc_feature 1..89: note = engineered ribonucleic acid scaffold (ERS) sequence
  source 1..89: mol_type = other RNA
actggcgcttctatctgattagtctcagcgccatcgccagcgactatgtcgtatggcgtaaagctccctcttcggagggagcatgagac

SEQ ID NO: 20965 - RNA, 89 nt, synthetic construct
  misc_feature 1..89: note = engineered ribonucleic acid scaffold (ERS) sequence
  source 1..89: mol_type = other RNA
actggcgcttctatctgattagtctgagcgccatcgccagcgactatgtcgtatggcgtaaagctccctcttcggagggagcatcagac

SEQ ID NO: 20966 - RNA, 89 nt, synthetic construct
  misc_feature 1..89: note = engineered ribonucleic acid scaffold (ERS) sequence
  source 1..89: mol_type = other RNA
actggcgcttctatctgattactctcagcgccatcgccagcgactatgtcgtatggcgtaaagctccctcttcggagggagcatgagag

SEQ ID NO: 20967 - RNA, 89 nt, synthetic construct
  misc_feature 1..89: note = engineered ribonucleic acid scaffold (ERS) sequence
  source 1..89: mol_type = other RNA
actggcgctcccatctgattaccccgagcgccatcgccagcgactatgtcgtatggcgtaaagctccctcttcggagggagcatcgggg

SEQ ID NO: 20968 - RNA, 89 nt, synthetic construct
  misc_feature 1..89: note = engineered ribonucleic acid scaffold (ERS) sequence
  source 1..89: mol_type = other RNA
actggcgctcctatctgattactccgagcgccatcgccagcgactatgtcgtatggcgtaaagctccctcttcggagggagcatcggag

SEQ ID NO: 20969 - RNA, 89 nt, synthetic construct
  misc_feature 1..89: note = engineered ribonucleic acid scaffold (ERS) sequence
  source 1..89: mol_type = other RNA
actggcgctgggatctgattaccccgagcgccatcgccagcgactatgtcgtatggcgtaaagctccctcttcggagggagcatcgggg

SEQ ID NO: 20970 - RNA, 89 nt, synthetic construct
  misc_feature 1..89: note = engineered ribonucleic acid scaffold (ERS) sequence
  source 1..89: mol_type = other RNA
actggcgctggtatctgattactccgagcgccatcgccagcgactatgtcgtatggcgtaaagctccctcttcggagggagcatcggag

SEQ ID NO: 20971 - RNA, 89 nt, synthetic construct
  misc_feature 1..89: note = engineered ribonucleic acid scaffold (ERS) sequence
  source 1..89: mol_type = other RNA
actggcgcttccatctgattaccctgagcgccatcgccagcgactatgtcgtatggcgtaaagctccctcttcggagggagcatcaggg

SEQ ID NO: 20972 - RNA, 89 nt, synthetic construct
  misc_feature 1..89: note = engineered ribonucleic acid scaffold (ERS) sequence
  source 1..89: mol_type = other RNA
actggcgcttggatctgattaccctgagcgccatcgccagcgactatgtcgtatggcgtaaagctccctcttcggagggagcatcaggg

SEQ ID NO: 20973 - RNA, 89 nt, synthetic construct
  misc_feature 1..89: note = engineered ribonucleic acid scaffold (ERS) sequence
  source 1..89: mol_type = other RNA
actggcgcttgtatctgattactctgagcgccatcgccagcgactatgtcgtatggcgtaaagctccctcttcggagggagcatcagag

SEQ ID NO: 20974 - RNA, 89 nt, synthetic construct
  misc_feature 1..89: note = engineered ribonucleic acid scaffold (ERS) sequence
  source 1..89: mol_type = other RNA
actggcgcttttatctgattactttgagcgccatcgccagcgactatgtcgtatggcgtaaagctccctcttcggagggagcatcagag

SEQ ID NO: 20975 - RNA, 89 nt, synthetic construct
  misc_feature 1..89: note = engineered ribonucleic acid scaffold (ERS) sequence
  source 1..89: mol_type = other RNA
actggcgcttttatctgattactctgagcgccatcgccagcgactatgtcgtatggcgtaaagctccctcttcggagggagcatcagag

SEQ ID NO: 20976 - RNA, 89 nt, synthetic construct
  misc_feature 1..89: note = engineered ribonucleic acid scaffold (ERS) sequence
  source 1..89: mol_type = other RNA
actggcgcttttatctgattactctgagcgccatcgccagcgactatgtcgtatggcgtaaagctccctcttcggagggagcatcaaag

SEQ ID NO: 20977 - RNA, 89 nt, synthetic construct
  misc_feature 1..89: note = engineered ribonucleic acid scaffold (ERS) sequence
  source 1..89: mol_type = other RNA
actggcgcttctatctgattactctgagcgccatcgccagcgactatgtcgtatggcgtaaagctccctcttcggagggagcctcagag

SEQ ID NO: 20978 - RNA, 89 nt, synthetic construct
  misc_feature 1..89: note = engineered ribonucleic acid scaffold (ERS) sequence
  source 1..89: mol_type = other RNA
actggcgcttctatctgattactctgagcgccatcgccagcgactatgtcgtatggcgtaaagctccctcttcggagggagcgtcagag

SEQ ID NO: 20979 - RNA, 89 nt, synthetic construct
  misc_feature 1..89: note = engineered ribonucleic acid scaffold (ERS) sequence
  source 1..89: mol_type = other RNA
actggcgcttctatctgattactctgagcgccatcgccagcgactatgtcgtatggcgtaaagctccctcttcggagggagcatcaaag

SEQ ID NO: 20980 - RNA, 88 nt, synthetic construct
  misc_feature 1..88: note = engineered ribonucleic acid scaffold (ERS) sequence
  source 1..88: mol_type = other RNA
actggcgctcccatctgattaccccgagcgccatcgccagcgactatgtcgtatgggtaaagctccctcttcggagggagcatcgggg

SEQ ID NO: 20981 - RNA, 88 nt, synthetic construct
  misc_feature 1..88: note = engineered ribonucleic acid scaffold (ERS) sequence
  source 1..88: mol_type = other RNA
actggcgctcctatctgattactccgagcgccatcgccagcgactatgtcgtatgggtaaagctccctcttcggagggagcatcggag

SEQ ID NO: 20982 - RNA, 88 nt, synthetic construct
  misc_feature 1..88: note = engineered ribonucleic acid scaffold (ERS) sequence
  source 1..88: mol_type = other RNA
actggcgctgggatctgattaccccgagcgccatcgccagcgactatgtcgtatgggtaaagctccctcttcggagggagcatcgggg

SEQ ID NO: 20983 - RNA, 88 nt, synthetic construct
  misc_feature 1..88: note = engineered ribonucleic acid scaffold (ERS) sequence
  source 1..88: mol_type = other RNA
actggcgctggtatctgattactccgagcgccatcgccagcgactatgtcgtatgggtaaagctccctcttcggagggagcatcggag

SEQ ID NO: 20984 - RNA, 88 nt, synthetic construct
  misc_feature 1..88: note = engineered ribonucleic acid scaffold (ERS) sequence
  source 1..88: mol_type = other RNA
actggcgcttccatctgattaccctgagcgccatcgccagcgactatgtcgtatgggtaaagctccctcttcggagggagcatcaggg

SEQ ID NO: 20985 - RNA, 88 nt, synthetic construct
  misc_feature 1..88: note = engineered ribonucleic acid scaffold (ERS) sequence
  source 1..88: mol_type = other RNA
actggcgcttggatctgattaccctgagcgccatcgccagcgactatgtcgtatgggtaaagctccctcttcggagggagcatcaggg

SEQ ID NO: 20986 - RNA, 88 nt, synthetic construct
  misc_feature 1..88: note = engineered ribonucleic acid scaffold (ERS) sequence
  source 1..88: mol_type = other RNA
actggcgcttgtatctgattactctgagcgccatcgccagcgactatgtcgtatgggtaaagctccctcttcggagggagcatcagag

SEQ ID NO: 20987 - RNA, 88 nt, synthetic construct
  misc_feature 1..88: note = engineered ribonucleic acid scaffold (ERS) sequence
  source 1..88: mol_type = other RNA
actggcgcttttatctgattactttgagcgccatcgccagcgactatgtcgtatgggtaaagctccctcttcggagggagcatcagag

SEQ ID NO: 20988 - RNA, 88 nt, synthetic construct
  misc_feature 1..88: note = engineered ribonucleic acid scaffold (ERS) sequence
  source 1..88: mol_type = other RNA
actggcgcttttatctgattactctgagcgccatcgccagcgactatgtcgtatgggtaaagctccctcttcggagggagcatcagag

SEQ ID NO: 20989 - RNA, 88 nt, synthetic construct
  misc_feature 1..88: note = engineered ribonucleic acid scaffold (ERS) sequence
  source 1..88: mol_type = other RNA
actggcgcttttatctgattactctgagcgccatcgccagcgactatgtcgtatgggtaaagctccctcttcggagggagcatcaaag

SEQ ID NO: 20990 - RNA, 88 nt, synthetic construct
  misc_feature 1..88: note = engineered ribonucleic acid scaffold (ERS) sequence
  source 1..88: mol_type = other RNA
actggcgcttctatctgattactctgagcgccatcgccagcgactatgtcgtatgggtaaagctccctcttcggagggagcctcagag

SEQ ID NO: 20991 - RNA, 88 nt, synthetic construct
  misc_feature 1..88: note = engineered ribonucleic acid scaffold (ERS) sequence
  source 1..88: mol_type = other RNA
actggcgcttctatctgattactctgagcgccatcgccagcgactatgtcgtatgggtaaagctccctcttcggagggagcgtcagag

SEQ ID NO: 20992 - RNA, 88 nt, synthetic construct
  misc_feature 1..88: note = engineered ribonucleic acid scaffold (ERS) sequence
  source 1..88: mol_type = other RNA
actggcgcttctatctgattactctgagcgccatcgccagcgactatgtcgtatgggtaaagctccctcttcggagggagcatcaaag

SEQ ID NO: 20993 - RNA, 88 nt, synthetic construct
  misc_feature 1..88: note = engineered ribonucleic acid scaffold (ERS) sequence
  source 1..88: mol_type = other RNA
actggcgcttctatctgattactctcagcgccatctccagcgactatgtcgtatgggtaaagctccctcttcggagggagcatcagac

SEQ ID NO: 20994 - RNA, 88 nt, synthetic construct
  misc_feature 1..88: note = engineered ribonucleic acid scaffold (ERS) sequence
  source 1..88: mol_type = other RNA
actggcgcttctatctgattactttgagcgccatctccagcgactatgtcgtatgggtaaagctccctcttcggagggagcatcagag

SEQ ID NO: 20995 - RNA, 88 nt, synthetic construct
  misc_feature 1..88: note = engineered ribonucleic acid scaffold (ERS) sequence
  source 1..88: mol_type = other RNA
actggcgcttctatctgattactttgagcgccatctccagcgactatgtcgtatgggtaaagctccctcttcggagggagcatcaaag

SEQ ID NO: 20996 - RNA, 88 nt, synthetic construct
  misc_feature 1..88: note = engineered ribonucleic acid scaffold (ERS) sequence
  source 1..88: mol_type = other RNA
actggcgcttctatctgattagtctcagcgccatctccagcgactatgtcgtatgggtaaagctccctcttcggagggagcatgagac

SEQ ID NO: 20997 - RNA, 88 nt, synthetic construct
  misc_feature 1..88: note = engineered ribonucleic acid scaffold (ERS) sequence
  source 1..88: mol_type = other RNA
actggcgcttctatctgattagtctgagcgccatctccagcgactatgtcgtatgggtaaagctccctcttcggagggagcatcagac

SEQ ID NO: 20998 - RNA, 88 nt, synthetic construct
  misc_feature 1..88: note = engineered ribonucleic acid scaffold (ERS) sequence
  source 1..88: mol_type = other RNA
actggcgcttctatctgattactctcagcgccatctccagcgactatgtcgtatgggtaaagctccctcttcggagggagcatgagag

SEQ ID NO: 20999 - RNA, 88 nt, synthetic construct
  misc_feature 1..88: note = engineered ribonucleic acid scaffold (ERS) sequence
  source 1..88: mol_type = other RNA
actggcgctcccatctgattaccccgagcgccatctccagcgactatgtcgtatgggtaaagctccctcttcggagggagcatcgggg

SEQ ID NO: 21000 - RNA, 88 nt, synthetic construct
  misc_feature 1..88: note = engineered ribonucleic acid scaffold (ERS) sequence
  source 1..88: mol_type = other RNA
actggcgctcctatctgattactccgagcgccatctccagcgactatgtcgtatgggtaaagctccctcttcggagggagcatcggag

SEQ ID NO: 21001 - RNA, 88 nt, synthetic construct
  misc_feature 1..88: note = engineered ribonucleic acid scaffold (ERS) sequence
  source 1..88: mol_type = other RNA
actggcgctgggatctgattaccccgagcgccatctccagcgactatgtcgtatgggtaaagctccctcttcggagggagcatcgggg

SEQ ID NO: 21002 - RNA, 88 nt, synthetic construct
  misc_feature 1..88: note = engineered ribonucleic acid scaffold (ERS) sequence
  source 1..88: mol_type = other RNA
actggcgctggtatctgattactccgagcgccatctccagcgactatgtcgtatgggtaaagctccctcttcggagggagcatcggag

SEQ ID NO: 21003 - RNA, 88 nt, synthetic construct
  misc_feature 1..88: note = engineered ribonucleic acid scaffold (ERS) sequence
  source 1..88: mol_type = other RNA
actggcgcttccatctgattaccctgagcgccatctccagcgactatgtcgtatgggtaaagctccctcttcggagggagcatcaggg

SEQ ID NO: 21004 - RNA, 88 nt, synthetic construct
  misc_feature 1..88: note = engineered ribonucleic acid scaffold (ERS) sequence
  source 1..88: mol_type = other RNA
actggcgcttggatctgattaccctgagcgccatctccagcgactatgtcgtatgggtaaagctccctcttcggagggagcatcaggg

SEQ ID NO: 21005 - RNA, 88 nt, synthetic construct
  misc_feature 1..88: note = engineered ribonucleic acid scaffold (ERS) sequence
  source 1..88: mol_type = other RNA
actggcgcttgtatctgattactctgagcgccatctccagcgactatgtcgtatgggtaaagctccctcttcggagggagcatcagag

SEQ ID NO: 21006 - RNA, 88 nt, synthetic construct
  misc_feature 1..88: note = engineered ribonucleic acid scaffold (ERS) sequence
  source 1..88: mol_type = other RNA
actggcgcttttatctgattactttgagcgccatctccagcgactatgtcgtatgggtaaagctccctcttcggagggagcatcagag

SEQ ID NO: 21007 - RNA, 88 nt, synthetic construct
  misc_feature 1..88: note = engineered ribonucleic acid scaffold (ERS) sequence
  source 1..88: mol_type = other RNA
actggcgcttttatctgattactctgagcgccatctccagcgactatgtcgtatgggtaaagctccctcttcggagggagcatcagag

SEQ ID NO: 21008 - RNA, 88 nt, synthetic construct
  misc_feature 1..88: note = engineered ribonucleic acid scaffold (ERS) sequence
  source 1..88: mol_type = other RNA
actggcgcttttatctgattactctgagcgccatctccagcgactatgtcgtatgggtaaagctccctcttcggagggagcatcaaag

SEQ ID NO: 21009 - RNA, 88 nt, synthetic construct
  misc_feature 1..88: note = engineered ribonucleic acid scaffold (ERS) sequence
  source 1..88: mol_type = other RNA
actggcgcttctatctgattactctgagcgccatctccagcgactatgtcgtatgggtaaagctccctcttcggagggagcctcagag

SEQ ID NO: 21010 - RNA, 88 nt, synthetic construct
  misc_feature 1..88: note = engineered ribonucleic acid scaffold (ERS) sequence
  source 1..88: mol_type = other RNA
actggcgcttctatctgattactctgagcgccatctccagcgactatgtcgtatgggtaaagctccctcttcggagggagcgtcagag

SEQ ID NO: 21011 - RNA, 88 nt, synthetic construct
  misc_feature 1..88: note = engineered ribonucleic acid scaffold (ERS) sequence
  source 1..88: mol_type = other RNA
actggcgcttctatctgattactctgagcgccatctccagcgactatgtcgtatgggtaaagctccctcttcggagggagcatcaaag

SEQ ID NO: 21012 - RNA, 88 nt, synthetic construct
  misc_feature 1..88: note = engineered ribonucleic acid scaffold (ERS) sequence
  source 1..88: mol_type = other RNA
actggcgcttctatctgattactctcagcgccatcacctgcgactatgtcgtaagggtaaagctccctcttcggagggagcatcagac

SEQ ID NO: 21013 - RNA, 88 nt, synthetic construct
  misc_feature 1..88: note = engineered ribonucleic acid scaffold (ERS) sequence
  source 1..88: mol_type = other RNA
actggcgcttctatctgattactttgagcgccatcacctgcgactatgtcgtaagggtaaagctccctcttcggagggagcatcagag

SEQ ID NO: 21014 - RNA, 88 nt, synthetic construct
  misc_feature 1..88: note = engineered ribonucleic acid scaffold (ERS) sequence
  source 1..88: mol_type = other RNA
actggcgcttctatctgattactttgagcgccatcacctgcgactatgtcgtaagggtaaagctccctcttcggagggagcatcaaag

SEQ ID NO: 21015 - RNA, 88 nt, synthetic construct
  misc_feature 1..88: note = engineered ribonucleic acid scaffold (ERS) sequence
  source 1..88: mol_type = other RNA
actggcgcttctatctgattagtctcagcgccatcacctgcgactatgtcgtaagggtaaagctccctcttcggagggagcatgagac

SEQ ID NO: 21016 - RNA, 88 nt, synthetic construct
  misc_feature 1..88: note = engineered ribonucleic acid scaffold (ERS) sequence
  source 1..88: mol_type = other RNA
actggcgcttctatctgattagtctgagcgccatcacctgcgactatgtcgtaagggtaaagctccctcttcggagggagcatcagac

SEQ ID NO: 21017 - RNA, 88 nt, synthetic construct
  misc_feature 1..88: note = engineered ribonucleic acid scaffold (ERS) sequence
  source 1..88: mol_type = other RNA
actggcgcttctatctgattactctcagcgccatcacctgcgactatgtcgtaagggtaaagctccctcttcggagggagcatgagag

SEQ ID NO: 21018 - RNA, 88 nt, synthetic construct
  misc_feature 1..88: note = engineered ribonucleic acid scaffold (ERS) sequence
  source 1..88: mol_type = other RNA
actggcgctcccatctgattaccccgagcgccatcacctgcgactatgtcgtaagggtaaagctccctcttcggagggagcatcgggg

SEQ ID NO: 21019 - RNA, 88 nt, synthetic construct
  misc_feature 1..88: note = engineered ribonucleic acid scaffold (ERS) sequence
  source 1..88: mol_type = other RNA
actggcgctcctatctgattactccgagcgccatcacctgcgactatgtcgtaagggtaaagctccctcttcggagggagcatcggag

SEQ ID NO: 21020 - RNA, 88 nt, synthetic construct
  misc_feature 1..88: note = engineered ribonucleic acid scaffold (ERS) sequence
  source 1..88: mol_type = other RNA
actggcgctgggatctgattaccccgagcgccatcacctgcgactatgtcgtaagggtaaagctccctcttcggagggagcatcgggg

SEQ ID NO: 21021 - RNA, 88 nt, synthetic construct
  misc_feature 1..88: note = engineered ribonucleic acid scaffold (ERS) sequence
  source 1..88: mol_type = other RNA
actggcgctggtatctgattactccgagcgccatcacctgcgactatgtcgtaagggtaaagctccctcttcggagggagcatcggag

SEQ ID NO: 21022 - RNA, 88 nt, synthetic construct
  misc_feature 1..88: note = engineered ribonucleic acid scaffold (ERS) sequence
  source 1..88: mol_type = other RNA
actggcgcttccatctgattaccctgagcgccatcacctgcgactatgtcgtaagggtaaagctccctcttcggagggagcatcaggg

SEQ ID NO: 21023 - RNA, 88 nt, synthetic construct
  misc_feature 1..88: note = engineered ribonucleic acid scaffold (ERS) sequence
  source 1..88: mol_type = other RNA
actggcgcttggatctgattaccctgagcgccatcacctgcgactatgtcgtaagggtaaagctccctcttcggagggagcatcaggg

SEQ ID NO: 21024 - RNA, 88 nt, synthetic construct
  misc_feature 1..88: note = engineered ribonucleic acid scaffold (ERS) sequence
  source 1..88: mol_type = other RNA
actggcgcttgtatctgattactctgagcgccatcacctgcgactatgtcgtaagggtaaagctccctcttcggagggagcatcagag

SEQ ID NO: 21025 - RNA, 88 nt, synthetic construct
  misc_feature 1..88: note = engineered ribonucleic acid scaffold (ERS) sequence
  source 1..88: mol_type = other RNA
actggcgcttttatctgattactttgagcgccatcacctgcgactatgtcgtaagggtaaagctccctcttcggagggagcatcagag

SEQ ID NO: 21026 - RNA, 88 nt, synthetic construct
  misc_feature 1..88: note = engineered ribonucleic acid scaffold (ERS) sequence
  source 1..88: mol_type = other RNA
actggcgcttttatctgattactctgagcgccatcacctgcgactatgtcgtaagggtaaagctccctcttcggagggagcatcagag

SEQ ID NO: 21027 - RNA, 88 nt, synthetic construct
  misc_feature 1..88: note = engineered ribonucleic acid scaffold (ERS) sequence
  source 1..88: mol_type = other RNA
actggcgcttttatctgattactctgagcgccatcacctgcgactatgtcgtaagggtaaagctccctcttcggagggagcatcaaag

SEQ ID NO: 21028 - RNA, 88 nt, synthetic construct
  misc_feature 1..88: note = engineered ribonucleic acid scaffold (ERS) sequence
  source 1..88: mol_type = other RNA
actggcgcttctatctgattactctgagcgccatcacctgcgactatgtcgtaagggtaaagctccctcttcggagggagcctcagag

SEQ ID NO: 21029 - RNA, 88 nt, synthetic construct
  misc_feature 1..88: note = engineered ribonucleic acid scaffold (ERS) sequence
  source 1..88: mol_type = other RNA
actggcgcttctatctgattactctgagcgccatcacctgcgactatgtcgtaagggtaaagctccctcttcggagggagcgtcagag

SEQ ID NO: 21030 - RNA, 88 nt, synthetic construct
  misc_feature 1..88: note = engineered ribonucleic acid scaffold (ERS) sequence
  source 1..88: mol_type = other RNA
actggcgcttctatctgattactctgagcgccatcacctgcgactatgtcgtaagggtaaagctccctcttcggagggagcatcaaag

SEQ ID NO: 21031 - RNA, 88 nt, synthetic construct
  misc_feature 1..88: note = engineered ribonucleic acid scaffold (ERS) sequence
  source 1..88: mol_type = other RNA
actggcgcttctatctgattactctcagcgccatcaccagagactatgtcttatgggtaaagctccctcttcggagggagcatcagac

SEQ ID NO: 21032 - RNA, 88 nt, synthetic construct
  misc_feature 1..88: note = engineered ribonucleic acid scaffold (ERS) sequence
  source 1..88: mol_type = other RNA
actggcgcttctatctgattactttgagcgccatcaccagagactatgtcttatgggtaaagctccctcttcggagggagcatcagag

SEQ ID NO: 21033 - RNA, 88 nt, synthetic construct
  misc_feature 1..88: note = engineered ribonucleic acid scaffold (ERS) sequence
  source 1..88: mol_type = other RNA
actggcgcttctatctgattactttgagcgccatcaccagagactatgtcttatgggtaaagctccctcttcggagggagcatcaaag

SEQ ID NO: 21034 - RNA, 88 nt, synthetic construct
  misc_feature 1..88: note = engineered ribonucleic acid scaffold (ERS) sequence
  source 1..88: mol_type = other RNA
actggcgcttctatctgattagtctcagcgccatcaccagagactatgtcttatgggtaaagctccctcttcggagggagcatgagac

SEQ ID NO: 21035 - RNA, 88 nt, synthetic construct
  misc_feature 1..88: note = engineered ribonucleic acid scaffold (ERS) sequence
  source 1..88: mol_type = other RNA
actggcgcttctatctgattagtctgagcgccatcaccagagactatgtcttatgggtaaagctccctcttcggagggagcatcagac

SEQ ID NO: 21036 - RNA, 88 nt, synthetic construct
  misc_feature 1..88: note = engineered ribonucleic acid scaffold (ERS) sequence
  source 1..88: mol_type = other RNA
actggcgcttctatctgattactctcagcgccatcaccagagactatgtcttatgggtaaagctccctcttcggagggagcatgagag

SEQ ID NO: 21037 - RNA, 88 nt, synthetic construct
  misc_feature 1..88: note = engineered ribonucleic acid scaffold (ERS) sequence
  source 1..88: mol_type = other RNA
actggcgctcccatctgattaccccgagcgccatcaccagagactatgtcttatgggtaaagctccctcttcggagggagcatcgggg

SEQ ID NO: 21038 - RNA, 88 nt, synthetic construct
  misc_feature 1..88: note = engineered ribonucleic acid scaffold (ERS) sequence
  source 1..88: mol_type = other RNA
actggcgctcctatctgattactccgagcgccatcaccagagactatgtcttatgggtaaagctccctcttcggagggagcatcggag

SEQ ID NO: 21039 - RNA, 88 nt, synthetic construct
  misc_feature 1..88: note = engineered ribonucleic acid scaffold (ERS) sequence
  source 1..88: mol_type = other RNA
actggcgctgggatctgattaccccgagcgccatcaccagagactatgtcttatgggtaaagctccctcttcggagggagcatcgggg

SEQ ID NO: 21040 - RNA, 88 nt, synthetic construct
  misc_feature 1..88: note = engineered ribonucleic acid scaffold (ERS) sequence
  source 1..88: mol_type = other RNA
actggcgctggtatctgattactccgagcgccatcaccagagactatgtcttatgggtaaagctccctcttcggagggagcatcggag

SEQ ID NO: 21041 - RNA, 88 nt, synthetic construct
  misc_feature 1..88: note = engineered ribonucleic acid scaffold (ERS) sequence
  source 1..88: mol_type = other RNA
actggcgcttccatctgattaccctgagcgccatcaccagagactatgtcttatgggtaaagctccctcttcggagggagcatcaggg

SEQ ID NO: 21042 - RNA, 88 nt, synthetic construct
  misc_feature 1..88: note = engineered ribonucleic acid scaffold (ERS) sequence
  source 1..88: mol_type = other RNA
actggcgcttggatctgattaccctgagcgccatcaccagagactatgtcttatgggtaaagctccctcttcggagggagcatcaggg

SEQ ID NO: 21043 - RNA, 88 nt, synthetic construct
  misc_feature 1..88: note = engineered ribonucleic acid scaffold (ERS) sequence
  source 1..88: mol_type = other RNA
actggcgcttgtatctgattactctgagcgccatcaccagagactatgtcttatgggtaaagctccctcttcggagggagcatcagag

SEQ ID NO: 21044 - RNA, 88 nt, synthetic construct
  misc_feature 1..88: note = engineered ribonucleic acid scaffold (ERS) sequence
  source 1..88: mol_type = other RNA
actggcgcttttatctgattactttgagcgccatcaccagagactatgtcttatgggtaaagctccctcttcggagggagcatcagag

SEQ ID NO: 21045 - RNA, 88 nt, synthetic construct
  misc_feature 1..88: note = engineered ribonucleic acid scaffold (ERS) sequence
  source 1..88: mol_type = other RNA
actggcgcttttatctgattactctgagcgccatcaccagagactatgtcttatgggtaaagctccctcttcggagggagcatcagag

SEQ ID NO: 21046 - RNA, 88 nt, synthetic construct
  misc_feature 1..88: note = engineered ribonucleic acid scaffold (ERS) sequence
  source 1..88: mol_type = other RNA
actggcgcttttatctgattactctgagcgccatcaccagagactatgtcttatgggtaaagctccctcttcggagggagcatcaaag

SEQ ID NO: 21047 - RNA, 88 nt, synthetic construct
  misc_feature 1..88: note = engineered ribonucleic acid scaffold (ERS) sequence
  source 1..88: mol_type = other RNA
actggcgcttctatctgattactctgagcgccatcaccagagactatgtcttatgggtaaagctccctcttcggagggagcctcagag

SEQ ID NO: 21048 - RNA, 88 nt, synthetic construct
  misc_feature 1..88: note = engineered ribonucleic acid scaffold (ERS) sequence
  source 1..88: mol_type = other RNA
actggcgcttctatctgattactctgagcgccatcaccagagactatgtcttatgggtaaagctccctcttcggagggagcgtcagag

SEQ ID NO: 21049 - RNA, 88 nt, synthetic construct
  misc_feature 1..88: note = engineered ribonucleic acid scaffold (ERS) sequence
  source 1..88: mol_type = other RNA
actggcgcttctatctgattactctgagcgccatcaccagagactatgtcttatgggtaaagctccctcttcggagggagcatcaaag

SEQ ID NO: 21050 - RNA, 88 nt, synthetic construct
  misc_feature 1..88: note = engineered ribonucleic acid scaffold (ERS) sequence
  source 1..88: mol_type = other RNA
actggcgcttctatctgattactctcagcgccatcaccagggactatgtcctatgggtaaagctccctcttcggagggagcatcagac

SEQ ID NO: 21051 - RNA, 88 nt, synthetic construct
  misc_feature 1..88: note = engineered ribonucleic acid scaffold (ERS) sequence
  source 1..88: mol_type = other RNA
actggcgcttctatctgattactttgagcgccatcaccagggactatgtcctatgggtaaagctccctcttcggagggagcatcagag

SEQ ID NO: 21052 - RNA, 88 nt, synthetic construct
  misc_feature 1..88: note = engineered ribonucleic acid scaffold (ERS) sequence
  source 1..88: mol_type = other RNA
actggcgcttctatctgattactttgagcgccatcaccagggactatgtcctatgggtaaagctccctcttcggagggagcatcaaag

SEQ ID NO: 21053 - RNA, 88 nt, synthetic construct
  misc_feature 1..88: note = engineered ribonucleic acid scaffold (ERS) sequence
  source 1..88: mol_type = other RNA
actggcgcttctatctgattagtctcagcgccatcaccagggactatgtcctatgggtaaagctccctcttcggagggagcatgagac

SEQ ID NO: 21054 - RNA, 88 nt, synthetic construct
  misc_feature 1..88: note = engineered ribonucleic acid scaffold (ERS) sequence
  source 1..88: mol_type = other RNA
actggcgcttctatctgattagtctgagcgccatcaccagggactatgtcctatgggtaaagctccctcttcggagggagcatcagac

SEQ ID NO: 21055 - RNA, 88 nt, synthetic construct
  misc_feature 1..88: note = engineered ribonucleic acid scaffold (ERS) sequence
  source 1..88: mol_type = other RNA
actggcgcttctatctgattactctcagcgccatcaccagggactatgtcctatgggtaaagctccctcttcggagggagcatgagag

SEQ ID NO: 21056 - RNA, 88 nt, synthetic construct
  misc_feature 1..88: note = engineered ribonucleic acid scaffold (ERS) sequence
  source 1..88: mol_type = other RNA
actggcgctcccatctgattaccccgagcgccatcaccagggactatgtcctatgggtaaagctccctcttcggagggagcatcgggg

SEQ ID NO: 21057 - RNA, 88 nt, synthetic construct
  misc_feature 1..88: note = engineered ribonucleic acid scaffold (ERS) sequence
  source 1..88: mol_type = other RNA
actggcgctcctatctgattactccgagcgccatcaccagggactatgtcctatgggtaaagctccctcttcggagggagcatcggag

SEQ ID NO: 21058 - RNA, 88 nt, synthetic construct
  misc_feature 1..88: note = engineered ribonucleic acid scaffold (ERS) sequence
  source 1..88: mol_type = other RNA
actggcgctgggatctgattaccccgagcgccatcaccagggactatgtcctatgggtaaagctccctcttcggagggagcatcgggg

SEQ ID NO: 21059 - RNA, 88 nt, synthetic construct
  misc_feature 1..88: note = engineered ribonucleic acid scaffold (ERS) sequence
  source 1..88: mol_type = other RNA
actggcgctggtatctgattactccgagcgccatcaccagggactatgtcctatgggtaaagctccctcttcggagggagcatcggag

SEQ ID NO: 21060 - RNA, 88 nt, synthetic construct
  misc_feature 1..88: note = engineered ribonucleic acid scaffold (ERS) sequence
  source 1..88: mol_type = other RNA
actggcgcttccatctgattaccctgagcgccatcaccagggactatgtcctatgggtaaagctccctcttcggagggagcatcaggg

SEQ ID NO: 21061 - RNA, 88 nt, synthetic construct
  misc_feature 1..88: note = engineered ribonucleic acid scaffold (ERS) sequence
  source 1..88: mol_type = other RNA
actggcgcttggatctgattaccctgagcgccatcaccagggactatgtcctatgggtaaagctccctcttcggagggagcatcaggg

SEQ ID NO: 21062 - RNA, 88 nt, synthetic construct
  misc_feature 1..88: note = engineered ribonucleic acid scaffold (ERS) sequence
  source 1..88: mol_type = other RNA
actggcgcttgtatctgattactctgagcgccatcaccagggactatgtcctatgggtaaagctccctcttcggagggagcatcagag

SEQ ID NO: 21063 - RNA, 88 nt, synthetic construct
  misc_feature 1..88: note = engineered ribonucleic acid scaffold (ERS) sequence
  source 1..88: mol_type = other RNA
actggcgcttttatctgattactttgagcgccatcaccagggactatgtcctatgggtaaagctccctcttcggagggagcatcagag

SEQ ID NO: 21064 - RNA, 88 nt, synthetic construct
  misc_feature 1..88: note = engineered ribonucleic acid scaffold (ERS) sequence
  source 1..88: mol_type = other RNA
actggcgcttttatctgattactctgagcgccatcaccagggactatgtcctatgggtaaagctccctcttcggagggagcatcagag

SEQ ID NO: 21065 - RNA, 88 nt, synthetic construct
  misc_feature 1..88: note = engineered ribonucleic acid scaffold (ERS) sequence
  source 1..88: mol_type = other RNA
actggcgcttttatctgattactctgagcgccatcaccagggactatgtcctatgggtaaagctccctcttcggagggagcatcaaag

SEQ ID NO: 21066 - RNA, 88 nt, synthetic construct
  misc_feature 1..88: note = engineered ribonucleic acid scaffold (ERS) sequence
  source 1..88: mol_type = other RNA
actggcgcttctatctgattactctgagcgccatcaccagggactatgtcctatgggtaaagctccctcttcggagggagcctcagag

SEQ ID NO: 21067 - RNA, 88 nt, synthetic construct
  misc_feature 1..88: note = engineered ribonucleic acid scaffold (ERS) sequence
  source 1..88: mol_type = other RNA
actggcgcttctatctgattactctgagcgccatcaccagggactatgtcctatgggtaaagctccctcttcggagggagcgtcagag

SEQ ID NO: 21068 - RNA, 88 nt, synthetic construct
  misc_feature 1..88: note = engineered ribonucleic acid scaffold (ERS) sequence
  source 1..88: mol_type = other RNA
actggcgcttctatctgattactctgagcgccatcaccagggactatgtcctatgggtaaagctccctcttcggagggagcatcaaag

SEQ ID NO: 21069 - RNA, 89 nt, synthetic construct
  misc_feature 1..89: note = engineered ribonucleic acid scaffold (ERS) sequence
  source 1..89: mol_type = other RNA
actggcgcttctatctgattactctcagcgccatcaccaggcactatgtgctattgggtaaagctccctcttcggagggagcatcagac

SEQ ID NO: 21070 - RNA, 89 nt, synthetic construct
  misc_feature 1..89: note = engineered ribonucleic acid scaffold (ERS) sequence
  source 1..89: mol_type = other RNA
actggcgcttctatctgattactttgagcgccatcaccaggcactatgtgctattgggtaaagctccctcttcggagggagcatcagag

SEQ ID NO: 21071 - RNA, 89 nt, synthetic construct
  misc_feature 1..89: note = engineered ribonucleic acid scaffold (ERS) sequence
  source 1..89: mol_type = other RNA
actggcgcttctatctgattactttgagcgccatcaccaggcactatgtgctattgggtaaagctccctcttcggagggagcatcaaag

SEQ ID NO: 21072 - RNA, 89 nt, synthetic construct
  misc_feature 1..89: note = engineered ribonucleic acid scaffold (ERS) sequence
  source 1..89: mol_type = other RNA
actggcgcttctatctgattagtctcagcgccatcaccaggcactatgtgctattgggtaaagctccctcttcggagggagcatgagac

SEQ ID NO: 21073 - RNA, 89 nt, synthetic construct
  misc_feature 1..89: note = engineered ribonucleic acid scaffold (ERS) sequence
  source 1..89: mol_type = other RNA
actggcgcttctatctgattagtctgagcgccatcaccaggcactatgtgctattgggtaaagctccctcttcggagggagcatcagac

SEQ ID NO: 21074 - RNA, 89 nt, synthetic construct
  misc_feature 1..89: note = engineered ribonucleic acid scaffold (ERS) sequence
  source 1..89: mol_type = other RNA
actggcgcttctatctgattactctcagcgccatcaccaggcactatgtgctattgggtaaagctccctcttcggagggagcatgagag

SEQ ID NO: 21075 - RNA, 89 nt, synthetic construct
  misc_feature 1..89: note = engineered ribonucleic acid scaffold (ERS) sequence
  source 1..89: mol_type = other RNA
actggcgctcccatctgattaccccgagcgccatcaccaggcactatgtgctattgggtaaagctccctcttcggagggagcatcgggg

SEQ ID NO: 21076 - RNA, 89 nt, synthetic construct
  misc_feature 1..89: note = engineered ribonucleic acid scaffold (ERS) sequence
  source 1..89: mol_type = other RNA
actggcgctcctatctgattactccgagcgccatcaccaggcactatgtgctattgggtaaagctccctcttcggagggagcatcggag

SEQ ID NO: 21077 - RNA, 89 nt, synthetic construct
  misc_feature 1..89: note = engineered ribonucleic acid scaffold (ERS) sequence
  source 1..89: mol_type = other RNA
actggcgctgggatctgattaccccgagcgccatcaccaggcactatgtgctattgggtaaagctccctcttcggagggagcatcgggg

SEQ ID NO: 21078 - RNA, 89 nt, synthetic construct
  misc_feature 1..89: note = engineered ribonucleic acid scaffold (ERS) sequence
  source 1..89: mol_type = other RNA
actggcgctggtatctgattactccgagcgccatcaccaggcactatgtgctattgggtaaagctccctcttcggagggagcatcggag

SEQ ID NO: 21079 - RNA, 89 nt, synthetic construct
  misc_feature 1..89: note = engineered ribonucleic acid scaffold (ERS) sequence
  source 1..89: mol_type = other RNA
actggcgcttccatctgattaccctgagcgccatcaccaggcactatgtgctattgggtaaagctccctcttcggagggagcatcaggg

SEQ ID NO: 21080 - RNA, 89 nt, synthetic construct
  misc_feature 1..89: note = engineered ribonucleic acid scaffold (ERS) sequence
  source 1..89: mol_type = other RNA
actggcgcttggatctgattaccctgagcgccatcaccaggcactatgtgctattgggtaaagctccctcttcggagggagcatcaggg

SEQ ID NO: 21081 - RNA, 89 nt, synthetic construct
  misc_feature 1..89: note = engineered ribonucleic acid scaffold (ERS) sequence
  source 1..89: mol_type = other RNA
actggcgcttgtatctgattactctgagcgccatcaccaggcactatgtgctattgggtaaagctccctcttcggagggagcatcagag

SEQ ID NO: 21082 - RNA, 89 nt, synthetic construct
  misc_feature 1..89: note = engineered ribonucleic acid scaffold (ERS) sequence
  source 1..89: mol_type = other RNA
actggcgcttttatctgattactttgagcgccatcaccaggcactatgtgctattgggtaaagctccctcttcggagggagcatcagag

SEQ ID NO: 21083 - RNA, 89 nt, synthetic construct
  misc_feature 1..89: note = engineered ribonucleic acid scaffold (ERS) sequence
  source 1..89: mol_type = other RNA
actggcgcttttatctgattactctgagcgccatcaccaggcactatgtgctattgggtaaagctccctcttcggagggagcatcagag

SEQ ID NO: 21084 - RNA, 89 nt, synthetic construct
  misc_feature 1..89: note = engineered ribonucleic acid scaffold (ERS) sequence
  source 1..89: mol_type = other RNA
actggcgcttttatctgattactctgagcgccatcaccaggcactatgtgctattgggtaaagctccctcttcggagggagcatcaaag

SEQ ID NO: 21085 - RNA, 89 nt, synthetic construct
  misc_feature 1..89: note = engineered ribonucleic acid scaffold (ERS) sequence
  source 1..89: mol_type = other RNA
actggcgcttctatctgattactctgagcgccatcaccaggcactatgtgctattgggtaaagctccctcttcggagggagcctcagag

SEQ ID NO: 21086 - RNA, 89 nt, synthetic construct
  misc_feature 1..89: note = engineered ribonucleic acid scaffold (ERS) sequence
  source 1..89: mol_type = other RNA
actggcgcttctatctgattactctgagcgccatcaccaggcactatgtgctattgggtaaagctccctcttcggagggagcgtcagag

SEQ ID NO: 21087 - RNA, 89 nt, synthetic construct
  misc_feature 1..89: note = engineered ribonucleic acid scaffold (ERS) sequence
  source 1..89: mol_type = other RNA
actggcgcttctatctgattactctgagcgccatcaccaggcactatgtgctattgggtaaagctccctcttcggagggagcatcaaag

SEQ ID NO: 21088 - RNA, 88 nt, synthetic construct
  misc_feature 1..88: note = engineered ribonucleic acid scaffold (ERS) sequence
  source 1..88: mol_type = other RNA
actggcgcttctatctgattactctcagcgccatcaccagccactatgtggtatgggtaaagctccctcttcggagggagcatcagac

SEQ ID NO: 21089 - RNA, 88 nt, synthetic construct
  misc_feature 1..88: note = engineered ribonucleic acid scaffold (ERS) sequence
  source 1..88: mol_type = other RNA
actggcgcttctatctgattactttgagcgccatcaccagccactatgtggtatgggtaaagctccctcttcggagggagcatcagag

SEQ ID NO: 21090 - RNA, 88 nt, synthetic construct
  misc_feature 1..88: note = engineered ribonucleic acid scaffold (ERS) sequence
  source 1..88: mol_type = other RNA
actggcgcttctatctgattactttgagcgccatcaccagccactatgtggtatgggtaaagctccctcttcggagggagcatcaaag

SEQ ID NO: 21091 - RNA, 88 nt, synthetic construct
  misc_feature 1..88: note = engineered ribonucleic acid scaffold (ERS) sequence
  source 1..88: mol_type = other RNA
actggcgcttctatctgattagtctcagcgccatcaccagccactatgtggtatgggtaaagctccctcttcggagggagcatgagac

SEQ ID NO: 21092 - RNA, 88 nt, synthetic construct
  misc_feature 1..88: note = engineered ribonucleic acid scaffold (ERS) sequence
  source 1..88: mol_type = other RNA
actggcgcttctatctgattagtctgagcgccatcaccagccactatgtggtatgggtaaagctccctcttcggagggagcatcagac

SEQ ID NO: 21093 - RNA, 88 nt, synthetic construct
  misc_feature 1..88: note = engineered ribonucleic acid scaffold (ERS) sequence
  source 1..88: mol_type = other RNA
actggcgcttctatctgattactctcagcgccatcaccagccactatgtggtatgggtaaagctccctcttcggagggagcatgagag

SEQ ID NO: 21094 - RNA, 88 nt, synthetic construct
  misc_feature 1..88: note = engineered ribonucleic acid scaffold (ERS) sequence
  source 1..88: mol_type = other RNA
actggcgctcccatctgattaccccgagcgccatcaccagccactatgtggtatgggtaaagctccctcttcggagggagcatcgggg

SEQ ID NO: 21095 - RNA, 88 nt, synthetic construct
  misc_feature 1..88: note = engineered ribonucleic acid scaffold (ERS) sequence
  source 1..88: mol_type = other RNA
actggcgctcctatctgattactccgagcgccatcaccagccactatgtggtatgggtaaagctccctcttcggagggagcatcggag

SEQ ID NO: 21096 - RNA, 88 nt, synthetic construct
  misc_feature 1..88: note = engineered ribonucleic acid scaffold (ERS) sequence
  source 1..88: mol_type = other RNA
actggcgctgggatctgattaccccgagcgccatcaccagccactatgtggtatgggtaaagctccctcttcggagggagcatcgggg

SEQ ID NO: 21097 - RNA, 88 nt, synthetic construct
  misc_feature 1..88: note = engineered ribonucleic acid scaffold (ERS) sequence
  source 1..88: mol_type = other RNA
actggcgctggtatctgattactccgagcgccatcaccagccactatgtggtatgggtaaagctccctcttcggagggagcatcggag

SEQ ID NO: 21098 - RNA, 88 nt, synthetic construct
  misc_feature 1..88: note = engineered ribonucleic acid scaffold (ERS) sequence
  source 1..88: mol_type = other RNA
actggcgcttccatctgattaccctgagcgccatcaccagccactatgtggtatgggtaaagctccctcttcggagggagcatcaggg

SEQ ID NO: 21099 - RNA, 88 nt, synthetic construct
  misc_feature 1..88: note = engineered ribonucleic acid scaffold (ERS) sequence
  source 1..88: mol_type = other RNA
actggcgcttggatctgattaccctgagcgccatcaccagccactatgtggtatgggtaaagctccctcttcggagggagcatcaggg

SEQ ID NO: 21100 - RNA, 88 nt, synthetic construct
  misc_feature 1..88: note = engineered ribonucleic acid scaffold (ERS) sequence
  source 1..88: mol_type = other RNA
actggcgcttgtatctgattactctgagcgccatcaccagccactatgtggtatgggtaaagctccctcttcggagggagcatcagag

SEQ ID NO: 21101 - RNA, 88 nt, synthetic construct
  misc_feature 1..88: note = engineered ribonucleic acid scaffold (ERS) sequence
  source 1..88: mol_type = other RNA
actggcgcttttatctgattactttgagcgccatcaccagccactatgtggtatgggtaaagctccctcttcggagggagcatcagag

SEQ ID NO: 21102 - RNA, 88 nt, synthetic construct
  misc_feature 1..88: note = engineered ribonucleic acid scaffold (ERS) sequence
  source 1..88: mol_type = other RNA
actggcgcttttatctgattactctgagcgccatcaccagccactatgtggtatgggtaaagctccctcttcggagggagcatcagag

SEQ ID NO: 21103 - RNA, 88 nt, synthetic construct
  misc_feature 1..88: note = engineered ribonucleic acid scaffold (ERS) sequence
  source 1..88: mol_type = other RNA
actggcgcttttatctgattactctgagcgccatcaccagccactatgtggtatgggtaaagctccctcttcggagggagcatcaaag

SEQ ID NO: 21104 - RNA, 88 nt, synthetic construct
  misc_feature 1..88: note = engineered ribonucleic acid scaffold (ERS) sequence
  source 1..88: mol_type = other RNA
actggcgcttctatctgattactctgagcgccatcaccagccactatgtggtatgggtaaagctccctcttcggagggagcctcagag

SEQ ID NO: 21105 - RNA, 88 nt, synthetic construct
  misc_feature 1..88: note = engineered ribonucleic acid scaffold (ERS) sequence
  source 1..88: mol_type = other RNA
actggcgcttctatctgattactctgagcgccatcaccagccactatgtggtatgggtaaagctccctcttcggagggagcgtcagag

SEQ ID NO: 21106 - RNA, 88 nt, synthetic construct
  misc_feature 1..88: note = engineered ribonucleic acid scaffold (ERS) sequence
  source 1..88: mol_type = other RNA
actggcgcttctatctgattactctgagcgccatcaccagccactatgtggtatgggtaaagctccctcttcggagggagcatcaaag

SEQ ID NO: 21107 - RNA, 88 nt, synthetic construct
  misc_feature 1..88: note = engineered ribonucleic acid scaffold (ERS) sequence
  source 1..88: mol_type = other RNA
actggcgcttctatctgattactctcagcgccatcaccagctactatgtagtatgggtaaagctccctcttcggagggagcatcagac

SEQ ID NO: 21108 - RNA, 88 nt, synthetic construct
  misc_feature 1..88: note = engineered ribonucleic acid scaffold (ERS) sequence
  source 1..88: mol_type = other RNA
actggcgcttctatctgattactttgagcgccatcaccagctactatgtagtatgggtaaagctccctcttcggagggagcatcagag

SEQ ID NO: 21109 - RNA, 88 nt, synthetic construct
  misc_feature 1..88: note = engineered ribonucleic acid scaffold (ERS) sequence
  source 1..88: mol_type = other RNA
actggcgcttctatctgattactttgagcgccatcaccagctactatgtagtatgggtaaagctccctcttcggagggagcatcaaag

SEQ ID NO: 21110 - RNA, 88 nt, synthetic construct
  misc_feature 1..88: note = engineered ribonucleic acid scaffold (ERS) sequence
  source 1..88: mol_type = other RNA
actggcgcttctatctgattagtctcagcgccatcaccagctactatgtagtatgggtaaagctccctcttcggagggagcatgagac

SEQ ID NO: 21111 - RNA, 88 nt, synthetic construct
  misc_feature 1..88: note = engineered ribonucleic acid scaffold (ERS) sequence
  source 1..88: mol_type = other RNA
actggcgcttctatctgattagtctgagcgccatcaccagctactatgtagtatgggtaaagctccctcttcggagggagcatcagac

SEQ ID NO: 21112 - RNA, 88 nt, synthetic construct
  misc_feature 1..88: note = engineered ribonucleic acid scaffold (ERS) sequence
  source 1..88: mol_type = other RNA
actggcgcttctatctgattactctcagcgccatcaccagctactatgtagtatgggtaaagctccctcttcggagggagcatgagag

SEQ ID NO: 21113 - RNA, 88 nt, synthetic construct
  misc_feature 1..88: note = engineered ribonucleic acid scaffold (ERS) sequence
  source 1..88: mol_type = other RNA
actggcgctcccatctgattaccccgagcgccatcaccagctactatgtagtatgggtaaagctccctcttcggagggagcatcgggg

SEQ ID NO: 21114 - RNA, 88 nt, synthetic construct
  misc_feature 1..88: note = engineered ribonucleic acid scaffold (ERS) sequence
  source 1..88: mol_type = other RNA
actggcgctcctatctgattactccgagcgccatcaccagctactatgtagtatgggtaaagctccctcttcggagggagcatcggag

SEQ ID NO: 21115 - RNA, 88 nt, synthetic construct
  misc_feature 1..88: note = engineered ribonucleic acid scaffold (ERS) sequence
  source 1..88: mol_type = other RNA
actggcgctgggatctgattaccccgagcgccatcaccagctactatgtagtatgggtaaagctccctcttcggagggagcatcgggg

SEQ ID NO: 21116 - RNA, 88 nt, synthetic construct
  misc_feature 1..88: note = engineered ribonucleic acid scaffold (ERS) sequence
  source 1..88: mol_type = other RNA
actggcgctggtatctgattactccgagcgccatcaccagctactatgtagtatgggtaaagctccctcttcggagggagcatcggag

SEQ ID NO: 21117 - RNA, 88 nt, synthetic construct
  misc_feature 1..88: note = engineered ribonucleic acid scaffold (ERS) sequence
  source 1..88: mol_type = other RNA
actggcgcttccatctgattaccctgagcgccatcaccagctactatgtagtatgggtaaagctccctcttcggagggagcatcaggg

SEQ ID NO: 21118 - RNA, 88 nt, synthetic construct
  misc_feature 1..88: note = engineered ribonucleic acid scaffold (ERS) sequence
  source 1..88: mol_type = other RNA
actggcgcttggatctgattaccctgagcgccatcaccagctactatgtagtatgggtaaagctccctcttcggagggagcatcaggg

SEQ ID NO: 21119 - RNA, 88 nt, synthetic construct
  misc_feature 1..88: note = engineered ribonucleic acid scaffold (ERS) sequence
  source 1..88: mol_type = other RNA
actggcgcttgtatctgattactctgagcgccatcaccagctactatgtagtatgggtaaagctccctcttcggagggagcatcagag

SEQ ID NO: 21120 - RNA, 88 nt, synthetic construct
  misc_feature 1..88: note = engineered ribonucleic acid scaffold (ERS) sequence
  source 1..88: mol_type = other RNA
actggcgcttttatctgattactttgagcgccatcaccagctactatgtagtatgggtaaagctccctcttcggagggagcatcagag

SEQ ID NO: 21121 - RNA, 88 nt, synthetic construct
  misc_feature 1..88: note = engineered ribonucleic acid scaffold (ERS) sequence
  source 1..88: mol_type = other RNA
actggcgcttttatctgattactctgagcgccatcaccagctactatgtagtatgggtaaagctccctcttcggagggagcatcagag

SEQ ID NO: 21122 - RNA, 88 nt, synthetic construct
  misc_feature 1..88: note = engineered ribonucleic acid scaffold (ERS) sequence
  source 1..88: mol_type = other RNA
actggcgcttttatctgattactctgagcgccatcaccagctactatgtagtatgggtaaagctccctcttcggagggagcatcaaag

SEQ ID NO: 21123 - RNA, 88 nt, synthetic construct
  misc_feature 1..88: note = engineered ribonucleic acid scaffold (ERS) sequence
  source 1..88: mol_type = other RNA
actggcgcttctatctgattactctgagcgccatcaccagctactatgtagtatgggtaaagctccctcttcggagggagcctcagag

SEQ ID NO: 21124 - RNA, 88 nt, synthetic construct
  misc_feature 1..88: note = engineered ribonucleic acid scaffold (ERS) sequence
  source 1..88: mol_type = other RNA
actggcgcttctatctgattactctgagcgccatcaccagctactatgtagtatgggtaaagctccctcttcggagggagcgtcagag

SEQ ID NO: 21125 - RNA, 88 nt, synthetic construct
  misc_feature 1..88: note = engineered ribonucleic acid scaffold (ERS) sequence
  source 1..88: mol_type = other RNA
actggcgcttctatctgattactctgagcgccatcaccagctactatgtagtatgggtaaagctccctcttcggagggagcatcaaag

SEQ ID NO: 21126 - RNA, 88 nt, synthetic construct
  misc_feature 1..88: note = engineered ribonucleic acid scaffold (ERS) sequence
  source 1..88: mol_type = other RNA
actggcgcttctatctgattactctcagcgccatcaccagcgattatgtcgtatgggtaaagctccctcttcggagggagcatcagac

SEQ ID NO: 21127 - RNA, 88 nt, synthetic construct
  misc_feature 1..88: note = engineered ribonucleic acid scaffold (ERS) sequence
  source 1..88: mol_type = other RNA
actggcgcttctatctgattactttgagcgccatcaccagcgattatgtcgtatgggtaaagctccctcttcggagggagcatcagag

SEQ ID NO: 21128 - RNA, 88 nt, synthetic construct
  misc_feature 1..88: note = engineered ribonucleic acid scaffold (ERS) sequence
  source 1..88: mol_type = other RNA
actggcgcttctatctgattactttgagcgccatcaccagcgattatgtcgtatgggtaaagctccctcttcggagggagcatcaaag

SEQ ID NO: 21129 - RNA, 88 nt, synthetic construct
  misc_feature 1..88: note = engineered ribonucleic acid scaffold (ERS) sequence
  source 1..88: mol_type = other RNA
actggcgcttctatctgattagtctcagcgccatcaccagcgattatgtcgtatgggtaaagctccctcttcggagggagcatgagac

SEQ ID NO: 21130 - RNA, 88 nt, synthetic construct
  misc_feature 1..88: note = engineered ribonucleic acid scaffold (ERS) sequence
  source 1..88: mol_type = other RNA
actggcgcttctatctgattagtctgagcgccatcaccagcgattatgtcgtatgggtaaagctccctcttcggagggagcatcagac

SEQ ID NO: 21131 - RNA, 88 nt, synthetic construct
  misc_feature 1..88: note = engineered ribonucleic acid scaffold (ERS) sequence
  source 1..88: mol_type = other RNA
actggcgcttctatctgattactctcagcgccatcaccagcgattatgtcgtatgggtaaagctccctcttcggagggagcatgagag

SEQ ID NO: 21132 - RNA, 88 nt, synthetic construct
  misc_feature 1..88: note = engineered ribonucleic acid scaffold (ERS) sequence
  source 1..88: mol_type = other RNA
actggcgctcccatctgattaccccgagcgccatcaccagcgattatgtcgtatgggtaaagctccctcttcggagggagcatcgggg

SEQ ID NO: 21133 - RNA, 88 nt, synthetic construct
  misc_feature 1..88: note = engineered ribonucleic acid scaffold (ERS) sequence
  source 1..88: mol_type = other RNA
actggcgctcctatctgattactccgagcgccatcaccagcgattatgtcgtatgggtaaagctccctcttcggagggagcatcggag

SEQ ID NO: 21134 - RNA, 88 nt, synthetic construct
  misc_feature 1..88: note = engineered ribonucleic acid scaffold (ERS) sequence
  source 1..88: mol_type = other RNA
actggcgctgggatctgattaccccgagcgccatcaccagcgattatgtcgtatgggtaaagctccctcttcggagggagcatcgggg

SEQ ID NO: 21135 - RNA, 88 nt, synthetic construct
  misc_feature 1..88: note = engineered ribonucleic acid scaffold (ERS) sequence
  source 1..88: mol_type = other RNA
actggcgctggtatctgattactccgagcgccatcaccagcgattatgtcgtatgggtaaagctccctcttcggagggagcatcggag

SEQ ID NO: 21136 - RNA, 88 nt, synthetic construct
  misc_feature 1..88: note = engineered ribonucleic acid scaffold (ERS) sequence
  source 1..88: mol_type = other RNA
actggcgcttccatctgattaccctgagcgccatcaccagcgattatgtcgtatgggtaaagctccctcttcggagggagcatcaggg

SEQ ID NO: 21137 - RNA, 88 nt, synthetic construct
  misc_feature 1..88: note = engineered ribonucleic acid scaffold (ERS) sequence
  source 1..88: mol_type = other RNA
actggcgcttggatctgattaccctgagcgccatcaccagcgattatgtcgtatgggtaaagctccctcttcggagggagcatcaggg

SEQ ID NO: 21138 - RNA, 88 nt, synthetic construct
  misc_feature 1..88: note = engineered ribonucleic acid scaffold (ERS) sequence
  source 1..88: mol_type = other RNA
actggcgcttgtatctgattactctgagcgccatcaccagcgattatgtcgtatgggtaaagctccctcttcggagggagcatcagag

SEQ ID NO: 21139 - RNA, 88 nt, synthetic construct
  misc_feature 1..88: note = engineered ribonucleic acid scaffold (ERS) sequence
  source 1..88: mol_type = other RNA
actggcgcttttatctgattactttgagcgccatcaccagcgattatgtcgtatgggtaaagctccctcttcggagggagcatcagag

SEQ ID NO: 21140 - RNA, 88 nt, synthetic construct
  misc_feature 1..88: note = engineered ribonucleic acid scaffold (ERS) sequence
  source 1..88: mol_type = other RNA
actggcgcttttatctgattactctgagcgccatcaccagcgattatgtcgtatgggtaaagctccctcttcggagggagcatcagag

SEQ ID NO: 21141 - RNA, 88 nt, synthetic construct
  misc_feature 1..88: note = engineered ribonucleic acid scaffold (ERS) sequence
  source 1..88: mol_type = other RNA
actggcgcttttatctgattactctgagcgccatcaccagcgattatgtcgtatgggtaaagctccctcttcggagggagcatcaaag

SEQ ID NO: 21142 - RNA, 88 nt, synthetic construct
  misc_feature 1..88: note = engineered ribonucleic acid scaffold (ERS) sequence
  source 1..88: mol_type = other RNA
actggcgcttctatctgattactctgagcgccatcaccagcgattatgtcgtatgggtaaagctccctcttcggagggagcctcagag

SEQ ID NO: 21143 - RNA, 88 nt, synthetic construct
  misc_feature 1..88: note = engineered ribonucleic acid scaffold (ERS) sequence
  source 1..88: mol_type = other RNA
actggcgcttctatctgattactctgagcgccatcaccagcgattatgtcgtatgggtaaagctccctcttcggagggagcgtcagag

SEQ ID NO: 21144 - RNA, 88 nt, synthetic construct
  misc_feature 1..88: note = engineered ribonucleic acid scaffold (ERS) sequence
  source 1..88: mol_type = other RNA
actggcgcttctatctgattactctgagcgccatcaccagcgattatgtcgtatgggtaaagctccctcttcggagggagcatcaaag

SEQ ID NO: 21145 - RNA, 88 nt, synthetic construct
  misc_feature 1..88: note = engineered ribonucleic acid scaffold (ERS) sequence
  source 1..88: mol_type = other RNA
actggcgcttctatctgattactctcagcgccatcaccagcgacgatgtcgtatgggtaaagctccctcttcggagggagcatcagac

SEQ ID NO: 21146 - RNA, 88 nt, synthetic construct
  misc_feature 1..88: note = engineered ribonucleic acid scaffold (ERS) sequence
  source 1..88: mol_type = other RNA
actggcgcttctatctgattactttgagcgccatcaccagcgacgatgtcgtatgggtaaagctccctcttcggagggagcatcagag

SEQ ID NO: 21147 - RNA, 88 nt, synthetic construct
  misc_feature 1..88: note = engineered ribonucleic acid scaffold (ERS) sequence
  source 1..88: mol_type = other RNA
actggcgcttctatctgattactttgagcgccatcaccagcgacgatgtcgtatgggtaaagctccctcttcggagggagcatcaaag

SEQ ID NO: 21148 - RNA, 88 nt, synthetic construct
  misc_feature 1..88: note = engineered ribonucleic acid scaffold (ERS) sequence
  source 1..88: mol_type = other RNA
actggcgcttctatctgattagtctcagcgccatcaccagcgacgatgtcgtatgggtaaagctccctcttcggagggagcatgagac

SEQ ID NO: 21149 - RNA, 88 nt, synthetic construct
  misc_feature 1..88: note = engineered ribonucleic acid scaffold (ERS) sequence
  source 1..88: mol_type = other RNA
actggcgcttctatctgattagtctgagcgccatcaccagcgacgatgtcgtatgggtaaagctccctcttcggagggagcatcagac

SEQ ID NO: 21150 - RNA, 88 nt, synthetic construct
  misc_feature 1..88: note = engineered ribonucleic acid scaffold (ERS) sequence
  source 1..88: mol_type = other RNA
actggcgcttctatctgattactctcagcgccatcaccagcgacgatgtcgtatgggtaaagctccctcttcggagggagcatgagag

SEQ ID NO: 21151 - RNA, 88 nt, synthetic construct
  misc_feature 1..88: note = engineered ribonucleic acid scaffold (ERS) sequence
  source 1..88: mol_type = other RNA
actggcgctcccatctgattaccccgagcgccatcaccagcgacgatgtcgtatgggtaaagctccctcttcggagggagcatcgggg

SEQ ID NO: 21152 - RNA, 88 nt, synthetic construct
  misc_feature 1..88: note = engineered ribonucleic acid scaffold (ERS) sequence
  source 1..88: mol_type = other RNA
actggcgctcctatctgattactccgagcgccatcaccagcgacgatgtcgtatgggtaaagctccctcttcggagggagcatcggag

SEQ ID NO: 21153 - RNA, 88 nt, synthetic construct
  misc_feature 1..88: note = engineered ribonucleic acid scaffold (ERS) sequence
  source 1..88: mol_type = other RNA
actggcgctgggatctgattaccccgagcgccatcaccagcgacgatgtcgtatgggtaaagctccctcttcggagggagcatcgggg

SEQ ID NO: 21154 - RNA, 88 nt, synthetic construct
  misc_feature 1..88: note = engineered ribonucleic acid scaffold (ERS) sequence
  source 1..88: mol_type = other RNA
actggcgctggtatctgattactccgagcgccatcaccagcgacgatgtcgtatgggtaaagctccctcttcggagggagcatcggag

SEQ ID NO: 21155 - RNA, 88 nt, synthetic construct
  misc_feature 1..88: note = engineered ribonucleic acid scaffold (ERS) sequence
  source 1..88: mol_type = other RNA
actggcgcttccatctgattaccctgagcgccatcaccagcgacgatgtcgtatgggtaaagctccctcttcggagggagcatcaggg

SEQ ID NO: 21156 - RNA, 88 nt, synthetic construct
  misc_feature 1..88: note = engineered ribonucleic acid scaffold (ERS) sequence
  source 1..88: mol_type = other RNA
actggcgcttggatctgattaccctgagcgccatcaccagcgacgatgtcgtatgggtaaagctccctcttcggagggagcatcaggg

SEQ ID NO: 21157 - RNA, 88 nt, synthetic construct
  misc_feature 1..88: note = engineered ribonucleic acid scaffold (ERS) sequence
  source 1..88: mol_type = other RNA
actggcgcttgtatctgattactctgagcgccatcaccagcgacgatgtcgtatgggtaaagctccctcttcggagggagcatcagag

SEQ ID NO: 21158 - RNA, 88 nt, synthetic construct
  misc_feature 1..88: note = engineered ribonucleic acid scaffold (ERS) sequence
  source 1..88: mol_type = other RNA
actggcgcttttatctgattactttgagcgccatcaccagcgacgatgtcgtatgggtaaagctccctcttcggagggagcatcagag

SEQ ID NO: 21159 - RNA, 88 nt, synthetic construct
  misc_feature 1..88: note = engineered ribonucleic acid scaffold (ERS) sequence
  source 1..88: mol_type = other RNA
actggcgcttttatctgattactctgagcgccatcaccagcgacgatgtcgtatgggtaaagctccctcttcggagggagcatcagag

SEQ ID NO: 21160 - RNA, 88 nt, synthetic construct
  misc_feature 1..88: note = engineered ribonucleic acid scaffold (ERS) sequence
  source 1..88: mol_type = other RNA
actggcgcttttatctgattactctgagcgccatcaccagcgacgatgtcgtatgggtaaagctccctcttcggagggagcatcaaag

SEQ ID NO: 21161 - RNA, 88 nt, synthetic construct
  misc_feature 1..88: note = engineered ribonucleic acid scaffold (ERS) sequence
  source 1..88: mol_type = other RNA
actggcgcttctatctgattactctgagcgccatcaccagcgacgatgtcgtatgggtaaagctccctcttcggagggagcctcagag

SEQ ID NO: 21162 - RNA, 88 nt, synthetic construct
  misc_feature 1..88: note = engineered ribonucleic acid scaffold (ERS) sequence
  source 1..88: mol_type = other RNA
actggcgcttctatctgattactctgagcgccatcaccagcgacgatgtcgtatgggtaaagctccctcttcggagggagcgtcagag

SEQ ID NO: 21163 - RNA, 88 nt, synthetic construct
  misc_feature 1..88: note = engineered ribonucleic acid scaffold (ERS) sequence
  source 1..88: mol_type = other RNA
actggcgcttctatctgattactctgagcgccatcaccagcgacgatgtcgtatgggtaaagctccctcttcggagggagcatcaaag

SEQ ID NO: 21164 - RNA, 88 nt, synthetic construct
  misc_feature 1..88: note = engineered ribonucleic acid scaffold (ERS) sequence
  source 1..88: mol_type = other RNA
actggcgcttctatctgattactctcagcgccatcaccagcgactctgtcgtatgggtaaagctccctcttcggagggagcatcagac

SEQ ID NO: 21165 - RNA, 88 nt, synthetic construct
  misc_feature 1..88: note = engineered ribonucleic acid scaffold (ERS) sequence
  source 1..88: mol_type = other RNA
actggcgcttctatctgattactttgagcgccatcaccagcgactctgtcgtatgggtaaagctccctcttcggagggagcatcagag

SEQ ID NO: 21166 - RNA, 88 nt, synthetic construct
  misc_feature 1..88: note = engineered ribonucleic acid scaffold (ERS) sequence
  source 1..88: mol_type = other RNA
actggcgcttctatctgattactttgagcgccatcaccagcgactctgtcgtatgggtaaagctccctcttcggagggagcatcaaag

SEQ ID NO: 21167 - RNA, 88 nt, synthetic construct
  misc_feature 1..88: note = engineered ribonucleic acid scaffold (ERS) sequence
  source 1..88: mol_type = other RNA
actggcgcttctatctgattagtctcagcgccatcaccagcgactctgtcgtatgggtaaagctccctcttcggagggagcatgagac

SEQ ID NO: 21168 - RNA, 88 nt, synthetic construct
  misc_feature 1..88: note = engineered ribonucleic acid scaffold (ERS) sequence
  source 1..88: mol_type = other RNA
actggcgcttctatctgattagtctgagcgccatcaccagcgactctgtcgtatgggtaaagctccctcttcggagggagcatcagac

SEQ ID NO: 21169 - RNA, 88 nt, synthetic construct
  misc_feature 1..88: note = engineered ribonucleic acid scaffold (ERS) sequence
  source 1..88: mol_type = other RNA
actggcgcttctatctgattactctcagcgccatcaccagcgactctgtcgtatgggtaaagctccctcttcggagggagcatgagag

SEQ ID NO: 21170 - RNA, 88 nt, synthetic construct
  misc_feature 1..88: note = engineered ribonucleic acid scaffold (ERS) sequence
  source 1..88: mol_type = other RNA
actggcgctcccatctgattaccccgagcgccatcaccagcgactctgtcgtatgggtaaagctccctcttcggagggagcatcgggg

SEQ ID NO: 21171 - RNA, 88 nt, synthetic construct
  misc_feature 1..88: note = engineered ribonucleic acid scaffold (ERS) sequence
  source 1..88: mol_type = other RNA
actggcgctcctatctgattactccgagcgccatcaccagcgactctgtcgtatgggtaaagctccctcttcggagggagcatcggag

SEQ ID NO: 21172 - RNA, 88 nt, synthetic construct
  misc_feature 1..88: note = engineered ribonucleic acid scaffold (ERS) sequence
  source 1..88: mol_type = other RNA
actggcgctgggatctgattaccccgagcgccatcaccagcgactctgtcgtatgggtaaagctccctcttcggagggagcatcgggg

SEQ ID NO: 21173 - RNA, 88 nt, synthetic construct
  misc_feature 1..88: note = engineered ribonucleic acid scaffold (ERS) sequence
  source 1..88: mol_type = other RNA
actggcgctggtatctgattactccgagcgccatcaccagcgactctgtcgtatgggtaaagctccctcttcggagggagcatcggag

SEQ ID NO: 21174 - RNA, 88 nt, synthetic construct
  misc_feature 1..88: note = engineered ribonucleic acid scaffold (ERS) sequence
  source 1..88: mol_type = other RNA
actggcgcttccatctgattaccctgagcgccatcaccagcgactctgtcgtatgggtaaagctccctcttcggagggagcatcaggg

SEQ ID NO: 21175 - RNA, 88 nt, synthetic construct
  misc_feature 1..88: note = engineered ribonucleic acid scaffold (ERS) sequence
  source 1..88: mol_type = other RNA
actggcgcttggatctgattaccctgagcgccatcaccagcgactctgtcgtatgggtaaagctccctcttcggagggagcatcaggg

SEQ ID NO: 21176 - RNA, 88 nt, synthetic construct
  misc_feature 1..88: note = engineered ribonucleic acid scaffold (ERS) sequence
  source 1..88: mol_type = other RNA
actggcgcttgtatctgattactctgagcgccatcaccagcgactctgtcgtatgggtaaagctccctcttcggagggagcatcagag

SEQ ID NO: 21177 - RNA, 88 nt, synthetic construct
  misc_feature 1..88: note = engineered ribonucleic acid scaffold (ERS) sequence
  source 1..88: mol_type = other RNA
actggcgcttttatctgattactttgagcgccatcaccagcgactctgtcgtatgggtaaagctccctcttcggagggagcatcagag

SEQ ID NO: 21178 - RNA, 88 nt, synthetic construct
  misc_feature 1..88: note = engineered ribonucleic acid scaffold (ERS) sequence
  source 1..88: mol_type = other RNA
actggcgcttttatctgattactctgagcgccatcaccagcgactctgtcgtatgggtaaagctccctcttcggagggagcatcagag

SEQ ID NO: 21179 - RNA, 88 nt, synthetic construct
  misc_feature 1..88: note = engineered ribonucleic acid scaffold (ERS) sequence
  source 1..88: mol_type = other RNA
actggcgcttttatctgattactctgagcgccatcaccagcgactctgtcgtatgggtaaagctccctcttcggagggagcatcaaag

SEQ ID NO: 21180 - RNA, 88 nt, synthetic construct
  misc_feature 1..88: note = engineered ribonucleic acid scaffold (ERS) sequence
  source 1..88: mol_type = other RNA
actggcgcttctatctgattactctgagcgccatcaccagcgactctgtcgtatgggtaaagctccctcttcggagggagcctcagag

SEQ ID NO: 21181 - RNA, 88 nt, synthetic construct
  misc_feature 1..88: note = engineered ribonucleic acid scaffold (ERS) sequence
  source 1..88: mol_type = other RNA
actggcgcttctatctgattactctgagcgccatcaccagcgactctgtcgtatgggtaaagctccctcttcggagggagcgtcagag

SEQ ID NO: 21182 - RNA, 88 nt, synthetic construct
  misc_feature 1..88: note = engineered ribonucleic acid scaffold (ERS) sequence
  source 1..88: mol_type = other RNA
actggcgcttctatctgattactctgagcgccatcaccagcgactctgtcgtatgggtaaagctccctcttcggagggagcatcaaag

SEQ ID NO: 21183 - RNA, 88 nt, synthetic construct
  misc_feature 1..88: note = engineered ribonucleic acid scaffold (ERS) sequence
  source 1..88: mol_type = other RNA
actggcgcttctatctgattactctcagcgccatcaccagcgactatgtcgtgtgggtaaagctccctcttcggagggagcatcagac

SEQ ID NO: 21184 - RNA, 88 nt, synthetic construct
  misc_feature 1..88: note = engineered ribonucleic acid scaffold (ERS) sequence
  source 1..88: mol_type = other RNA
actggcgcttctatctgattactttgagcgccatcaccagcgactatgtcgtgtgggtaaagctccctcttcggagggagcatcagag

SEQ ID NO: 21185 - RNA, 88 nt, synthetic construct
  misc_feature 1..88: note = engineered ribonucleic acid scaffold (ERS) sequence
  source 1..88: mol_type = other RNA
actggcgcttctatctgattactttgagcgccatcaccagcgactatgtcgtgtgggtaaagctccctcttcggagggagcatcaaag

SEQ ID NO: 21186 - RNA, 88 nt, synthetic construct
  misc_feature 1..88: note = engineered ribonucleic acid scaffold (ERS) sequence
  source 1..88: mol_type = other RNA
actggcgcttctatctgattagtctcagcgccatcaccagcgactatgtcgtgtgggtaaagctccctcttcggagggagcatgagac

SEQ ID NO: 21187 - RNA, 88 nt, synthetic construct
  misc_feature 1..88: note = engineered ribonucleic acid scaffold (ERS) sequence
  source 1..88: mol_type = other RNA
actggcgcttctatctgattagtctgagcgccatcaccagcgactatgtcgtgtgggtaaagctccctcttcggagggagcatcagac

SEQ ID NO: 21188 - RNA, 88 nt, synthetic construct
  misc_feature 1..88: note = engineered ribonucleic acid scaffold (ERS) sequence
  source 1..88: mol_type = other RNA
actggcgcttctatctgattactctcagcgccatcaccagcgactatgtcgtgtgggtaaagctccctcttcggagggagcatgagag

SEQ ID NO: 21189 - RNA, 88 nt, synthetic construct
  misc_feature 1..88: note = engineered ribonucleic acid scaffold (ERS) sequence
  source 1..88: mol_type = other RNA
actggcgctcccatctgattaccccgagcgccatcaccagcgactatgtcgtgtgggtaaagctccctcttcggagggagcatcgggg

SEQ ID NO: 21190 - RNA, 88 nt, synthetic construct
  misc_feature 1..88: note = engineered ribonucleic acid scaffold (ERS) sequence
  source 1..88: mol_type = other RNA
actggcgctcctatctgattactccgagcgccatcaccagcgactatgtcgtgtgggtaaagctccctcttcggagggagcatcggag

SEQ ID NO: 21191 - RNA, 88 nt, synthetic construct
  misc_feature 1..88: note = engineered ribonucleic acid scaffold (ERS) sequence
  source 1..88: mol_type = other RNA
actggcgctgggatctgattaccccgagcgccatcaccagcgactatgtcgtgtgggtaaagctccctcttcggagggagcatcgggg

SEQ ID NO: 21192 - RNA, 88 nt, synthetic construct
  misc_feature 1..88: note = engineered ribonucleic acid scaffold (ERS) sequence
  source 1..88: mol_type = other RNA
actggcgctggtatctgattactccgagcgccatcaccagcgactatgtcgtgtgggtaaagctccctcttcggagggagcatcggag

SEQ ID NO: 21193 - RNA, 88 nt, synthetic construct
  misc_feature 1..88: note = engineered ribonucleic acid scaffold (ERS) sequence
  source 1..88: mol_type = other RNA
actggcgcttccatctgattaccctgagcgccatcaccagcgactatgtcgtgtgggtaaagctccctcttcggagggagcatcaggg

SEQ ID NO: 21194 - RNA, 88 nt, synthetic construct
  misc_feature 1..88: note = engineered ribonucleic acid scaffold (ERS) sequence
  source 1..88: mol_type = other RNA
actggcgcttggatctgattaccctgagcgccatcaccagcgactatgtcgtgtgggtaaagctccctcttcggagggagcatcaggg

SEQ ID NO: 21195 - RNA, 88 nt, synthetic construct
  misc_feature 1..88: note = engineered ribonucleic acid scaffold (ERS) sequence
  source 1..88: mol_type = other RNA
actggcgcttgtatctgattactctgagcgccatcaccagcgactatgtcgtgtgggtaaagctccctcttcggagggagcatcagag

SEQ ID NO: 21196 - RNA, 88 nt, synthetic construct
  misc_feature 1..88: note = engineered ribonucleic acid scaffold (ERS) sequence
  source 1..88: mol_type = other RNA
actggcgcttttatctgattactttgagcgccatcaccagcgactatgtcgtgtgggtaaagctccctcttcggagggagcatcagag

SEQ ID NO: 21197 - RNA, 88 nt, synthetic construct
  misc_feature 1..88: note = engineered ribonucleic acid scaffold (ERS) sequence
  source 1..88: mol_type = other RNA
actggcgcttttatctgattactctgagcgccatcaccagcgactatgtcgtgtgggtaaagctccctcttcggagggagcatcagag

SEQ ID NO: 21198 - RNA, 88 nt, synthetic construct
  misc_feature 1..88: note = engineered ribonucleic acid scaffold (ERS) sequence
  source 1..88: mol_type = other RNA
actggcgcttttatctgattactctgagcgccatcaccagcgactatgtcgtgtgggtaaagctccctcttcggagggagcatcaaag

SEQ ID NO: 21199 - RNA, 88 nt, synthetic construct
  misc_feature 1..88: note = engineered ribonucleic acid scaffold (ERS) sequence
  source 1..88: mol_type = other RNA
actggcgcttctatctgattactctgagcgccatcaccagcgactatgtcgtgtgggtaaagctccctcttcggagggagcctcagag

SEQ ID NO: 21200 - RNA, 88 nt, synthetic construct
  misc_feature 1..88: note = engineered ribonucleic acid scaffold (ERS) sequence
  source 1..88: mol_type = other RNA
actggcgcttctatctgattactctgagcgccatcaccagcgactatgtcgtgtgggtaaagctccctcttcggagggagcgtcagag

SEQ ID NO: 21201 - RNA, 88 nt, synthetic construct
  misc_feature 1..88: note = engineered ribonucleic acid scaffold (ERS) sequence
  source 1..88: mol_type = other RNA
actggcgcttctatctgattactctgagcgccatcaccagcgactatgtcgtgtgggtaaagctccctcttcggagggagcatcaaag

SEQ ID NO: 21202 - RNA, 89 nt, synthetic construct
  misc_feature 1..89: note = engineered ribonucleic acid scaffold (ERS) sequence
  source 1..89: mol_type = other RNA
actggcgcttctatctgattactctcagcgccatcaccagcgactatgtcgtattgggtaaagctccctcttcggagggagcatcagac

SEQ ID NO: 21203 - RNA, 89 nt, synthetic construct
  misc_feature 1..89: note = engineered ribonucleic acid scaffold (ERS) sequence
  source 1..89: mol_type = other RNA
actggcgcttctatctgattactttgagcgccatcaccagcgactatgtcgtattgggtaaagctccctcttcggagggagcatcagag

SEQ ID NO: 21204 - RNA, 89 nt, synthetic construct
  misc_feature 1..89: note = engineered ribonucleic acid scaffold (ERS) sequence
  source 1..89: mol_type = other RNA
actggcgcttctatctgattactttgagcgccatcaccagcgactatgtcgtattgggtaaagctccctcttcggagggagcatcaaag

SEQ ID NO: 21205 - RNA, 89 nt, synthetic construct
  misc_feature 1..89: note = engineered ribonucleic acid scaffold (ERS) sequence
  source 1..89: mol_type = other RNA
actggcgcttctatctgattagtctcagcgccatcaccagcgactatgtcgtattgggtaaagctccctcttcggagggagcatgagac

SEQ ID NO: 21206 - RNA, 89 nt, synthetic construct
  misc_feature 1..89: note = engineered ribonucleic acid scaffold (ERS) sequence
  source 1..89: mol_type = other RNA
actggcgcttctatctgattagtctgagcgccatcaccagcgactatgtcgtattgggtaaagctccctcttcggagggagcatcagac

SEQ ID NO: 21207 - RNA, 89 nt, synthetic construct
  misc_feature 1..89: note = engineered ribonucleic acid scaffold (ERS) sequence
  source 1..89: mol_type = other RNA
actggcgcttctatctgattactctcagcgccatcaccagcgactatgtcgtattgggtaaagctccctcttcggagggagcatgagag

SEQ ID NO: 21208 - RNA, 89 nt, synthetic construct
  misc_feature 1..89: note = engineered ribonucleic acid scaffold (ERS) sequence
  source 1..89: mol_type = other RNA
actggcgctcccatctgattaccccgagcgccatcaccagcgactatgtcgtattgggtaaagctccctcttcggagggagcatcgggg

SEQ ID NO: 21209 - RNA, 89 nt, synthetic construct
  misc_feature 1..89: note = engineered ribonucleic acid scaffold (ERS) sequence
  source 1..89: mol_type = other RNA
actggcgctcctatctgattactccgagcgccatcaccagcgactatgtcgtattgggtaaagctccctcttcggagggagcatcggag

SEQ ID NO: 21210 - RNA, 89 nt, synthetic construct
  misc_feature 1..89: note = engineered ribonucleic acid scaffold (ERS) sequence
  source 1..89: mol_type = other RNA
actggcgctgggatctgattaccccgagcgccatcaccagcgactatgtcgtattgggtaaagctccctcttcggagggagcatcgggg

SEQ ID NO: 21211 - RNA, 89 nt, synthetic construct
  misc_feature 1..89: note = engineered ribonucleic acid scaffold (ERS) sequence
  source 1..89: mol_type = other RNA
actggcgctggtatctgattactccgagcgccatcaccagcgactatgtcgtattgggtaaagctccctcttcggagggagcatcggag

SEQ ID NO: 21212 - RNA, 89 nt, synthetic construct
  misc_feature 1..89: note = engineered ribonucleic acid scaffold (ERS) sequence
  source 1..89: mol_type = other RNA
actggcgcttccatctgattaccctgagcgccatcaccagcgactatgtcgtattgggtaaagctccctcttcggagggagcatcaggg

SEQ ID NO: 21213 - RNA, 89 nt, synthetic construct
  misc_feature 1..89: note = engineered ribonucleic acid scaffold (ERS) sequence
  source 1..89: mol_type = other RNA
actggcgcttggatctgattaccctgagcgccatcaccagcgactatgtcgtattgggtaaagctccctcttcggagggagcatcaggg

SEQ ID NO: 21214 - RNA, 89 nt, synthetic construct
  misc_feature 1..89: note = engineered ribonucleic acid scaffold (ERS) sequence
  source 1..89: mol_type = other RNA
actggcgcttgtatctgattactctgagcgccatcaccagcgactatgtcgtattgggtaaagctccctcttcggagggagcatcagag

SEQ ID NO: 21215 - RNA, 89 nt, synthetic construct
  misc_feature 1..89: note = engineered ribonucleic acid scaffold (ERS) sequence
  source 1..89: mol_type = other RNA
actggcgcttttatctgattactttgagcgccatcaccagcgactatgtcgtattgggtaaagctccctcttcggagggagcatcagag

SEQ ID NO: 21216 - RNA, 89 nt, synthetic construct
  misc_feature 1..89: note = engineered ribonucleic acid scaffold (ERS) sequence
  source 1..89: mol_type = other RNA
actggcgcttttatctgattactctgagcgccatcaccagcgactatgtcgtattgggtaaagctccctcttcggagggagcatcagag

SEQ ID NO: 21217 - RNA, 89 nt, synthetic construct
  misc_feature 1..89: note = engineered ribonucleic acid scaffold (ERS) sequence
  source 1..89: mol_type = other RNA
actggcgcttttatctgattactctgagcgccatcaccagcgactatgtcgtattgggtaaagctccctcttcggagggagcatcaaag

SEQ ID NO: 21218 - RNA, 89 nt, synthetic construct
  misc_feature 1..89: note = engineered ribonucleic acid scaffold (ERS) sequence
  source 1..89: mol_type = other RNA
actggcgcttctatctgattactctgagcgccatcaccagcgactatgtcgtattgggtaaagctccctcttcggagggagcctcagag

SEQ ID NO: 21219 - RNA, 89 nt, synthetic construct
  misc_feature 1..89: note = engineered ribonucleic acid scaffold (ERS) sequence
  source 1..89: mol_type = other RNA
actggcgcttctatctgattactctgagcgccatcaccagcgactatgtcgtattgggtaaagctccctcttcggagggagcgtcagag

SEQ ID NO: 21220 - RNA, 89 nt, synthetic construct
  misc_feature 1..89: note = engineered ribonucleic acid scaffold (ERS) sequence
  source 1..89: mol_type = other RNA
actggcgcttctatctgattactctgagcgccatcaccagcgactatgtcgtattgggtaaagctccctcttcggagggagcatcaaag

SEQ ID NO: 21221 - RNA, 89 nt, synthetic construct
  misc_feature 1..89: note = engineered ribonucleic acid scaffold (ERS) sequence
  source 1..89: mol_type = other RNA
actggcgcttctatctgattactctcagcgccatcaccagcgactatgtcgtatggagtaaagctccctcttcggagggagcatcagac

SEQ ID NO: 21222 - RNA, 89 nt, synthetic construct
  misc_feature 1..89: note = engineered ribonucleic acid scaffold (ERS) sequence
  source 1..89: mol_type = other RNA
actggcgcttctatctgattactttgagcgccatcaccagcgactatgtcgtatggagtaaagctccctcttcggagggagcatcagag

SEQ ID NO: 21223 - RNA, 89 nt, synthetic construct
  misc_feature 1..89: note = engineered ribonucleic acid scaffold (ERS) sequence
  source 1..89: mol_type = other RNA
actggcgcttctatctgattactttgagcgccatcaccagcgactatgtcgtatggagtaaagctccctcttcggagggagcatcaaag

SEQ ID NO: 21224 - RNA, 89 nt, synthetic construct
  misc_feature 1..89: note = engineered ribonucleic acid scaffold (ERS) sequence
  source 1..89: mol_type = other RNA
actggcgcttctatctgattagtctcagcgccatcaccagcgactatgtcgtatggagtaaagctccctcttcggagggagcatgagac

SEQ ID NO: 21225 - RNA, 89 nt, synthetic construct
  misc_feature 1..89: note = engineered ribonucleic acid scaffold (ERS) sequence
  source 1..89: mol_type = other RNA
actggcgcttctatctgattagtctgagcgccatcaccagcgactatgtcgtatggagtaaagctccctcttcggagggagcatcagac

SEQ ID NO: 21226 - RNA, 89 nt, synthetic construct
  misc_feature 1..89: note = engineered ribonucleic acid scaffold (ERS) sequence
  source 1..89: mol_type = other RNA
actggcgcttctatctgattactctcagcgccatcaccagcgactatgtcgtatggagtaaagctccctcttcggagggagcatgagag

SEQ ID NO: 21227 - RNA, 89 nt, synthetic construct
  misc_feature 1..89: note = engineered ribonucleic acid scaffold (ERS) sequence
  source 1..89: mol_type = other RNA
actggcgctcccatctgattaccccgagcgccatcaccagcgactatgtcgtatggagtaaagctccctcttcggagggagcatcgggg

SEQ ID NO: 21228 - RNA, 89 nt, synthetic construct
  misc_feature 1..89: note = engineered ribonucleic acid scaffold (ERS) sequence
  source 1..89: mol_type = other RNA
actggcgctcctatctgattactccgagcgccatcaccagcgactatgtcgtatggagtaaagctccctcttcggagggagcatcggag

SEQ ID NO: 21229 - RNA, 89 nt, synthetic construct
  misc_feature 1..89: note = engineered ribonucleic acid scaffold (ERS) sequence
  source 1..89: mol_type = other RNA
actggcgctgggatctgattaccccgagcgccatcaccagcgactatgtcgtatggagtaaagctccctcttcggagggagcatcgggg

SEQ ID NO: 21230 - RNA, 89 nt, synthetic construct
  misc_feature 1..89: note = engineered ribonucleic acid scaffold (ERS) sequence
  source 1..89: mol_type = other RNA
actggcgctggtatctgattactccgagcgccatcaccagcgactatgtcgtatggagtaaagctccctcttcggagggagcatcggag

SEQ ID NO: 21231 - RNA, 89 nt, synthetic construct
  misc_feature 1..89: note = engineered ribonucleic acid scaffold (ERS) sequence
  source 1..89: mol_type = other RNA
actggcgcttccatctgattaccctgagcgccatcaccagcgactatgtcgtatggagtaaagctccctcttcggagggagcatcaggg

SEQ ID NO: 21232 - RNA, 89 nt, synthetic construct
  misc_feature 1..89: note = engineered ribonucleic acid scaffold (ERS) sequence
  source 1..89: mol_type = other RNA
actggcgcttggatctgattaccctgagcgccatcaccagcgactatgtcgtatggagtaaagctccctcttcggagggagcatcaggg

SEQ ID NO: 21233 - RNA, 89 nt, synthetic construct
  misc_feature 1..89: note = engineered ribonucleic acid scaffold (ERS) sequence
  source 1..89: mol_type = other RNA
actggcgcttgtatctgattactctgagcgccatcaccagcgactatgtcgtatggagtaaagctccctcttcggagggagcatcagag

SEQ ID NO: 21234 - RNA, 89 nt, synthetic construct
  misc_feature 1..89: note = engineered ribonucleic acid scaffold (ERS) sequence
  source 1..89: mol_type = other RNA
actggcgcttttatctgattactttgagcgccatcaccagcgactatgtcgtatggagtaaagctccctcttcggagggagcatcagag

SEQ ID NO: 21235 - RNA, 89 nt, synthetic construct
  misc_feature 1..89: note = engineered ribonucleic acid scaffold (ERS) sequence
  source 1..89: mol_type = other RNA
actggcgcttttatctgattactctgagcgccatcaccagcgactatgtcgtatggagtaaagctccctcttcggagggagcatcagag

SEQ ID NO: 21236 - RNA, 89 nt, synthetic construct
  misc_feature 1..89: note = engineered ribonucleic acid scaffold (ERS) sequence
  source 1..89: mol_type = other RNA
actggcgcttttatctgattactctgagcgccatcaccagcgactatgtcgtatggagtaaagctccctcttcggagggagcatcaaag

SEQ ID NO: 21237 - RNA, 89 nt, synthetic construct
  misc_feature 1..89: note = engineered ribonucleic acid scaffold (ERS) sequence
  source 1..89: mol_type = other RNA
actggcgcttctatctgattactctgagcgccatcaccagcgactatgtcgtatggagtaaagctccctcttcggagggagcctcagag

SEQ ID NO: 21238 - RNA, 89 nt, synthetic construct
  misc_feature 1..89: note = engineered ribonucleic acid scaffold (ERS) sequence
  source 1..89: mol_type = other RNA
actggcgcttctatctgattactctgagcgccatcaccagcgactatgtcgtatggagtaaagctccctcttcggagggagcgtcagag

SEQ ID NO: 21239 - RNA, 89 nt, synthetic construct
  misc_feature 1..89: note = engineered ribonucleic acid scaffold (ERS) sequence
  source 1..89: mol_type = other RNA
actggcgcttctatctgattactctgagcgccatcaccagcgactatgtcgtatggagtaaagctccctcttcggagggagcatcaaag

SEQ ID NO: 21240 - RNA, 89 nt, synthetic construct
  misc_feature 1..89: note = engineered ribonucleic acid scaffold (ERS) sequence
  source 1..89: mol_type = other RNA
actggcgcttctatctgattactctcagcgccatcaccagcgactatgtcgtatggcgtaaagctccctcttcggagggagcatcagac

SEQ ID NO: 21241 - RNA, 89 nt, synthetic construct
  misc_feature 1..89: note = engineered ribonucleic acid scaffold (ERS) sequence
  source 1..89: mol_type = other RNA
actggcgcttctatctgattactttgagcgccatcaccagcgactatgtcgtatggcgtaaagctccctcttcggagggagcatcagag

SEQ ID NO: 21242 - RNA, 89 nt, synthetic construct
  misc_feature 1..89: note = engineered ribonucleic acid scaffold (ERS) sequence
  source 1..89: mol_type = other RNA
actggcgcttctatctgattactttgagcgccatcaccagcgactatgtcgtatggcgtaaagctccctcttcggagggagcatcaaag

SEQ ID NO: 21243 - RNA, 89 nt, synthetic construct
  misc_feature 1..89: note = engineered ribonucleic acid scaffold (ERS) sequence
  source 1..89: mol_type = other RNA
actggcgcttctatctgattagtctcagcgccatcaccagcgactatgtcgtatggcgtaaagctccctcttcggagggagcatgagac

SEQ ID NO: 21244 - RNA, 89 nt, synthetic construct
  misc_feature 1..89: note = engineered ribonucleic acid scaffold (ERS) sequence
  source 1..89: mol_type = other RNA
actggcgcttctatctgattagtctgagcgccatcaccagcgactatgtcgtatggcgtaaagctccctcttcggagggagcatcagac

SEQ ID NO: 21245 - RNA, 89 nt, synthetic construct
  misc_feature 1..89: note = engineered ribonucleic acid scaffold (ERS) sequence
  source 1..89: mol_type = other RNA
actggcgcttctatctgattactctcagcgccatcaccagcgactatgtcgtatggcgtaaagctccctcttcggagggagcatgagag

SEQ ID NO: 21246 - RNA, 89 nt, synthetic construct
  misc_feature 1..89: note = engineered ribonucleic acid scaffold (ERS) sequence
  source 1..89: mol_type = other RNA
actggcgctcccatctgattaccccgagcgccatcaccagcgactatgtcgtatggcgtaaagctccctcttcggagggagcatcgggg

SEQ ID NO: 21247 - RNA, 89 nt, synthetic construct
  misc_feature 1..89: note = engineered ribonucleic acid scaffold (ERS) sequence
  source 1..89: mol_type = other RNA
actggcgctcctatctgattactccgagcgccatcaccagcgactatgtcgtatggcgtaaagctccctcttcggagggagcatcggag

SEQ ID NO: 21248 - RNA, 89 nt, synthetic construct
  misc_feature 1..89: note = engineered ribonucleic acid scaffold (ERS) sequence
  source 1..89: mol_type = other RNA
actggcgctgggatctgattaccccgagcgccatcaccagcgactatgtcgtatggcgtaaagctccctcttcggagggagcatcgggg

SEQ ID NO: 21249 - RNA, 89 nt, synthetic construct
  misc_feature 1..89: note = engineered ribonucleic acid scaffold (ERS) sequence
  source 1..89: mol_type = other RNA
actggcgctggtatctgattactccgagcgccatcaccagcgactatgtcgtatggcgtaaagctccctcttcggagggagcatcggag

SEQ ID NO: 21250 - RNA, 89 nt, synthetic construct
  misc_feature 1..89: note = engineered ribonucleic acid scaffold (ERS) sequence
  source 1..89: mol_type = other RNA
actggcgcttccatctgattaccctgagcgccatcaccagcgactatgtcgtatggcgtaaagctccctcttcggagggagcatcaggg

SEQ ID NO: 21251 - RNA, 89 nt, synthetic construct
  misc_feature 1..89: note = engineered ribonucleic acid scaffold (ERS) sequence
  source 1..89: mol_type = other RNA
actggcgcttggatctgattaccctgagcgccatcaccagcgactatgtcgtatggcgtaaagctccctcttcggagggagcatcaggg

SEQ ID NO: 21252 - RNA, 89 nt, synthetic construct
  misc_feature 1..89: note = engineered ribonucleic acid scaffold (ERS) sequence
  source 1..89: mol_type = other RNA
actggcgcttgtatctgattactctgagcgccatcaccagcgactatgtcgtatggcgtaaagctccctcttcggagggagcatcagag

SEQ ID NO: 21253 - RNA, 89 nt, synthetic construct
  misc_feature 1..89: note = engineered ribonucleic acid scaffold (ERS) sequence
  source 1..89: mol_type = other RNA
actggcgcttttatctgattactttgagcgccatcaccagcgactatgtcgtatggcgtaaagctccctcttcggagggagcatcagag

SEQ ID NO: 21254 - RNA, 89 nt, synthetic construct
  misc_feature 1..89: note = engineered ribonucleic acid scaffold (ERS) sequence
  source 1..89: mol_type = other RNA
actggcgcttttatctgattactctgagcgccatcaccagcgactatgtcgtatggcgtaaagctccctcttcggagggagcatcagag

SEQ ID NO: 21255 - RNA, 89 nt, synthetic construct
  misc_feature 1..89: note = engineered ribonucleic acid scaffold (ERS) sequence
  source 1..89: mol_type = other RNA
actggcgcttttatctgattactctgagcgccatcaccagcgactatgtcgtatggcgtaaagctccctcttcggagggagcatcaaag

SEQ ID NO: 21256 - RNA, 89 nt, synthetic construct
  misc_feature 1..89: note = engineered ribonucleic acid scaffold (ERS) sequence
  source 1..89: mol_type = other RNA
actggcgcttctatctgattactctgagcgccatcaccagcgactatgtcgtatggcgtaaagctccctcttcggagggagcctcagag

SEQ ID NO: 21257 - RNA, 89 nt, synthetic construct
  misc_feature 1..89: note = engineered ribonucleic acid scaffold (ERS) sequence
  source 1..89: mol_type = other RNA
actggcgcttctatctgattactctgagcgccatcaccagcgactatgtcgtatggcgtaaagctccctcttcggagggagcgtcagag

SEQ ID NO: 21258 - RNA, 89 nt, synthetic construct
  misc_feature 1..89: note = engineered ribonucleic acid scaffold (ERS) sequence
  source 1..89: mol_type = other RNA
actggcgcttctatctgattactctgagcgccatcaccagcgactatgtcgtatggcgtaaagctccctcttcggagggagcatcaaag

SEQ ID NO: 21259 - RNA, 89 nt, synthetic construct
  misc_feature 1..89: note = engineered ribonucleic acid scaffold (ERS) sequence
  source 1..89: mol_type = other RNA
actggcgcttctatctgattactctcagcgccatcaccagcgactatgtcgtatggtgtaaagctccctcttcggagggagcatcagac

SEQ ID NO: 21260 - RNA, 89 nt, synthetic construct
  misc_feature 1..89: note = engineered ribonucleic acid scaffold (ERS) sequence
  source 1..89: mol_type = other RNA
actggcgcttctatctgattactttgagcgccatcaccagcgactatgtcgtatggtgtaaagctccctcttcggagggagcatcagag

SEQ ID NO: 21261 - RNA, 89 nt, synthetic construct
  misc_feature 1..89: note = engineered ribonucleic acid scaffold (ERS) sequence
  source 1..89: mol_type = other RNA
actggcgcttctatctgattactttgagcgccatcaccagcgactatgtcgtatggtgtaaagctccctcttcggagggagcatcaaag

SEQ ID NO: 21262 - RNA, 89 nt, synthetic construct
  misc_feature 1..89: note = engineered ribonucleic acid scaffold (ERS) sequence
  source 1..89: mol_type = other RNA
actggcgcttctatctgattagtctcagcgccatcaccagcgactatgtcgtatggtgtaaagctccctcttcggagggagcatgagac

SEQ ID NO: 21263 - RNA, 89 nt, synthetic construct
  misc_feature 1..89: note = engineered ribonucleic acid scaffold (ERS) sequence
  source 1..89: mol_type = other RNA
actggcgcttctatctgattagtctgagcgccatcaccagcgactatgtcgtatggtgtaaagctccctcttcggagggagcatcagac

SEQ ID NO: 21264 - RNA, 89 nt, synthetic construct
  misc_feature 1..89: note = engineered ribonucleic acid scaffold (ERS) sequence
  source 1..89: mol_type = other RNA
actggcgcttctatctgattactctcagcgccatcaccagcgactatgtcgtatggtgtaaagctccctcttcggagggagcatgagag

SEQ ID NO: 21265 - RNA, 89 nt, synthetic construct
  misc_feature 1..89: note = engineered ribonucleic acid scaffold (ERS) sequence
  source 1..89: mol_type = other RNA
actggcgctcccatctgattaccccgagcgccatcaccagcgactatgtcgtatggtgtaaagctccctcttcggagggagcatcgggg

SEQ ID NO: 21266 - RNA, 89 nt, synthetic construct
  misc_feature 1..89: note = engineered ribonucleic acid scaffold (ERS) sequence
  source 1..89: mol_type = other RNA
actggcgctcctatctgattactccgagcgccatcaccagcgactatgtcgtatggtgtaaagctccctcttcggagggagcatcggag

SEQ ID NO: 21267 - RNA, 89 nt, synthetic construct
  misc_feature 1..89: note = engineered ribonucleic acid scaffold (ERS) sequence
  source 1..89: mol_type = other RNA
actggcgctgggatctgattaccccgagcgccatcaccagcgactatgtcgtatggtgtaaagctccctcttcggagggagcatcgggg

SEQ ID NO: 21268 - RNA, 89 nt, synthetic construct
  misc_feature 1..89: note = engineered ribonucleic acid scaffold (ERS) sequence
  source 1..89: mol_type = other RNA
actggcgctggtatctgattactccgagcgccatcaccagcgactatgtcgtatggtgtaaagctccctcttcggagggagcatcggag

SEQ ID NO: 21269 - RNA, 89 nt, synthetic construct
  misc_feature 1..89: note = engineered ribonucleic acid scaffold (ERS) sequence
  source 1..89: mol_type = other RNA
actggcgcttccatctgattaccctgagcgccatcaccagcgactatgtcgtatggtgtaaagctccctcttcggagggagcatcaggg

SEQ ID NO: 21270 - RNA, 89 nt, synthetic construct
  misc_feature 1..89: note = engineered ribonucleic acid scaffold (ERS) sequence
  source 1..89: mol_type = other RNA
actggcgcttggatctgattaccctgagcgccatcaccagcgactatgtcgtatggtgtaaagctccctcttcggagggagcatcaggg

SEQ ID NO: 21271 - RNA, 89 nt, synthetic construct
  misc_feature 1..89: note = engineered ribonucleic acid scaffold (ERS) sequence
  source 1..89: mol_type = other RNA
actggcgcttgtatctgattactctgagcgccatcaccagcgactatgtcgtatggtgtaaagctccctcttcggagggagcatcagag

SEQ ID NO: 21272 - RNA, 89 nt, synthetic construct
  misc_feature 1..89: note = engineered ribonucleic acid scaffold (ERS) sequence
  source 1..89: mol_type = other RNA
actggcgcttttatctgattactttgagcgccatcaccagcgactatgtcgtatggtgtaaagctccctcttcggagggagcatcagag

SEQ ID NO: 21273 - RNA, 89 nt, synthetic construct
  misc_feature 1..89: note = engineered ribonucleic acid scaffold (ERS) sequence
  source 1..89: mol_type = other RNA
actggcgcttttatctgattactctgagcgccatcaccagcgactatgtcgtatggtgtaaagctccctcttcggagggagcatcagag

SEQ ID NO: 21274 - RNA, 89 nt, synthetic construct
  misc_feature 1..89: note = engineered ribonucleic acid scaffold (ERS) sequence
  source 1..89: mol_type = other RNA
actggcgcttttatctgattactctgagcgccatcaccagcgactatgtcgtatggtgtaaagctccctcttcggagggagcatcaaag

SEQ ID NO: 21275 - RNA, 89 nt, synthetic construct
  misc_feature 1..89: note = engineered ribonucleic acid scaffold (ERS) sequence
  source 1..89: mol_type = other RNA
actggcgcttctatctgattactctgagcgccatcaccagcgactatgtcgtatggtgtaaagctccctcttcggagggagcctcagag

SEQ ID NO: 21276 - RNA, 89 nt, synthetic construct
  misc_feature 1..89: note = engineered ribonucleic acid scaffold (ERS) sequence
  source 1..89: mol_type = other RNA
actggcgcttctatctgattactctgagcgccatcaccagcgactatgtcgtatggtgtaaagctccctcttcggagggagcgtcagag

SEQ ID NO: 21277 - RNA, 89 nt, synthetic construct
  misc_feature 1..89: note = engineered ribonucleic acid scaffold (ERS) sequence
  source 1..89: mol_type = other RNA
actggcgcttctatctgattactctgagcgccatcaccagcgactatgtcgtatggtgtaaagctccctcttcggagggagcatcaaag

SEQ ID NO: 21278 - RNA, 89 nt, synthetic construct
  misc_feature 1..89: note = engineered ribonucleic acid scaffold (ERS) sequence
  source 1..89: mol_type = other RNA
actggcgcttctatctgattactctcagcgccatcaccagcgactatgtcgtatgggctaaagctccctcttcggagggagcatcagac

SEQ ID NO: 21279 - RNA, 89 nt, synthetic construct
  misc_feature 1..89: note = engineered ribonucleic acid scaffold (ERS) sequence
  source 1..89: mol_type = other RNA
actggcgcttctatctgattactttgagcgccatcaccagcgactatgtcgtatgggctaaagctccctcttcggagggagcatcagag

SEQ ID NO: 21280 - RNA, 89 nt, synthetic construct
  misc_feature 1..89: note = engineered ribonucleic acid scaffold (ERS) sequence
  source 1..89: mol_type = other RNA
actggcgcttctatctgattactttgagcgccatcaccagcgactatgtcgtatgggctaaagctccctcttcggagggagcatcaaag

SEQ ID NO: 21281 - RNA, 89 nt, synthetic construct
  misc_feature 1..89: note = engineered ribonucleic acid scaffold (ERS) sequence
  source 1..89: mol_type = other RNA
actggcgcttctatctgattagtctcagcgccatcaccagcgactatgtcgtatgggctaaagctccctcttcggagggagcatgagac

SEQ ID NO: 21282 - RNA, 89 nt, synthetic construct
  misc_feature 1..89: note = engineered ribonucleic acid scaffold (ERS) sequence
  source 1..89: mol_type = other RNA
actggcgcttctatctgattagtctgagcgccatcaccagcgactatgtcgtatgggctaaagctccctcttcggagggagcatcagac

SEQ ID NO: 21283 - RNA, 89 nt, synthetic construct
  misc_feature 1..89: note = engineered ribonucleic acid scaffold (ERS) sequence
  source 1..89: mol_type = other RNA
actggcgcttctatctgattactctcagcgccatcaccagcgactatgtcgtatgggctaaagctccctcttcggagggagcatgagag

SEQ ID NO: 21284 - RNA, 89 nt, synthetic construct
  misc_feature 1..89: note = engineered ribonucleic acid scaffold (ERS) sequence
  source 1..89: mol_type = other RNA
actggcgctcccatctgattaccccgagcgccatcaccagcgactatgtcgtatgggctaaagctccctcttcggagggagcatcgggg

SEQ ID NO: 21285 - RNA, 89 nt, synthetic construct
  misc_feature 1..89: note = engineered ribonucleic acid scaffold (ERS) sequence
  source 1..89: mol_type = other RNA
actggcgctcctatctgattactccgagcgccatcaccagcgactatgtcgtatgggctaaagctccctcttcggagggagcatcggag

SEQ ID NO: 21286 - RNA, 89 nt, synthetic construct
  misc_feature 1..89: note = engineered ribonucleic acid scaffold (ERS) sequence
  source 1..89: mol_type = other RNA
actggcgctgggatctgattaccccgagcgccatcaccagcgactatgtcgtatgggctaaagctccctcttcggagggagcatcgggg

SEQ ID NO: 21287 - RNA, 89 nt, synthetic construct
  misc_feature 1..89: note = engineered ribonucleic acid scaffold (ERS) sequence
  source 1..89: mol_type = other RNA
actggcgctggtatctgattactccgagcgccatcaccagcgactatgtcgtatgggctaaagctccctcttcggagggagcatcggag

SEQ ID NO: 21288 - RNA, 89 nt, synthetic construct
  misc_feature 1..89: note = engineered ribonucleic acid scaffold (ERS) sequence
  source 1..89: mol_type = other RNA
actggcgcttccatctgattaccctgagcgccatcaccagcgactatgtcgtatgggctaaagctccctcttcggagggagcatcaggg

SEQ ID NO: 21289 - RNA, 89 nt, synthetic construct
  misc_feature 1..89: note = engineered ribonucleic acid scaffold (ERS) sequence
  source 1..89: mol_type = other RNA
actggcgcttggatctgattaccctgagcgccatcaccagcgactatgtcgtatgggctaaagctccctcttcggagggagcatcaggg

SEQ ID NO: 21290 - RNA, 89 nt, synthetic construct
  misc_feature 1..89: note = engineered ribonucleic acid scaffold (ERS) sequence
  source 1..89: mol_type = other RNA
actggcgcttgtatctgattactctgagcgccatcaccagcgactatgtcgtatgggctaaagctccctcttcggagggagcatcagag

SEQ ID NO: 21291 - RNA, 89 nt, synthetic construct
  misc_feature 1..89: note = engineered ribonucleic acid scaffold (ERS) sequence
  source 1..89: mol_type = other RNA
actggcgcttttatctgattactttgagcgccatcaccagcgactatgtcgtatgggctaaagctccctcttcggagggagcatcagag

SEQ ID NO: 21292 - RNA, 89 nt, synthetic construct
  misc_feature 1..89: note = engineered ribonucleic acid scaffold (ERS) sequence
  source 1..89: mol_type = other RNA
actggcgcttttatctgattactctgagcgccatcaccagcgactatgtcgtatgggctaaagctccctcttcggagggagcatcagag

SEQ ID NO: 21293 - RNA, 89 nt, synthetic construct
  misc_feature 1..89: note = engineered ribonucleic acid scaffold (ERS) sequence
  source 1..89: mol_type = other RNA
actggcgcttttatctgattactctgagcgccatcaccagcgactatgtcgtatgggctaaagctccctcttcggagggagcatcaaag

SEQ ID NO: 21294 - RNA, 89 nt, synthetic construct
  misc_feature 1..89: note = engineered ribonucleic acid scaffold (ERS) sequence
  source 1..89: mol_type = other RNA
actggcgcttctatctgattactctgagcgccatcaccagcgactatgtcgtatgggctaaagctccctcttcggagggagcctcagag

SEQ ID NO: 21295 - RNA, 89 nt, synthetic construct
  misc_feature 1..89: note = engineered ribonucleic acid scaffold (ERS) sequence
  source 1..89: mol_type = other RNA
actggcgcttctatctgattactctgagcgccatcaccagcgactatgtcgtatgggctaaagctccctcttcggagggagcgtcagag

SEQ ID NO: 21296 - RNA, 89 nt, synthetic construct
  misc_feature 1..89: note = engineered ribonucleic acid scaffold (ERS) sequence
  source 1..89: mol_type = other RNA
actggcgcttctatctgattactctgagcgccatcaccagcgactatgtcgtatgggctaaagctccctcttcggagggagcatcaaag

SEQ ID NO: 21297 - RNA, 86 nt, synthetic construct
  misc_feature 1..86: note = engineered ribonucleic acid scaffold (ERS) sequence
  source 1..86: mol_type = other RNA
actggcgcttctatctgattactctcagcgccatcaccagcgactatgtcgtatgggtagctccctcttcggagggagcatcagac

SEQ ID NO: 21298 - RNA, 86 nt, synthetic construct
  misc_feature 1..86: note = engineered ribonucleic acid scaffold (ERS) sequence
  source 1..86: mol_type = other RNA
actggcgcttctatctgattactttgagcgccatcaccagcgactatgtcgtatgggtagctccctcttcggagggagcatcagag

SEQ ID NO: 21299 - RNA, 86 nt, synthetic construct
  misc_feature 1..86: note = engineered ribonucleic acid scaffold (ERS) sequence
  source 1..86: mol_type = other RNA
actggcgcttctatctgattactttgagcgccatcaccagcgactatgtcgtatgggtagctccctcttcggagggagcatcaaag

SEQ ID NO: 21300 - RNA, 86 nt, synthetic construct
  misc_feature 1..86: note = engineered ribonucleic acid scaffold (ERS) sequence
  source 1..86: mol_type = other RNA
actggcgcttctatctgattagtctcagcgccatcaccagcgactatgtcgtatgggtagctccctcttcggagggagcatgagac

SEQ ID NO: 21301 - RNA, 86 nt, synthetic construct
  misc_feature 1..86: note = engineered ribonucleic acid scaffold (ERS) sequence
  source 1..86: mol_type = other RNA
actggcgcttctatctgattagtctgagcgccatcaccagcgactatgtcgtatgggtagctccctcttcggagggagcatcagac

SEQ ID NO: 21302 - RNA, 86 nt, synthetic construct
  misc_feature 1..86: note = engineered ribonucleic acid scaffold (ERS) sequence
  source 1..86: mol_type = other RNA
actggcgcttctatctgattactctcagcgccatcaccagcgactatgtcgtatgggtagctccctcttcggagggagcatgagag

SEQ ID NO: 21303 - RNA, 86 nt, synthetic construct
  misc_feature 1..86: note = engineered ribonucleic acid scaffold (ERS) sequence
  source 1..86: mol_type = other RNA
actggcgctcccatctgattaccccgagcgccatcaccagcgactatgtcgtatgggtagctccctcttcggagggagcatcgggg

SEQ ID NO: 21304 - RNA, 86 nt, synthetic construct
  misc_feature 1..86: note = engineered ribonucleic acid scaffold (ERS) sequence
  source 1..86: mol_type = other RNA
actggcgctcctatctgattactccgagcgccatcaccagcgactatgtcgtatgggtagctccctcttcggagggagcatcggag

SEQ ID NO: 21305 - RNA, 86 nt, synthetic construct
  misc_feature 1..86: note = engineered ribonucleic acid scaffold (ERS) sequence
  source 1..86: mol_type = other RNA
actggcgctgggatctgattaccccgagcgccatcaccagcgactatgtcgtatgggtagctccctcttcggagggagcatcgggg

SEQ ID NO: 21306 - RNA, 86 nt, synthetic construct
  misc_feature 1..86: note = engineered ribonucleic acid scaffold (ERS) sequence
  source 1..86: mol_type = other RNA
actggcgctggtatctgattactccgagcgccatcaccagcgactatgtcgtatgggtagctccctcttcggagggagcatcggag

SEQ ID NO: 21307 - RNA, 86 nt, synthetic construct
  misc_feature 1..86: note = engineered ribonucleic acid scaffold (ERS) sequence
  source 1..86: mol_type = other RNA
actggcgcttccatctgattaccctgagcgccatcaccagcgactatgtcgtatgggtagctccctcttcggagggagcatcaggg

SEQ ID NO: 21308 - RNA, 86 nt, synthetic construct
  misc_feature 1..86: note = engineered ribonucleic acid scaffold (ERS) sequence
  source 1..86: mol_type = other RNA
actggcgcttggatctgattaccctgagcgccatcaccagcgactatgtcgtatgggtagctccctcttcggagggagcatcaggg

SEQ ID NO: 21309 - RNA, 86 nt, synthetic construct
  misc_feature 1..86: note = engineered ribonucleic acid scaffold (ERS) sequence
  source 1..86: mol_type = other RNA
actggcgcttgtatctgattactctgagcgccatcaccagcgactatgtcgtatgggtagctccctcttcggagggagcatcagag

SEQ ID NO: 21310 - RNA, 86 nt, synthetic construct
  misc_feature 1..86: note = engineered ribonucleic acid scaffold (ERS) sequence
  source 1..86: mol_type = other RNA
actggcgcttttatctgattactttgagcgccatcaccagcgactatgtcgtatgggtagctccctcttcggagggagcatcagag

SEQ ID NO: 21311 - RNA, 86 nt, synthetic construct
  misc_feature 1..86: note = engineered ribonucleic acid scaffold (ERS) sequence
  source 1..86: mol_type = other RNA
actggcgcttttatctgattactctgagcgccatcaccagcgactatgtcgtatgggtagctccctcttcggagggagcatcagag

SEQ ID NO: 21312 - RNA, 86 nt, synthetic construct
  misc_feature 1..86: note = engineered ribonucleic acid scaffold (ERS) sequence
  source 1..86: mol_type = other RNA
actggcgcttttatctgattactctgagcgccatcaccagcgactatgtcgtatgggtagctccctcttcggagggagcatcaaag

SEQ ID NO: 21313 - RNA, 86 nt, synthetic construct
  misc_feature 1..86: note = engineered ribonucleic acid scaffold (ERS) sequence
  source 1..86: mol_type = other RNA
actggcgcttctatctgattactctgagcgccatcaccagcgactatgtcgtatgggtagctccctcttcggagggagcctcagag

SEQ ID NO: 21314 - RNA, 86 nt, synthetic construct
  misc_feature 1..86: note = engineered ribonucleic acid scaffold (ERS) sequence
  source 1..86: mol_type = other RNA
actggcgcttctatctgattactctgagcgccatcaccagcgactatgtcgtatgggtagctccctcttcggagggagcgtcagag

SEQ ID NO: 21315 - RNA, 86 nt, synthetic construct
  misc_feature 1..86: note = engineered ribonucleic acid scaffold (ERS) sequence
  source 1..86: mol_type = other RNA
actggcgcttctatctgattactctgagcgccatcaccagcgactatgtcgtatgggtagctccctcttcggagggagcatcaaag

SEQ ID NO: 21316 - RNA, 88 nt, synthetic construct
  misc_feature 1..88: note = engineered ribonucleic acid scaffold (ERS) sequence
  source 1..88: mol_type = other RNA
actggcgcttctatctgattactctcagcgccatcaccagcgactatgtcgtatgggtgaagctccctcttcggagggagcatcagac

SEQ ID NO: 21317 - RNA, 88 nt, synthetic construct
  misc_feature 1..88: note = engineered ribonucleic acid scaffold (ERS) sequence
  source 1..88: mol_type = other RNA
actggcgcttctatctgattactttgagcgccatcaccagcgactatgtcgtatgggtgaagctccctcttcggagggagcatcagag

SEQ ID NO: 21318 - RNA, 88 nt, synthetic construct
  misc_feature 1..88: note = engineered ribonucleic acid scaffold (ERS) sequence
  source 1..88: mol_type = other RNA
actggcgcttctatctgattactttgagcgccatcaccagcgactatgtcgtatgggtgaagctccctcttcggagggagcatcaaag

SEQ ID NO: 21319 - RNA, 88 nt, synthetic construct
  misc_feature 1..88: note = engineered ribonucleic acid scaffold (ERS) sequence
  source 1..88: mol_type = other RNA
actggcgcttctatctgattagtctcagcgccatcaccagcgactatgtcgtatgggtgaagctccctcttcggagggagcatgagac

SEQ ID NO: 21320 - RNA, 88 nt, synthetic construct
  misc_feature 1..88: note = engineered ribonucleic acid scaffold (ERS) sequence
  source 1..88: mol_type = other RNA
actggcgcttctatctgattagtctgagcgccatcaccagcgactatgtcgtatgggtgaagctccctcttcggagggagcatcagac

SEQ ID NO: 21321 - RNA, 88 nt, synthetic construct
  misc_feature 1..88: note = engineered ribonucleic acid scaffold (ERS) sequence
  source 1..88: mol_type = other RNA
actggcgcttctatctgattactctcagcgccatcaccagcgactatgtcgtatgggtgaagctccctcttcggagggagcatgagag

SEQ ID NO: 21322 - RNA, 88 nt, synthetic construct
  misc_feature 1..88: note = engineered ribonucleic acid scaffold (ERS) sequence
  source 1..88: mol_type = other RNA
actggcgctcccatctgattaccccgagcgccatcaccagcgactatgtcgtatgggtgaagctccctcttcggagggagcatcgggg

SEQ ID NO: 21323 - RNA, 88 nt, synthetic construct
  misc_feature 1..88: note = engineered ribonucleic acid scaffold (ERS) sequence
  source 1..88: mol_type = other RNA
actggcgctcctatctgattactccgagcgccatcaccagcgactatgtcgtatgggtgaagctccctcttcggagggagcatcggag

SEQ ID NO: 21324 - RNA, 88 nt, synthetic construct
  misc_feature 1..88: note = engineered ribonucleic acid scaffold (ERS) sequence
  source 1..88: mol_type = other RNA
actggcgctgggatctgattaccccgagcgccatcaccagcgactatgtcgtatgggtgaagctccctcttcggagggagcatcgggg

SEQ ID NO: 21325 - RNA, 88 nt, synthetic construct
  misc_feature 1..88: note = engineered ribonucleic acid scaffold (ERS) sequence
  source 1..88: mol_type = other RNA
actggcgctggtatctgattactccgagcgccatcaccagcgactatgtcgtatgggtgaagctccctcttcggagggagcatcggag

SEQ ID NO: 21326 - RNA, 88 nt, synthetic construct
  misc_feature 1..88: note = engineered ribonucleic acid scaffold (ERS) sequence
  source 1..88: mol_type = other RNA
actggcgcttccatctgattaccctgagcgccatcaccagcgactatgtcgtatgggtgaagctccctcttcggagggagcatcaggg

SEQ ID NO: 21327 - RNA, 88 nt, synthetic construct
  misc_feature 1..88: note = engineered ribonucleic acid scaffold (ERS) sequence
  source 1..88: mol_type = other RNA
actggcgcttggatctgattaccctgagcgccatcaccagcgactatgtcgtatgggtgaagctccctcttcggagggagcatcaggg

SEQ ID NO: 21328 - RNA, 88 nt, synthetic construct
  misc_feature 1..88: note = engineered ribonucleic acid scaffold (ERS) sequence
  source 1..88: mol_type = other RNA
actggcgcttgtatctgattactctgagcgccatcaccagcgactatgtcgtatgggtgaagctccctcttcggagggagcatcagag

SEQ ID NO: 21329 - RNA, 88 nt, synthetic construct
  misc_feature 1..88: note = engineered ribonucleic acid scaffold (ERS) sequence
  source 1..88: mol_type = other RNA
actggcgcttttatctgattactttgagcgccatcaccagcgactatgtcgtatgggtgaagctccctcttcggagggagcatcagag

SEQ ID NO: 21330 - RNA, 88 nt, synthetic construct
  misc_feature 1..88: note = engineered ribonucleic acid scaffold (ERS) sequence
  source 1..88: mol_type = other RNA
actggcgcttttatctgattactctgagcgccatcaccagcgactatgtcgtatgggtgaagctccctcttcggagggagcatcagag

SEQ ID NO: 21331 - RNA, 88 nt, synthetic construct
  misc_feature 1..88: note = engineered ribonucleic acid scaffold (ERS) sequence
  source 1..88: mol_type = other RNA
actggcgcttttatctgattactctgagcgccatcaccagcgactatgtcgtatgggtgaagctccctcttcggagggagcatcaaag

SEQ ID NO: 21332 - RNA, 88 nt, synthetic construct
  misc_feature 1..88: note = engineered ribonucleic acid scaffold (ERS) sequence
  source 1..88: mol_type = other RNA
actggcgcttctatctgattactctgagcgccatcaccagcgactatgtcgtatgggtgaagctccctcttcggagggagcctcagag

SEQ ID NO: 21333 - RNA, 88 nt, synthetic construct
  misc_feature 1..88: note = engineered ribonucleic acid scaffold (ERS) sequence
  source 1..88: mol_type = other RNA
actggcgcttctatctgattactctgagcgccatcaccagcgactatgtcgtatgggtgaagctccctcttcggagggagcgtcagag

SEQ ID NO: 21334 - RNA, 88 nt, synthetic construct
  misc_feature 1..88: note = engineered ribonucleic acid scaffold (ERS) sequence
  source 1..88: mol_type = other RNA
actggcgcttctatctgattactctgagcgccatcaccagcgactatgtcgtatgggtgaagctccctcttcggagggagcatcaaag

SEQ ID NO: 21335 - RNA, 88 nt, synthetic construct
  misc_feature 1..88: note = engineered ribonucleic acid scaffold (ERS) sequence
  source 1..88: mol_type = other RNA
actggcgcttctatctgattactctcagcgccatcaccagcgactatgtcgtatgggtagagctccctcttcggagggagcatcagac

SEQ ID NO: 21336 - RNA, 88 nt, synthetic construct
  misc_feature 1..88: note = engineered ribonucleic acid scaffold (ERS) sequence
  source 1..88: mol_type = other RNA
actggcgcttctatctgattactttgagcgccatcaccagcgactatgtcgtatgggtagagctccctcttcggagggagcatcagag

SEQ ID NO: 21337 - RNA, 88 nt, synthetic construct
  misc_feature 1..88: note = engineered ribonucleic acid scaffold (ERS) sequence
  source 1..88: mol_type = other RNA
actggcgcttctatctgattactttgagcgccatcaccagcgactatgtcgtatgggtagagctccctcttcggagggagcatcaaag

SEQ ID NO: 21338 - RNA, 88 nt, synthetic construct
  misc_feature 1..88: note = engineered ribonucleic acid scaffold (ERS) sequence
  source 1..88: mol_type = other RNA
actggcgcttctatctgattagtctcagcgccatcaccagcgactatgtcgtatgggtagagctccctcttcggagggagcatgagac

SEQ ID NO: 21339 - RNA, 88 nt, synthetic construct
  misc_feature 1..88: note = engineered ribonucleic acid scaffold (ERS) sequence
  source 1..88: mol_type = other RNA
actggcgcttctatctgattagtctgagcgccatcaccagcgactatgtcgtatgggtagagctccctcttcggagggagcatcagac

SEQ ID NO: 21340 - RNA, 88 nt, synthetic construct
  misc_feature 1..88: note = engineered ribonucleic acid scaffold (ERS) sequence
  source 1..88: mol_type = other RNA
actggcgcttctatctgattactctcagcgccatcaccagcgactatgtcgtatgggtagagctccctcttcggagggagcatgagag

SEQ ID NO: 21341 - RNA, 88 nt, synthetic construct
  misc_feature 1..88: note = engineered ribonucleic acid scaffold (ERS) sequence
  source 1..88: mol_type = other RNA
actggcgctcccatctgattaccccgagcgccatcaccagcgactatgtcgtatgggtagagctccctcttcggagggagcatcgggg

SEQ ID NO: 21342 - RNA, 88 nt, synthetic construct
  misc_feature 1..88: note = engineered ribonucleic acid scaffold (ERS) sequence
  source 1..88: mol_type = other RNA
actggcgctcctatctgattactccgagcgccatcaccagcgactatgtcgtatgggtagagctccctcttcggagggagcatcggag

SEQ ID NO: 21343 - RNA, 88 nt, synthetic construct
  misc_feature 1..88: note = engineered ribonucleic acid scaffold (ERS) sequence
  source 1..88: mol_type = other RNA
actggcgctgggatctgattaccccgagcgccatcaccagcgactatgtcgtatgggtagagctccctcttcggagggagcatcgggg

SEQ ID NO: 21344 - RNA, 88 nt, synthetic construct
  misc_feature 1..88: note = engineered ribonucleic acid scaffold (ERS) sequence
  source 1..88: mol_type = other RNA
actggcgctggtatctgattactccgagcgccatcaccagcgactatgtcgtatgggtagagctccctcttcggagggagcatcggag

SEQ ID NO: 21345 - RNA, 88 nt, synthetic construct
  misc_feature 1..88: note = engineered ribonucleic acid scaffold (ERS) sequence
  source 1..88: mol_type = other RNA
actggcgcttccatctgattaccctgagcgccatcaccagcgactatgtcgtatgggtagagctccctcttcggagggagcatcaggg

SEQ ID NO: 21346 - RNA, 88 nt, synthetic construct
  misc_feature 1..88: note = engineered ribonucleic acid scaffold (ERS) sequence
  source 1..88: mol_type = other RNA
actggcgcttggatctgattaccctgagcgccatcaccagcgactatgtcgtatgggtagagctccctcttcggagggagcatcaggg

SEQ ID NO: 21347 - RNA, 88 nt, synthetic construct
  misc_feature 1..88: note = engineered ribonucleic acid scaffold (ERS) sequence
  source 1..88: mol_type = other RNA
actggcgcttgtatctgattactctgagcgccatcaccagcgactatgtcgtatgggtagagctccctcttcggagggagcatcagag

SEQ ID NO: 21348 - RNA, 88 nt, synthetic construct
  misc_feature 1..88: note = engineered ribonucleic acid scaffold (ERS) sequence
  source 1..88: mol_type = other RNA
actggcgcttttatctgattactttgagcgccatcaccagcgactatgtcgtatgggtagagctccctcttcggagggagcatcagag

SEQ ID NO: 21349 - RNA, 88 nt, synthetic construct
  misc_feature 1..88: note = engineered ribonucleic acid scaffold (ERS) sequence
  source 1..88: mol_type = other RNA
actggcgcttttatctgattactctgagcgccatcaccagcgactatgtcgtatgggtagagctccctcttcggagggagcatcagag

SEQ ID NO: 21350 - RNA, 88 nt, synthetic construct
  misc_feature 1..88: note = engineered ribonucleic acid scaffold (ERS) sequence
  source 1..88: mol_type = other RNA
actggcgcttttatctgattactctgagcgccatcaccagcgactatgtcgtatgggtagagctccctcttcggagggagcatcaaag

SEQ ID NO: 21351 - RNA, 88 nt, synthetic construct
  misc_feature 1..88: note = engineered ribonucleic acid scaffold (ERS) sequence
  source 1..88: mol_type = other RNA
actggcgcttctatctgattactctgagcgccatcaccagcgactatgtcgtatgggtagagctccctcttcggagggagcctcagag

SEQ ID NO: 21352 - RNA, 88 nt, synthetic construct
  misc_feature 1..88: note = engineered ribonucleic acid scaffold (ERS) sequence
  source 1..88: mol_type = other RNA
actggcgcttctatctgattactctgagcgccatcaccagcgactatgtcgtatgggtagagctccctcttcggagggagcgtcagag

SEQ ID NO: 21353 - RNA, 88 nt, synthetic construct
  misc_feature 1..88: note = engineered ribonucleic acid scaffold (ERS) sequence
  source 1..88: mol_type = other RNA
actggcgcttctatctgattactctgagcgccatcaccagcgactatgtcgtatgggtagagctccctcttcggagggagcatcaaag

SEQ ID NO: 21354 - RNA, 90 nt, synthetic construct
  misc_feature 1..90: note = engineered ribonucleic acid scaffold (ERS) sequence
  source 1..90: mol_type = other RNA
actggcgcttctatatctgattactctgagcgccaacaccagcgactatgtcgtatgggtaaagctccctcttcggagggagcatcagag

SEQ ID NO: 21355 - RNA, 89 nt, synthetic construct
  misc_feature 1..89: note = engineered ribonucleic acid scaffold (ERS) sequence
  source 1..89: mol_type = other RNA
actggcgcttctaatctgattactctgagcgccaacaccagcgactatgtcgtatgggtaaagctccctcttcggagggagcatcagag

SEQ ID NO: 21356 - RNA, 87 nt, synthetic construct
  misc_feature 1..87: note = engineered ribonucleic acid scaffold (ERS) sequence
  source 1..87: mol_type = other RNA
actggcgcttctactgattactctgagcgccaacaccagcgactatgtcgtatgggtaaagctccctcttcggagggagcatcagag

SEQ ID NO: 21357 - RNA, 88 nt, synthetic construct
  misc_feature 1..88: note = engineered ribonucleic acid scaffold (ERS) sequence
  source 1..88: mol_type = other RNA
actggcgcttctaactgattactctgagcgccaacaccagcgactatgtcgtatgggtaaagctccctcttcggagggagcatcagag

SEQ ID NO: 21358 - RNA, 88 nt, synthetic construct
  misc_feature 1..88: note = engineered ribonucleic acid scaffold (ERS) sequence
  source 1..88: mol_type = other RNA
actggcgcttctacctgattactctgagcgccaacaccagcgactatgtcgtatgggtaaagctccctcttcggagggagcatcagag

SEQ ID NO: 21359 - RNA, 88 nt, synthetic construct
  misc_feature 1..88: note = engineered ribonucleic acid scaffold (ERS) sequence
  source 1..88: mol_type = other RNA
actggcgcttctagctgattactctgagcgccaacaccagcgactatgtcgtatgggtaaagctccctcttcggagggagcatcagag

SEQ ID NO: 21360 - RNA, 90 nt, synthetic construct
  misc_feature 1..90: note = engineered ribonucleic acid scaffold (ERS) sequence
  source 1..90: mol_type = other RNA
actggcgcttctattactgattactctgagcgccaacaccagcgactatgtcgtatgggtaaagctccctcttcggagggagcatcagag

SEQ ID NO: 21361 - RNA, 88 nt, synthetic construct
  misc_feature 1..88: note = engineered ribonucleic acid scaffold (ERS) sequence
  source 1..88: mol_type = other RNA
actggcgcttctatatgattactctgagcgccaacaccagcgactatgtcgtatgggtaaagctccctcttcggagggagcatcagag

SEQ ID NO: 21362 - RNA, 88 nt, synthetic construct
  misc_feature 1..88: note = engineered ribonucleic acid scaffold (ERS) sequence
  source 1..88: mol_type = other RNA
actggcgcttctatgtgattactctgagcgccaacaccagcgactatgtcgtatgggtaaagctccctcttcggagggagcatcagag

SEQ ID NO: 21363 - RNA, 88 nt, synthetic construct
  misc_feature 1..88: note = engineered ribonucleic acid scaffold (ERS) sequence
  source 1..88: mol_type = other RNA
actggcgcttctatttgattactctgagcgccaacaccagcgactatgtcgtatgggtaaagctccctcttcggagggagcatcagag

SEQ ID NO: 21364 - RNA, 89 nt, synthetic construct
  misc_feature 1..89: note = engineered ribonucleic acid scaffold (ERS) sequence
  source 1..89: mol_type = other RNA
actggcgcttctatcttgattactctgagcgccaacaccagcgactatgtcgtatgggtaaagctccctcttcggagggagcatcagag

SEQ ID NO: 21365 - RNA, 88 nt, synthetic construct
  misc_feature 1..88: note = engineered ribonucleic acid scaffold (ERS) sequence
  source 1..88: mol_type = other RNA
actggcgcttctatcagattactctgagcgccaacaccagcgactatgtcgtatgggtaaagctccctcttcggagggagcatcagag

SEQ ID NO: 21366 - RNA, 88 nt, synthetic construct
  misc_feature 1..88: note = engineered ribonucleic acid scaffold (ERS) sequence
  source 1..88: mol_type = other RNA
actggcgcttctatcggattactctgagcgccaacaccagcgactatgtcgtatgggtaaagctccctcttcggagggagcatcagag

SEQ ID NO: 21367 - RNA, 89 nt, synthetic construct
  misc_feature 1..89: note = engineered ribonucleic acid scaffold (ERS) sequence
  source 1..89: mol_type = other RNA
actggcgcttctatctgaattactctgagcgccaacaccagcgactatgtcgtatgggtaaagctccctcttcggagggagcatcagag

SEQ ID NO: 21368 - RNA, 89 nt, synthetic construct
  misc_feature 1..89: note = engineered ribonucleic acid scaffold (ERS) sequence
  source 1..89: mol_type = other RNA
actggcgcttctatctgtattactctgagcgccaacaccagcgactatgtcgtatgggtaaagctccctcttcggagggagcatcagag

SEQ ID NO: 21369 - RNA, 88 nt, synthetic construct
  misc_feature 1..88: note = engineered ribonucleic acid scaffold (ERS) sequence
  source 1..88: mol_type = other RNA
actggcgcttctatctggttactctgagcgccaacaccagcgactatgtcgtatgggtaaagctccctcttcggagggagcatcagag

SEQ ID NO: 21370 - RNA, 88 nt, synthetic construct
  misc_feature 1..88: note = engineered ribonucleic acid scaffold (ERS) sequence
  source 1..88: mol_type = other RNA
actggcgcttctatctgtttactctgagcgccaacaccagcgactatgtcgtatgggtaaagctccctcttcggagggagcatcagag

SEQ ID NO: 21371 - RNA, 89 nt, synthetic construct
  misc_feature 1..89: note = engineered ribonucleic acid scaffold (ERS) sequence
  source 1..89: mol_type = other RNA
actggcgcttctatctgatttactctgagcgccaacaccagcgactatgtcgtatgggtaaagctccctcttcggagggagcatcagag

SEQ ID NO: 21372 - RNA, 88 nt, synthetic construct
  misc_feature 1..88: note = engineered ribonucleic acid scaffold (ERS) sequence
  source 1..88: mol_type = other RNA
actggcgcttctatctgattgctctgagcgccaacaccagcgactatgtcgtatgggtaaagctccctcttcggagggagcatcagag

SEQ ID NO: 21373 - RNA, 90 nt, synthetic construct
  misc_feature 1..90: note = engineered ribonucleic acid scaffold (ERS) sequence
  source 1..90: mol_type = other RNA
actggcgcttctatatctgattactctgagcgccagcaccagcgactatgtcgtatgggtaaagctccctcttcggagggagcatcagag

SEQ ID NO: 21374 - RNA, 89 nt, synthetic construct
  misc_feature 1..89: note = engineered ribonucleic acid scaffold (ERS) sequence
  source 1..89: mol_type = other RNA
actggcgcttctaatctgattactctgagcgccagcaccagcgactatgtcgtatgggtaaagctccctcttcggagggagcatcagag

SEQ ID NO: 21375 - RNA, 87 nt, synthetic construct
  misc_feature 1..87: note = engineered ribonucleic acid scaffold (ERS) sequence
  source 1..87: mol_type = other RNA
actggcgcttctactgattactctgagcgccagcaccagcgactatgtcgtatgggtaaagctccctcttcggagggagcatcagag

SEQ ID NO: 21376 - RNA, 88 nt, synthetic construct
  misc_feature 1..88: note = engineered ribonucleic acid scaffold (ERS) sequence
  source 1..88: mol_type = other RNA
actggcgcttctaactgattactctgagcgccagcaccagcgactatgtcgtatgggtaaagctccctcttcggagggagcatcagag

SEQ ID NO: 21377 - RNA, 88 nt, synthetic construct
  misc_feature 1..88: note = engineered ribonucleic acid scaffold (ERS) sequence
  source 1..88: mol_type = other RNA
actggcgcttctacctgattactctgagcgccagcaccagcgactatgtcgtatgggtaaagctccctcttcggagggagcatcagag

SEQ ID NO: 21378 - RNA, 88 nt, synthetic construct
  misc_feature 1..88: note = engineered ribonucleic acid scaffold (ERS) sequence
  source 1..88: mol_type = other RNA
actggcgcttctagctgattactctgagcgccagcaccagcgactatgtcgtatgggtaaagctccctcttcggagggagcatcagag

SEQ ID NO: 21379 - RNA, 90 nt, synthetic construct
  misc_feature 1..90: note = engineered ribonucleic acid scaffold (ERS) sequence
  source 1..90: mol_type = other RNA
actggcgcttctattactgattactctgagcgccagcaccagcgactatgtcgtatgggtaaagctccctcttcggagggagcatcagag

SEQ ID NO: 21380 - RNA, 88 nt, synthetic construct
  misc_feature 1..88: note = engineered ribonucleic acid scaffold (ERS) sequence
  source 1..88: mol_type = other RNA
actggcgcttctatatgattactctgagcgccagcaccagcgactatgtcgtatgggtaaagctccctcttcggagggagcatcagag

SEQ ID NO: 21381 - RNA, 88 nt, synthetic construct
  misc_feature 1..88: note = engineered ribonucleic acid scaffold (ERS) sequence
  source 1..88: mol_type = other RNA
actggcgcttctatgtgattactctgagcgccagcaccagcgactatgtcgtatgggtaaagctccctcttcggagggagcatcagag

SEQ ID NO: 21382 - RNA, 88 nt, synthetic construct
  misc_feature 1..88: note = engineered ribonucleic acid scaffold (ERS) sequence
  source 1..88: mol_type = other RNA
actggcgcttctatttgattactctgagcgccagcaccagcgactatgtcgtatgggtaaagctccctcttcggagggagcatcagag

SEQ ID NO: 21383 - RNA, 89 nt, synthetic construct
  misc_feature 1..89: note = engineered ribonucleic acid scaffold (ERS) sequence
  source 1..89: mol_type = other RNA
actggcgcttctatcttgattactctgagcgccagcaccagcgactatgtcgtatgggtaaagctccctcttcggagggagcatcagag

SEQ ID NO: 21384 - RNA, 88 nt, synthetic construct
  misc_feature 1..88: note = engineered ribonucleic acid scaffold (ERS) sequence
  source 1..88: mol_type = other RNA
actggcgcttctatcagattactctgagcgccagcaccagcgactatgtcgtatgggtaaagctccctcttcggagggagcatcagag

SEQ ID NO: 21385 - RNA, 88 nt, synthetic construct
  misc_feature 1..88: note = engineered ribonucleic acid scaffold (ERS) sequence
  source 1..88: mol_type = other RNA
actggcgcttctatcggattactctgagcgccagcaccagcgactatgtcgtatgggtaaagctccctcttcggagggagcatcagag

SEQ ID NO: 21386 - RNA, 89 nt, synthetic construct
  misc_feature 1..89: note = engineered ribonucleic acid scaffold (ERS) sequence
  source 1..89: mol_type = other RNA
actggcgcttctatctgaattactctgagcgccagcaccagcgactatgtcgtatgggtaaagctccctcttcggagggagcatcagag

SEQ ID NO: 21387 - RNA, 89 nt, synthetic construct
  misc_feature 1..89: note = engineered ribonucleic acid scaffold (ERS) sequence
  source 1..89: mol_type = other RNA
actggcgcttctatctgtattactctgagcgccagcaccagcgactatgtcgtatgggtaaagctccctcttcggagggagcatcagag

SEQ ID NO: 21388 - RNA, 88 nt, synthetic construct
  misc_feature 1..88: note = engineered ribonucleic acid scaffold (ERS) sequence
  source 1..88: mol_type = other RNA
actggcgcttctatctggttactctgagcgccagcaccagcgactatgtcgtatgggtaaagctccctcttcggagggagcatcagag

SEQ ID NO: 21389 - RNA, 88 nt, synthetic construct
  misc_feature 1..88: note = engineered ribonucleic acid scaffold (ERS) sequence
  source 1..88: mol_type = other RNA
actggcgcttctatctgtttactctgagcgccagcaccagcgactatgtcgtatgggtaaagctccctcttcggagggagcatcagag

SEQ ID NO: 21390 - RNA, 89 nt, synthetic construct
  misc_feature 1..89: note = engineered ribonucleic acid scaffold (ERS) sequence
  source 1..89: mol_type = other RNA
actggcgcttctatctgatttactctgagcgccagcaccagcgactatgtcgtatgggtaaagctccctcttcggagggagcatcagag

SEQ ID NO: 21391 - RNA, 88 nt, synthetic construct
  misc_feature 1..88: note = engineered ribonucleic acid scaffold (ERS) sequence
  source 1..88: mol_type = other RNA
actggcgcttctatctgattgctctgagcgccagcaccagcgactatgtcgtatgggtaaagctccctcttcggagggagcatcagag

SEQ ID NO: 21392 - RNA, 90 nt, synthetic construct
  misc_feature 1..90: note = engineered ribonucleic acid scaffold (ERS) sequence
  source 1..90: mol_type = other RNA
actggcgcttctatatctgattactctgagcgccatgaccagcgactatgtcgtatgggtaaagctccctcttcggagggagcatcagag

SEQ ID NO: 21393 - RNA, 89 nt, synthetic construct
  misc_feature 1..89: note = engineered ribonucleic acid scaffold (ERS) sequence
  source 1..89: mol_type = other RNA
actggcgcttctaatctgattactctgagcgccatgaccagcgactatgtcgtatgggtaaagctccctcttcggagggagcatcagag

SEQ ID NO: 21394 - RNA, 87 nt, synthetic construct
  misc_feature 1..87: note = engineered ribonucleic acid scaffold (ERS) sequence
  source 1..87: mol_type = other RNA
actggcgcttctactgattactctgagcgccatgaccagcgactatgtcgtatgggtaaagctccctcttcggagggagcatcagag

SEQ ID NO: 21395 - RNA, 88 nt, synthetic construct
  misc_feature 1..88: note = engineered ribonucleic acid scaffold (ERS) sequence
  source 1..88: mol_type = other RNA
actggcgcttctaactgattactctgagcgccatgaccagcgactatgtcgtatgggtaaagctccctcttcggagggagcatcagag

SEQ ID NO: 21396 - RNA, 88 nt, synthetic construct
  misc_feature 1..88: note = engineered ribonucleic acid scaffold (ERS) sequence
  source 1..88: mol_type = other RNA
actggcgcttctacctgattactctgagcgccatgaccagcgactatgtcgtatgggtaaagctccctcttcggagggagcatcagag

SEQ ID NO: 21397 - RNA, 88 nt, synthetic construct
  misc_feature 1..88: note = engineered ribonucleic acid scaffold (ERS) sequence
  source 1..88: mol_type = other RNA
actggcgcttctagctgattactctgagcgccatgaccagcgactatgtcgtatgggtaaagctccctcttcggagggagcatcagag

SEQ ID NO: 21398 - RNA, 90 nt, synthetic construct
  misc_feature 1..90: note = engineered ribonucleic acid scaffold (ERS) sequence
  source 1..90: mol_type = other RNA
actggcgcttctattactgattactctgagcgccatgaccagcgactatgtcgtatgggtaaagctccctcttcggagggagcatcagag

SEQ ID NO: 21399 - RNA, 88 nt, synthetic construct
  misc_feature 1..88: note = engineered ribonucleic acid scaffold (ERS) sequence
  source 1..88: mol_type = other RNA
actggcgcttctatatgattactctgagcgccatgaccagcgactatgtcgtatgggtaaagctccctcttcggagggagcatcagag

SEQ ID NO: 21400 - RNA, 88 nt, synthetic construct
  misc_feature 1..88: note = engineered ribonucleic acid scaffold (ERS) sequence
  source 1..88: mol_type = other RNA
actggcgcttctatgtgattactctgagcgccatgaccagcgactatgtcgtatgggtaaagctccctcttcggagggagcatcagag

SEQ ID NO: 21401 - RNA, 88 nt, synthetic construct
  misc_feature 1..88: note = engineered ribonucleic acid scaffold (ERS) sequence
  source 1..88: mol_type = other RNA
actggcgcttctatttgattactctgagcgccatgaccagcgactatgtcgtatgggtaaagctccctcttcggagggagcatcagag

SEQ ID NO: 21402 - RNA, 89 nt, synthetic construct
  misc_feature 1..89: note = engineered ribonucleic acid scaffold (ERS) sequence
  source 1..89: mol_type = other RNA
actggcgcttctatcttgattactctgagcgccatgaccagcgactatgtcgtatgggtaaagctccctcttcggagggagcatcagag

SEQ ID NO: 21403 - RNA, 88 nt, synthetic construct
  misc_feature 1..88: note = engineered ribonucleic acid scaffold (ERS) sequence
  source 1..88: mol_type = other RNA
actggcgcttctatcagattactctgagcgccatgaccagcgactatgtcgtatgggtaaagctccctcttcggagggagcatcagag

SEQ ID NO: 21404 - RNA, 88 nt, synthetic construct
  misc_feature 1..88: note = engineered ribonucleic acid scaffold (ERS) sequence
  source 1..88: mol_type = other RNA
actggcgcttctatcggattactctgagcgccatgaccagcgactatgtcgtatgggtaaagctccctcttcggagggagcatcagag

SEQ ID NO: 21405 - RNA, 89 nt, synthetic construct
  misc_feature 1..89: note = engineered ribonucleic acid scaffold (ERS) sequence
  source 1..89: mol_type = other RNA
actggcgcttctatctgaattactctgagcgccatgaccagcgactatgtcgtatgggtaaagctccctcttcggagggagcatcagag

SEQ ID NO: 21406 - RNA, 89 nt, synthetic construct
  misc_feature 1..89: note = engineered ribonucleic acid scaffold (ERS) sequence
  source 1..89: mol_type = other RNA
actggcgcttctatctgtattactctgagcgccatgaccagcgactatgtcgtatgggtaaagctccctcttcggagggagcatcagag

SEQ ID NO: 21407 - RNA, 88 nt, synthetic construct
  misc_feature 1..88: note = engineered ribonucleic acid scaffold (ERS) sequence
  source 1..88: mol_type = other RNA
actggcgcttctatctggttactctgagcgccatgaccagcgactatgtcgtatgggtaaagctccctcttcggagggagcatcagag

SEQ ID NO: 21408 - RNA, 88 nt, synthetic construct
  misc_feature 1..88: note = engineered ribonucleic acid scaffold (ERS) sequence
  source 1..88: mol_type = other RNA
actggcgcttctatctgtttactctgagcgccatgaccagcgactatgtcgtatgggtaaagctccctcttcggagggagcatcagag

SEQ ID NO: 21409 - RNA, 89 nt, synthetic construct
  misc_feature 1..89: note = engineered ribonucleic acid scaffold (ERS) sequence
  source 1..89: mol_type = other RNA
actggcgcttctatctgatttactctgagcgccatgaccagcgactatgtcgtatgggtaaagctccctcttcggagggagcatcagag

SEQ ID NO: 21410 - RNA, 88 nt, synthetic construct
  misc_feature 1..88: note = engineered ribonucleic acid scaffold (ERS) sequence
  source 1..88: mol_type = other RNA
actggcgcttctatctgattgctctgagcgccatgaccagcgactatgtcgtatgggtaaagctccctcttcggagggagcatcagag

SEQ ID NO: 21411 - RNA, 90 nt, synthetic construct
  misc_feature 1..90: note = engineered ribonucleic acid scaffold (ERS) sequence
  source 1..90: mol_type = other RNA
actggcgcttctatatctgattactctgagcgccatgaccagcgactatgtcgtatggctaaagctccctcttcggagggagcatcagag

SEQ ID NO: 21412 - RNA, 89 nt, synthetic construct
  misc_feature 1..89: note = engineered ribonucleic acid scaffold (ERS) sequence
  source 1..89: mol_type = other RNA
actggcgcttctaatctgattactctgagcgccatgaccagcgactatgtcgtatggctaaagctccctcttcggagggagcatcagag

SEQ ID NO: 21413 - RNA, 87 nt, synthetic construct
  misc_feature 1..87: note = engineered ribonucleic acid scaffold (ERS) sequence
  source 1..87: mol_type = other RNA
actggcgcttctactgattactctgagcgccatgaccagcgactatgtcgtatggctaaagctccctcttcggagggagcatcagag

SEQ ID NO: 21414 - RNA, 88 nt, synthetic construct
  misc_feature 1..88: note = engineered ribonucleic acid scaffold (ERS) sequence
  source 1..88: mol_type = other RNA
actggcgcttctaactgattactctgagcgccatgaccagcgactatgtcgtatggctaaagctccctcttcggagggagcatcagag

SEQ ID NO: 21415 - RNA, 88 nt, synthetic construct
  misc_feature 1..88: note = engineered ribonucleic acid scaffold (ERS) sequence
  source 1..88: mol_type = other RNA
actggcgcttctacctgattactctgagcgccatgaccagcgactatgtcgtatggctaaagctccctcttcggagggagcatcagag

SEQ ID NO: 21416 - RNA, 88 nt, synthetic construct
  misc_feature 1..88: note = engineered ribonucleic acid scaffold (ERS) sequence
  source 1..88: mol_type = other RNA
actggcgcttctagctgattactctgagcgccatgaccagcgactatgtcgtatggctaaagctccctcttcggagggagcatcagag

SEQ ID NO: 21417 - RNA, 90 nt, synthetic construct
  misc_feature 1..90: note = engineered ribonucleic acid scaffold (ERS) sequence
  source 1..90: mol_type = other RNA
actggcgcttctattactgattactctgagcgccatgaccagcgactatgtcgtatggctaaagctccctcttcggagggagcatcagag

SEQ ID NO: 21418 - RNA, 88 nt, synthetic construct
  misc_feature 1..88: note = engineered ribonucleic acid scaffold (ERS) sequence
  source 1..88: mol_type = other RNA
actggcgcttctatatgattactctgagcgccatgaccagcgactatgtcgtatggctaaagctccctcttcggagggagcatcagag

SEQ ID NO: 21419 - RNA, 88 nt, synthetic construct
  misc_feature 1..88: note = engineered ribonucleic acid scaffold (ERS) sequence
  source 1..88: mol_type = other RNA
actggcgcttctatgtgattactctgagcgccatgaccagcgactatgtcgtatggctaaagctccctcttcggagggagcatcagag

SEQ ID NO: 21420 - RNA, 88 nt, synthetic construct
  misc_feature 1..88: note = engineered ribonucleic acid scaffold (ERS) sequence
  source 1..88: mol_type = other RNA
actggcgcttctatttgattactctgagcgccatgaccagcgactatgtcgtatggctaaagctccctcttcggagggagcatcagag

SEQ ID NO: 21421 - RNA, 89 nt, synthetic construct
  misc_feature 1..89: note = engineered ribonucleic acid scaffold (ERS) sequence
  source 1..89: mol_type = other RNA
actggcgcttctatcttgattactctgagcgccatgaccagcgactatgtcgtatggctaaagctccctcttcggagggagcatcagag

SEQ ID NO: 21422 - RNA, 88 nt, synthetic construct
  misc_feature 1..88: note = engineered ribonucleic acid scaffold (ERS) sequence
  source 1..88: mol_type = other RNA
actggcgcttctatcagattactctgagcgccatgaccagcgactatgtcgtatggctaaagctccctcttcggagggagcatcagag

SEQ ID NO: 21423 - RNA, 88 nt, synthetic construct
  misc_feature 1..88: note = engineered ribonucleic acid scaffold (ERS) sequence
  source 1..88: mol_type = other RNA
actggcgcttctatcggattactctgagcgccatgaccagcgactatgtcgtatggctaaagctccctcttcggagggagcatcagag

SEQ ID NO: 21424 - RNA, 89 nt, synthetic construct
  misc_feature 1..89: note = engineered ribonucleic acid scaffold (ERS) sequence
  source 1..89: mol_type = other RNA
actggcgcttctatctgaattactctgagcgccatgaccagcgactatgtcgtatggctaaagctccctcttcggagggagcatcagag

SEQ ID NO: 21425 - RNA, 89 nt, synthetic construct
  misc_feature 1..89: note = engineered ribonucleic acid scaffold (ERS) sequence
  source 1..89: mol_type = other RNA
actggcgcttctatctgtattactctgagcgccatgaccagcgactatgtcgtatggctaaagctccctcttcggagggagcatcagag

SEQ ID NO: 21426 - RNA, 88 nt, synthetic construct
  misc_feature 1..88: note = engineered ribonucleic acid scaffold (ERS) sequence
  source 1..88: mol_type = other RNA
actggcgcttctatctggttactctgagcgccatgaccagcgactatgtcgtatggctaaagctccctcttcggagggagcatcagag

SEQ ID NO: 21427 - RNA, 88 nt, synthetic construct
  misc_feature 1..88: note = engineered ribonucleic acid scaffold (ERS) sequence
  source 1..88: mol_type = other RNA
actggcgcttctatctgtttactctgagcgccatgaccagcgactatgtcgtatggctaaagctccctcttcggagggagcatcagag

SEQ ID NO: 21428 - RNA, 89 nt, synthetic construct
  misc_feature 1..89: note = engineered ribonucleic acid scaffold (ERS) sequence
  source 1..89: mol_type = other RNA
actggcgcttctatctgatttactctgagcgccatgaccagcgactatgtcgtatggctaaagctccctcttcggagggagcatcagag

SEQ ID NO: 21429 - RNA, 88 nt, synthetic construct
  misc_feature 1..88: note = engineered ribonucleic acid scaffold (ERS) sequence
  source 1..88: mol_type = other RNA
actggcgcttctatctgattgctctgagcgccatgaccagcgactatgtcgtatggctaaagctccctcttcggagggagcatcagag

SEQ ID NO: 21430 - RNA, 91 nt, synthetic construct
  misc_feature 1..91: note = engineered ribonucleic acid scaffold (ERS) sequence
  source 1..91: mol_type = other RNA
actggcgcttctatatctgattactctgagcgccatgaccagcgactatgtcgtatgggctaaagctccctcttcggagggagcatcagag

SEQ ID NO: 21431 - RNA, 90 nt, synthetic construct
  misc_feature 1..90: note = engineered ribonucleic acid scaffold (ERS) sequence
  source 1..90: mol_type = other RNA
actggcgcttctaatctgattactctgagcgccatgaccagcgactatgtcgtatgggctaaagctccctcttcggagggagcatcagag

SEQ ID NO: 21432 - RNA, 88 nt, synthetic construct
  misc_feature 1..88: note = engineered ribonucleic acid scaffold (ERS) sequence
  source 1..88: mol_type = other RNA
actggcgcttctactgattactctgagcgccatgaccagcgactatgtcgtatgggctaaagctccctcttcggagggagcatcagag

SEQ ID NO: 21433 - RNA, 89 nt, synthetic construct
  misc_feature 1..89: note = engineered ribonucleic acid scaffold (ERS) sequence
  source 1..89: mol_type = other RNA
actggcgcttctaactgattactctgagcgccatgaccagcgactatgtcgtatgggctaaagctccctcttcggagggagcatcagag

SEQ ID NO: 21434 - RNA, 89 nt, synthetic construct
  misc_feature 1..89: note = engineered ribonucleic acid scaffold (ERS) sequence
  source 1..89: mol_type = other RNA
actggcgcttctacctgattactctgagcgccatgaccagcgactatgtcgtatgggctaaagctccctcttcggagggagcatcagag

SEQ ID NO: 21435 - RNA, 89 nt, synthetic construct
  misc_feature 1..89: note = engineered ribonucleic acid scaffold (ERS) sequence
  source 1..89: mol_type = other RNA
actggcgcttctagctgattactctgagcgccatgaccagcgactatgtcgtatgggctaaagctccctcttcggagggagcatcagag

SEQ ID NO: 21436 - RNA, 91 nt, synthetic construct
  misc_feature 1..91: note = engineered ribonucleic acid scaffold (ERS) sequence
  source 1..91: mol_type = other RNA
actggcgcttctattactgattactctgagcgccatgaccagcgactatgtcgtatgggctaaagctccctcttcggagggagcatcagag

SEQ ID NO: 21437 - RNA, 89 nt, synthetic construct
  misc_feature 1..89: note = engineered ribonucleic acid scaffold (ERS) sequence
  source 1..89: mol_type = other RNA
actggcgcttctatatgattactctgagcgccatgaccagcgactatgtcgtatgggctaaagctccctcttcggagggagcatcagag

SEQ ID NO: 21438 - RNA, 89 nt, synthetic construct
  misc_feature 1..89: note = engineered ribonucleic acid scaffold (ERS) sequence
  source 1..89: mol_type = other RNA
actggcgcttctatgtgattactctgagcgccatgaccagcgactatgtcgtatgggctaaagctccctcttcggagggagcatcagag

SEQ ID NO: 21439 - RNA, 89 nt, synthetic construct
  misc_feature 1..89: note = engineered ribonucleic acid scaffold (ERS) sequence
  source 1..89: mol_type = other RNA
actggcgcttctatttgattactctgagcgccatgaccagcgactatgtcgtatgggctaaagctccctcttcggagggagcatcagag

SEQ ID NO: 21440 - RNA, 90 nt, synthetic construct
  misc_feature 1..90: note = engineered ribonucleic acid scaffold (ERS) sequence
  source 1..90: mol_type = other RNA
actggcgcttctatcttgattactctgagcgccatgaccagcgactatgtcgtatgggctaaagctccctcttcggagggagcatcagag

SEQ ID NO: 21441 - RNA, 89 nt, synthetic construct
  misc_feature 1..89: note = engineered ribonucleic acid scaffold (ERS) sequence
  source 1..89: mol_type = other RNA
actggcgcttctatcagattactctgagcgccatgaccagcgactatgtcgtatgggctaaagctccctcttcggagggagcatcagag

SEQ ID NO: 21442 - RNA, 89 nt, synthetic construct
  misc_feature 1..89: note = engineered ribonucleic acid scaffold (ERS) sequence
  source 1..89: mol_type = other RNA
actggcgcttctatcggattactctgagcgccatgaccagcgactatgtcgtatgggctaaagctccctcttcggagggagcatcagag

SEQ ID NO: 21443 - RNA, 90 nt, synthetic construct
  misc_feature 1..90: note = engineered ribonucleic acid scaffold (ERS) sequence
  source 1..90: mol_type = other RNA
actggcgcttctatctgaattactctgagcgccatgaccagcgactatgtcgtatgggctaaagctccctcttcggagggagcatcagag

SEQ ID NO: 21444 - RNA, 90 nt, synthetic construct
  misc_feature 1..90: note = engineered ribonucleic acid scaffold (ERS) sequence
  source 1..90: mol_type = other RNA
actggcgcttctatctgtattactctgagcgccatgaccagcgactatgtcgtatgggctaaagctccctcttcggagggagcatcagag

SEQ ID NO: 21445 - RNA, 89 nt, synthetic construct
  misc_feature 1..89: note = engineered ribonucleic acid scaffold (ERS) sequence
  source 1..89: mol_type = other RNA
actggcgcttctatctggttactctgagcgccatgaccagcgactatgtcgtatgggctaaagctccctcttcggagggagcatcagag

SEQ ID NO: 21446 - RNA, 89 nt, synthetic construct
  misc_feature 1..89: note = engineered ribonucleic acid scaffold (ERS) sequence
  source 1..89: mol_type = other RNA
actggcgcttctatctgtttactctgagcgccatgaccagcgactatgtcgtatgggctaaagctccctcttcggagggagcatcagag

SEQ ID NO: 21447 - RNA, 90 nt, synthetic construct
  misc_feature 1..90: note = engineered ribonucleic acid scaffold (ERS) sequence
  source 1..90: mol_type = other RNA
actggcgcttctatctgatttactctgagcgccatgaccagcgactatgtcgtatgggctaaagctccctcttcggagggagcatcagag

SEQ ID NO: 21448 - RNA, 89 nt, synthetic construct
  misc_feature 1..89: note = engineered ribonucleic acid scaffold (ERS) sequence
  source 1..89: mol_type = other RNA
actggcgcttctatctgattgctctgagcgccatgaccagcgactatgtcgtatgggctaaagctccctcttcggagggagcatcagag

SEQ ID NO: 21449 - RNA, 90 nt, synthetic construct
  misc_feature 1..90: note = engineered ribonucleic acid scaffold (ERS) sequence
  source 1..90: mol_type = other RNA
actggcgcttctatatctgattactctgagcgccatccccagcgactatgtcgtatgggtaaagctccctcttcggagggagcatcagag

SEQ ID NO: 21450 - RNA, 89 nt, synthetic construct
  misc_feature 1..89: note = engineered ribonucleic acid scaffold (ERS) sequence
  source 1..89: mol_type = other RNA
actggcgcttctaatctgattactctgagcgccatccccagcgactatgtcgtatgggtaaagctccctcttcggagggagcatcagag

SEQ ID NO: 21451 - RNA, 87 nt, synthetic construct
  misc_feature 1..87: note = engineered ribonucleic acid scaffold (ERS) sequence
  source 1..87: mol_type = other RNA
actggcgcttctactgattactctgagcgccatccccagcgactatgtcgtatgggtaaagctccctcttcggagggagcatcagag

SEQ ID NO: 21452 - RNA, 88 nt, synthetic construct
  misc_feature 1..88: note = engineered ribonucleic acid scaffold (ERS) sequence
  source 1..88: mol_type = other RNA
actggcgcttctaactgattactctgagcgccatccccagcgactatgtcgtatgggtaaagctccctcttcggagggagcatcagag

SEQ ID NO: 21453 - RNA, 88 nt, synthetic construct
  misc_feature 1..88: note = engineered ribonucleic acid scaffold (ERS) sequence
  source 1..88: mol_type = other RNA
actggcgcttctacctgattactctgagcgccatccccagcgactatgtcgtatgggtaaagctccctcttcggagggagcatcagag

SEQ ID NO: 21454 - RNA, 88 nt, synthetic construct
  misc_feature 1..88: note = engineered ribonucleic acid scaffold (ERS) sequence
  source 1..88: mol_type = other RNA
actggcgcttctagctgattactctgagcgccatccccagcgactatgtcgtatgggtaaagctccctcttcggagggagcatcagag

SEQ ID NO: 21455 - RNA, 90 nt, synthetic construct
  misc_feature 1..90: note = engineered ribonucleic acid scaffold (ERS) sequence
  source 1..90: mol_type = other RNA
actggcgcttctattactgattactctgagcgccatccccagcgactatgtcgtatgggtaaagctccctcttcggagggagcatcagag

SEQ ID NO: 21456 - RNA, 88 nt, synthetic construct
  misc_feature 1..88: note = engineered ribonucleic acid scaffold (ERS) sequence
  source 1..88: mol_type = other RNA
actggcgcttctatatgattactctgagcgccatccccagcgactatgtcgtatgggtaaagctccctcttcggagggagcatcagag

SEQ ID NO: 21457 - RNA, 88 nt, synthetic construct
  misc_feature 1..88: note = engineered ribonucleic acid scaffold (ERS) sequence
  source 1..88: mol_type = other RNA
actggcgcttctatgtgattactctgagcgccatccccagcgactatgtcgtatgggtaaagctccctcttcggagggagcatcagag

SEQ ID NO: 21458 - RNA, 88 nt, synthetic construct
  misc_feature 1..88: note = engineered ribonucleic acid scaffold (ERS) sequence
  source 1..88: mol_type = other RNA
actggcgcttctatttgattactctgagcgccatccccagcgactatgtcgtatgggtaaagctccctcttcggagggagcatcagag

SEQ ID NO: 21459 - RNA, 89 nt, synthetic construct
  misc_feature 1..89: note = engineered ribonucleic acid scaffold (ERS) sequence
  source 1..89: mol_type = other RNA
actggcgcttctatcttgattactctgagcgccatccccagcgactatgtcgtatgggtaaagctccctcttcggagggagcatcagag

SEQ ID NO: 21460 - RNA, 88 nt, synthetic construct
  misc_feature 1..88: note = engineered ribonucleic acid scaffold (ERS) sequence
  source 1..88: mol_type = other RNA
actggcgcttctatcagattactctgagcgccatccccagcgactatgtcgtatgggtaaagctccctcttcggagggagcatcagag

SEQ ID NO: 21461 - RNA, 88 nt, synthetic construct
  misc_feature 1..88: note = engineered ribonucleic acid scaffold (ERS) sequence
  source 1..88: mol_type = other RNA
actggcgcttctatcggattactctgagcgccatccccagcgactatgtcgtatgggtaaagctccctcttcggagggagcatcagag

SEQ ID NO: 21462 - RNA, 89 nt, synthetic construct
  misc_feature 1..89: note = engineered ribonucleic acid scaffold (ERS) sequence
  source 1..89: mol_type = other RNA
actggcgcttctatctgaattactctgagcgccatccccagcgactatgtcgtatgggtaaagctccctcttcggagggagcatcagag

SEQ ID NO: 21463 - RNA, 89 nt, synthetic construct
  misc_feature 1..89: note = engineered ribonucleic acid scaffold (ERS) sequence
  source 1..89: mol_type = other RNA
actggcgcttctatctgtattactctgagcgccatccccagcgactatgtcgtatgggtaaagctccctcttcggagggagcatcagag

SEQ ID NO: 21464 - RNA, 88 nt, synthetic construct
  misc_feature 1..88: note = engineered ribonucleic acid scaffold (ERS) sequence
  source 1..88: mol_type = other RNA
actggcgcttctatctggttactctgagcgccatccccagcgactatgtcgtatgggtaaagctccctcttcggagggagcatcagag

SEQ ID NO: 21465 - RNA, 88 nt, synthetic construct
  misc_feature 1..88: note = engineered ribonucleic acid scaffold (ERS) sequence
  source 1..88: mol_type = other RNA
actggcgcttctatctgtttactctgagcgccatccccagcgactatgtcgtatgggtaaagctccctcttcggagggagcatcagag

SEQ ID NO: 21466 - RNA, 89 nt, synthetic construct
  misc_feature 1..89: note = engineered ribonucleic acid scaffold (ERS) sequence
  source 1..89: mol_type = other RNA
actggcgcttctatctgatttactctgagcgccatccccagcgactatgtcgtatgggtaaagctccctcttcggagggagcatcagag

SEQ ID NO: 21467 - RNA, 88 nt, synthetic construct
  misc_feature 1..88: note = engineered ribonucleic acid scaffold (ERS) sequence
  source 1..88: mol_type = other RNA
actggcgcttctatctgattgctctgagcgccatccccagcgactatgtcgtatgggtaaagctccctcttcggagggagcatcagag

SEQ ID NO: 21468 - RNA, 90 nt, synthetic construct
  misc_feature 1..90: note = engineered ribonucleic acid scaffold (ERS) sequence
  source 1..90: mol_type = other RNA
actggcgcttctatatctgattactctgagcgccatcgccagcgactatgtcgtatgggtaaagctccctcttcggagggagcatcagag

SEQ ID NO: 21469 - RNA, 89 nt, synthetic construct
  misc_feature 1..89: note = engineered ribonucleic acid scaffold (ERS) sequence
  source 1..89: mol_type = other RNA
actggcgcttctaatctgattactctgagcgccatcgccagcgactatgtcgtatgggtaaagctccctcttcggagggagcatcagag

SEQ ID NO: 21470 - RNA, 87 nt, synthetic construct
  misc_feature 1..87: note = engineered ribonucleic acid scaffold (ERS) sequence
  source 1..87: mol_type = other RNA
actggcgcttctactgattactctgagcgccatcgccagcgactatgtcgtatgggtaaagctccctcttcggagggagcatcagag

SEQ ID NO: 21471 - RNA, 88 nt, synthetic construct
  misc_feature 1..88: note = engineered ribonucleic acid scaffold (ERS) sequence
  source 1..88: mol_type = other RNA
actggcgcttctaactgattactctgagcgccatcgccagcgactatgtcgtatgggtaaagctccctcttcggagggagcatcagag

SEQ ID NO: 21472 - RNA, 88 nt, synthetic construct
  misc_feature 1..88: note = engineered ribonucleic acid scaffold (ERS) sequence
  source 1..88: mol_type = other RNA
actggcgcttctacctgattactctgagcgccatcgccagcgactatgtcgtatgggtaaagctccctcttcggagggagcatcagag

SEQ ID NO: 21473 - RNA, 88 nt, synthetic construct
  misc_feature 1..88: note = engineered ribonucleic acid scaffold (ERS) sequence
  source 1..88: mol_type = other RNA
actggcgcttctagctgattactctgagcgccatcgccagcgactatgtcgtatgggtaaagctccctcttcggagggagcatcagag

SEQ ID NO: 21474 - RNA, 90 nt, synthetic construct
  misc_feature 1..90: note = engineered ribonucleic acid scaffold (ERS) sequence
  source 1..90: mol_type = other RNA
actggcgcttctattactgattactctgagcgccatcgccagcgactatgtcgtatgggtaaagctccctcttcggagggagcatcagag

SEQ ID NO: 21475 - RNA, 88 nt, synthetic construct
  misc_feature 1..88: note = engineered ribonucleic acid scaffold (ERS) sequence
  source 1..88: mol_type = other RNA
actggcgcttctatatgattactctgagcgccatcgccagcgactatgtcgtatgggtaaagctccctcttcggagggagcatcagag

SEQ ID NO: 21476 - RNA, 88 nt, synthetic construct
  misc_feature 1..88: note = engineered ribonucleic acid scaffold (ERS) sequence
  source 1..88: mol_type = other RNA
actggcgcttctatgtgattactctgagcgccatcgccagcgactatgtcgtatgggtaaagctccctcttcggagggagcatcagag

SEQ ID NO: 21477 - RNA, 88 nt, synthetic construct
  misc_feature 1..88: note = engineered ribonucleic acid scaffold (ERS) sequence
  source 1..88: mol_type = other RNA
actggcgcttctatttgattactctgagcgccatcgccagcgactatgtcgtatgggtaaagctccctcttcggagggagcatcagag

SEQ ID NO: 21478 - RNA, 89 nt, synthetic construct
  misc_feature 1..89: note = engineered ribonucleic acid scaffold (ERS) sequence
  source 1..89: mol_type = other RNA
actggcgcttctatcttgattactctgagcgccatcgccagcgactatgtcgtatgggtaaagctccctcttcggagggagcatcagag

SEQ ID NO: 21479 - RNA, 88 nt, synthetic construct
  misc_feature 1..88: note = engineered ribonucleic acid scaffold (ERS) sequence
  source 1..88: mol_type = other RNA
actggcgcttctatcagattactctgagcgccatcgccagcgactatgtcgtatgggtaaagctccctcttcggagggagcatcagag

SEQ ID NO: 21480 - RNA, 88 nt, synthetic construct
  misc_feature 1..88: note = engineered ribonucleic acid scaffold (ERS) sequence
  source 1..88: mol_type = other RNA
actggcgcttctatcggattactctgagcgccatcgccagcgactatgtcgtatgggtaaagctccctcttcggagggagcatcagag

SEQ ID NO: 21481 - RNA, 89 nt, synthetic construct
  misc_feature 1..89: note = engineered ribonucleic acid scaffold (ERS) sequence
  source 1..89: mol_type = other RNA
actggcgcttctatctgaattactctgagcgccatcgccagcgactatgtcgtatgggtaaagctccctcttcggagggagcatcagag

SEQ ID NO: 21482 - RNA, 89 nt, synthetic construct
  misc_feature 1..89: note = engineered ribonucleic acid scaffold (ERS) sequence
  source 1..89: mol_type = other RNA
actggcgcttctatctgtattactctgagcgccatcgccagcgactatgtcgtatgggtaaagctccctcttcggagggagcatcagag

SEQ ID NO: 21483 - RNA, 88 nt, synthetic construct
  misc_feature 1..88: note = engineered ribonucleic acid scaffold (ERS) sequence
  source 1..88: mol_type = other RNA
actggcgcttctatctggttactctgagcgccatcgccagcgactatgtcgtatgggtaaagctccctcttcggagggagcatcagag

SEQ ID NO: 21484 - RNA, 88 nt, synthetic construct
  misc_feature 1..88: note = engineered ribonucleic acid scaffold (ERS) sequence
  source 1..88: mol_type = other RNA
actggcgcttctatctgtttactctgagcgccatcgccagcgactatgtcgtatgggtaaagctccctcttcggagggagcatcagag

SEQ ID NO: 21485 - RNA, 89 nt, synthetic construct
  misc_feature 1..89: note = engineered ribonucleic acid scaffold (ERS) sequence
  source 1..89: mol_type = other RNA
actggcgcttctatctgatttactctgagcgccatcgccagcgactatgtcgtatgggtaaagctccctcttcggagggagcatcagag

SEQ ID NO: 21486 - RNA, 88 nt, synthetic construct
  misc_feature 1..88: note = engineered ribonucleic acid scaffold (ERS) sequence
  source 1..88: mol_type = other RNA
actggcgcttctatctgattgctctgagcgccatcgccagcgactatgtcgtatgggtaaagctccctcttcggagggagcatcagag

SEQ ID NO: 21487 - RNA, 91 nt, synthetic construct
  misc_feature 1..91: note = engineered ribonucleic acid scaffold (ERS) sequence
  source 1..91: mol_type = other RNA
actggcgcttctatatctgattactctgagcgccatcgccagcgactatgtcgtatggcgtaaagctccctcttcggagggagcatcagag

SEQ ID NO: 21488 - RNA, 90 nt, synthetic construct
  misc_feature 1..90: note = engineered ribonucleic acid scaffold (ERS) sequence
  source 1..90: mol_type = other RNA
actggcgcttctaatctgattactctgagcgccatcgccagcgactatgtcgtatggcgtaaagctccctcttcggagggagcatcagag

SEQ ID NO: 21489 - RNA, 88 nt, synthetic construct
  misc_feature 1..88: note = engineered ribonucleic acid scaffold (ERS) sequence
  source 1..88: mol_type = other RNA
actggcgcttctactgattactctgagcgccatcgccagcgactatgtcgtatggcgtaaagctccctcttcggagggagcatcagag

SEQ ID NO: 21490 - RNA, 89 nt, synthetic construct
  misc_feature 1..89: note = engineered ribonucleic acid scaffold (ERS) sequence
  source 1..89: mol_type = other RNA
actggcgcttctaactgattactctgagcgccatcgccagcgactatgtcgtatggcgtaaagctccctcttcggagggagcatcagag

SEQ ID NO: 21491 - RNA, 89 nt, synthetic construct
  misc_feature 1..89: note = engineered ribonucleic acid scaffold (ERS) sequence
  source 1..89: mol_type = other RNA
actggcgcttctacctgattactctgagcgccatcgccagcgactatgtcgtatggcgtaaagctccctcttcggagggagcatcagag

SEQ ID NO: 21492 - RNA, 89 nt, synthetic construct
  misc_feature 1..89: note = engineered ribonucleic acid scaffold (ERS) sequence
  source 1..89: mol_type = other RNA
actggcgcttctagctgattactctgagcgccatcgccagcgactatgtcgtatggcgtaaagctccctcttcggagggagcatcagag

SEQ ID NO: 21493 - RNA, 91 nt, synthetic construct
  misc_feature 1..91: note = engineered ribonucleic acid scaffold (ERS) sequence
  source 1..91: mol_type = other RNA
actggcgcttctattactgattactctgagcgccatcgccagcgactatgtcgtatggcgtaaagctccctcttcggagggagcatcagag

SEQ ID NO: 21494 - RNA, 89 nt, synthetic construct
  misc_feature 1..89: note = engineered ribonucleic acid scaffold (ERS) sequence
  source 1..89: mol_type = other RNA
actggcgcttctatatgattactctgagcgccatcgccagcgactatgtcgtatggcgtaaagctccctcttcggagggagcatcagag

SEQ ID NO: 21495 - RNA, 89 nt, synthetic construct
  misc_feature 1..89: note = engineered ribonucleic acid scaffold (ERS) sequence
  source 1..89: mol_type = other RNA
actggcgcttctatgtgattactctgagcgccatcgccagcgactatgtcgtatggcgtaaagctccctcttcggagggagcatcagag

SEQ ID NO: 21496 - RNA, 89 nt, synthetic construct
  misc_feature 1..89: note = engineered ribonucleic acid scaffold (ERS) sequence
  source 1..89: mol_type = other RNA
actggcgcttctatttgattactctgagcgccatcgccagcgactatgtcgtatggcgtaaagctccctcttcggagggagcatcagag

SEQ ID NO: 21497 - RNA, 90 nt, synthetic construct
  misc_feature 1..90: note = engineered ribonucleic acid scaffold (ERS) sequence
  source 1..90: mol_type = other RNA
actggcgcttctatcttgattactctgagcgccatcgccagcgactatgtcgtatggcgtaaagctccctcttcggagggagcatcagag

SEQ ID NO: 21498 - RNA, 89 nt, synthetic construct
  misc_feature 1..89: note = engineered ribonucleic acid scaffold (ERS) sequence
  source 1..89: mol_type = other RNA
actggcgcttctatcagattactctgagcgccatcgccagcgactatgtcgtatggcgtaaagctccctcttcggagggagcatcagag

SEQ ID NO: 21499 - RNA, 89 nt, synthetic construct
  misc_feature 1..89: note = engineered ribonucleic acid scaffold (ERS) sequence
  source 1..89: mol_type = other RNA
actggcgcttctatcggattactctgagcgccatcgccagcgactatgtcgtatggcgtaaagctccctcttcggagggagcatcagag

SEQ ID NO: 21500 - RNA, 90 nt, synthetic construct
  misc_feature 1..90: note = engineered ribonucleic acid scaffold (ERS) sequence
  source 1..90: mol_type = other RNA
actggcgcttctatctgaattactctgagcgccatcgccagcgactatgtcgtatggcgtaaagctccctcttcggagggagcatcagag

SEQ ID NO: 21501 - RNA, 90 nt, synthetic construct
  misc_feature 1..90: note = engineered ribonucleic acid scaffold (ERS) sequence
  source 1..90: mol_type = other RNA
actggcgcttctatctgtattactctgagcgccatcgccagcgactatgtcgtatggcgtaaagctccctcttcggagggagcatcagag

SEQ ID NO: 21502 - RNA, 89 nt, synthetic construct
  misc_feature 1..89: note = engineered ribonucleic acid scaffold (ERS) sequence
  source 1..89: mol_type = other RNA
actggcgcttctatctggttactctgagcgccatcgccagcgactatgtcgtatggcgtaaagctccctcttcggagggagcatcagag

SEQ ID NO: 21503 - RNA, 89 nt, synthetic construct
  misc_feature 1..89: note = engineered ribonucleic acid scaffold (ERS) sequence
  source 1..89: mol_type = other RNA
actggcgcttctatctgtttactctgagcgccatcgccagcgactatgtcgtatggcgtaaagctccctcttcggagggagcatcagag

SEQ ID NO: 21504 - RNA, 90 nt, synthetic construct
  misc_feature 1..90: note = engineered ribonucleic acid scaffold (ERS) sequence
  source 1..90: mol_type = other RNA
actggcgcttctatctgatttactctgagcgccatcgccagcgactatgtcgtatggcgtaaagctccctcttcggagggagcatcagag

SEQ ID NO: 21505 - RNA, 89 nt, synthetic construct
  misc_feature 1..89: note = engineered ribonucleic acid scaffold (ERS) sequence
  source 1..89: mol_type = other RNA
actggcgcttctatctgattgctctgagcgccatcgccagcgactatgtcgtatggcgtaaagctccctcttcggagggagcatcagag

SEQ ID NO: 21506 - RNA, 90 nt, synthetic construct
  misc_feature 1..90: note = engineered ribonucleic acid scaffold (ERS) sequence
  source 1..90: mol_type = other RNA
actggcgcttctatatctgattactctgagcgccatctccagcgactatgtcgtatgggtaaagctccctcttcggagggagcatcagag

SEQ ID NO: 21507 - RNA, 89 nt, synthetic construct
  misc_feature 1..89: note = engineered ribonucleic acid scaffold (ERS) sequence
  source 1..89: mol_type = other RNA
actggcgcttctaatctgattactctgagcgccatctccagcgactatgtcgtatgggtaaagctccctcttcggagggagcatcagag

SEQ ID NO: 21508 - RNA, 87 nt, synthetic construct
  misc_feature 1..87: note = engineered ribonucleic acid scaffold (ERS) sequence
  source 1..87: mol_type = other RNA
actggcgcttctactgattactctgagcgccatctccagcgactatgtcgtatgggtaaagctccctcttcggagggagcatcagag

SEQ ID NO: 21509 - RNA, 88 nt, synthetic construct
  misc_feature 1..88: note = engineered ribonucleic acid scaffold (ERS) sequence
  source 1..88: mol_type = other RNA
actggcgcttctaactgattactctgagcgccatctccagcgactatgtcgtatgggtaaagctccctcttcggagggagcatcagag

SEQ ID NO: 21510 - RNA, 88 nt, synthetic construct
  misc_feature 1..88: note = engineered ribonucleic acid scaffold (ERS) sequence
  source 1..88: mol_type = other RNA
actggcgcttctacctgattactctgagcgccatctccagcgactatgtcgtatgggtaaagctccctcttcggagggagcatcagag

SEQ ID NO: 21511 - RNA, 88 nt, synthetic construct
  misc_feature 1..88: note = engineered ribonucleic acid scaffold (ERS) sequence
  source 1..88: mol_type = other RNA
actggcgcttctagctgattactctgagcgccatctccagcgactatgtcgtatgggtaaagctccctcttcggagggagcatcagag

SEQ ID NO: 21512 - RNA, 90 nt, synthetic construct
  misc_feature 1..90: note = engineered ribonucleic acid scaffold (ERS) sequence
  source 1..90: mol_type = other RNA
actggcgcttctattactgattactctgagcgccatctccagcgactatgtcgtatgggtaaagctccctcttcggagggagcatcagag

SEQ ID NO: 21513 - RNA, 88 nt, synthetic construct
  misc_feature 1..88: note = engineered ribonucleic acid scaffold (ERS) sequence
  source 1..88: mol_type = other RNA
actggcgcttctatatgattactctgagcgccatctccagcgactatgtcgtatgggtaaagctccctcttcggagggagcatcagag

SEQ ID NO: 21514 - RNA, 88 nt, synthetic construct
  misc_feature 1..88: note = engineered ribonucleic acid scaffold (ERS) sequence
  source 1..88: mol_type = other RNA
actggcgcttctatgtgattactctgagcgccatctccagcgactatgtcgtatgggtaaagctccctcttcggagggagcatcagag

SEQ ID NO: 21515 - RNA, 88 nt, synthetic construct
  misc_feature 1..88: note = engineered ribonucleic acid scaffold (ERS) sequence
  source 1..88: mol_type = other RNA
actggcgcttctatttgattactctgagcgccatctccagcgactatgtcgtatgggtaaagctccctcttcggagggagcatcagag

SEQ ID NO: 21516 - RNA, 89 nt, synthetic construct
  misc_feature 1..89: note = engineered ribonucleic acid scaffold (ERS) sequence
  source 1..89: mol_type = other RNA
actggcgcttctatcttgattactctgagcgccatctccagcgactatgtcgtatgggtaaagctccctcttcggagggagcatcagag

SEQ ID NO: 21517 - RNA, 88 nt, synthetic construct
  misc_feature 1..88: note = engineered ribonucleic acid scaffold (ERS) sequence
  source 1..88: mol_type = other RNA
actggcgcttctatcagattactctgagcgccatctccagcgactatgtcgtatgggtaaagctccctcttcggagggagcatcagag

SEQ ID NO: 21518 - RNA, 88 nt, synthetic construct
  misc_feature 1..88: note = engineered ribonucleic acid scaffold (ERS) sequence
  source 1..88: mol_type = other RNA
actggcgcttctatcggattactctgagcgccatctccagcgactatgtcgtatgggtaaagctccctcttcggagggagcatcagag

SEQ ID NO: 21519 - RNA, 89 nt, synthetic construct
  misc_feature 1..89: note = engineered ribonucleic acid scaffold (ERS) sequence
  source 1..89: mol_type = other RNA
actggcgcttctatctgaattactctgagcgccatctccagcgactatgtcgtatgggtaaagctccctcttcggagggagcatcagag

SEQ ID NO: 21520 - RNA, 89 nt, synthetic construct
  misc_feature 1..89: note = engineered ribonucleic acid scaffold (ERS) sequence
  source 1..89: mol_type = other RNA
actggcgcttctatctgtattactctgagcgccatctccagcgactatgtcgtatgggtaaagctccctcttcggagggagcatcagag

SEQ ID NO: 21521 - RNA, 88 nt, synthetic construct
  misc_feature 1..88: note = engineered ribonucleic acid scaffold (ERS) sequence
  source 1..88: mol_type = other RNA
actggcgcttctatctggttactctgagcgccatctccagcgactatgtcgtatgggtaaagctccctcttcggagggagcatcagag

SEQ ID NO: 21522 - RNA, 88 nt, synthetic construct
  misc_feature 1..88: note = engineered ribonucleic acid scaffold (ERS) sequence
  source 1..88: mol_type = other RNA
actggcgcttctatctgtttactctgagcgccatctccagcgactatgtcgtatgggtaaagctccctcttcggagggagcatcagag

SEQ ID NO: 21523 - RNA, 89 nt, synthetic construct
  misc_feature 1..89: note = engineered ribonucleic acid scaffold (ERS) sequence
  source 1..89: mol_type = other RNA
actggcgcttctatctgatttactctgagcgccatctccagcgactatgtcgtatgggtaaagctccctcttcggagggagcatcagag

SEQ ID NO: 21524 - RNA, 88 nt, synthetic construct
  misc_feature 1..88: note = engineered ribonucleic acid scaffold (ERS) sequence
  source 1..88: mol_type = other RNA
actggcgcttctatctgattgctctgagcgccatctccagcgactatgtcgtatgggtaaagctccctcttcggagggagcatcagag

SEQ ID NO: 21525 - RNA, 90 nt, synthetic construct
  misc_feature 1..90: note = engineered ribonucleic acid scaffold (ERS) sequence
  source 1..90: mol_type = other RNA
actggcgcttctatatctgattactctgagcgccatcacctgcgactatgtcgtaagggtaaagctccctcttcggagggagcatcagag

SEQ ID NO: 21526 - RNA, 89 nt, synthetic construct
  misc_feature 1..89: note = engineered ribonucleic acid scaffold (ERS) sequence
  source 1..89: mol_type = other RNA
actggcgcttctaatctgattactctgagcgccatcacctgcgactatgtcgtaagggtaaagctccctcttcggagggagcatcagag

SEQ ID NO: 21527 - RNA, 87 nt, synthetic construct
  misc_feature 1..87: note = engineered ribonucleic acid scaffold (ERS) sequence
  source 1..87: mol_type = other RNA
actggcgcttctactgattactctgagcgccatcacctgcgactatgtcgtaagggtaaagctccctcttcggagggagcatcagag

SEQ ID NO: 21528 - RNA, 88 nt, synthetic construct
  misc_feature 1..88: note = engineered ribonucleic acid scaffold (ERS) sequence
  source 1..88: mol_type = other RNA
actggcgcttctaactgattactctgagcgccatcacctgcgactatgtcgtaagggtaaagctccctcttcggagggagcatcagag

SEQ ID NO: 21529 - RNA, 88 nt, synthetic construct
  misc_feature 1..88: note = engineered ribonucleic acid scaffold (ERS) sequence
  source 1..88: mol_type = other RNA
actggcgcttctacctgattactctgagcgccatcacctgcgactatgtcgtaagggtaaagctccctcttcggagggagcatcagag

SEQ ID NO: 21530 - RNA, 88 nt, synthetic construct
  misc_feature 1..88: note = engineered ribonucleic acid scaffold (ERS) sequence
  source 1..88: mol_type = other RNA
actggcgcttctagctgattactctgagcgccatcacctgcgactatgtcgtaagggtaaagctccctcttcggagggagcatcagag

SEQ ID NO: 21531 - RNA, 90 nt, synthetic construct
  misc_feature 1..90: note = engineered ribonucleic acid scaffold (ERS) sequence
  source 1..90: mol_type = other RNA
actggcgcttctattactgattactctgagcgccatcacctgcgactatgtcgtaagggtaaagctccctcttcggagggagcatcagag

SEQ ID NO: 21532 - RNA, 88 nt, synthetic construct
  misc_feature 1..88: note = engineered ribonucleic acid scaffold (ERS) sequence
  source 1..88: mol_type = other RNA
actggcgcttctatatgattactctgagcgccatcacctgcgactatgtcgtaagggtaaagctccctcttcggagggagcatcagag

SEQ ID NO: 21533 - RNA, 88 nt, synthetic construct
  misc_feature 1..88: note = engineered ribonucleic acid scaffold (ERS) sequence
  source 1..88: mol_type = other RNA
actggcgcttctatgtgattactctgagcgccatcacctgcgactatgtcgtaagggtaaagctccctcttcggagggagcatcagag

SEQ ID NO: 21534 - RNA, 88 nt, synthetic construct
  misc_feature 1..88: note = engineered ribonucleic acid scaffold (ERS) sequence
  source 1..88: mol_type = other RNA
actggcgcttctatttgattactctgagcgccatcacctgcgactatgtcgtaagggtaaagctccctcttcggagggagcatcagag

SEQ ID NO: 21535 - RNA, 89 nt, synthetic construct
  misc_feature 1..89: note = engineered ribonucleic acid scaffold (ERS) sequence
  source 1..89: mol_type = other RNA
actggcgcttctatcttgattactctgagcgccatcacctgcgactatgtcgtaagggtaaagctccctcttcggagggagcatcagag

SEQ ID NO: 21536 - RNA, 88 nt, synthetic construct
  misc_feature 1..88: note = engineered ribonucleic acid scaffold (ERS) sequence
  source 1..88: mol_type = other RNA
actggcgcttctatcagattactctgagcgccatcacctgcgactatgtcgtaagggtaaagctccctcttcggagggagcatcagag

SEQ ID NO: 21537 - RNA, 88 nt, synthetic construct
  misc_feature 1..88: note = engineered ribonucleic acid scaffold (ERS) sequence
  source 1..88: mol_type = other RNA
actggcgcttctatcggattactctgagcgccatcacctgcgactatgtcgtaagggtaaagctccctcttcggagggagcatcagag

SEQ ID NO: 21538 - RNA, 89 nt, synthetic construct
  misc_feature 1..89: note = engineered ribonucleic acid scaffold (ERS) sequence
  source 1..89: mol_type = other RNA
actggcgcttctatctgaattactctgagcgccatcacctgcgactatgtcgtaagggtaaagctccctcttcggagggagcatcagag

SEQ ID NO: 21539 - RNA, 89 nt, synthetic construct
  misc_feature 1..89: note = engineered ribonucleic acid scaffold (ERS) sequence
  source 1..89: mol_type = other RNA
actggcgcttctatctgtattactctgagcgccatcacctgcgactatgtcgtaagggtaaagctccctcttcggagggagcatcagag

SEQ ID NO: 21540 - RNA, 88 nt, synthetic construct
  misc_feature 1..88: note = engineered ribonucleic acid scaffold (ERS) sequence
  source 1..88: mol_type = other RNA
actggcgcttctatctggttactctgagcgccatcacctgcgactatgtcgtaagggtaaagctccctcttcggagggagcatcagag

SEQ ID NO: 21541 - RNA, 88 nt, synthetic construct
  misc_feature 1..88: note = engineered ribonucleic acid scaffold (ERS) sequence
  source 1..88: mol_type = other RNA
actggcgcttctatctgtttactctgagcgccatcacctgcgactatgtcgtaagggtaaagctccctcttcggagggagcatcagag

SEQ ID NO: 21542 - RNA, 89 nt, synthetic construct
  misc_feature 1..89: note = engineered ribonucleic acid scaffold (ERS) sequence
  source 1..89: mol_type = other RNA
actggcgcttctatctgatttactctgagcgccatcacctgcgactatgtcgtaagggtaaagctccctcttcggagggagcatcagag

SEQ ID NO: 21543 - RNA, 88 nt, synthetic construct
  misc_feature 1..88: note = engineered ribonucleic acid scaffold (ERS) sequence
  source 1..88: mol_type = other RNA
actggcgcttctatctgattgctctgagcgccatcacctgcgactatgtcgtaagggtaaagctccctcttcggagggagcatcagag

SEQ ID NO: 21544 - RNA, 90 nt, synthetic construct
  misc_feature 1..90: note = engineered ribonucleic acid scaffold (ERS) sequence
  source 1..90: mol_type = other RNA
actggcgcttctatatctgattactctgagcgccatcaccagagactatgtcttatgggtaaagctccctcttcggagggagcatcagag

SEQ ID NO: 21545 - RNA, 89 nt, synthetic construct
  misc_feature 1..89: note = engineered ribonucleic acid scaffold (ERS) sequence
  source 1..89: mol_type = other RNA
actggcgcttctaatctgattactctgagcgccatcaccagagactatgtcttatgggtaaagctccctcttcggagggagcatcagag

SEQ ID NO: 21546 - RNA, 87 nt, synthetic construct
  misc_feature 1..87: note = engineered ribonucleic acid scaffold (ERS) sequence
  source 1..87: mol_type = other RNA
actggcgcttctactgattactctgagcgccatcaccagagactatgtcttatgggtaaagctccctcttcggagggagcatcagag

SEQ ID NO: 21547 - RNA, 88 nt, synthetic construct
  misc_feature 1..88: note = engineered ribonucleic acid scaffold (ERS) sequence
  source 1..88: mol_type = other RNA
actggcgcttctaactgattactctgagcgccatcaccagagactatgtcttatgggtaaagctccctcttcggagggagcatcagag

SEQ ID NO: 21548 - RNA, 88 nt, synthetic construct
  misc_feature 1..88: note = engineered ribonucleic acid scaffold (ERS) sequence
  source 1..88: mol_type = other RNA
actggcgcttctacctgattactctgagcgccatcaccagagactatgtcttatgggtaaagctccctcttcggagggagcatcagag

SEQ ID NO: 21549 - RNA, 88 nt, synthetic construct
  misc_feature 1..88: note = engineered ribonucleic acid scaffold (ERS) sequence
  source 1..88: mol_type = other RNA
actggcgcttctagctgattactctgagcgccatcaccagagactatgtcttatgggtaaagctccctcttcggagggagcatcagag

SEQ ID NO: 21550 - RNA, 90 nt, synthetic construct
  misc_feature 1..90: note = engineered ribonucleic acid scaffold (ERS) sequence
  source 1..90: mol_type = other RNA
actggcgcttctattactgattactctgagcgccatcaccagagactatgtcttatgggtaaagctccctcttcggagggagcatcagag

SEQ ID NO: 21551 - RNA, 88 nt, synthetic construct
  misc_feature 1..88: note = engineered ribonucleic acid scaffold (ERS) sequence
  source 1..88: mol_type = other RNA
actggcgcttctatatgattactctgagcgccatcaccagagactatgtcttatgggtaaagctccctcttcggagggagcatcagag

SEQ ID NO: 21552 - RNA, 88 nt, synthetic construct
  misc_feature 1..88: note = engineered ribonucleic acid scaffold (ERS) sequence
  source 1..88: mol_type = other RNA
actggcgcttctatgtgattactctgagcgccatcaccagagactatgtcttatgggtaaagctccctcttcggagggagcatcagag

SEQ ID NO: 21553 - RNA, 88 nt, synthetic construct
  misc_feature 1..88: note = engineered ribonucleic acid scaffold (ERS) sequence
  source 1..88: mol_type = other RNA
actggcgcttctatttgattactctgagcgccatcaccagagactatgtcttatgggtaaagctccctcttcggagggagcatcagag

SEQ ID NO: 21554 - RNA, 89 nt, synthetic construct
  misc_feature 1..89: note = engineered ribonucleic acid scaffold (ERS) sequence
  source 1..89: mol_type = other RNA
actggcgcttctatcttgattactctgagcgccatcaccagagactatgtcttatgggtaaagctccctcttcggagggagcatcagag

SEQ ID NO: 21555 - RNA, 88 nt, synthetic construct
  misc_feature 1..88: note = engineered ribonucleic acid scaffold (ERS) sequence
  source 1..88: mol_type = other RNA
actggcgcttctatcagattactctgagcgccatcaccagagactatgtcttatgggtaaagctccctcttcggagggagcatcagag

SEQ ID NO: 21556 - RNA, 88 nt, synthetic construct
  misc_feature 1..88: note = engineered ribonucleic acid scaffold (ERS) sequence
  source 1..88: mol_type = other RNA
actggcgcttctatcggattactctgagcgccatcaccagagactatgtcttatgggtaaagctccctcttcggagggagcatcagag

SEQ ID NO: 21557 - RNA, 89 nt, synthetic construct
  misc_feature 1..89: note = engineered ribonucleic acid scaffold (ERS) sequence
  source 1..89: mol_type = other RNA
actggcgcttctatctgaattactctgagcgccatcaccagagactatgtcttatgggtaaagctccctcttcggagggagcatcagag

SEQ ID NO: 21558 - RNA, 89 nt, synthetic construct
  misc_feature 1..89: note = engineered ribonucleic acid scaffold (ERS) sequence
  source 1..89: mol_type = other RNA
actggcgcttctatctgtattactctgagcgccatcaccagagactatgtcttatgggtaaagctccctcttcggagggagcatcagag

SEQ ID NO: 21559 - RNA, 88 nt, synthetic construct
  misc_feature 1..88: note = engineered ribonucleic acid scaffold (ERS) sequence
  source 1..88: mol_type = other RNA
actggcgcttctatctggttactctgagcgccatcaccagagactatgtcttatgggtaaagctccctcttcggagggagcatcagag

SEQ ID NO: 21560 - RNA, 88 nt, synthetic construct
  misc_feature 1..88: note = engineered ribonucleic acid scaffold (ERS) sequence
  source 1..88: mol_type = other RNA
actggcgcttctatctgtttactctgagcgccatcaccagagactatgtcttatgggtaaagctccctcttcggagggagcatcagag

SEQ ID NO: 21561 - RNA, 89 nt, synthetic construct
  misc_feature 1..89: note = engineered ribonucleic acid scaffold (ERS) sequence
  source 1..89: mol_type = other RNA
actggcgcttctatctgatttactctgagcgccatcaccagagactatgtcttatgggtaaagctccctcttcggagggagcatcagag

SEQ ID NO: 21562 - RNA, 88 nt, synthetic construct
  misc_feature 1..88: note = engineered ribonucleic acid scaffold (ERS) sequence
  source 1..88: mol_type = other RNA
actggcgcttctatctgattgctctgagcgccatcaccagagactatgtcttatgggtaaagctccctcttcggagggagcatcagag

SEQ ID NO: 21563 - RNA, 90 nt, synthetic construct
  misc_feature 1..90: note = engineered ribonucleic acid scaffold (ERS) sequence
  source 1..90: mol_type = other RNA
actggcgcttctatatctgattactctgagcgccatcaccagggactatgtcctatgggtaaagctccctcttcggagggagcatcagag

SEQ ID NO: 21564 - RNA, 89 nt, synthetic construct
  misc_feature 1..89: note = engineered ribonucleic acid scaffold (ERS) sequence
  source 1..89: mol_type = other RNA
actggcgcttctaatctgattactctgagcgccatcaccagggactatgtcctatgggtaaagctccctcttcggagggagcatcagag

SEQ ID NO: 21565 - RNA, 87 nt, synthetic construct
  misc_feature 1..87: note = engineered ribonucleic acid scaffold (ERS) sequence
  source 1..87: mol_type = other RNA
actggcgcttctactgattactctgagcgccatcaccagggactatgtcctatgggtaaagctccctcttcggagggagcatcagag

SEQ ID NO: 21566 - RNA, 88 nt, synthetic construct
  misc_feature 1..88: note = engineered ribonucleic acid scaffold (ERS) sequence
  source 1..88: mol_type = other RNA
actggcgcttctaactgattactctgagcgccatcaccagggactatgtcctatgggtaaagctccctcttcggagggagcatcagag

SEQ ID NO: 21567 - RNA, 88 nt, synthetic construct
  misc_feature 1..88: note = engineered ribonucleic acid scaffold (ERS) sequence
  source 1..88: mol_type = other RNA
actggcgcttctacctgattactctgagcgccatcaccagggactatgtcctatgggtaaagctccctcttcggagggagcatcagag

SEQ ID NO: 21568 - RNA, 88 nt, synthetic construct
  misc_feature 1..88: note = engineered ribonucleic acid scaffold (ERS) sequence
  source 1..88: mol_type = other RNA
actggcgcttctagctgattactctgagcgccatcaccagggactatgtcctatgggtaaagctccctcttcggagggagcatcagag

SEQ ID NO: 21569 - RNA, 90 nt, synthetic construct
  misc_feature 1..90: note = engineered ribonucleic acid scaffold (ERS) sequence
  source 1..90: mol_type = other RNA
actggcgcttctattactgattactctgagcgccatcaccagggactatgtcctatgggtaaagctccctcttcggagggagcatcagag

SEQ ID NO: 21570 - RNA, 88 nt, synthetic construct
  misc_feature 1..88: note = engineered ribonucleic acid scaffold (ERS) sequence
  source 1..88: mol_type = other RNA
actggcgcttctatatgattactctgagcgccatcaccagggactatgtcctatgggtaaagctccctcttcggagggagcatcagag

SEQ ID NO: 21571 - RNA, 88 nt, synthetic construct
  misc_feature 1..88: note = engineered ribonucleic acid scaffold (ERS) sequence
  source 1..88: mol_type = other RNA
actggcgcttctatgtgattactctgagcgccatcaccagggactatgtcctatgggtaaagctccctcttcggagggagcatcagag

SEQ ID NO: 21572 - RNA, 88 nt, synthetic construct
  misc_feature 1..88: note = engineered ribonucleic acid scaffold (ERS) sequence
  source 1..88: mol_type = other RNA
actggcgcttctatttgattactctgagcgccatcaccagggactatgtcctatgggtaaagctccctcttcggagggagcatcagag

SEQ ID NO: 21573 - RNA, 89 nt, synthetic construct
  misc_feature 1..89: note = engineered ribonucleic acid scaffold (ERS) sequence
  source 1..89: mol_type = other RNA
actggcgcttctatcttgattactctgagcgccatcaccagggactatgtcctatgggtaaagctccctcttcggagggagcatcagag

SEQ ID NO: 21574 - RNA, 88 nt, synthetic construct
  misc_feature 1..88: note = engineered ribonucleic acid scaffold (ERS) sequence
  source 1..88: mol_type = other RNA
actggcgcttctatcagattactctgagcgccatcaccagggactatgtcctatgggtaaagctccctcttcggagggagcatcagag

SEQ ID NO: 21575 - RNA, 88 nt, synthetic construct
  misc_feature 1..88: note = engineered ribonucleic acid scaffold (ERS) sequence
  source 1..88: mol_type = other RNA
actggcgcttctatcggattactctgagcgccatcaccagggactatgtcctatgggtaaagctccctcttcggagggagcatcagag

SEQ ID NO: 21576 - RNA, 89 nt, synthetic construct
  misc_feature 1..89: note = engineered ribonucleic acid scaffold (ERS) sequence
  source 1..89: mol_type = other RNA
actggcgcttctatctgaattactctgagcgccatcaccagggactatgtcctatgggtaaagctccctcttcggagggagcatcagag

SEQ ID NO: 21577 - RNA, 89 nt, synthetic construct
  misc_feature 1..89: note = engineered ribonucleic acid scaffold (ERS) sequence
  source 1..89: mol_type = other RNA
actggcgcttctatctgtattactctgagcgccatcaccagggactatgtcctatgggtaaagctccctcttcggagggagcatcagag

SEQ ID NO: 21578 - RNA, 88 nt, synthetic construct
  misc_feature 1..88: note = engineered ribonucleic acid scaffold (ERS) sequence
  source 1..88: mol_type = other RNA
actggcgcttctatctggttactctgagcgccatcaccagggactatgtcctatgggtaaagctccctcttcggagggagcatcagag

SEQ ID NO: 21579 - RNA, 88 nt, synthetic construct
  misc_feature 1..88: note = engineered ribonucleic acid scaffold (ERS) sequence
  source 1..88: mol_type = other RNA
actggcgcttctatctgtttactctgagcgccatcaccagggactatgtcctatgggtaaagctccctcttcggagggagcatcagag

SEQ ID NO: 21580 - RNA, 89 nt, synthetic construct
  misc_feature 1..89: note = engineered ribonucleic acid scaffold (ERS) sequence
  source 1..89: mol_type = other RNA
actggcgcttctatctgatttactctgagcgccatcaccagggactatgtcctatgggtaaagctccctcttcggagggagcatcagag

SEQ ID NO: 21581 - RNA, 88 nt, synthetic construct
  misc_feature 1..88: note = engineered ribonucleic acid scaffold (ERS) sequence
  source 1..88: mol_type = other RNA
actggcgcttctatctgattgctctgagcgccatcaccagggactatgtcctatgggtaaagctccctcttcggagggagcatcagag

SEQ ID NO: 21582 - RNA, 91 nt, synthetic construct
  misc_feature 1..91: note = engineered ribonucleic acid scaffold (ERS) sequence
  source 1..91: mol_type = other RNA
actggcgcttctatatctgattactctgagcgccatcaccaggcactatgtgctattgggtaaagctccctcttcggagggagcatcagag

SEQ ID NO: 21583 - RNA, 90 nt, synthetic construct
  misc_feature 1..90: note = engineered ribonucleic acid scaffold (ERS) sequence
  source 1..90: mol_type = other RNA
actggcgcttctaatctgattactctgagcgccatcaccaggcactatgtgctattgggtaaagctccctcttcggagggagcatcagag

SEQ ID NO: 21584 - RNA, 88 nt, synthetic construct
  misc_feature 1..88: note = engineered ribonucleic acid scaffold (ERS) sequence
  source 1..88: mol_type = other RNA
actggcgcttctactgattactctgagcgccatcaccaggcactatgtgctattgggtaaagctccctcttcggagggagcatcagag

SEQ ID NO: 21585 - RNA, 89 nt, synthetic construct
  misc_feature 1..89: note = engineered ribonucleic acid scaffold (ERS) sequence
  source 1..89: mol_type = other RNA
actggcgcttctaactgattactctgagcgccatcaccaggcactatgtgctattgggtaaagctccctcttcggagggagcatcagag

SEQ ID NO: 21586 - RNA, 89 nt, synthetic construct
  misc_feature 1..89: note = engineered ribonucleic acid scaffold (ERS) sequence
  source 1..89: mol_type = other RNA
actggcgcttctacctgattactctgagcgccatcaccaggcactatgtgctattgggtaaagctccctcttcggagggagcatcagag

SEQ ID NO: 21587 - RNA, 89 nt, synthetic construct
  misc_feature 1..89: note = engineered ribonucleic acid scaffold (ERS) sequence
  source 1..89: mol_type = other RNA
actggcgcttctagctgattactctgagcgccatcaccaggcactatgtgctattgggtaaagctccctcttcggagggagcatcagag

SEQ ID NO: 21588 - RNA, 91 nt, synthetic construct
  misc_feature 1..91: note = engineered ribonucleic acid scaffold (ERS) sequence
  source 1..91: mol_type = other RNA
actggcgcttctattactgattactctgagcgccatcaccaggcactatgtgctattgggtaaagctccctcttcggagggagcatcagag

SEQ ID NO: 21589 - RNA, 89 nt, synthetic construct
  misc_feature 1..89: note = engineered ribonucleic acid scaffold (ERS) sequence
  source 1..89: mol_type = other RNA
actggcgcttctatatgattactctgagcgccatcaccaggcactatgtgctattgggtaaagctccctcttcggagggagcatcagag

SEQ ID NO: 21590 - RNA, 89 nt, synthetic construct
  misc_feature 1..89: note = engineered ribonucleic acid scaffold (ERS) sequence
  source 1..89: mol_type = other RNA
actggcgcttctatgtgattactctgagcgccatcaccaggcactatgtgctattgggtaaagctccctcttcggagggagcatcagag

SEQ ID NO: 21591 - RNA, 89 nt, synthetic construct
  misc_feature 1..89: note = engineered ribonucleic acid scaffold (ERS) sequence
  source 1..89: mol_type = other RNA
actggcgcttctatttgattactctgagcgccatcaccaggcactatgtgctattgggtaaagctccctcttcggagggagcatcagag

SEQ ID NO: 21592 - RNA, 90 nt, synthetic construct
  misc_feature 1..90: note = engineered ribonucleic acid scaffold (ERS) sequence
  source 1..90: mol_type = other RNA
actggcgcttctatcttgattactctgagcgccatcaccaggcactatgtgctattgggtaaagctccctcttcggagggagcatcagag

SEQ ID NO: 21593 - RNA, 89 nt, synthetic construct
  misc_feature 1..89: note = engineered ribonucleic acid scaffold (ERS) sequence
  source 1..89: mol_type = other RNA
actggcgcttctatcagattactctgagcgccatcaccaggcactatgtgctattgggtaaagctccctcttcggagggagcatcagag

SEQ ID NO: 21594 - RNA, 89 nt, synthetic construct
  misc_feature 1..89: note = engineered ribonucleic acid scaffold (ERS) sequence
  source 1..89: mol_type = other RNA
actggcgcttctatcggattactctgagcgccatcaccaggcactatgtgctattgggtaaagctccctcttcggagggagcatcagag

SEQ ID NO: 21595 - RNA, 90 nt, synthetic construct
  misc_feature 1..90: note = engineered ribonucleic acid scaffold (ERS) sequence
  source 1..90: mol_type = other RNA
actggcgcttctatctgaattactctgagcgccatcaccaggcactatgtgctattgggtaaagctccctcttcggagggagcatcagag

SEQ ID NO: 21596 - RNA, 90 nt, synthetic construct
  misc_feature 1..90: note = engineered ribonucleic acid scaffold (ERS) sequence
  source 1..90: mol_type = other RNA
actggcgcttctatctgtattactctgagcgccatcaccaggcactatgtgctattgggtaaagctccctcttcggagggagcatcagag

SEQ ID NO: 21597 - RNA, 89 nt, synthetic construct
  misc_feature 1..89: note = engineered ribonucleic acid scaffold (ERS) sequence
  source 1..89: mol_type = other RNA
actggcgcttctatctggttactctgagcgccatcaccaggcactatgtgctattgggtaaagctccctcttcggagggagcatcagag

SEQ ID NO: 21598 - RNA, 89 nt, synthetic construct
  misc_feature 1..89: note = engineered ribonucleic acid scaffold (ERS) sequence
  source 1..89: mol_type = other RNA
actggcgcttctatctgtttactctgagcgccatcaccaggcactatgtgctattgggtaaagctccctcttcggagggagcatcagag

SEQ ID NO: 21599 - RNA, 90 nt, synthetic construct
  misc_feature 1..90: note = engineered ribonucleic acid scaffold (ERS) sequence
  source 1..90: mol_type = other RNA
actggcgcttctatctgatttactctgagcgccatcaccaggcactatgtgctattgggtaaagctccctcttcggagggagcatcagag

SEQ ID NO: 21600 - RNA, 89 nt, synthetic construct
  misc_feature 1..89: note = engineered ribonucleic acid scaffold (ERS) sequence
  source 1..89: mol_type = other RNA
actggcgcttctatctgattgctctgagcgccatcaccaggcactatgtgctattgggtaaagctccctcttcggagggagcatcagag

SEQ ID NO: 21601 - RNA, 90 nt, synthetic construct
  misc_feature 1..90: note = engineered ribonucleic acid scaffold (ERS) sequence
  source 1..90: mol_type = other RNA
actggcgcttctatatctgattactctgagcgccatcaccagccactatgtggtatgggtaaagctccctcttcggagggagcatcagag

SEQ ID NO: 21602 - RNA, 89 nt, synthetic construct
  misc_feature 1..89: note = engineered ribonucleic acid scaffold (ERS) sequence
  source 1..89: mol_type = other RNA
actggcgcttctaatctgattactctgagcgccatcaccagccactatgtggtatgggtaaagctccctcttcggagggagcatcagag

SEQ ID NO: 21603 - RNA, 87 nt, synthetic construct
  misc_feature 1..87: note = engineered ribonucleic acid scaffold (ERS) sequence
  source 1..87: mol_type = other RNA
actggcgcttctactgattactctgagcgccatcaccagccactatgtggtatgggtaaagctccctcttcggagggagcatcagag

SEQ ID NO: 21604 - RNA, 88 nt, synthetic construct
  misc_feature 1..88: note = engineered ribonucleic acid scaffold (ERS) sequence
  source 1..88: mol_type = other RNA
actggcgcttctaactgattactctgagcgccatcaccagccactatgtggtatgggtaaagctccctcttcggagggagcatcagag

SEQ ID NO: 21605 - RNA, 88 nt, synthetic construct
  misc_feature 1..88: note = engineered ribonucleic acid scaffold (ERS) sequence
  source 1..88: mol_type = other RNA
actggcgcttctacctgattactctgagcgccatcaccagccactatgtggtatgggtaaagctccctcttcggagggagcatcagag

SEQ ID NO: 21606 - RNA, 88 nt, synthetic construct
  misc_feature 1..88: note = engineered ribonucleic acid scaffold (ERS) sequence
  source 1..88: mol_type = other RNA
actggcgcttctagctgattactctgagcgccatcaccagccactatgtggtatgggtaaagctccctcttcggagggagcatcagag

SEQ ID NO: 21607 - RNA, 90 nt, synthetic construct
  misc_feature 1..90: note = engineered ribonucleic acid scaffold (ERS) sequence
  source 1..90: mol_type = other RNA
actggcgcttctattactgattactctgagcgccatcaccagccactatgtggtatgggtaaagctccctcttcggagggagcatcagag

SEQ ID NO: 21608 - RNA, 88 nt, synthetic construct
  misc_feature 1..88: note = engineered ribonucleic acid scaffold (ERS) sequence
  source 1..88: mol_type = other RNA
actggcgcttctatatgattactctgagcgccatcaccagccactatgtggtatgggtaaagctccctcttcggagggagcatcagag

SEQ ID NO: 21609 - RNA, 88 nt, synthetic construct
  misc_feature 1..88: note = engineered ribonucleic acid scaffold (ERS) sequence
  source 1..88: mol_type = other RNA
actggcgcttctatgtgattactctgagcgccatcaccagccactatgtggtatgggtaaagctccctcttcggagggagcatcagag

SEQ ID NO: 21610 - RNA, 88 nt, synthetic construct
  misc_feature 1..88: note = engineered ribonucleic acid scaffold (ERS) sequence
  source 1..88: mol_type = other RNA
actggcgcttctatttgattactctgagcgccatcaccagccactatgtggtatgggtaaagctccctcttcggagggagcatcagag

SEQ ID NO: 21611 - RNA, 89 nt, synthetic construct
  misc_feature 1..89: note = engineered ribonucleic acid scaffold (ERS) sequence
  source 1..89: mol_type = other RNA
actggcgcttctatcttgattactctgagcgccatcaccagccactatgtggtatgggtaaagctccctcttcggagggagcatcagag

SEQ ID NO: 21612 - RNA, 88 nt, synthetic construct
  misc_feature 1..88: note = engineered ribonucleic acid scaffold (ERS) sequence
  source 1..88: mol_type = other RNA
actggcgcttctatcagattactctgagcgccatcaccagccactatgtggtatgggtaaagctccctcttcggagggagcatcagag

SEQ ID NO: 21613 - RNA, 88 nt, synthetic construct
  misc_feature 1..88: note = engineered ribonucleic acid scaffold (ERS) sequence
  source 1..88: mol_type = other RNA
actggcgcttctatcggattactctgagcgccatcaccagccactatgtggtatgggtaaagctccctcttcggagggagcatcagag

SEQ ID NO: 21614 - RNA, 89 nt, synthetic construct
  misc_feature 1..89: note = engineered ribonucleic acid scaffold (ERS) sequence
  source 1..89: mol_type = other RNA
actggcgcttctatctgaattactctgagcgccatcaccagccactatgtggtatgggtaaagctccctcttcggagggagcatcagag

SEQ ID NO: 21615 - RNA, 89 nt, synthetic construct
  misc_feature 1..89: note = engineered ribonucleic acid scaffold (ERS) sequence
  source 1..89: mol_type = other RNA
actggcgcttctatctgtattactctgagcgccatcaccagccactatgtggtatgggtaaagctccctcttcggagggagcatcagag

SEQ ID NO: 21616 - RNA, 88 nt, synthetic construct
  misc_feature 1..88: note = engineered ribonucleic acid scaffold (ERS) sequence
  source 1..88: mol_type = other RNA
actggcgcttctatctggttactctgagcgccatcaccagccactatgtggtatgggtaaagctccctcttcggagggagcatcagag

SEQ ID NO: 21617 - RNA, 88 nt, synthetic construct
  misc_feature 1..88: note = engineered ribonucleic acid scaffold (ERS) sequence
  source 1..88: mol_type = other RNA
actggcgcttctatctgtttactctgagcgccatcaccagccactatgtggtatgggtaaagctccctcttcggagggagcatcagag

SEQ ID NO: 21618 - RNA, 89 nt, synthetic construct
  misc_feature 1..89: note = engineered ribonucleic acid scaffold (ERS) sequence
  source 1..89: mol_type = other RNA
actggcgcttctatctgatttactctgagcgccatcaccagccactatgtggtatgggtaaagctccctcttcggagggagcatcagag

SEQ ID NO: 21619 - RNA, 88 nt, synthetic construct
  misc_feature 1..88: note = engineered ribonucleic acid scaffold (ERS) sequence
  source 1..88: mol_type = other RNA
actggcgcttctatctgattgctctgagcgccatcaccagccactatgtggtatgggtaaagctccctcttcggagggagcatcagag

SEQ ID NO: 21620 - RNA, 90 nt, synthetic construct
  misc_feature 1..90: note = engineered ribonucleic acid scaffold (ERS) sequence
  source 1..90: mol_type = other RNA
actggcgcttctatatctgattactctgagcgccatcaccagctactatgtagtatgggtaaagctccctcttcggagggagcatcagag

SEQ ID NO: 21621 - RNA, 89 nt, synthetic construct
  misc_feature 1..89: note = engineered ribonucleic acid scaffold (ERS) sequence
  source 1..89: mol_type = other RNA
actggcgcttctaatctgattactctgagcgccatcaccagctactatgtagtatgggtaaagctccctcttcggagggagcatcagag

SEQ ID NO: 21622 - RNA, 87 nt, synthetic construct
  misc_feature 1..87: note = engineered ribonucleic acid scaffold (ERS) sequence
  source 1..87: mol_type = other RNA
actggcgcttctactgattactctgagcgccatcaccagctactatgtagtatgggtaaagctccctcttcggagggagcatcagag

SEQ ID NO: 21623 - RNA, 88 nt, synthetic construct
  misc_feature 1..88: note = engineered ribonucleic acid scaffold (ERS) sequence
  source 1..88: mol_type = other RNA
actggcgcttctaactgattactctgagcgccatcaccagctactatgtagtatgggtaaagctccctcttcggagggagcatcagag

SEQ ID NO: 21624 - RNA, 88 nt, synthetic construct
  misc_feature 1..88: note = engineered ribonucleic acid scaffold (ERS) sequence
  source 1..88: mol_type = other RNA
actggcgcttctacctgattactctgagcgccatcaccagctactatgtagtatgggtaaagctccctcttcggagggagcatcagag

SEQ ID NO: 21625 - RNA, 88 nt, synthetic construct
  misc_feature 1..88: note = engineered ribonucleic acid scaffold (ERS) sequence
  source 1..88: mol_type = other RNA
actggcgcttctagctgattactctgagcgccatcaccagctactatgtagtatgggtaaagctccctcttcggagggagcatcagag

SEQ ID NO: 21626 - RNA, 90 nt, synthetic construct
  misc_feature 1..90: note = engineered ribonucleic acid scaffold (ERS) sequence
  source 1..90: mol_type = other RNA
actggcgcttctattactgattactctgagcgccatcaccagctactatgtagtatgggtaaagctccctcttcggagggagcatcagag

SEQ ID NO: 21627 - RNA, 88 nt, synthetic construct
  misc_feature 1..88: note = engineered ribonucleic acid scaffold (ERS) sequence
  source 1..88: mol_type = other RNA
actggcgcttctatatgattactctgagcgccatcaccagctactatgtagtatgggtaaagctccctcttcggagggagcatcagag

SEQ ID NO: 21628 - RNA, 88 nt, synthetic construct
  misc_feature 1..88: note = engineered ribonucleic acid scaffold (ERS) sequence
  source 1..88: mol_type = other RNA
actggcgcttctatgtgattactctgagcgccatcaccagctactatgtagtatgggtaaagctccctcttcggagggagcatcagag

SEQ ID NO: 21629 - RNA, 88 nt, synthetic construct
  misc_feature 1..88: note = engineered ribonucleic acid scaffold (ERS) sequence
  source 1..88: mol_type = other RNA
actggcgcttctatttgattactctgagcgccatcaccagctactatgtagtatgggtaaagctccctcttcggagggagcatcagag

SEQ ID NO: 21630 - RNA, 89 nt, synthetic construct
  misc_feature 1..89: note = engineered ribonucleic acid scaffold (ERS) sequence
  source 1..89: mol_type = other RNA
actggcgcttctatcttgattactctgagcgccatcaccagctactatgtagtatgggtaaagctccctcttcggagggagcatcagag

SEQ ID NO: 21631 - RNA, 88 nt, synthetic construct
  misc_feature 1..88: note = engineered ribonucleic acid scaffold (ERS) sequence
  source 1..88: mol_type = other RNA
actggcgcttctatcagattactctgagcgccatcaccagctactatgtagtatgggtaaagctccctcttcggagggagcatcagag

SEQ ID NO: 21632 - RNA, 88 nt, synthetic construct
  misc_feature 1..88: note = engineered ribonucleic acid scaffold (ERS) sequence
  source 1..88: mol_type = other RNA
actggcgcttctatcggattactctgagcgccatcaccagctactatgtagtatgggtaaagctccctcttcggagggagcatcagag

SEQ ID NO: 21633 - RNA, 89 nt, synthetic construct
  misc_feature 1..89: note = engineered ribonucleic acid scaffold (ERS) sequence
  source 1..89: mol_type = other RNA
actggcgcttctatctgaattactctgagcgccatcaccagctactatgtagtatgggtaaagctccctcttcggagggagcatcagag

SEQ ID NO: 21634 - RNA, 89 nt, synthetic construct
  misc_feature 1..89: note = engineered ribonucleic acid scaffold (ERS) sequence
  source 1..89: mol_type = other RNA
actggcgcttctatctgtattactctgagcgccatcaccagctactatgtagtatgggtaaagctccctcttcggagggagcatcagag

SEQ ID NO: 21635 - RNA, 88 nt, synthetic construct
  misc_feature 1..88: note = engineered ribonucleic acid scaffold (ERS) sequence
  source 1..88: mol_type = other RNA
actggcgcttctatctggttactctgagcgccatcaccagctactatgtagtatgggtaaagctccctcttcggagggagcatcagag

SEQ ID NO: 21636 - RNA, 88 nt, synthetic construct
  misc_feature 1..88: note = engineered ribonucleic acid scaffold (ERS) sequence
  source 1..88: mol_type = other RNA
actggcgcttctatctgtttactctgagcgccatcaccagctactatgtagtatgggtaaagctccctcttcggagggagcatcagag

SEQ ID NO: 21637 - RNA, 89 nt, synthetic construct
  misc_feature 1..89: note = engineered ribonucleic acid scaffold (ERS) sequence
  source 1..89: mol_type = other RNA
actggcgcttctatctgatttactctgagcgccatcaccagctactatgtagtatgggtaaagctccctcttcggagggagcatcagag

SEQ ID NO: 21638 - RNA, 88 nt, synthetic construct
  misc_feature 1..88: note = engineered ribonucleic acid scaffold (ERS) sequence
  source 1..88: mol_type = other RNA
actggcgcttctatctgattgctctgagcgccatcaccagctactatgtagtatgggtaaagctccctcttcggagggagcatcagag

SEQ ID NO: 21639 - RNA, 90 nt, synthetic construct
  misc_feature 1..90: note = engineered ribonucleic acid scaffold (ERS) sequence
  source 1..90: mol_type = other RNA
actggcgcttctatatctgattactctgagcgccatcaccagcgattatgtcgtatgggtaaagctccctcttcggagggagcatcagag

SEQ ID NO: 21640 - RNA, 89 nt, synthetic construct
  misc_feature 1..89: note = engineered ribonucleic acid scaffold (ERS) sequence
  source 1..89: mol_type = other RNA
actggcgcttctaatctgattactctgagcgccatcaccagcgattatgtcgtatgggtaaagctccctcttcggagggagcatcagag

SEQ ID NO: 21641 - RNA, 87 nt, synthetic construct
  misc_feature 1..87: note = engineered ribonucleic acid scaffold (ERS) sequence
  source 1..87: mol_type = other RNA
actggcgcttctactgattactctgagcgccatcaccagcgattatgtcgtatgggtaaagctccctcttcggagggagcatcagag

SEQ ID NO: 21642 - RNA, 88 nt, synthetic construct
  misc_feature 1..88: note = engineered ribonucleic acid scaffold (ERS) sequence
  source 1..88: mol_type = other RNA
actggcgcttctaactgattactctgagcgccatcaccagcgattatgtcgtatgggtaaagctccctcttcggagggagcatcagag

SEQ ID NO: 21643 - RNA, 88 nt, synthetic construct
  misc_feature 1..88: note = engineered ribonucleic acid scaffold (ERS) sequence
  source 1..88: mol_type = other RNA
actggcgcttctacctgattactctgagcgccatcaccagcgattatgtcgtatgggtaaagctccctcttcggagggagcatcagag

SEQ ID NO: 21644 - RNA, 88 nt, synthetic construct
  misc_feature 1..88: note = engineered ribonucleic acid scaffold (ERS) sequence
  source 1..88: mol_type = other RNA
actggcgcttctagctgattactctgagcgccatcaccagcgattatgtcgtatgggtaaagctccctcttcggagggagcatcagag

SEQ ID NO: 21645 - RNA, 90 nt, synthetic construct
  misc_feature 1..90: note = engineered ribonucleic acid scaffold (ERS) sequence
  source 1..90: mol_type = other RNA
actggcgcttctattactgattactctgagcgccatcaccagcgattatgtcgtatgggtaaagctccctcttcggagggagcatcagag

SEQ ID NO: 21646 - RNA, 88 nt, synthetic construct
  misc_feature 1..88: note = engineered ribonucleic acid scaffold (ERS) sequence
  source 1..88: mol_type = other RNA
actggcgcttctatatgattactctgagcgccatcaccagcgattatgtcgtatgggtaaagctccctcttcggagggagcatcagag

SEQ ID NO: 21647 - RNA, 88 nt, synthetic construct
  misc_feature 1..88: note = engineered ribonucleic acid scaffold (ERS) sequence
  source 1..88: mol_type = other RNA
actggcgcttctatgtgattactctgagcgccatcaccagcgattatgtcgtatgggtaaagctccctcttcggagggagcatcagag

SEQ ID NO: 21648 - RNA, 88 nt, synthetic construct
  misc_feature 1..88: note = engineered ribonucleic acid scaffold (ERS) sequence
  source 1..88: mol_type = other RNA
actggcgcttctatttgattactctgagcgccatcaccagcgattatgtcgtatgggtaaagctccctcttcggagggagcatcagag

SEQ ID NO: 21649 - RNA, 89 nt, synthetic construct
  misc_feature 1..89: note = engineered ribonucleic acid scaffold (ERS) sequence
  source 1..89: mol_type = other RNA
actggcgcttctatcttgattactctgagcgccatcaccagcgattatgtcgtatgggtaaagctccctcttcggagggagcatcagag

SEQ ID NO: 21650 - RNA, 88 nt, synthetic construct
  misc_feature 1..88: note = engineered ribonucleic acid scaffold (ERS) sequence
  source 1..88: mol_type = other RNA
actggcgcttctatcagattactctgagcgccatcaccagcgattatgtcgtatgggtaaagctccctcttcggagggagcatcagag

SEQ ID NO: 21651 - RNA, 88 nt, synthetic construct
  misc_feature 1..88: note = engineered ribonucleic acid scaffold (ERS) sequence
  source 1..88: mol_type = other RNA
actggcgcttctatcggattactctgagcgccatcaccagcgattatgtcgtatgggtaaagctccctcttcggagggagcatcagag

SEQ ID NO: 21652 - RNA, 89 nt, synthetic construct
  misc_feature 1..89: note = engineered ribonucleic acid scaffold (ERS) sequence
  source 1..89: mol_type = other RNA
actggcgcttctatctgaattactctgagcgccatcaccagcgattatgtcgtatgggtaaagctccctcttcggagggagcatcagag

SEQ ID NO: 21653 - RNA, 89 nt, synthetic construct
  misc_feature 1..89: note = engineered ribonucleic acid scaffold (ERS) sequence
  source 1..89: mol_type = other RNA
actggcgcttctatctgtattactctgagcgccatcaccagcgattatgtcgtatgggtaaagctccctcttcggagggagcatcagag

SEQ ID NO: 21654 - RNA, 88 nt, synthetic construct
  misc_feature 1..88: note = engineered ribonucleic acid scaffold (ERS) sequence
  source 1..88: mol_type = other RNA
actggcgcttctatctggttactctgagcgccatcaccagcgattatgtcgtatgggtaaagctccctcttcggagggagcatcagag

SEQ ID NO: 21655 - RNA, 88 nt, synthetic construct
  misc_feature 1..88: note = engineered ribonucleic acid scaffold (ERS) sequence
  source 1..88: mol_type = other RNA
actggcgcttctatctgtttactctgagcgccatcaccagcgattatgtcgtatgggtaaagctccctcttcggagggagcatcagag

SEQ ID NO: 21656 - RNA, 89 nt, synthetic construct
  misc_feature 1..89: note = engineered ribonucleic acid scaffold (ERS) sequence
  source 1..89: mol_type = other RNA
actggcgcttctatctgatttactctgagcgccatcaccagcgattatgtcgtatgggtaaagctccctcttcggagggagcatcagag

SEQ ID NO: 21657 - RNA, 88 nt, synthetic construct
  misc_feature 1..88: note = engineered ribonucleic acid scaffold (ERS) sequence
  source 1..88: mol_type = other RNA
actggcgcttctatctgattgctctgagcgccatcaccagcgattatgtcgtatgggtaaagctccctcttcggagggagcatcagag

SEQ ID NO: 21658 - RNA, 90 nt, synthetic construct
  misc_feature 1..90: note = engineered ribonucleic acid scaffold (ERS) sequence
  source 1..90: mol_type = other RNA
actggcgcttctatatctgattactctgagcgccatcaccagcgacgatgtcgtatgggtaaagctccctcttcggagggagcatcagag

SEQ ID NO: 21659 - RNA, 89 nt, synthetic construct
  misc_feature 1..89: note = engineered ribonucleic acid scaffold (ERS) sequence
  source 1..89: mol_type = other RNA
actggcgcttctaatctgattactctgagcgccatcaccagcgacgatgtcgtatgggtaaagctccctcttcggagggagcatcagag

SEQ ID NO: 21660 - RNA, 87 nt, synthetic construct
  misc_feature 1..87: note = engineered ribonucleic acid scaffold (ERS) sequence
  source 1..87: mol_type = other RNA
actggcgcttctactgattactctgagcgccatcaccagcgacgatgtcgtatgggtaaagctccctcttcggagggagcatcagag

SEQ ID NO: 21661 - RNA, 88 nt, synthetic construct
  misc_feature 1..88: note = engineered ribonucleic acid scaffold (ERS) sequence
  source 1..88: mol_type = other RNA
actggcgcttctaactgattactctgagcgccatcaccagcgacgatgtcgtatgggtaaagctccctcttcggagggagcatcagag

SEQ ID NO: 21662 - RNA, 88 nt, synthetic construct
  misc_feature 1..88: note = engineered ribonucleic acid scaffold (ERS) sequence
  source 1..88: mol_type = other RNA
actggcgcttctacctgattactctgagcgccatcaccagcgacgatgtcgtatgggtaaagctccctcttcggagggagcatcagag

SEQ ID NO: 21663 - RNA, 88 nt, synthetic construct
  misc_feature 1..88: note = engineered ribonucleic acid scaffold (ERS) sequence
  source 1..88: mol_type = other RNA
actggcgcttctagctgattactctgagcgccatcaccagcgacgatgtcgtatgggtaaagctccctcttcggagggagcatcagag

SEQ ID NO: 21664 - RNA, 90 nt, synthetic construct
  misc_feature 1..90: note = engineered ribonucleic acid scaffold (ERS) sequence
  source 1..90: mol_type = other RNA
actggcgcttctattactgattactctgagcgccatcaccagcgacgatgtcgtatgggtaaagctccctcttcggagggagcatcagag

SEQ ID NO: 21665 - RNA, 88 nt, synthetic construct
  misc_feature 1..88: note = engineered ribonucleic acid scaffold (ERS) sequence
  source 1..88: mol_type = other RNA
actggcgcttctatatgattactctgagcgccatcaccagcgacgatgtcgtatgggtaaagctccctcttcggagggagcatcagag

SEQ ID NO: 21666 - RNA, 88 nt, synthetic construct
  misc_feature 1..88: note = engineered ribonucleic acid scaffold (ERS) sequence
  source 1..88: mol_type = other RNA
actggcgcttctatgtgattactctgagcgccatcaccagcgacgatgtcgtatgggtaaagctccctcttcggagggagcatcagag

SEQ ID NO: 21667 - RNA, 88 nt, synthetic construct
  misc_feature 1..88: note = engineered ribonucleic acid scaffold (ERS) sequence
  source 1..88: mol_type = other RNA
actggcgcttctatttgattactctgagcgccatcaccagcgacgatgtcgtatgggtaaagctccctcttcggagggagcatcagag

SEQ ID NO: 21668 - RNA, 89 nt, synthetic construct
  misc_feature 1..89: note = engineered ribonucleic acid scaffold (ERS) sequence
  source 1..89: mol_type = other RNA
actggcgcttctatcttgattactctgagcgccatcaccagcgacgatgtcgtatgggtaaagctccctcttcggagggagcatcagag

SEQ ID NO: 21669 - RNA, 88 nt, synthetic construct
  misc_feature 1..88: note = engineered ribonucleic acid scaffold (ERS) sequence
  source 1..88: mol_type = other RNA
actggcgcttctatcagattactctgagcgccatcaccagcgacgatgtcgtatgggtaaagctccctcttcggagggagcatcagag

SEQ ID NO: 21670 - RNA, 88 nt, synthetic construct
  misc_feature 1..88: note = engineered ribonucleic acid scaffold (ERS) sequence
  source 1..88: mol_type = other RNA
actggcgcttctatcggattactctgagcgccatcaccagcgacgatgtcgtatgggtaaagctccctcttcggagggagcatcagag

SEQ ID NO: 21671 - RNA, 89 nt, synthetic construct
  misc_feature 1..89: note = engineered ribonucleic acid scaffold (ERS) sequence
  source 1..89: mol_type = other RNA
actggcgcttctatctgaattactctgagcgccatcaccagcgacgatgtcgtatgggtaaagctccctcttcggagggagcatcagag

SEQ ID NO: 21672 - RNA, 89 nt, synthetic construct
  misc_feature 1..89: note = engineered ribonucleic acid scaffold (ERS) sequence
  source 1..89: mol_type = other RNA
actggcgcttctatctgtattactctgagcgccatcaccagcgacgatgtcgtatgggtaaagctccctcttcggagggagcatcagag

SEQ ID NO: 21673 - RNA, 88 nt, synthetic construct
  misc_feature 1..88: note = engineered ribonucleic acid scaffold (ERS) sequence
  source 1..88: mol_type = other RNA
actggcgcttctatctggttactctgagcgccatcaccagcgacgatgtcgtatgggtaaagctccctcttcggagggagcatcagag

SEQ ID NO: 21674 - RNA, 88 nt, synthetic construct
  misc_feature 1..88: note = engineered ribonucleic acid scaffold (ERS) sequence
  source 1..88: mol_type = other RNA
actggcgcttctatctgtttactctgagcgccatcaccagcgacgatgtcgtatgggtaaagctccctcttcggagggagcatcagag

SEQ ID NO: 21675 - RNA, 89 nt, synthetic construct
  misc_feature 1..89: note = engineered ribonucleic acid scaffold (ERS) sequence
  source 1..89: mol_type = other RNA
actggcgcttctatctgatttactctgagcgccatcaccagcgacgatgtcgtatgggtaaagctccctcttcggagggagcatcagag

SEQ ID NO: 21676 - RNA, 88 nt, synthetic construct
  misc_feature 1..88: note = engineered ribonucleic acid scaffold (ERS) sequence
  source 1..88: mol_type = other RNA
actggcgcttctatctgattgctctgagcgccatcaccagcgacgatgtcgtatgggtaaagctccctcttcggagggagcatcagag

SEQ ID NO: 21677 - RNA, 90 nt, synthetic construct
  misc_feature 1..90: note = engineered ribonucleic acid scaffold (ERS) sequence
  source 1..90: mol_type = other RNA
actggcgcttctatatctgattactctgagcgccatcaccagcgactctgtcgtatgggtaaagctccctcttcggagggagcatcagag

SEQ ID NO: 21678 - RNA, 89 nt, synthetic construct
  misc_feature 1..89: note = engineered ribonucleic acid scaffold (ERS) sequence
  source 1..89: mol_type = other RNA
actggcgcttctaatctgattactctgagcgccatcaccagcgactctgtcgtatgggtaaagctccctcttcggagggagcatcagag

SEQ ID NO: 21679 - RNA, 87 nt, synthetic construct
  misc_feature 1..87: note = engineered ribonucleic acid scaffold (ERS) sequence
  source 1..87: mol_type = other RNA
actggcgcttctactgattactctgagcgccatcaccagcgactctgtcgtatgggtaaagctccctcttcggagggagcatcagag

SEQ ID NO: 21680 - RNA, 88 nt, synthetic construct
  misc_feature 1..88: note = engineered ribonucleic acid scaffold (ERS) sequence
  source 1..88: mol_type = other RNA
actggcgcttctaactgattactctgagcgccatcaccagcgactctgtcgtatgggtaaagctccctcttcggagggagcatcagag

SEQ ID NO: 21681 - RNA, 88 nt, synthetic construct
  misc_feature 1..88: note = engineered ribonucleic acid scaffold (ERS) sequence
  source 1..88: mol_type = other RNA
actggcgcttctacctgattactctgagcgccatcaccagcgactctgtcgtatgggtaaagctccctcttcggagggagcatcagag

SEQ ID NO: 21682 - RNA, 88 nt, synthetic construct
  misc_feature 1..88: note = engineered ribonucleic acid scaffold (ERS) sequence
  source 1..88: mol_type = other RNA
actggcgcttctagctgattactctgagcgccatcaccagcgactctgtcgtatgggtaaagctccctcttcggagggagcatcagag

SEQ ID NO: 21683 - RNA, 90 nt, synthetic construct
  misc_feature 1..90: note = engineered ribonucleic acid scaffold (ERS) sequence
  source 1..90: mol_type = other RNA
actggcgcttctattactgattactctgagcgccatcaccagcgactctgtcgtatgggtaaagctccctcttcggagggagcatcagag

SEQ ID NO: 21684 - RNA, 88 nt, synthetic construct
  misc_feature 1..88: note = engineered ribonucleic acid scaffold (ERS) sequence
  source 1..88: mol_type = other RNA
actggcgcttctatatgattactctgagcgccatcaccagcgactctgtcgtatgggtaaagctccctcttcggagggagcatcagag

SEQ ID NO: 21685 - RNA, 88 nt, synthetic construct
  misc_feature 1..88: note = engineered ribonucleic acid scaffold (ERS) sequence
  source 1..88: mol_type = other RNA
actggcgcttctatgtgattactctgagcgccatcaccagcgactctgtcgtatgggtaaagctccctcttcggagggagcatcagag

SEQ ID NO: 21686 - RNA, 88 nt, synthetic construct
  misc_feature 1..88: note = engineered ribonucleic acid scaffold (ERS) sequence
  source 1..88: mol_type = other RNA
actggcgcttctatttgattactctgagcgccatcaccagcgactctgtcgtatgggtaaagctccctcttcggagggagcatcagag

SEQ ID NO: 21687 - RNA, 89 nt, synthetic construct
  misc_feature 1..89: note = engineered ribonucleic acid scaffold (ERS) sequence
  source 1..89: mol_type = other RNA
actggcgcttctatcttgattactctgagcgccatcaccagcgactctgtcgtatgggtaaagctccctcttcggagggagcatcagag

SEQ ID NO: 21688 - RNA, 88 nt, synthetic construct
  misc_feature 1..88: note = engineered ribonucleic acid scaffold (ERS) sequence
  source 1..88: mol_type = other RNA
actggcgcttctatcagattactctgagcgccatcaccagcgactctgtcgtatgggtaaagctccctcttcggagggagcatcagag

SEQ ID NO: 21689 - RNA, 88 nt, synthetic construct
  misc_feature 1..88: note = engineered ribonucleic acid scaffold (ERS) sequence
  source 1..88: mol_type = other RNA
actggcgcttctatcggattactctgagcgccatcaccagcgactctgtcgtatgggtaaagctccctcttcggagggagcatcagag

SEQ ID NO: 21690 - RNA, 89 nt, synthetic construct
  misc_feature 1..89: note = engineered ribonucleic acid scaffold (ERS) sequence
  source 1..89: mol_type = other RNA
actggcgcttctatctgaattactctgagcgccatcaccagcgactctgtcgtatgggtaaagctccctcttcggagggagcatcagag

SEQ ID NO: 21691 - RNA, 89 nt, synthetic construct
  misc_feature 1..89: note = engineered ribonucleic acid scaffold (ERS) sequence
  source 1..89: mol_type = other RNA
actggcgcttctatctgtattactctgagcgccatcaccagcgactctgtcgtatgggtaaagctccctcttcggagggagcatcagag

SEQ ID NO: 21692 - RNA, 88 nt, synthetic construct
  misc_feature 1..88: note = engineered ribonucleic acid scaffold (ERS) sequence
  source 1..88: mol_type = other RNA
actggcgcttctatctggttactctgagcgccatcaccagcgactctgtcgtatgggtaaagctccctcttcggagggagcatcagag

SEQ ID NO: 21693 - RNA, 88 nt, synthetic construct
  misc_feature 1..88: note = engineered ribonucleic acid scaffold (ERS) sequence
  source 1..88: mol_type = other RNA
actggcgcttctatctgtttactctgagcgccatcaccagcgactctgtcgtatgggtaaagctccctcttcggagggagcatcagag

SEQ ID NO: 21694 - RNA, 89 nt, synthetic construct
  misc_feature 1..89: note = engineered ribonucleic acid scaffold (ERS) sequence
  source 1..89: mol_type = other RNA
actggcgcttctatctgatttactctgagcgccatcaccagcgactctgtcgtatgggtaaagctccctcttcggagggagcatcagag

SEQ ID NO: 21695 - RNA, 88 nt, synthetic construct
  misc_feature 1..88: note = engineered ribonucleic acid scaffold (ERS) sequence
  source 1..88: mol_type = other RNA
actggcgcttctatctgattgctctgagcgccatcaccagcgactctgtcgtatgggtaaagctccctcttcggagggagcatcagag

SEQ ID NO: 21696 - RNA, 90 nt, synthetic construct
  misc_feature 1..90: note = engineered ribonucleic acid scaffold (ERS) sequence
  source 1..90: mol_type = other RNA
actggcgcttctatatctgattactctgagcgccatcaccagcgactatgtcgtgtgggtaaagctccctcttcggagggagcatcagag

SEQ ID NO: 21697 - RNA, 89 nt, synthetic construct
  misc_feature 1..89: note = engineered ribonucleic acid scaffold (ERS) sequence
  source 1..89: mol_type = other RNA
actggcgcttctaatctgattactctgagcgccatcaccagcgactatgtcgtgtgggtaaagctccctcttcggagggagcatcagag

SEQ ID NO: 21698 - RNA, 87 nt, synthetic construct
  misc_feature 1..87: note = engineered ribonucleic acid scaffold (ERS) sequence
  source 1..87: mol_type = other RNA
actggcgcttctactgattactctgagcgccatcaccagcgactatgtcgtgtgggtaaagctccctcttcggagggagcatcagag

SEQ ID NO: 21699 - RNA, 88 nt, synthetic construct
  misc_feature 1..88: note = engineered ribonucleic acid scaffold (ERS) sequence
  source 1..88: mol_type = other RNA
actggcgcttctaactgattactctgagcgccatcaccagcgactatgtcgtgtgggtaaagctccctcttcggagggagcatcagag

SEQ ID NO: 21700 - RNA, 88 nt, synthetic construct
  misc_feature 1..88: note = engineered ribonucleic acid scaffold (ERS) sequence
  source 1..88: mol_type = other RNA
actggcgcttctacctgattactctgagcgccatcaccagcgactatgtcgtgtgggtaaagctccctcttcggagggagcatcagag

SEQ ID NO: 21701 - RNA, 88 nt, synthetic construct
  misc_feature 1..88: note = engineered ribonucleic acid scaffold (ERS) sequence
  source 1..88: mol_type = other RNA
actggcgcttctagctgattactctgagcgccatcaccagcgactatgtcgtgtgggtaaagctccctcttcggagggagcatcagag

SEQ ID NO: 21702 - RNA, 90 nt, synthetic construct
  misc_feature 1..90: note = engineered ribonucleic acid scaffold (ERS) sequence
  source 1..90: mol_type = other RNA
actggcgcttctattactgattactctgagcgccatcaccagcgactatgtcgtgtgggtaaagctccctcttcggagggagcatcagag

SEQ ID NO: 21703 - RNA, 88 nt, synthetic construct
  misc_feature 1..88: note = engineered ribonucleic acid scaffold (ERS) sequence
  source 1..88: mol_type = other RNA
actggcgcttctatatgattactctgagcgccatcaccagcgactatgtcgtgtgggtaaagctccctcttcggagggagcatcagag

SEQ ID NO: 21704 - RNA, 88 nt, synthetic construct
  misc_feature 1..88: note = engineered ribonucleic acid scaffold (ERS) sequence
  source 1..88: mol_type = other RNA
actggcgcttctatgtgattactctgagcgccatcaccagcgactatgtcgtgtgggtaaagctccctcttcggagggagcatcagag

SEQ ID NO: 21705 - RNA, 88 nt, synthetic construct
  misc_feature 1..88: note = engineered ribonucleic acid scaffold (ERS) sequence
  source 1..88: mol_type = other RNA
actggcgcttctatttgattactctgagcgccatcaccagcgactatgtcgtgtgggtaaagctccctcttcggagggagcatcagag

SEQ ID NO: 21706 - RNA, 89 nt, synthetic construct
  misc_feature 1..89: note = engineered ribonucleic acid scaffold (ERS) sequence
  source 1..89: mol_type = other RNA
actggcgcttctatcttgattactctgagcgccatcaccagcgactatgtcgtgtgggtaaagctccctcttcggagggagcatcagag

SEQ ID NO: 21707 - RNA, 88 nt, synthetic construct
  misc_feature 1..88: note = engineered ribonucleic acid scaffold (ERS) sequence
  source 1..88: mol_type = other RNA
actggcgcttctatcagattactctgagcgccatcaccagcgactatgtcgtgtgggtaaagctccctcttcggagggagcatcagag

SEQ ID NO: 21708 - RNA, 88 nt, synthetic construct
  misc_feature 1..88: note = engineered ribonucleic acid scaffold (ERS) sequence
  source 1..88: mol_type = other RNA
actggcgcttctatcggattactctgagcgccatcaccagcgactatgtcgtgtgggtaaagctccctcttcggagggagcatcagag

SEQ ID NO: 21709 - RNA, 89 nt, synthetic construct
  misc_feature 1..89: note = engineered ribonucleic acid scaffold (ERS) sequence
  source 1..89: mol_type = other RNA
actggcgcttctatctgaattactctgagcgccatcaccagcgactatgtcgtgtgggtaaagctccctcttcggagggagcatcagag

SEQ ID NO: 21710 - RNA, 89 nt, synthetic construct
  misc_feature 1..89: note = engineered ribonucleic acid scaffold (ERS) sequence
  source 1..89: mol_type = other RNA
actggcgcttctatctgtattactctgagcgccatcaccagcgactatgtcgtgtgggtaaagctccctcttcggagggagcatcagag

SEQ ID NO: 21711 - RNA, 88 nt, synthetic construct
  misc_feature 1..88: note = engineered ribonucleic acid scaffold (ERS) sequence
  source 1..88: mol_type = other RNA
actggcgcttctatctggttactctgagcgccatcaccagcgactatgtcgtgtgggtaaagctccctcttcggagggagcatcagag

SEQ ID NO: 21712 - RNA, 88 nt, synthetic construct
  misc_feature 1..88: note = engineered ribonucleic acid scaffold (ERS) sequence
  source 1..88: mol_type = other RNA
actggcgcttctatctgtttactctgagcgccatcaccagcgactatgtcgtgtgggtaaagctccctcttcggagggagcatcagag

SEQ ID NO: 21713 - RNA, 89 nt, synthetic construct
  misc_feature 1..89: note = engineered ribonucleic acid scaffold (ERS) sequence
  source 1..89: mol_type = other RNA
actggcgcttctatctgatttactctgagcgccatcaccagcgactatgtcgtgtgggtaaagctccctcttcggagggagcatcagag

SEQ ID NO: 21714 - RNA, 88 nt, synthetic construct
  misc_feature 1..88: note = engineered ribonucleic acid scaffold (ERS) sequence
  source 1..88: mol_type = other RNA
actggcgcttctatctgattgctctgagcgccatcaccagcgactatgtcgtgtgggtaaagctccctcttcggagggagcatcagag

SEQ ID NO: 21715 - RNA, 91 nt, synthetic construct
  misc_feature 1..91: note = engineered ribonucleic acid scaffold (ERS) sequence
  source 1..91: mol_type = other RNA
actggcgcttctatatctgattactctgagcgccatcaccagcgactatgtcgtattgggtaaagctccctcttcggagggagcatcagag

SEQ ID NO: 21716 - RNA, 90 nt, synthetic construct
  misc_feature 1..90: note = engineered ribonucleic acid scaffold (ERS) sequence
  source 1..90: mol_type = other RNA
actggcgcttctaatctgattactctgagcgccatcaccagcgactatgtcgtattgggtaaagctccctcttcggagggagcatcagag

SEQ ID NO: 21717 - RNA, 88 nt, synthetic construct
  misc_feature 1..88: note = engineered ribonucleic acid scaffold (ERS) sequence
  source 1..88: mol_type = other RNA
actggcgcttctactgattactctgagcgccatcaccagcgactatgtcgtattgggtaaagctccctcttcggagggagcatcagag

SEQ ID NO: 21718 - RNA, 89 nt, synthetic construct
  misc_feature 1..89: note = engineered ribonucleic acid scaffold (ERS) sequence
  source 1..89: mol_type = other RNA
actggcgcttctaactgattactctgagcgccatcaccagcgactatgtcgtattgggtaaagctccctcttcggagggagcatcagag

SEQ ID NO: 21719 - RNA, 89 nt, synthetic construct
  misc_feature 1..89: note = engineered ribonucleic acid scaffold (ERS) sequence
  source 1..89: mol_type = other RNA
actggcgcttctacctgattactctgagcgccatcaccagcgactatgtcgtattgggtaaagctccctcttcggagggagcatcagag

SEQ ID NO: 21720 - RNA, 89 nt, synthetic construct
  misc_feature 1..89: note = engineered ribonucleic acid scaffold (ERS) sequence
  source 1..89: mol_type = other RNA
actggcgcttctagctgattactctgagcgccatcaccagcgactatgtcgtattgggtaaagctccctcttcggagggagcatcagag

SEQ ID NO: 21721 - RNA, 91 nt, synthetic construct
  misc_feature 1..91: note = engineered ribonucleic acid scaffold (ERS) sequence
  source 1..91: mol_type = other RNA
actggcgcttctattactgattactctgagcgccatcaccagcgactatgtcgtattgggtaaagctccctcttcggagggagcatcagag

SEQ ID NO: 21722 - RNA, 89 nt, synthetic construct
  misc_feature 1..89: note = engineered ribonucleic acid scaffold (ERS) sequence
  source 1..89: mol_type = other RNA
actggcgcttctatatgattactctgagcgccatcaccagcgactatgtcgtattgggtaaagctccctcttcggagggagcatcagag

SEQ ID NO: 21723 - RNA, 89 nt, synthetic construct
  misc_feature 1..89: note = engineered ribonucleic acid scaffold (ERS) sequence
  source 1..89: mol_type = other RNA
actggcgcttctatgtgattactctgagcgccatcaccagcgactatgtcgtattgggtaaagctccctcttcggagggagcatcagag

SEQ ID NO: 21724 - RNA, 89 nt, synthetic construct
  misc_feature 1..89: note = engineered ribonucleic acid scaffold (ERS) sequence
  source 1..89: mol_type = other RNA
actggcgcttctatttgattactctgagcgccatcaccagcgactatgtcgtattgggtaaagctccctcttcggagggagcatcagag

SEQ ID NO: 21725 - RNA, 90 nt, synthetic construct
  misc_feature 1..90: note = engineered ribonucleic acid scaffold (ERS) sequence
  source 1..90: mol_type = other RNA
actggcgcttctatcttgattactctgagcgccatcaccagcgactatgtcgtattgggtaaagctccctcttcggagggagcatcagag

SEQ ID NO: 21726 - RNA, 89 nt, synthetic construct
  misc_feature 1..89: note = engineered ribonucleic acid scaffold (ERS) sequence
  source 1..89: mol_type = other RNA
actggcgcttctatcagattactctgagcgccatcaccagcgactatgtcgtattgggtaaagctccctcttcggagggagcatcagag

SEQ ID NO: 21727 - RNA, 89 nt, synthetic construct
  misc_feature 1..89: note = engineered ribonucleic acid scaffold (ERS) sequence
  source 1..89: mol_type = other RNA
actggcgcttctatcggattactctgagcgccatcaccagcgactatgtcgtattgggtaaagctccctcttcggagggagcatcagag

SEQ ID NO: 21728 - RNA, 90 nt, synthetic construct
  misc_feature 1..90: note = engineered ribonucleic acid scaffold (ERS) sequence
  source 1..90: mol_type = other RNA
actggcgcttctatctgaattactctgagcgccatcaccagcgactatgtcgtattgggtaaagctccctcttcggagggagcatcagag

SEQ ID NO: 21729 - RNA, 90 nt, synthetic construct
  misc_feature 1..90: note = engineered ribonucleic acid scaffold (ERS) sequence
  source 1..90: mol_type = other RNA
actggcgcttctatctgtattactctgagcgccatcaccagcgactatgtcgtattgggtaaagctccctcttcggagggagcatcagag

SEQ ID NO: 21730 - RNA, 89 nt, synthetic construct
  misc_feature 1..89: note = engineered ribonucleic acid scaffold (ERS) sequence
  source 1..89: mol_type = other RNA
actggcgcttctatctggttactctgagcgccatcaccagcgactatgtcgtattgggtaaagctccctcttcggagggagcatcagag

SEQ ID NO: 21731 - RNA, 89 nt, synthetic construct
  misc_feature 1..89: note = engineered ribonucleic acid scaffold (ERS) sequence
  source 1..89: mol_type = other RNA
actggcgcttctatctgtttactctgagcgccatcaccagcgactatgtcgtattgggtaaagctccctcttcggagggagcatcagag

SEQ ID NO: 21732 - RNA, 90 nt, synthetic construct
  misc_feature 1..90: note = engineered ribonucleic acid scaffold (ERS) sequence
  source 1..90: mol_type = other RNA
actggcgcttctatctgatttactctgagcgccatcaccagcgactatgtcgtattgggtaaagctccctcttcggagggagcatcagag

SEQ ID NO: 21733 - RNA, 89 nt, synthetic construct
  misc_feature 1..89: note = engineered ribonucleic acid scaffold (ERS) sequence
  source 1..89: mol_type = other RNA
actggcgcttctatctgattgctctgagcgccatcaccagcgactatgtcgtattgggtaaagctccctcttcggagggagcatcagag

SEQ ID NO: 21734 - RNA, 91 nt, synthetic construct
  misc_feature 1..91: note = engineered ribonucleic acid scaffold (ERS) sequence
  source 1..91: mol_type = other RNA
actggcgcttctatatctgattactctgagcgccatcaccagcgactatgtcgtatggagtaaagctccctcttcggagggagcatcagag

SEQ ID NO: 21735 - RNA, 90 nt, synthetic construct
  misc_feature 1..90: note = engineered ribonucleic acid scaffold (ERS) sequence
  source 1..90: mol_type = other RNA
actggcgcttctaatctgattactctgagcgccatcaccagcgactatgtcgtatggagtaaagctccctcttcggagggagcatcagag

SEQ ID NO: 21736 - RNA, 88 nt, synthetic construct
  misc_feature 1..88: note = engineered ribonucleic acid scaffold (ERS) sequence
  source 1..88: mol_type = other RNA
actggcgcttctactgattactctgagcgccatcaccagcgactatgtcgtatggagtaaagctccctcttcggagggagcatcagag

SEQ ID NO: 21737 - RNA, 89 nt, synthetic construct
  misc_feature 1..89: note = engineered ribonucleic acid scaffold (ERS) sequence
  source 1..89: mol_type = other RNA
actggcgcttctaactgattactctgagcgccatcaccagcgactatgtcgtatggagtaaagctccctcttcggagggagcatcagag

SEQ ID NO: 21738 - RNA, 89 nt, synthetic construct
  misc_feature 1..89: note = engineered ribonucleic acid scaffold (ERS) sequence
  source 1..89: mol_type = other RNA
actggcgcttctacctgattactctgagcgccatcaccagcgactatgtcgtatggagtaaagctccctcttcggagggagcatcagag

SEQ ID NO: 21739 - RNA, 89 nt, synthetic construct
  misc_feature 1..89: note = engineered ribonucleic acid scaffold (ERS) sequence
  source 1..89: mol_type = other RNA
actggcgcttctagctgattactctgagcgccatcaccagcgactatgtcgtatggagtaaagctccctcttcggagggagcatcagag

SEQ ID NO: 21740 - RNA, 91 nt, synthetic construct
  misc_feature 1..91: note = engineered ribonucleic acid scaffold (ERS) sequence
  source 1..91: mol_type = other RNA
actggcgcttctattactgattactctgagcgccatcaccagcgactatgtcgtatggagtaaagctccctcttcggagggagcatcagag

SEQ ID NO: 21741 - RNA, 89 nt, synthetic construct
  misc_feature 1..89: note = engineered ribonucleic acid scaffold (ERS) sequence
  source 1..89: mol_type = other RNA
actggcgcttctatatgattactctgagcgccatcaccagcgactatgtcgtatggagtaaagctccctcttcggagggagcatcagag

SEQ ID NO: 21742 - RNA, 89 nt, synthetic construct
  misc_feature 1..89: note = engineered ribonucleic acid scaffold (ERS) sequence
  source 1..89: mol_type = other RNA
actggcgcttctatgtgattactctgagcgccatcaccagcgactatgtcgtatggagtaaagctccctcttcggagggagcatcagag

SEQ ID NO: 21743 - RNA, 89 nt, synthetic construct
  misc_feature 1..89: note = engineered ribonucleic acid scaffold (ERS) sequence
  source 1..89: mol_type = other RNA
actggcgcttctatttgattactctgagcgccatcaccagcgactatgtcgtatggagtaaagctccctcttcggagggagcatcagag

SEQ ID NO: 21744 - RNA, 90 nt, synthetic construct
  misc_feature 1..90: note = engineered ribonucleic acid scaffold (ERS) sequence
  source 1..90: mol_type = other RNA
actggcgcttctatcttgattactctgagcgccatcaccagcgactatgtcgtatggagtaaagctccctcttcggagggagcatcagag

SEQ ID NO: 21745 - RNA, 89 nt, synthetic construct
  misc_feature 1..89: note = engineered ribonucleic acid scaffold (ERS) sequence
  source 1..89: mol_type = other RNA
actggcgcttctatcagattactctgagcgccatcaccagcgactatgtcgtatggagtaaagctccctcttcggagggagcatcagag

SEQ ID NO: 21746 - RNA, 89 nt, synthetic construct
  misc_feature 1..89: note = engineered ribonucleic acid scaffold (ERS) sequence
  source 1..89: mol_type = other RNA
actggcgcttctatcggattactctgagcgccatcaccagcgactatgtcgtatggagtaaagctccctcttcggagggagcatcagag

SEQ ID NO: 21747 - RNA, 90 nt, synthetic construct
  misc_feature 1..90: note = engineered ribonucleic acid scaffold (ERS) sequence
  source 1..90: mol_type = other RNA
actggcgcttctatctgaattactctgagcgccatcaccagcgactatgtcgtatggagtaaagctccctcttcggagggagcatcagag

SEQ ID NO: 21748 - RNA, 90 nt, synthetic construct
  misc_feature 1..90: note = engineered ribonucleic acid scaffold (ERS) sequence
  source 1..90: mol_type = other RNA
actggcgcttctatctgtattactctgagcgccatcaccagcgactatgtcgtatggagtaaagctccctcttcggagggagcatcagag

SEQ ID NO: 21749 - RNA, 89 nt, synthetic construct
  misc_feature 1..89: note = engineered ribonucleic acid scaffold (ERS) sequence
  source 1..89: mol_type = other RNA
actggcgcttctatctggttactctgagcgccatcaccagcgactatgtcgtatggagtaaagctccctcttcggagggagcatcagag

SEQ ID NO: 21750 - RNA, 89 nt, synthetic construct
  misc_feature 1..89: note = engineered ribonucleic acid scaffold (ERS) sequence
  source 1..89: mol_type = other RNA
actggcgcttctatctgtttactctgagcgccatcaccagcgactatgtcgtatggagtaaagctccctcttcggagggagcatcagag

SEQ ID NO: 21751 - RNA, 90 nt, synthetic construct
  misc_feature 1..90: note = engineered ribonucleic acid scaffold (ERS) sequence
  source 1..90: mol_type = other RNA
actggcgcttctatctgatttactctgagcgccatcaccagcgactatgtcgtatggagtaaagctccctcttcggagggagcatcagag

SEQ ID NO: 21752 - RNA, 89 nt, synthetic construct
  misc_feature 1..89: note = engineered ribonucleic acid scaffold (ERS) sequence
  source 1..89: mol_type = other RNA
actggcgcttctatctgattgctctgagcgccatcaccagcgactatgtcgtatggagtaaagctccctcttcggagggagcatcagag

SEQ ID NO: 21753 - RNA, 91 nt, synthetic construct
  misc_feature 1..91: note = engineered ribonucleic acid scaffold (ERS) sequence
  source 1..91: mol_type = other RNA
actggcgcttctatatctgattactctgagcgccatcaccagcgactatgtcgtatggcgtaaagctccctcttcggagggagcatcagag

SEQ ID NO: 21754 - RNA, 90 nt, synthetic construct
  misc_feature 1..90: note = engineered ribonucleic acid scaffold (ERS) sequence
  source 1..90: mol_type = other RNA
actggcgcttctaatctgattactctgagcgccatcaccagcgactatgtcgtatggcgtaaagctccctcttcggagggagcatcagag

SEQ ID NO: 21755 - RNA, 88 nt, synthetic construct
  misc_feature 1..88: note = engineered ribonucleic acid scaffold (ERS) sequence
  source 1..88: mol_type = other RNA
actggcgcttctactgattactctgagcgccatcaccagcgactatgtcgtatggcgtaaagctccctcttcggagggagcatcagag

SEQ ID NO: 21756 - RNA, 89 nt, synthetic construct
  misc_feature 1..89: note = engineered ribonucleic acid scaffold (ERS) sequence
  source 1..89: mol_type = other RNA
actggcgcttctaactgattactctgagcgccatcaccagcgactatgtcgtatggcgtaaagctccctcttcggagggagcatcagag

SEQ ID NO: 21757 - RNA, 89 nt, synthetic construct
  misc_feature 1..89: note = engineered ribonucleic acid scaffold (ERS) sequence
  source 1..89: mol_type = other RNA
actggcgcttctacctgattactctgagcgccatcaccagcgactatgtcgtatggcgtaaagctccctcttcggagggagcatcagag

SEQ ID NO: 21758 - RNA, 89 nt, synthetic construct
  misc_feature 1..89: note = engineered ribonucleic acid scaffold (ERS) sequence
  source 1..89: mol_type = other RNA
actggcgcttctagctgattactctgagcgccatcaccagcgactatgtcgtatggcgtaaagctccctcttcggagggagcatcagag

SEQ ID NO: 21759 - RNA, 91 nt, synthetic construct
  misc_feature 1..91: note = engineered ribonucleic acid scaffold (ERS) sequence
  source 1..91: mol_type = other RNA
actggcgcttctattactgattactctgagcgccatcaccagcgactatgtcgtatggcgtaaagctccctcttcggagggagcatcagag

SEQ ID NO: 21760 - RNA, 89 nt, synthetic construct
  misc_feature 1..89: note = engineered ribonucleic acid scaffold (ERS) sequence
  source 1..89: mol_type = other RNA
actggcgcttctatatgattactctgagcgccatcaccagcgactatgtcgtatggcgtaaagctccctcttcggagggagcatcagag

SEQ ID NO: 21761 - RNA, 89 nt, synthetic construct
  misc_feature 1..89: note = engineered ribonucleic acid scaffold (ERS) sequence
  source 1..89: mol_type = other RNA
actggcgcttctatgtgattactctgagcgccatcaccagcgactatgtcgtatggcgtaaagctccctcttcggagggagcatcagag

SEQ ID NO: 21762 - RNA, 89 nt, synthetic construct
  misc_feature 1..89: note = engineered ribonucleic acid scaffold (ERS) sequence
  source 1..89: mol_type = other RNA
actggcgcttctatttgattactctgagcgccatcaccagcgactatgtcgtatggcgtaaagctccctcttcggagggagcatcagag

SEQ ID NO: 21763 - RNA, 90 nt, synthetic construct
  misc_feature 1..90: note = engineered ribonucleic acid scaffold (ERS) sequence
  source 1..90: mol_type = other RNA
actggcgcttctatcttgattactctgagcgccatcaccagcgactatgtcgtatggcgtaaagctccctcttcggagggagcatcagag

SEQ ID NO: 21764 - RNA, 89 nt, synthetic construct
  misc_feature 1..89: note = engineered ribonucleic acid scaffold (ERS) sequence
  source 1..89: mol_type = other RNA
actggcgcttctatcagattactctgagcgccatcaccagcgactatgtcgtatggcgtaaagctccctcttcggagggagcatcagag

SEQ ID NO: 21765 - RNA, 89 nt, synthetic construct
  misc_feature 1..89: note = engineered ribonucleic acid scaffold (ERS) sequence
  source 1..89: mol_type = other RNA
actggcgcttctatcggattactctgagcgccatcaccagcgactatgtcgtatggcgtaaagctccctcttcggagggagcatcagag

SEQ ID NO: 21766 - RNA, 90 nt, synthetic construct
  misc_feature 1..90: note = engineered ribonucleic acid scaffold (ERS) sequence
  source 1..90: mol_type = other RNA
actggcgcttctatctgaattactctgagcgccatcaccagcgactatgtcgtatggcgtaaagctccctcttcggagggagcatcagag

SEQ ID NO: 21767 - RNA, 90 nt, synthetic construct
  misc_feature 1..90: note = engineered ribonucleic acid scaffold (ERS) sequence
  source 1..90: mol_type = other RNA
actggcgcttctatctgtattactctgagcgccatcaccagcgactatgtcgtatggcgtaaagctccctcttcggagggagcatcagag

SEQ ID NO: 21768 - RNA, 89 nt, synthetic construct
  misc_feature 1..89: note = engineered ribonucleic acid scaffold (ERS) sequence
  source 1..89: mol_type = other RNA
actggcgcttctatctggttactctgagcgccatcaccagcgactatgtcgtatggcgtaaagctccctcttcggagggagcatcagag

SEQ ID NO: 21769 - RNA, 89 nt, synthetic construct
  misc_feature 1..89: note = engineered ribonucleic acid scaffold (ERS) sequence
  source 1..89: mol_type = other RNA
actggcgcttctatctgtttactctgagcgccatcaccagcgactatgtcgtatggcgtaaagctccctcttcggagggagcatcagag

SEQ ID NO: 21770 - RNA, 90 nt, synthetic construct
  misc_feature 1..90: note = engineered ribonucleic acid scaffold (ERS) sequence
  source 1..90: mol_type = other RNA
actggcgcttctatctgatttactctgagcgccatcaccagcgactatgtcgtatggcgtaaagctccctcttcggagggagcatcagag

SEQ ID NO: 21771 - RNA, 89 nt, synthetic construct
  misc_feature 1..89: note = engineered ribonucleic acid scaffold (ERS) sequence
  source 1..89: mol_type = other RNA
actggcgcttctatctgattgctctgagcgccatcaccagcgactatgtcgtatggcgtaaagctccctcttcggagggagcatcagag

SEQ ID NO: 21772 - RNA, 91 nt, synthetic construct
  misc_feature 1..91: note = engineered ribonucleic acid scaffold (ERS) sequence
  source 1..91: mol_type = other RNA
actggcgcttctatatctgattactctgagcgccatcaccagcgactatgtcgtatggtgtaaagctccctcttcggagggagcatcagag

SEQ ID NO: 21773 - RNA, 90 nt, synthetic construct
  misc_feature 1..90: note = engineered ribonucleic acid scaffold (ERS) sequence
  source 1..90: mol_type = other RNA
actggcgcttctaatctgattactctgagcgccatcaccagcgactatgtcgtatggtgtaaagctccctcttcggagggagcatcagag

SEQ ID NO: 21774 - RNA, 88 nt, synthetic construct
  misc_feature 1..88: note = engineered ribonucleic acid scaffold (ERS) sequence
  source 1..88: mol_type = other RNA
actggcgcttctactgattactctgagcgccatcaccagcgactatgtcgtatggtgtaaagctccctcttcggagggagcatcagag

SEQ ID NO: 21775 - RNA, 89 nt, synthetic construct
  misc_feature 1..89: note = engineered ribonucleic acid scaffold (ERS) sequence
  source 1..89: mol_type = other RNA
actggcgcttctaactgattactctgagcgccatcaccagcgactatgtcgtatggtgtaaagctccctcttcggagggagcatcagag

SEQ ID NO: 21776 - RNA, 89 nt, synthetic construct
  misc_feature 1..89: note = engineered ribonucleic acid scaffold (ERS) sequence
  source 1..89: mol_type = other RNA
actggcgcttctacctgattactctgagcgccatcaccagcgactatgtcgtatggtgtaaagctccctcttcggagggagcatcagag

SEQ ID NO: 21777 - RNA, 89 nt, synthetic construct
  misc_feature 1..89: note = engineered ribonucleic acid scaffold (ERS) sequence
  source 1..89: mol_type = other RNA
actggcgcttctagctgattactctgagcgccatcaccagcgactatgtcgtatggtgtaaagctccctcttcggagggagcatcagag

SEQ ID NO: 21778 - RNA, 91 nt, synthetic construct
  misc_feature 1..91: note = engineered ribonucleic acid scaffold (ERS) sequence
  source 1..91: mol_type = other RNA
actggcgcttctattactgattactctgagcgccatcaccagcgactatgtcgtatggtgtaaagctccctcttcggagggagcatcagag

SEQ ID NO: 21779 - RNA, 89 nt, synthetic construct
  misc_feature 1..89: note = engineered ribonucleic acid scaffold (ERS) sequence
  source 1..89: mol_type = other RNA
actggcgcttctatatgattactctgagcgccatcaccagcgactatgtcgtatggtgtaaagctccctcttcggagggagcatcagag

SEQ ID NO: 21780 - RNA, 89 nt, synthetic construct
  misc_feature 1..89: note = engineered ribonucleic acid scaffold (ERS) sequence
  source 1..89: mol_type = other RNA
actggcgcttctatgtgattactctgagcgccatcaccagcgactatgtcgtatggtgtaaagctccctcttcggagggagcatcagag

SEQ ID NO: 21781 - RNA, 89 nt, synthetic construct
  misc_feature 1..89: note = engineered ribonucleic acid scaffold (ERS) sequence
  source 1..89: mol_type = other RNA
actggcgcttctatttgattactctgagcgccatcaccagcgactatgtcgtatggtgtaaagctccctcttcggagggagcatcagag

SEQ ID NO: 21782 - RNA, 90 nt, synthetic construct
  misc_feature 1..90: note = engineered ribonucleic acid scaffold (ERS) sequence
  source 1..90: mol_type = other RNA
actggcgcttctatcttgattactctgagcgccatcaccagcgactatgtcgtatggtgtaaagctccctcttcggagggagcatcagag

SEQ ID NO: 21783 - RNA, 89 nt, synthetic construct
  misc_feature 1..89: note = engineered ribonucleic acid scaffold (ERS) sequence
  source 1..89: mol_type = other RNA
actggcgcttctatcagattactctgagcgccatcaccagcgactatgtcgtatggtgtaaagctccctcttcggagggagcatcagag

SEQ ID NO: 21784 - RNA, 89 nt, synthetic construct
  misc_feature 1..89: note = engineered ribonucleic acid scaffold (ERS) sequence
  source 1..89: mol_type = other RNA
actggcgcttctatcggattactctgagcgccatcaccagcgactatgtcgtatggtgtaaagctccctcttcggagggagcatcagag

SEQ ID NO: 21785 - RNA, 90 nt, synthetic construct
  misc_feature 1..90: note = engineered ribonucleic acid scaffold (ERS) sequence
  source 1..90: mol_type = other RNA
actggcgcttctatctgaattactctgagcgccatcaccagcgactatgtcgtatggtgtaaagctccctcttcggagggagcatcagag

SEQ ID NO: 21786 - RNA, 90 nt, synthetic construct
  misc_feature 1..90: note = engineered ribonucleic acid scaffold (ERS) sequence
  source 1..90: mol_type = other RNA
actggcgcttctatctgtattactctgagcgccatcaccagcgactatgtcgtatggtgtaaagctccctcttcggagggagcatcagag

SEQ ID NO: 21787 - RNA, 89 nt, synthetic construct
  misc_feature 1..89: note = engineered ribonucleic acid scaffold (ERS) sequence
  source 1..89: mol_type = other RNA
actggcgcttctatctggttactctgagcgccatcaccagcgactatgtcgtatggtgtaaagctccctcttcggagggagcatcagag

SEQ ID NO: 21788 - RNA, 89 nt, synthetic construct
  misc_feature 1..89: note = engineered ribonucleic acid scaffold (ERS) sequence
  source 1..89: mol_type = other RNA
actggcgcttctatctgtttactctgagcgccatcaccagcgactatgtcgtatggtgtaaagctccctcttcggagggagcatcagag

SEQ ID NO: 21789 - RNA, 90 nt, synthetic construct
  misc_feature 1..90: note = engineered ribonucleic acid scaffold (ERS) sequence
  source 1..90: mol_type = other RNA
actggcgcttctatctgatttactctgagcgccatcaccagcgactatgtcgtatggtgtaaagctccctcttcggagggagcatcagag

SEQ ID NO: 21790 - RNA, 89 nt, synthetic construct
  misc_feature 1..89: note = engineered ribonucleic acid scaffold (ERS) sequence
  source 1..89: mol_type = other RNA
actggcgcttctatctgattgctctgagcgccatcaccagcgactatgtcgtatggtgtaaagctccctcttcggagggagcatcagag

SEQ ID NO: 21791 - RNA, 91 nt, synthetic construct
  misc_feature 1..91: note = engineered ribonucleic acid scaffold (ERS) sequence
  source 1..91: mol_type = other RNA
actggcgcttctatatctgattactctgagcgccatcaccagcgactatgtcgtatgggctaaagctccctcttcggagggagcatcagag

SEQ ID NO: 21792 - RNA, 90 nt, synthetic construct
  misc_feature 1..90: note = engineered ribonucleic acid scaffold (ERS) sequence
  source 1..90: mol_type = other RNA
actggcgcttctaatctgattactctgagcgccatcaccagcgactatgtcgtatgggctaaagctccctcttcggagggagcatcagag

SEQ ID NO: 21793 - RNA, 88 nt, synthetic construct
  misc_feature 1..88: note = engineered ribonucleic acid scaffold (ERS) sequence
  source 1..88: mol_type = other RNA
actggcgcttctactgattactctgagcgccatcaccagcgactatgtcgtatgggctaaagctccctcttcggagggagcatcagag

SEQ ID NO: 21794 - RNA, 89 nt, synthetic construct
  misc_feature 1..89: note = engineered ribonucleic acid scaffold (ERS) sequence
  source 1..89: mol_type = other RNA
actggcgcttctaactgattactctgagcgccatcaccagcgactatgtcgtatgggctaaagctccctcttcggagggagcatcagag

SEQ ID NO: 21795 - RNA, 89 nt, synthetic construct
  misc_feature 1..89: note = engineered ribonucleic acid scaffold (ERS) sequence
  source 1..89: mol_type = other RNA
actggcgcttctacctgattactctgagcgccatcaccagcgactatgtcgtatgggctaaagctccctcttcggagggagcatcagag

SEQ ID NO: 21796 - RNA, 89 nt, synthetic construct
  misc_feature 1..89: note = engineered ribonucleic acid scaffold (ERS) sequence
  source 1..89: mol_type = other RNA
actggcgcttctagctgattactctgagcgccatcaccagcgactatgtcgtatgggctaaagctccctcttcggagggagcatcagag

SEQ ID NO: 21797 - RNA, 91 nt, synthetic construct
  misc_feature 1..91: note = engineered ribonucleic acid scaffold (ERS) sequence
  source 1..91: mol_type = other RNA
actggcgcttctattactgattactctgagcgccatcaccagcgactatgtcgtatgggctaaagctccctcttcggagggagcatcagag

SEQ ID NO: 21798 - RNA, 89 nt, synthetic construct
  misc_feature 1..89: note = engineered ribonucleic acid scaffold (ERS) sequence
  source 1..89: mol_type = other RNA
actggcgcttctatatgattactctgagcgccatcaccagcgactatgtcgtatgggctaaagctccctcttcggagggagcatcagag

SEQ ID NO: 21799 - RNA, 89 nt, synthetic construct
  misc_feature 1..89: note = engineered ribonucleic acid scaffold (ERS) sequence
  source 1..89: mol_type = other RNA
actggcgcttctatgtgattactctgagcgccatcaccagcgactatgtcgtatgggctaaagctccctcttcggagggagcatcagag

SEQ ID NO: 21800 - RNA, 89 nt, synthetic construct
  misc_feature 1..89: note = engineered ribonucleic acid scaffold (ERS) sequence
  source 1..89: mol_type = other RNA
actggcgcttctatttgattactctgagcgccatcaccagcgactatgtcgtatgggctaaagctccctcttcggagggagcatcagag

SEQ ID NO: 21801 - RNA, 90 nt, synthetic construct
  misc_feature 1..90: note = engineered ribonucleic acid scaffold (ERS) sequence
  source 1..90: mol_type = other RNA
actggcgcttctatcttgattactctgagcgccatcaccagcgactatgtcgtatgggctaaagctccctcttcggagggagcatcagag

SEQ ID NO: 21802 - RNA, 89 nt, synthetic construct
  misc_feature 1..89: note = engineered ribonucleic acid scaffold (ERS) sequence
  source 1..89: mol_type = other RNA
actggcgcttctatcagattactctgagcgccatcaccagcgactatgtcgtatgggctaaagctccctcttcggagggagcatcagag

SEQ ID NO: 21803 - RNA, 89 nt, synthetic construct
  misc_feature 1..89: note = engineered ribonucleic acid scaffold (ERS) sequence
  source 1..89: mol_type = other RNA
actggcgcttctatcggattactctgagcgccatcaccagcgactatgtcgtatgggctaaagctccctcttcggagggagcatcagag

SEQ ID NO: 21804 - RNA, 90 nt, synthetic construct
  misc_feature 1..90: note = engineered ribonucleic acid scaffold (ERS) sequence
  source 1..90: mol_type = other RNA
actggcgcttctatctgaattactctgagcgccatcaccagcgactatgtcgtatgggctaaagctccctcttcggagggagcatcagag

SEQ ID NO: 21805 - RNA, 90 nt, synthetic construct
  misc_feature 1..90: note = engineered ribonucleic acid scaffold (ERS) sequence
  source 1..90: mol_type = other RNA
actggcgcttctatctgtattactctgagcgccatcaccagcgactatgtcgtatgggctaaagctccctcttcggagggagcatcagag

SEQ ID NO: 21806 - RNA, 89 nt, synthetic construct
  misc_feature 1..89: note = engineered ribonucleic acid scaffold (ERS) sequence
  source 1..89: mol_type = other RNA
actggcgcttctatctggttactctgagcgccatcaccagcgactatgtcgtatgggctaaagctccctcttcggagggagcatcagag

SEQ ID NO: 21807 - RNA, 89 nt, synthetic construct
  misc_feature 1..89: note = engineered ribonucleic acid scaffold (ERS) sequence
  source 1..89: mol_type = other RNA
actggcgcttctatctgtttactctgagcgccatcaccagcgactatgtcgtatgggctaaagctccctcttcggagggagcatcagag

SEQ ID NO: 21808 - RNA, 90 nt, synthetic construct
  misc_feature 1..90: note = engineered ribonucleic acid scaffold (ERS) sequence
  source 1..90: mol_type = other RNA
actggcgcttctatctgatttactctgagcgccatcaccagcgactatgtcgtatgggctaaagctccctcttcggagggagcatcagag

SEQ ID NO: 21809 - RNA, 89 nt, synthetic construct
  misc_feature 1..89: note = engineered ribonucleic acid scaffold (ERS) sequence
  source 1..89: mol_type = other RNA
actggcgcttctatctgattgctctgagcgccatcaccagcgactatgtcgtatgggctaaagctccctcttcggagggagcatcagag

SEQ ID NO: 21810 - RNA, 88 nt, synthetic construct
  misc_feature 1..88: note = engineered ribonucleic acid scaffold (ERS) sequence
  source 1..88: mol_type = other RNA
actggcgcttctatatctgattactctgagcgccatcaccagcgactatgtcgtatgggtagctccctcttcggagggagcatcagag

SEQ ID NO: 21811 - RNA, 87 nt, synthetic construct
  misc_feature 1..87: note = engineered ribonucleic acid scaffold (ERS) sequence
  source 1..87: mol_type = other RNA
actggcgcttctaatctgattactctgagcgccatcaccagcgactatgtcgtatgggtagctccctcttcggagggagcatcagag

SEQ ID NO: 21812 - RNA, 85 nt, synthetic construct
  misc_feature 1..85: note = engineered ribonucleic acid scaffold (ERS) sequence
  source 1..85: mol_type = other RNA
actggcgcttctactgattactctgagcgccatcaccagcgactatgtcgtatgggtagctccctcttcggagggagcatcagag

SEQ ID NO: 21813 - RNA, 86 nt, synthetic construct
  misc_feature 1..86: note = engineered ribonucleic acid scaffold (ERS) sequence
  source 1..86: mol_type = other RNA
actggcgcttctaactgattactctgagcgccatcaccagcgactatgtcgtatgggtagctccctcttcggagggagcatcagag

SEQ ID NO: 21814 - RNA, 86 nt, synthetic construct
  misc_feature 1..86: note = engineered ribonucleic acid scaffold (ERS) sequence
  source 1..86: mol_type = other RNA
actggcgcttctacctgattactctgagcgccatcaccagcgactatgtcgtatgggtagctccctcttcggagggagcatcagag

SEQ ID NO: 21815 - RNA, 86 nt, synthetic construct
  misc_feature 1..86: note = engineered ribonucleic acid scaffold (ERS) sequence
  source 1..86: mol_type = other RNA
actggcgcttctagctgattactctgagcgccatcaccagcgactatgtcgtatgggtagctccctcttcggagggagcatcagag

SEQ ID NO: 21816 - RNA, 88 nt, synthetic construct
  misc_feature 1..88: note = engineered ribonucleic acid scaffold (ERS) sequence
  source 1..88: mol_type = other RNA
actggcgcttctattactgattactctgagcgccatcaccagcgactatgtcgtatgggtagctccctcttcggagggagcatcagag

SEQ ID NO: 21817 - RNA, 86 nt, synthetic construct
  misc_feature 1..86: note = engineered ribonucleic acid scaffold (ERS) sequence
  source 1..86: mol_type = other RNA
actggcgcttctatatgattactctgagcgccatcaccagcgactatgtcgtatgggtagctccctcttcggagggagcatcagag

SEQ ID NO: 21818 - RNA, 86 nt, synthetic construct
  misc_feature 1..86: note = engineered ribonucleic acid scaffold (ERS) sequence
  source 1..86: mol_type = other RNA
actggcgcttctatgtgattactctgagcgccatcaccagcgactatgtcgtatgggtagctccctcttcggagggagcatcagag

SEQ ID NO: 21819 - RNA, 86 nt, synthetic construct
  misc_feature 1..86: note = engineered ribonucleic acid scaffold (ERS) sequence
  source 1..86: mol_type = other RNA
actggcgcttctatttgattactctgagcgccatcaccagcgactatgtcgtatgggtagctccctcttcggagggagcatcagag

SEQ ID NO: 21820 - RNA, 87 nt, synthetic construct
  misc_feature 1..87: note = engineered ribonucleic acid scaffold (ERS) sequence
  source 1..87: mol_type = other RNA
actggcgcttctatcttgattactctgagcgccatcaccagcgactatgtcgtatgggtagctccctcttcggagggagcatcagag

SEQ ID NO: 21821 - RNA, 86 nt, synthetic construct
  misc_feature 1..86: note = engineered ribonucleic acid scaffold (ERS) sequence
  source 1..86: mol_type = other RNA
actggcgcttctatcagattactctgagcgccatcaccagcgactatgtcgtatgggtagctccctcttcggagggagcatcagag

SEQ ID NO: 21822 - RNA, 86 nt, synthetic construct
  misc_feature 1..86: note = engineered ribonucleic acid scaffold (ERS) sequence
  source 1..86: mol_type = other RNA
actggcgcttctatcggattactctgagcgccatcaccagcgactatgtcgtatgggtagctccctcttcggagggagcatcagag

SEQ ID NO: 21823 - RNA, 87 nt, synthetic construct
  misc_feature 1..87: note = engineered ribonucleic acid scaffold (ERS) sequence
  source 1..87: mol_type = other RNA
actggcgcttctatctgaattactctgagcgccatcaccagcgactatgtcgtatgggtagctccctcttcggagggagcatcagag

SEQ ID NO: 21824 - RNA, 87 nt, synthetic construct
  misc_feature 1..87: note = engineered ribonucleic acid scaffold (ERS) sequence
  source 1..87: mol_type = other RNA
actggcgcttctatctgtattactctgagcgccatcaccagcgactatgtcgtatgggtagctccctcttcggagggagcatcagag

SEQ ID NO: 21825 - RNA, 86 nt, synthetic construct
  misc_feature 1..86: note = engineered ribonucleic acid scaffold (ERS) sequence
  source 1..86: mol_type = other RNA
actggcgcttctatctggttactctgagcgccatcaccagcgactatgtcgtatgggtagctccctcttcggagggagcatcagag

SEQ ID NO: 21826 - RNA, 86 nt, synthetic construct
  misc_feature 1..86: note = engineered ribonucleic acid scaffold (ERS) sequence
  source 1..86: mol_type = other RNA
actggcgcttctatctgtttactctgagcgccatcaccagcgactatgtcgtatgggtagctccctcttcggagggagcatcagag

SEQ ID NO: 21827 - RNA, 87 nt, synthetic construct
  misc_feature 1..87: note = engineered ribonucleic acid scaffold (ERS) sequence
  source 1..87: mol_type = other RNA
actggcgcttctatctgatttactctgagcgccatcaccagcgactatgtcgtatgggtagctccctcttcggagggagcatcagag

SEQ ID NO: 21828 - RNA, 86 nt, synthetic construct
  misc_feature 1..86: note = engineered ribonucleic acid scaffold (ERS) sequence
  source 1..86: mol_type = other RNA
actggcgcttctatctgattgctctgagcgccatcaccagcgactatgtcgtatgggtagctccctcttcggagggagcatcagag

SEQ ID NO: 21829 - RNA, 90 nt, synthetic construct
  misc_feature 1..90: note = engineered ribonucleic acid scaffold (ERS) sequence
  source 1..90: mol_type = other RNA
actggcgcttctatatctgattactctgagcgccatcaccagcgactatgtcgtatgggtgaagctccctcttcggagggagcatcagag

SEQ ID NO: 21830 - RNA, 89 nt, synthetic construct
  misc_feature 1..89: note = engineered ribonucleic acid scaffold (ERS) sequence
  source 1..89: mol_type = other RNA
actggcgcttctaatctgattactctgagcgccatcaccagcgactatgtcgtatgggtgaagctccctcttcggagggagcatcagag

SEQ ID NO: 21831 - RNA, 87 nt, synthetic construct
  misc_feature 1..87: note = engineered ribonucleic acid scaffold (ERS) sequence
  source 1..87: mol_type = other RNA
actggcgcttctactgattactctgagcgccatcaccagcgactatgtcgtatgggtgaagctccctcttcggagggagcatcagag

SEQ ID NO: 21832 - RNA, 88 nt, synthetic construct
  misc_feature 1..88: note = engineered ribonucleic acid scaffold (ERS) sequence
  source 1..88: mol_type = other RNA
actggcgcttctaactgattactctgagcgccatcaccagcgactatgtcgtatgggtgaagctccctcttcggagggagcatcagag

SEQ ID NO: 21833 - RNA, 88 nt, synthetic construct
  misc_feature 1..88: note = engineered ribonucleic acid scaffold (ERS) sequence
  source 1..88: mol_type = other RNA
actggcgcttctacctgattactctgagcgccatcaccagcgactatgtcgtatgggtgaagctccctcttcggagggagcatcagag

SEQ ID NO: 21834 - RNA, 88 nt, synthetic construct
  misc_feature 1..88: note = engineered ribonucleic acid scaffold (ERS) sequence
  source 1..88: mol_type = other RNA
actggcgcttctagctgattactctgagcgccatcaccagcgactatgtcgtatgggtgaagctccctcttcggagggagcatcagag

SEQ ID NO: 21835 - RNA, 90 nt, synthetic construct
  misc_feature 1..90: note = engineered ribonucleic acid scaffold (ERS) sequence
  source 1..90: mol_type = other RNA
actggcgcttctattactgattactctgagcgccatcaccagcgactatgtcgtatgggtgaagctccctcttcggagggagcatcagag

SEQ ID NO: 21836 - RNA, 88 nt, synthetic construct
  misc_feature 1..88: note = engineered ribonucleic acid scaffold (ERS) sequence
  source 1..88: mol_type = other RNA
actggcgcttctatatgattactctgagcgccatcaccagcgactatgtcgtatgggtgaagctccctcttcggagggagcatcagag

SEQ ID NO: 21837 - RNA, 88 nt, synthetic construct
  misc_feature 1..88: note = engineered ribonucleic acid scaffold (ERS) sequence
  source 1..88: mol_type = other RNA
actggcgcttctatgtgattactctgagcgccatcaccagcgactatgtcgtatgggtgaagctccctcttcggagggagcatcagag

SEQ ID NO: 21838 - RNA, 88 nt, synthetic construct
  misc_feature 1..88: note = engineered ribonucleic acid scaffold (ERS) sequence
  source 1..88: mol_type = other RNA
actggcgcttctatttgattactctgagcgccatcaccagcgactatgtcgtatgggtgaagctccctcttcggagggagcatcagag

SEQ ID NO: 21839 - RNA, 89 nt, synthetic construct
  misc_feature 1..89: note = engineered ribonucleic acid scaffold (ERS) sequence
  source 1..89: mol_type = other RNA
actggcgcttctatcttgattactctgagcgccatcaccagcgactatgtcgtatgggtgaagctccctcttcggagggagcatcagag

SEQ ID NO: 21840 - RNA, 88 nt, synthetic construct
  misc_feature 1..88: note = engineered ribonucleic acid scaffold (ERS) sequence
  source 1..88: mol_type = other RNA
actggcgcttctatcagattactctgagcgccatcaccagcgactatgtcgtatgggtgaagctccctcttcggagggagcatcagag

SEQ ID NO: 21841 - RNA, 88 nt, synthetic construct
  misc_feature 1..88: note = engineered ribonucleic acid scaffold (ERS) sequence
  source 1..88: mol_type = other RNA
actggcgcttctatcggattactctgagcgccatcaccagcgactatgtcgtatgggtgaagctccctcttcggagggagcatcagag

SEQ ID NO: 21842 - RNA, 89 nt, synthetic construct
  misc_feature 1..89: note = engineered ribonucleic acid scaffold (ERS) sequence
  source 1..89: mol_type = other RNA
actggcgcttctatctgaattactctgagcgccatcaccagcgactatgtcgtatgggtgaagctccctcttcggagggagcatcagag

SEQ ID NO: 21843 - RNA, 89 nt, synthetic construct
  misc_feature 1..89: note = engineered ribonucleic acid scaffold (ERS) sequence
  source 1..89: mol_type = other RNA
actggcgcttctatctgtattactctgagcgccatcaccagcgactatgtcgtatgggtgaagctccctcttcggagggagcatcagag

SEQ ID NO: 21844 - RNA, 88 nt, synthetic construct
  misc_feature 1..88: note = engineered ribonucleic acid scaffold (ERS) sequence
  source 1..88: mol_type = other RNA
actggcgcttctatctggttactctgagcgccatcaccagcgactatgtcgtatgggtgaagctccctcttcggagggagcatcagag

SEQ ID NO: 21845 - RNA, 88 nt, synthetic construct
  misc_feature 1..88: note = engineered ribonucleic acid scaffold (ERS) sequence
  source 1..88: mol_type = other RNA
actggcgcttctatctgtttactctgagcgccatcaccagcgactatgtcgtatgggtgaagctccctcttcggagggagcatcagag

SEQ ID NO: 21846 - RNA, 89 nt, synthetic construct
  misc_feature 1..89: note = engineered ribonucleic acid scaffold (ERS) sequence
  source 1..89: mol_type = other RNA
actggcgcttctatctgatttactctgagcgccatcaccagcgactatgtcgtatgggtgaagctccctcttcggagggagcatcagag

SEQ ID NO: 21847 - RNA, 88 nt, synthetic construct
  misc_feature 1..88: note = engineered ribonucleic acid scaffold (ERS) sequence
  source 1..88: mol_type = other RNA
actggcgcttctatctgattgctctgagcgccatcaccagcgactatgtcgtatgggtgaagctccctcttcggagggagcatcagag

SEQ ID NO: 21848 - RNA, 90 nt, synthetic construct
  misc_feature 1..90: note = engineered ribonucleic acid scaffold (ERS) sequence
  source 1..90: mol_type = other RNA
actggcgcttctatatctgattactctgagcgccatcaccagcgactatgtcgtatgggtagagctccctcttcggagggagcatcagag

SEQ ID NO: 21849 - RNA, 89 nt, synthetic construct
  misc_feature 1..89: note = engineered ribonucleic acid scaffold (ERS) sequence
  source 1..89: mol_type = other RNA
actggcgcttctaatctgattactctgagcgccatcaccagcgactatgtcgtatgggtagagctccctcttcggagggagcatcagag

SEQ ID NO: 21850 - RNA, 87 nt, synthetic construct
  misc_feature 1..87: note = engineered ribonucleic acid scaffold (ERS) sequence
  source 1..87: mol_type = other RNA
actggcgcttctactgattactctgagcgccatcaccagcgactatgtcgtatgggtagagctccctcttcggagggagcatcagag

SEQ ID NO: 21851 - RNA, 88 nt, synthetic construct
  misc_feature 1..88: note = engineered ribonucleic acid scaffold (ERS) sequence
  source 1..88: mol_type = other RNA
actggcgcttctaactgattactctgagcgccatcaccagcgactatgtcgtatgggtagagctccctcttcggagggagcatcagag

SEQ ID NO: 21852 - RNA, 88 nt, synthetic construct
  misc_feature 1..88: note = engineered ribonucleic acid scaffold (ERS) sequence
  source 1..88: mol_type = other RNA
actggcgcttctacctgattactctgagcgccatcaccagcgactatgtcgtatgggtagagctccctcttcggagggagcatcagag

SEQ ID NO: 21853 - RNA, 88 nt, synthetic construct
  misc_feature 1..88: note = engineered ribonucleic acid scaffold (ERS) sequence
  source 1..88: mol_type = other RNA
actggcgcttctagctgattactctgagcgccatcaccagcgactatgtcgtatgggtagagctccctcttcggagggagcatcagag

SEQ ID NO: 21854 - RNA, 90 nt, synthetic construct
  misc_feature 1..90: note = engineered ribonucleic acid scaffold (ERS) sequence
  source 1..90: mol_type = other RNA
actggcgcttctattactgattactctgagcgccatcaccagcgactatgtcgtatgggtagagctccctcttcggagggagcatcagag

SEQ ID NO: 21855 - RNA, 88 nt, synthetic construct
  misc_feature 1..88: note = engineered ribonucleic acid scaffold (ERS) sequence
  source 1..88: mol_type = other RNA
actggcgcttctatatgattactctgagcgccatcaccagcgactatgtcgtatgggtagagctccctcttcggagggagcatcagag

SEQ ID NO: 21856 - RNA, 88 nt, synthetic construct
  misc_feature 1..88: note = engineered ribonucleic acid scaffold (ERS) sequence
  source 1..88: mol_type = other RNA
actggcgcttctatgtgattactctgagcgccatcaccagcgactatgtcgtatgggtagagctccctcttcggagggagcatcagag

SEQ ID NO: 21857 - RNA, 88 nt, synthetic construct
  misc_feature 1..88: note = engineered ribonucleic acid scaffold (ERS) sequence
  source 1..88: mol_type = other RNA
actggcgcttctatttgattactctgagcgccatcaccagcgactatgtcgtatgggtagagctccctcttcggagggagcatcagag

SEQ ID NO: 21858 - RNA, 89 nt, synthetic construct
  misc_feature 1..89: note = engineered ribonucleic acid scaffold (ERS) sequence
  source 1..89: mol_type = other RNA
actggcgcttctatcttgattactctgagcgccatcaccagcgactatgtcgtatgggtagagctccctcttcggagggagcatcagag

SEQ ID NO: 21859 - RNA, 88 nt, synthetic construct
  misc_feature 1..88: note = engineered ribonucleic acid scaffold (ERS) sequence
  source 1..88: mol_type = other RNA
actggcgcttctatcagattactctgagcgccatcaccagcgactatgtcgtatgggtagagctccctcttcggagggagcatcagag

SEQ ID NO: 21860 - RNA, 88 nt, synthetic construct
  misc_feature 1..88: note = engineered ribonucleic acid scaffold (ERS) sequence
  source 1..88: mol_type = other RNA
actggcgcttctatcggattactctgagcgccatcaccagcgactatgtcgtatgggtagagctccctcttcggagggagcatcagag

SEQ ID NO: 21861 - RNA, 89 nt, synthetic construct
  misc_feature 1..89: note = engineered ribonucleic acid scaffold (ERS) sequence
  source 1..89: mol_type = other RNA
actggcgcttctatctgaattactctgagcgccatcaccagcgactatgtcgtatgggtagagctccctcttcggagggagcatcagag

SEQ ID NO: 21862 - RNA, 89 nt, synthetic construct
  misc_feature 1..89: note = engineered ribonucleic acid scaffold (ERS) sequence
  source 1..89: mol_type = other RNA
actggcgcttctatctgtattactctgagcgccatcaccagcgactatgtcgtatgggtagagctccctcttcggagggagcatcagag

SEQ ID NO: 21863 - RNA, 88 nt, synthetic construct
  misc_feature 1..88: note = engineered ribonucleic acid scaffold (ERS) sequence
  source 1..88: mol_type = other RNA
actggcgcttctatctggttactctgagcgccatcaccagcgactatgtcgtatgggtagagctccctcttcggagggagcatcagag

SEQ ID NO: 21864 - RNA, 88 nt, synthetic construct
  misc_feature 1..88: note = engineered ribonucleic acid scaffold (ERS) sequence
  source 1..88: mol_type = other RNA
actggcgcttctatctgtttactctgagcgccatcaccagcgactatgtcgtatgggtagagctccctcttcggagggagcatcagag

SEQ ID NO: 21865 - RNA, 89 nt, synthetic construct
  misc_feature 1..89: note = engineered ribonucleic acid scaffold (ERS) sequence
  source 1..89: mol_type = other RNA
actggcgcttctatctgatttactctgagcgccatcaccagcgactatgtcgtatgggtagagctccctcttcggagggagcatcagag

SEQ ID NO: 21866 - RNA, 88 nt, synthetic construct
  misc_feature 1..88: note = engineered ribonucleic acid scaffold (ERS) sequence
  source 1..88: mol_type = other RNA
actggcgcttctatctgattgctctgagcgccatcaccagcgactatgtcgtatgggtagagctccctcttcggagggagcatcagag

SEQ ID NO: 21867 - RNA, 91 nt, synthetic construct
  misc_feature 1..91: note = engineered ribonucleic acid scaffold (ERS) sequence
  source 1..91: mol_type = other RNA
actggcgcttctatatctgattactctcagcgccatcaccagcgactatgtcgtagtgggtaaagctccctcttcggagggagcatcagac

SEQ ID NO: 21868 - RNA, 90 nt, synthetic construct
  misc_feature 1..90: note = engineered ribonucleic acid scaffold (ERS) sequence
  source 1..90: mol_type = other RNA
actggcgcttctaatctgattactctcagcgccatcaccagcgactatgtcgtagtgggtaaagctccctcttcggagggagcatcagac

SEQ ID NO: 21869 - RNA, 88 nt, synthetic construct
  misc_feature 1..88: note = engineered ribonucleic acid scaffold (ERS) sequence
  source 1..88: mol_type = other RNA
actggcgcttctactgattactctcagcgccatcaccagcgactatgtcgtagtgggtaaagctccctcttcggagggagcatcagac

SEQ ID NO: 21870 - RNA, 89 nt, synthetic construct
  misc_feature 1..89: note = engineered ribonucleic acid scaffold (ERS) sequence
  source 1..89: mol_type = other RNA
actggcgcttctaactgattactctcagcgccatcaccagcgactatgtcgtagtgggtaaagctccctcttcggagggagcatcagac

SEQ ID NO: 21871 - RNA, 89 nt, synthetic construct
  misc_feature 1..89: note = engineered ribonucleic acid scaffold (ERS) sequence
  source 1..89: mol_type = other RNA
actggcgcttctacctgattactctcagcgccatcaccagcgactatgtcgtagtgggtaaagctccctcttcggagggagcatcagac

SEQ ID NO: 21872 - RNA, 89 nt, synthetic construct
  misc_feature 1..89: note = engineered ribonucleic acid scaffold (ERS) sequence
  source 1..89: mol_type = other RNA
actggcgcttctagctgattactctcagcgccatcaccagcgactatgtcgtagtgggtaaagctccctcttcggagggagcatcagac

SEQ ID NO: 21873 - RNA, 91 nt, synthetic construct
  misc_feature 1..91: note = engineered ribonucleic acid scaffold (ERS) sequence
  source 1..91: mol_type = other RNA
actggcgcttctattactgattactctcagcgccatcaccagcgactatgtcgtagtgggtaaagctccctcttcggagggagcatcagac

SEQ ID NO: 21874 - RNA, 89 nt, synthetic construct
  misc_feature 1..89: note = engineered ribonucleic acid scaffold (ERS) sequence
  source 1..89: mol_type = other RNA
actggcgcttctatatgattactctcagcgccatcaccagcgactatgtcgtagtgggtaaagctccctcttcggagggagcatcagac

SEQ ID NO: 21875 - RNA, 89 nt, synthetic construct
  misc_feature 1..89: note = engineered ribonucleic acid scaffold (ERS) sequence
  source 1..89: mol_type = other RNA
actggcgcttctatgtgattactctcagcgccatcaccagcgactatgtcgtagtgggtaaagctccctcttcggagggagcatcagac

SEQ ID NO: 21876 - RNA, 89 nt, synthetic construct
  misc_feature 1..89: note = engineered ribonucleic acid scaffold (ERS) sequence
  source 1..89: mol_type = other RNA
actggcgcttctatttgattactctcagcgccatcaccagcgactatgtcgtagtgggtaaagctccctcttcggagggagcatcagac

SEQ ID NO: 21877 - RNA, 90 nt, synthetic construct
  misc_feature 1..90: note = engineered ribonucleic acid scaffold (ERS) sequence
  source 1..90: mol_type = other RNA
actggcgcttctatcttgattactctcagcgccatcaccagcgactatgtcgtagtgggtaaagctccctcttcggagggagcatcagac

SEQ ID NO: 21878 - RNA, 89 nt, synthetic construct
  misc_feature 1..89: note = engineered ribonucleic acid scaffold (ERS) sequence
  source 1..89: mol_type = other RNA
actggcgcttctatcagattactctcagcgccatcaccagcgactatgtcgtagtgggtaaagctccctcttcggagggagcatcagac

SEQ ID NO: 21879 - RNA, 89 nt, synthetic construct
  misc_feature 1..89: note = engineered ribonucleic acid scaffold (ERS) sequence
  source 1..89: mol_type = other RNA
actggcgcttctatcggattactctcagcgccatcaccagcgactatgtcgtagtgggtaaagctccctcttcggagggagcatcagac

SEQ ID NO: 21880 - RNA, 90 nt, synthetic construct
  misc_feature 1..90: note = engineered ribonucleic acid scaffold (ERS) sequence
  source 1..90: mol_type = other RNA
actggcgcttctatctgaattactctcagcgccatcaccagcgactatgtcgtagtgggtaaagctccctcttcggagggagcatcagac

SEQ ID NO: 21881 - RNA, 90 nt, synthetic construct
  misc_feature 1..90: note = engineered ribonucleic acid scaffold (ERS) sequence
  source 1..90: mol_type = other RNA
actggcgcttctatctgtattactctcagcgccatcaccagcgactatgtcgtagtgggtaaagctccctcttcggagggagcatcagac

SEQ ID NO: 21882 - RNA, 89 nt, synthetic construct
  misc_feature 1..89: note = engineered ribonucleic acid scaffold (ERS) sequence
  source 1..89: mol_type = other RNA
actggcgcttctatctggttactctcagcgccatcaccagcgactatgtcgtagtgggtaaagctccctcttcggagggagcatcagac

SEQ ID NO: 21883 - RNA, 89 nt, synthetic construct
  misc_feature 1..89: note = engineered ribonucleic acid scaffold (ERS) sequence
  source 1..89: mol_type = other RNA
actggcgcttctatctgtttactctcagcgccatcaccagcgactatgtcgtagtgggtaaagctccctcttcggagggagcatcagac

SEQ ID NO: 21884 - RNA, 90 nt, synthetic construct
  misc_feature 1..90: note = engineered ribonucleic acid scaffold (ERS) sequence
  source 1..90: mol_type = other RNA
actggcgcttctatctgatttactctcagcgccatcaccagcgactatgtcgtagtgggtaaagctccctcttcggagggagcatcagac

SEQ ID NO: 21885 - RNA, 89 nt, synthetic construct
  misc_feature 1..89: note = engineered ribonucleic acid scaffold (ERS) sequence
  source 1..89: mol_type = other RNA
actggcgcttctatctgattgctctcagcgccatcaccagcgactatgtcgtagtgggtaaagctccctcttcggagggagcatcagac

SEQ ID NO: 21886 - RNA, 91 nt, synthetic construct
  misc_feature 1..91: note = engineered ribonucleic acid scaffold (ERS) sequence
  source 1..91: mol_type = other RNA
actggcgcttctatatctgattactttgagcgccatcaccagcgactatgtcgtagtgggtaaagctccctcttcggagggagcatcagag

SEQ ID NO: 21887 - RNA, 90 nt, synthetic construct
  misc_feature 1..90: note = engineered ribonucleic acid scaffold (ERS) sequence
  source 1..90: mol_type = other RNA
actggcgcttctaatctgattactttgagcgccatcaccagcgactatgtcgtagtgggtaaagctccctcttcggagggagcatcagag

SEQ ID NO: 21888 - RNA, 88 nt, synthetic construct
  misc_feature 1..88: note = engineered ribonucleic acid scaffold (ERS) sequence
  source 1..88: mol_type = other RNA
actggcgcttctactgattactttgagcgccatcaccagcgactatgtcgtagtgggtaaagctccctcttcggagggagcatcagag

SEQ ID NO: 21889 - RNA, 89 nt, synthetic construct
  misc_feature 1..89: note = engineered ribonucleic acid scaffold (ERS) sequence
  source 1..89: mol_type = other RNA
actggcgcttctaactgattactttgagcgccatcaccagcgactatgtcgtagtgggtaaagctccctcttcggagggagcatcagag

SEQ ID NO: 21890 - RNA, 89 nt, synthetic construct
  misc_feature 1..89: note = engineered ribonucleic acid scaffold (ERS) sequence
  source 1..89: mol_type = other RNA
actggcgcttctacctgattactttgagcgccatcaccagcgactatgtcgtagtgggtaaagctccctcttcggagggagcatcagag

SEQ ID NO: 21891 - RNA, 89 nt, synthetic construct
  misc_feature 1..89: note = engineered ribonucleic acid scaffold (ERS) sequence
  source 1..89: mol_type = other RNA
actggcgcttctagctgattactttgagcgccatcaccagcgactatgtcgtagtgggtaaagctccctcttcggagggagcatcagag

SEQ ID NO: 21892 - RNA, 91 nt, synthetic construct
  misc_feature 1..91: note = engineered ribonucleic acid scaffold (ERS) sequence
  source 1..91: mol_type = other RNA
actggcgcttctattactgattactttgagcgccatcaccagcgactatgtcgtagtgggtaaagctccctcttcggagggagcatcagag

SEQ ID NO: 21893 - RNA, 89 nt, synthetic construct
  misc_feature 1..89: note = engineered ribonucleic acid scaffold (ERS) sequence
  source 1..89: mol_type = other RNA
actggcgcttctatatgattactttgagcgccatcaccagcgactatgtcgtagtgggtaaagctccctcttcggagggagcatcagag

SEQ ID NO: 21894 - RNA, 89 nt, synthetic construct
  misc_feature 1..89: note = engineered ribonucleic acid scaffold (ERS) sequence
  source 1..89: mol_type = other RNA
actggcgcttctatgtgattactttgagcgccatcaccagcgactatgtcgtagtgggtaaagctccctcttcggagggagcatcagag

SEQ ID NO: 21895 - RNA, 89 nt, synthetic construct
  misc_feature 1..89: note = engineered ribonucleic acid scaffold (ERS) sequence
  source 1..89: mol_type = other RNA
actggcgcttctatttgattactttgagcgccatcaccagcgactatgtcgtagtgggtaaagctccctcttcggagggagcatcagag

SEQ ID NO: 21896 - RNA, 90 nt, synthetic construct
  misc_feature 1..90: note = engineered ribonucleic acid scaffold (ERS) sequence
  source 1..90: mol_type = other RNA
actggcgcttctatcttgattactttgagcgccatcaccagcgactatgtcgtagtgggtaaagctccctcttcggagggagcatcagag

SEQ ID NO: 21897 - RNA, 89 nt, synthetic construct
  misc_feature 1..89: note = engineered ribonucleic acid scaffold (ERS) sequence
  source 1..89: mol_type = other RNA
actggcgcttctatcagattactttgagcgccatcaccagcgactatgtcgtagtgggtaaagctccctcttcggagggagcatcagag

SEQ ID NO: 21898 - RNA, 89 nt, synthetic construct
  misc_feature 1..89: note = engineered ribonucleic acid scaffold (ERS) sequence
  source 1..89: mol_type = other RNA
actggcgcttctatcggattactttgagcgccatcaccagcgactatgtcgtagtgggtaaagctccctcttcggagggagcatcagag

SEQ ID NO: 21899 - RNA, 90 nt, synthetic construct
  misc_feature 1..90: note = engineered ribonucleic acid scaffold (ERS) sequence
  source 1..90: mol_type = other RNA
actggcgcttctatctgaattactttgagcgccatcaccagcgactatgtcgtagtgggtaaagctccctcttcggagggagcatcagag

SEQ ID NO: 21900 - RNA, 90 nt, synthetic construct
  misc_feature 1..90: note = engineered ribonucleic acid scaffold (ERS) sequence
  source 1..90: mol_type = other RNA
actggcgcttctatctgtattactttgagcgccatcaccagcgactatgtcgtagtgggtaaagctccctcttcggagggagcatcagag

SEQ ID NO: 21901 - RNA, 89 nt, synthetic construct
  misc_feature 1..89: note = engineered ribonucleic acid scaffold (ERS) sequence
  source 1..89: mol_type = other RNA
actggcgcttctatctggttactttgagcgccatcaccagcgactatgtcgtagtgggtaaagctccctcttcggagggagcatcagag

SEQ ID NO: 21902 - RNA, 89 nt, synthetic construct
  misc_feature 1..89: note = engineered ribonucleic acid scaffold (ERS) sequence
  source 1..89: mol_type = other RNA
actggcgcttctatctgtttactttgagcgccatcaccagcgactatgtcgtagtgggtaaagctccctcttcggagggagcatcagag

SEQ ID NO: 21903 - RNA, 90 nt, synthetic construct
  misc_feature 1..90: note = engineered ribonucleic acid scaffold (ERS) sequence
  source 1..90: mol_type = other RNA
actggcgcttctatctgatttactttgagcgccatcaccagcgactatgtcgtagtgggtaaagctccctcttcggagggagcatcagag

SEQ ID NO: 21904 - RNA, 89 nt, synthetic construct
  misc_feature 1..89: note = engineered ribonucleic acid scaffold (ERS) sequence
  source 1..89: mol_type = other RNA
actggcgcttctatctgattgctttgagcgccatcaccagcgactatgtcgtagtgggtaaagctccctcttcggagggagcatcagag

SEQ ID NO: 21905 - RNA, 91 nt, synthetic construct
  misc_feature 1..91: note = engineered ribonucleic acid scaffold (ERS) sequence
  source 1..91: mol_type = other RNA
actggcgcttctatatctgattactttgagcgccatcaccagcgactatgtcgtagtgggtaaagctccctcttcggagggagcatcaaag

SEQ ID NO: 21906 - RNA, 90 nt, synthetic construct
  misc_feature 1..90: note = engineered ribonucleic acid scaffold (ERS) sequence
  source 1..90: mol_type = other RNA
actggcgcttctaatctgattactttgagcgccatcaccagcgactatgtcgtagtgggtaaagctccctcttcggagggagcatcaaag

SEQ ID NO: 21907 - RNA, 88 nt, synthetic construct
  misc_feature 1..88: note = engineered ribonucleic acid scaffold (ERS) sequence
  source 1..88: mol_type = other RNA
actggcgcttctactgattactttgagcgccatcaccagcgactatgtcgtagtgggtaaagctccctcttcggagggagcatcaaag

SEQ ID NO: 21908 - RNA, 89 nt, synthetic construct
  misc_feature 1..89: note = engineered ribonucleic acid scaffold (ERS) sequence
  source 1..89: mol_type = other RNA
actggcgcttctaactgattactttgagcgccatcaccagcgactatgtcgtagtgggtaaagctccctcttcggagggagcatcaaag

SEQ ID NO: 21909 - RNA, 89 nt, synthetic construct
  misc_feature 1..89: note = engineered ribonucleic acid scaffold (ERS) sequence
  source 1..89: mol_type = other RNA
actggcgcttctacctgattactttgagcgccatcaccagcgactatgtcgtagtgggtaaagctccctcttcggagggagcatcaaag

SEQ ID NO: 21910 - RNA, 89 nt, synthetic construct
  misc_feature 1..89: note = engineered ribonucleic acid scaffold (ERS) sequence
  source 1..89: mol_type = other RNA
actggcgcttctagctgattactttgagcgccatcaccagcgactatgtcgtagtgggtaaagctccctcttcggagggagcatcaaag

SEQ ID NO: 21911 - RNA, 91 nt, synthetic construct
  misc_feature 1..91: note = engineered ribonucleic acid scaffold (ERS) sequence
  source 1..91: mol_type = other RNA
actggcgcttctattactgattactttgagcgccatcaccagcgactatgtcgtagtgggtaaagctccctcttcggagggagcatcaaag

SEQ ID NO: 21912 - RNA, 89 nt, synthetic construct
  misc_feature 1..89: note = engineered ribonucleic acid scaffold (ERS) sequence
  source 1..89: mol_type = other RNA
actggcgcttctatatgattactttgagcgccatcaccagcgactatgtcgtagtgggtaaagctccctcttcggagggagcatcaaag

SEQ ID NO: 21913 - RNA, 89 nt, synthetic construct
  misc_feature 1..89: note = engineered ribonucleic acid scaffold (ERS) sequence
  source 1..89: mol_type = other RNA
actggcgcttctatgtgattactttgagcgccatcaccagcgactatgtcgtagtgggtaaagctccctcttcggagggagcatcaaag

SEQ ID NO: 21914 - RNA, 89 nt, synthetic construct
  misc_feature 1..89: note = engineered ribonucleic acid scaffold (ERS) sequence
  source 1..89: mol_type = other RNA
actggcgcttctatttgattactttgagcgccatcaccagcgactatgtcgtagtgggtaaagctccctcttcggagggagcatcaaag

SEQ ID NO: 21915 - RNA, 90 nt, synthetic construct
  misc_feature 1..90: note = engineered ribonucleic acid scaffold (ERS) sequence
  source 1..90: mol_type = other RNA
actggcgcttctatcttgattactttgagcgccatcaccagcgactatgtcgtagtgggtaaagctccctcttcggagggagcatcaaag

SEQ ID NO: 21916 - RNA, 89 nt, synthetic construct
  misc_feature 1..89: note = engineered ribonucleic acid scaffold (ERS) sequence
  source 1..89: mol_type = other RNA
actggcgcttctatcagattactttgagcgccatcaccagcgactatgtcgtagtgggtaaagctccctcttcggagggagcatcaaag

SEQ ID NO: 21917 - RNA, 89 nt, synthetic construct
  misc_feature 1..89: note = engineered ribonucleic acid scaffold (ERS) sequence
  source 1..89: mol_type = other RNA
actggcgcttctatcggattactttgagcgccatcaccagcgactatgtcgtagtgggtaaagctccctcttcggagggagcatcaaag

SEQ ID NO: 21918 - RNA, 90 nt, synthetic construct
  misc_feature 1..90: note = engineered ribonucleic acid scaffold (ERS) sequence
  source 1..90: mol_type = other RNA
actggcgcttctatctgaattactttgagcgccatcaccagcgactatgtcgtagtgggtaaagctccctcttcggagggagcatcaaag

SEQ ID NO: 21919 - RNA, 90 nt, synthetic construct
  misc_feature 1..90: note = engineered ribonucleic acid scaffold (ERS) sequence
  source 1..90: mol_type = other RNA
actggcgcttctatctgtattactttgagcgccatcaccagcgactatgtcgtagtgggtaaagctccctcttcggagggagcatcaaag

SEQ ID NO: 21920 - RNA, 89 nt, synthetic construct
  misc_feature 1..89: note = engineered ribonucleic acid scaffold (ERS) sequence
  source 1..89: mol_type = other RNA
actggcgcttctatctggttactttgagcgccatcaccagcgactatgtcgtagtgggtaaagctccctcttcggagggagcatcaaag

SEQ ID NO: 21921 - RNA, 89 nt, synthetic construct
  misc_feature 1..89: note = engineered ribonucleic acid scaffold (ERS) sequence
  source 1..89: mol_type = other RNA
actggcgcttctatctgtttactttgagcgccatcaccagcgactatgtcgtagtgggtaaagctccctcttcggagggagcatcaaag

SEQ ID NO: 21922 - RNA, 90 nt, synthetic construct
  misc_feature 1..90: note = engineered ribonucleic acid scaffold (ERS) sequence
  source 1..90: mol_type = other RNA
actggcgcttctatctgatttactttgagcgccatcaccagcgactatgtcgtagtgggtaaagctccctcttcggagggagcatcaaag

SEQ ID NO: 21923 - RNA, 89 nt, synthetic construct
  misc_feature 1..89: note = engineered ribonucleic acid scaffold (ERS) sequence
  source 1..89: mol_type = other RNA
actggcgcttctatctgattgctttgagcgccatcaccagcgactatgtcgtagtgggtaaagctccctcttcggagggagcatcaaag

SEQ ID NO: 21924 - RNA, 91 nt, synthetic construct
  misc_feature 1..91: note = engineered ribonucleic acid scaffold (ERS) sequence
  source 1..91: mol_type = other RNA
actggcgcttctatatctgattagtctcagcgccatcaccagcgactatgtcgtagtgggtaaagctccctcttcggagggagcatgagac

SEQ ID NO: 21925 - RNA, 90 nt, synthetic construct
  misc_feature 1..90: note = engineered ribonucleic acid scaffold (ERS) sequence
  source 1..90: mol_type = other RNA
actggcgcttctaatctgattagtctcagcgccatcaccagcgactatgtcgtagtgggtaaagctccctcttcggagggagcatgagac

SEQ ID NO: 21926 - RNA, 88 nt, synthetic construct
  misc_feature 1..88: note = engineered ribonucleic acid scaffold (ERS) sequence
  source 1..88: mol_type = other RNA
actggcgcttctactgattagtctcagcgccatcaccagcgactatgtcgtagtgggtaaagctccctcttcggagggagcatgagac

SEQ ID NO: 21927 - RNA, 89 nt, synthetic construct
  misc_feature 1..89: note = engineered ribonucleic acid scaffold (ERS) sequence
  source 1..89: mol_type = other RNA
actggcgcttctaactgattagtctcagcgccatcaccagcgactatgtcgtagtgggtaaagctccctcttcggagggagcatgagac

SEQ ID NO: 21928 - RNA, 89 nt, synthetic construct
  misc_feature 1..89: note = engineered ribonucleic acid scaffold (ERS) sequence
  source 1..89: mol_type = other RNA
actggcgcttctacctgattagtctcagcgccatcaccagcgactatgtcgtagtgggtaaagctccctcttcggagggagcatgagac

SEQ ID NO: 21929 - RNA, 89 nt, synthetic construct
  misc_feature 1..89: note = engineered ribonucleic acid scaffold (ERS) sequence
  source 1..89: mol_type = other RNA
actggcgcttctagctgattagtctcagcgccatcaccagcgactatgtcgtagtgggtaaagctccctcttcggagggagcatgagac

SEQ ID NO: 21930 - RNA, 91 nt, synthetic construct
  misc_feature 1..91: note = engineered ribonucleic acid scaffold (ERS) sequence
  source 1..91: mol_type = other RNA
actggcgcttctattactgattagtctcagcgccatcaccagcgactatgtcgtagtgggtaaagctccctcttcggagggagcatgagac

SEQ ID NO: 21931 - RNA, 89 nt, synthetic construct
  misc_feature 1..89: note = engineered ribonucleic acid scaffold (ERS) sequence
  source 1..89: mol_type = other RNA
actggcgcttctatatgattagtctcagcgccatcaccagcgactatgtcgtagtgggtaaagctccctcttcggagggagcatgagac

SEQ ID NO: 21932 - RNA, 89 nt, synthetic construct
  misc_feature 1..89: note = engineered ribonucleic acid scaffold (ERS) sequence
  source 1..89: mol_type = other RNA
actggcgcttctatgtgattagtctcagcgccatcaccagcgactatgtcgtagtgggtaaagctccctcttcggagggagcatgagac

SEQ ID NO: 21933 - RNA, 89 nt, synthetic construct
  misc_feature 1..89: note = engineered ribonucleic acid scaffold (ERS) sequence
  source 1..89: mol_type = other RNA
actggcgcttctatttgattagtctcagcgccatcaccagcgactatgtcgtagtgggtaaagctccctcttcggagggagcatgagac

SEQ ID NO: 21934 - RNA, 90 nt, synthetic construct
  misc_feature 1..90: note = engineered ribonucleic acid scaffold (ERS) sequence
  source 1..90: mol_type = other RNA
actggcgcttctatcttgattagtctcagcgccatcaccagcgactatgtcgtagtgggtaaagctccctcttcggagggagcatgagac

SEQ ID NO: 21935 - RNA, 89 nt, synthetic construct
  misc_feature 1..89: note = engineered ribonucleic acid scaffold (ERS) sequence
  source 1..89: mol_type = other RNA
actggcgcttctatcagattagtctcagcgccatcaccagcgactatgtcgtagtgggtaaagctccctcttcggagggagcatgagac

SEQ ID NO: 21936 - RNA, 89 nt, synthetic construct
  misc_feature 1..89: note = engineered ribonucleic acid scaffold (ERS) sequence
  source 1..89: mol_type = other RNA
actggcgcttctatcggattagtctcagcgccatcaccagcgactatgtcgtagtgggtaaagctccctcttcggagggagcatgagac

SEQ ID NO: 21937 - RNA, 90 nt, synthetic construct
  misc_feature 1..90: note = engineered ribonucleic acid scaffold (ERS) sequence
  source 1..90: mol_type = other RNA
actggcgcttctatctgaattagtctcagcgccatcaccagcgactatgtcgtagtgggtaaagctccctcttcggagggagcatgagac

SEQ ID NO: 21938 - RNA, 90 nt, synthetic construct
  misc_feature 1..90: note = engineered ribonucleic acid scaffold (ERS) sequence
  source 1..90: mol_type = other RNA
actggcgcttctatctgtattagtctcagcgccatcaccagcgactatgtcgtagtgggtaaagctccctcttcggagggagcatgagac

SEQ ID NO: 21939 - RNA, 89 nt, synthetic construct
  misc_feature 1..89: note = engineered ribonucleic acid scaffold (ERS) sequence
  source 1..89: mol_type = other RNA
actggcgcttctatctggttagtctcagcgccatcaccagcgactatgtcgtagtgggtaaagctccctcttcggagggagcatgagac

SEQ ID NO: 21940 - RNA, 89 nt, synthetic construct
  misc_feature 1..89: note = engineered ribonucleic acid scaffold (ERS) sequence
  source 1..89: mol_type = other RNA
actggcgcttctatctgtttagtctcagcgccatcaccagcgactatgtcgtagtgggtaaagctccctcttcggagggagcatgagac

SEQ ID NO: 21941 - RNA, 90 nt, synthetic construct
  misc_feature 1..90: note = engineered ribonucleic acid scaffold (ERS) sequence
  source 1..90: mol_type = other RNA
actggcgcttctatctgatttagtctcagcgccatcaccagcgactatgtcgtagtgggtaaagctccctcttcggagggagcatgagac

SEQ ID NO: 21942 - RNA, 89 nt, synthetic construct
  misc_feature 1..89: note = engineered ribonucleic acid scaffold (ERS) sequence
  source 1..89: mol_type = other RNA
actggcgcttctatctgattggtctcagcgccatcaccagcgactatgtcgtagtgggtaaagctccctcttcggagggagcatgagac

SEQ ID NO: 21943 - RNA, 91 nt, synthetic construct
  misc_feature 1..91: note = engineered ribonucleic acid scaffold (ERS) sequence
  source 1..91: mol_type = other RNA
actggcgcttctatatctgattagtctgagcgccatcaccagcgactatgtcgtagtgggtaaagctccctcttcggagggagcatcagac

SEQ ID NO: 21944 - RNA, 90 nt, synthetic construct
  misc_feature 1..90: note = engineered ribonucleic acid scaffold (ERS) sequence
  source 1..90: mol_type = other RNA
actggcgcttctaatctgattagtctgagcgccatcaccagcgactatgtcgtagtgggtaaagctccctcttcggagggagcatcagac

SEQ ID NO: 21945 - RNA, 88 nt, synthetic construct
  misc_feature 1..88: note = engineered ribonucleic acid scaffold (ERS) sequence
  source 1..88: mol_type = other RNA
actggcgcttctactgattagtctgagcgccatcaccagcgactatgtcgtagtgggtaaagctccctcttcggagggagcatcagac

SEQ ID NO: 21946 - RNA, 89 nt, synthetic construct
  misc_feature 1..89: note = engineered ribonucleic acid scaffold (ERS) sequence
  source 1..89: mol_type = other RNA
actggcgcttctaactgattagtctgagcgccatcaccagcgactatgtcgtagtgggtaaagctccctcttcggagggagcatcagac

SEQ ID NO: 21947 - RNA, 89 nt, synthetic construct
  misc_feature 1..89: note = engineered ribonucleic acid scaffold (ERS) sequence
  source 1..89: mol_type = other RNA
actggcgcttctacctgattagtctgagcgccatcaccagcgactatgtcgtagtgggtaaagctccctcttcggagggagcatcagac

SEQ ID NO: 21948 - RNA, 89 nt, synthetic construct
  misc_feature 1..89: note = engineered ribonucleic acid scaffold (ERS) sequence
  source 1..89: mol_type = other RNA
actggcgcttctagctgattagtctgagcgccatcaccagcgactatgtcgtagtgggtaaagctccctcttcggagggagcatcagac

SEQ ID NO: 21949 - RNA, 91 nt, synthetic construct
  misc_feature 1..91: note = engineered ribonucleic acid scaffold (ERS) sequence
  source 1..91: mol_type = other RNA
actggcgcttctattactgattagtctgagcgccatcaccagcgactatgtcgtagtgggtaaagctccctcttcggagggagcatcagac

SEQ ID NO: 21950 - RNA, 89 nt, synthetic construct
  misc_feature 1..89: note = engineered ribonucleic acid scaffold (ERS) sequence
  source 1..89: mol_type = other RNA
actggcgcttctatatgattagtctgagcgccatcaccagcgactatgtcgtagtgggtaaagctccctcttcggagggagcatcagac

SEQ ID NO: 21951 - RNA, 89 nt, synthetic construct
  misc_feature 1..89: note = engineered ribonucleic acid scaffold (ERS) sequence
  source 1..89: mol_type = other RNA
actggcgcttctatgtgattagtctgagcgccatcaccagcgactatgtcgtagtgggtaaagctccctcttcggagggagcatcagac

SEQ ID NO: 21952 - RNA, 89 nt, synthetic construct
  misc_feature 1..89: note = engineered ribonucleic acid scaffold (ERS) sequence
  source 1..89: mol_type = other RNA
actggcgcttctatttgattagtctgagcgccatcaccagcgactatgtcgtagtgggtaaagctccctcttcggagggagcatcagac

SEQ ID NO: 21953 - RNA, 90 nt, synthetic construct
  misc_feature 1..90: note = engineered ribonucleic acid scaffold (ERS) sequence
  source 1..90: mol_type = other RNA
actggcgcttctatcttgattagtctgagcgccatcaccagcgactatgtcgtagtgggtaaagctccctcttcggagggagcatcagac

SEQ ID NO: 21954 - RNA, 89 nt, synthetic construct
  misc_feature 1..89: note = engineered ribonucleic acid scaffold (ERS) sequence
  source 1..89: mol_type = other RNA
actggcgcttctatcagattagtctgagcgccatcaccagcgactatgtcgtagtgggtaaagctccctcttcggagggagcatcagac

SEQ ID NO: 21955 - RNA, 89 nt, synthetic construct
  misc_feature 1..89: note = engineered ribonucleic acid scaffold (ERS) sequence
  source 1..89: mol_type = other RNA
actggcgcttctatcggattagtctgagcgccatcaccagcgactatgtcgtagtgggtaaagctccctcttcggagggagcatcagac

SEQ ID NO: 21956 - RNA, 90 nt, synthetic construct
  misc_feature 1..90: note = engineered ribonucleic acid scaffold (ERS) sequence
  source 1..90: mol_type = other RNA
actggcgcttctatctgaattagtctgagcgccatcaccagcgactatgtcgtagtgggtaaagctccctcttcggagggagcatcagac

SEQ ID NO: 21957 - RNA, 90 nt, synthetic construct
  misc_feature 1..90: note = engineered ribonucleic acid scaffold (ERS) sequence
  source 1..90: mol_type = other RNA
actggcgcttctatctgtattagtctgagcgccatcaccagcgactatgtcgtagtgggtaaagctccctcttcggagggagcatcagac

SEQ ID NO: 21958 - RNA, 89 nt, synthetic construct
  misc_feature 1..89: note = engineered ribonucleic acid scaffold (ERS) sequence
  source 1..89: mol_type = other RNA
actggcgcttctatctggttagtctgagcgccatcaccagcgactatgtcgtagtgggtaaagctccctcttcggagggagcatcagac

SEQ ID NO: 21959 - RNA, 89 nt, synthetic construct
  misc_feature 1..89: note = engineered ribonucleic acid scaffold (ERS) sequence
  source 1..89: mol_type = other RNA
actggcgcttctatctgtttagtctgagcgccatcaccagcgactatgtcgtagtgggtaaagctccctcttcggagggagcatcagac

SEQ ID NO: 21960 - RNA, 90 nt, synthetic construct
  misc_feature 1..90: note = engineered ribonucleic acid scaffold (ERS) sequence
  source 1..90: mol_type = other RNA
actggcgcttctatctgatttagtctgagcgccatcaccagcgactatgtcgtagtgggtaaagctccctcttcggagggagcatcagac

SEQ ID NO: 21961 - RNA, 89 nt, synthetic construct
  misc_feature 1..89: note = engineered ribonucleic acid scaffold (ERS) sequence
  source 1..89: mol_type = other RNA
actggcgcttctatctgattggtctgagcgccatcaccagcgactatgtcgtagtgggtaaagctccctcttcggagggagcatcagac

SEQ ID NO: 21962 - RNA, 91 nt, synthetic construct
  misc_feature 1..91: note = engineered ribonucleic acid scaffold (ERS) sequence
  source 1..91: mol_type = other RNA
actggcgcttctatatctgattactctcagcgccatcaccagcgactatgtcgtagtgggtaaagctccctcttcggagggagcatgagag

SEQ ID NO: 21963 - RNA, 90 nt, synthetic construct
  misc_feature 1..90: note = engineered ribonucleic acid scaffold (ERS) sequence
  source 1..90: mol_type = other RNA
actggcgcttctaatctgattactctcagcgccatcaccagcgactatgtcgtagtgggtaaagctccctcttcggagggagcatgagag

SEQ ID NO: 21964 - RNA, 88 nt, synthetic construct
  misc_feature 1..88: note = engineered ribonucleic acid scaffold (ERS) sequence
  source 1..88: mol_type = other RNA
actggcgcttctactgattactctcagcgccatcaccagcgactatgtcgtagtgggtaaagctccctcttcggagggagcatgagag

SEQ ID NO: 21965 - RNA, 89 nt, synthetic construct
  misc_feature 1..89: note = engineered ribonucleic acid scaffold (ERS) sequence
  source 1..89: mol_type = other RNA
actggcgcttctaactgattactctcagcgccatcaccagcgactatgtcgtagtgggtaaagctccctcttcggagggagcatgagag

SEQ ID NO: 21966 - RNA, 89 nt, synthetic construct
  misc_feature 1..89: note = engineered ribonucleic acid scaffold (ERS) sequence
  source 1..89: mol_type = other RNA
actggcgcttctacctgattactctcagcgccatcaccagcgactatgtcgtagtgggtaaagctccctcttcggagggagcatgagag

SEQ ID NO: 21967 - RNA, 89 nt, synthetic construct
  misc_feature 1..89: note = engineered ribonucleic acid scaffold (ERS) sequence
  source 1..89: mol_type = other RNA
actggcgcttctagctgattactctcagcgccatcaccagcgactatgtcgtagtgggtaaagctccctcttcggagggagcatgagag

SEQ ID NO: 21968 - RNA, 91 nt, synthetic construct
  misc_feature 1..91: note = engineered ribonucleic acid scaffold (ERS) sequence
  source 1..91: mol_type = other RNA
actggcgcttctattactgattactctcagcgccatcaccagcgactatgtcgtagtgggtaaagctccctcttcggagggagcatgagag

SEQ ID NO: 21969 - RNA, 89 nt, synthetic construct
  misc_feature 1..89: note = engineered ribonucleic acid scaffold (ERS) sequence
  source 1..89: mol_type = other RNA
actggcgcttctatatgattactctcagcgccatcaccagcgactatgtcgtagtgggtaaagctccctcttcggagggagcatgagag

SEQ ID NO: 21970 - RNA, 89 nt, synthetic construct
  misc_feature 1..89: note = engineered ribonucleic acid scaffold (ERS) sequence
  source 1..89: mol_type = other RNA
actggcgcttctatgtgattactctcagcgccatcaccagcgactatgtcgtagtgggtaaagctccctcttcggagggagcatgagag

SEQ ID NO: 21971 - RNA, 89 nt, synthetic construct
  misc_feature 1..89: note = engineered ribonucleic acid scaffold (ERS) sequence
  source 1..89: mol_type = other RNA
actggcgcttctatttgattactctcagcgccatcaccagcgactatgtcgtagtgggtaaagctccctcttcggagggagcatgagag

SEQ ID NO: 21972 - RNA, 90 nt, synthetic construct
  misc_feature 1..90: note = engineered ribonucleic acid scaffold (ERS) sequence
  source 1..90: mol_type = other RNA
actggcgcttctatcttgattactctcagcgccatcaccagcgactatgtcgtagtgggtaaagctccctcttcggagggagcatgagag

SEQ ID NO: 21973 - RNA, 89 nt, synthetic construct
  misc_feature 1..89: note = engineered ribonucleic acid scaffold (ERS) sequence
  source 1..89: mol_type = other RNA
actggcgcttctatcagattactctcagcgccatcaccagcgactatgtcgtagtgggtaaagctccctcttcggagggagcatgagag

SEQ ID NO: 21974 - RNA, 89 nt, synthetic construct
  misc_feature 1..89: note = engineered ribonucleic acid scaffold (ERS) sequence
  source 1..89: mol_type = other RNA
actggcgcttctatcggattactctcagcgccatcaccagcgactatgtcgtagtgggtaaagctccctcttcggagggagcatgagag

SEQ ID NO: 21975 - RNA, 90 nt, synthetic construct
  misc_feature 1..90: note = engineered ribonucleic acid scaffold (ERS) sequence
  source 1..90: mol_type = other RNA
actggcgcttctatctgaattactctcagcgccatcaccagcgactatgtcgtagtgggtaaagctccctcttcggagggagcatgagag

SEQ ID NO: 21976 - RNA, 90 nt, synthetic construct
  misc_feature 1..90: note = engineered ribonucleic acid scaffold (ERS) sequence
  source 1..90: mol_type = other RNA
actggcgcttctatctgtattactctcagcgccatcaccagcgactatgtcgtagtgggtaaagctccctcttcggagggagcatgagag

SEQ ID NO: 21977 - RNA, 89 nt, synthetic construct
  misc_feature 1..89: note = engineered ribonucleic acid scaffold (ERS) sequence
  source 1..89: mol_type = other RNA
actggcgcttctatctggttactctcagcgccatcaccagcgactatgtcgtagtgggtaaagctccctcttcggagggagcatgagag

SEQ ID NO: 21978 - RNA, 89 nt, synthetic construct
  misc_feature 1..89: note = engineered ribonucleic acid scaffold (ERS) sequence
  source 1..89: mol_type = other RNA
actggcgcttctatctgtttactctcagcgccatcaccagcgactatgtcgtagtgggtaaagctccctcttcggagggagcatgagag

SEQ ID NO: 21979 - RNA, 90 nt, synthetic construct
  misc_feature 1..90: note = engineered ribonucleic acid scaffold (ERS) sequence
  source 1..90: mol_type = other RNA
actggcgcttctatctgatttactctcagcgccatcaccagcgactatgtcgtagtgggtaaagctccctcttcggagggagcatgagag

SEQ ID NO: 21980 - RNA, 89 nt, synthetic construct
  misc_feature 1..89: note = engineered ribonucleic acid scaffold (ERS) sequence
  source 1..89: mol_type = other RNA
actggcgcttctatctgattgctctcagcgccatcaccagcgactatgtcgtagtgggtaaagctccctcttcggagggagcatgagag

SEQ ID NO: 21981 - RNA, 92 nt, synthetic construct
  misc_feature 1..92: note = engineered ribonucleic acid scaffold (ERS) sequence
  source 1..92: mol_type = other RNA
actggcgctccctatatctgattaccccgagcgccatcaccagcgactatgtcgtagtgggtaaagctccctcttcggagggagcatcgggg

SEQ ID NO: 21982 - RNA, 90 nt, synthetic construct
  misc_feature 1..90: note = engineered ribonucleic acid scaffold (ERS) sequence
  source 1..90: mol_type = other RNA
actggcgctcccaatctgattaccccgagcgccatcaccagcgactatgtcgtagtgggtaaagctccctcttcggagggagcatcgggg

SEQ ID NO: 21983 - RNA, 88 nt, synthetic construct
  misc_feature 1..88: note = engineered ribonucleic acid scaffold (ERS) sequence
  source 1..88: mol_type = other RNA
actggcgctcccactgattaccccgagcgccatcaccagcgactatgtcgtagtgggtaaagctccctcttcggagggagcatcgggg

SEQ ID NO: 21984 - RNA, 89 nt, synthetic construct
  misc_feature 1..89: note = engineered ribonucleic acid scaffold (ERS) sequence
  source 1..89: mol_type = other RNA
actggcgctcccaactgattaccccgagcgccatcaccagcgactatgtcgtagtgggtaaagctccctcttcggagggagcatcgggg

SEQ ID NO: 21985 - RNA, 89 nt, synthetic construct
  misc_feature 1..89: note = engineered ribonucleic acid scaffold (ERS) sequence
  source 1..89: mol_type = other RNA
actggcgctcccacctgattaccccgagcgccatcaccagcgactatgtcgtagtgggtaaagctccctcttcggagggagcatcgggg

SEQ ID NO: 21986 - RNA, 89 nt, synthetic construct
  misc_feature 1..89: note = engineered ribonucleic acid scaffold (ERS) sequence
  source 1..89: mol_type = other RNA
actggcgctcccagctgattaccccgagcgccatcaccagcgactatgtcgtagtgggtaaagctccctcttcggagggagcatcgggg

SEQ ID NO: 21987 - RNA, 91 nt, synthetic construct
  misc_feature 1..91: note = engineered ribonucleic acid scaffold (ERS) sequence
  source 1..91: mol_type = other RNA
actggcgctcccattactgattaccccgagcgccatcaccagcgactatgtcgtagtgggtaaagctccctcttcggagggagcatcgggg

SEQ ID NO: 21988 - RNA, 89 nt, synthetic construct
  misc_feature 1..89: note = engineered ribonucleic acid scaffold (ERS) sequence
  source 1..89: mol_type = other RNA
actggcgctcccatatgattaccccgagcgccatcaccagcgactatgtcgtagtgggtaaagctccctcttcggagggagcatcgggg

SEQ ID NO: 21989 - RNA, 89 nt, synthetic construct
  misc_feature 1..89: note = engineered ribonucleic acid scaffold (ERS) sequence
  source 1..89: mol_type = other RNA
actggcgctcccatgtgattaccccgagcgccatcaccagcgactatgtcgtagtgggtaaagctccctcttcggagggagcatcgggg

SEQ ID NO: 21990 - RNA, 89 nt, synthetic construct
  misc_feature 1..89: note = engineered ribonucleic acid scaffold (ERS) sequence
  source 1..89: mol_type = other RNA
actggcgctcccatttgattaccccgagcgccatcaccagcgactatgtcgtagtgggtaaagctccctcttcggagggagcatcgggg

SEQ ID NO: 21991 - RNA, 90 nt, synthetic construct
  misc_feature 1..90: note = engineered ribonucleic acid scaffold (ERS) sequence
  source 1..90: mol_type = other RNA
actggcgctcccatcttgattaccccgagcgccatcaccagcgactatgtcgtagtgggtaaagctccctcttcggagggagcatcgggg

SEQ ID NO: 21992 - RNA, 89 nt, synthetic construct
  misc_feature 1..89: note = engineered ribonucleic acid scaffold (ERS) sequence
  source 1..89: mol_type = other RNA
actggcgctcccatcagattaccccgagcgccatcaccagcgactatgtcgtagtgggtaaagctccctcttcggagggagcatcgggg

SEQ ID NO: 21993 - RNA, 89 nt, synthetic construct
  misc_feature 1..89: note = engineered ribonucleic acid scaffold (ERS) sequence
  source 1..89: mol_type = other RNA
actggcgctcccatcggattaccccgagcgccatcaccagcgactatgtcgtagtgggtaaagctccctcttcggagggagcatcgggg

SEQ ID NO: 21994 - RNA, 90 nt, synthetic construct
  misc_feature 1..90: note = engineered ribonucleic acid scaffold (ERS) sequence
  source 1..90: mol_type = other RNA
actggcgctcccatctgaattaccccgagcgccatcaccagcgactatgtcgtagtgggtaaagctccctcttcggagggagcatcgggg

SEQ ID NO: 21995 - RNA, 90 nt, synthetic construct
  misc_feature 1..90: note = engineered ribonucleic acid scaffold (ERS) sequence
  source 1..90: mol_type = other RNA
actggcgctcccatctgtattaccccgagcgccatcaccagcgactatgtcgtagtgggtaaagctccctcttcggagggagcatcgggg

SEQ ID NO: 21996 - RNA, 89 nt, synthetic construct
  misc_feature 1..89: note = engineered ribonucleic acid scaffold (ERS) sequence
  source 1..89: mol_type = other RNA
actggcgctcccatctggttaccccgagcgccatcaccagcgactatgtcgtagtgggtaaagctccctcttcggagggagcatcgggg

SEQ ID NO: 21997 - RNA, 89 nt, synthetic construct
  misc_feature 1..89: note = engineered ribonucleic acid scaffold (ERS) sequence
  source 1..89: mol_type = other RNA
actggcgctcccatctgtttaccccgagcgccatcaccagcgactatgtcgtagtgggtaaagctccctcttcggagggagcatcgggg

SEQ ID NO: 21998 - RNA, 90 nt, synthetic construct
  misc_feature 1..90: note = engineered ribonucleic acid scaffold (ERS) sequence
  source 1..90: mol_type = other RNA
actggcgctcccatctgatttaccccgagcgccatcaccagcgactatgtcgtagtgggtaaagctccctcttcggagggagcatcgggg

SEQ ID NO: 21999 - RNA, 89 nt, synthetic construct
  misc_feature 1..89: note = engineered ribonucleic acid scaffold (ERS) sequence
  source 1..89: mol_type = other RNA
actggcgctcccatctgattgccccgagcgccatcaccagcgactatgtcgtagtgggtaaagctccctcttcggagggagcatcgggg

SEQ ID NO: 22000 - RNA, 92 nt, synthetic construct
  misc_feature 1..92: note = engineered ribonucleic acid scaffold (ERS) sequence
  source 1..92: mol_type = other RNA
actggcgctccttatatctgattactccgagcgccatcaccagcgactatgtcgtagtgggtaaagctccctcttcggagggagcatcggag

SEQ ID NO: 22001 - RNA, 90 nt, synthetic construct
  misc_feature 1..90: note = engineered ribonucleic acid scaffold (ERS) sequence
  source 1..90: mol_type = other RNA
actggcgctcctaatctgattactccgagcgccatcaccagcgactatgtcgtagtgggtaaagctccctcttcggagggagcatcggag

SEQ ID NO: 22002 - RNA, 88 nt, synthetic construct
  misc_feature 1..88: note = engineered ribonucleic acid scaffold (ERS) sequence
  source 1..88: mol_type = other RNA
actggcgctcctactgattactccgagcgccatcaccagcgactatgtcgtagtgggtaaagctccctcttcggagggagcatcggag

SEQ ID NO: 22003 - RNA, 89 nt, synthetic construct
  misc_feature 1..89: note = engineered ribonucleic acid scaffold (ERS) sequence
  source 1..89: mol_type = other RNA
actggcgctcctaactgattactccgagcgccatcaccagcgactatgtcgtagtgggtaaagctccctcttcggagggagcatcggag

SEQ ID NO: 22004 - RNA, 89 nt, synthetic construct
  misc_feature 1..89: note = engineered ribonucleic acid scaffold (ERS) sequence
  source 1..89: mol_type = other RNA
actggcgctcctacctgattactccgagcgccatcaccagcgactatgtcgtagtgggtaaagctccctcttcggagggagcatcggag

SEQ ID NO: 22005 - RNA, 89 nt, synthetic construct
  misc_feature 1..89: note = engineered ribonucleic acid scaffold (ERS) sequence
  source 1..89: mol_type = other RNA
actggcgctcctagctgattactccgagcgccatcaccagcgactatgtcgtagtgggtaaagctccctcttcggagggagcatcggag

SEQ ID NO: 22006 - RNA, 91 nt, synthetic construct
  misc_feature 1..91: note = engineered ribonucleic acid scaffold (ERS) sequence
  source 1..91: mol_type = other RNA
actggcgctcctattactgattactccgagcgccatcaccagcgactatgtcgtagtgggtaaagctccctcttcggagggagcatcggag

SEQ ID NO: 22007 - RNA, 89 nt, synthetic construct
  misc_feature 1..89: note = engineered ribonucleic acid scaffold (ERS) sequence
  source 1..89: mol_type = other RNA
actggcgctcctatatgattactccgagcgccatcaccagcgactatgtcgtagtgggtaaagctccctcttcggagggagcatcggag

SEQ ID NO: 22008 - RNA, 89 nt, synthetic construct
  misc_feature 1..89: note = engineered ribonucleic acid scaffold (ERS) sequence
  source 1..89: mol_type = other RNA
actggcgctcctatgtgattactccgagcgccatcaccagcgactatgtcgtagtgggtaaagctccctcttcggagggagcatcggag

SEQ ID NO: 22009 - RNA, 89 nt, synthetic construct
  misc_feature 1..89: note = engineered ribonucleic acid scaffold (ERS) sequence
  source 1..89: mol_type = other RNA
actggcgctcctatttgattactccgagcgccatcaccagcgactatgtcgtagtgggtaaagctccctcttcggagggagcatcggag

SEQ ID NO: 22010 - RNA, 90 nt, synthetic construct
  misc_feature 1..90: note = engineered ribonucleic acid scaffold (ERS) sequence
  source 1..90: mol_type = other RNA
actggcgctcctatcttgattactccgagcgccatcaccagcgactatgtcgtagtgggtaaagctccctcttcggagggagcatcggag

SEQ ID NO: 22011 - RNA, 89 nt, synthetic construct
  misc_feature 1..89: note = engineered ribonucleic acid scaffold (ERS) sequence
  source 1..89: mol_type = other RNA
actggcgctcctatcagattactccgagcgccatcaccagcgactatgtcgtagtgggtaaagctccctcttcggagggagcatcggag

SEQ ID NO: 22012 - RNA, 89 nt, synthetic construct
  misc_feature 1..89: note = engineered ribonucleic acid scaffold (ERS) sequence
  source 1..89: mol_type = other RNA
actggcgctcctatcggattactccgagcgccatcaccagcgactatgtcgtagtgggtaaagctccctcttcggagggagcatcggag

SEQ ID NO: 22013 - RNA, 90 nt, synthetic construct
  misc_feature 1..90: note = engineered ribonucleic acid scaffold (ERS) sequence
  source 1..90: mol_type = other RNA
actggcgctcctatctgaattactccgagcgccatcaccagcgactatgtcgtagtgggtaaagctccctcttcggagggagcatcggag

SEQ ID NO: 22014 - RNA, 90 nt, synthetic construct
  misc_feature 1..90: note = engineered ribonucleic acid scaffold (ERS) sequence
  source 1..90: mol_type = other RNA
actggcgctcctatctgtattactccgagcgccatcaccagcgactatgtcgtagtgggtaaagctccctcttcggagggagcatcggag

SEQ ID NO: 22015 - RNA, 89 nt, synthetic construct
  misc_feature 1..89: note = engineered ribonucleic acid scaffold (ERS) sequence
  source 1..89: mol_type = other RNA
actggcgctcctatctggttactccgagcgccatcaccagcgactatgtcgtagtgggtaaagctccctcttcggagggagcatcggag

SEQ ID NO: 22016 - RNA, 89 nt, synthetic construct
  misc_feature 1..89: note = engineered ribonucleic acid scaffold (ERS) sequence
  source 1..89: mol_type = other RNA
actggcgctcctatctgtttactccgagcgccatcaccagcgactatgtcgtagtgggtaaagctccctcttcggagggagcatcggag

SEQ ID NO: 22017 - RNA, 90 nt, synthetic construct
  misc_feature 1..90: note = engineered ribonucleic acid scaffold (ERS) sequence
  source 1..90: mol_type = other RNA
actggcgctcctatctgatttactccgagcgccatcaccagcgactatgtcgtagtgggtaaagctccctcttcggagggagcatcggag

SEQ ID NO: 22018 - RNA, 89 nt, synthetic construct
  misc_feature 1..89: note = engineered ribonucleic acid scaffold (ERS) sequence
  source 1..89: mol_type = other RNA
actggcgctcctatctgattgctccgagcgccatcaccagcgactatgtcgtagtgggtaaagctccctcttcggagggagcatcggag

SEQ ID NO: 22019 - RNA, 92 nt, synthetic construct
  misc_feature 1..92: note = engineered ribonucleic acid scaffold (ERS) sequence
  source 1..92: mol_type = other RNA
actggcgctgggtatatctgattaccccgagcgccatcaccagcgactatgtcgtagtgggtaaagctccctcttcggagggagcatcgggg

SEQ ID NO: 22020 - RNA, 90 nt, synthetic construct
  misc_feature 1..90: note = engineered ribonucleic acid scaffold (ERS) sequence
  source 1..90: mol_type = other RNA
actggcgctgggaatctgattaccccgagcgccatcaccagcgactatgtcgtagtgggtaaagctccctcttcggagggagcatcgggg

SEQ ID NO: 22021 - RNA, 88 nt, synthetic construct
  misc_feature 1..88: note = engineered ribonucleic acid scaffold (ERS) sequence
  source 1..88: mol_type = other RNA
actggcgctgggactgattaccccgagcgccatcaccagcgactatgtcgtagtgggtaaagctccctcttcggagggagcatcgggg

SEQ ID NO: 22022 - RNA, 89 nt, synthetic construct
  misc_feature 1..89: note = engineered ribonucleic acid scaffold (ERS) sequence
  source 1..89: mol_type = other RNA
actggcgctgggaactgattaccccgagcgccatcaccagcgactatgtcgtagtgggtaaagctccctcttcggagggagcatcgggg

SEQ ID NO: 22023 - RNA, 89 nt, synthetic construct
  misc_feature 1..89: note = engineered ribonucleic acid scaffold (ERS) sequence
  source 1..89: mol_type = other RNA
actggcgctgggacctgattaccccgagcgccatcaccagcgactatgtcgtagtgggtaaagctccctcttcggagggagcatcgggg

SEQ ID NO: 22024 - RNA, 89 nt, synthetic construct
  misc_feature 1..89: note = engineered ribonucleic acid scaffold (ERS) sequence
  source 1..89: mol_type = other RNA
actggcgctgggagctgattaccccgagcgccatcaccagcgactatgtcgtagtgggtaaagctccctcttcggagggagcatcgggg

SEQ ID NO: 22025 - RNA, 91 nt, synthetic construct
  misc_feature 1..91: note = engineered ribonucleic acid scaffold (ERS) sequence
  source 1..91: mol_type = other RNA
actggcgctgggattactgattaccccgagcgccatcaccagcgactatgtcgtagtgggtaaagctccctcttcggagggagcatcgggg

SEQ ID NO: 22026 - RNA, 89 nt, synthetic construct
  misc_feature 1..89: note = engineered ribonucleic acid scaffold (ERS) sequence
  source 1..89: mol_type = other RNA
actggcgctgggatatgattaccccgagcgccatcaccagcgactatgtcgtagtgggtaaagctccctcttcggagggagcatcgggg

SEQ ID NO: 22027 - RNA, 89 nt, synthetic construct
  misc_feature 1..89: note = engineered ribonucleic acid scaffold (ERS) sequence
  source 1..89: mol_type = other RNA
actggcgctgggatgtgattaccccgagcgccatcaccagcgactatgtcgtagtgggtaaagctccctcttcggagggagcatcgggg

SEQ ID NO: 22028 - RNA, 89 nt, synthetic construct
  misc_feature 1..89: note = engineered ribonucleic acid scaffold (ERS) sequence
  source 1..89: mol_type = other RNA
actggcgctgggatttgattaccccgagcgccatcaccagcgactatgtcgtagtgggtaaagctccctcttcggagggagcatcgggg

SEQ ID NO: 22029 - RNA, 90 nt, synthetic construct
  misc_feature 1..90: note = engineered ribonucleic acid scaffold (ERS) sequence
  source 1..90: mol_type = other RNA
actggcgctgggatcttgattaccccgagcgccatcaccagcgactatgtcgtagtgggtaaagctccctcttcggagggagcatcgggg

SEQ ID NO: 22030 - RNA, 89 nt, synthetic construct
  misc_feature 1..89: note = engineered ribonucleic acid scaffold (ERS) sequence
  source 1..89: mol_type = other RNA
actggcgctgggatcagattaccccgagcgccatcaccagcgactatgtcgtagtgggtaaagctccctcttcggagggagcatcgggg

SEQ ID NO: 22031 - RNA, 89 nt, synthetic construct
  misc_feature 1..89: note = engineered ribonucleic acid scaffold (ERS) sequence
  source 1..89: mol_type = other RNA
actggcgctgggatcggattaccccgagcgccatcaccagcgactatgtcgtagtgggtaaagctccctcttcggagggagcatcgggg

SEQ ID NO: 22032 - RNA, 90 nt, synthetic construct
  misc_feature 1..90: note = engineered ribonucleic acid scaffold (ERS) sequence
  source 1..90: mol_type = other RNA
actggcgctgggatctgaattaccccgagcgccatcaccagcgactatgtcgtagtgggtaaagctccctcttcggagggagcatcgggg

SEQ ID NO: 22033 - RNA, 90 nt, synthetic construct
  misc_feature 1..90: note = engineered ribonucleic acid scaffold (ERS) sequence
  source 1..90: mol_type = other RNA
actggcgctgggatctgtattaccccgagcgccatcaccagcgactatgtcgtagtgggtaaagctccctcttcggagggagcatcgggg

SEQ ID NO: 22034 - RNA, 89 nt, synthetic construct
  misc_feature 1..89: note = engineered ribonucleic acid scaffold (ERS) sequence
  source 1..89: mol_type = other RNA
actggcgctgggatctggttaccccgagcgccatcaccagcgactatgtcgtagtgggtaaagctccctcttcggagggagcatcgggg

SEQ ID NO: 22035 - RNA, 89 nt, synthetic construct
  misc_feature 1..89: note = engineered ribonucleic acid scaffold (ERS) sequence
  source 1..89: mol_type = other RNA
actggcgctgggatctgtttaccccgagcgccatcaccagcgactatgtcgtagtgggtaaagctccctcttcggagggagcatcgggg

SEQ ID NO: 22036 - RNA, 90 nt, synthetic construct
  misc_feature 1..90: note = engineered ribonucleic acid scaffold (ERS) sequence
  source 1..90: mol_type = other RNA
actggcgctgggatctgatttaccccgagcgccatcaccagcgactatgtcgtagtgggtaaagctccctcttcggagggagcatcgggg

SEQ ID NO: 22037 - RNA, 89 nt, synthetic construct
  misc_feature 1..89: note = engineered ribonucleic acid scaffold (ERS) sequence
  source 1..89: mol_type = other RNA
actggcgctgggatctgattgccccgagcgccatcaccagcgactatgtcgtagtgggtaaagctccctcttcggagggagcatcgggg

SEQ ID NO: 22038 - RNA, 92 nt, synthetic construct
  misc_feature 1..92: note = engineered ribonucleic acid scaffold (ERS) sequence
  source 1..92: mol_type = other RNA
actggcgctggttatatctgattactccgagcgccatcaccagcgactatgtcgtagtgggtaaagctccctcttcggagggagcatcggag

SEQ ID NO: 22039 - RNA, 90 nt, synthetic construct
  misc_feature 1..90: note = engineered ribonucleic acid scaffold (ERS) sequence
  source 1..90: mol_type = other RNA
actggcgctggtaatctgattactccgagcgccatcaccagcgactatgtcgtagtgggtaaagctccctcttcggagggagcatcggag

SEQ ID NO: 22040 - RNA, 88 nt, synthetic construct
  misc_feature 1..88: note = engineered ribonucleic acid scaffold (ERS) sequence
  source 1..88: mol_type = other RNA
actggcgctggtactgattactccgagcgccatcaccagcgactatgtcgtagtgggtaaagctccctcttcggagggagcatcggag

SEQ ID NO: 22041 - RNA, 89 nt, synthetic construct
  misc_feature 1..89: note = engineered ribonucleic acid scaffold (ERS) sequence
  source 1..89: mol_type = other RNA
actggcgctggtaactgattactccgagcgccatcaccagcgactatgtcgtagtgggtaaagctccctcttcggagggagcatcggag

SEQ ID NO: 22042 - RNA, 89 nt, synthetic construct
  misc_feature 1..89: note = engineered ribonucleic acid scaffold (ERS) sequence
  source 1..89: mol_type = other RNA
actggcgctggtacctgattactccgagcgccatcaccagcgactatgtcgtagtgggtaaagctccctcttcggagggagcatcggag

SEQ ID NO: 22043 - RNA, 89 nt, synthetic construct
  misc_feature 1..89: note = engineered ribonucleic acid scaffold (ERS) sequence
  source 1..89: mol_type = other RNA
actggcgctggtagctgattactccgagcgccatcaccagcgactatgtcgtagtgggtaaagctccctcttcggagggagcatcggag

SEQ ID NO: 22044 - RNA, 91 nt, synthetic construct
  misc_feature 1..91: note = engineered ribonucleic acid scaffold (ERS) sequence
  source 1..91: mol_type = other RNA
actggcgctggtattactgattactccgagcgccatcaccagcgactatgtcgtagtgggtaaagctccctcttcggagggagcatcggag

SEQ ID NO: 22045 - RNA, 89 nt, synthetic construct
  misc_feature 1..89: note = engineered ribonucleic acid scaffold (ERS) sequence
  source 1..89: mol_type = other RNA
actggcgctggtatatgattactccgagcgccatcaccagcgactatgtcgtagtgggtaaagctccctcttcggagggagcatcggag

SEQ ID NO: 22046 - RNA, 89 nt, synthetic construct
  misc_feature 1..89: note = engineered ribonucleic acid scaffold (ERS) sequence
  source 1..89: mol_type = other RNA
actggcgctggtatgtgattactccgagcgccatcaccagcgactatgtcgtagtgggtaaagctccctcttcggagggagcatcggag

SEQ ID NO: 22047 - RNA, 89 nt, synthetic construct
  misc_feature 1..89: note = engineered ribonucleic acid scaffold (ERS) sequence
  source 1..89: mol_type = other RNA
actggcgctggtatttgattactccgagcgccatcaccagcgactatgtcgtagtgggtaaagctccctcttcggagggagcatcggag

SEQ ID NO: 22048 - RNA, 90 nt, synthetic construct
  misc_feature 1..90: note = engineered ribonucleic acid scaffold (ERS) sequence
  source 1..90: mol_type = other RNA
actggcgctggtatcttgattactccgagcgccatcaccagcgactatgtcgtagtgggtaaagctccctcttcggagggagcatcggag

SEQ ID NO: 22049 - RNA, 89 nt, synthetic construct
  misc_feature 1..89: note = engineered ribonucleic acid scaffold (ERS) sequence
  source 1..89: mol_type = other RNA
actggcgctggtatcagattactccgagcgccatcaccagcgactatgtcgtagtgggtaaagctccctcttcggagggagcatcggag

SEQ ID NO: 22050 - RNA, 89 nt, synthetic construct
  misc_feature 1..89: note = engineered ribonucleic acid scaffold (ERS) sequence
  source 1..89: mol_type = other RNA
actggcgctggtatcggattactccgagcgccatcaccagcgactatgtcgtagtgggtaaagctccctcttcggagggagcatcggag

SEQ ID NO: 22051 - RNA, 90 nt, synthetic construct
  misc_feature 1..90: note = engineered ribonucleic acid scaffold (ERS) sequence
  source 1..90: mol_type = other RNA
actggcgctggtatctgaattactccgagcgccatcaccagcgactatgtcgtagtgggtaaagctccctcttcggagggagcatcggag

SEQ ID NO: 22052 - RNA, 90 nt, synthetic construct
  misc_feature 1..90: note = engineered ribonucleic acid scaffold (ERS) sequence
  source 1..90: mol_type = other RNA
actggcgctggtatctgtattactccgagcgccatcaccagcgactatgtcgtagtgggtaaagctccctcttcggagggagcatcggag

SEQ ID NO: 22053 - RNA, 89 nt, synthetic construct
  misc_feature 1..89: note = engineered ribonucleic acid scaffold (ERS) sequence
  source 1..89: mol_type = other RNA
actggcgctggtatctggttactccgagcgccatcaccagcgactatgtcgtagtgggtaaagctccctcttcggagggagcatcggag

SEQ ID NO: 22054 - RNA, 89 nt, synthetic construct
  misc_feature 1..89: note = engineered ribonucleic acid scaffold (ERS) sequence
  source 1..89: mol_type = other RNA
actggcgctggtatctgtttactccgagcgccatcaccagcgactatgtcgtagtgggtaaagctccctcttcggagggagcatcggag

SEQ ID NO: 22055 - RNA, 90 nt, synthetic construct
  misc_feature 1..90: note = engineered ribonucleic acid scaffold (ERS) sequence
  source 1..90: mol_type = other RNA
actggcgctggtatctgatttactccgagcgccatcaccagcgactatgtcgtagtgggtaaagctccctcttcggagggagcatcggag

SEQ ID NO: 22056 - RNA, 89 nt, synthetic construct
  misc_feature 1..89: note = engineered ribonucleic acid scaffold (ERS) sequence
  source 1..89: mol_type = other RNA
actggcgctggtatctgattgctccgagcgccatcaccagcgactatgtcgtagtgggtaaagctccctcttcggagggagcatcggag

SEQ ID NO: 22057 - RNA, 92 nt, synthetic construct
  misc_feature 1..92: note = engineered ribonucleic acid scaffold (ERS) sequence
  source 1..92: mol_type = other RNA
actggcgcttcctatatctgattaccctgagcgccatcaccagcgactatgtcgtagtgggtaaagctccctcttcggagggagcatcaggg

SEQ ID NO: 22058 - RNA, 90 nt, synthetic construct
  misc_feature 1..90: note = engineered ribonucleic acid scaffold (ERS) sequence
  source 1..90: mol_type = other RNA
actggcgcttccaatctgattaccctgagcgccatcaccagcgactatgtcgtagtgggtaaagctccctcttcggagggagcatcaggg

SEQ ID NO: 22059 - RNA, 88 nt, synthetic construct
  misc_feature 1..88: note = engineered ribonucleic acid scaffold (ERS) sequence
  source 1..88: mol_type = other RNA
actggcgcttccactgattaccctgagcgccatcaccagcgactatgtcgtagtgggtaaagctccctcttcggagggagcatcaggg

SEQ ID NO: 22060 - RNA, 89 nt, synthetic construct
  misc_feature 1..89: note = engineered ribonucleic acid scaffold (ERS) sequence
  source 1..89: mol_type = other RNA
actggcgcttccaactgattaccctgagcgccatcaccagcgactatgtcgtagtgggtaaagctccctcttcggagggagcatcaggg

SEQ ID NO: 22061 - RNA, 89 nt, synthetic construct
  misc_feature 1..89: note = engineered ribonucleic acid scaffold (ERS) sequence
  source 1..89: mol_type = other RNA
actggcgcttccacctgattaccctgagcgccatcaccagcgactatgtcgtagtgggtaaagctccctcttcggagggagcatcaggg

SEQ ID NO: 22062 - RNA, 89 nt, synthetic construct
  misc_feature 1..89: note = engineered ribonucleic acid scaffold (ERS) sequence
  source 1..89: mol_type = other RNA
actggcgcttccagctgattaccctgagcgccatcaccagcgactatgtcgtagtgggtaaagctccctcttcggagggagcatcaggg

SEQ ID NO: 22063 - RNA, 91 nt, synthetic construct
  misc_feature 1..91: note = engineered ribonucleic acid scaffold (ERS) sequence
  source 1..91: mol_type = other RNA
actggcgcttccattactgattaccctgagcgccatcaccagcgactatgtcgtagtgggtaaagctccctcttcggagggagcatcaggg

SEQ ID NO: 22064 - RNA, 89 nt, synthetic construct
  misc_feature 1..89: note = engineered ribonucleic acid scaffold (ERS) sequence
  source 1..89: mol_type = other RNA
actggcgcttccatatgattaccctgagcgccatcaccagcgactatgtcgtagtgggtaaagctccctcttcggagggagcatcaggg

SEQ ID NO: 22065 - RNA, 89 nt, synthetic construct
  misc_feature 1..89: note = engineered ribonucleic acid scaffold (ERS) sequence
  source 1..89: mol_type = other RNA
actggcgcttccatgtgattaccctgagcgccatcaccagcgactatgtcgtagtgggtaaagctccctcttcggagggagcatcaggg

SEQ ID NO: 22066 - RNA, 89 nt, synthetic construct
  misc_feature 1..89: note = engineered ribonucleic acid scaffold (ERS) sequence
  source 1..89: mol_type = other RNA
actggcgcttccatttgattaccctgagcgccatcaccagcgactatgtcgtagtgggtaaagctccctcttcggagggagcatcaggg

SEQ ID NO: 22067 - RNA, 90 nt, synthetic construct
  misc_feature 1..90: note = engineered ribonucleic acid scaffold (ERS) sequence
  source 1..90: mol_type = other RNA
actggcgcttccatcttgattaccctgagcgccatcaccagcgactatgtcgtagtgggtaaagctccctcttcggagggagcatcaggg

SEQ ID NO: 22068 - RNA, 89 nt, synthetic construct
  misc_feature 1..89: note = engineered ribonucleic acid scaffold (ERS) sequence
  source 1..89: mol_type = other RNA
actggcgcttccatcagattaccctgagcgccatcaccagcgactatgtcgtagtgggtaaagctccctcttcggagggagcatcaggg

SEQ ID NO: 22069 - RNA, 89 nt, synthetic construct
  misc_feature 1..89: note = engineered ribonucleic acid scaffold (ERS) sequence
  source 1..89: mol_type = other RNA
actggcgcttccatcggattaccctgagcgccatcaccagcgactatgtcgtagtgggtaaagctccctcttcggagggagcatcaggg

SEQ ID NO: 22070 - RNA, 90 nt, synthetic construct
  misc_feature 1..90: note = engineered ribonucleic acid scaffold (ERS) sequence
  source 1..90: mol_type = other RNA
actggcgcttccatctgaattaccctgagcgccatcaccagcgactatgtcgtagtgggtaaagctccctcttcggagggagcatcaggg

SEQ ID NO: 22071 - RNA, 90 nt, synthetic construct
  misc_feature 1..90: note = engineered ribonucleic acid scaffold (ERS) sequence
  source 1..90: mol_type = other RNA
actggcgcttccatctgtattaccctgagcgccatcaccagcgactatgtcgtagtgggtaaagctccctcttcggagggagcatcaggg

SEQ ID NO: 22072 - RNA, 89 nt, synthetic construct
  misc_feature 1..89: note = engineered ribonucleic acid scaffold (ERS) sequence
  source 1..89: mol_type = other RNA
actggcgcttccatctggttaccctgagcgccatcaccagcgactatgtcgtagtgggtaaagctccctcttcggagggagcatcaggg

SEQ ID NO: 22073 - RNA, 89 nt, synthetic construct
  misc_feature 1..89: note = engineered ribonucleic acid scaffold (ERS) sequence
  source 1..89: mol_type = other RNA
actggcgcttccatctgtttaccctgagcgccatcaccagcgactatgtcgtagtgggtaaagctccctcttcggagggagcatcaggg

SEQ ID NO: 22074 - RNA, 90 nt, synthetic construct
  misc_feature 1..90: note = engineered ribonucleic acid scaffold (ERS) sequence
  source 1..90: mol_type = other RNA
actggcgcttccatctgatttaccctgagcgccatcaccagcgactatgtcgtagtgggtaaagctccctcttcggagggagcatcaggg

SEQ ID NO: 22075 - RNA, 89 nt, synthetic construct
  misc_feature 1..89: note = engineered ribonucleic acid scaffold (ERS) sequence
  source 1..89: mol_type = other RNA
actggcgcttccatctgattgccctgagcgccatcaccagcgactatgtcgtagtgggtaaagctccctcttcggagggagcatcaggg

SEQ ID NO: 22076 - RNA, 92 nt, synthetic construct
  misc_feature 1..92: note = engineered ribonucleic acid scaffold (ERS) sequence
  source 1..92: mol_type = other RNA
actggcgcttggtatatctgattaccctgagcgccatcaccagcgactatgtcgtagtgggtaaagctccctcttcggagggagcatcaggg

SEQ ID NO: 22077 - RNA, 90 nt, synthetic construct
  misc_feature 1..90: note = engineered ribonucleic acid scaffold (ERS) sequence
  source 1..90: mol_type = other RNA
actggcgcttggaatctgattaccctgagcgccatcaccagcgactatgtcgtagtgggtaaagctccctcttcggagggagcatcaggg

SEQ ID NO: 22078 - RNA, 88 nt, synthetic construct
  misc_feature 1..88: note = engineered ribonucleic acid scaffold (ERS) sequence
  source 1..88: mol_type = other RNA
actggcgcttggactgattaccctgagcgccatcaccagcgactatgtcgtagtgggtaaagctccctcttcggagggagcatcaggg

SEQ ID NO: 22079 - RNA, 89 nt, synthetic construct
  misc_feature 1..89: note = engineered ribonucleic acid scaffold (ERS) sequence
  source 1..89: mol_type = other RNA
actggcgcttggaactgattaccctgagcgccatcaccagcgactatgtcgtagtgggtaaagctccctcttcggagggagcatcaggg

SEQ ID NO: 22080 - RNA, 89 nt, synthetic construct
  misc_feature 1..89: note = engineered ribonucleic acid scaffold (ERS) sequence
  source 1..89: mol_type = other RNA
actggcgcttggacctgattaccctgagcgccatcaccagcgactatgtcgtagtgggtaaagctccctcttcggagggagcatcaggg

SEQ ID NO: 22081 - RNA, 89 nt, synthetic construct
  misc_feature 1..89: note = engineered ribonucleic acid scaffold (ERS) sequence
  source 1..89: mol_type = other RNA
actggcgcttggagctgattaccctgagcgccatcaccagcgactatgtcgtagtgggtaaagctccctcttcggagggagcatcaggg

SEQ ID NO: 22082 - RNA, 91 nt, synthetic construct
  misc_feature 1..91: note = engineered ribonucleic acid scaffold (ERS) sequence
  source 1..91: mol_type = other RNA
actggcgcttggattactgattaccctgagcgccatcaccagcgactatgtcgtagtgggtaaagctccctcttcggagggagcatcaggg

SEQ ID NO: 22083 - RNA, 89 nt, synthetic construct
  misc_feature 1..89: note = engineered ribonucleic acid scaffold (ERS) sequence
  source 1..89: mol_type = other RNA
actggcgcttggatatgattaccctgagcgccatcaccagcgactatgtcgtagtgggtaaagctccctcttcggagggagcatcaggg

SEQ ID NO: 22084 - RNA, 89 nt, synthetic construct
  misc_feature 1..89: note = engineered ribonucleic acid scaffold (ERS) sequence
  source 1..89: mol_type = other RNA
actggcgcttggatgtgattaccctgagcgccatcaccagcgactatgtcgtagtgggtaaagctccctcttcggagggagcatcaggg

SEQ ID NO: 22085 - RNA, 89 nt, synthetic construct
  misc_feature 1..89: note = engineered ribonucleic acid scaffold (ERS) sequence
  source 1..89: mol_type = other RNA
actggcgcttggatttgattaccctgagcgccatcaccagcgactatgtcgtagtgggtaaagctccctcttcggagggagcatcaggg

SEQ ID NO: 22086 - RNA, 90 nt, synthetic construct
  misc_feature 1..90: note = engineered ribonucleic acid scaffold (ERS) sequence
  source 1..90: mol_type = other RNA
actggcgcttggatcttgattaccctgagcgccatcaccagcgactatgtcgtagtgggtaaagctccctcttcggagggagcatcaggg

SEQ ID NO: 22087 - RNA, 89 nt, synthetic construct
  misc_feature 1..89: note = engineered ribonucleic acid scaffold (ERS) sequence
  source 1..89: mol_type = other RNA
actggcgcttggatcagattaccctgagcgccatcaccagcgactatgtcgtagtgggtaaagctccctcttcggagggagcatcaggg

SEQ ID NO: 22088 - RNA, 89 nt, synthetic construct
  misc_feature 1..89: note = engineered ribonucleic acid scaffold (ERS) sequence
  source 1..89: mol_type = other RNA
actggcgcttggatcggattaccctgagcgccatcaccagcgactatgtcgtagtgggtaaagctccctcttcggagggagcatcaggg

SEQ ID NO: 22089 - RNA, 90 nt, synthetic construct
  misc_feature 1..90: note = engineered ribonucleic acid scaffold (ERS) sequence
  source 1..90: mol_type = other RNA
actggcgcttggatctgaattaccctgagcgccatcaccagcgactatgtcgtagtgggtaaagctccctcttcggagggagcatcaggg

SEQ ID NO: 22090 - RNA, 90 nt, synthetic construct
  misc_feature 1..90: note = engineered ribonucleic acid scaffold (ERS) sequence
  source 1..90: mol_type = other RNA
actggcgcttggatctgtattaccctgagcgccatcaccagcgactatgtcgtagtgggtaaagctccctcttcggagggagcatcaggg

SEQ ID NO: 22091 - RNA, 89 nt, synthetic construct
  misc_feature 1..89: note = engineered ribonucleic acid scaffold (ERS) sequence
  source 1..89: mol_type = other RNA
actggcgcttggatctggttaccctgagcgccatcaccagcgactatgtcgtagtgggtaaagctccctcttcggagggagcatcaggg

SEQ ID NO: 22092 - RNA, 89 nt, synthetic construct
  misc_feature 1..89: note = engineered ribonucleic acid scaffold (ERS) sequence
  source 1..89: mol_type = other RNA
actggcgcttggatctgtttaccctgagcgccatcaccagcgactatgtcgtagtgggtaaagctccctcttcggagggagcatcaggg

SEQ ID NO: 22093 - RNA, 90 nt, synthetic construct
  misc_feature 1..90: note = engineered ribonucleic acid scaffold (ERS) sequence
  source 1..90: mol_type = other RNA
actggcgcttggatctgatttaccctgagcgccatcaccagcgactatgtcgtagtgggtaaagctccctcttcggagggagcatcaggg

SEQ ID NO: 22094 - RNA, 89 nt, synthetic construct
  misc_feature 1..89: note = engineered ribonucleic acid scaffold (ERS) sequence
  source 1..89: mol_type = other RNA
actggcgcttggatctgattgccctgagcgccatcaccagcgactatgtcgtagtgggtaaagctccctcttcggagggagcatcaggg

SEQ ID NO: 22095 - RNA, 92 nt, synthetic construct
  misc_feature 1..92: note = engineered ribonucleic acid scaffold (ERS) sequence
  source 1..92: mol_type = other RNA
actggcgcttgttatatctgattactctgagcgccatcaccagcgactatgtcgtagtgggtaaagctccctcttcggagggagcatcagag

SEQ ID NO: 22096 - RNA, 90 nt, synthetic construct
  misc_feature 1..90: note = engineered ribonucleic acid scaffold (ERS) sequence
  source 1..90: mol_type = other RNA
actggcgcttgtaatctgattactctgagcgccatcaccagcgactatgtcgtagtgggtaaagctccctcttcggagggagcatcagag

SEQ ID NO: 22097 - RNA, 88 nt, synthetic construct
  misc_feature 1..88: note = engineered ribonucleic acid scaffold (ERS) sequence
  source 1..88: mol_type = other RNA
actggcgcttgtactgattactctgagcgccatcaccagcgactatgtcgtagtgggtaaagctccctcttcggagggagcatcagag

SEQ ID NO: 22098 - RNA, 89 nt, synthetic construct
  misc_feature 1..89: note = engineered ribonucleic acid scaffold (ERS) sequence
  source 1..89: mol_type = other RNA
actggcgcttgtaactgattactctgagcgccatcaccagcgactatgtcgtagtgggtaaagctccctcttcggagggagcatcagag

SEQ ID NO: 22099 - RNA, 89 nt, synthetic construct
  misc_feature 1..89: note = engineered ribonucleic acid scaffold (ERS) sequence
  source 1..89: mol_type = other RNA
actggcgcttgtacctgattactctgagcgccatcaccagcgactatgtcgtagtgggtaaagctccctcttcggagggagcatcagag

SEQ ID NO: 22100 - RNA, 89 nt, synthetic construct
  misc_feature 1..89: note = engineered ribonucleic acid scaffold (ERS) sequence
  source 1..89: mol_type = other RNA
actggcgcttgtagctgattactctgagcgccatcaccagcgactatgtcgtagtgggtaaagctccctcttcggagggagcatcagag

SEQ ID NO: 22101 - RNA, 91 nt, synthetic construct
  misc_feature 1..91: note = engineered ribonucleic acid scaffold (ERS) sequence
  source 1..91: mol_type = other RNA
actggcgcttgtattactgattactctgagcgccatcaccagcgactatgtcgtagtgggtaaagctccctcttcggagggagcatcagag

SEQ ID NO: 22102 - RNA, 89 nt, synthetic construct
  misc_feature 1..89: note = engineered ribonucleic acid scaffold (ERS) sequence
  source 1..89: mol_type = other RNA
actggcgcttgtatatgattactctgagcgccatcaccagcgactatgtcgtagtgggtaaagctccctcttcggagggagcatcagag

SEQ ID NO: 22103 - RNA, 89 nt, synthetic construct
  misc_feature 1..89: note = engineered ribonucleic acid scaffold (ERS) sequence
  source 1..89: mol_type = other RNA
actggcgcttgtatgtgattactctgagcgccatcaccagcgactatgtcgtagtgggtaaagctccctcttcggagggagcatcagag

SEQ ID NO: 22104 - RNA, 89 nt, synthetic construct
  misc_feature 1..89: note = engineered ribonucleic acid scaffold (ERS) sequence
  source 1..89: mol_type = other RNA
actggcgcttgtatttgattactctgagcgccatcaccagcgactatgtcgtagtgggtaaagctccctcttcggagggagcatcagag

SEQ ID NO: 22105 - RNA, 90 nt, synthetic construct
  misc_feature 1..90: note = engineered ribonucleic acid scaffold (ERS) sequence
  source 1..90: mol_type = other RNA
actggcgcttgtatcttgattactctgagcgccatcaccagcgactatgtcgtagtgggtaaagctccctcttcggagggagcatcagag

SEQ ID NO: 22106 - RNA, 89 nt, synthetic construct
  misc_feature 1..89: note = engineered ribonucleic acid scaffold (ERS) sequence
  source 1..89: mol_type = other RNA
actggcgcttgtatcagattactctgagcgccatcaccagcgactatgtcgtagtgggtaaagctccctcttcggagggagcatcagag

SEQ ID NO: 22107 - RNA, 89 nt, synthetic construct
  misc_feature 1..89: note = engineered ribonucleic acid scaffold (ERS) sequence
  source 1..89: mol_type = other RNA
actggcgcttgtatcggattactctgagcgccatcaccagcgactatgtcgtagtgggtaaagctccctcttcggagggagcatcagag

SEQ ID NO: 22108 - RNA, 90 nt, synthetic construct
  misc_feature 1..90: note = engineered ribonucleic acid scaffold (ERS) sequence
  source 1..90: mol_type = other RNA
actggcgcttgtatctgaattactctgagcgccatcaccagcgactatgtcgtagtgggtaaagctccctcttcggagggagcatcagag

SEQ ID NO: 22109 - RNA, 90 nt, synthetic construct
  misc_feature 1..90: note = engineered ribonucleic acid scaffold (ERS) sequence
  source 1..90: mol_type = other RNA
actggcgcttgtatctgtattactctgagcgccatcaccagcgactatgtcgtagtgggtaaagctccctcttcggagggagcatcagag

SEQ ID NO: 22110 - RNA, 89 nt, synthetic construct
  misc_feature 1..89: note = engineered ribonucleic acid scaffold (ERS) sequence
  source 1..89: mol_type = other RNA
actggcgcttgtatctggttactctgagcgccatcaccagcgactatgtcgtagtgggtaaagctccctcttcggagggagcatcagag

SEQ ID NO: 22111 - RNA, 89 nt, synthetic construct
  misc_feature 1..89: note = engineered ribonucleic acid scaffold (ERS) sequence
  source 1..89: mol_type = other RNA
actggcgcttgtatctgtttactctgagcgccatcaccagcgactatgtcgtagtgggtaaagctccctcttcggagggagcatcagag

SEQ ID NO: 22112 - RNA, 90 nt, synthetic construct
  misc_feature 1..90: note = engineered ribonucleic acid scaffold (ERS) sequence
  source 1..90: mol_type = other RNA
actggcgcttgtatctgatttactctgagcgccatcaccagcgactatgtcgtagtgggtaaagctccctcttcggagggagcatcagag

SEQ ID NO: 22113 - RNA, 89 nt, synthetic construct
  misc_feature 1..89: note = engineered ribonucleic acid scaffold (ERS) sequence
  source 1..89: mol_type = other RNA
actggcgcttgtatctgattgctctgagcgccatcaccagcgactatgtcgtagtgggtaaagctccctcttcggagggagcatcagag

SEQ ID NO: 22114 - RNA, 92 nt, synthetic construct
  misc_feature 1..92: note = engineered ribonucleic acid scaffold (ERS) sequence
  source 1..92: mol_type = other RNA
actggcgctttttatatctgattactctgagcgccatcaccagcgactatgtcgtagtgggtaaagctccctcttcggagggagcatcagag

SEQ ID NO: 22115 - RNA, 90 nt, synthetic construct
  misc_feature 1..90: note = engineered ribonucleic acid scaffold (ERS) sequence
  source 1..90: mol_type = other RNA
actggcgcttttaatctgattactctgagcgccatcaccagcgactatgtcgtagtgggtaaagctccctcttcggagggagcatcagag

SEQ ID NO: 22116 - RNA, 88 nt, synthetic construct
  misc_feature 1..88: note = engineered ribonucleic acid scaffold (ERS) sequence
  source 1..88: mol_type = other RNA
actggcgcttttactgattactctgagcgccatcaccagcgactatgtcgtagtgggtaaagctccctcttcggagggagcatcagag

SEQ ID NO: 22117 - RNA, 89 nt, synthetic construct
  misc_feature 1..89: note = engineered ribonucleic acid scaffold (ERS) sequence
  source 1..89: mol_type = other RNA
actggcgcttttaactgattactctgagcgccatcaccagcgactatgtcgtagtgggtaaagctccctcttcggagggagcatcagag

SEQ ID NO: 22118 - RNA, 89 nt, synthetic construct
  misc_feature 1..89: note = engineered ribonucleic acid scaffold (ERS) sequence
  source 1..89: mol_type = other RNA
actggcgcttttacctgattactctgagcgccatcaccagcgactatgtcgtagtgggtaaagctccctcttcggagggagcatcagag

SEQ ID NO: 22119 - RNA, 89 nt, synthetic construct
  misc_feature 1..89: note = engineered ribonucleic acid scaffold (ERS) sequence
  source 1..89: mol_type = other RNA
actggcgcttttagctgattactctgagcgccatcaccagcgactatgtcgtagtgggtaaagctccctcttcggagggagcatcagag

SEQ ID NO: 22120 - RNA, 91 nt, synthetic construct
  misc_feature 1..91: note = engineered ribonucleic acid scaffold (ERS) sequence
  source 1..91: mol_type = other RNA
actggcgcttttattactgattactctgagcgccatcaccagcgactatgtcgtagtgggtaaagctccctcttcggagggagcatcagag

SEQ ID NO: 22121 - RNA, 89 nt, synthetic construct
  misc_feature 1..89: note = engineered ribonucleic acid scaffold (ERS) sequence
  source 1..89: mol_type = other RNA
actggcgcttttatatgattactctgagcgccatcaccagcgactatgtcgtagtgggtaaagctccctcttcggagggagcatcagag

SEQ ID NO: 22122 - RNA, 89 nt, synthetic construct
  misc_feature 1..89: note = engineered ribonucleic acid scaffold (ERS) sequence
  source 1..89: mol_type = other RNA
actggcgcttttatgtgattactctgagcgccatcaccagcgactatgtcgtagtgggtaaagctccctcttcggagggagcatcagag

SEQ ID NO: 22123 - RNA, 89 nt, synthetic construct
  misc_feature 1..89: note = engineered ribonucleic acid scaffold (ERS) sequence
  source 1..89: mol_type = other RNA
actggcgcttttatttgattactctgagcgccatcaccagcgactatgtcgtagtgggtaaagctccctcttcggagggagcatcagag

SEQ ID NO: 22124 - RNA, 90 nt, synthetic construct
  misc_feature 1..90: note = engineered ribonucleic acid scaffold (ERS) sequence
  source 1..90: mol_type = other RNA
actggcgcttttatcttgattactctgagcgccatcaccagcgactatgtcgtagtgggtaaagctccctcttcggagggagcatcagag

SEQ ID NO: 22125 - RNA, 89 nt, synthetic construct
  misc_feature 1..89: note = engineered ribonucleic acid scaffold (ERS) sequence
  source 1..89: mol_type = other RNA
actggcgcttttatcagattactctgagcgccatcaccagcgactatgtcgtagtgggtaaagctccctcttcggagggagcatcagag

SEQ ID NO: 22126 - RNA, 89 nt, synthetic construct
  misc_feature 1..89: note = engineered ribonucleic acid scaffold (ERS) sequence
  source 1..89: mol_type = other RNA
actggcgcttttatcggattactctgagcgccatcaccagcgactatgtcgtagtgggtaaagctccctcttcggagggagcatcagag

SEQ ID NO: 22127 - RNA, 90 nt, synthetic construct
  misc_feature 1..90: note = engineered ribonucleic acid scaffold (ERS) sequence
  source 1..90: mol_type = other RNA
actggcgcttttatctgaattactctgagcgccatcaccagcgactatgtcgtagtgggtaaagctccctcttcggagggagcatcagag

SEQ ID NO: 22128 - RNA, 90 nt, synthetic construct
  misc_feature 1..90: note = engineered ribonucleic acid scaffold (ERS) sequence
  source 1..90: mol_type = other RNA
actggcgcttttatctgtattactctgagcgccatcaccagcgactatgtcgtagtgggtaaagctccctcttcggagggagcatcagag

SEQ ID NO: 22129 - RNA, 89 nt, synthetic construct
  misc_feature 1..89: note = engineered ribonucleic acid scaffold (ERS) sequence
  source 1..89: mol_type = other RNA
actggcgcttttatctggttactctgagcgccatcaccagcgactatgtcgtagtgggtaaagctccctcttcggagggagcatcagag

SEQ ID NO: 22130 - RNA, 89 nt, synthetic construct
  misc_feature 1..89: note = engineered ribonucleic acid scaffold (ERS) sequence
  source 1..89: mol_type = other RNA
actggcgcttttatctgtttactctgagcgccatcaccagcgactatgtcgtagtgggtaaagctccctcttcggagggagcatcagag

SEQ ID NO: 22131 - RNA, 90 nt, synthetic construct
  misc_feature 1..90: note = engineered ribonucleic acid scaffold (ERS) sequence
  source 1..90: mol_type = other RNA
actggcgcttttatctgatttactctgagcgccatcaccagcgactatgtcgtagtgggtaaagctccctcttcggagggagcatcagag

SEQ ID NO: 22132 - RNA, 89 nt, synthetic construct
  misc_feature 1..89: note = engineered ribonucleic acid scaffold (ERS) sequence
  source 1..89: mol_type = other RNA
actggcgcttttatctgattgctctgagcgccatcaccagcgactatgtcgtagtgggtaaagctccctcttcggagggagcatcagag

SEQ ID NO: 22133 - RNA, 92 nt, synthetic construct
  misc_feature 1..92: note = engineered ribonucleic acid scaffold (ERS) sequence
  source 1..92: mol_type = other RNA
actggcgctttttatatctgattactttgagcgccatcaccagcgactatgtcgtagtgggtaaagctccctcttcggagggagcatcagag

SEQ ID NO: 22134 - RNA, 90 nt, synthetic construct
  misc_feature 1..90: note = engineered ribonucleic acid scaffold (ERS) sequence
  source 1..90: mol_type = other RNA
actggcgcttttaatctgattactttgagcgccatcaccagcgactatgtcgtagtgggtaaagctccctcttcggagggagcatcagag

SEQ ID NO: 22135 - RNA, 88 nt, synthetic construct
  misc_feature 1..88: note = engineered ribonucleic acid scaffold (ERS) sequence
  source 1..88: mol_type = other RNA
actggcgcttttactgattactttgagcgccatcaccagcgactatgtcgtagtgggtaaagctccctcttcggagggagcatcagag

SEQ ID NO: 22136 - RNA, 89 nt, synthetic construct
  misc_feature 1..89: note = engineered ribonucleic acid scaffold (ERS) sequence
  source 1..89: mol_type = other RNA
actggcgcttttaactgattactttgagcgccatcaccagcgactatgtcgtagtgggtaaagctccctcttcggagggagcatcagag

SEQ ID NO: 22137 - RNA, 89 nt, synthetic construct
  misc_feature 1..89: note = engineered ribonucleic acid scaffold (ERS) sequence
  source 1..89: mol_type = other RNA
actggcgcttttacctgattactttgagcgccatcaccagcgactatgtcgtagtgggtaaagctccctcttcggagggagcatcagag

SEQ ID NO: 22138 - RNA, 89 nt, synthetic construct
  misc_feature 1..89: note = engineered ribonucleic acid scaffold (ERS) sequence
  source 1..89: mol_type = other RNA
actggcgcttttagctgattactttgagcgccatcaccagcgactatgtcgtagtgggtaaagctccctcttcggagggagcatcagag

SEQ ID NO: 22139 - RNA, 91 nt, synthetic construct
  misc_feature 1..91: note = engineered ribonucleic acid scaffold (ERS) sequence
  source 1..91: mol_type = other RNA
actggcgcttttattactgattactttgagcgccatcaccagcgactatgtcgtagtgggtaaagctccctcttcggagggagcatcagag

SEQ ID NO: 22140 - RNA, 89 nt, synthetic construct
  misc_feature 1..89: note = engineered ribonucleic acid scaffold (ERS) sequence
  source 1..89: mol_type = other RNA
actggcgcttttatatgattactttgagcgccatcaccagcgactatgtcgtagtgggtaaagctccctcttcggagggagcatcagag

SEQ ID NO: 22141 - RNA, 89 nt, synthetic construct
  misc_feature 1..89: note = engineered ribonucleic acid scaffold (ERS) sequence
  source 1..89: mol_type = other RNA
actggcgcttttatgtgattactttgagcgccatcaccagcgactatgtcgtagtgggtaaagctccctcttcggagggagcatcagag

SEQ ID NO: 22142 - RNA, 89 nt, synthetic construct
  misc_feature 1..89: note = engineered ribonucleic acid scaffold (ERS) sequence
  source 1..89: mol_type = other RNA
actggcgcttttatttgattactttgagcgccatcaccagcgactatgtcgtagtgggtaaagctccctcttcggagggagcatcagag

SEQ ID NO: 22143 - RNA, 90 nt, synthetic construct
  misc_feature 1..90: note = engineered ribonucleic acid scaffold (ERS) sequence
  source 1..90: mol_type = other RNA
actggcgcttttatcttgattactttgagcgccatcaccagcgactatgtcgtagtgggtaaagctccctcttcggagggagcatcagag

SEQ ID NO: 22144 - RNA, 89 nt, synthetic construct
  misc_feature 1..89: note = engineered ribonucleic acid scaffold (ERS) sequence
  source 1..89: mol_type = other RNA
actggcgcttttatcagattactttgagcgccatcaccagcgactatgtcgtagtgggtaaagctccctcttcggagggagcatcagag

SEQ ID NO: 22145 - RNA, 89 nt, synthetic construct
  misc_feature 1..89: note = engineered ribonucleic acid scaffold (ERS) sequence
  source 1..89: mol_type = other RNA
actggcgcttttatcggattactttgagcgccatcaccagcgactatgtcgtagtgggtaaagctccctcttcggagggagcatcagag

SEQ ID NO: 22146 - RNA, 90 nt, synthetic construct
  misc_feature 1..90: note = engineered ribonucleic acid scaffold (ERS) sequence
  source 1..90: mol_type = other RNA
actggcgcttttatctgaattactttgagcgccatcaccagcgactatgtcgtagtgggtaaagctccctcttcggagggagcatcagag

SEQ ID NO: 22147 - RNA, 90 nt, synthetic construct
  misc_feature 1..90: note = engineered ribonucleic acid scaffold (ERS) sequence
  source 1..90: mol_type = other RNA
actggcgcttttatctgtattactttgagcgccatcaccagcgactatgtcgtagtgggtaaagctccctcttcggagggagcatcagag

SEQ ID NO: 22148 - RNA, 89 nt, synthetic construct
  misc_feature 1..89: note = engineered ribonucleic acid scaffold (ERS) sequence
  source 1..89: mol_type = other RNA
actggcgcttttatctggttactttgagcgccatcaccagcgactatgtcgtagtgggtaaagctccctcttcggagggagcatcagag

SEQ ID NO: 22149 - RNA, 89 nt, synthetic construct
  misc_feature 1..89: note = engineered ribonucleic acid scaffold (ERS) sequence
  source 1..89: mol_type = other RNA
actggcgcttttatctgtttactttgagcgccatcaccagcgactatgtcgtagtgggtaaagctccctcttcggagggagcatcagag

SEQ ID NO: 22150 - RNA, 90 nt, synthetic construct
  misc_feature 1..90: note = engineered ribonucleic acid scaffold (ERS) sequence
  source 1..90: mol_type = other RNA
actggcgcttttatctgatttactttgagcgccatcaccagcgactatgtcgtagtgggtaaagctccctcttcggagggagcatcagag

SEQ ID NO: 22151 - RNA, 89 nt, synthetic construct
  misc_feature 1..89: note = engineered ribonucleic acid scaffold (ERS) sequence
  source 1..89: mol_type = other RNA
actggcgcttttatctgattgctttgagcgccatcaccagcgactatgtcgtagtgggtaaagctccctcttcggagggagcatcagag

SEQ ID NO: 22152 - RNA, 92 nt, synthetic construct
  misc_feature 1..92: note = engineered ribonucleic acid scaffold (ERS) sequence
  source 1..92: mol_type = other RNA
actggcgctttttatatctgattactctgagcgccatcaccagcgactatgtcgtagtgggtaaagctccctcttcggagggagcatcaaag

SEQ ID NO: 22153 - RNA, 90 nt, synthetic construct
  misc_feature 1..90: note = engineered ribonucleic acid scaffold (ERS) sequence
  source 1..90: mol_type = other RNA
actggcgcttttaatctgattactctgagcgccatcaccagcgactatgtcgtagtgggtaaagctccctcttcggagggagcatcaaag

SEQ ID NO: 22154 - RNA, 88 nt, synthetic construct
  misc_feature 1..88: note = engineered ribonucleic acid scaffold (ERS) sequence
  source 1..88: mol_type = other RNA
actggcgcttttactgattactctgagcgccatcaccagcgactatgtcgtagtgggtaaagctccctcttcggagggagcatcaaag

SEQ ID NO: 22155 - RNA, 89 nt, synthetic construct
  misc_feature 1..89: note = engineered ribonucleic acid scaffold (ERS) sequence
  source 1..89: mol_type = other RNA
actggcgcttttaactgattactctgagcgccatcaccagcgactatgtcgtagtgggtaaagctccctcttcggagggagcatcaaag

SEQ ID NO: 22156 - RNA, 89 nt, synthetic construct
  misc_feature 1..89: note = engineered ribonucleic acid scaffold (ERS) sequence
  source 1..89: mol_type = other RNA
actggcgcttttacctgattactctgagcgccatcaccagcgactatgtcgtagtgggtaaagctccctcttcggagggagcatcaaag

SEQ ID NO: 22157 - RNA, 89 nt, synthetic construct
  misc_feature 1..89: note = engineered ribonucleic acid scaffold (ERS) sequence
  source 1..89: mol_type = other RNA
actggcgcttttagctgattactctgagcgccatcaccagcgactatgtcgtagtgggtaaagctccctcttcggagggagcatcaaag

SEQ ID NO: 22158 - RNA, 91 nt, synthetic construct
  misc_feature 1..91: note = engineered ribonucleic acid scaffold (ERS) sequence
  source 1..91: mol_type = other RNA
actggcgcttttattactgattactctgagcgccatcaccagcgactatgtcgtagtgggtaaagctccctcttcggagggagcatcaaag

SEQ ID NO: 22159 - RNA, 89 nt, synthetic construct
  misc_feature 1..89: note = engineered ribonucleic acid scaffold (ERS) sequence
  source 1..89: mol_type = other RNA
actggcgcttttatatgattactctgagcgccatcaccagcgactatgtcgtagtgggtaaagctccctcttcggagggagcatcaaag

SEQ ID NO: 22160 - RNA, 89 nt, synthetic construct
  misc_feature 1..89: note = engineered ribonucleic acid scaffold (ERS) sequence
  source 1..89: mol_type = other RNA
actggcgcttttatgtgattactctgagcgccatcaccagcgactatgtcgtagtgggtaaagctccctcttcggagggagcatcaaag

SEQ ID NO: 22161 - RNA, 89 nt, synthetic construct
  misc_feature 1..89: note = engineered ribonucleic acid scaffold (ERS) sequence
  source 1..89: mol_type = other RNA
actggcgcttttatttgattactctgagcgccatcaccagcgactatgtcgtagtgggtaaagctccctcttcggagggagcatcaaag

SEQ ID NO: 22162 - RNA, 90 nt, synthetic construct
  misc_feature 1..90: note = engineered ribonucleic acid scaffold (ERS) sequence
  source 1..90: mol_type = other RNA
actggcgcttttatcttgattactctgagcgccatcaccagcgactatgtcgtagtgggtaaagctccctcttcggagggagcatcaaag

SEQ ID NO: 22163 - RNA, 89 nt, synthetic construct
  misc_feature 1..89: note = engineered ribonucleic acid scaffold (ERS) sequence
  source 1..89: mol_type = other RNA
actggcgcttttatcagattactctgagcgccatcaccagcgactatgtcgtagtgggtaaagctccctcttcggagggagcatcaaag

SEQ ID NO: 22164 - RNA, 89 nt, synthetic construct
  misc_feature 1..89: note = engineered ribonucleic acid scaffold (ERS) sequence
  source 1..89: mol_type = other RNA
actggcgcttttatcggattactctgagcgccatcaccagcgactatgtcgtagtgggtaaagctccctcttcggagggagcatcaaag

SEQ ID NO: 22165 - RNA, 90 nt, synthetic construct
  misc_feature 1..90: note = engineered ribonucleic acid scaffold (ERS) sequence
  source 1..90: mol_type = other RNA
actggcgcttttatctgaattactctgagcgccatcaccagcgactatgtcgtagtgggtaaagctccctcttcggagggagcatcaaag

SEQ ID NO: 22166 - RNA, 90 nt, synthetic construct
  misc_feature 1..90: note = engineered ribonucleic acid scaffold (ERS) sequence
  source 1..90: mol_type = other RNA
actggcgcttttatctgtattactctgagcgccatcaccagcgactatgtcgtagtgggtaaagctccctcttcggagggagcatcaaag

SEQ ID NO: 22167 - RNA, 89 nt, synthetic construct
  misc_feature 1..89: note = engineered ribonucleic acid scaffold (ERS) sequence
  source 1..89: mol_type = other RNA
actggcgcttttatctggttactctgagcgccatcaccagcgactatgtcgtagtgggtaaagctccctcttcggagggagcatcaaag

SEQ ID NO: 22168 - RNA, 89 nt, synthetic construct
  misc_feature 1..89: note = engineered ribonucleic acid scaffold (ERS) sequence
  source 1..89: mol_type = other RNA
actggcgcttttatctgtttactctgagcgccatcaccagcgactatgtcgtagtgggtaaagctccctcttcggagggagcatcaaag

SEQ ID NO: 22169 - RNA, 90 nt, synthetic construct
  misc_feature 1..90: note = engineered ribonucleic acid scaffold (ERS) sequence
  source 1..90: mol_type = other RNA
actggcgcttttatctgatttactctgagcgccatcaccagcgactatgtcgtagtgggtaaagctccctcttcggagggagcatcaaag

SEQ ID NO: 22170 - RNA, 89 nt, synthetic construct
  misc_feature 1..89: note = engineered ribonucleic acid scaffold (ERS) sequence
  source 1..89: mol_type = other RNA
actggcgcttttatctgattgctctgagcgccatcaccagcgactatgtcgtagtgggtaaagctccctcttcggagggagcatcaaag

SEQ ID NO: 22171 - RNA, 91 nt, synthetic construct
  misc_feature 1..91: note = engineered ribonucleic acid scaffold (ERS) sequence
  source 1..91: mol_type = other RNA
actggcgcttctatatctgattactctgagcgccatcaccagcgactatgtcgtagtgggtaaagctccctcttcggagggagcctcagag

SEQ ID NO: 22172 - RNA, 90 nt, synthetic construct
  misc_feature 1..90: note = engineered ribonucleic acid scaffold (ERS) sequence
  source 1..90: mol_type = other RNA
actggcgcttctaatctgattactctgagcgccatcaccagcgactatgtcgtagtgggtaaagctccctcttcggagggagcctcagag

SEQ ID NO: 22173 - RNA, 88 nt, synthetic construct
  misc_feature 1..88: note = engineered ribonucleic acid scaffold (ERS) sequence
  source 1..88: mol_type = other RNA
actggcgcttctactgattactctgagcgccatcaccagcgactatgtcgtagtgggtaaagctccctcttcggagggagcctcagag

SEQ ID NO: 22174 - RNA, 89 nt, synthetic construct
  misc_feature 1..89: note = engineered ribonucleic acid scaffold (ERS) sequence
  source 1..89: mol_type = other RNA
actggcgcttctaactgattactctgagcgccatcaccagcgactatgtcgtagtgggtaaagctccctcttcggagggagcctcagag

SEQ ID NO: 22175 - RNA, 89 nt, synthetic construct
  misc_feature 1..89: note = engineered ribonucleic acid scaffold (ERS) sequence
  source 1..89: mol_type = other RNA
actggcgcttctacctgattactctgagcgccatcaccagcgactatgtcgtagtgggtaaagctccctcttcggagggagcctcagag

SEQ ID NO: 22176 - RNA, 89 nt, synthetic construct
  misc_feature 1..89: note = engineered ribonucleic acid scaffold (ERS) sequence
  source 1..89: mol_type = other RNA
actggcgcttctagctgattactctgagcgccatcaccagcgactatgtcgtagtgggtaaagctccctcttcggagggagcctcagag

SEQ ID NO: 22177 - RNA, 91 nt, synthetic construct
  misc_feature 1..91: note = engineered ribonucleic acid scaffold (ERS) sequence
  source 1..91: mol_type = other RNA
actggcgcttctattactgattactctgagcgccatcaccagcgactatgtcgtagtgggtaaagctccctcttcggagggagcctcagag

SEQ ID NO: 22178 - RNA, 89 nt, synthetic construct
  misc_feature 1..89: note = engineered ribonucleic acid scaffold (ERS) sequence
  source 1..89: mol_type = other RNA
actggcgcttctatatgattactctgagcgccatcaccagcgactatgtcgtagtgggtaaagctccctcttcggagggagcctcagag

SEQ ID NO: 22179 - RNA, 89 nt, synthetic construct
  misc_feature 1..89: note = engineered ribonucleic acid scaffold (ERS) sequence
  source 1..89: mol_type = other RNA
actggcgcttctatgtgattactctgagcgccatcaccagcgactatgtcgtagtgggtaaagctccctcttcggagggagcctcagag

SEQ ID NO: 22180 - RNA, 89 nt, synthetic construct
  misc_feature 1..89: note = engineered ribonucleic acid scaffold (ERS) sequence
  source 1..89: mol_type = other RNA
actggcgcttctatttgattactctgagcgccatcaccagcgactatgtcgtagtgggtaaagctccctcttcggagggagcctcagag

SEQ ID NO: 22181 - RNA, 90 nt, synthetic construct
  misc_feature 1..90: note = engineered ribonucleic acid scaffold (ERS) sequence
  source 1..90: mol_type = other RNA
actggcgcttctatcttgattactctgagcgccatcaccagcgactatgtcgtagtgggtaaagctccctcttcggagggagcctcagag

SEQ ID NO: 22182 - RNA, 89 nt, synthetic construct
  misc_feature 1..89: note = engineered ribonucleic acid scaffold (ERS) sequence
  source 1..89: mol_type = other RNA
actggcgcttctatcagattactctgagcgccatcaccagcgactatgtcgtagtgggtaaagctccctcttcggagggagcctcagag

SEQ ID NO: 22183 - RNA, 89 nt, synthetic construct
  misc_feature 1..89: note = engineered ribonucleic acid scaffold (ERS) sequence
  source 1..89: mol_type = other RNA
actggcgcttctatcggattactctgagcgccatcaccagcgactatgtcgtagtgggtaaagctccctcttcggagggagcctcagag

SEQ ID NO: 22184 - RNA, 90 nt, synthetic construct
  misc_feature 1..90: note = engineered ribonucleic acid scaffold (ERS) sequence
  source 1..90: mol_type = other RNA
actggcgcttctatctgaattactctgagcgccatcaccagcgactatgtcgtagtgggtaaagctccctcttcggagggagcctcagag

SEQ ID NO: 22185 - RNA, 90 nt, synthetic construct
  misc_feature 1..90: note = engineered ribonucleic acid scaffold (ERS) sequence
  source 1..90: mol_type = other RNA
actggcgcttctatctgtattactctgagcgccatcaccagcgactatgtcgtagtgggtaaagctccctcttcggagggagcctcagag

SEQ ID NO: 22186 - RNA, 89 nt, synthetic construct
  misc_feature 1..89: note = engineered ribonucleic acid scaffold (ERS) sequence
  source 1..89: mol_type = other RNA
actggcgcttctatctggttactctgagcgccatcaccagcgactatgtcgtagtgggtaaagctccctcttcggagggagcctcagag

SEQ ID NO: 22187 - RNA, 89 nt, synthetic construct
  misc_feature 1..89: note = engineered ribonucleic acid scaffold (ERS) sequence
  source 1..89: mol_type = other RNA
actggcgcttctatctgtttactctgagcgccatcaccagcgactatgtcgtagtgggtaaagctccctcttcggagggagcctcagag

SEQ ID NO: 22188 - RNA, 90 nt, synthetic construct
  misc_feature 1..90: note = engineered ribonucleic acid scaffold (ERS) sequence
  source 1..90: mol_type = other RNA
actggcgcttctatctgatttactctgagcgccatcaccagcgactatgtcgtagtgggtaaagctccctcttcggagggagcctcagag

SEQ ID NO: 22189 - RNA, 89 nt, synthetic construct
  misc_feature 1..89: note = engineered ribonucleic acid scaffold (ERS) sequence
  source 1..89: mol_type = other RNA
actggcgcttctatctgattgctctgagcgccatcaccagcgactatgtcgtagtgggtaaagctccctcttcggagggagcctcagag

SEQ ID NO: 22190 - RNA, 91 nt, synthetic construct
  misc_feature 1..91: note = engineered ribonucleic acid scaffold (ERS) sequence
  source 1..91: mol_type = other RNA
actggcgcttctatatctgattactctgagcgccatcaccagcgactatgtcgtagtgggtaaagctccctcttcggagggagcgtcagag

SEQ ID NO: 22191 - RNA, 90 nt, synthetic construct
  misc_feature 1..90: note = engineered ribonucleic acid scaffold (ERS) sequence
  source 1..90: mol_type = other RNA
actggcgcttctaatctgattactctgagcgccatcaccagcgactatgtcgtagtgggtaaagctccctcttcggagggagcgtcagag

SEQ ID NO: 22192 - RNA, 88 nt, synthetic construct
  misc_feature 1..88: note = engineered ribonucleic acid scaffold (ERS) sequence
  source 1..88: mol_type = other RNA
actggcgcttctactgattactctgagcgccatcaccagcgactatgtcgtagtgggtaaagctccctcttcggagggagcgtcagag

SEQ ID NO: 22193 - RNA, 89 nt, synthetic construct
  misc_feature 1..89: note = engineered ribonucleic acid scaffold (ERS) sequence
  source 1..89: mol_type = other RNA
actggcgcttctaactgattactctgagcgccatcaccagcgactatgtcgtagtgggtaaagctccctcttcggagggagcgtcagag

SEQ ID NO: 22194 - RNA, 89 nt, synthetic construct
  misc_feature 1..89: note = engineered ribonucleic acid scaffold (ERS) sequence
  source 1..89: mol_type = other RNA
actggcgcttctacctgattactctgagcgccatcaccagcgactatgtcgtagtgggtaaagctccctcttcggagggagcgtcagag

SEQ ID NO: 22195 - RNA, 89 nt, synthetic construct
  misc_feature 1..89: note = engineered ribonucleic acid scaffold (ERS) sequence
  source 1..89: mol_type = other RNA
actggcgcttctagctgattactctgagcgccatcaccagcgactatgtcgtagtgggtaaagctccctcttcggagggagcgtcagag

SEQ ID NO: 22196 - RNA, 91 nt, synthetic construct
  misc_feature 1..91: note = engineered ribonucleic acid scaffold (ERS) sequence
  source 1..91: mol_type = other RNA
actggcgcttctattactgattactctgagcgccatcaccagcgactatgtcgtagtgggtaaagctccctcttcggagggagcgtcagag

SEQ ID NO: 22197 - RNA, 89 nt, synthetic construct
  misc_feature 1..89: note = engineered ribonucleic acid scaffold (ERS) sequence
  source 1..89: mol_type = other RNA
actggcgcttctatatgattactctgagcgccatcaccagcgactatgtcgtagtgggtaaagctccctcttcggagggagcgtcagag

SEQ ID NO: 22198 - RNA, 89 nt, synthetic construct
  misc_feature 1..89: note = engineered ribonucleic acid scaffold (ERS) sequence
  source 1..89: mol_type = other RNA
actggcgcttctatgtgattactctgagcgccatcaccagcgactatgtcgtagtgggtaaagctccctcttcggagggagcgtcagag

SEQ ID NO: 22199 - RNA, 89 nt, synthetic construct
  misc_feature 1..89: note = engineered ribonucleic acid scaffold (ERS) sequence
  source 1..89: mol_type = other RNA
actggcgcttctatttgattactctgagcgccatcaccagcgactatgtcgtagtgggtaaagctccctcttcggagggagcgtcagag

SEQ ID NO: 22200 - RNA, 90 nt, synthetic construct
  misc_feature 1..90: note = engineered ribonucleic acid scaffold (ERS) sequence
  source 1..90: mol_type = other RNA
actggcgcttctatcttgattactctgagcgccatcaccagcgactatgtcgtagtgggtaaagctccctcttcggagggagcgtcagag

SEQ ID NO: 22201 - RNA, 89 nt, synthetic construct
  misc_feature 1..89: note = engineered ribonucleic acid scaffold (ERS) sequence
  source 1..89: mol_type = other RNA
actggcgcttctatcagattactctgagcgccatcaccagcgactatgtcgtagtgggtaaagctccctcttcggagggagcgtcagag

SEQ ID NO: 22202 - RNA, 89 nt, synthetic construct
  misc_feature 1..89: note = engineered ribonucleic acid scaffold (ERS) sequence
  source 1..89: mol_type = other RNA
actggcgcttctatcggattactctgagcgccatcaccagcgactatgtcgtagtgggtaaagctccctcttcggagggagcgtcagag

SEQ ID NO: 22203 - RNA, 90 nt, synthetic construct
  misc_feature 1..90: note = engineered ribonucleic acid scaffold (ERS) sequence
  source 1..90: mol_type = other RNA
actggcgcttctatctgaattactctgagcgccatcaccagcgactatgtcgtagtgggtaaagctccctcttcggagggagcgtcagag

SEQ ID NO: 22204 - RNA, 90 nt, synthetic construct
  misc_feature 1..90: note = engineered ribonucleic acid scaffold (ERS) sequence
  source 1..90: mol_type = other RNA
actggcgcttctatctgtattactctgagcgccatcaccagcgactatgtcgtagtgggtaaagctccctcttcggagggagcgtcagag

SEQ ID NO: 22205 - RNA, 89 nt, synthetic construct
  misc_feature 1..89: note = engineered ribonucleic acid scaffold (ERS) sequence
  source 1..89: mol_type = other RNA
actggcgcttctatctggttactctgagcgccatcaccagcgactatgtcgtagtgggtaaagctccctcttcggagggagcgtcagag

SEQ ID NO: 22206 - RNA, 89 nt, synthetic construct
  misc_feature 1..89: note = engineered ribonucleic acid scaffold (ERS) sequence
  source 1..89: mol_type = other RNA
actggcgcttctatctgtttactctgagcgccatcaccagcgactatgtcgtagtgggtaaagctccctcttcggagggagcgtcagag

SEQ ID NO: 22207 - RNA, 90 nt, synthetic construct
  misc_feature 1..90: note = engineered ribonucleic acid scaffold (ERS) sequence
  source 1..90: mol_type = other RNA
actggcgcttctatctgatttactctgagcgccatcaccagcgactatgtcgtagtgggtaaagctccctcttcggagggagcgtcagag

SEQ ID NO: 22208 - RNA, 89 nt, synthetic construct
  misc_feature 1..89: note = engineered ribonucleic acid scaffold (ERS) sequence
  source 1..89: mol_type = other RNA
actggcgcttctatctgattgctctgagcgccatcaccagcgactatgtcgtagtgggtaaagctccctcttcggagggagcgtcagag

SEQ ID NO: 22209 - RNA, 91 nt, synthetic construct
  misc_feature 1..91: note = engineered ribonucleic acid scaffold (ERS) sequence
  source 1..91: mol_type = other RNA
actggcgcttctatatctgattactctgagcgccatcaccagcgactatgtcgtagtgggtaaagctccctcttcggagggagcatcaaag

SEQ ID NO: 22210 - RNA, 90 nt, synthetic construct
  misc_feature 1..90: note = engineered ribonucleic acid scaffold (ERS) sequence
  source 1..90: mol_type = other RNA
actggcgcttctaatctgattactctgagcgccatcaccagcgactatgtcgtagtgggtaaagctccctcttcggagggagcatcaaag

SEQ ID NO: 22211 - RNA, 88 nt, synthetic construct
  misc_feature 1..88: note = engineered ribonucleic acid scaffold (ERS) sequence
  source 1..88: mol_type = other RNA
actggcgcttctactgattactctgagcgccatcaccagcgactatgtcgtagtgggtaaagctccctcttcggagggagcatcaaag

SEQ ID NO: 22212 - RNA, 89 nt, synthetic construct
  misc_feature 1..89: note = engineered ribonucleic acid scaffold (ERS) sequence
  source 1..89: mol_type = other RNA
actggcgcttctaactgattactctgagcgccatcaccagcgactatgtcgtagtgggtaaagctccctcttcggagggagcatcaaag

SEQ ID NO: 22213 - RNA, 89 nt, synthetic construct
  misc_feature 1..89: note = engineered ribonucleic acid scaffold (ERS) sequence
  source 1..89: mol_type = other RNA
actggcgcttctacctgattactctgagcgccatcaccagcgactatgtcgtagtgggtaaagctccctcttcggagggagcatcaaag

SEQ ID NO: 22214 - RNA, 89 nt, synthetic construct
  misc_feature 1..89: note = engineered ribonucleic acid scaffold (ERS) sequence
  source 1..89: mol_type = other RNA
actggcgcttctagctgattactctgagcgccatcaccagcgactatgtcgtagtgggtaaagctccctcttcggagggagcatcaaag

SEQ ID NO: 22215 - RNA, 91 nt, synthetic construct
  misc_feature 1..91: note = engineered ribonucleic acid scaffold (ERS) sequence
  source 1..91: mol_type = other RNA
actggcgcttctattactgattactctgagcgccatcaccagcgactatgtcgtagtgggtaaagctccctcttcggagggagcatcaaag

SEQ ID NO: 22216 - RNA, 89 nt, synthetic construct
  misc_feature 1..89: note = engineered ribonucleic acid scaffold (ERS) sequence
  source 1..89: mol_type = other RNA
actggcgcttctatatgattactctgagcgccatcaccagcgactatgtcgtagtgggtaaagctccctcttcggagggagcatcaaag

SEQ ID NO: 22217 - RNA, 89 nt, synthetic construct
  misc_feature 1..89: note = engineered ribonucleic acid scaffold (ERS) sequence
  source 1..89: mol_type = other RNA
actggcgcttctatgtgattactctgagcgccatcaccagcgactatgtcgtagtgggtaaagctccctcttcggagggagcatcaaag

SEQ ID NO: 22218 - RNA, 89 nt, synthetic construct
  misc_feature 1..89: note = engineered ribonucleic acid scaffold (ERS) sequence
  source 1..89: mol_type = other RNA
actggcgcttctatttgattactctgagcgccatcaccagcgactatgtcgtagtgggtaaagctccctcttcggagggagcatcaaag

SEQ ID NO: 22219 - RNA, 90 nt, synthetic construct
  misc_feature 1..90: note = engineered ribonucleic acid scaffold (ERS) sequence
  source 1..90: mol_type = other RNA
actggcgcttctatcttgattactctgagcgccatcaccagcgactatgtcgtagtgggtaaagctccctcttcggagggagcatcaaag

SEQ ID NO: 22220 - RNA, 89 nt, synthetic construct
  misc_feature 1..89: note = engineered ribonucleic acid scaffold (ERS) sequence
  source 1..89: mol_type = other RNA
actggcgcttctatcagattactctgagcgccatcaccagcgactatgtcgtagtgggtaaagctccctcttcggagggagcatcaaag

SEQ ID NO: 22221 - RNA, 89 nt, synthetic construct
  misc_feature 1..89: note = engineered ribonucleic acid scaffold (ERS) sequence
  source 1..89: mol_type = other RNA
actggcgcttctatcggattactctgagcgccatcaccagcgactatgtcgtagtgggtaaagctccctcttcggagggagcatcaaag

SEQ ID NO: 22222 - RNA, 90 nt, synthetic construct
  misc_feature 1..90: note = engineered ribonucleic acid scaffold (ERS) sequence
  source 1..90: mol_type = other RNA
actggcgcttctatctgaattactctgagcgccatcaccagcgactatgtcgtagtgggtaaagctccctcttcggagggagcatcaaag

SEQ ID NO: 22223 - RNA, 90 nt, synthetic construct
  misc_feature 1..90: note = engineered ribonucleic acid scaffold (ERS) sequence
  source 1..90: mol_type = other RNA
actggcgcttctatctgtattactctgagcgccatcaccagcgactatgtcgtagtgggtaaagctccctcttcggagggagcatcaaag

SEQ ID NO: 22224 - RNA, 89 nt, synthetic construct
  misc_feature 1..89: note = engineered ribonucleic acid scaffold (ERS) sequence
  source 1..89: mol_type = other RNA
actggcgcttctatctggttactctgagcgccatcaccagcgactatgtcgtagtgggtaaagctccctcttcggagggagcatcaaag

SEQ ID NO: 22225 - RNA, 89 nt, synthetic construct
  misc_feature 1..89: note = engineered ribonucleic acid scaffold (ERS) sequence
  source 1..89: mol_type = other RNA
actggcgcttctatctgtttactctgagcgccatcaccagcgactatgtcgtagtgggtaaagctccctcttcggagggagcatcaaag

SEQ ID NO: 22226 - RNA, 90 nt, synthetic construct
  misc_feature 1..90: note = engineered ribonucleic acid scaffold (ERS) sequence
  source 1..90: mol_type = other RNA
actggcgcttctatctgatttactctgagcgccatcaccagcgactatgtcgtagtgggtaaagctccctcttcggagggagcatcaaag

SEQ ID NO: 22227 - RNA, 89 nt, synthetic construct
  misc_feature 1..89: note = engineered ribonucleic acid scaffold (ERS) sequence
  source 1..89: mol_type = other RNA
actggcgcttctatctgattgctctgagcgccatcaccagcgactatgtcgtagtgggtaaagctccctcttcggagggagcatcaaag

SEQ ID NO: 22228 - DNA, 90 bp, synthetic construct
  misc_feature 1..90: note = engineered ribonucleic acid scaffold (ERS) sequence
  source 1..90: mol_type = other DNA
aacacacggttctatctgattactctgaccgtgttcaccagcgactatgtcgtagtgggtaaagctccctcttcggagggagcatcagag

SEQ ID NO: 22229 - DNA, 90 bp, synthetic construct
  misc_feature 1..90: note = engineered ribonucleic acid scaffold (ERS) sequence
  source 1..90: mol_type = other DNA
aacactggtttctatctgattactctgaaccagttcaccagcgactatgtcgtagtgggtaaagctccctcttcggagggagcatcagag

SEQ ID NO: 22230 - DNA, 90 bp, synthetic construct
  misc_feature 1..90: note = engineered ribonucleic acid scaffold (ERS) sequence
  source 1..90: mol_type = other DNA
aacaggccgttctatctgattactctgacggccttcaccagcgactatgtcgtagtgggtaaagctccctcttcggagggagcatcagag

SEQ ID NO: 22231 - DNA, 90 bp, synthetic construct
  misc_feature 1..90: note = engineered ribonucleic acid scaffold (ERS) sequence
  source 1..90: mol_type = other DNA
aacaggtccttctatctgattactctgaggaccttcaccagcgactatgtcgtagtgggtaaagctccctcttcggagggagcatcagag

SEQ ID NO: 22232 - DNA, 90 bp, synthetic construct
  misc_feature 1..90: note = engineered ribonucleic acid scaffold (ERS) sequence
  source 1..90: mol_type = other DNA
aaccagcaattctatctgattactctgattgctgtcaccagcgactatgtcgtagtgggtaaagctccctcttcggagggagcatcagag

SEQ ID NO: 22233 - DNA, 90 bp, synthetic construct
  misc_feature 1..90: note = engineered ribonucleic acid scaffold (ERS) sequence
  source 1..90: mol_type = other DNA
aaccgagacttctatctgattactctgaggctcgtcaccagcgactatgtcgtagtgggtaaagctccctcttcggagggagcatcagag

SEQ ID NO: 22234 - DNA, 90 bp, synthetic construct
  misc_feature 1..90: note = engineered ribonucleic acid scaffold (ERS) sequence
  source 1..90: mol_type = other DNA
aacctgtagttctatctgattactctgactacagtcaccagcgactatgtcgtagtgggtaaagctccctcttcggagggagcatcagag

SEQ ID NO: 22235 - DNA, 90 bp, synthetic construct
  misc_feature 1..90: note = engineered ribonucleic acid scaffold (ERS) sequence
  source 1..90: mol_type = other DNA
aacgagcacttctatctgattactctgagggctctcaccagcgactatgtcgtagtgggtaaagctccctcttcggagggagcatcagag

SEQ ID NO: 22236 - DNA, 90 bp, synthetic construct
  misc_feature 1..90: note = engineered ribonucleic acid scaffold (ERS) sequence
  source 1..90: mol_type = other DNA
aacgaggtgttctatctgattactctgacacctctcaccagcgactatgtcgtagtgggtaaagctccctcttcggagggagcatcagag

SEQ ID NO: 22237 - DNA, 90 bp, synthetic construct
  misc_feature 1..90: note = engineered ribonucleic acid scaffold (ERS) sequence
  source 1..90: mol_type = other DNA
aacgggactttctatctgattactctgaagtccctcaccagcgactatgtcgtagtgggtaaagctccctcttcggagggagcatcagag

SEQ ID NO: 22238 - DNA, 90 bp, synthetic construct
  misc_feature 1..90: note = engineered ribonucleic acid scaffold (ERS) sequence
  source 1..90: mol_type = other DNA
aacgggcaattctatctgattactctgattgccctcaccagcgactatgtcgtagtgggtaaagctccctcttcggagggagcatcagag

SEQ ID NO: 22239 - DNA, 90 bp, synthetic construct
  misc_feature 1..90: note = engineered ribonucleic acid scaffold (ERS) sequence
  source 1..90: mol_type = other DNA
aactgtgcgttctatctgattactctgacgcacatcaccagcgactatgtcgtagtgggtaaagctccctcttcggagggagcatcagag

SEQ ID NO: 22240 - DNA, 89 bp, synthetic construct
  misc_feature 1..89: note = engineered ribonucleic acid scaffold (ERS) sequence
  source 1..89: mol_type = other DNA
gcacacggttctatctgattactctgaccgtgttcaccagcgactatgtcgtagtgggtaaagctccctcttcggagggagcatcagag

SEQ ID NO: 22241 - DNA, 89 bp, synthetic construct
  misc_feature 1..89: note = engineered ribonucleic acid scaffold (ERS) sequence
  source 1..89: mol_type = other DNA
gcactggtttctatctgattactctgaaccagttcaccagcgactatgtcgtagtgggtaaagctccctcttcggagggagcatcagag

SEQ ID NO: 22242 - DNA, 89 bp, synthetic construct
  misc_feature 1..89: note = engineered ribonucleic acid scaffold (ERS) sequence
  source 1..89: mol_type = other DNA
gcaggccgttctatctgattactctgacggccttcaccagcgactatgtcgtagtgggtaaagctccctcttcggagggagcatcagag

SEQ ID NO: 22243 - DNA, 89 bp, synthetic construct
  misc_feature 1..89: note = engineered ribonucleic acid scaffold (ERS) sequence
  source 1..89: mol_type = other DNA
gcaggtccttctatctgattactctgaggaccttcaccagcgactatgtcgtagtgggtaaagctccctcttcggagggagcatcagag

SEQ ID NO: 22244 - DNA, 89 bp, synthetic construct
  misc_feature 1..89: note = engineered ribonucleic acid scaffold (ERS) sequence
  source 1..89: mol_type = other DNA
gccagcaattctatctgattactctgattgctgtcaccagcgactatgtcgtagtgggtaaagctccctcttcggagggagcatcagag

SEQ ID NO: 22245 - DNA, 89 bp, synthetic construct
  misc_feature 1..89: note = engineered ribonucleic acid scaffold (ERS) sequence
  source 1..89: mol_type = other DNA
gccgagacttctatctgattactctgaggctcgtcaccagcgactatgtcgtagtgggtaaagctccctcttcggagggagcatcagag

SEQ ID NO: 22246 - DNA, 89 bp, synthetic construct
  misc_feature 1..89: note = engineered ribonucleic acid scaffold (ERS) sequence
  source 1..89: mol_type = other DNA
gcctgtagttctatctgattactctgactacagtcaccagcgactatgtcgtagtgggtaaagctccctcttcggagggagcatcagag

SEQ ID NO: 22247 - DNA, 89 bp, synthetic construct
  misc_feature 1..89: note = engineered ribonucleic acid scaffold (ERS) sequence
  source 1..89: mol_type = other DNA
gcgagcacttctatctgattactctgagggctctcaccagcgactatgtcgtagtgggtaaagctccctcttcggagggagcatcagag

SEQ ID NO: 22248 - DNA, 89 bp, synthetic construct
  misc_feature 1..89: note = engineered ribonucleic acid scaffold (ERS) sequence
  source 1..89: mol_type = other DNA
gcgaggtgttctatctgattactctgacacctctcaccagcgactatgtcgtagtgggtaaagctccctcttcggagggagcatcagag

SEQ ID NO: 22249 - DNA, 89 bp, synthetic construct
  misc_feature 1..89: note = engineered ribonucleic acid scaffold (ERS) sequence
  source 1..89: mol_type = other DNA
gcgggactttctatctgattactctgaagtccctcaccagcgactatgtcgtagtgggtaaagctccctcttcggagggagcatcagag

SEQ ID NO: 22250 - DNA, 89 bp, synthetic construct
  misc_feature 1..89: note = engineered ribonucleic acid scaffold (ERS) sequence
  source 1..89: mol_type = other DNA
gcgggcaattctatctgattactctgattgccctcaccagcgactatgtcgtagtgggtaaagctccctcttcggagggagcatcagag

SEQ ID NO: 22251 - DNA, 89 bp, synthetic construct
  misc_feature 1..89: note = engineered ribonucleic acid scaffold (ERS) sequence
  source 1..89: mol_type = other DNA
gctgtgcgttctatctgattactctgacgcacatcaccagcgactatgtcgtagtgggtaaagctccctcttcggagggagcatcagag

SEQ ID NO: 22252 - DNA, 89 bp, synthetic construct
  misc_feature 1..89: note = engineered ribonucleic acid scaffold (ERS) sequence
  source 1..89: mol_type = other DNA
taacacggttctatctgattactctgaccgtgttcaccagcgactatgtcgtagtgggtaaagctccctcttcggagggagcatcagag

SEQ ID NO: 22253 - DNA, 89 bp, synthetic construct
  misc_feature 1..89: note = engineered ribonucleic acid scaffold (ERS) sequence
  source 1..89: mol_type = other DNA
taactggtttctatctgattactctgaaccagttcaccagcgactatgtcgtagtgggtaaagctccctcttcggagggagcatcagag

SEQ ID NO: 22254 - DNA, 89 bp, synthetic construct
  misc_feature 1..89: note = engineered ribonucleic acid scaffold (ERS) sequence
  source 1..89: mol_type = other DNA
taaggccgttctatctgattactctgacggccttcaccagcgactatgtcgtagtgggtaaagctccctcttcggagggagcatcagag

SEQ ID NO: 22255 - DNA, 89 bp, synthetic construct
  misc_feature 1..89: note = engineered ribonucleic acid scaffold (ERS) sequence
  source 1..89: mol_type = other DNA
taaggtccttctatctgattactctgaggaccttcaccagcgactatgtcgtagtgggtaaagctccctcttcggagggagcatcagag

SEQ ID NO: 22256 - DNA, 89 bp, synthetic construct
  misc_feature 1..89: note = engineered ribonucleic acid scaffold (ERS) sequence
  source 1..89: mol_type = other DNA
tacagcaattctatctgattactctgattgctgtcaccagcgactatgtcgtagtgggtaaagctccctcttcggagggagcatcagag

SEQ ID NO: 22257 - DNA, 89 bp, synthetic construct
  misc_feature 1..89: note = engineered ribonucleic acid scaffold (ERS) sequence
  source 1..89: mol_type = other DNA
tacgagacttctatctgattactctgaggctcgtcaccagcgactatgtcgtagtgggtaaagctccctcttcggagggagcatcagag

SEQ ID NO: 22258 - DNA, 89 bp, synthetic construct
  misc_feature 1..89: note = engineered ribonucleic acid scaffold (ERS) sequence
  source 1..89: mol_type = other DNA
tactgtagttctatctgattactctgactacagtcaccagcgactatgtcgtagtgggtaaagctccctcttcggagggagcatcagag

SEQ ID NO: 22259 - DNA, 89 bp, synthetic construct
  misc_feature 1..89: note = engineered ribonucleic acid scaffold (ERS) sequence
  source 1..89: mol_type = other DNA
tagagcacttctatctgattactctgagggctctcaccagcgactatgtcgtagtgggtaaagctccctcttcggagggagcatcagag

SEQ ID NO: 22260 - DNA, 89 bp, synthetic construct
  misc_feature 1..89: note = engineered ribonucleic acid scaffold (ERS) sequence
  source 1..89: mol_type = other DNA
tagaggtgttctatctgattactctgacacctctcaccagcgactatgtcgtagtgggtaaagctccctcttcggagggagcatcagag

SEQ ID NO: 22261 - DNA, 89 bp, synthetic construct
  misc_feature 1..89: note = engineered ribonucleic acid scaffold (ERS) sequence
  source 1..89: mol_type = other DNA
tagggactttctatctgattactctgaagtccctcaccagcgactatgtcgtagtgggtaaagctccctcttcggagggagcatcagag

SEQ ID NO: 22262 - DNA, 89 bp, synthetic construct
  misc_feature 1..89: note = engineered ribonucleic acid scaffold (ERS) sequence
  source 1..89: mol_type = other DNA
tagggcaattctatctgattactctgattgccctcaccagcgactatgtcgtagtgggtaaagctccctcttcggagggagcatcagag

SEQ ID NO: 22263 - DNA, 89 bp, synthetic construct
  misc_feature 1..89: note = engineered ribonucleic acid scaffold (ERS) sequence
  source 1..89: mol_type = other DNA
tatgtgcgttctatctgattactctgacgcacatcaccagcgactatgtcgtagtgggtaaagctccctcttcggagggagcatcagag

SEQ ID NO: 22264 - DNA, 89 bp, synthetic construct
  misc_feature 1..89: note = engineered ribonucleic acid scaffold (ERS) sequence
  source 1..89: mol_type = other DNA
tcacacggttctatctgattactctgaccgtgttcaccagcgactatgtcgtagtgggtaaagctccctcttcggagggagcatcagag

SEQ ID NO: 22265 - DNA, 89 bp, synthetic construct
  misc_feature 1..89: note = engineered ribonucleic acid scaffold (ERS) sequence
  source 1..89: mol_type = other DNA
tcactggtttctatctgattactctgaaccagttcaccagcgactatgtcgtagtgggtaaagctccctcttcggagggagcatcagag

SEQ ID NO: 22266 - DNA, 89 bp, synthetic construct
  misc_feature 1..89: note = engineered ribonucleic acid scaffold (ERS) sequence
  source 1..89: mol_type = other DNA
tcaggccgttctatctgattactctgacggccttcaccagcgactatgtcgtagtgggtaaagctccctcttcggagggagcatcagag

SEQ ID NO: 22267 - DNA, 89 bp, synthetic construct
  misc_feature 1..89: note = engineered ribonucleic acid scaffold (ERS) sequence
  source 1..89: mol_type = other DNA
tcaggtccttctatctgattactctgaggaccttcaccagcgactatgtcgtagtgggtaaagctccctcttcggagggagcatcagag

SEQ ID NO: 22268 - DNA, 89 bp, synthetic construct
  misc_feature 1..89: note = engineered ribonucleic acid scaffold (ERS) sequence
  source 1..89: mol_type = other DNA
tccagcaattctatctgattactctgattgctgtcaccagcgactatgtcgtagtgggtaaagctccctcttcggagggagcatcagag

SEQ ID NO: 22269 - DNA, 89 bp, synthetic construct
  misc_feature 1..89: note = engineered ribonucleic acid scaffold (ERS) sequence
  source 1..89: mol_type = other DNA
tccgagacttctatctgattactctgaggctcgtcaccagcgactatgtcgtagtgggtaaagctccctcttcggagggagcatcagag

SEQ ID NO: 22270 - DNA, 89 bp, synthetic construct
  misc_feature 1..89: note = engineered ribonucleic acid scaffold (ERS) sequence
  source 1..89: mol_type = other DNA
tcctgtagttctatctgattactctgactacagtcaccagcgactatgtcgtagtgggtaaagctccctcttcggagggagcatcagag

SEQ ID NO: 22271 - DNA, 89 bp, synthetic construct
  misc_feature 1..89: note = engineered ribonucleic acid scaffold (ERS) sequence
  source 1..89: mol_type = other DNA
tcgagcacttctatctgattactctgagggctctcaccagcgactatgtcgtagtgggtaaagctccctcttcggagggagcatcagag

SEQ ID NO: 22272 - DNA, 89 bp, synthetic construct
  misc_feature 1..89: note = engineered ribonucleic acid scaffold (ERS) sequence
  source 1..89: mol_type = other DNA
tcgaggtgttctatctgattactctgacacctctcaccagcgactatgtcgtagtgggtaaagctccctcttcggagggagcatcagag

SEQ ID NO: 22273 - DNA, 89 bp, synthetic construct
  misc_feature 1..89: note = engineered ribonucleic acid scaffold (ERS) sequence
  source 1..89: mol_type = other DNA
tcgggactttctatctgattactctgaagtccctcaccagcgactatgtcgtagtgggtaaagctccctcttcggagggagcatcagag

SEQ ID NO: 22274 - DNA, 89 bp, synthetic construct
  misc_feature 1..89: note = engineered ribonucleic acid scaffold (ERS) sequence
  source 1..89: mol_type = other DNA
tcgggcaattctatctgattactctgattgccctcaccagcgactatgtcgtagtgggtaaagctccctcttcggagggagcatcagag

SEQ ID NO: 22275 - DNA, 89 bp, synthetic construct
  misc_feature 1..89: note = engineered ribonucleic acid scaffold (ERS) sequence
  source 1..89: mol_type = other DNA
tctgtgcgttctatctgattactctgacgcacatcaccagcgactatgtcgtagtgggtaaagctccctcttcggagggagcatcagag

SEQ ID NO: 22276 - DNA, 90 bp, synthetic construct
  misc_feature 1..90: note = engineered ribonucleic acid scaffold (ERS) sequence
  source 1..90: mol_type = other DNA
atcacacggttctatctgattactctgaccgtgttcaccagcgactatgtcgtagtgggtaaagctccctcttcggagggagcatcagag

SEQ ID NO: 22277 - DNA, 90 bp, synthetic construct
  misc_feature 1..90: note = engineered ribonucleic acid scaffold (ERS) sequence
  source 1..90: mol_type = other DNA
atcactggtttctatctgattactctgaaccagttcaccagcgactatgtcgtagtgggtaaagctccctcttcggagggagcatcagag

SEQ ID NO: 22278 - DNA, 90 bp, synthetic construct
  misc_feature 1..90: note = engineered ribonucleic acid scaffold (ERS) sequence
  source 1..90: mol_type = other DNA
atcaggccgttctatctgattactctgacggccttcaccagcgactatgtcgtagtgggtaaagctccctcttcggagggagcatcagag

SEQ ID NO: 22279 - DNA, 90 bp, synthetic construct
  misc_feature 1..90: note = engineered ribonucleic acid scaffold (ERS) sequence
  source 1..90: mol_type = other DNA
atcaggtccttctatctgattactctgaggaccttcaccagcgactatgtcgtagtgggtaaagctccctcttcggagggagcatcagag

SEQ ID NO: 22280 - DNA, 90 bp, synthetic construct
  misc_feature 1..90: note = engineered ribonucleic acid scaffold (ERS) sequence
  source 1..90: mol_type = other DNA
atccagcaattctatctgattactctgattgctgtcaccagcgactatgtcgtagtgggtaaagctccctcttcggagggagcatcagag

SEQ ID NO: 22281 - DNA, 90 bp, synthetic construct
  misc_feature 1..90: note = engineered ribonucleic acid scaffold (ERS) sequence
  source 1..90: mol_type = other DNA
atccgagacttctatctgattactctgaggctcgtcaccagcgactatgtcgtagtgggtaaagctccctcttcggagggagcatcagag

SEQ ID NO: 22282 - DNA, 90 bp, synthetic construct
  misc_feature 1..90: note = engineered ribonucleic acid scaffold (ERS) sequence
  source 1..90: mol_type = other DNA
atcctgtagttctatctgattactctgactacagtcaccagcgactatgtcgtagtgggtaaagctccctcttcggagggagcatcagag

SEQ ID NO: 22283 - DNA, 90 bp, synthetic construct
  misc_feature 1..90: note = engineered ribonucleic acid scaffold (ERS) sequence
  source 1..90: mol_type = other DNA
atcgagcacttctatctgattactctgagggctctcaccagcgactatgtcgtagtgggtaaagctccctcttcggagggagcatcagag

SEQ ID NO: 22284 - DNA, 90 bp, synthetic construct
  misc_feature 1..90: note = engineered ribonucleic acid scaffold (ERS) sequence
  source 1..90: mol_type = other DNA
atcgaggtgttctatctgattactctgacacctctcaccagcgactatgtcgtagtgggtaaagctccctcttcggagggagcatcagag

SEQ ID NO: 22285 - DNA, 90 bp, synthetic construct
  misc_feature 1..90: note = engineered ribonucleic acid scaffold (ERS) sequence
  source 1..90: mol_type = other DNA
atcgggactttctatctgattactctgaagtccctcaccagcgactatgtcgtagtgggtaaagctccctcttcggagggagcatcagag

SEQ ID NO: 22286 - DNA, 90 bp, synthetic construct
  misc_feature 1..90: note = engineered ribonucleic acid scaffold (ERS) sequence
  source 1..90: mol_type = other DNA
atcgggcaattctatctgattactctgattgccctcaccagcgactatgtcgtagtgggtaaagctccctcttcggagggagcatcagag

SEQ ID NO: 22287 - DNA, 90 bp, synthetic construct
  misc_feature 1..90: note = engineered ribonucleic acid scaffold (ERS) sequence
  source 1..90: mol_type = other DNA
atctgtgcgttctatctgattactctgacgcacatcaccagcgactatgtcgtagtgggtaaagctccctcttcggagggagcatcagag

SEQ ID NO: 22288 - DNA, 88 bp, synthetic construct
  misc_feature 1..88: note = engineered ribonucleic acid scaffold (ERS) sequence
  source 1..88: mol_type = other DNA
aacacggttctatctgattactctgaccgtgttcaccagcgactatgtcgtagtgggtaaagctccctcttcggagggagcatcagag

SEQ ID NO: 22289 - DNA, 88 bp, synthetic construct
  misc_feature 1..88: note = engineered ribonucleic acid scaffold (ERS) sequence
  source 1..88: mol_type = other DNA
aactggtttctatctgattactctgaaccagttcaccagcgactatgtcgtagtgggtaaagctccctcttcggagggagcatcagag

SEQ ID NO: 22290 - DNA, 88 bp, synthetic construct
  misc_feature 1..88: note = engineered ribonucleic acid scaffold (ERS) sequence
  source 1..88: mol_type = other DNA
aaggccgttctatctgattactctgacggccttcaccagcgactatgtcgtagtgggtaaagctccctcttcggagggagcatcagag

SEQ ID NO: 22291 - DNA, 88 bp, synthetic construct
  misc_feature 1..88: note = engineered ribonucleic acid scaffold (ERS) sequence
  source 1..88: mol_type = other DNA
aaggtccttctatctgattactctgaggaccttcaccagcgactatgtcgtagtgggtaaagctccctcttcggagggagcatcagag

SEQ ID NO: 22292 - DNA, 88 bp, synthetic construct
  misc_feature 1..88: note = engineered ribonucleic acid scaffold (ERS) sequence
  source 1..88: mol_type = other DNA
acagcaattctatctgattactctgattgctgtcaccagcgactatgtcgtagtgggtaaagctccctcttcggagggagcatcagag

SEQ ID NO: 22293 - DNA, 88 bp, synthetic construct
  misc_feature 1..88: note = engineered ribonucleic acid scaffold (ERS) sequence
  source 1..88: mol_type = other DNA
acgagacttctatctgattactctgaggctcgtcaccagcgactatgtcgtagtgggtaaagctccctcttcggagggagcatcagag

SEQ ID NO: 22294 - DNA, 88 bp, synthetic construct
  misc_feature 1..88: note = engineered ribonucleic acid scaffold (ERS) sequence
  source 1..88: mol_type = other DNA
actgtagttctatctgattactctgactacagtcaccagcgactatgtcgtagtgggtaaagctccctcttcggagggagcatcagag

SEQ ID NO: 22295 - DNA, 88 bp, synthetic construct
  misc_feature 1..88: note = engineered ribonucleic acid scaffold (ERS) sequence
  source 1..88: mol_type = other DNA
agagcacttctatctgattactctgagggctctcaccagcgactatgtcgtagtgggtaaagctccctcttcggagggagcatcagag

SEQ ID NO: 22296 - DNA, 88 bp, synthetic construct
  misc_feature 1..88: note = engineered ribonucleic acid scaffold (ERS) sequence
  source 1..88: mol_type = other DNA
agaggtgttctatctgattactctgacacctctcaccagcgactatgtcgtagtgggtaaagctccctcttcggagggagcatcagag

SEQ ID NO: 22297 - DNA, 88 bp, synthetic construct
  misc_feature 1..88: note = engineered ribonucleic acid scaffold (ERS) sequence
  source 1..88: mol_type = other DNA
agggactttctatctgattactctgaagtccctcaccagcgactatgtcgtagtgggtaaagctccctcttcggagggagcatcagag

SEQ ID NO: 22298 - DNA, 88 bp, synthetic construct
  misc_feature 1..88: note = engineered ribonucleic acid scaffold (ERS) sequence
  source 1..88: mol_type = other DNA
agggcaattctatctgattactctgattgccctcaccagcgactatgtcgtagtgggtaaagctccctcttcggagggagcatcagag

SEQ ID NO: 22299 - DNA, 88 bp, synthetic construct
  misc_feature 1..88: note = engineered ribonucleic acid scaffold (ERS) sequence
  source 1..88: mol_type = other DNA
atgtgcgttctatctgattactctgacgcacatcaccagcgactatgtcgtagtgggtaaagctccctcttcggagggagcatcagag

SEQ ID NO: 22300 - DNA, 89 bp, synthetic construct
  misc_feature 1..89: note = engineered ribonucleic acid scaffold (ERS) sequence
  source 1..89: mol_type = other DNA
aaacacggttctatctgattactctgaccgtgttcaccagcgactatgtcgtagtgggtaaagctccctcttcggagggagcatcagag

SEQ ID NO: 22301 - DNA, 89 bp, synthetic construct
  misc_feature 1..89: note = engineered ribonucleic acid scaffold (ERS) sequence
  source 1..89: mol_type = other DNA
aaactggtttctatctgattactctgaaccagttcaccagcgactatgtcgtagtgggtaaagctccctcttcggagggagcatcagag

SEQ ID NO: 22302 - DNA, 89 bp, synthetic construct
  misc_feature 1..89: note = engineered ribonucleic acid scaffold (ERS) sequence
  source 1..89: mol_type = other DNA
aaaggccgttctatctgattactctgacggccttcaccagcgactatgtcgtagtgggtaaagctccctcttcggagggagcatcagag

SEQ ID NO: 22303 - DNA, 89 bp, synthetic construct
  misc_feature 1..89: note = engineered ribonucleic acid scaffold (ERS) sequence
  source 1..89: mol_type = other DNA
aaaggtccttctatctgattactctgaggaccttcaccagcgactatgtcgtagtgggtaaagctccctcttcggagggagcatcagag

SEQ ID NO: 22304 - DNA, 89 bp, synthetic construct
  misc_feature 1..89: note = engineered ribonucleic acid scaffold (ERS) sequence
  source 1..89: mol_type = other DNA
aacagcaattctatctgattactctgattgctgtcaccagcgactatgtcgtagtgggtaaagctccctcttcggagggagcatcagag

SEQ ID NO: 22305 - DNA, 89 bp, synthetic construct
  misc_feature 1..89: note = engineered ribonucleic acid scaffold (ERS) sequence
  source 1..89: mol_type = other DNA
aacgagacttctatctgattactctgaggctcgtcaccagcgactatgtcgtagtgggtaaagctccctcttcggagggagcatcagag

SEQ ID NO: 22306 - DNA, 89 bp, synthetic construct
  misc_feature 1..89: note = engineered ribonucleic acid scaffold (ERS) sequence
  source 1..89: mol_type = other DNA
aactgtagttctatctgattactctgactacagtcaccagcgactatgtcgtagtgggtaaagctccctcttcggagggagcatcagag

SEQ ID NO: 22307 - DNA, 89 bp, synthetic construct
  misc_feature 1..89: note = engineered ribonucleic acid scaffold (ERS) sequence
  source 1..89: mol_type = other DNA
aagagcacttctatctgattactctgagggctctcaccagcgactatgtcgtagtgggtaaagctccctcttcggagggagcatcagag

SEQ ID NO: 22308 - DNA, 89 bp, synthetic construct
  misc_feature 1..89: note = engineered ribonucleic acid scaffold (ERS) sequence
  source 1..89: mol_type = other DNA
aagaggtgttctatctgattactctgacacctctcaccagcgactatgtcgtagtgggtaaagctccctcttcggagggagcatcagag

SEQ ID NO: 22309 - DNA, 89 bp, synthetic construct
  misc_feature 1..89: note = engineered ribonucleic acid scaffold (ERS) sequence
  source 1..89: mol_type = other DNA
aagggactttctatctgattactctgaagtccctcaccagcgactatgtcgtagtgggtaaagctccctcttcggagggagcatcagag

SEQ ID NO: 22310 - DNA, 89 bp, synthetic construct
  misc_feature 1..89: note = engineered ribonucleic acid scaffold (ERS) sequence
  source 1..89: mol_type = other DNA
aagggcaattctatctgattactctgattgccctcaccagcgactatgtcgtagtgggtaaagctccctcttcggagggagcatcagag

SEQ ID NO: 22311 - DNA, 89 bp, synthetic construct
  misc_feature 1..89: note = engineered ribonucleic acid scaffold (ERS) sequence
  source 1..89: mol_type = other DNA
aatgtgcgttctatctgattactctgacgcacatcaccagcgactatgtcgtagtgggtaaagctccctcttcggagggagcatcagag

SEQ ID NO: 22312 - DNA, 89 bp, synthetic construct
  misc_feature 1..89: note = engineered ribonucleic acid scaffold (ERS) sequence
  source 1..89: mol_type = other DNA
agacacggttctatctgattactctgaccgtgttcaccagcgactatgtcgtagtgggtaaagctccctcttcggagggagcatcagag

SEQ ID NO: 22313 - DNA, 89 bp, synthetic construct
  misc_feature 1..89: note = engineered ribonucleic acid scaffold (ERS) sequence
  source 1..89: mol_type = other DNA
agactggtttctatctgattactctgaaccagttcaccagcgactatgtcgtagtgggtaaagctccctcttcggagggagcatcagag

SEQ ID NO: 22314 - DNA, 89 bp, synthetic construct
  misc_feature 1..89: note = engineered ribonucleic acid scaffold (ERS) sequence
  source 1..89: mol_type = other DNA
agaggccgttctatctgattactctgacggccttcaccagcgactatgtcgtagtgggtaaagctccctcttcggagggagcatcagag

SEQ ID NO: 22315 - DNA, 89 bp, synthetic construct
  misc_feature 1..89: note = engineered ribonucleic acid scaffold (ERS) sequence
  source 1..89: mol_type = other DNA
agaggtccttctatctgattactctgaggaccttcaccagcgactatgtcgtagtgggtaaagctccctcttcggagggagcatcagag

SEQ ID NO: 22316 - DNA, 89 bp, synthetic construct
  misc_feature 1..89: note = engineered ribonucleic acid scaffold (ERS) sequence
  source 1..89: mol_type = other DNA
agcagcaattctatctgattactctgattgctgtcaccagcgactatgtcgtagtgggtaaagctccctcttcggagggagcatcagag

SEQ ID NO: 22317 - DNA, 89 bp, synthetic construct
  misc_feature 1..89: note = engineered ribonucleic acid scaffold (ERS) sequence
  source 1..89: mol_type = other DNA
agcgagacttctatctgattactctgaggctcgtcaccagcgactatgtcgtagtgggtaaagctccctcttcggagggagcatcagag

SEQ ID NO: 22318 - DNA, 89 bp, synthetic construct
  misc_feature 1..89: note = engineered ribonucleic acid scaffold (ERS) sequence
  source 1..89: mol_type = other DNA
agctgtagttctatctgattactctgactacagtcaccagcgactatgtcgtagtgggtaaagctccctcttcggagggagcatcagag

SEQ ID NO: 22319 - DNA, 89 bp, synthetic construct
  misc_feature 1..89: note = engineered ribonucleic acid scaffold (ERS) sequence
  source 1..89: mol_type = other DNA
aggagcacttctatctgattactctgagggctctcaccagcgactatgtcgtagtgggtaaagctccctcttcggagggagcatcagag

SEQ ID NO: 22320 - DNA, 89 bp, synthetic construct
  misc_feature 1..89: note = engineered ribonucleic acid scaffold (ERS) sequence
  source 1..89: mol_type = other DNA
aggaggtgttctatctgattactctgacacctctcaccagcgactatgtcgtagtgggtaaagctccctcttcggagggagcatcagag

SEQ ID NO: 22321 - DNA, 89 bp, synthetic construct
  misc_feature 1..89: note = engineered ribonucleic acid scaffold (ERS) sequence
  source 1..89: mol_type = other DNA
aggggactttctatctgattactctgaagtccctcaccagcgactatgtcgtagtgggtaaagctccctcttcggagggagcatcagag

SEQ ID NO: 22322 - DNA, 89 bp, synthetic construct
  misc_feature 1..89: note = engineered ribonucleic acid scaffold (ERS) sequence
  source 1..89: mol_type = other DNA
aggggcaattctatctgattactctgattgccctcaccagcgactatgtcgtagtgggtaaagctccctcttcggagggagcatcagag

SEQ ID NO: 22323 - DNA, 89 bp, synthetic construct
  misc_feature 1..89: note = engineered ribonucleic acid scaffold (ERS) sequence
  source 1..89: mol_type = other DNA
agtgtgcgttctatctgattactctgacgcacatcaccagcgactatgtcgtagtgggtaaagctccctcttcggagggagcatcagag

SEQ ID NO: 22324 - DNA, 95 bp, synthetic construct
  misc_feature 1..95: note = engineered ribonucleic acid scaffold (ERS) sequence
  source 1..95: mol_type = other DNA
acacacggaggcacttctatctgattactctgaccgtgttcaccagcgactatgtcgtagtgggtaaagctccctcttcggagggagcatcagag

SEQ ID NO: 22325 - DNA, 95 bp, synthetic construct
  misc_feature 1..95: note = engineered ribonucleic acid scaffold (ERS) sequence
  source 1..95: mol_type = other DNA
acactggtaggcacttctatctgattactctgaaccagttcaccagcgactatgtcgtagtgggtaaagctccctcttcggagggagcatcagag

SEQ ID NO: 22326 - DNA, 95 bp, synthetic construct
  misc_feature 1..95: note = engineered ribonucleic acid scaffold (ERS) sequence
  source 1..95: mol_type = other DNA
acaggccgaggcacttctatctgattactctgacggccttcaccagcgactatgtcgtagtgggtaaagctccctcttcggagggagcatcagag

SEQ ID NO: 22327 - DNA, 95 bp, synthetic construct
  misc_feature 1..95: note = engineered ribonucleic acid scaffold (ERS) sequence
  source 1..95: mol_type = other DNA
acaggtccaggcacttctatctgattactctgaggaccttcaccagcgactatgtcgtagtgggtaaagctccctcttcggagggagcatcagag

SEQ ID NO: 22328 - DNA, 95 bp, synthetic construct
  misc_feature 1..95: note = engineered ribonucleic acid scaffold (ERS) sequence
  source 1..95: mol_type = other DNA
accagcaaaggcacttctatctgattactctgattgctgtcaccagcgactatgtcgtagtgggtaaagctccctcttcggagggagcatcagag

SEQ ID NO: 22329 - DNA, 95 bp, synthetic construct
  misc_feature 1..95: note = engineered ribonucleic acid scaffold (ERS) sequence
  source 1..95: mol_type = other DNA
accgagacaggcacttctatctgattactctgaggctcgtcaccagcgactatgtcgtagtgggtaaagctccctcttcggagggagcatcagag

SEQ ID NO: 22330 - DNA, 95 bp, synthetic construct
  misc_feature 1..95: note = engineered ribonucleic acid scaffold (ERS) sequence
  source 1..95: mol_type = other DNA
acctgtagaggcacttctatctgattactctgactacagtcaccagcgactatgtcgtagtgggtaaagctccctcttcggagggagcatcagag

SEQ ID NO: 22331 - DNA, 95 bp, synthetic construct
  misc_feature 1..95: note = engineered ribonucleic acid scaffold (ERS) sequence
  source 1..95: mol_type = other DNA
acgagcacaggcacttctatctgattactctgagggctctcaccagcgactatgtcgtagtgggtaaagctccctcttcggagggagcatcagag

SEQ ID NO: 22332 - DNA, 95 bp, synthetic construct
  misc_feature 1..95: note = engineered ribonucleic acid scaffold (ERS) sequence
  source 1..95: mol_type = other DNA
acgaggtgaggcacttctatctgattactctgacacctctcaccagcgactatgtcgtagtgggtaaagctccctcttcggagggagcatcagag

SEQ ID NO: 22333 - DNA, 95 bp, synthetic construct
  misc_feature 1..95: note = engineered ribonucleic acid scaffold (ERS) sequence
  source 1..95: mol_type = other DNA
acgggactaggcacttctatctgattactctgaagtccctcaccagcgactatgtcgtagtgggtaaagctccctcttcggagggagcatcagag

SEQ ID NO: 22334 - DNA, 95 bp, synthetic construct
  misc_feature 1..95: note = engineered ribonucleic acid scaffold (ERS) sequence
  source 1..95: mol_type = other DNA
acgggcaaaggcacttctatctgattactctgattgccctcaccagcgactatgtcgtagtgggtaaagctccctcttcggagggagcatcagag

SEQ ID NO: 22335 - DNA, 95 bp, synthetic construct
  misc_feature 1..95: note = engineered ribonucleic acid scaffold (ERS) sequence
  source 1..95: mol_type = other DNA
actgtgcgaggcacttctatctgattactctgacgcacatcaccagcgactatgtcgtagtgggtaaagctccctcttcggagggagcatcagag

SEQ ID NO: 22336 - DNA, 87 bp, synthetic construct
  misc_feature 1..87: note = engineered ribonucleic acid scaffold (ERS) sequence
  source 1..87: mol_type = other DNA
acacacggttctatctgattactctgaccgtgttcaccagcgactatgtcgtagtgggtaaactccctcttcggagggagatcagag

SEQ ID NO: 22337 - DNA, 87 bp, synthetic construct
  misc_feature 1..87: note = engineered ribonucleic acid scaffold (ERS) sequence
  source 1..87: mol_type = other DNA
acactggtttctatctgattactctgaaccagttcaccagcgactatgtcgtagtgggtaaactccctcttcggagggagatcagag

SEQ ID NO: 22338 - DNA, 87 bp, synthetic construct
  misc_feature 1..87: note = engineered ribonucleic acid scaffold (ERS) sequence
  source 1..87: mol_type = other DNA
acaggccgttctatctgattactctgacggccttcaccagcgactatgtcgtagtgggtaaactccctcttcggagggagatcagag

SEQ ID NO: 22339 - DNA, 87 bp, synthetic construct
  misc_feature 1..87: note = engineered ribonucleic acid scaffold (ERS) sequence
  source 1..87: mol_type = other DNA
acaggtccttctatctgattactctgaggaccttcaccagcgactatgtcgtagtgggtaaactccctcttcggagggagatcagag

SEQ ID NO: 22340 - DNA, 87 bp, synthetic construct
  misc_feature 1..87: note = engineered ribonucleic acid scaffold (ERS) sequence
  source 1..87: mol_type = other DNA
accagcaattctatctgattactctgattgctgtcaccagcgactatgtcgtagtgggtaaactccctcttcggagggagatcagag

SEQ ID NO: 22341 - DNA, 87 bp, synthetic construct
  misc_feature 1..87: note = engineered ribonucleic acid scaffold (ERS) sequence
  source 1..87: mol_type = other DNA
accgagacttctatctgattactctgaggctcgtcaccagcgactatgtcgtagtgggtaaactccctcttcggagggagatcagag

SEQ ID NO: 22342 - DNA, 87 bp, synthetic construct
  misc_feature 1..87: note = engineered ribonucleic acid scaffold (ERS) sequence
  source 1..87: mol_type = other DNA
acctgtagttctatctgattactctgactacagtcaccagcgactatgtcgtagtgggtaaactccctcttcggagggagatcagag

SEQ ID NO: 22343 - DNA, 87 bp, synthetic construct
  misc_feature 1..87: note = engineered ribonucleic acid scaffold (ERS) sequence
  source 1..87: mol_type = other DNA
acgagcacttctatctgattactctgagggctctcaccagcgactatgtcgtagtgggtaaactccctcttcggagggagatcagag

SEQ ID NO: 22344 - DNA, 87 bp, synthetic construct
  misc_feature 1..87: note = engineered ribonucleic acid scaffold (ERS) sequence
  source 1..87: mol_type = other DNA
acgaggtgttctatctgattactctgacacctctcaccagcgactatgtcgtagtgggtaaactccctcttcggagggagatcagag

SEQ ID NO: 22345 - DNA, 87 bp, synthetic construct
  misc_feature 1..87: note = engineered ribonucleic acid scaffold (ERS) sequence
  source 1..87: mol_type = other DNA
acgggactttctatctgattactctgaagtccctcaccagcgactatgtcgtagtgggtaaactccctcttcggagggagatcagag

SEQ ID NO: 22346 - DNA, 87 bp, synthetic construct
  misc_feature 1..87: note = engineered ribonucleic acid scaffold (ERS) sequence
  source 1..87: mol_type = other DNA
acgggcaattctatctgattactctgattgccctcaccagcgactatgtcgtagtgggtaaactccctcttcggagggagatcagag

SEQ ID NO: 22347 - DNA, 87 bp, synthetic construct
  misc_feature 1..87: note = engineered ribonucleic acid scaffold (ERS) sequence
  source 1..87: mol_type = other DNA
actgtgcgttctatctgattactctgacgcacatcaccagcgactatgtcgtagtgggtaaactccctcttcggagggagatcagag

SEQ ID NO: 22348 - DNA, 89 bp, synthetic construct
  misc_feature 1..89: note = engineered ribonucleic acid scaffold (ERS) sequence
  source 1..89: mol_type = other DNA
acacacggttctatctgattactctgaccgtgttcaccagcgactatgtcgtagtgggtaaagcgccctcttcggagggagcatcagag

SEQ ID NO: 22349 - DNA, 89 bp, synthetic construct
  misc_feature 1..89: note = engineered ribonucleic acid scaffold (ERS) sequence
  source 1..89: mol_type = other DNA
acactggtttctatctgattactctgaaccagttcaccagcgactatgtcgtagtgggtaaagcgccctcttcggagggagcatcagag

SEQ ID NO: 22350 - DNA, 89 bp, synthetic construct
  misc_feature 1..89: note = engineered ribonucleic acid scaffold (ERS) sequence
  source 1..89: mol_type = other DNA
acaggccgttctatctgattactctgacggccttcaccagcgactatgtcgtagtgggtaaagcgccctcttcggagggagcatcagag

SEQ ID NO: 22351 - DNA, 89 bp, synthetic construct
  misc_feature 1..89: note = engineered ribonucleic acid scaffold (ERS) sequence
  source 1..89: mol_type = other DNA
acaggtccttctatctgattactctgaggaccttcaccagcgactatgtcgtagtgggtaaagcgccctcttcggagggagcatcagag

SEQ ID NO: 22352 - DNA, 89 bp, synthetic construct
  misc_feature 1..89: note = engineered ribonucleic acid scaffold (ERS) sequence
  source 1..89: mol_type = other DNA
accagcaattctatctgattactctgattgctgtcaccagcgactatgtcgtagtgggtaaagcgccctcttcggagggagcatcagag

SEQ ID NO: 22353 - DNA, 89 bp, synthetic construct
  misc_feature 1..89: note = engineered ribonucleic acid scaffold (ERS) sequence
  source 1..89: mol_type = other DNA
accgagacttctatctgattactctgaggctcgtcaccagcgactatgtcgtagtgggtaaagcgccctcttcggagggagcatcagag

SEQ ID NO: 22354 - DNA, 89 bp, synthetic construct
  misc_feature 1..89: note = engineered ribonucleic acid scaffold (ERS) sequence
  source 1..89: mol_type = other DNA
acctgtagttctatctgattactctgactacagtcaccagcgactatgtcgtagtgggtaaagcgccctcttcggagggagcatcagag

SEQ ID NO: 22355 - DNA, 89 bp, synthetic construct
  misc_feature 1..89: note = engineered ribonucleic acid scaffold (ERS) sequence
  source 1..89: mol_type = other DNA
acgagcacttctatctgattactctgagggctctcaccagcgactatgtcgtagtgggtaaagcgccctcttcggagggagcatcagag

SEQ ID NO: 22356 - DNA, 89 bp, synthetic construct
  misc_feature 1..89: note = engineered ribonucleic acid scaffold (ERS) sequence
  source 1..89: mol_type = other DNA
acgaggtgttctatctgattactctgacacctctcaccagcgactatgtcgtagtgggtaaagcgccctcttcggagggagcatcagag

SEQ ID NO: 22357 - DNA, 89 bp, synthetic construct
  misc_feature 1..89: note = engineered ribonucleic acid scaffold (ERS) sequence
  source 1..89: mol_type = other DNA
acgggactttctatctgattactctgaagtccctcaccagcgactatgtcgtagtgggtaaagcgccctcttcggagggagcatcagag

SEQ ID NO: 22358 - DNA, 89 bp, synthetic construct
  misc_feature 1..89: note = engineered ribonucleic acid scaffold (ERS) sequence
  source 1..89: mol_type = other DNA
acgggcaattctatctgattactctgattgccctcaccagcgactatgtcgtagtgggtaaagcgccctcttcggagggagcatcagag

SEQ ID NO: 22359 - DNA, 89 bp, synthetic construct
  misc_feature 1..89: note = engineered ribonucleic acid scaffold (ERS) sequence
  source 1..89: mol_type = other DNA
actgtgcgttctatctgattactctgacgcacatcaccagcgactatgtcgtagtgggtaaagcgccctcttcggagggagcatcagag

SEQ ID NO: 22360 - DNA, 99 bp, synthetic construct
  misc_feature 1..99: note = engineered ribonucleic acid scaffold (ERS) sequence
  source 1..99: mol_type = other DNA
acacacggttctatctgattactctgaccgtgttcaccagcgactatgtcgtagtgggtaaagcgccttacggacttcggtccgtaaggagcatcagag

SEQ ID NO: 22361 - DNA, 99 bp, synthetic construct
  misc_feature 1..99: note = engineered ribonucleic acid scaffold (ERS) sequence
  source 1..99: mol_type = other DNA
acactggtttctatctgattactctgaaccagttcaccagcgactatgtcgtagtgggtaaagcgccttacggacttcggtccgtaaggagcatcagag

SEQ ID NO: 22362 - DNA, 99 bp, synthetic construct
  misc_feature 1..99: note = engineered ribonucleic acid scaffold (ERS) sequence
  source 1..99: mol_type = other DNA
acaggccgttctatctgattactctgacggccttcaccagcgactatgtcgtagtgggtaaagcgccttacggacttcggtccgtaaggagcatcagag

SEQ ID NO: 22363 - DNA, 99 bp, synthetic construct
  misc_feature 1..99: note = engineered ribonucleic acid scaffold (ERS) sequence
  source 1..99: mol_type = other DNA
acaggtccttctatctgattactctgaggaccttcaccagcgactatgtcgtagtgggtaaagcgccttacggacttcggtccgtaaggagcatcagag

SEQ ID NO: 22364 - DNA, 99 bp, synthetic construct
  misc_feature 1..99: note = engineered ribonucleic acid scaffold (ERS) sequence
  source 1..99: mol_type = other DNA
accagcaattctatctgattactctgattgctgtcaccagcgactatgtcgtagtgggtaaagcgccttacggacttcggtccgtaaggagcatcagag

SEQ ID NO: 22365 - DNA, 99 bp, synthetic construct
  misc_feature 1..99: note = engineered ribonucleic acid scaffold (ERS) sequence
  source 1..99: mol_type = other DNA
accgagacttctatctgattactctgaggctcgtcaccagcgactatgtcgtagtgggtaaagcgccttacggacttcggtccgtaaggagcatcagag

SEQ ID NO: 22366 - DNA, 99 bp, synthetic construct
  misc_feature 1..99: note = engineered ribonucleic acid scaffold (ERS) sequence
  source 1..99: mol_type = other DNA
acctgtagttctatctgattactctgactacagtcaccagcgactatgtcgtagtgggtaaagcgccttacggacttcggtccgtaaggagcatcagag

SEQ ID NO: 22367 - DNA, 99 bp, synthetic construct
  misc_feature 1..99: note = engineered ribonucleic acid scaffold (ERS) sequence
  source 1..99: mol_type = other DNA
acgagcacttctatctgattactctgagggctctcaccagcgactatgtcgtagtgggtaaagcgccttacggacttcggtccgtaaggagcatcagag

SEQ ID NO: 22368 - DNA, 99 bp, synthetic construct
  misc_feature 1..99: note = engineered ribonucleic acid scaffold (ERS) sequence
  source 1..99: mol_type = other DNA
acgaggtgttctatctgattactctgacacctctcaccagcgactatgtcgtagtgggtaaagcgccttacggacttcggtccgtaaggagcatcagag

SEQ ID NO: 22369 - DNA, 99 bp, synthetic construct
  misc_feature 1..99: note = engineered ribonucleic acid scaffold (ERS) sequence
  source 1..99: mol_type = other DNA
acgggactttctatctgattactctgaagtccctcaccagcgactatgtcgtagtgggtaaagcgccttacggacttcggtccgtaaggagcatcagag

SEQ ID NO: 22370 - DNA, 99 bp, synthetic construct
  misc_feature 1..99: note = engineered ribonucleic acid scaffold (ERS) sequence
  source 1..99: mol_type = other DNA
acgggcaattctatctgattactctgattgccctcaccagcgactatgtcgtagtgggtaaagcgccttacggacttcggtccgtaaggagcatcagag

SEQ ID NO: 22371 - DNA, 99 bp, synthetic construct
  misc_feature 1..99: note = engineered ribonucleic acid scaffold (ERS) sequence
  source 1..99: mol_type = other DNA
actgtgcgttctatctgattactctgacgcacatcaccagcgactatgtcgtagtgggtaaagcgccttacggacttcggtccgtaaggagcatcagag

SEQ ID NO: 22372 - DNA, 99 bp, synthetic construct
  misc_feature 1..99: note = engineered ribonucleic acid scaffold (ERS) sequence
  source 1..99: mol_type = other DNA
acacacggttctatctgattactctgaccgtgttcaccagcgactatgtcgtagtgggtaaagcgcttacggaattcgtgtccgtaagaagcatcagag

SEQ ID NO: 22373 - DNA, 99 bp, synthetic construct
  misc_feature 1..99: note = engineered ribonucleic acid scaffold (ERS) sequence
  source 1..99: mol_type = other DNA
acactggtttctatctgattactctgaaccagttcaccagcgactatgtcgtagtgggtaaagcgcttacggaattcgtgtccgtaagaagcatcagag

SEQ ID NO: 22374 - DNA, 99 bp, synthetic construct
  misc_feature 1..99: note = engineered ribonucleic acid scaffold (ERS) sequence
  source 1..99: mol_type = other DNA
acaggccgttctatctgattactctgacggccttcaccagcgactatgtcgtagtgggtaaagcgcttacggaattcgtgtccgtaagaagcatcagag

SEQ ID NO: 22375 - DNA, 99 bp, synthetic construct
  misc_feature 1..99: note = engineered ribonucleic acid scaffold (ERS) sequence
  source 1..99: mol_type = other DNA
acaggtccttctatctgattactctgaggaccttcaccagcgactatgtcgtagtgggtaaagcgcttacggaattcgtgtccgtaagaagcatcagag

SEQ ID NO: 22376 - DNA, 99 bp, synthetic construct
  misc_feature 1..99: note = engineered ribonucleic acid scaffold (ERS) sequence
  source 1..99: mol_type = other DNA
accagcaattctatctgattactctgattgctgtcaccagcgactatgtcgtagtgggtaaagcgcttacggaattcgtgtccgtaagaagcatcagag

SEQ ID NO: 22377 - DNA, 99 bp, synthetic construct
  misc_feature 1..99: note = engineered ribonucleic acid scaffold (ERS) sequence
  source 1..99: mol_type = other DNA
accgagacttctatctgattactctgaggctcgtcaccagcgactatgtcgtagtgggtaaagcgcttacggaattcgtgtccgtaagaagcatcagag

SEQ ID NO: 22378 - DNA, 99 bp, synthetic construct
  misc_feature 1..99: note = engineered ribonucleic acid scaffold (ERS) sequence
  source 1..99: mol_type = other DNA
acctgtagttctatctgattactctgactacagtcaccagcgactatgtcgtagtgggtaaagcgcttacggaattcgtgtccgtaagaagcatcagag

SEQ ID NO: 22379 - DNA, 99 bp, synthetic construct
  misc_feature 1..99: note = engineered ribonucleic acid scaffold (ERS) sequence
  source 1..99: mol_type = other DNA
acgagcacttctatctgattactctgagggctctcaccagcgactatgtcgtagtgggtaaagcgcttacggaattcgtgtccgtaagaagcatcagag

SEQ ID NO: 22380 - DNA, 99 bp, synthetic construct
  misc_feature 1..99: note = engineered ribonucleic acid scaffold (ERS) sequence
  source 1..99: mol_type = other DNA
acgaggtgttctatctgattactctgacacctctcaccagcgactatgtcgtagtgggtaaagcgcttacggaattcgtgtccgtaagaagcatcagag

SEQ ID NO: 22381 - DNA, 99 bp, synthetic construct
  misc_feature 1..99: note = engineered ribonucleic acid scaffold (ERS) sequence
  source 1..99: mol_type = other DNA
acgggactttctatctgattactctgaagtccctcaccagcgactatgtcgtagtgggtaaagcgcttacggaattcgtgtccgtaagaagcatcagag

SEQ ID NO: 22382 - DNA, 99 bp, synthetic construct
  misc_feature 1..99: note = engineered ribonucleic acid scaffold (ERS) sequence
  source 1..99: mol_type = other DNA
acgggcaattctatctgattactctgattgccctcaccagcgactatgtcgtagtgggtaaagcgcttacggaattcgtgtccgtaagaagcatcagag

SEQ ID NO: 22383 - DNA, 99 bp, synthetic construct
  misc_feature 1..99: note = engineered ribonucleic acid scaffold (ERS) sequence
  source 1..99: mol_type = other DNA
actgtgcgttctatctgattactctgacgcacatcaccagcgactatgtcgtagtgggtaaagcgcttacggaattcgtgtccgtaagaagcatcagag

SEQ ID NO: 22384 - DNA, 100 bp, synthetic construct
  misc_feature 1..100: note = engineered ribonucleic acid scaffold (ERS) sequence
  source 1..100: mol_type = other DNA
acacacggttctatctgattactctgaccgtgttcaccagcgactatgtcgtagtgggtaaagcgcttacggacttcgcggtccgtaagaagcatcagag

SEQ ID NO: 22385 - DNA, 100 bp, synthetic construct
  misc_feature 1..100: note = engineered ribonucleic acid scaffold (ERS) sequence
  source 1..100: mol_type = other DNA
acactggtttctatctgattactctgaaccagttcaccagcgactatgtcgtagtgggtaaagcgcttacggacttcgcggtccgtaagaagcatcagag

SEQ ID NO: 22386 - DNA, 100 bp, synthetic construct
  misc_feature 1..100: note = engineered ribonucleic acid scaffold (ERS) sequence
  source 1..100: mol_type = other DNA
acaggccgttctatctgattactctgacggccttcaccagcgactatgtcgtagtgggtaaagcgcttacggacttcgcggtccgtaagaagcatcagag

SEQ ID NO: 22387 - DNA, 100 bp, synthetic construct
  misc_feature 1..100: note = engineered ribonucleic acid scaffold (ERS) sequence
  source 1..100: mol_type = other DNA
acaggtccttctatctgattactctgaggaccttcaccagcgactatgtcgtagtgggtaaagcgcttacggacttcgcggtccgtaagaagcatcagag

SEQ ID NO: 22388 - DNA, 100 bp, synthetic construct
  misc_feature 1..100: note = engineered ribonucleic acid scaffold (ERS) sequence
  source 1..100: mol_type = other DNA
accagcaattctatctgattactctgattgctgtcaccagcgactatgtcgtagtgggtaaagcgcttacggacttcgcggtccgtaagaagcatcagag

SEQ ID NO: 22389 - DNA, 100 bp, synthetic construct
  misc_feature 1..100: note = engineered ribonucleic acid scaffold (ERS) sequence
  source 1..100: mol_type = other DNA
accgagacttctatctgattactctgaggctcgtcaccagcgactatgtcgtagtgggtaaagcgcttacggacttcgcggtccgtaagaagcatcagag

SEQ ID NO: 22390 - DNA, 100 bp, synthetic construct
  misc_feature 1..100: note = engineered ribonucleic acid scaffold (ERS) sequence
  source 1..100: mol_type = other DNA
acctgtagttctatctgattactctgactacagtcaccagcgactatgtcgtagtgggtaaagcgcttacggacttcgcggtccgtaagaagcatcagag

SEQ ID NO: 22391 - DNA, 100 bp, synthetic construct
  misc_feature 1..100: note = engineered ribonucleic acid scaffold (ERS) sequence
  source 1..100: mol_type = other DNA
acgagcacttctatctgattactctgagggctctcaccagcgactatgtcgtagtgggtaaagcgcttacggacttcgcggtccgtaagaagcatcagag

SEQ ID NO: 22392 - DNA, 100 bp, synthetic construct
  misc_feature 1..100: note = engineered ribonucleic acid scaffold (ERS) sequence
  source 1..100: mol_type = other DNA
acgaggtgttctatctgattactctgacacctctcaccagcgactatgtcgtagtgggtaaagcgcttacggacttcgcggtccgtaagaagcatcagag

SEQ ID NO: 22393 - DNA, 100 bp, synthetic construct
  misc_feature 1..100: note = engineered ribonucleic acid scaffold (ERS) sequence
  source 1..100: mol_type = other DNA
acgggactttctatctgattactctgaagtccctcaccagcgactatgtcgtagtgggtaaagcgcttacggacttcgcggtccgtaagaagcatcagag

SEQ ID NO: 22394 - DNA, 100 bp, synthetic construct
  misc_feature 1..100: note = engineered ribonucleic acid scaffold (ERS) sequence
  source 1..100: mol_type = other DNA
acgggcaattctatctgattactctgattgccctcaccagcgactatgtcgtagtgggtaaagcgcttacggacttcgcggtccgtaagaagcatcagag

SEQ ID NO: 22395 - DNA, 100 bp, synthetic construct
  misc_feature 1..100: note = engineered ribonucleic acid scaffold (ERS) sequence
  source 1..100: mol_type = other DNA
actgtgcgttctatctgattactctgacgcacatcaccagcgactatgtcgtagtgggtaaagcgcttacggacttcgcggtccgtaagaagcatcagag

SEQ ID NO: 22396 - DNA, 98 bp, synthetic construct
  misc_feature 1..98: note = engineered ribonucleic acid scaffold (ERS) sequence
  source 1..98: mol_type = other DNA
acacacggttctatctgattactctgaccgtgttcaccagcgactatgtcgtagtgggtaaagcgcttacggacttcggtccgtaagaagcatcagag

SEQ ID NO: 22397 - DNA, 98 bp, synthetic construct
  misc_feature 1..98: note = engineered ribonucleic acid scaffold (ERS) sequence
  source 1..98: mol_type = other DNA
acactggtttctatctgattactctgaaccagttcaccagcgactatgtcgtagtgggtaaagcgcttacggacttcggtccgtaagaagcatcagag

SEQ ID NO: 22398 - DNA, 98 bp, synthetic construct
  misc_feature 1..98: note = engineered ribonucleic acid scaffold (ERS) sequence
  source 1..98: mol_type = other DNA
acaggccgttctatctgattactctgacggccttcaccagcgactatgtcgtagtgggtaaagcgcttacggacttcggtccgtaagaagcatcagag

SEQ ID NO: 22399 - DNA, 98 bp, synthetic construct
  misc_feature 1..98: note = engineered ribonucleic acid scaffold (ERS) sequence
  source 1..98: mol_type = other DNA
acaggtccttctatctgattactctgaggaccttcaccagcgactatgtcgtagtgggtaaagcgcttacggacttcggtccgtaagaagcatcagag

SEQ ID NO: 22400 - DNA, 98 bp, synthetic construct
  misc_feature 1..98: note = engineered ribonucleic acid scaffold (ERS) sequence
  source 1..98: mol_type = other DNA
accagcaattctatctgattactctgattgctgtcaccagcgactatgtcgtagtgggtaaagcgcttacggacttcggtccgtaagaagcatcagag

SEQ ID NO: 22401 - DNA, 98 bp, synthetic construct
  misc_feature 1..98: note = engineered ribonucleic acid scaffold (ERS) sequence
  source 1..98: mol_type = other DNA
accgagacttctatctgattactctgaggctcgtcaccagcgactatgtcgtagtgggtaaagcgcttacggacttcggtccgtaagaagcatcagag

SEQ ID NO: 22402 - DNA, 98 bp, synthetic construct
  misc_feature 1..98: note = engineered ribonucleic acid scaffold (ERS) sequence
  source 1..98: mol_type = other DNA
acctgtagttctatctgattactctgactacagtcaccagcgactatgtcgtagtgggtaaagcgcttacggacttcggtccgtaagaagcatcagag

SEQ ID NO: 22403 - DNA, 98 bp, synthetic construct
  misc_feature 1..98: note = engineered ribonucleic acid scaffold (ERS) sequence
  source 1..98: mol_type = other DNA
acgagcacttctatctgattactctgagggctctcaccagcgactatgtcgtagtgggtaaagcgcttacggacttcggtccgtaagaagcatcagag

SEQ ID NO: 22404 - DNA, 98 bp, synthetic construct
  misc_feature 1..98: note = engineered ribonucleic acid scaffold (ERS) sequence
  source 1..98: mol_type = other DNA
acgaggtgttctatctgattactctgacacctctcaccagcgactatgtcgtagtgggtaaagcgcttacggacttcggtccgtaagaagcatcagag

SEQ ID NO: 22405 - DNA, 98 bp, synthetic construct
  misc_feature 1..98: note = engineered ribonucleic acid scaffold (ERS) sequence
  source 1..98: mol_type = other DNA
acgggactttctatctgattactctgaagtccctcaccagcgactatgtcgtagtgggtaaagcgcttacggacttcggtccgtaagaagcatcagag

SEQ ID NO: 22406 - DNA, 98 bp, synthetic construct
  misc_feature 1..98: note = engineered ribonucleic acid scaffold (ERS) sequence
  source 1..98: mol_type = other DNA
acgggcaattctatctgattactctgattgccctcaccagcgactatgtcgtagtgggtaaagcgcttacggacttcggtccgtaagaagcatcagag

SEQ ID NO: 22407 - DNA, 98 bp, synthetic construct
  misc_feature 1..98: note = engineered ribonucleic acid scaffold (ERS) sequence
  source 1..98: mol_type = other DNA
actgtgcgttctatctgattactctgacgcacatcaccagcgactatgtcgtagtgggtaaagcgcttacggacttcggtccgtaagaagcatcagag

SEQ ID NO: 22408 - DNA, 98 bp, synthetic construct
  misc_feature 1..98: note = engineered ribonucleic acid scaffold (ERS) sequence
  source 1..98: mol_type = other DNA
acacacggttctatctgattactctgaccgtgttcaccagcgactatgtcgtagtgggtaaagcgcttacggacttcggtccgtaagtcgcatcagag

SEQ ID NO: 22409 - DNA, 98 bp, synthetic construct
  misc_feature 1..98: note = engineered ribonucleic acid scaffold (ERS) sequence
  source 1..98: mol_type = other DNA
acactggtttctatctgattactctgaaccagttcaccagcgactatgtcgtagtgggtaaagcgcttacggacttcggtccgtaagtcgcatcagag

SEQ ID NO: 22410 - DNA, 98 bp, synthetic construct
  misc_feature 1..98: note = engineered ribonucleic acid scaffold (ERS) sequence
  source 1..98: mol_type = other DNA
acaggccgttctatctgattactctgacggccttcaccagcgactatgtcgtagtgggtaaagcgcttacggacttcggtccgtaagtcgcatcagag

SEQ ID NO: 22411 - DNA, 98 bp, synthetic construct
  misc_feature 1..98: note = engineered ribonucleic acid scaffold (ERS) sequence
  source 1..98: mol_type = other DNA
acaggtccttctatctgattactctgaggaccttcaccagcgactatgtcgtagtgggtaaagcgcttacggacttcggtccgtaagtcgcatcagag

SEQ ID NO: 22412 - DNA, 98 bp, synthetic construct
  misc_feature 1..98: note = engineered ribonucleic acid scaffold (ERS) sequence
  source 1..98: mol_type = other DNA
accagcaattctatctgattactctgattgctgtcaccagcgactatgtcgtagtgggtaaagcgcttacggacttcggtccgtaagtcgcatcagag

SEQ ID NO: 22413 - DNA, 98 bp, synthetic construct
  misc_feature 1..98: note = engineered ribonucleic acid scaffold (ERS) sequence
  source 1..98: mol_type = other DNA
accgagacttctatctgattactctgaggctcgtcaccagcgactatgtcgtagtgggtaaagcgcttacggacttcggtccgtaagtcgcatcagag

SEQ ID NO: 22414 - DNA, 98 bp, synthetic construct
  misc_feature 1..98: note = engineered ribonucleic acid scaffold (ERS) sequence
  source 1..98: mol_type = other DNA
acctgtagttctatctgattactctgactacagtcaccagcgactatgtcgtagtgggtaaagcgcttacggacttcggtccgtaagtcgcatcagag

SEQ ID NO: 22415 - DNA, 98 bp, synthetic construct
  misc_feature 1..98: note = engineered ribonucleic acid scaffold (ERS) sequence
  source 1..98: mol_type = other DNA
acgagcacttctatctgattactctgagggctctcaccagcgactatgtcgtagtgggtaaagcgcttacggacttcggtccgtaagtcgcatcagag

SEQ ID NO: 22416 - DNA, 98 bp, synthetic construct
  misc_feature 1..98: note = engineered ribonucleic acid scaffold (ERS) sequence
  source 1..98: mol_type = other DNA
acgaggtgttctatctgattactctgacacctctcaccagcgactatgtcgtagtgggtaaagcgcttacggacttcggtccgtaagtcgcatcagag

SEQ ID NO: 22417 - DNA, 98 bp, synthetic construct
  misc_feature 1..98: note = engineered ribonucleic acid scaffold (ERS) sequence
  source 1..98: mol_type = other DNA
acgggactttctatctgattactctgaagtccctcaccagcgactatgtcgtagtgggtaaagcgcttacggacttcggtccgtaagtcgcatcagag

SEQ ID NO: 22418 - DNA, 98 bp, synthetic construct
  misc_feature 1..98: note = engineered ribonucleic acid scaffold (ERS) sequence
  source 1..98: mol_type = other DNA
acgggcaattctatctgattactctgattgccctcaccagcgactatgtcgtagtgggtaaagcgcttacggacttcggtccgtaagtcgcatcagag

SEQ ID NO: 22419 - DNA, 98 bp, synthetic construct
  misc_feature 1..98: note = engineered ribonucleic acid scaffold (ERS) sequence
  source 1..98: mol_type = other DNA
actgtgcgttctatctgattactctgacgcacatcaccagcgactatgtcgtagtgggtaaagcgcttacggacttcggtccgtaagtcgcatcagag

SEQ ID NO: 22420 - DNA, 98 bp, synthetic construct
  misc_feature 1..98: note = engineered ribonucleic acid scaffold (ERS) sequence
  source 1..98: mol_type = other DNA
acacacggttctatctgattactctgaccgtgttcaccagcgactatgtcgtagtgggtaaagcgcttacggagttcgatccgtaagaagcatcagag

SEQ ID NO: 22421 - DNA, 98 bp, synthetic construct
  misc_feature 1..98: note = engineered ribonucleic acid scaffold (ERS) sequence
  source 1..98: mol_type = other DNA
acactggtttctatctgattactctgaaccagttcaccagcgactatgtcgtagtgggtaaagcgcttacggagttcgatccgtaagaagcatcagag

SEQ ID NO: 22422 - DNA, 98 bp, synthetic construct
  misc_feature 1..98: note = engineered ribonucleic acid scaffold (ERS) sequence
  source 1..98: mol_type = other DNA
acaggccgttctatctgattactctgacggccttcaccagcgactatgtcgtagtgggtaaagcgcttacggagttcgatccgtaagaagcatcagag

SEQ ID NO: 22423 - DNA, 98 bp, synthetic construct
  misc_feature 1..98: note = engineered ribonucleic acid scaffold (ERS) sequence
  source 1..98: mol_type = other DNA
acaggtccttctatctgattactctgaggaccttcaccagcgactatgtcgtagtgggtaaagcgcttacggagttcgatccgtaagaagcatcagag

SEQ ID NO: 22424 - DNA, 98 bp, synthetic construct
  misc_feature 1..98: note = engineered ribonucleic acid scaffold (ERS) sequence
  source 1..98: mol_type = other DNA
accagcaattctatctgattactctgattgctgtcaccagcgactatgtcgtagtgggtaaagcgcttacggagttcgatccgtaagaagcatcagag

SEQ ID NO: 22425 - DNA, 98 bp, synthetic construct
  misc_feature 1..98: note = engineered ribonucleic acid scaffold (ERS) sequence
  source 1..98: mol_type = other DNA
accgagacttctatctgattactctgaggctcgtcaccagcgactatgtcgtagtgggtaaagcgcttacggagttcgatccgtaagaagcatcagag

SEQ ID NO: 22426 - DNA, 98 bp, synthetic construct
  misc_feature 1..98: note = engineered ribonucleic acid scaffold (ERS) sequence
  source 1..98: mol_type = other DNA
acctgtagttctatctgattactctgactacagtcaccagcgactatgtcgtagtgggtaaagcgcttacggagttcgatccgtaagaagcatcagag

SEQ ID NO: 22427 - DNA, 98 bp, synthetic construct
  misc_feature 1..98: note = engineered ribonucleic acid scaffold (ERS) sequence
  source 1..98: mol_type = other DNA
acgagcacttctatctgattactctgagggctctcaccagcgactatgtcgtagtgggtaaagcgcttacggagttcgatccgtaagaagcatcagag

SEQ ID NO: 22428 - DNA, 98 bp, synthetic construct
  misc_feature 1..98: note = engineered ribonucleic acid scaffold (ERS) sequence
  source 1..98: mol_type = other DNA
acgaggtgttctatctgattactctgacacctctcaccagcgactatgtcgtagtgggtaaagcgcttacggagttcgatccgtaagaagcatcagag

SEQ ID NO: 22429 - DNA, 98 bp, synthetic construct
  misc_feature 1..98: note = engineered ribonucleic acid scaffold (ERS) sequence
  source 1..98: mol_type = other DNA
acgggactttctatctgattactctgaagtccctcaccagcgactatgtcgtagtgggtaaagcgcttacggagttcgatccgtaagaagcatcagag

SEQ ID NO: 22430 - DNA, 98 bp, synthetic construct
  misc_feature 1..98: note = engineered ribonucleic acid scaffold (ERS) sequence
  source 1..98: mol_type = other DNA
acgggcaattctatctgattactctgattgccctcaccagcgactatgtcgtagtgggtaaagcgcttacggagttcgatccgtaagaagcatcagag

SEQ ID NO: 22431 - DNA, 98 bp, synthetic construct
  misc_feature 1..98: note = engineered ribonucleic acid scaffold (ERS) sequence
  source 1..98: mol_type = other DNA
actgtgcgttctatctgattactctgacgcacatcaccagcgactatgtcgtagtgggtaaagcgcttacggagttcgatccgtaagaagcatcagag

SEQ ID NO: 22432 - DNA, 98 bp, synthetic construct
  misc_feature 1..98: note = engineered ribonucleic acid scaffold (ERS) sequence
  source 1..98: mol_type = other DNA
acacacggttctatctgattactctgaccgtgttcaccagcgactatgtcgtagtgggtaaagcgctttcggacttcggtccggaagaagcatcagag

SEQ ID NO: 22433 - DNA, 98 bp, synthetic construct
  misc_feature 1..98: note = engineered ribonucleic acid scaffold (ERS) sequence
  source 1..98: mol_type = other DNA
acactggtttctatctgattactctgaaccagttcaccagcgactatgtcgtagtgggtaaagcgctttcggacttcggtccggaagaagcatcagag

SEQ ID NO: 22434 - DNA, 98 bp, synthetic construct
  misc_feature 1..98: note = engineered ribonucleic acid scaffold (ERS) sequence
  source 1..98: mol_type = other DNA
acaggccgttctatctgattactctgacggccttcaccagcgactatgtcgtagtgggtaaagcgctttcggacttcggtccggaagaagcatcagag

SEQ ID NO: 22435 - DNA, 98 bp, synthetic construct
  misc_feature 1..98: note = engineered ribonucleic acid scaffold (ERS) sequence
  source 1..98: mol_type = other DNA
acaggtccttctatctgattactctgaggaccttcaccagcgactatgtcgtagtgggtaaagcgctttcggacttcggtccggaagaagcatcagag

SEQ ID NO: 22436 - DNA, 98 bp, synthetic construct
  misc_feature 1..98: note = engineered ribonucleic acid scaffold (ERS) sequence
  source 1..98: mol_type = other DNA
accagcaattctatctgattactctgattgctgtcaccagcgactatgtcgtagtgggtaaagcgctttcggacttcggtccggaagaagcatcagag

SEQ ID NO: 22437 - DNA, 98 bp, synthetic construct
  misc_feature 1..98: note = engineered ribonucleic acid scaffold (ERS) sequence
  source 1..98: mol_type = other DNA
accgagacttctatctgattactctgaggctcgtcaccagcgactatgtcgtagtgggtaaagcgctttcggacttcggtccggaagaagcatcagag

SEQ ID NO: 22438 - DNA, 98 bp, synthetic construct
  misc_feature 1..98: note = engineered ribonucleic acid scaffold (ERS) sequence
  source 1..98: mol_type = other DNA
acctgtagttctatctgattactctgactacagtcaccagcgactatgtcgtagtgggtaaagcgctttcggacttcggtccggaagaagcatcagag

SEQ ID NO: 22439 - DNA, 98 bp, synthetic construct
  misc_feature 1..98: note = engineered ribonucleic acid scaffold (ERS) sequence
  source 1..98: mol_type = other DNA
acgagcacttctatctgattactctgagggctctcaccagcgactatgtcgtagtgggtaaagcgctttcggacttcggtccggaagaagcatcagag

SEQ ID NO: 22440 - DNA, 98 bp, synthetic construct
  misc_feature 1..98: note = engineered ribonucleic acid scaffold (ERS) sequence
  source 1..98: mol_type = other DNA
acgaggtgttctatctgattactctgacacctctcaccagcgactatgtcgtagtgggtaaagcgctttcggacttcggtccggaagaagcatcagag

SEQ ID NO: 22441 - DNA, 98 bp, synthetic construct
  misc_feature 1..98: note = engineered ribonucleic acid scaffold (ERS) sequence
  source 1..98: mol_type = other DNA
acgggactttctatctgattactctgaagtccctcaccagcgactatgtcgtagtgggtaaagcgctttcggacttcggtccggaagaagcatcagag

SEQ ID NO: 22442 - DNA, 98 bp, synthetic construct
  misc_feature 1..98: note = engineered ribonucleic acid scaffold (ERS) sequence
  source 1..98: mol_type = other DNA
acgggcaattctatctgattactctgattgccctcaccagcgactatgtcgtagtgggtaaagcgctttcggacttcggtccggaagaagcatcagag

SEQ ID NO: 22443 - DNA, 98 bp, synthetic construct
  misc_feature 1..98: note = engineered ribonucleic acid scaffold (ERS) sequence
  source 1..98: mol_type = other DNA
actgtgcgttctatctgattactctgacgcacatcaccagcgactatgtcgtagtgggtaaagcgctttcggacttcggtccggaagaagcatcagag

SEQ ID NO: 22444 - DNA, 102 bp, synthetic construct
  misc_feature 1..102: note = engineered ribonucleic acid scaffold (ERS) sequence
  source 1..102: mol_type = other DNA
acacacggttctatctgattactctgaccgtgttcaccagcgactatgtcgtagtgggtaaagcggcagatctgagcctccgagctctctgccgcatcagag

SEQ ID NO: 22445 - DNA, 102 bp, synthetic construct
  misc_feature 1..102: note = engineered ribonucleic acid scaffold (ERS) sequence
  source 1..102: mol_type = other DNA
acactggtttctatctgattactctgaaccagttcaccagcgactatgtcgtagtgggtaaagcggcagatctgagcctccgagctctctgccgcatcagag

SEQ ID NO: 22446 - DNA, 102 bp, synthetic construct
  misc_feature 1..102: note = engineered ribonucleic acid scaffold (ERS) sequence
  source 1..102: mol_type = other DNA
acaggccgttctatctgattactctgacggccttcaccagcgactatgtcgtagtgggtaaagcggcagatctgagcctccgagctctctgccgcatcagag

SEQ ID NO: 22447 - DNA, 102 bp, synthetic construct
  misc_feature 1..102: note = engineered ribonucleic acid scaffold (ERS) sequence
  source 1..102: mol_type = other DNA
acaggtccttctatctgattactctgaggaccttcaccagcgactatgtcgtagtgggtaaagcggcagatctgagcctccgagctctctgccgcatcagag

SEQ ID NO: 22448 - DNA, 102 bp, synthetic construct
  misc_feature 1..102: note = engineered ribonucleic acid scaffold (ERS) sequence
  source 1..102: mol_type = other DNA
accagcaattctatctgattactctgattgctgtcaccagcgactatgtcgtagtgggtaaagcggcagatctgagcctccgagctctctgccgcatcagag

SEQ ID NO: 22449 - DNA, 102 bp, synthetic construct
  misc_feature 1..102: note = engineered ribonucleic acid scaffold (ERS) sequence
  source 1..102: mol_type = other DNA
accgagacttctatctgattactctgaggctcgtcaccagcgactatgtcgtagtgggtaaagcggcagatctgagcctccgagctctctgccgcatcagag

SEQ ID NO: 22450 - DNA, 102 bp, synthetic construct
  misc_feature 1..102: note = engineered ribonucleic acid scaffold (ERS) sequence
  source 1..102: mol_type = other DNA
acctgtagttctatctgattactctgactacagtcaccagcgactatgtcgtagtgggtaaagcggcagatctgagcctccgagctctctgccgcatcagag

SEQ ID NO: 22451 - DNA, 102 bp, synthetic construct
  misc_feature 1..102: note = engineered ribonucleic acid scaffold (ERS) sequence
  source 1..102: mol_type = other DNA
acgagcacttctatctgattactctgagggctctcaccagcgactatgtcgtagtgggtaaagcggcagatctgagcctccgagctctctgccgcatcagag

SEQ ID NO: 22452 - DNA, 102 bp, synthetic construct
  misc_feature 1..102: note = engineered ribonucleic acid scaffold (ERS) sequence
  source 1..102: mol_type = other DNA
acgaggtgttctatctgattactctgacacctctcaccagcgactatgtcgtagtgggtaaagcggcagatctgagcctccgagctctctgccgcatcagag

SEQ ID NO: 22453 - DNA, 102 bp, synthetic construct
  misc_feature 1..102: note = engineered ribonucleic acid scaffold (ERS) sequence
  source 1..102: mol_type = other DNA
acgggactttctatctgattactctgaagtccctcaccagcgactatgtcgtagtgggtaaagcggcagatctgagcctccgagctctctgccgcatcagag

SEQ ID NO: 22454 - DNA, 102 bp, synthetic construct
  misc_feature 1..102: note = engineered ribonucleic acid scaffold (ERS) sequence
  source 1..102: mol_type = other DNA
acgggcaattctatctgattactctgattgccctcaccagcgactatgtcgtagtgggtaaagcggcagatctgagcctccgagctctctgccgcatcagag

SEQ ID NO: 22455 - DNA, 102 bp, synthetic construct
  misc_feature 1..102: note = engineered ribonucleic acid scaffold (ERS) sequence
  source 1..102: mol_type = other DNA
actgtgcgttctatctgattactctgacgcacatcaccagcgactatgtcgtagtgggtaaagcggcagatctgagcctccgagctctctgccgcatcagag

SEQ ID NO: 22456 - DNA, 98 bp, synthetic construct
  misc_feature 1..98: note = engineered ribonucleic acid scaffold (ERS) sequence
  source 1..98: mol_type = other DNA
acacacggttctatctgattactctgaccgtgttcaccagcgactatgtcgtagtgggtaaagcggttacggacttcggtccgtaagacgcatcagag

SEQ ID NO: 22457 - DNA, 98 bp, synthetic construct
  misc_feature 1..98: note = engineered ribonucleic acid scaffold (ERS) sequence
  source 1..98: mol_type = other DNA
acactggtttctatctgattactctgaaccagttcaccagcgactatgtcgtagtgggtaaagcggttacggacttcggtccgtaagacgcatcagag

SEQ ID NO: 22458 - DNA, 98 bp, synthetic construct
  misc_feature 1..98: note = engineered ribonucleic acid scaffold (ERS) sequence
  source 1..98: mol_type = other DNA
acaggccgttctatctgattactctgacggccttcaccagcgactatgtcgtagtgggtaaagcggttacggacttcggtccgtaagacgcatcagag

SEQ ID NO: 22459 - DNA, 98 bp, synthetic construct
  misc_feature 1..98: note = engineered ribonucleic acid scaffold (ERS) sequence
  source 1..98: mol_type = other DNA
acaggtccttctatctgattactctgaggaccttcaccagcgactatgtcgtagtgggtaaagcggttacggacttcggtccgtaagacgcatcagag

SEQ ID NO: 22460 - DNA, 98 bp, synthetic construct
  misc_feature 1..98: note = engineered ribonucleic acid scaffold (ERS) sequence
  source 1..98: mol_type = other DNA
accagcaattctatctgattactctgattgctgtcaccagcgactatgtcgtagtgggtaaagcggttacggacttcggtccgtaagacgcatcagag

SEQ ID NO: 22461 - DNA, 98 bp, synthetic construct
  misc_feature 1..98: note = engineered ribonucleic acid scaffold (ERS) sequence
  source 1..98: mol_type = other DNA
accgagacttctatctgattactctgaggctcgtcaccagcgactatgtcgtagtgggtaaagcggttacggacttcggtccgtaagacgcatcagag

SEQ ID NO: 22462 - DNA, 98 bp, synthetic construct
  misc_feature 1..98: note = engineered ribonucleic acid scaffold (ERS) sequence
  source 1..98: mol_type = other DNA
acctgtagttctatctgattactctgactacagtcaccagcgactatgtcgtagtgggtaaagcggttacggacttcggtccgtaagacgcatcagag

SEQ ID NO: 22463 - DNA, 98 bp, synthetic construct
  misc_feature 1..98: note = engineered ribonucleic acid scaffold (ERS) sequence
  source 1..98: mol_type = other DNA
acgagcacttctatctgattactctgagggctctcaccagcgactatgtcgtagtgggtaaagcggttacggacttcggtccgtaagacgcatcagag

SEQ ID NO: 22464 - DNA, 98 bp, synthetic construct
  misc_feature 1..98: note = engineered ribonucleic acid scaffold (ERS) sequence
  source 1..98: mol_type = other DNA
acgaggtgttctatctgattactctgacacctctcaccagcgactatgtcgtagtgggtaaagcggttacggacttcggtccgtaagacgcatcagag

SEQ ID NO: 22465 - DNA, 98 bp, synthetic construct
  misc_feature 1..98: note = engineered ribonucleic acid scaffold (ERS) sequence
  source 1..98: mol_type = other DNA
acgggactttctatctgattactctgaagtccctcaccagcgactatgtcgtagtgggtaaagcggttacggacttcggtccgtaagacgcatcagag

SEQ ID NO: 22466 - DNA, 98 bp, synthetic construct
  misc_feature 1..98: note = engineered ribonucleic acid scaffold (ERS) sequence
  source 1..98: mol_type = other DNA
acgggcaattctatctgattactctgattgccctcaccagcgactatgtcgtagtgggtaaagcggttacggacttcggtccgtaagacgcatcagag

SEQ ID NO: 22467 - DNA, 98 bp, synthetic construct
  misc_feature 1..98: note = engineered ribonucleic acid scaffold (ERS) sequence
  source 1..98: mol_type = other DNA
actgtgcgttctatctgattactctgacgcacatcaccagcgactatgtcgtagtgggtaaagcggttacggacttcggtccgtaagacgcatcagag

SEQ ID NO: 22468 - DNA, 75 bp, synthetic construct
  misc_feature 1..75: note = engineered ribonucleic acid scaffold (ERS) sequence
  source 1..75: mol_type = other DNA
acacacggttctatctgattactctgaccgtgttcaccagcgactatgtcgtagtgggtaaagctagcatcagag

SEQ ID NO: 22469 - DNA, 75 bp, synthetic construct
  misc_feature 1..75: note = engineered ribonucleic acid scaffold (ERS) sequence
  source 1..75: mol_type = other DNA
acactggtttctatctgattactctgaaccagttcaccagcgactatgtcgtagtgggtaaagctagcatcagag

SEQ ID NO: 22470 - DNA, 75 bp, synthetic construct
  misc_feature 1..75: note = engineered ribonucleic acid scaffold (ERS) sequence
  source 1..75: mol_type = other DNA
acaggccgttctatctgattactctgacggccttcaccagcgactatgtcgtagtgggtaaagctagcatcagag

SEQ ID NO: 22471 - DNA, 75 bp, synthetic construct
  misc_feature 1..75: note = engineered ribonucleic acid scaffold (ERS) sequence
  source 1..75: mol_type = other DNA
acaggtccttctatctgattactctgaggaccttcaccagcgactatgtcgtagtgggtaaagctagcatcagag

SEQ ID NO: 22472 - DNA, 75 bp, synthetic construct
  misc_feature 1..75: note = engineered ribonucleic acid scaffold (ERS) sequence
  source 1..75: mol_type = other DNA
accagcaattctatctgattactctgattgctgtcaccagcgactatgtcgtagtgggtaaagctagcatcagag

SEQ ID NO: 22473 - DNA, 75 bp, synthetic construct
  misc_feature 1..75: note = engineered ribonucleic acid scaffold (ERS) sequence
  source 1..75: mol_type = other DNA
accgagacttctatctgattactctgaggctcgtcaccagcgactatgtcgtagtgggtaaagctagcatcagag

SEQ ID NO: 22474 - DNA, 75 bp, synthetic construct
  misc_feature 1..75: note = engineered ribonucleic acid scaffold (ERS) sequence
  source 1..75: mol_type = other DNA
acctgtagttctatctgattactctgactacagtcaccagcgactatgtcgtagtgggtaaagctagcatcagag

SEQ ID NO: 22475 - DNA, 75 bp, synthetic construct
  misc_feature 1..75: note = engineered ribonucleic acid scaffold (ERS) sequence
  source 1..75: mol_type = other DNA
acgagcacttctatctgattactctgagggctctcaccagcgactatgtcgtagtgggtaaagctagcatcagag

SEQ ID NO: 22476 - DNA, 75 bp, synthetic construct
  misc_feature 1..75: note = engineered ribonucleic acid scaffold (ERS) sequence
  source 1..75: mol_type = other DNA
acgaggtgttctatctgattactctgacacctctcaccagcgactatgtcgtagtgggtaaagctagcatcagag

SEQ ID NO: 22477 - DNA, 75 bp, synthetic construct
  misc_feature 1..75: note = engineered ribonucleic acid scaffold (ERS) sequence
  source 1..75: mol_type = other DNA
acgggactttctatctgattactctgaagtccctcaccagcgactatgtcgtagtgggtaaagctagcatcagag

SEQ ID NO: 22478 - DNA, 75 bp, synthetic construct
  misc_feature 1..75: note = engineered ribonucleic acid scaffold (ERS) sequence
  source 1..75: mol_type = other DNA
acgggcaattctatctgattactctgattgccctcaccagcgactatgtcgtagtgggtaaagctagcatcagag

SEQ ID NO: 22479 - DNA, 75 bp, synthetic construct
  misc_feature 1..75: note = engineered ribonucleic acid scaffold (ERS) sequence
  source 1..75: mol_type = other DNA
actgtgcgttctatctgattactctgacgcacatcaccagcgactatgtcgtagtgggtaaagctagcatcagag

SEQ ID NO: 22480 - DNA, 89 bp, synthetic construct
  misc_feature 1..89: note = engineered ribonucleic acid scaffold (ERS) sequence
  source 1..89: mol_type = other DNA
acacacggttctatctgattactctgaccgtgttcaccagcgactatgtcgtagtgggtaaagctccctattcggatggagcatcagag

SEQ ID NO: 22481 - DNA, 89 bp, synthetic construct
  misc_feature 1..89: note = engineered ribonucleic acid scaffold (ERS) sequence
  source 1..89: mol_type = other DNA
acactggtttctatctgattactctgaaccagttcaccagcgactatgtcgtagtgggtaaagctccctattcggatggagcatcagag

SEQ ID NO: 22482 - DNA, 89 bp, synthetic construct
  misc_feature 1..89: note = engineered ribonucleic acid scaffold (ERS) sequence
  source 1..89: mol_type = other DNA
acaggccgttctatctgattactctgacggccttcaccagcgactatgtcgtagtgggtaaagctccctattcggatggagcatcagag

SEQ ID NO: 22483 - DNA, 89 bp, synthetic construct
  misc_feature 1..89: note = engineered ribonucleic acid scaffold (ERS) sequence
  source 1..89: mol_type = other DNA
acaggtccttctatctgattactctgaggaccttcaccagcgactatgtcgtagtgggtaaagctccctattcggatggagcatcagag

SEQ ID NO: 22484 - DNA, 89 bp, synthetic construct
  misc_feature 1..89: note = engineered ribonucleic acid scaffold (ERS) sequence
  source 1..89: mol_type = other DNA
accagcaattctatctgattactctgattgctgtcaccagcgactatgtcgtagtgggtaaagctccctattcggatggagcatcagag

SEQ ID NO: 22485 - DNA, 89 bp, synthetic construct
  misc_feature 1..89: note = engineered ribonucleic acid scaffold (ERS) sequence
  source 1..89: mol_type = other DNA
accgagacttctatctgattactctgaggctcgtcaccagcgactatgtcgtagtgggtaaagctccctattcggatggagcatcagag

SEQ ID NO: 22486 - DNA, 89 bp, synthetic construct
  misc_feature 1..89: note = engineered ribonucleic acid scaffold (ERS) sequence
  source 1..89: mol_type = other DNA
acctgtagttctatctgattactctgactacagtcaccagcgactatgtcgtagtgggtaaagctccctattcggatggagcatcagag

SEQ ID NO: 22487 - DNA, 89 bp, synthetic construct
  misc_feature 1..89: note = engineered ribonucleic acid scaffold (ERS) sequence
  source 1..89: mol_type = other DNA
acgagcacttctatctgattactctgagggctctcaccagcgactatgtcgtagtgggtaaagctccctattcggatggagcatcagag

SEQ ID NO: 22488 - DNA, 89 bp, synthetic construct
  misc_feature 1..89: note = engineered ribonucleic acid scaffold (ERS) sequence
  source 1..89: mol_type = other DNA
acgaggtgttctatctgattactctgacacctctcaccagcgactatgtcgtagtgggtaaagctccctattcggatggagcatcagag

SEQ ID NO: 22489 - DNA, 89 bp, synthetic construct
  misc_feature 1..89: note = engineered ribonucleic acid scaffold (ERS) sequence
  source 1..89: mol_type = other DNA
acgggactttctatctgattactctgaagtccctcaccagcgactatgtcgtagtgggtaaagctccctattcggatggagcatcagag

SEQ ID NO: 22490 - DNA, 89 bp, synthetic construct
  misc_feature 1..89: note = engineered ribonucleic acid scaffold (ERS) sequence
  source 1..89: mol_type = other DNA
acgggcaattctatctgattactctgattgccctcaccagcgactatgtcgtagtgggtaaagctccctattcggatggagcatcagag

SEQ ID NO: 22491 - DNA, 89 bp, synthetic construct
  misc_feature 1..89: note = engineered ribonucleic acid scaffold (ERS) sequence
  source 1..89: mol_type = other DNA
actgtgcgttctatctgattactctgacgcacatcaccagcgactatgtcgtagtgggtaaagctccctattcggatggagcatcagag

SEQ ID NO: 22492 - DNA, 95 bp, synthetic construct
  misc_feature 1..95: note = engineered ribonucleic acid scaffold (ERS) sequence
  source 1..95: mol_type = other DNA
acacacggttctatctgattactctgaccgtgttcaccagcgactatgtcgtagtgggtaaagctccctcacagggatgtgagggagcatcagag

SEQ ID NO: 22493 - DNA, 95 bp, synthetic construct
  misc_feature 1..95: note = engineered ribonucleic acid scaffold (ERS) sequence
  source 1..95: mol_type = other DNA
acactggtttctatctgattactctgaaccagttcaccagcgactatgtcgtagtgggtaaagctccctcacagggatgtgagggagcatcagag

SEQ ID NO: 22494 - DNA, 95 bp, synthetic construct
  misc_feature 1..95: note = engineered ribonucleic acid scaffold (ERS) sequence
  source 1..95: mol_type = other DNA
acaggccgttctatctgattactctgacggccttcaccagcgactatgtcgtagtgggtaaagctccctcacagggatgtgagggagcatcagag

SEQ ID NO: 22495 - DNA, 95 bp, synthetic construct
  misc_feature 1..95: note = engineered ribonucleic acid scaffold (ERS) sequence
  source 1..95: mol_type = other DNA
acaggtccttctatctgattactctgaggaccttcaccagcgactatgtcgtagtgggtaaagctccctcacagggatgtgagggagcatcagag

SEQ ID NO: 22496 - DNA, 95 bp, synthetic construct
  misc_feature 1..95: note = engineered ribonucleic acid scaffold (ERS) sequence
  source 1..95: mol_type = other DNA
accagcaattctatctgattactctgattgctgtcaccagcgactatgtcgtagtgggtaaagctccctcacagggatgtgagggagcatcagag

SEQ ID NO: 22497 - DNA, 95 bp, synthetic construct
  misc_feature 1..95: note = engineered ribonucleic acid scaffold (ERS) sequence
  source 1..95: mol_type = other DNA
accgagacttctatctgattactctgaggctcgtcaccagcgactatgtcgtagtgggtaaagctccctcacagggatgtgagggagcatcagag

SEQ ID NO: 22498 - DNA, 95 bp, synthetic construct
  misc_feature 1..95: note = engineered ribonucleic acid scaffold (ERS) sequence
  source 1..95: mol_type = other DNA
acctgtagttctatctgattactctgactacagtcaccagcgactatgtcgtagtgggtaaagctccctcacagggatgtgagggagcatcagag

SEQ ID NO: 22499 - DNA, 95 bp, synthetic construct
  misc_feature 1..95: note = engineered ribonucleic acid scaffold (ERS) sequence
  source 1..95: mol_type = other DNA
acgagcacttctatctgattactctgagggctctcaccagcgactatgtcgtagtgggtaaagctccctcacagggatgtgagggagcatcagag

SEQ ID NO: 22500 - DNA, 95 bp, synthetic construct
  misc_feature 1..95: note = engineered ribonucleic acid scaffold (ERS) sequence
  source 1..95: mol_type = other DNA
acgaggtgttctatctgattactctgacacctctcaccagcgactatgtcgtagtgggtaaagctccctcacagggatgtgagggagcatcagag

SEQ ID NO: 22501 - DNA, 95 bp, synthetic construct
  misc_feature 1..95: note = engineered ribonucleic acid scaffold (ERS) sequence
  source 1..95: mol_type = other DNA
acgggactttctatctgattactctgaagtccctcaccagcgactatgtcgtagtgggtaaagctccctcacagggatgtgagggagcatcagag

SEQ ID NO: 22502 - DNA, 95 bp, synthetic construct
  misc_feature 1..95: note = engineered ribonucleic acid scaffold (ERS) sequence
  source 1..95: mol_type = other DNA
acgggcaattctatctgattactctgattgccctcaccagcgactatgtcgtagtgggtaaagctccctcacagggatgtgagggagcatcagag

SEQ ID NO: 22503 - DNA, 95 bp, synthetic construct
  misc_feature 1..95: note = engineered ribonucleic acid scaffold (ERS) sequence
  source 1..95: mol_type = other DNA
actgtgcgttctatctgattactctgacgcacatcaccagcgactatgtcgtagtgggtaaagctccctcacagggatgtgagggagcatcagag

SEQ ID NO: 22504 - DNA, 94 bp, synthetic construct
  misc_feature 1..94: note = engineered ribonucleic acid scaffold (ERS) sequence
  source 1..94: mol_type = other DNA
acacacggttctatctgattactctgaccgtgttcaccagcgactatgtcgtagtgggtaaagctccctcagctgcagtgagggagcatcagag

SEQ ID NO: 22505 - DNA, 94 bp, synthetic construct
  misc_feature 1..94: note = engineered ribonucleic acid scaffold (ERS) sequence
  source 1..94: mol_type = other DNA
acactggtttctatctgattactctgaaccagttcaccagcgactatgtcgtagtgggtaaagctccctcagctgcagtgagggagcatcagag

SEQ ID NO: 22506 - DNA, 94 bp, synthetic construct
  misc_feature 1..94: note = engineered ribonucleic acid scaffold (ERS) sequence
  source 1..94: mol_type = other DNA
acaggccgttctatctgattactctgacggccttcaccagcgactatgtcgtagtgggtaaagctccctcagctgcagtgagggagcatcagag

SEQ ID NO: 22507 - DNA, 94 bp, synthetic construct
  misc_feature 1..94: note = engineered ribonucleic acid scaffold (ERS) sequence
  source 1..94: mol_type = other DNA
acaggtccttctatctgattactctgaggaccttcaccagcgactatgtcgtagtgggtaaagctccctcagctgcagtgagggagcatcagag

SEQ ID NO: 22508 - DNA, 94 bp, synthetic construct
  misc_feature 1..94: note = engineered ribonucleic acid scaffold (ERS) sequence
  source 1..94: mol_type = other DNA
accagcaattctatctgattactctgattgctgtcaccagcgactatgtcgtagtgggtaaagctccctcagctgcagtgagggagcatcagag

SEQ ID NO: 22509 - DNA, 94 bp, synthetic construct
  misc_feature 1..94: note = engineered ribonucleic acid scaffold (ERS) sequence
  source 1..94: mol_type = other DNA
accgagacttctatctgattactctgaggctcgtcaccagcgactatgtcgtagtgggtaaagctccctcagctgcagtgagggagcatcagag

SEQ ID NO: 22510 - DNA, 94 bp, synthetic construct
  misc_feature 1..94: note = engineered ribonucleic acid scaffold (ERS) sequence
  source 1..94: mol_type = other DNA
acctgtagttctatctgattactctgactacagtcaccagcgactatgtcgtagtgggtaaagctccctcagctgcagtgagggagcatcagag

SEQ ID NO: 22511 - DNA, 94 bp, synthetic construct
  misc_feature 1..94: note = engineered ribonucleic acid scaffold (ERS) sequence
  source 1..94: mol_type = other DNA
acgagcacttctatctgattactctgagggctctcaccagcgactatgtcgtagtgggtaaagctccctcagctgcagtgagggagcatcagag

SEQ ID NO: 22512 - DNA, 94 bp, synthetic construct
  misc_feature 1..94: note = engineered ribonucleic acid scaffold (ERS) sequence
  source 1..94: mol_type = other DNA
acgaggtgttctatctgattactctgacacctctcaccagcgactatgtcgtagtgggtaaagctccctcagctgcagtgagggagcatcagag

SEQ ID NO: 22513 - DNA, 94 bp, synthetic construct
  misc_feature 1..94: note = engineered ribonucleic acid scaffold (ERS) sequence
  source 1..94: mol_type = other DNA
acgggactttctatctgattactctgaagtccctcaccagcgactatgtcgtagtgggtaaagctccctcagctgcagtgagggagcatcagag

SEQ ID NO: 22514 - DNA, 94 bp, synthetic construct
  misc_feature 1..94: note = engineered ribonucleic acid scaffold (ERS) sequence
  source 1..94: mol_type = other DNA
acgggcaattctatctgattactctgattgccctcaccagcgactatgtcgtagtgggtaaagctccctcagctgcagtgagggagcatcagag

SEQ ID NO: 22515 - DNA, 94 bp, synthetic construct
  misc_feature 1..94: note = engineered ribonucleic acid scaffold (ERS) sequence
  source 1..94: mol_type = other DNA
actgtgcgttctatctgattactctgacgcacatcaccagcgactatgtcgtagtgggtaaagctccctcagctgcagtgagggagcatcagag

SEQ ID NO: 22516 - DNA, 89 bp, synthetic construct
  misc_feature 1..89: note = engineered ribonucleic acid scaffold (ERS) sequence
  source 1..89: mol_type = other DNA
acacacggttctatctgattactctgaccgtgttcaccagcgactatgtcgtagtgggtaaagctccctcataggagggagcatcagag

SEQ ID NO: 22517 - DNA, 89 bp, synthetic construct
  misc_feature 1..89: note = engineered ribonucleic acid scaffold (ERS) sequence
  source 1..89: mol_type = other DNA
acactggtttctatctgattactctgaaccagttcaccagcgactatgtcgtagtgggtaaagctccctcataggagggagcatcagag

SEQ ID NO: 22518 - DNA, 89 bp, synthetic construct
  misc_feature 1..89: note = engineered ribonucleic acid scaffold (ERS) sequence
  source 1..89: mol_type = other DNA
acaggccgttctatctgattactctgacggccttcaccagcgactatgtcgtagtgggtaaagctccctcataggagggagcatcagag

SEQ ID NO: 22519 - DNA, 89 bp, synthetic construct
  misc_feature 1..89: note = engineered ribonucleic acid scaffold (ERS) sequence
  source 1..89: mol_type = other DNA
acaggtccttctatctgattactctgaggaccttcaccagcgactatgtcgtagtgggtaaagctccctcataggagggagcatcagag

SEQ ID NO: 22520 - DNA, 89 bp, synthetic construct
  misc_feature 1..89: note = engineered ribonucleic acid scaffold (ERS) sequence
  source 1..89: mol_type = other DNA
accagcaattctatctgattactctgattgctgtcaccagcgactatgtcgtagtgggtaaagctccctcataggagggagcatcagag

SEQ ID NO: 22521 - DNA, 89 bp, synthetic construct
  misc_feature 1..89: note = engineered ribonucleic acid scaffold (ERS) sequence
  source 1..89: mol_type = other DNA
accgagacttctatctgattactctgaggctcgtcaccagcgactatgtcgtagtgggtaaagctccctcataggagggagcatcagag

SEQ ID NO: 22522 - DNA, 89 bp, synthetic construct
  misc_feature 1..89: note = engineered ribonucleic acid scaffold (ERS) sequence
  source 1..89: mol_type = other DNA
acctgtagttctatctgattactctgactacagtcaccagcgactatgtcgtagtgggtaaagctccctcataggagggagcatcagag

SEQ ID NO: 22523 - DNA, 89 bp, synthetic construct
  misc_feature 1..89: note = engineered ribonucleic acid scaffold (ERS) sequence
  source 1..89: mol_type = other DNA
acgagcacttctatctgattactctgagggctctcaccagcgactatgtcgtagtgggtaaagctccctcataggagggagcatcagag

SEQ ID NO: 22524 - DNA, 89 bp, synthetic construct
  misc_feature 1..89: note = engineered ribonucleic acid scaffold (ERS) sequence
  source 1..89: mol_type = other DNA
acgaggtgttctatctgattactctgacacctctcaccagcgactatgtcgtagtgggtaaagctccctcataggagggagcatcagag

SEQ ID NO: 22525 - DNA, 89 bp, synthetic construct
  misc_feature 1..89: note = engineered ribonucleic acid scaffold (ERS) sequence
  source 1..89: mol_type = other DNA
acgggactttctatctgattactctgaagtccctcaccagcgactatgtcgtagtgggtaaagctccctcataggagggagcatcagag

SEQ ID NO: 22526 - DNA, 89 bp, synthetic construct
  misc_feature 1..89: note = engineered ribonucleic acid scaffold (ERS) sequence
  source 1..89: mol_type = other DNA
acgggcaattctatctgattactctgattgccctcaccagcgactatgtcgtagtgggtaaagctccctcataggagggagcatcagag

SEQ ID NO: 22527 - DNA, 89 bp, synthetic construct
  misc_feature 1..89: note = engineered ribonucleic acid scaffold (ERS) sequence
  source 1..89: mol_type = other DNA
actgtgcgttctatctgattactctgacgcacatcaccagcgactatgtcgtagtgggtaaagctccctcataggagggagcatcagag

SEQ ID NO: 22528 - DNA, 90 bp, synthetic construct
  misc_feature 1..90: note = engineered ribonucleic acid scaffold (ERS) sequence
  source 1..90: mol_type = other DNA
acacacggttctatctgattactctgaccgtgttcaccagcgactatgtcgtagtgggtaaagctccctcttcaggagggagcatcagag

SEQ ID NO: 22529 - DNA, 90 bp, synthetic construct
  misc_feature 1..90: note = engineered ribonucleic acid scaffold (ERS) sequence
  source 1..90: mol_type = other DNA
acactggtttctatctgattactctgaaccagttcaccagcgactatgtcgtagtgggtaaagctccctcttcaggagggagcatcagag

SEQ ID NO: 22530 - DNA, 90 bp, synthetic construct
  misc_feature 1..90: note = engineered ribonucleic acid scaffold (ERS) sequence
  source 1..90: mol_type = other DNA
acaggccgttctatctgattactctgacggccttcaccagcgactatgtcgtagtgggtaaagctccctcttcaggagggagcatcagag

SEQ ID NO: 22531 - DNA, 90 bp, synthetic construct
  misc_feature 1..90: note = engineered ribonucleic acid scaffold (ERS) sequence
  source 1..90: mol_type = other DNA
acaggtccttctatctgattactctgaggaccttcaccagcgactatgtcgtagtgggtaaagctccctcttcaggagggagcatcagag

SEQ ID NO: 22532 - DNA, 90 bp, synthetic construct
  misc_feature 1..90: note = engineered ribonucleic acid scaffold (ERS) sequence
  source 1..90: mol_type = other DNA
accagcaattctatctgattactctgattgctgtcaccagcgactatgtcgtagtgggtaaagctccctcttcaggagggagcatcagag

SEQ ID NO: 22533 - DNA, 90 bp, synthetic construct
  misc_feature 1..90: note = engineered ribonucleic acid scaffold (ERS) sequence
  source 1..90: mol_type = other DNA
accgagacttctatctgattactctgaggctcgtcaccagcgactatgtcgtagtgggtaaagctccctcttcaggagggagcatcagag

SEQ ID NO: 22534 - DNA, 90 bp, synthetic construct
  misc_feature 1..90: note = engineered ribonucleic acid scaffold (ERS) sequence
  source 1..90: mol_type = other DNA
acctgtagttctatctgattactctgactacagtcaccagcgactatgtcgtagtgggtaaagctccctcttcaggagggagcatcagag

SEQ ID NO: 22535 - DNA, 90 bp, synthetic construct
  misc_feature 1..90: note = engineered ribonucleic acid scaffold (ERS) sequence
  source 1..90: mol_type = other DNA
acgagcacttctatctgattactctgagggctctcaccagcgactatgtcgtagtgggtaaagctccctcttcaggagggagcatcagag

SEQ ID NO: 22536 - DNA, 90 bp, synthetic construct
  misc_feature 1..90: note = engineered ribonucleic acid scaffold (ERS) sequence
  source 1..90: mol_type = other DNA
acgaggtgttctatctgattactctgacacctctcaccagcgactatgtcgtagtgggtaaagctccctcttcaggagggagcatcagag

SEQ ID NO: 22537 - DNA, 90 bp, synthetic construct
  misc_feature 1..90: note = engineered ribonucleic acid scaffold (ERS) sequence
  source 1..90: mol_type = other DNA
acgggactttctatctgattactctgaagtccctcaccagcgactatgtcgtagtgggtaaagctccctcttcaggagggagcatcagag

SEQ ID NO: 22538 - DNA, 90 bp, synthetic construct
  misc_feature 1..90: note = engineered ribonucleic acid scaffold (ERS) sequence
  source 1..90: mol_type = other DNA
acgggcaattctatctgattactctgattgccctcaccagcgactatgtcgtagtgggtaaagctccctcttcaggagggagcatcagag

SEQ ID NO: 22539 - DNA, 90 bp, synthetic construct
  misc_feature 1..90: note = engineered ribonucleic acid scaffold (ERS) sequence
  source 1..90: mol_type = other DNA
actgtgcgttctatctgattactctgacgcacatcaccagcgactatgtcgtagtgggtaaagctccctcttcaggagggagcatcagag

SEQ ID NO: 22540 - DNA, 89 bp, synthetic construct
  misc_feature 1..89: note = engineered ribonucleic acid scaffold (ERS) sequence
  source 1..89: mol_type = other DNA
acacacggttctatctgattactctgaccgtgttcaccagcgactatgtcgtagtgggtaaagctccctcttcggagagtgcatcagag

SEQ ID NO: 22541 - DNA, 89 bp, synthetic construct
  misc_feature 1..89: note = engineered ribonucleic acid scaffold (ERS) sequence
  source 1..89: mol_type = other DNA
acactggtttctatctgattactctgaaccagttcaccagcgactatgtcgtagtgggtaaagctccctcttcggagagtgcatcagag

SEQ ID NO: 22542 - DNA, 89 bp, synthetic construct
  misc_feature 1..89: note = engineered ribonucleic acid scaffold (ERS) sequence
  source 1..89: mol_type = other DNA
acaggccgttctatctgattactctgacggccttcaccagcgactatgtcgtagtgggtaaagctccctcttcggagagtgcatcagag

SEQ ID NO: 22543 - DNA, 89 bp, synthetic construct
  misc_feature 1..89: note = engineered ribonucleic acid scaffold (ERS) sequence
  source 1..89: mol_type = other DNA
acaggtccttctatctgattactctgaggaccttcaccagcgactatgtcgtagtgggtaaagctccctcttcggagagtgcatcagag

SEQ ID NO: 22544 - DNA, 89 bp, synthetic construct
  misc_feature 1..89: note = engineered ribonucleic acid scaffold (ERS) sequence
  source 1..89: mol_type = other DNA
accagcaattctatctgattactctgattgctgtcaccagcgactatgtcgtagtgggtaaagctccctcttcggagagtgcatcagag

SEQ ID NO: 22545 - DNA, 89 bp, synthetic construct
  misc_feature 1..89: note = engineered ribonucleic acid scaffold (ERS) sequence
  source 1..89: mol_type = other DNA
accgagacttctatctgattactctgaggctcgtcaccagcgactatgtcgtagtgggtaaagctccctcttcggagagtgcatcagag

SEQ ID NO: 22546 - DNA, 89 bp, synthetic construct
  misc_feature 1..89: note = engineered ribonucleic acid scaffold (ERS) sequence
  source 1..89: mol_type = other DNA
acctgtagttctatctgattactctgactacagtcaccagcgactatgtcgtagtgggtaaagctccctcttcggagagtgcatcagag

SEQ ID NO: 22547 - DNA, 89 bp, synthetic construct
  misc_feature 1..89: note = engineered ribonucleic acid scaffold (ERS) sequence
  source 1..89: mol_type = other DNA
acgagcacttctatctgattactctgagggctctcaccagcgactatgtcgtagtgggtaaagctccctcttcggagagtgcatcagag

SEQ ID NO: 22548 - DNA, 89 bp, synthetic construct
  misc_feature 1..89: note = engineered ribonucleic acid scaffold (ERS) sequence
  source 1..89: mol_type = other DNA
acgaggtgttctatctgattactctgacacctctcaccagcgactatgtcgtagtgggtaaagctccctcttcggagagtgcatcagag

SEQ ID NO: 22549 - DNA, 89 bp, synthetic construct
  misc_feature 1..89: note = engineered ribonucleic acid scaffold (ERS) sequence
  source 1..89: mol_type = other DNA
acgggactttctatctgattactctgaagtccctcaccagcgactatgtcgtagtgggtaaagctccctcttcggagagtgcatcagag

SEQ ID NO: 22550 - DNA, 89 bp, synthetic construct
  misc_feature 1..89: note = engineered ribonucleic acid scaffold (ERS) sequence
  source 1..89: mol_type = other DNA
acgggcaattctatctgattactctgattgccctcaccagcgactatgtcgtagtgggtaaagctccctcttcggagagtgcatcagag

SEQ ID NO: 22551 - DNA, 89 bp, synthetic construct
  misc_feature 1..89: note = engineered ribonucleic acid scaffold (ERS) sequence
  source 1..89: mol_type = other DNA
actgtgcgttctatctgattactctgacgcacatcaccagcgactatgtcgtagtgggtaaagctccctcttcggagagtgcatcagag

SEQ ID NO: 22552 - DNA, 89 bp, synthetic construct
  misc_feature 1..89: note = engineered ribonucleic acid scaffold (ERS) sequence
  source 1..89: mol_type = other DNA
acacacggttctatctgattactctgaccgtgttcaccagcgactatgtcgtagtgggtaaagctccctcttcggaggaggcatcagag

SEQ ID NO: 22553 - DNA, 89 bp, synthetic construct
  misc_feature 1..89: note = engineered ribonucleic acid scaffold (ERS) sequence
  source 1..89: mol_type = other DNA
acactggtttctatctgattactctgaaccagttcaccagcgactatgtcgtagtgggtaaagctccctcttcggaggaggcatcagag

SEQ ID NO: 22554 - DNA, 89 bp, synthetic construct
  misc_feature 1..89: note = engineered ribonucleic acid scaffold (ERS) sequence
  source 1..89: mol_type = other DNA
acaggccgttctatctgattactctgacggccttcaccagcgactatgtcgtagtgggtaaagctccctcttcggaggaggcatcagag

SEQ ID NO: 22555 - DNA, 89 bp, synthetic construct
  misc_feature 1..89: note = engineered ribonucleic acid scaffold (ERS) sequence
  source 1..89: mol_type = other DNA
acaggtccttctatctgattactctgaggaccttcaccagcgactatgtcgtagtgggtaaagctccctcttcggaggaggcatcagag

SEQ ID NO: 22556 - DNA, 89 bp, synthetic construct
  misc_feature 1..89: note = engineered ribonucleic acid scaffold (ERS) sequence
  source 1..89: mol_type = other DNA
accagcaattctatctgattactctgattgctgtcaccagcgactatgtcgtagtgggtaaagctccctcttcggaggaggcatcagag

SEQ ID NO: 22557 - DNA, 89 bp, synthetic construct
  misc_feature 1..89: note = engineered ribonucleic acid scaffold (ERS) sequence
  source 1..89: mol_type = other DNA
accgagacttctatctgattactctgaggctcgtcaccagcgactatgtcgtagtgggtaaagctccctcttcggaggaggcatcagag

SEQ ID NO: 22558 - DNA, 89 bp, synthetic construct
  misc_feature 1..89: note = engineered ribonucleic acid scaffold (ERS) sequence
  source 1..89: mol_type = other DNA
acctgtagttctatctgattactctgactacagtcaccagcgactatgtcgtagtgggtaaagctccctcttcggaggaggcatcagag

SEQ ID NO: 22559 - DNA, 89 bp, synthetic construct
  misc_feature 1..89: note = engineered ribonucleic acid scaffold (ERS) sequence
  source 1..89: mol_type = other DNA
acgagcacttctatctgattactctgagggctctcaccagcgactatgtcgtagtgggtaaagctccctcttcggaggaggcatcagag

SEQ ID NO: 22560 - DNA, 89 bp, synthetic construct
  misc_feature 1..89: note = engineered ribonucleic acid scaffold (ERS) sequence
  source 1..89: mol_type = other DNA
acgaggtgttctatctgattactctgacacctctcaccagcgactatgtcgtagtgggtaaagctccctcttcggaggaggcatcagag

SEQ ID NO: 22561 - DNA, 89 bp, synthetic construct
  misc_feature 1..89: note = engineered ribonucleic acid scaffold (ERS) sequence
  source 1..89: mol_type = other DNA
acgggactttctatctgattactctgaagtccctcaccagcgactatgtcgtagtgggtaaagctccctcttcggaggaggcatcagag

SEQ ID NO: 22562 - DNA, 89 bp, synthetic construct
  misc_feature 1..89: note = engineered ribonucleic acid scaffold (ERS) sequence
  source 1..89: mol_type = other DNA
acgggcaattctatctgattactctgattgccctcaccagcgactatgtcgtagtgggtaaagctccctcttcggaggaggcatcagag

SEQ ID NO: 22563 - DNA, 89 bp, synthetic construct
  misc_feature 1..89: note = engineered ribonucleic acid scaffold (ERS) sequence
  source 1..89: mol_type = other DNA
actgtgcgttctatctgattactctgacgcacatcaccagcgactatgtcgtagtgggtaaagctccctcttcggaggaggcatcagag

SEQ ID NO: 22564 - DNA, 91 bp, synthetic construct
  misc_feature 1..91: note = engineered ribonucleic acid scaffold (ERS) sequence
  source 1..91: mol_type = other DNA
acacacggttctatctgattactctgaccgtgttcaccagcgactatgtcgtagtgggtaaagctccctcttcggagggaacgcatcagag

SEQ ID NO: 22565 - DNA, 91 bp, synthetic construct
  misc_feature 1..91: note = engineered ribonucleic acid scaffold (ERS) sequence
  source 1..91: mol_type = other DNA
acactggtttctatctgattactctgaaccagttcaccagcgactatgtcgtagtgggtaaagctccctcttcggagggaacgcatcagag

SEQ ID NO: 22566 - DNA, 91 bp, synthetic construct
  misc_feature 1..91: note = engineered ribonucleic acid scaffold (ERS) sequence
  source 1..91: mol_type = other DNA
acaggccgttctatctgattactctgacggccttcaccagcgactatgtcgtagtgggtaaagctccctcttcggagggaacgcatcagag

SEQ ID NO: 22567 - DNA, 91 bp, synthetic construct
  misc_feature 1..91: note = engineered ribonucleic acid scaffold (ERS) sequence
  source 1..91: mol_type = other DNA
acaggtccttctatctgattactctgaggaccttcaccagcgactatgtcgtagtgggtaaagctccctcttcggagggaacgcatcagag

SEQ ID NO: 22568 - DNA, 91 bp, synthetic construct
  misc_feature 1..91: note = engineered ribonucleic acid scaffold (ERS) sequence
  source 1..91: mol_type = other DNA
accagcaattctatctgattactctgattgctgtcaccagcgactatgtcgtagtgggtaaagctccctcttcggagggaacgcatcagag

SEQ ID NO: 22569 - DNA, 91 bp, synthetic construct
  misc_feature 1..91: note = engineered ribonucleic acid scaffold (ERS) sequence
  source 1..91: mol_type = other DNA
accgagacttctatctgattactctgaggctcgtcaccagcgactatgtcgtagtgggtaaagctccctcttcggagggaacgcatcagag

SEQ ID NO: 22570 - DNA, 91 bp, synthetic construct
  misc_feature 1..91: note = engineered ribonucleic acid scaffold (ERS) sequence
  source 1..91: mol_type = other DNA
acctgtagttctatctgattactctgactacagtcaccagcgactatgtcgtagtgggtaaagctccctcttcggagggaacgcatcagag

SEQ ID NO: 22571 - DNA, 91 bp, synthetic construct
  misc_feature 1..91: note = engineered ribonucleic acid scaffold (ERS) sequence
  source 1..91: mol_type = other DNA
acgagcacttctatctgattactctgagggctctcaccagcgactatgtcgtagtgggtaaagctccctcttcggagggaacgcatcagag

SEQ ID NO: 22572 - DNA, 91 bp, synthetic construct
  misc_feature 1..91: note = engineered ribonucleic acid scaffold (ERS) sequence
  source 1..91: mol_type = other DNA
acgaggtgttctatctgattactctgacacctctcaccagcgactatgtcgtagtgggtaaagctccctcttcggagggaacgcatcagag

SEQ ID NO: 22573 - DNA, 91 bp, synthetic construct
  misc_feature 1..91: note = engineered ribonucleic acid scaffold (ERS) sequence
  source 1..91: mol_type = other DNA
acgggactttctatctgattactctgaagtccctcaccagcgactatgtcgtagtgggtaaagctccctcttcggagggaacgcatcagag

SEQ ID NO: 22574 - DNA, 91 bp, synthetic construct
  misc_feature 1..91: note = engineered ribonucleic acid scaffold (ERS) sequence
  source 1..91: mol_type = other DNA
acgggcaattctatctgattactctgattgccctcaccagcgactatgtcgtagtgggtaaagctccctcttcggagggaacgcatcagag

SEQ ID NO: 22575 - DNA, 91 bp, synthetic construct
  misc_feature 1..91: note = engineered ribonucleic acid scaffold (ERS) sequence
  source 1..91: mol_type = other DNA
actgtgcgttctatctgattactctgacgcacatcaccagcgactatgtcgtagtgggtaaagctccctcttcggagggaacgcatcagag

SEQ ID NO: 22576 - DNA, 89 bp, synthetic construct
  misc_feature 1..89: note = engineered ribonucleic acid scaffold (ERS) sequence
  source 1..89: mol_type = other DNA
acacacggttctatctgattactctgaccgtgttcaccagcgactatgtcgtagtgggtaaagctccctggaaacagggagcatcagag

SEQ ID NO: 22577 - DNA, 89 bp, synthetic construct
  misc_feature 1..89: note = engineered ribonucleic acid scaffold (ERS) sequence
  source 1..89: mol_type = other DNA
acactggtttctatctgattactctgaaccagttcaccagcgactatgtcgtagtgggtaaagctccctggaaacagggagcatcagag

SEQ ID NO: 22578 - DNA, 89 bp, synthetic construct
  misc_feature 1..89: note = engineered ribonucleic acid scaffold (ERS) sequence
  source 1..89: mol_type = other DNA
acaggccgttctatctgattactctgacggccttcaccagcgactatgtcgtagtgggtaaagctccctggaaacagggagcatcagag

SEQ ID NO: 22579 - DNA, 89 bp, synthetic construct
  misc_feature 1..89: note = engineered ribonucleic acid scaffold (ERS) sequence
  source 1..89: mol_type = other DNA
acaggtccttctatctgattactctgaggaccttcaccagcgactatgtcgtagtgggtaaagctccctggaaacagggagcatcagag

SEQ ID NO: 22580 - DNA, 89 bp, synthetic construct
  misc_feature 1..89: note = engineered ribonucleic acid scaffold (ERS) sequence
  source 1..89: mol_type = other DNA
accagcaattctatctgattactctgattgctgtcaccagcgactatgtcgtagtgggtaaagctccctggaaacagggagcatcagag

SEQ ID NO: 22581 - DNA, 89 bp, synthetic construct
  misc_feature 1..89: note = engineered ribonucleic acid scaffold (ERS) sequence
  source 1..89: mol_type = other DNA
accgagacttctatctgattactctgaggctcgtcaccagcgactatgtcgtagtgggtaaagctccctggaaacagggagcatcagag

SEQ ID NO: 22582 - DNA, 89 bp, synthetic construct
  misc_feature 1..89: note = engineered ribonucleic acid scaffold (ERS) sequence
  source 1..89: mol_type = other DNA
acctgtagttctatctgattactctgactacagtcaccagcgactatgtcgtagtgggtaaagctccctggaaacagggagcatcagag

SEQ ID NO: 22583 - DNA, 89 bp, synthetic construct
  misc_feature 1..89: note = engineered ribonucleic acid scaffold (ERS) sequence
  source 1..89: mol_type = other DNA
acgagcacttctatctgattactctgagggctctcaccagcgactatgtcgtagtgggtaaagctccctggaaacagggagcatcagag

SEQ ID NO: 22584 - DNA, 89 bp, synthetic construct
  misc_feature 1..89: note = engineered ribonucleic acid scaffold (ERS) sequence
  source 1..89: mol_type = other DNA
acgaggtgttctatctgattactctgacacctctcaccagcgactatgtcgtagtgggtaaagctccctggaaacagggagcatcagag

SEQ ID NO: 22585 - DNA, 89 bp, synthetic construct
  misc_feature 1..89: note = engineered ribonucleic acid scaffold (ERS) sequence
  source 1..89: mol_type = other DNA
acgggactttctatctgattactctgaagtccctcaccagcgactatgtcgtagtgggtaaagctccctggaaacagggagcatcagag

SEQ ID NO: 22586 - DNA, 89 bp, synthetic construct
  misc_feature 1..89: note = engineered ribonucleic acid scaffold (ERS) sequence
  source 1..89: mol_type = other DNA
acgggcaattctatctgattactctgattgccctcaccagcgactatgtcgtagtgggtaaagctccctggaaacagggagcatcagag

SEQ ID NO: 22587 - DNA, 89 bp, synthetic construct
  misc_feature 1..89: note = engineered ribonucleic acid scaffold (ERS) sequence
  source 1..89: mol_type = other DNA
actgtgcgttctatctgattactctgacgcacatcaccagcgactatgtcgtagtgggtaaagctccctggaaacagggagcatcagag

SEQ ID NO: 22588 - DNA, 85 bp, synthetic construct
  misc_feature 1..85: note = engineered ribonucleic acid scaffold (ERS) sequence
  source 1..85: mol_type = other DNA
acacacggttctatctgattactctgaccgtgttcaccagcgactatgtcgtagtgggtaaagctcccttcggggagcatcagag

SEQ ID NO: 22589 - DNA, 85 bp, synthetic construct
  misc_feature 1..85: note = engineered ribonucleic acid scaffold (ERS) sequence
  source 1..85: mol_type = other DNA
acactggtttctatctgattactctgaaccagttcaccagcgactatgtcgtagtgggtaaagctcccttcggggagcatcagag

SEQ ID NO: 22590 - DNA, 85 bp, synthetic construct
  misc_feature 1..85: note = engineered ribonucleic acid scaffold (ERS) sequence
  source 1..85: mol_type = other DNA
acaggccgttctatctgattactctgacggccttcaccagcgactatgtcgtagtgggtaaagctcccttcggggagcatcagag

SEQ ID NO: 22591 - DNA, 85 bp, synthetic construct
  misc_feature 1..85: note = engineered ribonucleic acid scaffold (ERS) sequence
  source 1..85: mol_type = other DNA
acaggtccttctatctgattactctgaggaccttcaccagcgactatgtcgtagtgggtaaagctcccttcggggagcatcagag

SEQ ID NO: 22592 - DNA, 85 bp, synthetic construct
  misc_feature 1..85: note = engineered ribonucleic acid scaffold (ERS) sequence
  source 1..85: mol_type = other DNA
accagcaattctatctgattactctgattgctgtcaccagcgactatgtcgtagtgggtaaagctcccttcggggagcatcagag

SEQ ID NO: 22593 - DNA, 85 bp, synthetic construct
  misc_feature 1..85: note = engineered ribonucleic acid scaffold (ERS) sequence
  source 1..85: mol_type = other DNA
accgagacttctatctgattactctgaggctcgtcaccagcgactatgtcgtagtgggtaaagctcccttcggggagcatcagag

SEQ ID NO: 22594 - DNA, 85 bp, synthetic construct
  misc_feature 1..85: note = engineered ribonucleic acid scaffold (ERS) sequence
  source 1..85: mol_type = other DNA
acctgtagttctatctgattactctgactacagtcaccagcgactatgtcgtagtgggtaaagctcccttcggggagcatcagag

SEQ ID NO: 22595 - DNA, 85 bp, synthetic construct
  misc_feature 1..85: note = engineered ribonucleic acid scaffold (ERS) sequence
  source 1..85: mol_type = other DNA
acgagcacttctatctgattactctgagggctctcaccagcgactatgtcgtagtgggtaaagctcccttcggggagcatcagag

SEQ ID NO: 22596 - DNA, 85 bp, synthetic construct
  misc_feature 1..85: note = engineered ribonucleic acid scaffold (ERS) sequence
  source 1..85: mol_type = other DNA
acgaggtgttctatctgattactctgacacctctcaccagcgactatgtcgtagtgggtaaagctcccttcggggagcatcagag

SEQ ID NO: 22597 - DNA, 85 bp, synthetic construct
  misc_feature 1..85: note = engineered ribonucleic acid scaffold (ERS) sequence
  source 1..85: mol_type = other DNA
acgggactttctatctgattactctgaagtccctcaccagcgactatgtcgtagtgggtaaagctcccttcggggagcatcagag

SEQ ID NO: 22598 - DNA, 85 bp, synthetic construct
  misc_feature 1..85: note = engineered ribonucleic acid scaffold (ERS) sequence
  source 1..85: mol_type = other DNA
acgggcaattctatctgattactctgattgccctcaccagcgactatgtcgtagtgggtaaagctcccttcggggagcatcagag

SEQ ID NO: 22599 - DNA, 85 bp, synthetic construct
  misc_feature 1..85: note = engineered ribonucleic acid scaffold (ERS) sequence
  source 1..85: mol_type = other DNA
actgtgcgttctatctgattactctgacgcacatcaccagcgactatgtcgtagtgggtaaagctcccttcggggagcatcagag

SEQ ID NO: 22600 - DNA, 85 bp, synthetic construct
  misc_feature 1..85: note = engineered ribonucleic acid scaffold (ERS) sequence
  source 1..85: mol_type = other DNA
acacacggttctatctgattactctgaccgtgttcaccagcgactatgtcgtagtgggtaaagctccgttcgcggagcatcagag

SEQ ID NO: 22601 - DNA, 85 bp, synthetic construct
  misc_feature 1..85: note = engineered ribonucleic acid scaffold (ERS) sequence
  source 1..85: mol_type = other DNA
acactggtttctatctgattactctgaaccagttcaccagcgactatgtcgtagtgggtaaagctccgttcgcggagcatcagag

SEQ ID NO: 22602 - DNA, 85 bp, synthetic construct
  misc_feature 1..85: note = engineered ribonucleic acid scaffold (ERS) sequence
  source 1..85: mol_type = other DNA
acaggccgttctatctgattactctgacggccttcaccagcgactatgtcgtagtgggtaaagctccgttcgcggagcatcagag

SEQ ID NO: 22603 - DNA, 85 bp, synthetic construct
  misc_feature 1..85: note = engineered ribonucleic acid scaffold (ERS) sequence
  source 1..85: mol_type = other DNA
acaggtccttctatctgattactctgaggaccttcaccagcgactatgtcgtagtgggtaaagctccgttcgcggagcatcagag

SEQ ID NO: 22604 - DNA, 85 bp, synthetic construct
  misc_feature 1..85: note = engineered ribonucleic acid scaffold (ERS) sequence
  source 1..85: mol_type = other DNA
accagcaattctatctgattactctgattgctgtcaccagcgactatgtcgtagtgggtaaagctccgttcgcggagcatcagag

SEQ ID NO: 22605 - DNA, 85 bp, synthetic construct
  misc_feature 1..85: note = engineered ribonucleic acid scaffold (ERS) sequence
  source 1..85: mol_type = other DNA
accgagacttctatctgattactctgaggctcgtcaccagcgactatgtcgtagtgggtaaagctccgttcgcggagcatcagag

SEQ ID NO: 22606 - DNA, 85 bp, synthetic construct
  misc_feature 1..85: note = engineered ribonucleic acid scaffold (ERS) sequence
  source 1..85: mol_type = other DNA
acctgtagttctatctgattactctgactacagtcaccagcgactatgtcgtagtgggtaaagctccgttcgcggagcatcagag

SEQ ID NO: 22607 - DNA, 85 bp, synthetic construct
  misc_feature 1..85: note = engineered ribonucleic acid scaffold (ERS) sequence
  source 1..85: mol_type = other DNA
acgagcacttctatctgattactctgagggctctcaccagcgactatgtcgtagtgggtaaagctccgttcgcggagcatcagag

SEQ ID NO: 22608 - DNA, 85 bp, synthetic construct
  misc_feature 1..85: note = engineered ribonucleic acid scaffold (ERS) sequence
  source 1..85: mol_type = other DNA
acgaggtgttctatctgattactctgacacctctcaccagcgactatgtcgtagtgggtaaagctccgttcgcggagcatcagag

SEQ ID NO: 22609 - DNA, 85 bp, synthetic construct
  misc_feature 1..85: note = engineered ribonucleic acid scaffold (ERS) sequence
  source 1..85: mol_type = other DNA
acgggactttctatctgattactctgaagtccctcaccagcgactatgtcgtagtgggtaaagctccgttcgcggagcatcagag

SEQ ID NO: 22610 - DNA, 85 bp, synthetic construct
  misc_feature 1..85: note = engineered ribonucleic acid scaffold (ERS) sequence
  source 1..85: mol_type = other DNA
acgggcaattctatctgattactctgattgccctcaccagcgactatgtcgtagtgggtaaagctccgttcgcggagcatcagag

SEQ ID NO: 22611 - DNA, 85 bp, synthetic construct
  misc_feature 1..85: note = engineered ribonucleic acid scaffold (ERS) sequence
  source 1..85: mol_type = other DNA
actgtgcgttctatctgattactctgacgcacatcaccagcgactatgtcgtagtgggtaaagctccgttcgcggagcatcagag

SEQ ID NO: 22612 - DNA, 87 bp, synthetic construct
  misc_feature 1..87: note = engineered ribonucleic acid scaffold (ERS) sequence
  source 1..87: mol_type = other DNA
acacacggttctatctgattactctgaccgtgttcaccagcgactatgtcgtagtgggtaaagctcctcttcggaggagcatcagag

SEQ ID NO: 22613 - DNA, 87 bp, synthetic construct
  misc_feature 1..87: note = engineered ribonucleic acid scaffold (ERS) sequence
  source 1..87: mol_type = other DNA
acactggtttctatctgattactctgaaccagttcaccagcgactatgtcgtagtgggtaaagctcctcttcggaggagcatcagag

SEQ ID NO: 22614 - DNA, 87 bp, synthetic construct
  misc_feature 1..87: note = engineered ribonucleic acid scaffold (ERS) sequence
  source 1..87: mol_type = other DNA
acaggccgttctatctgattactctgacggccttcaccagcgactatgtcgtagtgggtaaagctcctcttcggaggagcatcagag

SEQ ID NO: 22615 - DNA, 87 bp, synthetic construct
  misc_feature 1..87: note = engineered ribonucleic acid scaffold (ERS) sequence
  source 1..87: mol_type = other DNA
acaggtccttctatctgattactctgaggaccttcaccagcgactatgtcgtagtgggtaaagctcctcttcggaggagcatcagag

SEQ ID NO: 22616 - DNA, 87 bp, synthetic construct
  misc_feature 1..87: note = engineered ribonucleic acid scaffold (ERS) sequence
  source 1..87: mol_type = other DNA
accagcaattctatctgattactctgattgctgtcaccagcgactatgtcgtagtgggtaaagctcctcttcggaggagcatcagag

SEQ ID NO: 22617 - DNA, 87 bp, synthetic construct
  misc_feature 1..87: note = engineered ribonucleic acid scaffold (ERS) sequence
  source 1..87: mol_type = other DNA
accgagacttctatctgattactctgaggctcgtcaccagcgactatgtcgtagtgggtaaagctcctcttcggaggagcatcagag

SEQ ID NO: 22618 - DNA, 87 bp, synthetic construct
  misc_feature 1..87: note = engineered ribonucleic acid scaffold (ERS) sequence
  source 1..87: mol_type = other DNA
acctgtagttctatctgattactctgactacagtcaccagcgactatgtcgtagtgggtaaagctcctcttcggaggagcatcagag

SEQ ID NO: 22619 - DNA, 87 bp, synthetic construct
  misc_feature 1..87: note = engineered ribonucleic acid scaffold (ERS) sequence
  source 1..87: mol_type = other DNA
acgagcacttctatctgattactctgagggctctcaccagcgactatgtcgtagtgggtaaagctcctcttcggaggagcatcagag

SEQ ID NO: 22620 - DNA, 87 bp, synthetic construct
  misc_feature 1..87: note = engineered ribonucleic acid scaffold (ERS) sequence
  source 1..87: mol_type = other DNA
acgaggtgttctatctgattactctgacacctctcaccagcgactatgtcgtagtgggtaaagctcctcttcggaggagcatcagag

SEQ ID NO: 22621 - DNA, 87 bp, synthetic construct
  misc_feature 1..87: note = engineered ribonucleic acid scaffold (ERS) sequence
  source 1..87: mol_type = other DNA
acgggactttctatctgattactctgaagtccctcaccagcgactatgtcgtagtgggtaaagctcctcttcggaggagcatcagag

SEQ ID NO: 22622 - DNA, 87 bp, synthetic construct
  misc_feature 1..87: note = engineered ribonucleic acid scaffold (ERS) sequence
  source 1..87: mol_type = other DNA
acgggcaattctatctgattactctgattgccctcaccagcgactatgtcgtagtgggtaaagctcctcttcggaggagcatcagag

SEQ ID NO: 22623 - DNA, 87 bp, synthetic construct
  misc_feature 1..87: note = engineered ribonucleic acid scaffold (ERS) sequence
  source 1..87: mol_type = other DNA
actgtgcgttctatctgattactctgacgcacatcaccagcgactatgtcgtagtgggtaaagctcctcttcggaggagcatcagag

SEQ ID NO: 22624 - DNA, 85 bp, synthetic construct
  misc_feature 1..85: note = engineered ribonucleic acid scaffold (ERS) sequence
  source 1..85: mol_type = other DNA
acacacggttctatctgattactctgaccgtgttcaccagcgactatgtcgtagtgggtaaagctctcttcggagagcatcagag

SEQ ID NO: 22625 - DNA, 85 bp, synthetic construct
  misc_feature 1..85: note = engineered ribonucleic acid scaffold (ERS) sequence
  source 1..85: mol_type = other DNA
acactggtttctatctgattactctgaaccagttcaccagcgactatgtcgtagtgggtaaagctctcttcggagagcatcagag

SEQ ID NO: 22626 - DNA, 85 bp, synthetic construct
  misc_feature 1..85: note = engineered ribonucleic acid scaffold (ERS) sequence
  source 1..85: mol_type = other DNA
acaggccgttctatctgattactctgacggccttcaccagcgactatgtcgtagtgggtaaagctctcttcggagagcatcagag

SEQ ID NO: 22627 - DNA, 85 bp, synthetic construct
  misc_feature 1..85: note = engineered ribonucleic acid scaffold (ERS) sequence
  source 1..85: mol_type = other DNA
acaggtccttctatctgattactctgaggaccttcaccagcgactatgtcgtagtgggtaaagctctcttcggagagcatcagag

SEQ ID NO: 22628 - DNA, 85 bp, synthetic construct
  misc_feature 1..85: note = engineered ribonucleic acid scaffold (ERS) sequence
  source 1..85: mol_type = other DNA
accagcaattctatctgattactctgattgctgtcaccagcgactatgtcgtagtgggtaaagctctcttcggagagcatcagag

SEQ ID NO: 22629 - DNA, 85 bp, synthetic construct
  misc_feature 1..85: note = engineered ribonucleic acid scaffold (ERS) sequence
  source 1..85: mol_type = other DNA
accgagacttctatctgattactctgaggctcgtcaccagcgactatgtcgtagtgggtaaagctctcttcggagagcatcagag

SEQ ID NO: 22630 - DNA, 85 bp, synthetic construct
  misc_feature 1..85: note = engineered ribonucleic acid scaffold (ERS) sequence
  source 1..85: mol_type = other DNA
acctgtagttctatctgattactctgactacagtcaccagcgactatgtcgtagtgggtaaagctctcttcggagagcatcagag

SEQ ID NO: 22631 - DNA, 85 bp, synthetic construct
  misc_feature 1..85: note = engineered ribonucleic acid scaffold (ERS) sequence
  source 1..85: mol_type = other DNA
acgagcacttctatctgattactctgagggctctcaccagcgactatgtcgtagtgggtaaagctctcttcggagagcatcagag

SEQ ID NO: 22632 - DNA, 85 bp, synthetic construct
  misc_feature 1..85: note = engineered ribonucleic acid scaffold (ERS) sequence
  source 1..85: mol_type = other DNA
acgaggtgttctatctgattactctgacacctctcaccagcgactatgtcgtagtgggtaaagctctcttcggagagcatcagag

SEQ ID NO: 22633 - DNA, 85 bp, synthetic construct
  misc_feature 1..85: note = engineered ribonucleic acid scaffold (ERS) sequence
  source 1..85: mol_type = other DNA
acgggactttctatctgattactctgaagtccctcaccagcgactatgtcgtagtgggtaaagctctcttcggagagcatcagag

SEQ ID NO: 22634 - DNA, 85 bp, synthetic construct
  misc_feature 1..85: note = engineered ribonucleic acid scaffold (ERS) sequence
  source 1..85: mol_type = other DNA
acgggcaattctatctgattactctgattgccctcaccagcgactatgtcgtagtgggtaaagctctcttcggagagcatcagag

SEQ ID NO: 22635 - DNA, 85 bp, synthetic construct
  misc_feature 1..85: note = engineered ribonucleic acid scaffold (ERS) sequence
  source 1..85: mol_type = other DNA
actgtgcgttctatctgattactctgacgcacatcaccagcgactatgtcgtagtgggtaaagctctcttcggagagcatcagag

SEQ ID NO: 22636 - DNA, 77 bp, synthetic construct
  misc_feature 1..77: note = engineered ribonucleic acid scaffold (ERS) sequence
  source 1..77: mol_type = other DNA
acacacggttctatctgattactctgaccgtgttcaccagcgactatgtcgtagtgggtaaagctgcagcatcagag

SEQ ID NO: 22637 - DNA, 77 bp, synthetic construct
  misc_feature 1..77: note = engineered ribonucleic acid scaffold (ERS) sequence
  source 1..77: mol_type = other DNA
acactggtttctatctgattactctgaaccagttcaccagcgactatgtcgtagtgggtaaagctgcagcatcagag

SEQ ID NO: 22638 - DNA, 77 bp, synthetic construct
  misc_feature 1..77: note = engineered ribonucleic acid scaffold (ERS) sequence
  source 1..77: mol_type = other DNA
acaggccgttctatctgattactctgacggccttcaccagcgactatgtcgtagtgggtaaagctgcagcatcagag

SEQ ID NO: 22639 - DNA, 77 bp, synthetic construct
  misc_feature 1..77: note = engineered ribonucleic acid scaffold (ERS) sequence
  source 1..77: mol_type = other DNA
acaggtccttctatctgattactctgaggaccttcaccagcgactatgtcgtagtgggtaaagctgcagcatcagag

SEQ ID NO: 22640 - DNA, 77 bp, synthetic construct
  misc_feature 1..77: note = engineered ribonucleic acid scaffold (ERS) sequence
  source 1..77: mol_type = other DNA
accagcaattctatctgattactctgattgctgtcaccagcgactatgtcgtagtgggtaaagctgcagcatcagag

SEQ ID NO: 22641 - DNA, 77 bp, synthetic construct
  misc_feature 1..77: note = engineered ribonucleic acid scaffold (ERS) sequence
  source 1..77: mol_type = other DNA
accgagacttctatctgattactctgaggctcgtcaccagcgactatgtcgtagtgggtaaagctgcagcatcagag

SEQ ID NO: 22642 - DNA, 77 bp, synthetic construct
  misc_feature 1..77: note = engineered ribonucleic acid scaffold (ERS) sequence
  source 1..77: mol_type = other DNA
acctgtagttctatctgattactctgactacagtcaccagcgactatgtcgtagtgggtaaagctgcagcatcagag

SEQ ID NO: 22643 - DNA, 77 bp, synthetic construct
  misc_feature 1..77: note = engineered ribonucleic acid scaffold (ERS) sequence
  source 1..77: mol_type = other DNA
acgagcacttctatctgattactctgagggctctcaccagcgactatgtcgtagtgggtaaagctgcagcatcagag

SEQ ID NO: 22644 - DNA, 77 bp, synthetic construct
  misc_feature 1..77: note = engineered ribonucleic acid scaffold (ERS) sequence
  source 1..77: mol_type = other DNA
acgaggtgttctatctgattactctgacacctctcaccagcgactatgtcgtagtgggtaaagctgcagcatcagag

SEQ ID NO: 22645 - DNA, 77 bp, synthetic construct
  misc_feature 1..77: note = engineered ribonucleic acid scaffold (ERS) sequence
  source 1..77: mol_type = other DNA
acgggactttctatctgattactctgaagtccctcaccagcgactatgtcgtagtgggtaaagctgcagcatcagag

SEQ ID NO: 22646 - DNA, 77 bp, synthetic construct
  misc_feature 1..77: note = engineered ribonucleic acid scaffold (ERS) sequence
  source 1..77: mol_type = other DNA
acgggcaattctatctgattactctgattgccctcaccagcgactatgtcgtagtgggtaaagctgcagcatcagag

SEQ ID NO: 22647 - DNA, 77 bp, synthetic construct
  misc_feature 1..77: note = engineered ribonucleic acid scaffold (ERS) sequence
  source 1..77: mol_type = other DNA
actgtgcgttctatctgattactctgacgcacatcaccagcgactatgtcgtagtgggtaaagctgcagcatcagag

SEQ ID NO: 22648 - DNA, 83 bp, synthetic construct
  misc_feature 1..83: note = engineered ribonucleic acid scaffold (ERS) sequence
  source 1..83: mol_type = other DNA
acacacggttctatctgattactctgaccgtgttcaccagcgactatgtcgtagtgggtaaagctgcttcggcagcatcagag

SEQ ID NO: 22649 - DNA, 83 bp, synthetic construct
  misc_feature 1..83: note = engineered ribonucleic acid scaffold (ERS) sequence
  source 1..83: mol_type = other DNA
acactggtttctatctgattactctgaaccagttcaccagcgactatgtcgtagtgggtaaagctgcttcggcagcatcagag

SEQ ID NO: 22650 - DNA, 83 bp, synthetic construct
  misc_feature 1..83: note = engineered ribonucleic acid scaffold (ERS) sequence
  source 1..83: mol_type = other DNA
acaggccgttctatctgattactctgacggccttcaccagcgactatgtcgtagtgggtaaagctgcttcggcagcatcagag

SEQ ID NO: 22651 - DNA, 83 bp, synthetic construct
  misc_feature 1..83: note = engineered ribonucleic acid scaffold (ERS) sequence
  source 1..83: mol_type = other DNA
acaggtccttctatctgattactctgaggaccttcaccagcgactatgtcgtagtgggtaaagctgcttcggcagcatcagag

SEQ ID NO: 22652 - DNA, 83 bp, synthetic construct
  misc_feature 1..83: note = engineered ribonucleic acid scaffold (ERS) sequence
  source 1..83: mol_type = other DNA
accagcaattctatctgattactctgattgctgtcaccagcgactatgtcgtagtgggtaaagctgcttcggcagcatcagag

SEQ ID NO: 22653 - DNA, 83 bp, synthetic construct
  misc_feature 1..83: note = engineered ribonucleic acid scaffold (ERS) sequence
  source 1..83: mol_type = other DNA
accgagacttctatctgattactctgaggctcgtcaccagcgactatgtcgtagtgggtaaagctgcttcggcagcatcagag

SEQ ID NO: 22654 - DNA, 83 bp, synthetic construct
  misc_feature 1..83: note = engineered ribonucleic acid scaffold (ERS) sequence
  source 1..83: mol_type = other DNA
acctgtagttctatctgattactctgactacagtcaccagcgactatgtcgtagtgggtaaagctgcttcggcagcatcagag

SEQ ID NO: 22655 - DNA, 83 bp, synthetic construct
  misc_feature 1..83: note = engineered ribonucleic acid scaffold (ERS) sequence
  source 1..83: mol_type = other DNA
acgagcacttctatctgattactctgagggctctcaccagcgactatgtcgtagtgggtaaagctgcttcggcagcatcagag

SEQ ID NO: 22656 - DNA, 83 bp, synthetic construct
  misc_feature 1..83: note = engineered ribonucleic acid scaffold (ERS) sequence
  source 1..83: mol_type = other DNA
acgaggtgttctatctgattactctgacacctctcaccagcgactatgtcgtagtgggtaaagctgcttcggcagcatcagag

SEQ ID NO: 22657 - DNA, 83 bp, synthetic construct
  misc_feature 1..83: note = engineered ribonucleic acid scaffold (ERS) sequence
  source 1..83: mol_type = other DNA
acgggactttctatctgattactctgaagtccctcaccagcgactatgtcgtagtgggtaaagctgcttcggcagcatcagag

SEQ ID NO: 22658 - DNA, 83 bp, synthetic construct
  misc_feature 1..83: note = engineered ribonucleic acid scaffold (ERS) sequence
  source 1..83: mol_type = other DNA
acgggcaattctatctgattactctgattgccctcaccagcgactatgtcgtagtgggtaaagctgcttcggcagcatcagag

SEQ ID NO: 22659 - DNA, 83 bp, synthetic construct
  misc_feature 1..83: note = engineered ribonucleic acid scaffold (ERS) sequence
  source 1..83: mol_type = other DNA
actgtgcgttctatctgattactctgacgcacatcaccagcgactatgtcgtagtgggtaaagctgcttcggcagcatcagag

SEQ ID NO: 22660 - DNA, 89 bp, synthetic construct
  misc_feature 1..89: note = engineered ribonucleic acid scaffold (ERS) sequence
  source 1..89: mol_type = other DNA
acacacggttctatctgattactctgaccgtgttcaccagcgactatgtcgtagtgggtaaaggtccctcttcggagggaacatcagag

SEQ ID NO: 22661 - DNA, 89 bp, synthetic construct
  misc_feature 1..89: note = engineered ribonucleic acid scaffold (ERS) sequence
  source 1..89: mol_type = other DNA
acactggtttctatctgattactctgaaccagttcaccagcgactatgtcgtagtgggtaaaggtccctcttcggagggaacatcagag

SEQ ID NO: 22662 - DNA, 89 bp, synthetic construct
  misc_feature 1..89: note = engineered ribonucleic acid scaffold (ERS) sequence
  source 1..89: mol_type = other DNA
acaggccgttctatctgattactctgacggccttcaccagcgactatgtcgtagtgggtaaaggtccctcttcggagggaacatcagag

SEQ ID NO: 22663 - DNA, 89 bp, synthetic construct
  misc_feature 1..89: note = engineered ribonucleic acid scaffold (ERS) sequence
  source 1..89: mol_type = other DNA
acaggtccttctatctgattactctgaggaccttcaccagcgactatgtcgtagtgggtaaaggtccctcttcggagggaacatcagag

SEQ ID NO: 22664 - DNA, 89 bp, synthetic construct
  misc_feature 1..89: note = engineered ribonucleic acid scaffold (ERS) sequence
  source 1..89: mol_type = other DNA
accagcaattctatctgattactctgattgctgtcaccagcgactatgtcgtagtgggtaaaggtccctcttcggagggaacatcagag

SEQ ID NO: 22665 - DNA, 89 bp, synthetic construct
  misc_feature 1..89: note = engineered ribonucleic acid scaffold (ERS) sequence
  source 1..89: mol_type = other DNA
accgagacttctatctgattactctgaggctcgtcaccagcgactatgtcgtagtgggtaaaggtccctcttcggagggaacatcagag

SEQ ID NO: 22666 - DNA, 89 bp, synthetic construct
  misc_feature 1..89: note = engineered ribonucleic acid scaffold (ERS) sequence
  source 1..89: mol_type = other DNA
acctgtagttctatctgattactctgactacagtcaccagcgactatgtcgtagtgggtaaaggtccctcttcggagggaacatcagag

SEQ ID NO: 22667 - DNA, 89 bp, synthetic construct
  misc_feature 1..89: note = engineered ribonucleic acid scaffold (ERS) sequence
  source 1..89: mol_type = other DNA
acgagcacttctatctgattactctgagggctctcaccagcgactatgtcgtagtgggtaaaggtccctcttcggagggaacatcagag

SEQ ID NO: 22668 - DNA, 89 bp, synthetic construct
  misc_feature 1..89: note = engineered ribonucleic acid scaffold (ERS) sequence
  source 1..89: mol_type = other DNA
acgaggtgttctatctgattactctgacacctctcaccagcgactatgtcgtagtgggtaaaggtccctcttcggagggaacatcagag

SEQ ID NO: 22669 - DNA, 89 bp, synthetic construct
  misc_feature 1..89: note = engineered ribonucleic acid scaffold (ERS) sequence
  source 1..89: mol_type = other DNA
acgggactttctatctgattactctgaagtccctcaccagcgactatgtcgtagtgggtaaaggtccctcttcggagggaacatcagag

SEQ ID NO: 22670 - DNA, 89 bp, synthetic construct
  misc_feature 1..89: note = engineered ribonucleic acid scaffold (ERS) sequence
  source 1..89: mol_type = other DNA
acgggcaattctatctgattactctgattgccctcaccagcgactatgtcgtagtgggtaaaggtccctcttcggagggaacatcagag

SEQ ID NO: 22671 - DNA, 89 bp, synthetic construct
  misc_feature 1..89: note = engineered ribonucleic acid scaffold (ERS) sequence
  source 1..89: mol_type = other DNA
actgtgcgttctatctgattactctgacgcacatcaccagcgactatgtcgtagtgggtaaaggtccctcttcggagggaacatcagag

SEQ ID NO: 22672 - DNA, 93 bp, synthetic construct
  misc_feature 1..93: note = engineered ribonucleic acid scaffold (ERS) sequence
  source 1..93: mol_type = other DNA
acacacggttctatctgattactctgaccgtgttcaccagcgactatgtcgtagtgggtaaaggtgacggtcttcggaccgtcaccatcagag

SEQ ID NO: 22673 - DNA, 93 bp, synthetic construct
  misc_feature 1..93: note = engineered ribonucleic acid scaffold (ERS) sequence
  source 1..93: mol_type = other DNA
acactggtttctatctgattactctgaaccagttcaccagcgactatgtcgtagtgggtaaaggtgacggtcttcggaccgtcaccatcagag

SEQ ID NO: 22674 - DNA, 93 bp, synthetic construct
  misc_feature 1..93: note = engineered ribonucleic acid scaffold (ERS) sequence
  source 1..93: mol_type = other DNA
acaggccgttctatctgattactctgacggccttcaccagcgactatgtcgtagtgggtaaaggtgacggtcttcggaccgtcaccatcagag

SEQ ID NO: 22675 - DNA, 93 bp, synthetic construct
  misc_feature 1..93: note = engineered ribonucleic acid scaffold (ERS) sequence
  source 1..93: mol_type = other DNA
acaggtccttctatctgattactctgaggaccttcaccagcgactatgtcgtagtgggtaaaggtgacggtcttcggaccgtcaccatcagag

SEQ ID NO: 22676 - DNA, 93 bp, synthetic construct
  misc_feature 1..93: note = engineered ribonucleic acid scaffold (ERS) sequence
  source 1..93: mol_type = other DNA
accagcaattctatctgattactctgattgctgtcaccagcgactatgtcgtagtgggtaaaggtgacggtcttcggaccgtcaccatcagag

SEQ ID NO: 22677 - DNA, 93 bp, synthetic construct
  misc_feature 1..93: note = engineered ribonucleic acid scaffold (ERS) sequence
  source 1..93: mol_type = other DNA
accgagacttctatctgattactctgaggctcgtcaccagcgactatgtcgtagtgggtaaaggtgacggtcttcggaccgtcaccatcagag

SEQ ID NO: 22678 - DNA, 93 bp, synthetic construct
  misc_feature 1..93: note = engineered ribonucleic acid scaffold (ERS) sequence
  source 1..93: mol_type = other DNA
acctgtagttctatctgattactctgactacagtcaccagcgactatgtcgtagtgggtaaaggtgacggtcttcggaccgtcaccatcagag

SEQ ID NO: 22679 - DNA, 93 bp, synthetic construct
  misc_feature 1..93: note = engineered ribonucleic acid scaffold (ERS) sequence
  source 1..93: mol_type = other DNA
acgagcacttctatctgattactctgagggctctcaccagcgactatgtcgtagtgggtaaaggtgacggtcttcggaccgtcaccatcagag

SEQ ID NO: 22680 - DNA, 93 bp, synthetic construct
  misc_feature 1..93: note = engineered ribonucleic acid scaffold (ERS) sequence
  source 1..93: mol_type = other DNA
acgaggtgttctatctgattactctgacacctctcaccagcgactatgtcgtagtgggtaaaggtgacggtcttcggaccgtcaccatcagag

SEQ ID NO: 22681 - DNA, 93 bp, synthetic construct
  misc_feature 1..93: note = engineered ribonucleic acid scaffold (ERS) sequence
  source 1..93: mol_type = other DNA
acgggactttctatctgattactctgaagtccctcaccagcgactatgtcgtagtgggtaaaggtgacggtcttcggaccgtcaccatcagag

SEQ ID NO: 22682 - DNA, 93 bp, synthetic construct
  misc_feature 1..93: note = engineered ribonucleic acid scaffold (ERS) sequence
  source 1..93: mol_type = other DNA
acgggcaattctatctgattactctgattgccctcaccagcgactatgtcgtagtgggtaaaggtgacggtcttcggaccgtcaccatcagag

SEQ ID NO: 22683 - DNA, 93 bp, synthetic construct
  misc_feature 1..93: note = engineered ribonucleic acid scaffold (ERS) sequence
  source 1..93: mol_type = other DNA
actgtgcgttctatctgattactctgacgcacatcaccagcgactatgtcgtagtgggtaaaggtgacggtcttcggaccgtcaccatcagag

SEQ ID NO: 22684 - DNA, 91 bp, synthetic construct
  misc_feature 1..91: note = engineered ribonucleic acid scaffold (ERS) sequence
  source 1..91: mol_type = other DNA
acacacggttctatctgattactctgaccgtgttcaccagcgactatgtcgtagtgggtaaagtctccctcttcggagggaggcatcagag

SEQ ID NO: 22685 - DNA, 91 bp, synthetic construct
  misc_feature 1..91: note = engineered ribonucleic acid scaffold (ERS) sequence
  source 1..91: mol_type = other DNA
acactggtttctatctgattactctgaaccagttcaccagcgactatgtcgtagtgggtaaagtctccctcttcggagggaggcatcagag

SEQ ID NO: 22686 - DNA, 91 bp, synthetic construct
  misc_feature 1..91: note = engineered ribonucleic acid scaffold (ERS) sequence
  source 1..91: mol_type = other DNA
acaggccgttctatctgattactctgacggccttcaccagcgactatgtcgtagtgggtaaagtctccctcttcggagggaggcatcagag

SEQ ID NO: 22687 - DNA, 91 bp, synthetic construct
  misc_feature 1..91: note = engineered ribonucleic acid scaffold (ERS) sequence
  source 1..91: mol_type = other DNA
acaggtccttctatctgattactctgaggaccttcaccagcgactatgtcgtagtgggtaaagtctccctcttcggagggaggcatcagag

SEQ ID NO: 22688 - DNA, 91 bp, synthetic construct
  misc_feature 1..91: note = engineered ribonucleic acid scaffold (ERS) sequence
  source 1..91: mol_type = other DNA
accagcaattctatctgattactctgattgctgtcaccagcgactatgtcgtagtgggtaaagtctccctcttcggagggaggcatcagag

SEQ ID NO: 22689 - DNA, 91 bp, synthetic construct
  misc_feature 1..91: note = engineered ribonucleic acid scaffold (ERS) sequence
  source 1..91: mol_type = other DNA
accgagacttctatctgattactctgaggctcgtcaccagcgactatgtcgtagtgggtaaagtctccctcttcggagggaggcatcagag

SEQ ID NO: 22690 - DNA, 91 bp, synthetic construct
  misc_feature 1..91: note = engineered ribonucleic acid scaffold (ERS) sequence
  source 1..91: mol_type = other DNA
acctgtagttctatctgattactctgactacagtcaccagcgactatgtcgtagtgggtaaagtctccctcttcggagggaggcatcagag

SEQ ID NO: 22691 - DNA, 91 bp, synthetic construct
  misc_feature 1..91: note = engineered ribonucleic acid scaffold (ERS) sequence
  source 1..91: mol_type = other DNA
acgagcacttctatctgattactctgagggctctcaccagcgactatgtcgtagtgggtaaagtctccctcttcggagggaggcatcagag

SEQ ID NO: 22692 - DNA, 91 bp, synthetic construct
  misc_feature 1..91: note = engineered ribonucleic acid scaffold (ERS) sequence
  source 1..91: mol_type = other DNA
acgaggtgttctatctgattactctgacacctctcaccagcgactatgtcgtagtgggtaaagtctccctcttcggagggaggcatcagag

SEQ ID NO: 22693 - DNA, 91 bp, synthetic construct
  misc_feature 1..91: note = engineered ribonucleic acid scaffold (ERS) sequence
  source 1..91: mol_type = other DNA
acgggactttctatctgattactctgaagtccctcaccagcgactatgtcgtagtgggtaaagtctccctcttcggagggaggcatcagag

SEQ ID NO: 22694 - DNA, 91 bp, synthetic construct
  misc_feature 1..91: note = engineered ribonucleic acid scaffold (ERS) sequence
  source 1..91: mol_type = other DNA
acgggcaattctatctgattactctgattgccctcaccagcgactatgtcgtagtgggtaaagtctccctcttcggagggaggcatcagag

SEQ ID NO: 22695 - DNA, 91 bp, synthetic construct
  misc_feature 1..91: note = engineered ribonucleic acid scaffold (ERS) sequence
  source 1..91: mol_type = other DNA
actgtgcgttctatctgattactctgacgcacatcaccagcgactatgtcgtagtgggtaaagtctccctcttcggagggaggcatcagag

SEQ ID NO: 22696 - DNA, 93 bp, synthetic construct
  misc_feature 1..93: note = engineered ribonucleic acid scaffold (ERS) sequence
  source 1..93: mol_type = other DNA
acacacggttctatctgattactctgaccgtgttcaccagcgactatgtcgtagtgggtaaagtgcgcccgcttcggcgggcgcacatcagag

SEQ ID NO: 22697 - DNA, 93 bp, synthetic construct
  misc_feature 1..93: note = engineered ribonucleic acid scaffold (ERS) sequence
  source 1..93: mol_type = other DNA
acactggtttctatctgattactctgaaccagttcaccagcgactatgtcgtagtgggtaaagtgcgcccgcttcggcgggcgcacatcagag

SEQ ID NO: 22698 - DNA, 93 bp, synthetic construct
  misc_feature 1..93: note = engineered ribonucleic acid scaffold (ERS) sequence
  source 1..93: mol_type = other DNA
acaggccgttctatctgattactctgacggccttcaccagcgactatgtcgtagtgggtaaagtgcgcccgcttcggcgggcgcacatcagag

SEQ ID NO: 22699 - DNA, 93 bp, synthetic construct
  misc_feature 1..93: note = engineered ribonucleic acid scaffold (ERS) sequence
  source 1..93: mol_type = other DNA
acaggtccttctatctgattactctgaggaccttcaccagcgactatgtcgtagtgggtaaagtgcgcccgcttcggcgggcgcacatcagag

SEQ ID NO: 22700 - DNA, 93 bp, synthetic construct
  misc_feature 1..93: note = engineered ribonucleic acid scaffold (ERS) sequence
  source 1..93: mol_type = other DNA
accagcaattctatctgattactctgattgctgtcaccagcgactatgtcgtagtgggtaaagtgcgcccgcttcggcgggcgcacatcagag

SEQ ID NO: 22701 - DNA, 93 bp, synthetic construct
  misc_feature 1..93: note = engineered ribonucleic acid scaffold (ERS) sequence
  source 1..93: mol_type = other DNA
accgagacttctatctgattactctgaggctcgtcaccagcgactatgtcgtagtgggtaaagtgcgcccgcttcggcgggcgcacatcagag

SEQ ID NO: 22702 - DNA, 93 bp, synthetic construct
  misc_feature 1..93: note = engineered ribonucleic acid scaffold (ERS) sequence
  source 1..93: mol_type = other DNA
acctgtagttctatctgattactctgactacagtcaccagcgactatgtcgtagtgggtaaagtgcgcccgcttcggcgggcgcacatcagag

SEQ ID NO: 22703 - DNA, 93 bp, synthetic construct
  misc_feature 1..93: note = engineered ribonucleic acid scaffold (ERS) sequence
  source 1..93: mol_type = other DNA
acgagcacttctatctgattactctgagggctctcaccagcgactatgtcgtagtgggtaaagtgcgcccgcttcggcgggcgcacatcagag

SEQ ID NO: 22704 - DNA, 93 bp, synthetic construct
  misc_feature 1..93: note = engineered ribonucleic acid scaffold (ERS) sequence
  source 1..93: mol_type = other DNA
acgaggtgttctatctgattactctgacacctctcaccagcgactatgtcgtagtgggtaaagtgcgcccgcttcggcgggcgcacatcagag

SEQ ID NO: 22705 - DNA, 93 bp, synthetic construct
  misc_feature 1..93: note = engineered ribonucleic acid scaffold (ERS) sequence
  source 1..93: mol_type = other DNA
acgggactttctatctgattactctgaagtccctcaccagcgactatgtcgtagtgggtaaagtgcgcccgcttcggcgggcgcacatcagag

SEQ ID NO: 22706 - DNA, 93 bp, synthetic construct
  misc_feature 1..93: note = engineered ribonucleic acid scaffold (ERS) sequence
  source 1..93: mol_type = other DNA
acgggcaattctatctgattactctgattgccctcaccagcgactatgtcgtagtgggtaaagtgcgcccgcttcggcgggcgcacatcagag

SEQ ID NO: 22707 - DNA, 93 bp, synthetic construct
  misc_feature 1..93: note = engineered ribonucleic acid scaffold (ERS) sequence
  source 1..93: mol_type = other DNA
actgtgcgttctatctgattactctgacgcacatcaccagcgactatgtcgtagtgggtaaagtgcgcccgcttcggcgggcgcacatcagag

SEQ ID NO: 22708 - DNA, 93 bp, synthetic construct
  misc_feature 1..93: note = engineered ribonucleic acid scaffold (ERS) sequence
  source 1..93: mol_type = other DNA
acacacggttctatctgattactctgaccgtgttcaccagcgactatgtcgtagtgggtaaataatgaaaacttcggttttcattaatcagag

SEQ ID NO: 22709 - DNA, 93 bp, synthetic construct
  misc_feature 1..93: note = engineered ribonucleic acid scaffold (ERS) sequence
  source 1..93: mol_type = other DNA
acactggtttctatctgattactctgaaccagttcaccagcgactatgtcgtagtgggtaaataatgaaaacttcggttttcattaatcagag

SEQ ID NO: 22710 - DNA, 93 bp, synthetic construct
  misc_feature 1..93: note = engineered ribonucleic acid scaffold (ERS) sequence
  source 1..93: mol_type = other DNA
acaggccgttctatctgattactctgacggccttcaccagcgactatgtcgtagtgggtaaataatgaaaacttcggttttcattaatcagag

SEQ ID NO: 22711 - DNA, 93 bp, synthetic construct
  misc_feature 1..93: note = engineered ribonucleic acid scaffold (ERS) sequence
  source 1..93: mol_type = other DNA
acaggtccttctatctgattactctgaggaccttcaccagcgactatgtcgtagtgggtaaataatgaaaacttcggttttcattaatcagag

SEQ ID NO: 22712 - DNA, 93 bp, synthetic construct
  misc_feature 1..93: note = engineered ribonucleic acid scaffold (ERS) sequence
  source 1..93: mol_type = other DNA
accagcaattctatctgattactctgattgctgtcaccagcgactatgtcgtagtgggtaaataatgaaaacttcggttttcattaatcagag

SEQ ID NO: 22713 - DNA, 93 bp, synthetic construct
  misc_feature 1..93: note = engineered ribonucleic acid scaffold (ERS) sequence
  source 1..93: mol_type = other DNA
accgagacttctatctgattactctgaggctcgtcaccagcgactatgtcgtagtgggtaaataatgaaaacttcggttttcattaatcagag

SEQ ID NO: 22714 - DNA, 93 bp, synthetic construct
  misc_feature 1..93: note = engineered ribonucleic acid scaffold (ERS) sequence
  source 1..93: mol_type = other DNA
acctgtagttctatctgattactctgactacagtcaccagcgactatgtcgtagtgggtaaataatgaaaacttcggttttcattaatcagag

SEQ ID NO: 22715 - DNA, 93 bp, synthetic construct
  misc_feature 1..93: note = engineered ribonucleic acid scaffold (ERS) sequence
  source 1..93: mol_type = other DNA
acgagcacttctatctgattactctgagggctctcaccagcgactatgtcgtagtgggtaaataatgaaaacttcggttttcattaatcagag

SEQ ID NO: 22716 - DNA, 93 bp, synthetic construct
  misc_feature 1..93: note = engineered ribonucleic acid scaffold (ERS) sequence
  source 1..93: mol_type = other DNA
acgaggtgttctatctgattactctgacacctctcaccagcgactatgtcgtagtgggtaaataatgaaaacttcggttttcattaatcagag

SEQ ID NO: 22717 - DNA, 93 bp, synthetic construct
  misc_feature 1..93: note = engineered ribonucleic acid scaffold (ERS) sequence
  source 1..93: mol_type = other DNA
acgggactttctatctgattactctgaagtccctcaccagcgactatgtcgtagtgggtaaataatgaaaacttcggttttcattaatcagag

SEQ ID NO: 22718 - DNA, 93 bp, synthetic construct
  misc_feature 1..93: note = engineered ribonucleic acid scaffold (ERS) sequence
  source 1..93: mol_type = other DNA
acgggcaattctatctgattactctgattgccctcaccagcgactatgtcgtagtgggtaaataatgaaaacttcggttttcattaatcagag

SEQ ID NO: 22719 - DNA, 93 bp, synthetic construct
  misc_feature 1..93: note = engineered ribonucleic acid scaffold (ERS) sequence
  source 1..93: mol_type = other DNA
actgtgcgttctatctgattactctgacgcacatcaccagcgactatgtcgtagtgggtaaataatgaaaacttcggttttcattaatcagag

SEQ ID NO: 22720 - DNA, 93 bp, synthetic construct
  misc_feature 1..93: note = engineered ribonucleic acid scaffold (ERS) sequence
  source 1..93: mol_type = other DNA
acacacggttctatctgattactctgaccgtgttcaccagcgactatgtcgtagtgggtaaatcgtaagaacttcggttcttacgaatcagag

SEQ ID NO: 22721 - DNA, 93 bp, synthetic construct
  misc_feature 1..93: note = engineered ribonucleic acid scaffold (ERS) sequence
  source 1..93: mol_type = other DNA
acactggtttctatctgattactctgaaccagttcaccagcgactatgtcgtagtgggtaaatcgtaagaacttcggttcttacgaatcagag

SEQ ID NO: 22722 - DNA, 93 bp, synthetic construct
  misc_feature 1..93: note = engineered ribonucleic acid scaffold (ERS) sequence
  source 1..93: mol_type = other DNA
acaggccgttctatctgattactctgacggccttcaccagcgactatgtcgtagtgggtaaatcgtaagaacttcggttcttacgaatcagag

SEQ ID NO: 22723 - DNA, 93 bp, synthetic construct
  misc_feature 1..93: note = engineered ribonucleic acid scaffold (ERS) sequence
  source 1..93: mol_type = other DNA
acaggtccttctatctgattactctgaggaccttcaccagcgactatgtcgtagtgggtaaatcgtaagaacttcggttcttacgaatcagag

SEQ ID NO: 22724 - DNA, 93 bp, synthetic construct
  misc_feature 1..93: note = engineered ribonucleic acid scaffold (ERS) sequence
  source 1..93: mol_type = other DNA
accagcaattctatctgattactctgattgctgtcaccagcgactatgtcgtagtgggtaaatcgtaagaacttcggttcttacgaatcagag

SEQ ID NO: 22725 - DNA, 93 bp, synthetic construct
  misc_feature 1..93: note = engineered ribonucleic acid scaffold (ERS) sequence
  source 1..93: mol_type = other DNA
accgagacttctatctgattactctgaggctcgtcaccagcgactatgtcgtagtgggtaaatcgtaagaacttcggttcttacgaatcagag

SEQ ID NO: 22726 - DNA, 93 bp, synthetic construct
  misc_feature 1..93: note = engineered ribonucleic acid scaffold (ERS) sequence
  source 1..93: mol_type = other DNA
acctgtagttctatctgattactctgactacagtcaccagcgactatgtcgtagtgggtaaatcgtaagaacttcggttcttacgaatcagag

SEQ ID NO: 22727 - DNA, 93 bp, synthetic construct
  misc_feature 1..93: note = engineered ribonucleic acid scaffold (ERS) sequence
  source 1..93: mol_type = other DNA
acgagcacttctatctgattactctgagggctctcaccagcgactatgtcgtagtgggtaaatcgtaagaacttcggttcttacgaatcagag

SEQ ID NO: 22728 - DNA, 93 bp, synthetic construct
  misc_feature 1..93: note = engineered ribonucleic acid scaffold (ERS) sequence
  source 1..93: mol_type = other DNA
acgaggtgttctatctgattactctgacacctctcaccagcgactatgtcgtagtgggtaaatcgtaagaacttcggttcttacgaatcagag

SEQ ID NO: 22729 - DNA, 93 bp, synthetic construct
  misc_feature 1..93: note = engineered ribonucleic acid scaffold (ERS) sequence
  source 1..93: mol_type = other DNA
acgggactttctatctgattactctgaagtccctcaccagcgactatgtcgtagtgggtaaatcgtaagaacttcggttcttacgaatcagag

SEQ ID NO: 22730 - DNA, 93 bp, synthetic construct
  misc_feature 1..93: note = engineered ribonucleic acid scaffold (ERS) sequence
  source 1..93: mol_type = other DNA
acgggcaattctatctgattactctgattgccctcaccagcgactatgtcgtagtgggtaaatcgtaagaacttcggttcttacgaatcagag

SEQ ID NO: 22731 - DNA, 93 bp, synthetic construct
  misc_feature 1..93: note = engineered ribonucleic acid scaffold (ERS) sequence
  source 1..93: mol_type = other DNA
actgtgcgttctatctgattactctgacgcacatcaccagcgactatgtcgtagtgggtaaatcgtaagaacttcggttcttacgaatcagag

SEQ ID NO: 22732 - DNA, 93 bp, synthetic construct
  misc_feature 1..93: note = engineered ribonucleic acid scaffold (ERS) sequence
  source 1..93: mol_type = other DNA
acacacggttctatctgattactctgaccgtgttcaccagcgactatgtcgtagtgggtaaatggaagatgcttcggcatcttccaatcagag

SEQ ID NO: 22733 - DNA, 93 bp, synthetic construct
  misc_feature 1..93: note = engineered ribonucleic acid scaffold (ERS) sequence
  source 1..93: mol_type = other DNA
acactggtttctatctgattactctgaaccagttcaccagcgactatgtcgtagtgggtaaatggaagatgcttcggcatcttccaatcagag

SEQ ID NO: 22734 - DNA, 93 bp, synthetic construct
  misc_feature 1..93: note = engineered ribonucleic acid scaffold (ERS) sequence
  source 1..93: mol_type = other DNA
acaggccgttctatctgattactctgacggccttcaccagcgactatgtcgtagtgggtaaatggaagatgcttcggcatcttccaatcagag

SEQ ID NO: 22735 - DNA, 93 bp, synthetic construct
  misc_feature 1..93: note = engineered ribonucleic acid scaffold (ERS) sequence
  source 1..93: mol_type = other DNA
acaggtccttctatctgattactctgaggaccttcaccagcgactatgtcgtagtgggtaaatggaagatgcttcggcatcttccaatcagag

SEQ ID NO: 22736 - DNA, 93 bp, synthetic construct
  misc_feature 1..93: note = engineered ribonucleic acid scaffold (ERS) sequence
  source 1..93: mol_type = other DNA
accagcaattctatctgattactctgattgctgtcaccagcgactatgtcgtagtgggtaaatggaagatgcttcggcatcttccaatcagag

SEQ ID NO: 22737 - DNA, 93 bp, synthetic construct
  misc_feature 1..93: note = engineered ribonucleic acid scaffold (ERS) sequence
  source 1..93: mol_type = other DNA
accgagacttctatctgattactctgaggctcgtcaccagcgactatgtcgtagtgggtaaatggaagatgcttcggcatcttccaatcagag

SEQ ID NO: 22738 - DNA, 93 bp, synthetic construct
  misc_feature 1..93: note = engineered ribonucleic acid scaffold (ERS) sequence
  source 1..93: mol_type = other DNA
acctgtagttctatctgattactctgactacagtcaccagcgactatgtcgtagtgggtaaatggaagatgcttcggcatcttccaatcagag

SEQ ID NO: 22739 - DNA, 93 bp, synthetic construct
  misc_feature 1..93: note = engineered ribonucleic acid scaffold (ERS) sequence
  source 1..93: mol_type = other DNA
acgagcacttctatctgattactctgagggctctcaccagcgactatgtcgtagtgggtaaatggaagatgcttcggcatcttccaatcagag

SEQ ID NO: 22740 - DNA, 93 bp, synthetic construct
  misc_feature 1..93: note = engineered ribonucleic acid scaffold (ERS) sequence
  source 1..93: mol_type = other DNA
acgaggtgttctatctgattactctgacacctctcaccagcgactatgtcgtagtgggtaaatggaagatgcttcggcatcttccaatcagag

SEQ ID NO: 22741 - DNA, 93 bp, synthetic construct
  misc_feature 1..93: note = engineered ribonucleic acid scaffold (ERS) sequence
  source 1..93: mol_type = other DNA
acgggactttctatctgattactctgaagtccctcaccagcgactatgtcgtagtgggtaaatggaagatgcttcggcatcttccaatcagag

SEQ ID NO: 22742 - DNA, 93 bp, synthetic construct
  misc_feature 1..93: note = engineered ribonucleic acid scaffold (ERS) sequence
  source 1..93: mol_type = other DNA
acgggcaattctatctgattactctgattgccctcaccagcgactatgtcgtagtgggtaaatggaagatgcttcggcatcttccaatcagag

SEQ ID NO: 22743 - DNA, 93 bp, synthetic construct
  misc_feature 1..93: note = engineered ribonucleic acid scaffold (ERS) sequence
  source 1..93: mol_type = other DNA
actgtgcgttctatctgattactctgacgcacatcaccagcgactatgtcgtagtgggtaaatggaagatgcttcggcatcttccaatcagag

SEQ ID NO: 22744 - DNA, 97 bp, synthetic construct
  misc_feature 1..97: note = engineered ribonucleic acid scaffold (ERS) sequence
  source 1..97: mol_type = other DNA
acacacggttctatctgattactctgaccgtgttcaccagcgactatgtcgtagtgggtaaagcccttacggacttcggtccgtaagggcatcagag

SEQ ID NO: 22745 - DNA, 97 bp, synthetic construct
  misc_feature 1..97: note = engineered ribonucleic acid scaffold (ERS) sequence
  source 1..97: mol_type = other DNA
acactggtttctatctgattactctgaaccagttcaccagcgactatgtcgtagtgggtaaagcccttacggacttcggtccgtaagggcatcagag

SEQ ID NO: 22746 - DNA, 97 bp, synthetic construct
  misc_feature 1..97: note = engineered ribonucleic acid scaffold (ERS) sequence
  source 1..97: mol_type = other DNA
acaggccgttctatctgattactctgacggccttcaccagcgactatgtcgtagtgggtaaagcccttacggacttcggtccgtaagggcatcagag

SEQ ID NO: 22747 - DNA, 97 bp, synthetic construct
  misc_feature 1..97: note = engineered ribonucleic acid scaffold (ERS) sequence
  source 1..97: mol_type = other DNA
acaggtccttctatctgattactctgaggaccttcaccagcgactatgtcgtagtgggtaaagcccttacggacttcggtccgtaagggcatcagag

SEQ ID NO: 22748 - DNA, 97 bp, synthetic construct
  misc_feature 1..97: note = engineered ribonucleic acid scaffold (ERS) sequence
  source 1..97: mol_type = other DNA
accagcaattctatctgattactctgattgctgtcaccagcgactatgtcgtagtgggtaaagcccttacggacttcggtccgtaagggcatcagag

SEQ ID NO: 22749 - DNA, 97 bp, synthetic construct
  misc_feature 1..97: note = engineered ribonucleic acid scaffold (ERS) sequence
  source 1..97: mol_type = other DNA
accgagacttctatctgattactctgaggctcgtcaccagcgactatgtcgtagtgggtaaagcccttacggacttcggtccgtaagggcatcagag

SEQ ID NO: 22750 - DNA, 97 bp, synthetic construct
  misc_feature 1..97: note = engineered ribonucleic acid scaffold (ERS) sequence
  source 1..97: mol_type = other DNA
acctgtagttctatctgattactctgactacagtcaccagcgactatgtcgtagtgggtaaagcccttacggacttcggtccgtaagggcatcagag

SEQ ID NO: 22751 - DNA, 97 bp, synthetic construct
  misc_feature 1..97: note = engineered ribonucleic acid scaffold (ERS) sequence
  source 1..97: mol_type = other DNA
acgagcacttctatctgattactctgagggctctcaccagcgactatgtcgtagtgggtaaagcccttacggacttcggtccgtaagggcatcagag

SEQ ID NO: 22752 - DNA, 97 bp, synthetic construct
  misc_feature 1..97: note = engineered ribonucleic acid scaffold (ERS) sequence
  source 1..97: mol_type = other DNA
acgaggtgttctatctgattactctgacacctctcaccagcgactatgtcgtagtgggtaaagcccttacggacttcggtccgtaagggcatcagag

SEQ ID NO: 22753 - DNA, 97 bp, synthetic construct
  misc_feature 1..97: note = engineered ribonucleic acid scaffold (ERS) sequence
  source 1..97: mol_type = other DNA
acgggactttctatctgattactctgaagtccctcaccagcgactatgtcgtagtgggtaaagcccttacggacttcggtccgtaagggcatcagag

SEQ ID NO: 22754 - DNA, 97 bp, synthetic construct
  misc_feature 1..97: note = engineered ribonucleic acid scaffold (ERS) sequence
  source 1..97: mol_type = other DNA
acgggcaattctatctgattactctgattgccctcaccagcgactatgtcgtagtgggtaaagcccttacggacttcggtccgtaagggcatcagag

SEQ ID NO: 22755 - DNA, 97 bp, synthetic construct
  misc_feature 1..97: note = engineered ribonucleic acid scaffold (ERS) sequence
  source 1..97: mol_type = other DNA
actgtgcgttctatctgattactctgacgcacatcaccagcgactatgtcgtagtgggtaaagcccttacggacttcggtccgtaagggcatcagag

SEQ ID NO: 22756 - DNA, 99 bp, synthetic construct
  misc_feature 1..99: note = engineered ribonucleic acid scaffold (ERS) sequence
  source 1..99: mol_type = other DNA
acacacggttctatctgattactctgaccgtgttcaccagcgactatgtcgtagtgggtaaagcctcttacggacttcggtccgtaagaggcatcagag

SEQ ID NO: 22757 - DNA, 99 bp, synthetic construct
  misc_feature 1..99: note = engineered ribonucleic acid scaffold (ERS) sequence
  source 1..99: mol_type = other DNA
acactggtttctatctgattactctgaaccagttcaccagcgactatgtcgtagtgggtaaagcctcttacggacttcggtccgtaagaggcatcagag

SEQ ID NO: 22758 - DNA, 99 bp, synthetic construct
  misc_feature 1..99: note = engineered ribonucleic acid scaffold (ERS) sequence
  source 1..99: mol_type = other DNA
acaggccgttctatctgattactctgacggccttcaccagcgactatgtcgtagtgggtaaagcctcttacggacttcggtccgtaagaggcatcagag

SEQ ID NO: 22759 - DNA, 99 bp, synthetic construct
  misc_feature 1..99: note = engineered ribonucleic acid scaffold (ERS) sequence
  source 1..99: mol_type = other DNA
acaggtccttctatctgattactctgaggaccttcaccagcgactatgtcgtagtgggtaaagcctcttacggacttcggtccgtaagaggcatcagag

SEQ ID NO: 22760 - DNA, 99 bp, synthetic construct
  misc_feature 1..99: note = engineered ribonucleic acid scaffold (ERS) sequence
  source 1..99: mol_type = other DNA
accagcaattctatctgattactctgattgctgtcaccagcgactatgtcgtagtgggtaaagcctcttacggacttcggtccgtaagaggcatcagag

SEQ ID NO: 22761 - DNA, 99 bp, synthetic construct
  misc_feature 1..99: note = engineered ribonucleic acid scaffold (ERS) sequence
  source 1..99: mol_type = other DNA
accgagacttctatctgattactctgaggctcgtcaccagcgactatgtcgtagtgggtaaagcctcttacggacttcggtccgtaagaggcatcagag

SEQ ID NO: 22762 - DNA, 99 bp, synthetic construct
  misc_feature 1..99: note = engineered ribonucleic acid scaffold (ERS) sequence
  source 1..99: mol_type = other DNA
acctgtagttctatctgattactctgactacagtcaccagcgactatgtcgtagtgggtaaagcctcttacggacttcggtccgtaagaggcatcagag

SEQ ID NO: 22763 - DNA, 99 bp, synthetic construct
  misc_feature 1..99: note = engineered ribonucleic acid scaffold (ERS) sequence
  source 1..99: mol_type = other DNA
acgagcacttctatctgattactctgagggctctcaccagcgactatgtcgtagtgggtaaagcctcttacggacttcggtccgtaagaggcatcagag

SEQ ID NO: 22764 - DNA, 99 bp, synthetic construct
  misc_feature 1..99: note = engineered ribonucleic acid scaffold (ERS) sequence
  source 1..99: mol_type = other DNA
acgaggtgttctatctgattactctgacacctctcaccagcgactatgtcgtagtgggtaaagcctcttacggacttcggtccgtaagaggcatcagag

SEQ ID NO: 22765 - DNA, 99 bp, synthetic construct
  misc_feature 1..99: note = engineered ribonucleic acid scaffold (ERS) sequence
  source 1..99: mol_type = other DNA
acgggactttctatctgattactctgaagtccctcaccagcgactatgtcgtagtgggtaaagcctcttacggacttcggtccgtaagaggcatcagag

SEQ ID NO: 22766 - DNA, 99 bp, synthetic construct
  misc_feature 1..99: note = engineered ribonucleic acid scaffold (ERS) sequence
  source 1..99: mol_type = other DNA
acgggcaattctatctgattactctgattgccctcaccagcgactatgtcgtagtgggtaaagcctcttacggacttcggtccgtaagaggcatcagag

SEQ ID NO: 22767 - DNA, 99 bp, synthetic construct
  misc_feature 1..99: note = engineered ribonucleic acid scaffold (ERS) sequence
  source 1..99: mol_type = other DNA
actgtgcgttctatctgattactctgacgcacatcaccagcgactatgtcgtagtgggtaaagcctcttacggacttcggtccgtaagaggcatcagag

SEQ ID NO: 22768 - DNA, 99 bp, synthetic construct
  misc_feature 1..99: note = engineered ribonucleic acid scaffold (ERS) sequence
  source 1..99: mol_type = other DNA
acacacggttctatctgattactctgaccgtgttcaccagcgactatgtcgtagtgggtaaagccgcttagggacttcggtccctaagaggcatcagag

SEQ ID NO: 22769 - DNA, 99 bp, synthetic construct
  misc_feature 1..99: note = engineered ribonucleic acid scaffold (ERS) sequence
  source 1..99: mol_type = other DNA
acactggtttctatctgattactctgaaccagttcaccagcgactatgtcgtagtgggtaaagccgcttagggacttcggtccctaagaggcatcagag

SEQ ID NO: 22770 - DNA, 99 bp, synthetic construct
  misc_feature 1..99: note = engineered ribonucleic acid scaffold (ERS) sequence
  source 1..99: mol_type = other DNA
acaggccgttctatctgattactctgacggccttcaccagcgactatgtcgtagtgggtaaagccgcttagggacttcggtccctaagaggcatcagag

SEQ ID NO: 22771 - DNA, 99 bp, synthetic construct
  misc_feature 1..99: note = engineered ribonucleic acid scaffold (ERS) sequence
  source 1..99: mol_type = other DNA
acaggtccttctatctgattactctgaggaccttcaccagcgactatgtcgtagtgggtaaagccgcttagggacttcggtccctaagaggcatcagag

SEQ ID NO: 22772 - DNA, 99 bp, synthetic construct
  misc_feature 1..99: note = engineered ribonucleic acid scaffold (ERS) sequence
  source 1..99: mol_type = other DNA
accagcaattctatctgattactctgattgctgtcaccagcgactatgtcgtagtgggtaaagccgcttagggacttcggtccctaagaggcatcagag

SEQ ID NO: 22773 - DNA, 99 bp, synthetic construct
  misc_feature 1..99: note = engineered ribonucleic acid scaffold (ERS) sequence
  source 1..99: mol_type = other DNA
accgagacttctatctgattactctgaggctcgtcaccagcgactatgtcgtagtgggtaaagccgcttagggacttcggtccctaagaggcatcagag

SEQ ID NO: 22774 - DNA, 99 bp, synthetic construct
  misc_feature 1..99: note = engineered ribonucleic acid scaffold (ERS) sequence
  source 1..99: mol_type = other DNA
acctgtagttctatctgattactctgactacagtcaccagcgactatgtcgtagtgggtaaagccgcttagggacttcggtccctaagaggcatcagag

SEQ ID NO: 22775 - DNA, 99 bp, synthetic construct
  misc_feature 1..99: note = engineered ribonucleic acid scaffold (ERS) sequence
  source 1..99: mol_type = other DNA
acgagcacttctatctgattactctgagggctctcaccagcgactatgtcgtagtgggtaaagccgcttagggacttcggtccctaagaggcatcagag

SEQ ID NO: 22776 - DNA, 99 bp, synthetic construct
  misc_feature 1..99: note = engineered ribonucleic acid scaffold (ERS) sequence
  source 1..99: mol_type = other DNA
acgaggtgttctatctgattactctgacacctctcaccagcgactatgtcgtagtgggtaaagccgcttagggacttcggtccctaagaggcatcagag

SEQ ID NO: 22777 - DNA, 99 bp, synthetic construct
  misc_feature 1..99: note = engineered ribonucleic acid scaffold (ERS) sequence
  source 1..99: mol_type = other DNA
acgggactttctatctgattactctgaagtccctcaccagcgactatgtcgtagtgggtaaagccgcttagggacttcggtccctaagaggcatcagag

SEQ ID NO: 22778 - DNA, 99 bp, synthetic construct
  misc_feature 1..99: note = engineered ribonucleic acid scaffold (ERS) sequence
  source 1..99: mol_type = other DNA
acgggcaattctatctgattactctgattgccctcaccagcgactatgtcgtagtgggtaaagccgcttagggacttcggtccctaagaggcatcagag

SEQ ID NO: 22779 - DNA, 99 bp, synthetic construct
  misc_feature 1..99: note = engineered ribonucleic acid scaffold (ERS) sequence
  source 1..99: mol_type = other DNA
actgtgcgttctatctgattactctgacgcacatcaccagcgactatgtcgtagtgggtaaagccgcttagggacttcggtccctaagaggcatcagag

SEQ ID NO: 22780 - DNA, 89 bp, synthetic construct
  misc_feature 1..89: note = engineered ribonucleic acid scaffold (ERS) sequence
  source 1..89: mol_type = other DNA
acgagcacttctatctgattactctgagggctctcaccagcgactatgtcgtagtgggtaaagctccctcttcggagggagcatcaaag

SEQ ID NO: 22781 - DNA, 89 bp, synthetic construct
  misc_feature 1..89: note = engineered ribonucleic acid scaffold (ERS) sequence
  source 1..89: mol_type = other DNA
acgaggtgttctatctgattactttgacacctctcaccagcgactatgtcgtagtgggtaaagctccctcttcggagggagcatcagag

SEQ ID NO: 22782 - DNA, 89 bp, synthetic construct
  misc_feature 1..89: note = engineered ribonucleic acid scaffold (ERS) sequence
  source 1..89: mol_type = other DNA
acgaggtgttctatctgattactttgacacctctcaccagcgactatgtcgtagtgggtaaagctccctcttcggagggagcatcaaag

SEQ ID NO: 22783 - DNA, 89 bp, synthetic construct
  misc_feature 1..89: note = engineered ribonucleic acid scaffold (ERS) sequence
  source 1..89: mol_type = other DNA
acgaggtgttctatctgattagtctcacacctctcaccagcgactatgtcgtagtgggtaaagctccctcttcggagggagcatgagac

SEQ ID NO: 22784 - DNA, 89 bp, synthetic construct
  misc_feature 1..89: note = engineered ribonucleic acid scaffold (ERS) sequence
  source 1..89: mol_type = other DNA
acgaggtgttctatctgattagtctgacacctctcaccagcgactatgtcgtagtgggtaaagctccctcttcggagggagcatcagac

SEQ ID NO: 22785 - DNA, 89 bp, synthetic construct
  misc_feature 1..89: note = engineered ribonucleic acid scaffold (ERS) sequence
  source 1..89: mol_type = other DNA
acgaggtgttctatctgattactctcacacctctcaccagcgactatgtcgtagtgggtaaagctccctcttcggagggagcatgagag

SEQ ID NO: 22786 - DNA, 89 bp, synthetic construct
  misc_feature 1..89: note = engineered ribonucleic acid scaffold (ERS) sequence
  source 1..89: mol_type = other DNA
acgaggtgtcccatctgattaccccgacacctctcaccagcgactatgtcgtagtgggtaaagctccctcttcggagggagcatcgggg

SEQ ID NO: 22787 - DNA, 89 bp, synthetic construct
  misc_feature 1..89: note = engineered ribonucleic acid scaffold (ERS) sequence
  source 1..89: mol_type = other DNA
acgaggtgtcctatctgattactccgacacctctcaccagcgactatgtcgtagtgggtaaagctccctcttcggagggagcatcggag

SEQ ID NO: 22788 - DNA, 89 bp, synthetic construct
  misc_feature 1..89: note = engineered ribonucleic acid scaffold (ERS) sequence
  source 1..89: mol_type = other DNA
acgaggtgtgggatctgattaccccgacacctctcaccagcgactatgtcgtagtgggtaaagctccctcttcggagggagcatcgggg

SEQ ID NO: 22789 - DNA, 89 bp, synthetic construct
  misc_feature 1..89: note = engineered ribonucleic acid scaffold (ERS) sequence
  source 1..89: mol_type = other DNA
acgaggtgtggtatctgattactccgacacctctcaccagcgactatgtcgtagtgggtaaagctccctcttcggagggagcatcggag

SEQ ID NO: 22790 - DNA, 89 bp, synthetic construct
  misc_feature 1..89: note = engineered ribonucleic acid scaffold (ERS) sequence
  source 1..89: mol_type = other DNA
acgaggtgttccatctgattaccctgacacctctcaccagcgactatgtcgtagtgggtaaagctccctcttcggagggagcatcaggg

SEQ ID NO: 22791 - DNA, 89 bp, synthetic construct
  misc_feature 1..89: note = engineered ribonucleic acid scaffold (ERS) sequence
  source 1..89: mol_type = other DNA
acgaggtgttggatctgattaccctgacacctctcaccagcgactatgtcgtagtgggtaaagctccctcttcggagggagcatcaggg

SEQ ID NO: 22792 - DNA, 89 bp, synthetic construct
  misc_feature 1..89: note = engineered ribonucleic acid scaffold (ERS) sequence
  source 1..89: mol_type = other DNA
acgaggtgttgtatctgattactctgacacctctcaccagcgactatgtcgtagtgggtaaagctccctcttcggagggagcatcagag

SEQ ID NO: 22793 - DNA, 89 bp, synthetic construct
  misc_feature 1..89: note = engineered ribonucleic acid scaffold (ERS) sequence
  source 1..89: mol_type = other DNA
acgaggtgttttatctgattactttgacacctctcaccagcgactatgtcgtagtgggtaaagctccctcttcggagggagcatcagag

SEQ ID NO: 22794 - DNA, 89 bp, synthetic construct
  misc_feature 1..89: note = engineered ribonucleic acid scaffold (ERS) sequence
  source 1..89: mol_type = other DNA
acgaggtgttttatctgattactctgacacctctcaccagcgactatgtcgtagtgggtaaagctccctcttcggagggagcatcagag

SEQ ID NO: 22795 - DNA, 89 bp, synthetic construct
  misc_feature 1..89: note = engineered ribonucleic acid scaffold (ERS) sequence
  source 1..89: mol_type = other DNA
acgaggtgttttatctgattactctgacacctctcaccagcgactatgtcgtagtgggtaaagctccctcttcggagggagcatcaaag

SEQ ID NO: 22796 - DNA, 89 bp, synthetic construct
  misc_feature 1..89: note = engineered ribonucleic acid scaffold (ERS) sequence
  source 1..89: mol_type = other DNA
acgaggtgttctatctgattactctgacacctctcaccagcgactatgtcgtagtgggtaaagctccctcttcggagggagcctcagag

SEQ ID NO: 22797 - DNA, 89 bp, synthetic construct
  misc_feature 1..89: note = engineered ribonucleic acid scaffold (ERS) sequence
  source 1..89: mol_type = other DNA
acgaggtgttctatctgattactctgacacctctcaccagcgactatgtcgtagtgggtaaagctccctcttcggagggagcgtcagag

SEQ ID NO: 22798 - DNA, 89 bp, synthetic construct
  misc_feature 1..89: note = engineered ribonucleic acid scaffold (ERS) sequence
  source 1..89: mol_type = other DNA
acgaggtgttctatctgattactctgacacctctcaccagcgactatgtcgtagtgggtaaagctccctcttcggagggagcatcaaag

SEQ ID NO: 22799 - DNA, 89 bp, synthetic construct
  misc_feature 1..89: note = engineered ribonucleic acid scaffold (ERS) sequence
  source 1..89: mol_type = other DNA
acgggactttctatctgattactctcaagtccctcaccagcgactatgtcgtagtgggtaaagctccctcttcggagggagcatcagac

SEQ ID NO: 22800 - DNA, 89 bp, synthetic construct
  misc_feature 1..89: note = engineered ribonucleic acid scaffold (ERS) sequence
  source 1..89: mol_type = other DNA
acgggactttctatctgattactttgaagtccctcaccagcgactatgtcgtagtgggtaaagctccctcttcggagggagcatcagag

SEQ ID NO: 22801 - DNA, 89 bp, synthetic construct
  misc_feature 1..89: note = engineered ribonucleic acid scaffold (ERS) sequence
  source 1..89: mol_type = other DNA
acgggactttctatctgattactttgaagtccctcaccagcgactatgtcgtagtgggtaaagctccctcttcggagggagcatcaaag

SEQ ID NO: 22802 - DNA, 89 bp, synthetic construct
  misc_feature 1..89: note = engineered ribonucleic acid scaffold (ERS) sequence
  source 1..89: mol_type = other DNA
acgggactttctatctgattagtctcaagtccctcaccagcgactatgtcgtagtgggtaaagctccctcttcggagggagcatgagac

SEQ ID NO: 22803 - DNA, 89 bp, synthetic construct
  misc_feature 1..89: note = engineered ribonucleic acid scaffold (ERS) sequence
  source 1..89: mol_type = other DNA
acgggactttctatctgattagtctgaagtccctcaccagcgactatgtcgtagtgggtaaagctccctcttcggagggagcatcagac

SEQ ID NO: 22804 - DNA, 89 bp, synthetic construct
  misc_feature 1..89: note = engineered ribonucleic acid scaffold (ERS) sequence
  source 1..89: mol_type = other DNA
acgggactttctatctgattactctcaagtccctcaccagcgactatgtcgtagtgggtaaagctccctcttcggagggagcatgagag

SEQ ID NO: 22805 - DNA, 89 bp, synthetic construct
  misc_feature 1..89: note = engineered ribonucleic acid scaffold (ERS) sequence
  source 1..89: mol_type = other DNA
acgggacttcccatctgattaccccgaagtccctcaccagcgactatgtcgtagtgggtaaagctccctcttcggagggagcatcgggg

SEQ ID NO: 22806 - DNA, 89 bp, synthetic construct
  misc_feature 1..89: note = engineered ribonucleic acid scaffold (ERS) sequence
  source 1..89: mol_type = other DNA
acgggacttcctatctgattactccgaagtccctcaccagcgactatgtcgtagtgggtaaagctccctcttcggagggagcatcggag

SEQ ID NO: 22807 - DNA, 89 bp, synthetic construct
  misc_feature 1..89: note = engineered ribonucleic acid scaffold (ERS) sequence
  source 1..89: mol_type = other DNA
acgggacttgggatctgattaccccgaagtccctcaccagcgactatgtcgtagtgggtaaagctccctcttcggagggagcatcgggg

SEQ ID NO: 22808 - DNA, 89 bp, synthetic construct
  misc_feature 1..89: note = engineered ribonucleic acid scaffold (ERS) sequence
  source 1..89: mol_type = other DNA
acgggacttggtatctgattactccgaagtccctcaccagcgactatgtcgtagtgggtaaagctccctcttcggagggagcatcggag

SEQ ID NO: 22809 - DNA, 89 bp, synthetic construct
  misc_feature 1..89: note = engineered ribonucleic acid scaffold (ERS) sequence
  source 1..89: mol_type = other DNA
acgggactttccatctgattaccctgaagtccctcaccagcgactatgtcgtagtgggtaaagctccctcttcggagggagcatcaggg

SEQ ID NO: 22810 - DNA, 89 bp, synthetic construct
  misc_feature 1..89: note = engineered ribonucleic acid scaffold (ERS) sequence
  source 1..89: mol_type = other DNA
acgggactttggatctgattaccctgaagtccctcaccagcgactatgtcgtagtgggtaaagctccctcttcggagggagcatcaggg

SEQ ID NO: 22811 - DNA, 89 bp, synthetic construct
  misc_feature 1..89: note = engineered ribonucleic acid scaffold (ERS) sequence
  source 1..89: mol_type = other DNA
acgggactttgtatctgattactctgaagtccctcaccagcgactatgtcgtagtgggtaaagctccctcttcggagggagcatcagag

SEQ ID NO: 22812 - DNA, 89 bp, synthetic construct
  misc_feature 1..89: note = engineered ribonucleic acid scaffold (ERS) sequence
  source 1..89: mol_type = other DNA
acgggactttttatctgattactttgaagtccctcaccagcgactatgtcgtagtgggtaaagctccctcttcggagggagcatcagag

SEQ ID NO: 22813 - DNA, 89 bp, synthetic construct
  misc_feature 1..89: note = engineered ribonucleic acid scaffold (ERS) sequence
  source 1..89: mol_type = other DNA
acgggactttttatctgattactctgaagtccctcaccagcgactatgtcgtagtgggtaaagctccctcttcggagggagcatcagag

SEQ ID NO: 22814 - DNA, 89 bp, synthetic construct
  misc_feature 1..89: note = engineered ribonucleic acid scaffold (ERS) sequence
  source 1..89: mol_type = other DNA
acgggactttttatctgattactctgaagtccctcaccagcgactatgtcgtagtgggtaaagctccctcttcggagggagcatcaaag

SEQ ID NO: 22815 - DNA, 89 bp, synthetic construct
  misc_feature 1..89: note = engineered ribonucleic acid scaffold (ERS) sequence
  source 1..89: mol_type = other DNA
acgggactttctatctgattactctgaagtccctcaccagcgactatgtcgtagtgggtaaagctccctcttcggagggagcctcagag

SEQ ID NO: 22816 - DNA, 89 bp, synthetic construct
  misc_feature 1..89: note = engineered ribonucleic acid scaffold (ERS) sequence
  source 1..89: mol_type = other DNA
acgggactttctatctgattactctgaagtccctcaccagcgactatgtcgtagtgggtaaagctccctcttcggagggagcgtcagag

SEQ ID NO: 22817 - DNA, 89 bp, synthetic construct
  misc_feature 1..89: note = engineered ribonucleic acid scaffold (ERS) sequence
  source 1..89: mol_type = other DNA
acgggactttctatctgattactctgaagtccctcaccagcgactatgtcgtagtgggtaaagctccctcttcggagggagcatcaaag

SEQ ID NO: 22818 - DNA, 89 bp, synthetic construct
  misc_feature 1..89: note = engineered ribonucleic acid scaffold (ERS) sequence
  source 1..89: mol_type = other DNA
acgggcaattctatctgattactctcattgccctcaccagcgactatgtcgtagtgggtaaagctccctcttcggagggagcatcagac

SEQ ID NO: 22819 - DNA, 89 bp, synthetic construct
  misc_feature 1..89: note = engineered ribonucleic acid scaffold (ERS) sequence
  source 1..89: mol_type = other DNA
acgggcaattctatctgattactttgattgccctcaccagcgactatgtcgtagtgggtaaagctccctcttcggagggagcatcagag

SEQ ID NO: 22820 - DNA, 89 bp, synthetic construct
  misc_feature 1..89: note = engineered ribonucleic acid scaffold (ERS) sequence
  source 1..89: mol_type = other DNA
acgggcaattctatctgattactttgattgccctcaccagcgactatgtcgtagtgggtaaagctccctcttcggagggagcatcaaag

SEQ ID NO: 22821 - DNA, 89 bp, synthetic construct
  misc_feature 1..89: note = engineered ribonucleic acid scaffold (ERS) sequence
  source 1..89: mol_type = other DNA
acgggcaattctatctgattagtctcattgccctcaccagcgactatgtcgtagtgggtaaagctccctcttcggagggagcatgagac

SEQ ID NO: 22822 - DNA, 89 bp, synthetic construct
  misc_feature 1..89: note = engineered ribonucleic acid scaffold (ERS) sequence
  source 1..89: mol_type = other DNA
acgggcaattctatctgattagtctgattgccctcaccagcgactatgtcgtagtgggtaaagctccctcttcggagggagcatcagac

SEQ ID NO: 22823 - DNA, 89 bp, synthetic construct
  misc_feature 1..89: note = engineered ribonucleic acid scaffold (ERS) sequence
  source 1..89: mol_type = other DNA
acgggcaattctatctgattactctcattgccctcaccagcgactatgtcgtagtgggtaaagctccctcttcggagggagcatgagag

SEQ ID NO: 22824 - DNA, 89 bp, synthetic construct
  misc_feature 1..89: note = engineered ribonucleic acid scaffold (ERS) sequence
  source 1..89: mol_type = other DNA
acgggcaatcccatctgattaccccgattgccctcaccagcgactatgtcgtagtgggtaaagctccctcttcggagggagcatcgggg

SEQ ID NO: 22825 - DNA, 89 bp, synthetic construct
  misc_feature 1..89: note = engineered ribonucleic acid scaffold (ERS) sequence
  source 1..89: mol_type = other DNA
acgggcaatcctatctgattactccgattgccctcaccagcgactatgtcgtagtgggtaaagctccctcttcggagggagcatcggag

SEQ ID NO: 22826 - DNA, 89 bp, synthetic construct
  misc_feature 1..89: note = engineered ribonucleic acid scaffold (ERS) sequence
  source 1..89: mol_type = other DNA
acgggcaatgggatctgattaccccgattgccctcaccagcgactatgtcgtagtgggtaaagctccctcttcggagggagcatcgggg

SEQ ID NO: 22827 - DNA, 89 bp, synthetic construct
  misc_feature 1..89: note = engineered ribonucleic acid scaffold (ERS) sequence
  source 1..89: mol_type = other DNA
acgggcaatggtatctgattactccgattgccctcaccagcgactatgtcgtagtgggtaaagctccctcttcggagggagcatcggag

SEQ ID NO: 22828 - DNA, 89 bp, synthetic construct
  misc_feature 1..89: note = engineered ribonucleic acid scaffold (ERS) sequence
  source 1..89: mol_type = other DNA
acgggcaattccatctgattaccctgattgccctcaccagcgactatgtcgtagtgggtaaagctccctcttcggagggagcatcaggg

SEQ ID NO: 22829 - DNA, 89 bp, synthetic construct
  misc_feature 1..89: note = engineered ribonucleic acid scaffold (ERS) sequence
  source 1..89: mol_type = other DNA
acgggcaattggatctgattaccctgattgccctcaccagcgactatgtcgtagtgggtaaagctccctcttcggagggagcatcaggg

SEQ ID NO: 22830 - DNA, 89 bp, synthetic construct
  misc_feature 1..89: note = engineered ribonucleic acid scaffold (ERS) sequence
  source 1..89: mol_type = other DNA
acgggcaattgtatctgattactctgattgccctcaccagcgactatgtcgtagtgggtaaagctccctcttcggagggagcatcagag

SEQ ID NO: 22831 - DNA, 89 bp, synthetic construct
  misc_feature 1..89: note = engineered ribonucleic acid scaffold (ERS) sequence
  source 1..89: mol_type = other DNA
acgggcaattttatctgattactttgattgccctcaccagcgactatgtcgtagtgggtaaagctccctcttcggagggagcatcagag

SEQ ID NO: 22832 - DNA, 89 bp, synthetic construct
  misc_feature 1..89: note = engineered ribonucleic acid scaffold (ERS) sequence
  source 1..89: mol_type = other DNA
acgggcaattttatctgattactctgattgccctcaccagcgactatgtcgtagtgggtaaagctccctcttcggagggagcatcagag

SEQ ID NO: 22833 - DNA, 89 bp, synthetic construct
  misc_feature 1..89: note = engineered ribonucleic acid scaffold (ERS) sequence
  source 1..89: mol_type = other DNA
acgggcaattttatctgattactctgattgccctcaccagcgactatgtcgtagtgggtaaagctccctcttcggagggagcatcaaag

SEQ ID NO: 22834 - DNA, 89 bp, synthetic construct
  misc_feature 1..89: note = engineered ribonucleic acid scaffold (ERS) sequence
  source 1..89: mol_type = other DNA
acgggcaattctatctgattactctgattgccctcaccagcgactatgtcgtagtgggtaaagctccctcttcggagggagcctcagag

SEQ ID NO: 22835 - DNA, 89 bp, synthetic construct
  misc_feature 1..89: note = engineered ribonucleic acid scaffold (ERS) sequence
  source 1..89: mol_type = other DNA
acgggcaattctatctgattactctgattgccctcaccagcgactatgtcgtagtgggtaaagctccctcttcggagggagcgtcagag

SEQ ID NO: 22836 - DNA, 89 bp, synthetic construct
  misc_feature 1..89: note = engineered ribonucleic acid scaffold (ERS) sequence
  source 1..89: mol_type = other DNA
acgggcaattctatctgattactctgattgccctcaccagcgactatgtcgtagtgggtaaagctccctcttcggagggagcatcaaag

SEQ ID NO: 22837 - DNA, 89 bp, synthetic construct
  misc_feature 1..89: note = engineered ribonucleic acid scaffold (ERS) sequence
  source 1..89: mol_type = other DNA
actgtgcgttctatctgattactctcacgcacatcaccagcgactatgtcgtagtgggtaaagctccctcttcggagggagcatcagac

SEQ ID NO: 22838 - DNA, 89 bp, synthetic construct
  misc_feature 1..89: note = engineered ribonucleic acid scaffold (ERS) sequence
  source 1..89: mol_type = other DNA
actgtgcgttctatctgattactttgacgcacatcaccagcgactatgtcgtagtgggtaaagctccctcttcggagggagcatcagag

SEQ ID NO: 22839 - DNA, 89 bp, synthetic construct
  misc_feature 1..89: note = engineered ribonucleic acid scaffold (ERS) sequence
  source 1..89: mol_type = other DNA
actgtgcgttctatctgattactttgacgcacatcaccagcgactatgtcgtagtgggtaaagctccctcttcggagggagcatcaaag

SEQ ID NO: 22840 - DNA, 89 bp, synthetic construct
  misc_feature 1..89: note = engineered ribonucleic acid scaffold (ERS) sequence
  source 1..89: mol_type = other DNA
actgtgcgttctatctgattagtctcacgcacatcaccagcgactatgtcgtagtgggtaaagctccctcttcggagggagcatgagac

SEQ ID NO: 22841 - DNA, 89 bp, synthetic construct
  misc_feature 1..89: note = engineered ribonucleic acid scaffold (ERS) sequence
  source 1..89: mol_type = other DNA
actgtgcgttctatctgattagtctgacgcacatcaccagcgactatgtcgtagtgggtaaagctccctcttcggagggagcatcagac

SEQ ID NO: 22842 - DNA, 89 bp, synthetic construct
  misc_feature 1..89: note = engineered ribonucleic acid scaffold (ERS) sequence
  source 1..89: mol_type = other DNA
actgtgcgttctatctgattactctcacgcacatcaccagcgactatgtcgtagtgggtaaagctccctcttcggagggagcatgagag

SEQ ID NO: 22843 - DNA, 89 bp, synthetic construct
  misc_feature 1..89: note = engineered ribonucleic acid scaffold (ERS) sequence
  source 1..89: mol_type = other DNA
actgtgcgtcccatctgattaccccgacgcacatcaccagcgactatgtcgtagtgggtaaagctccctcttcggagggagcatcgggg

SEQ ID NO: 22844 - DNA, 89 bp, synthetic construct
  misc_feature 1..89: note = engineered ribonucleic acid scaffold (ERS) sequence
  source 1..89: mol_type = other DNA
actgtgcgtcctatctgattactccgacgcacatcaccagcgactatgtcgtagtgggtaaagctccctcttcggagggagcatcggag

SEQ ID NO: 22845 - DNA, 89 bp, synthetic construct
  misc_feature 1..89: note = engineered ribonucleic acid scaffold (ERS) sequence
  source 1..89: mol_type = other DNA
actgtgcgtgggatctgattaccccgacgcacatcaccagcgactatgtcgtagtgggtaaagctccctcttcggagggagcatcgggg

SEQ ID NO: 22846 - DNA, 89 bp, synthetic construct
  misc_feature 1..89: note = engineered ribonucleic acid scaffold (ERS) sequence
  source 1..89: mol_type = other DNA
actgtgcgtggtatctgattactccgacgcacatcaccagcgactatgtcgtagtgggtaaagctccctcttcggagggagcatcggag

SEQ ID NO: 22847 - DNA, 89 bp, synthetic construct
  misc_feature 1..89: note = engineered ribonucleic acid scaffold (ERS) sequence
  source 1..89: mol_type = other DNA
actgtgcgttccatctgattaccctgacgcacatcaccagcgactatgtcgtagtgggtaaagctccctcttcggagggagcatcaggg

SEQ ID NO: 22848 - DNA, 89 bp, synthetic construct
  misc_feature 1..89: note = engineered ribonucleic acid scaffold (ERS) sequence
  source 1..89: mol_type = other DNA
actgtgcgttggatctgattaccctgacgcacatcaccagcgactatgtcgtagtgggtaaagctccctcttcggagggagcatcaggg

SEQ ID NO: 22849 - DNA, 89 bp, synthetic construct
  misc_feature 1..89: note = engineered ribonucleic acid scaffold (ERS) sequence
  source 1..89: mol_type = other DNA
actgtgcgttgtatctgattactctgacgcacatcaccagcgactatgtcgtagtgggtaaagctccctcttcggagggagcatcagag

SEQ ID NO: 22850 - DNA, 89 bp, synthetic construct
  misc_feature 1..89: note = engineered ribonucleic acid scaffold (ERS) sequence
  source 1..89: mol_type = other DNA
actgtgcgttttatctgattactttgacgcacatcaccagcgactatgtcgtagtgggtaaagctccctcttcggagggagcatcagag

SEQ ID NO: 22851 - DNA, 89 bp, synthetic construct
  misc_feature 1..89: note = engineered ribonucleic acid scaffold (ERS) sequence
  source 1..89: mol_type = other DNA
actgtgcgttttatctgattactctgacgcacatcaccagcgactatgtcgtagtgggtaaagctccctcttcggagggagcatcagag

SEQ ID NO: 22852 - DNA, 89 bp, synthetic construct
  misc_feature 1..89: note = engineered ribonucleic acid scaffold (ERS) sequence
  source 1..89: mol_type = other DNA
actgtgcgttttatctgattactctgacgcacatcaccagcgactatgtcgtagtgggtaaagctccctcttcggagggagcatcaaag

SEQ ID NO: 22853 - DNA, 89 bp, synthetic construct
  misc_feature 1..89: note = engineered ribonucleic acid scaffold (ERS) sequence
  source 1..89: mol_type = other DNA
actgtgcgttctatctgattactctgacgcacatcaccagcgactatgtcgtagtgggtaaagctccctcttcggagggagcctcagag

SEQ ID NO: 22854 - DNA, 89 bp, synthetic construct
  misc_feature 1..89: note = engineered ribonucleic acid scaffold (ERS) sequence
  source 1..89: mol_type = other DNA
actgtgcgttctatctgattactctgacgcacatcaccagcgactatgtcgtagtgggtaaagctccctcttcggagggagcgtcagag

SEQ ID NO: 22855 - DNA, 89 bp, synthetic construct
  misc_feature 1..89: note = engineered ribonucleic acid scaffold (ERS) sequence
  source 1..89: mol_type = other DNA
actgtgcgttctatctgattactctgacgcacatcaccagcgactatgtcgtagtgggtaaagctccctcttcggagggagcatcaaag

SEQ ID NO: 22856 - DNA, 91 bp, synthetic construct
  misc_feature 1..91: note = engineered ribonucleic acid scaffold (ERS) sequence
  source 1..91: mol_type = other DNA
acacacggttctatatctgattactctgaccgtgttcaccagcgactatgtcgtagtgggtaaagctccctcttcggagggagcatcagag

SEQ ID NO: 22857 - DNA, 90 bp, synthetic construct
  misc_feature 1..90: note = engineered ribonucleic acid scaffold (ERS) sequence
  source 1..90: mol_type = other DNA
acacacggttctaatctgattactctgaccgtgttcaccagcgactatgtcgtagtgggtaaagctccctcttcggagggagcatcagag

SEQ ID NO: 22858 - DNA, 88 bp, synthetic construct
  misc_feature 1..88: note = engineered ribonucleic acid scaffold (ERS) sequence
  source 1..88: mol_type = other DNA
acacacggttctactgattactctgaccgtgttcaccagcgactatgtcgtagtgggtaaagctccctcttcggagggagcatcagag

SEQ ID NO: 22859 - DNA, 89 bp, synthetic construct
  misc_feature 1..89: note = engineered ribonucleic acid scaffold (ERS) sequence
  source 1..89: mol_type = other DNA
acacacggttctaactgattactctgaccgtgttcaccagcgactatgtcgtagtgggtaaagctccctcttcggagggagcatcagag

SEQ ID NO: 22860 - DNA, 89 bp, synthetic construct
  misc_feature 1..89: note = engineered ribonucleic acid scaffold (ERS) sequence
  source 1..89: mol_type = other DNA
acacacggttctacctgattactctgaccgtgttcaccagcgactatgtcgtagtgggtaaagctccctcttcggagggagcatcagag

SEQ ID NO: 22861 - DNA, 89 bp, synthetic construct
  misc_feature 1..89: note = engineered ribonucleic acid scaffold (ERS) sequence
  source 1..89: mol_type = other DNA
acacacggttctagctgattactctgaccgtgttcaccagcgactatgtcgtagtgggtaaagctccctcttcggagggagcatcagag

SEQ ID NO: 22862 - DNA, 91 bp, synthetic construct
  misc_feature 1..91: note = engineered ribonucleic acid scaffold (ERS) sequence
  source 1..91: mol_type = other DNA
acacacggttctattactgattactctgaccgtgttcaccagcgactatgtcgtagtgggtaaagctccctcttcggagggagcatcagag

SEQ ID NO: 22863 - DNA, 89 bp, synthetic construct
  misc_feature 1..89: note = engineered ribonucleic acid scaffold (ERS) sequence
  source 1..89: mol_type = other DNA
acacacggttctatatgattactctgaccgtgttcaccagcgactatgtcgtagtgggtaaagctccctcttcggagggagcatcagag

SEQ ID NO: 22864 - DNA, 89 bp, synthetic construct
  misc_feature 1..89: note = engineered ribonucleic acid scaffold (ERS) sequence
  source 1..89: mol_type = other DNA
acacacggttctatgtgattactctgaccgtgttcaccagcgactatgtcgtagtgggtaaagctccctcttcggagggagcatcagag

SEQ ID NO: 22865 - DNA, 89 bp, synthetic construct
  misc_feature 1..89: note = engineered ribonucleic acid scaffold (ERS) sequence
  source 1..89: mol_type = other DNA
acacacggttctatttgattactctgaccgtgttcaccagcgactatgtcgtagtgggtaaagctccctcttcggagggagcatcagag

SEQ ID NO: 22866 - DNA, 90 bp, synthetic construct
  misc_feature 1..90: note = engineered ribonucleic acid scaffold (ERS) sequence
  source 1..90: mol_type = other DNA
acacacggttctatcttgattactctgaccgtgttcaccagcgactatgtcgtagtgggtaaagctccctcttcggagggagcatcagag

SEQ ID NO: 22867 - DNA, 89 bp, synthetic construct
  misc_feature 1..89: note = engineered ribonucleic acid scaffold (ERS) sequence
  source 1..89: mol_type = other DNA
acacacggttctatcagattactctgaccgtgttcaccagcgactatgtcgtagtgggtaaagctccctcttcggagggagcatcagag

SEQ ID NO: 22868 - DNA, 89 bp, synthetic construct
  misc_feature 1..89: note = engineered ribonucleic acid scaffold (ERS) sequence
  source 1..89: mol_type = other DNA
acacacggttctatcggattactctgaccgtgttcaccagcgactatgtcgtagtgggtaaagctccctcttcggagggagcatcagag

SEQ ID NO: 22869 - DNA, 90 bp, synthetic construct
  misc_feature 1..90: note = engineered ribonucleic acid scaffold (ERS) sequence
  source 1..90: mol_type = other DNA
acacacggttctatctgaattactctgaccgtgttcaccagcgactatgtcgtagtgggtaaagctccctcttcggagggagcatcagag

SEQ ID NO: 22870 - DNA, 90 bp, synthetic construct
  misc_feature 1..90: note = engineered ribonucleic acid scaffold (ERS) sequence
  source 1..90: mol_type = other DNA
acacacggttctatctgtattactctgaccgtgttcaccagcgactatgtcgtagtgggtaaagctccctcttcggagggagcatcagag

SEQ ID NO: 22871 - DNA, 89 bp, synthetic construct
  misc_feature 1..89: note = engineered ribonucleic acid scaffold (ERS) sequence
  source 1..89: mol_type = other DNA
acacacggttctatctggttactctgaccgtgttcaccagcgactatgtcgtagtgggtaaagctccctcttcggagggagcatcagag

SEQ ID NO: 22872 - DNA, 89 bp, synthetic construct
  misc_feature 1..89: note = engineered ribonucleic acid scaffold (ERS) sequence
  source 1..89: mol_type = other DNA
acacacggttctatctgtttactctgaccgtgttcaccagcgactatgtcgtagtgggtaaagctccctcttcggagggagcatcagag

SEQ ID NO: 22873 - DNA, 90 bp, synthetic construct
  misc_feature 1..90: note = engineered ribonucleic acid scaffold (ERS) sequence
  source 1..90: mol_type = other DNA
acacacggttctatctgatttactctgaccgtgttcaccagcgactatgtcgtagtgggtaaagctccctcttcggagggagcatcagag

SEQ ID NO: 22874 - DNA, 89 bp, synthetic construct
  misc_feature 1..89: note = engineered ribonucleic acid scaffold (ERS) sequence
  source 1..89: mol_type = other DNA
acacacggttctatctgattgctctgaccgtgttcaccagcgactatgtcgtagtgggtaaagctccctcttcggagggagcatcagag

SEQ ID NO: 22875 - DNA, 91 bp, synthetic construct
  misc_feature 1..91: note = engineered ribonucleic acid scaffold (ERS) sequence
  source 1..91: mol_type = other DNA
acactggtttctatatctgattactctgaaccagttcaccagcgactatgtcgtagtgggtaaagctccctcttcggagggagcatcagag

SEQ ID NO: 22876 - DNA, 90 bp, synthetic construct
  misc_feature 1..90: note = engineered ribonucleic acid scaffold (ERS) sequence
  source 1..90: mol_type = other DNA
acactggtttctaatctgattactctgaaccagttcaccagcgactatgtcgtagtgggtaaagctccctcttcggagggagcatcagag

SEQ ID NO: 22877 - DNA, 88 bp, synthetic construct
  misc_feature 1..88: note = engineered ribonucleic acid scaffold (ERS) sequence
  source 1..88: mol_type = other DNA
acactggtttctactgattactctgaaccagttcaccagcgactatgtcgtagtgggtaaagctccctcttcggagggagcatcagag

SEQ ID NO: 22878 - DNA, 89 bp, synthetic construct
  misc_feature 1..89: note = engineered ribonucleic acid scaffold (ERS) sequence
  source 1..89: mol_type = other DNA
acactggtttctaactgattactctgaaccagttcaccagcgactatgtcgtagtgggtaaagctccctcttcggagggagcatcagag

SEQ ID NO: 22879 - DNA, 89 bp, synthetic construct
  misc_feature 1..89: note = engineered ribonucleic acid scaffold (ERS) sequence
  source 1..89: mol_type = other DNA
acactggtttctacctgattactctgaaccagttcaccagcgactatgtcgtagtgggtaaagctccctcttcggagggagcatcagag

SEQ ID NO: 22880 - DNA, 89 bp, synthetic construct
  misc_feature 1..89: note = engineered ribonucleic acid scaffold (ERS) sequence
  source 1..89: mol_type = other DNA
acactggtttctagctgattactctgaaccagttcaccagcgactatgtcgtagtgggtaaagctccctcttcggagggagcatcagag

SEQ ID NO: 22881 - DNA, 91 bp, synthetic construct
  misc_feature 1..91: note = engineered ribonucleic acid scaffold (ERS) sequence
  source 1..91: mol_type = other DNA
acactggtttctattactgattactctgaaccagttcaccagcgactatgtcgtagtgggtaaagctccctcttcggagggagcatcagag

SEQ ID NO: 22882 - DNA, 89 bp, synthetic construct
  misc_feature 1..89: note = engineered ribonucleic acid scaffold (ERS) sequence
  source 1..89: mol_type = other DNA
acactggtttctatatgattactctgaaccagttcaccagcgactatgtcgtagtgggtaaagctccctcttcggagggagcatcagag

SEQ ID NO: 22883 - DNA, 89 bp, synthetic construct
  misc_feature 1..89: note = engineered ribonucleic acid scaffold (ERS) sequence
  source 1..89: mol_type = other DNA
acactggtttctatgtgattactctgaaccagttcaccagcgactatgtcgtagtgggtaaagctccctcttcggagggagcatcagag

SEQ ID NO: 22884 - DNA, 89 bp, synthetic construct
  misc_feature 1..89: note = engineered ribonucleic acid scaffold (ERS) sequence
  source 1..89: mol_type = other DNA
acactggtttctatttgattactctgaaccagttcaccagcgactatgtcgtagtgggtaaagctccctcttcggagggagcatcagag

SEQ ID NO: 22885 - DNA, 90 bp, synthetic construct
  misc_feature 1..90: note = engineered ribonucleic acid scaffold (ERS) sequence
  source 1..90: mol_type = other DNA
acactggtttctatcttgattactctgaaccagttcaccagcgactatgtcgtagtgggtaaagctccctcttcggagggagcatcagag

SEQ ID NO: 22886 - DNA, 89 bp, synthetic construct
  misc_feature 1..89: note = engineered ribonucleic acid scaffold (ERS) sequence
  source 1..89: mol_type = other DNA
acactggtttctatcagattactctgaaccagttcaccagcgactatgtcgtagtgggtaaagctccctcttcggagggagcatcagag

SEQ ID NO: 22887 - DNA, 89 bp, synthetic construct
  misc_feature 1..89: note = engineered ribonucleic acid scaffold (ERS) sequence
  source 1..89: mol_type = other DNA
acactggtttctatcggattactctgaaccagttcaccagcgactatgtcgtagtgggtaaagctccctcttcggagggagcatcagag

SEQ ID NO: 22888 - DNA, 90 bp, synthetic construct
  misc_feature 1..90: note = engineered ribonucleic acid scaffold (ERS) sequence
  source 1..90: mol_type = other DNA
acactggtttctatctgaattactctgaaccagttcaccagcgactatgtcgtagtgggtaaagctccctcttcggagggagcatcagag

SEQ ID NO: 22889 - DNA, 90 bp, synthetic construct
  misc_feature 1..90: note = engineered ribonucleic acid scaffold (ERS) sequence
  source 1..90: mol_type = other DNA
acactggtttctatctgtattactctgaaccagttcaccagcgactatgtcgtagtgggtaaagctccctcttcggagggagcatcagag

SEQ ID NO: 22890 - DNA, 89 bp, synthetic construct
  misc_feature 1..89: note = engineered ribonucleic acid scaffold (ERS) sequence
  source 1..89: mol_type = other DNA
acactggtttctatctggttactctgaaccagttcaccagcgactatgtcgtagtgggtaaagctccctcttcggagggagcatcagag

SEQ ID NO: 22891 - DNA, 89 bp, synthetic construct
  misc_feature 1..89: note = engineered ribonucleic acid scaffold (ERS) sequence
  source 1..89: mol_type = other DNA
acactggtttctatctgtttactctgaaccagttcaccagcgactatgtcgtagtgggtaaagctccctcttcggagggagcatcagag

SEQ ID NO: 22892 - DNA, 90 bp, synthetic construct
  misc_feature 1..90: note = engineered ribonucleic acid scaffold (ERS) sequence
  source 1..90: mol_type = other DNA
acactggtttctatctgatttactctgaaccagttcaccagcgactatgtcgtagtgggtaaagctccctcttcggagggagcatcagag

SEQ ID NO: 22893 - DNA, 89 bp, synthetic construct
  misc_feature 1..89: note = engineered ribonucleic acid scaffold (ERS) sequence
  source 1..89: mol_type = other DNA
acactggtttctatctgattgctctgaaccagttcaccagcgactatgtcgtagtgggtaaagctccctcttcggagggagcatcagag

SEQ ID NO: 22894 - DNA, 91 bp, synthetic construct
  misc_feature 1..91: note = engineered ribonucleic acid scaffold (ERS) sequence
  source 1..91: mol_type = other DNA
acaggccgttctatatctgattactctgacggccttcaccagcgactatgtcgtagtgggtaaagctccctcttcggagggagcatcagag

SEQ ID NO: 22895 - DNA, 90 bp, synthetic construct
  misc_feature 1..90: note = engineered ribonucleic acid scaffold (ERS) sequence
  source 1..90: mol_type = other DNA
acaggccgttctaatctgattactctgacggccttcaccagcgactatgtcgtagtgggtaaagctccctcttcggagggagcatcagag

SEQ ID NO: 22896 - DNA, 88 bp, synthetic construct
  misc_feature 1..88: note = engineered ribonucleic acid scaffold (ERS) sequence
  source 1..88: mol_type = other DNA
acaggccgttctactgattactctgacggccttcaccagcgactatgtcgtagtgggtaaagctccctcttcggagggagcatcagag

SEQ ID NO: 22897 - DNA, 89 bp, synthetic construct
  misc_feature 1..89: note = engineered ribonucleic acid scaffold (ERS) sequence
  source 1..89: mol_type = other DNA
acaggccgttctaactgattactctgacggccttcaccagcgactatgtcgtagtgggtaaagctccctcttcggagggagcatcagag

SEQ ID NO: 22898 - DNA, 89 bp, synthetic construct
  misc_feature 1..89: note = engineered ribonucleic acid scaffold (ERS) sequence
  source 1..89: mol_type = other DNA
acaggccgttctacctgattactctgacggccttcaccagcgactatgtcgtagtgggtaaagctccctcttcggagggagcatcagag

SEQ ID NO: 22899 - DNA, 89 bp, synthetic construct
  misc_feature 1..89: note = engineered ribonucleic acid scaffold (ERS) sequence
  source 1..89: mol_type = other DNA
acaggccgttctagctgattactctgacggccttcaccagcgactatgtcgtagtgggtaaagctccctcttcggagggagcatcagag

SEQ ID NO: 22900 - DNA, 91 bp, synthetic construct
  misc_feature 1..91: note = engineered ribonucleic acid scaffold (ERS) sequence
  source 1..91: mol_type = other DNA
acaggccgttctattactgattactctgacggccttcaccagcgactatgtcgtagtgggtaaagctccctcttcggagggagcatcagag

SEQ ID NO: 22901 - DNA, 89 bp, synthetic construct
  misc_feature 1..89: note = engineered ribonucleic acid scaffold (ERS) sequence
  source 1..89: mol_type = other DNA
acaggccgttctatatgattactctgacggccttcaccagcgactatgtcgtagtgggtaaagctccctcttcggagggagcatcagag

SEQ ID NO: 22902 - DNA, 89 bp, synthetic construct
  misc_feature 1..89: note = engineered ribonucleic acid scaffold (ERS) sequence
  source 1..89: mol_type = other DNA
acaggccgttctatgtgattactctgacggccttcaccagcgactatgtcgtagtgggtaaagctccctcttcggagggagcatcagag

SEQ ID NO: 22903 - DNA, 89 bp, synthetic construct
  misc_feature 1..89: note = engineered ribonucleic acid scaffold (ERS) sequence
  source 1..89: mol_type = other DNA
acaggccgttctatttgattactctgacggccttcaccagcgactatgtcgtagtgggtaaagctccctcttcggagggagcatcagag

SEQ ID NO: 22904 - DNA, 90 bp, synthetic construct
  misc_feature 1..90: note = engineered ribonucleic acid scaffold (ERS) sequence
  source 1..90: mol_type = other DNA
acaggccgttctatcttgattactctgacggccttcaccagcgactatgtcgtagtgggtaaagctccctcttcggagggagcatcagag

SEQ ID NO: 22905 - DNA, 89 bp, synthetic construct
  misc_feature 1..89: note = engineered ribonucleic acid scaffold (ERS) sequence
  source 1..89: mol_type = other DNA
acaggccgttctatcagattactctgacggccttcaccagcgactatgtcgtagtgggtaaagctccctcttcggagggagcatcagag

SEQ ID NO: 22906 - DNA, 89 bp, synthetic construct
  misc_feature 1..89: note = engineered ribonucleic acid scaffold (ERS) sequence
  source 1..89: mol_type = other DNA
acaggccgttctatcggattactctgacggccttcaccagcgactatgtcgtagtgggtaaagctccctcttcggagggagcatcagag

SEQ ID NO: 22907 - DNA, 90 bp, synthetic construct
  misc_feature 1..90: note = engineered ribonucleic acid scaffold (ERS) sequence
  source 1..90: mol_type = other DNA
acaggccgttctatctgaattactctgacggccttcaccagcgactatgtcgtagtgggtaaagctccctcttcggagggagcatcagag

SEQ ID NO: 22908 - DNA, 90 bp, synthetic construct
  misc_feature 1..90: note = engineered ribonucleic acid scaffold (ERS) sequence
  source 1..90: mol_type = other DNA
acaggccgttctatctgtattactctgacggccttcaccagcgactatgtcgtagtgggtaaagctccctcttcggagggagcatcagag

SEQ ID NO: 22909 - DNA, 89 bp, synthetic construct
  misc_feature 1..89: note = engineered ribonucleic acid scaffold (ERS) sequence
  source 1..89: mol_type = other DNA
acaggccgttctatctggttactctgacggccttcaccagcgactatgtcgtagtgggtaaagctccctcttcggagggagcatcagag

SEQ ID NO: 22910 - DNA, 89 bp, synthetic construct
  misc_feature 1..89: note = engineered ribonucleic acid scaffold (ERS) sequence
  source 1..89: mol_type = other DNA
acaggccgttctatctgtttactctgacggccttcaccagcgactatgtcgtagtgggtaaagctccctcttcggagggagcatcagag

SEQ ID NO: 22911 - DNA, 90 bp, synthetic construct
  misc_feature 1..90: note = engineered ribonucleic acid scaffold (ERS) sequence
  source 1..90: mol_type = other DNA
acaggccgttctatctgatttactctgacggccttcaccagcgactatgtcgtagtgggtaaagctccctcttcggagggagcatcagag

SEQ ID NO: 22912 - DNA, 89 bp, synthetic construct
  misc_feature 1..89: note = engineered ribonucleic acid scaffold (ERS) sequence
  source 1..89: mol_type = other DNA
acaggccgttctatctgattgctctgacggccttcaccagcgactatgtcgtagtgggtaaagctccctcttcggagggagcatcagag

SEQ ID NO: 22913 - DNA, 91 bp, synthetic construct
  misc_feature 1..91: note = engineered ribonucleic acid scaffold (ERS) sequence
  source 1..91: mol_type = other DNA
acaggtccttctatatctgattactctgaggaccttcaccagcgactatgtcgtagtgggtaaagctccctcttcggagggagcatcagag

SEQ ID NO: 22914 - DNA, 90 bp, synthetic construct
  misc_feature 1..90: note = engineered ribonucleic acid scaffold (ERS) sequence
  source 1..90: mol_type = other DNA
acaggtccttctaatctgattactctgaggaccttcaccagcgactatgtcgtagtgggtaaagctccctcttcggagggagcatcagag

SEQ ID NO: 22915 - DNA, 88 bp, synthetic construct
  misc_feature 1..88: note = engineered ribonucleic acid scaffold (ERS) sequence
  source 1..88: mol_type = other DNA
acaggtccttctactgattactctgaggaccttcaccagcgactatgtcgtagtgggtaaagctccctcttcggagggagcatcagag

SEQ ID NO: 22916 - DNA, 89 bp, synthetic construct
  misc_feature 1..89: note = engineered ribonucleic acid scaffold (ERS) sequence
  source 1..89: mol_type = other DNA
acaggtccttctaactgattactctgaggaccttcaccagcgactatgtcgtagtgggtaaagctccctcttcggagggagcatcagag

SEQ ID NO: 22917 - DNA, 89 bp, synthetic construct
  misc_feature 1..89: note = engineered ribonucleic acid scaffold (ERS) sequence
  source 1..89: mol_type = other DNA
acaggtccttctacctgattactctgaggaccttcaccagcgactatgtcgtagtgggtaaagctccctcttcggagggagcatcagag

SEQ ID NO: 22918 - DNA, 89 bp, synthetic construct
  misc_feature 1..89: note = engineered ribonucleic acid scaffold (ERS) sequence
  source 1..89: mol_type = other DNA
acaggtccttctagctgattactctgaggaccttcaccagcgactatgtcgtagtgggtaaagctccctcttcggagggagcatcagag

SEQ ID NO: 22919 - DNA, 91 bp, synthetic construct
  misc_feature 1..91: note = engineered ribonucleic acid scaffold (ERS) sequence
  source 1..91: mol_type = other DNA
acaggtccttctattactgattactctgaggaccttcaccagcgactatgtcgtagtgggtaaagctccctcttcggagggagcatcagag

SEQ ID NO: 22920 - DNA, 89 bp, synthetic construct
  misc_feature 1..89: note = engineered ribonucleic acid scaffold (ERS) sequence
  source 1..89: mol_type = other DNA
acaggtccttctatatgattactctgaggaccttcaccagcgactatgtcgtagtgggtaaagctccctcttcggagggagcatcagag

SEQ ID NO: 22921 - DNA, 89 bp, synthetic construct
  misc_feature 1..89: note = engineered ribonucleic acid scaffold (ERS) sequence
  source 1..89: mol_type = other DNA
acaggtccttctatgtgattactctgaggaccttcaccagcgactatgtcgtagtgggtaaagctccctcttcggagggagcatcagag

SEQ ID NO: 22922 - DNA, 89 bp, synthetic construct
  misc_feature 1..89: note = engineered ribonucleic acid scaffold (ERS) sequence
  source 1..89: mol_type = other DNA
acaggtccttctatttgattactctgaggaccttcaccagcgactatgtcgtagtgggtaaagctccctcttcggagggagcatcagag

SEQ ID NO: 22923 - DNA, 90 bp, synthetic construct
  misc_feature 1..90: note = engineered ribonucleic acid scaffold (ERS) sequence
  source 1..90: mol_type = other DNA
acaggtccttctatcttgattactctgaggaccttcaccagcgactatgtcgtagtgggtaaagctccctcttcggagggagcatcagag

SEQ ID NO: 22924 - DNA, 89 bp, synthetic construct
  misc_feature 1..89: note = engineered ribonucleic acid scaffold (ERS) sequence
  source 1..89: mol_type = other DNA
acaggtccttctatcagattactctgaggaccttcaccagcgactatgtcgtagtgggtaaagctccctcttcggagggagcatcagag

SEQ ID NO: 22925 - DNA, 89 bp, synthetic construct
  misc_feature 1..89: note = engineered ribonucleic acid scaffold (ERS) sequence
  source 1..89: mol_type = other DNA
acaggtccttctatcggattactctgaggaccttcaccagcgactatgtcgtagtgggtaaagctccctcttcggagggagcatcagag

SEQ ID NO: 22926 - DNA, 90 bp, synthetic construct
  misc_feature 1..90: note = engineered ribonucleic acid scaffold (ERS) sequence
  source 1..90: mol_type = other DNA
acaggtccttctatctgaattactctgaggaccttcaccagcgactatgtcgtagtgggtaaagctccctcttcggagggagcatcagag

SEQ ID NO: 22927 - DNA, 90 bp, synthetic construct
  misc_feature 1..90: note = engineered ribonucleic acid scaffold (ERS) sequence
  source 1..90: mol_type = other DNA
acaggtccttctatctgtattactctgaggaccttcaccagcgactatgtcgtagtgggtaaagctccctcttcggagggagcatcagag

SEQ ID NO: 22928 - DNA, 89 bp, synthetic construct
  misc_feature 1..89: note = engineered ribonucleic acid scaffold (ERS) sequence
  source 1..89: mol_type = other DNA
acaggtccttctatctggttactctgaggaccttcaccagcgactatgtcgtagtgggtaaagctccctcttcggagggagcatcagag

SEQ ID NO: 22929 - DNA, 89 bp, synthetic construct
  misc_feature 1..89: note = engineered ribonucleic acid scaffold (ERS) sequence
  source 1..89: mol_type = other DNA
acaggtccttctatctgtttactctgaggaccttcaccagcgactatgtcgtagtgggtaaagctccctcttcggagggagcatcagag

SEQ ID NO: 22930 - DNA, 90 bp, synthetic construct
  misc_feature 1..90: note = engineered ribonucleic acid scaffold (ERS) sequence
  source 1..90: mol_type = other DNA
acaggtccttctatctgatttactctgaggaccttcaccagcgactatgtcgtagtgggtaaagctccctcttcggagggagcatcagag

SEQ ID NO: 22931 - DNA, 89 bp, synthetic construct
  misc_feature 1..89: note = engineered ribonucleic acid scaffold (ERS) sequence
  source 1..89: mol_type = other DNA
acaggtccttctatctgattgctctgaggaccttcaccagcgactatgtcgtagtgggtaaagctccctcttcggagggagcatcagag

SEQ ID NO: 22932 - DNA, 91 bp, synthetic construct
  misc_feature 1..91: note = engineered ribonucleic acid scaffold (ERS) sequence
  source 1..91: mol_type = other DNA
accagcaattctatatctgattactctgattgctgtcaccagcgactatgtcgtagtgggtaaagctccctcttcggagggagcatcagag

SEQ ID NO: 22933 - DNA, 90 bp, synthetic construct
  misc_feature 1..90: note = engineered ribonucleic acid scaffold (ERS) sequence
  source 1..90: mol_type = other DNA
accagcaattctaatctgattactctgattgctgtcaccagcgactatgtcgtagtgggtaaagctccctcttcggagggagcatcagag

SEQ ID NO: 22934 - DNA, 88 bp, synthetic construct
  misc_feature 1..88: note = engineered ribonucleic acid scaffold (ERS) sequence
  source 1..88: mol_type = other DNA
accagcaattctactgattactctgattgctgtcaccagcgactatgtcgtagtgggtaaagctccctcttcggagggagcatcagag

SEQ ID NO: 22935 - DNA, 89 bp, synthetic construct
  misc_feature 1..89: note = engineered ribonucleic acid scaffold (ERS) sequence
  source 1..89: mol_type = other DNA
accagcaattctaactgattactctgattgctgtcaccagcgactatgtcgtagtgggtaaagctccctcttcggagggagcatcagag

SEQ ID NO: 22936 - DNA, 89 bp, synthetic construct
  misc_feature 1..89: note = engineered ribonucleic acid scaffold (ERS) sequence
  source 1..89: mol_type = other DNA
accagcaattctacctgattactctgattgctgtcaccagcgactatgtcgtagtgggtaaagctccctcttcggagggagcatcagag

SEQ ID NO: 22937 - DNA, 89 bp, synthetic construct
  misc_feature 1..89: note = engineered ribonucleic acid scaffold (ERS) sequence
  source 1..89: mol_type = other DNA
accagcaattctagctgattactctgattgctgtcaccagcgactatgtcgtagtgggtaaagctccctcttcggagggagcatcagag

SEQ ID NO: 22938 - DNA, 91 bp, synthetic construct
  misc_feature 1..91: note = engineered ribonucleic acid scaffold (ERS) sequence
  source 1..91: mol_type = other DNA
accagcaattctattactgattactctgattgctgtcaccagcgactatgtcgtagtgggtaaagctccctcttcggagggagcatcagag

SEQ ID NO: 22939 - DNA, 89 bp, synthetic construct
  misc_feature 1..89: note = engineered ribonucleic acid scaffold (ERS) sequence
  source 1..89: mol_type = other DNA
accagcaattctatatgattactctgattgctgtcaccagcgactatgtcgtagtgggtaaagctccctcttcggagggagcatcagag

SEQ ID NO: 22940 - DNA, 89 bp, synthetic construct
  misc_feature 1..89: note = engineered ribonucleic acid scaffold (ERS) sequence
  source 1..89: mol_type = other DNA
accagcaattctatgtgattactctgattgctgtcaccagcgactatgtcgtagtgggtaaagctccctcttcggagggagcatcagag

SEQ ID NO: 22941 - DNA, 89 bp, synthetic construct
  misc_feature 1..89: note = engineered ribonucleic acid scaffold (ERS) sequence
  source 1..89: mol_type = other DNA
accagcaattctatttgattactctgattgctgtcaccagcgactatgtcgtagtgggtaaagctccctcttcggagggagcatcagag

SEQ ID NO: 22942 - DNA, 90 bp, synthetic construct
  misc_feature 1..90: note = engineered ribonucleic acid scaffold (ERS) sequence
  source 1..90: mol_type = other DNA
accagcaattctatcttgattactctgattgctgtcaccagcgactatgtcgtagtgggtaaagctccctcttcggagggagcatcagag

SEQ ID NO: 22943 - DNA, 89 bp, synthetic construct
  misc_feature 1..89: note = engineered ribonucleic acid scaffold (ERS) sequence
  source 1..89: mol_type = other DNA
accagcaattctatcagattactctgattgctgtcaccagcgactatgtcgtagtgggtaaagctccctcttcggagggagcatcagag

SEQ ID NO: 22944 - DNA, 89 bp, synthetic construct
  misc_feature 1..89: note = engineered ribonucleic acid scaffold (ERS) sequence
  source 1..89: mol_type = other DNA
accagcaattctatcggattactctgattgctgtcaccagcgactatgtcgtagtgggtaaagctccctcttcggagggagcatcagag

SEQ ID NO: 22945 - DNA, 90 bp, synthetic construct
  misc_feature 1..90: note = engineered ribonucleic acid scaffold (ERS) sequence
  source 1..90: mol_type = other DNA
accagcaattctatctgaattactctgattgctgtcaccagcgactatgtcgtagtgggtaaagctccctcttcggagggagcatcagag

SEQ ID NO: 22946 - DNA, 90 bp, synthetic construct
  misc_feature 1..90: note = engineered ribonucleic acid scaffold (ERS) sequence
  source 1..90: mol_type = other DNA
accagcaattctatctgtattactctgattgctgtcaccagcgactatgtcgtagtgggtaaagctccctcttcggagggagcatcagag

SEQ ID NO: 22947 - DNA, 89 bp, synthetic construct
  misc_feature 1..89: note = engineered ribonucleic acid scaffold (ERS) sequence
  source 1..89: mol_type = other DNA
accagcaattctatctggttactctgattgctgtcaccagcgactatgtcgtagtgggtaaagctccctcttcggagggagcatcagag

SEQ ID NO: 22948 - DNA, 89 bp, synthetic construct
  misc_feature 1..89: note = engineered ribonucleic acid scaffold (ERS) sequence
  source 1..89: mol_type = other DNA
accagcaattctatctgtttactctgattgctgtcaccagcgactatgtcgtagtgggtaaagctccctcttcggagggagcatcagag

SEQ ID NO: 22949 - DNA, 90 bp, synthetic construct
  misc_feature 1..90: note = engineered ribonucleic acid scaffold (ERS) sequence
  source 1..90: mol_type = other DNA
accagcaattctatctgatttactctgattgctgtcaccagcgactatgtcgtagtgggtaaagctccctcttcggagggagcatcagag

SEQ ID NO: 22950 - DNA, 89 bp, synthetic construct
  misc_feature 1..89: note = engineered ribonucleic acid scaffold (ERS) sequence
  source 1..89: mol_type = other DNA
accagcaattctatctgattgctctgattgctgtcaccagcgactatgtcgtagtgggtaaagctccctcttcggagggagcatcagag

SEQ ID NO: 22951 - DNA, 91 bp, synthetic construct
  misc_feature 1..91: note = engineered ribonucleic acid scaffold (ERS) sequence
  source 1..91: mol_type = other DNA
accgagacttctatatctgattactctgaggctcgtcaccagcgactatgtcgtagtgggtaaagctccctcttcggagggagcatcagag

SEQ ID NO: 22952 - DNA, 90 bp, synthetic construct
  misc_feature 1..90: note = engineered ribonucleic acid scaffold (ERS) sequence
  source 1..90: mol_type = other DNA
accgagacttctaatctgattactctgaggctcgtcaccagcgactatgtcgtagtgggtaaagctccctcttcggagggagcatcagag

SEQ ID NO: 22953 - DNA, 88 bp, synthetic construct
  misc_feature 1..88: note = engineered ribonucleic acid scaffold (ERS) sequence
  source 1..88: mol_type = other DNA
accgagacttctactgattactctgaggctcgtcaccagcgactatgtcgtagtgggtaaagctccctcttcggagggagcatcagag

SEQ ID NO: 22954 - DNA, 89 bp, synthetic construct
  misc_feature 1..89: note = engineered ribonucleic acid scaffold (ERS) sequence
  source 1..89: mol_type = other DNA
accgagacttctaactgattactctgaggctcgtcaccagcgactatgtcgtagtgggtaaagctccctcttcggagggagcatcagag

SEQ ID NO: 22955 - DNA, 89 bp, synthetic construct
  misc_feature 1..89: note = engineered ribonucleic acid scaffold (ERS) sequence
  source 1..89: mol_type = other DNA
accgagacttctacctgattactctgaggctcgtcaccagcgactatgtcgtagtgggtaaagctccctcttcggagggagcatcagag

SEQ ID NO: 22956 - DNA, 89 bp, synthetic construct
  misc_feature 1..89: note = engineered ribonucleic acid scaffold (ERS) sequence
  source 1..89: mol_type = other DNA
accgagacttctagctgattactctgaggctcgtcaccagcgactatgtcgtagtgggtaaagctccctcttcggagggagcatcagag

SEQ ID NO: 22957 - DNA, 91 bp, synthetic construct
  misc_feature 1..91: note = engineered ribonucleic acid scaffold (ERS) sequence
  source 1..91: mol_type = other DNA
accgagacttctattactgattactctgaggctcgtcaccagcgactatgtcgtagtgggtaaagctccctcttcggagggagcatcagag

SEQ ID NO: 22958 - DNA, 89 bp, synthetic construct
  misc_feature 1..89: note = engineered ribonucleic acid scaffold (ERS) sequence
  source 1..89: mol_type = other DNA
accgagacttctatatgattactctgaggctcgtcaccagcgactatgtcgtagtgggtaaagctccctcttcggagggagcatcagag

SEQ ID NO: 22959 - DNA, 89 bp, synthetic construct
  misc_feature 1..89: note = engineered ribonucleic acid scaffold (ERS) sequence
  source 1..89: mol_type = other DNA
accgagacttctatgtgattactctgaggctcgtcaccagcgactatgtcgtagtgggtaaagctccctcttcggagggagcatcagag

SEQ ID NO: 22960 - DNA, 89 bp, synthetic construct
  misc_feature 1..89: note = engineered ribonucleic acid scaffold (ERS) sequence
  source 1..89: mol_type = other DNA
accgagacttctatttgattactctgaggctcgtcaccagcgactatgtcgtagtgggtaaagctccctcttcggagggagcatcagag

SEQ ID NO: 22961 - DNA, 90 bp, synthetic construct
  misc_feature 1..90: note = engineered ribonucleic acid scaffold (ERS) sequence
  source 1..90: mol_type = other DNA
accgagacttctatcttgattactctgaggctcgtcaccagcgactatgtcgtagtgggtaaagctccctcttcggagggagcatcagag

SEQ ID NO: 22962 - DNA, 89 bp, synthetic construct
  misc_feature 1..89: note = engineered ribonucleic acid scaffold (ERS) sequence
  source 1..89: mol_type = other DNA
accgagacttctatcagattactctgaggctcgtcaccagcgactatgtcgtagtgggtaaagctccctcttcggagggagcatcagag

SEQ ID NO: 22963 - DNA, 89 bp, synthetic construct
  misc_feature 1..89: note = engineered ribonucleic acid scaffold (ERS) sequence
  source 1..89: mol_type = other DNA
accgagacttctatcggattactctgaggctcgtcaccagcgactatgtcgtagtgggtaaagctccctcttcggagggagcatcagag

SEQ ID NO: 22964 - DNA, 90 bp, synthetic construct
  misc_feature 1..90: note = engineered ribonucleic acid scaffold (ERS) sequence
  source 1..90: mol_type = other DNA
accgagacttctatctgaattactctgaggctcgtcaccagcgactatgtcgtagtgggtaaagctccctcttcggagggagcatcagag

SEQ ID NO: 22965 - DNA, 90 bp, synthetic construct
  misc_feature 1..90: note = engineered ribonucleic acid scaffold (ERS) sequence
  source 1..90: mol_type = other DNA
accgagacttctatctgtattactctgaggctcgtcaccagcgactatgtcgtagtgggtaaagctccctcttcggagggagcatcagag

SEQ ID NO: 22966 - DNA, 89 bp, synthetic construct
  misc_feature 1..89: note = engineered ribonucleic acid scaffold (ERS) sequence
  source 1..89: mol_type = other DNA
accgagacttctatctggttactctgaggctcgtcaccagcgactatgtcgtagtgggtaaagctccctcttcggagggagcatcagag

SEQ ID NO: 22967 - DNA, 89 bp, synthetic construct
  misc_feature 1..89: note = engineered ribonucleic acid scaffold (ERS) sequence
  source 1..89: mol_type = other DNA
accgagacttctatctgtttactctgaggctcgtcaccagcgactatgtcgtagtgggtaaagctccctcttcggagggagcatcagag

SEQ ID NO: 22968 - DNA, 90 bp, synthetic construct
  misc_feature 1..90: note = engineered ribonucleic acid scaffold (ERS) sequence
  source 1..90: mol_type = other DNA
accgagacttctatctgatttactctgaggctcgtcaccagcgactatgtcgtagtgggtaaagctccctcttcggagggagcatcagag

SEQ ID NO: 22969 - DNA, 89 bp, synthetic construct
  misc_feature 1..89: note = engineered ribonucleic acid scaffold (ERS) sequence
  source 1..89: mol_type = other DNA
accgagacttctatctgattgctctgaggctcgtcaccagcgactatgtcgtagtgggtaaagctccctcttcggagggagcatcagag

SEQ ID NO: 22970 - DNA, 91 bp, synthetic construct
  misc_feature 1..91: note = engineered ribonucleic acid scaffold (ERS) sequence
  source 1..91: mol_type = other DNA
acctgtagttctatatctgattactctgactacagtcaccagcgactatgtcgtagtgggtaaagctccctcttcggagggagcatcagag

SEQ ID NO: 22971 - DNA, 90 bp, synthetic construct
  misc_feature 1..90: note = engineered ribonucleic acid scaffold (ERS) sequence
  source 1..90: mol_type = other DNA
acctgtagttctaatctgattactctgactacagtcaccagcgactatgtcgtagtgggtaaagctccctcttcggagggagcatcagag

SEQ ID NO: 22972 - DNA, 88 bp, synthetic construct
  misc_feature 1..88: note = engineered ribonucleic acid scaffold (ERS) sequence
  source 1..88: mol_type = other DNA
acctgtagttctactgattactctgactacagtcaccagcgactatgtcgtagtgggtaaagctccctcttcggagggagcatcagag

SEQ ID NO: 22973 - DNA, 89 bp, synthetic construct
  misc_feature 1..89: note = engineered ribonucleic acid scaffold (ERS) sequence
  source 1..89: mol_type = other DNA
acctgtagttctaactgattactctgactacagtcaccagcgactatgtcgtagtgggtaaagctccctcttcggagggagcatcagag

SEQ ID NO: 22974 - DNA, 89 bp, synthetic construct
  misc_feature 1..89: note = engineered ribonucleic acid scaffold (ERS) sequence
  source 1..89: mol_type = other DNA
acctgtagttctacctgattactctgactacagtcaccagcgactatgtcgtagtgggtaaagctccctcttcggagggagcatcagag

SEQ ID NO: 22975 - DNA, 89 bp, synthetic construct
  misc_feature 1..89: note = engineered ribonucleic acid scaffold (ERS) sequence
  source 1..89: mol_type = other DNA
acctgtagttctagctgattactctgactacagtcaccagcgactatgtcgtagtgggtaaagctccctcttcggagggagcatcagag

SEQ ID NO: 22976 - DNA, 91 bp, synthetic construct
  misc_feature 1..91: note = engineered ribonucleic acid scaffold (ERS) sequence
  source 1..91: mol_type = other DNA
acctgtagttctattactgattactctgactacagtcaccagcgactatgtcgtagtgggtaaagctccctcttcggagggagcatcagag

SEQ ID NO: 22977 - DNA, 89 bp, synthetic construct
  misc_feature 1..89: note = engineered ribonucleic acid scaffold (ERS) sequence
  source 1..89: mol_type = other DNA
acctgtagttctatatgattactctgactacagtcaccagcgactatgtcgtagtgggtaaagctccctcttcggagggagcatcagag

SEQ ID NO: 22978 - DNA, 89 bp, synthetic construct
  misc_feature 1..89: note = engineered ribonucleic acid scaffold (ERS) sequence
  source 1..89: mol_type = other DNA
acctgtagttctatgtgattactctgactacagtcaccagcgactatgtcgtagtgggtaaagctccctcttcggagggagcatcagag

SEQ ID NO: 22979 - DNA, 89 bp, synthetic construct
  misc_feature 1..89: note = engineered ribonucleic acid scaffold (ERS) sequence
  source 1..89: mol_type = other DNA
acctgtagttctatttgattactctgactacagtcaccagcgactatgtcgtagtgggtaaagctccctcttcggagggagcatcagag

SEQ ID NO: 22980 - DNA, 90 bp, synthetic construct
  misc_feature 1..90: note = engineered ribonucleic acid scaffold (ERS) sequence
  source 1..90: mol_type = other DNA
acctgtagttctatcttgattactctgactacagtcaccagcgactatgtcgtagtgggtaaagctccctcttcggagggagcatcagag

SEQ ID NO: 22981 - DNA, 89 bp, synthetic construct
  misc_feature 1..89: note = engineered ribonucleic acid scaffold (ERS) sequence
  source 1..89: mol_type = other DNA
acctgtagttctatcagattactctgactacagtcaccagcgactatgtcgtagtgggtaaagctccctcttcggagggagcatcagag

SEQ ID NO: 22982 - DNA, 89 bp, synthetic construct
  misc_feature 1..89: note = engineered ribonucleic acid scaffold (ERS) sequence
  source 1..89: mol_type = other DNA
acctgtagttctatcggattactctgactacagtcaccagcgactatgtcgtagtgggtaaagctccctcttcggagggagcatcagag

SEQ ID NO: 22983 - DNA, 90 bp, synthetic construct
  misc_feature 1..90: note = engineered ribonucleic acid scaffold (ERS) sequence
  source 1..90: mol_type = other DNA
acctgtagttctatctgaattactctgactacagtcaccagcgactatgtcgtagtgggtaaagctccctcttcggagggagcatcagag

SEQ ID NO: 22984 - DNA, 90 bp, synthetic construct
  misc_feature 1..90: note = engineered ribonucleic acid scaffold (ERS) sequence
  source 1..90: mol_type = other DNA
acctgtagttctatctgtattactctgactacagtcaccagcgactatgtcgtagtgggtaaagctccctcttcggagggagcatcagag

SEQ ID NO: 22985 - DNA, 89 bp, synthetic construct
  misc_feature 1..89: note = engineered ribonucleic acid scaffold (ERS) sequence
  source 1..89: mol_type = other DNA
acctgtagttctatctggttactctgactacagtcaccagcgactatgtcgtagtgggtaaagctccctcttcggagggagcatcagag

SEQ ID NO: 22986 - DNA, 89 bp, synthetic construct
  misc_feature 1..89: note = engineered ribonucleic acid scaffold (ERS) sequence
  source 1..89: mol_type = other DNA
acctgtagttctatctgtttactctgactacagtcaccagcgactatgtcgtagtgggtaaagctccctcttcggagggagcatcagag

SEQ ID NO: 22987 - DNA, 90 bp, synthetic construct
  misc_feature 1..90: note = engineered ribonucleic acid scaffold (ERS) sequence
  source 1..90: mol_type = other DNA
acctgtagttctatctgatttactctgactacagtcaccagcgactatgtcgtagtgggtaaagctccctcttcggagggagcatcagag

SEQ ID NO: 22988 - DNA, 89 bp, synthetic construct
  misc_feature 1..89: note = engineered ribonucleic acid scaffold (ERS) sequence
  source 1..89: mol_type = other DNA
acctgtagttctatctgattgctctgactacagtcaccagcgactatgtcgtagtgggtaaagctccctcttcggagggagcatcagag

SEQ ID NO: 22989 - DNA, 91 bp, synthetic construct
  misc_feature 1..91: note = engineered ribonucleic acid scaffold (ERS) sequence
  source 1..91: mol_type = other DNA
acgagcacttctatatctgattactctgagggctctcaccagcgactatgtcgtagtgggtaaagctccctcttcggagggagcatcagag

SEQ ID NO: 22990 - DNA, 90 bp, synthetic construct
  misc_feature 1..90: note = engineered ribonucleic acid scaffold (ERS) sequence
  source 1..90: mol_type = other DNA
acgagcacttctaatctgattactctgagggctctcaccagcgactatgtcgtagtgggtaaagctccctcttcggagggagcatcagag

SEQ ID NO: 22991 - DNA, 88 bp, synthetic construct
  misc_feature 1..88: note = engineered ribonucleic acid scaffold (ERS) sequence
  source 1..88: mol_type = other DNA
acgagcacttctactgattactctgagggctctcaccagcgactatgtcgtagtgggtaaagctccctcttcggagggagcatcagag

SEQ ID NO: 22992 - DNA, 89 bp, synthetic construct
  misc_feature 1..89: note = engineered ribonucleic acid scaffold (ERS) sequence
  source 1..89: mol_type = other DNA
acgagcacttctaactgattactctgagggctctcaccagcgactatgtcgtagtgggtaaagctccctcttcggagggagcatcagag

SEQ ID NO: 22993 - DNA, 89 bp, synthetic construct
  misc_feature 1..89: note = engineered ribonucleic acid scaffold (ERS) sequence
  source 1..89: mol_type = other DNA
acgagcacttctacctgattactctgagggctctcaccagcgactatgtcgtagtgggtaaagctccctcttcggagggagcatcagag

SEQ ID NO: 22994 - DNA, 89 bp, synthetic construct
  misc_feature 1..89: note = engineered ribonucleic acid scaffold (ERS) sequence
  source 1..89: mol_type = other DNA
acgagcacttctagctgattactctgagggctctcaccagcgactatgtcgtagtgggtaaagctccctcttcggagggagcatcagag

SEQ ID NO: 22995 - DNA, 91 bp, synthetic construct
  misc_feature 1..91: note = engineered ribonucleic acid scaffold (ERS) sequence
  source 1..91: mol_type = other DNA
acgagcacttctattactgattactctgagggctctcaccagcgactatgtcgtagtgggtaaagctccctcttcggagggagcatcagag

SEQ ID NO: 22996 - DNA, 89 bp, synthetic construct
  misc_feature 1..89: note = engineered ribonucleic acid scaffold (ERS) sequence
  source 1..89: mol_type = other DNA
acgagcacttctatatgattactctgagggctctcaccagcgactatgtcgtagtgggtaaagctccctcttcggagggagcatcagag

SEQ ID NO: 22997 - DNA, 89 bp, synthetic construct
  misc_feature 1..89: note = engineered ribonucleic acid scaffold (ERS) sequence
  source 1..89: mol_type = other DNA
acgagcacttctatgtgattactctgagggctctcaccagcgactatgtcgtagtgggtaaagctccctcttcggagggagcatcagag

SEQ ID NO: 22998 - DNA, 89 bp, synthetic construct
  misc_feature 1..89: note = engineered ribonucleic acid scaffold (ERS) sequence
  source 1..89: mol_type = other DNA
acgagcacttctatttgattactctgagggctctcaccagcgactatgtcgtagtgggtaaagctccctcttcggagggagcatcagag

SEQ ID NO: 22999 - DNA, 90 bp, synthetic construct
  misc_feature 1..90: note = engineered ribonucleic acid scaffold (ERS) sequence
  source 1..90: mol_type = other DNA
acgagcacttctatcttgattactctgagggctctcaccagcgactatgtcgtagtgggtaaagctccctcttcggagggagcatcagag

SEQ ID NO: 23000 - DNA, 89 bp, synthetic construct
  misc_feature 1..89: note = engineered ribonucleic acid scaffold (ERS) sequence
  source 1..89: mol_type = other DNA
acgagcacttctatcagattactctgagggctctcaccagcgactatgtcgtagtgggtaaagctccctcttcggagggagcatcagag

SEQ ID NO: 23001 - DNA, 89 bp, synthetic construct
  misc_feature 1..89: note = engineered ribonucleic acid scaffold (ERS) sequence
  source 1..89: mol_type = other DNA
acgagcacttctatcggattactctgagggctctcaccagcgactatgtcgtagtgggtaaagctccctcttcggagggagcatcagag

SEQ ID NO: 23002 - DNA, 90 bp, synthetic construct
  misc_feature 1..90: note = engineered ribonucleic acid scaffold (ERS) sequence
  source 1..90: mol_type = other DNA
acgagcacttctatctgaattactctgagggctctcaccagcgactatgtcgtagtgggtaaagctccctcttcggagggagcatcagag

SEQ ID NO: 23003 - DNA, 90 bp, synthetic construct
  misc_feature 1..90: note = engineered ribonucleic acid scaffold (ERS) sequence
  source 1..90: mol_type = other DNA
acgagcacttctatctgtattactctgagggctctcaccagcgactatgtcgtagtgggtaaagctccctcttcggagggagcatcagag

SEQ ID NO: 23004 - DNA, 89 bp, synthetic construct
  misc_feature 1..89: note = engineered ribonucleic acid scaffold (ERS) sequence
  source 1..89: mol_type = other DNA
acgagcacttctatctggttactctgagggctctcaccagcgactatgtcgtagtgggtaaagctccctcttcggagggagcatcagag

SEQ ID NO: 23005 - DNA, 89 bp, synthetic construct
  misc_feature 1..89: note = engineered ribonucleic acid scaffold (ERS) sequence
  source 1..89: mol_type = other DNA
acgagcacttctatctgtttactctgagggctctcaccagcgactatgtcgtagtgggtaaagctccctcttcggagggagcatcagag

SEQ ID NO: 23006 - DNA, 90 bp, synthetic construct
  misc_feature 1..90: note = engineered ribonucleic acid scaffold (ERS) sequence
  source 1..90: mol_type = other DNA
acgagcacttctatctgatttactctgagggctctcaccagcgactatgtcgtagtgggtaaagctccctcttcggagggagcatcagag

SEQ ID NO: 23007 - DNA, 89 bp, synthetic construct
  misc_feature 1..89: note = engineered ribonucleic acid scaffold (ERS) sequence
  source 1..89: mol_type = other DNA
acgagcacttctatctgattgctctgagggctctcaccagcgactatgtcgtagtgggtaaagctccctcttcggagggagcatcagag

SEQ ID NO: 23008 - DNA, 91 bp, synthetic construct
  misc_feature 1..91: note = engineered ribonucleic acid scaffold (ERS) sequence
  source 1..91: mol_type = other DNA
acgaggtgttctatatctgattactctgacacctctcaccagcgactatgtcgtagtgggtaaagctccctcttcggagggagcatcagag

SEQ ID NO: 23009 - DNA, 90 bp, synthetic construct
  misc_feature 1..90: note = engineered ribonucleic acid scaffold (ERS) sequence
  source 1..90: mol_type = other DNA
acgaggtgttctaatctgattactctgacacctctcaccagcgactatgtcgtagtgggtaaagctccctcttcggagggagcatcagag

SEQ ID NO: 23010 - DNA, 88 bp, synthetic construct
  misc_feature 1..88: note = engineered ribonucleic acid scaffold (ERS) sequence
  source 1..88: mol_type = other DNA
acgaggtgttctactgattactctgacacctctcaccagcgactatgtcgtagtgggtaaagctccctcttcggagggagcatcagag

SEQ ID NO: 23011 - DNA, 89 bp, synthetic construct
  misc_feature 1..89: note = engineered ribonucleic acid scaffold (ERS) sequence
  source 1..89: mol_type = other DNA
acgaggtgttctaactgattactctgacacctctcaccagcgactatgtcgtagtgggtaaagctccctcttcggagggagcatcagag

SEQ ID NO: 23012 - DNA, 89 bp, synthetic construct
  misc_feature 1..89: note = engineered ribonucleic acid scaffold (ERS) sequence
  source 1..89: mol_type = other DNA
acgaggtgttctacctgattactctgacacctctcaccagcgactatgtcgtagtgggtaaagctccctcttcggagggagcatcagag

SEQ ID NO: 23013 - DNA, 89 bp, synthetic construct
  misc_feature 1..89: note = engineered ribonucleic acid scaffold (ERS) sequence
  source 1..89: mol_type = other DNA
acgaggtgttctagctgattactctgacacctctcaccagcgactatgtcgtagtgggtaaagctccctcttcggagggagcatcagag

SEQ ID NO: 23014 - DNA, 91 bp, synthetic construct
  misc_feature 1..91: note = engineered ribonucleic acid scaffold (ERS) sequence
  source 1..91: mol_type = other DNA
acgaggtgttctattactgattactctgacacctctcaccagcgactatgtcgtagtgggtaaagctccctcttcggagggagcatcagag

SEQ ID NO: 23015 - DNA, 89 bp, synthetic construct
  misc_feature 1..89: note = engineered ribonucleic acid scaffold (ERS) sequence
  source 1..89: mol_type = other DNA
acgaggtgttctatatgattactctgacacctctcaccagcgactatgtcgtagtgggtaaagctccctcttcggagggagcatcagag

SEQ ID NO: 23016 - DNA, 89 bp, synthetic construct
  misc_feature 1..89: note = engineered ribonucleic acid scaffold (ERS) sequence
  source 1..89: mol_type = other DNA
acgaggtgttctatgtgattactctgacacctctcaccagcgactatgtcgtagtgggtaaagctccctcttcggagggagcatcagag

SEQ ID NO: 23017 - DNA, 89 bp, synthetic construct
  misc_feature 1..89: note = engineered ribonucleic acid scaffold (ERS) sequence
  source 1..89: mol_type = other DNA
acgaggtgttctatttgattactctgacacctctcaccagcgactatgtcgtagtgggtaaagctccctcttcggagggagcatcagag

SEQ ID NO: 23018 - DNA, 90 bp, synthetic construct
  misc_feature 1..90: note = engineered ribonucleic acid scaffold (ERS) sequence
  source 1..90: mol_type = other DNA
acgaggtgttctatcttgattactctgacacctctcaccagcgactatgtcgtagtgggtaaagctccctcttcggagggagcatcagag

SEQ ID NO: 23019 - DNA, 89 bp, synthetic construct
  misc_feature 1..89: note = engineered ribonucleic acid scaffold (ERS) sequence
  source 1..89: mol_type = other DNA
acgaggtgttctatcagattactctgacacctctcaccagcgactatgtcgtagtgggtaaagctccctcttcggagggagcatcagag

SEQ ID NO: 23020 - DNA, 89 bp, synthetic construct
  misc_feature 1..89: note = engineered ribonucleic acid scaffold (ERS) sequence
  source 1..89: mol_type = other DNA
acgaggtgttctatcggattactctgacacctctcaccagcgactatgtcgtagtgggtaaagctccctcttcggagggagcatcagag

SEQ ID NO: 23021 - DNA, 90 bp, synthetic construct
  misc_feature 1..90: note = engineered ribonucleic acid scaffold (ERS) sequence
  source 1..90: mol_type = other DNA
acgaggtgttctatctgaattactctgacacctctcaccagcgactatgtcgtagtgggtaaagctccctcttcggagggagcatcagag

SEQ ID NO: 23022 - DNA, 90 bp, synthetic construct
  misc_feature 1..90: note = engineered ribonucleic acid scaffold (ERS) sequence
  source 1..90: mol_type = other DNA
acgaggtgttctatctgtattactctgacacctctcaccagcgactatgtcgtagtgggtaaagctccctcttcggagggagcatcagag

SEQ ID NO: 23023 - DNA, 89 bp, synthetic construct
  misc_feature 1..89: note = engineered ribonucleic acid scaffold (ERS) sequence
  source 1..89: mol_type = other DNA
acgaggtgttctatctggttactctgacacctctcaccagcgactatgtcgtagtgggtaaagctccctcttcggagggagcatcagag

SEQ ID NO: 23024 - DNA, 89 bp, synthetic construct
  misc_feature 1..89: note = engineered ribonucleic acid scaffold (ERS) sequence
  source 1..89: mol_type = other DNA
acgaggtgttctatctgtttactctgacacctctcaccagcgactatgtcgtagtgggtaaagctccctcttcggagggagcatcagag

SEQ ID NO: 23025 - DNA, 90 bp, synthetic construct
  misc_feature 1..90: note = engineered ribonucleic acid scaffold (ERS) sequence
  source 1..90: mol_type = other DNA
acgaggtgttctatctgatttactctgacacctctcaccagcgactatgtcgtagtgggtaaagctccctcttcggagggagcatcagag

SEQ ID NO: 23026 - DNA, 89 bp, synthetic construct
  misc_feature 1..89: note = engineered ribonucleic acid scaffold (ERS) sequence
  source 1..89: mol_type = other DNA
acgaggtgttctatctgattgctctgacacctctcaccagcgactatgtcgtagtgggtaaagctccctcttcggagggagcatcagag

SEQ ID NO: 23027 - DNA, 91 bp, synthetic construct
  misc_feature 1..91: note = engineered ribonucleic acid scaffold (ERS) sequence
  source 1..91: mol_type = other DNA
acgggactttctatatctgattactctgaagtccctcaccagcgactatgtcgtagtgggtaaagctccctcttcggagggagcatcagag

SEQ ID NO: 23028 - DNA, 90 bp, synthetic construct
  misc_feature 1..90: note = engineered ribonucleic acid scaffold (ERS) sequence
  source 1..90: mol_type = other DNA
acgggactttctaatctgattactctgaagtccctcaccagcgactatgtcgtagtgggtaaagctccctcttcggagggagcatcagag

SEQ ID NO: 23029 - DNA, 88 bp, synthetic construct
  misc_feature 1..88: note = engineered ribonucleic acid scaffold (ERS) sequence
  source 1..88: mol_type = other DNA
acgggactttctactgattactctgaagtccctcaccagcgactatgtcgtagtgggtaaagctccctcttcggagggagcatcagag

SEQ ID NO: 23030 - DNA, 89 bp, synthetic construct
  misc_feature 1..89: note = engineered ribonucleic acid scaffold (ERS) sequence
  source 1..89: mol_type = other DNA
acgggactttctaactgattactctgaagtccctcaccagcgactatgtcgtagtgggtaaagctccctcttcggagggagcatcagag

SEQ ID NO: 23031 - DNA, 89 bp, synthetic construct
  misc_feature 1..89: note = engineered ribonucleic acid scaffold (ERS) sequence
  source 1..89: mol_type = other DNA
acgggactttctacctgattactctgaagtccctcaccagcgactatgtcgtagtgggtaaagctccctcttcggagggagcatcagag

SEQ ID NO: 23032 - DNA, 89 bp, synthetic construct
  misc_feature 1..89: note = engineered ribonucleic acid scaffold (ERS) sequence
  source 1..89: mol_type = other DNA
acgggactttctagctgattactctgaagtccctcaccagcgactatgtcgtagtgggtaaagctccctcttcggagggagcatcagag

SEQ ID NO: 23033 - DNA, 91 bp, synthetic construct
  misc_feature 1..91: note = engineered ribonucleic acid scaffold (ERS) sequence
  source 1..91: mol_type = other DNA
acgggactttctattactgattactctgaagtccctcaccagcgactatgtcgtagtgggtaaagctccctcttcggagggagcatcagag

SEQ ID NO: 23034 - DNA, 89 bp, synthetic construct
  misc_feature 1..89: note = engineered ribonucleic acid scaffold (ERS) sequence
  source 1..89: mol_type = other DNA
acgggactttctatatgattactctgaagtccctcaccagcgactatgtcgtagtgggtaaagctccctcttcggagggagcatcagag

SEQ ID NO: 23035 - DNA, 89 bp, synthetic construct
  misc_feature 1..89: note = engineered ribonucleic acid scaffold (ERS) sequence
  source 1..89: mol_type = other DNA
acgggactttctatgtgattactctgaagtccctcaccagcgactatgtcgtagtgggtaaagctccctcttcggagggagcatcagag

SEQ ID NO: 23036 - DNA, 89 bp, synthetic construct
  misc_feature 1..89: note = engineered ribonucleic acid scaffold (ERS) sequence
  source 1..89: mol_type = other DNA
acgggactttctatttgattactctgaagtccctcaccagcgactatgtcgtagtgggtaaagctccctcttcggagggagcatcagag

SEQ ID NO: 23037 - DNA, 90 bp, synthetic construct
  misc_feature 1..90: note = engineered ribonucleic acid scaffold (ERS) sequence
  source 1..90: mol_type = other DNA
acgggactttctatcttgattactctgaagtccctcaccagcgactatgtcgtagtgggtaaagctccctcttcggagggagcatcagag

SEQ ID NO: 23038 - DNA, 89 bp, synthetic construct
  misc_feature 1..89: note = engineered ribonucleic acid scaffold (ERS) sequence
  source 1..89: mol_type = other DNA
acgggactttctatcagattactctgaagtccctcaccagcgactatgtcgtagtgggtaaagctccctcttcggagggagcatcagag

SEQ ID NO: 23039 - DNA, 89 bp, synthetic construct
  misc_feature 1..89: note = engineered ribonucleic acid scaffold (ERS) sequence
  source 1..89: mol_type = other DNA
acgggactttctatcggattactctgaagtccctcaccagcgactatgtcgtagtgggtaaagctccctcttcggagggagcatcagag

SEQ ID NO: 23040 - DNA, 90 bp, synthetic construct
  misc_feature 1..90: note = engineered ribonucleic acid scaffold (ERS) sequence
  source 1..90: mol_type = other DNA
acgggactttctatctgaattactctgaagtccctcaccagcgactatgtcgtagtgggtaaagctccctcttcggagggagcatcagag

SEQ ID NO: 23041 - DNA, 90 bp, synthetic construct
  misc_feature 1..90: note = engineered ribonucleic acid scaffold (ERS) sequence
  source 1..90: mol_type = other DNA
acgggactttctatctgtattactctgaagtccctcaccagcgactatgtcgtagtgggtaaagctccctcttcggagggagcatcagag

SEQ ID NO: 23042 - DNA, 89 bp, synthetic construct
  misc_feature 1..89: note = engineered ribonucleic acid scaffold (ERS) sequence
  source 1..89: mol_type = other DNA
acgggactttctatctggttactctgaagtccctcaccagcgactatgtcgtagtgggtaaagctccctcttcggagggagcatcagag

SEQ ID NO: 23043 - DNA, 89 bp, synthetic construct
  misc_feature 1..89: note = engineered ribonucleic acid scaffold (ERS) sequence
  source 1..89: mol_type = other DNA
acgggactttctatctgtttactctgaagtccctcaccagcgactatgtcgtagtgggtaaagctccctcttcggagggagcatcagag

SEQ ID NO: 23044 - DNA, 90 bp, synthetic construct
  misc_feature 1..90: note = engineered ribonucleic acid scaffold (ERS) sequence
  source 1..90: mol_type = other DNA
acgggactttctatctgatttactctgaagtccctcaccagcgactatgtcgtagtgggtaaagctccctcttcggagggagcatcagag

SEQ ID NO: 23045 - DNA, 89 bp, synthetic construct
  misc_feature 1..89: note = engineered ribonucleic acid scaffold (ERS) sequence
  source 1..89: mol_type = other DNA
acgggactttctatctgattgctctgaagtccctcaccagcgactatgtcgtagtgggtaaagctccctcttcggagggagcatcagag

SEQ ID NO: 23046 - DNA, 91 bp, synthetic construct
  misc_feature 1..91: note = engineered ribonucleic acid scaffold (ERS) sequence
  source 1..91: mol_type = other DNA
acgggcaattctatatctgattactctgattgccctcaccagcgactatgtcgtagtgggtaaagctccctcttcggagggagcatcagag

SEQ ID NO: 23047 - DNA, 90 bp, synthetic construct
  misc_feature 1..90: note = engineered ribonucleic acid scaffold (ERS) sequence
  source 1..90: mol_type = other DNA
acgggcaattctaatctgattactctgattgccctcaccagcgactatgtcgtagtgggtaaagctccctcttcggagggagcatcagag

SEQ ID NO: 23048 - DNA, 88 bp, synthetic construct
  misc_feature 1..88: note = engineered ribonucleic acid scaffold (ERS) sequence
  source 1..88: mol_type = other DNA
acgggcaattctactgattactctgattgccctcaccagcgactatgtcgtagtgggtaaagctccctcttcggagggagcatcagag

SEQ ID NO: 23049 - DNA, 89 bp, synthetic construct
  misc_feature 1..89: note = engineered ribonucleic acid scaffold (ERS) sequence
  source 1..89: mol_type = other DNA
acgggcaattctaactgattactctgattgccctcaccagcgactatgtcgtagtgggtaaagctccctcttcggagggagcatcagag

SEQ ID NO: 23050 - DNA, 89 bp, synthetic construct
  misc_feature 1..89: note = engineered ribonucleic acid scaffold (ERS) sequence
  source 1..89: mol_type = other DNA
acgggcaattctacctgattactctgattgccctcaccagcgactatgtcgtagtgggtaaagctccctcttcggagggagcatcagag

SEQ ID NO: 23051 - DNA, 89 bp, synthetic construct
  misc_feature 1..89: note = engineered ribonucleic acid scaffold (ERS) sequence
  source 1..89: mol_type = other DNA
acgggcaattctagctgattactctgattgccctcaccagcgactatgtcgtagtgggtaaagctccctcttcggagggagcatcagag

SEQ ID NO: 23052 - DNA, 91 bp, synthetic construct
  misc_feature 1..91: note = engineered ribonucleic acid scaffold (ERS) sequence
  source 1..91: mol_type = other DNA
acgggcaattctattactgattactctgattgccctcaccagcgactatgtcgtagtgggtaaagctccctcttcggagggagcatcagag

SEQ ID NO: 23053 - DNA, 89 bp, synthetic construct
  misc_feature 1..89: note = engineered ribonucleic acid scaffold (ERS) sequence
  source 1..89: mol_type = other DNA
acgggcaattctatatgattactctgattgccctcaccagcgactatgtcgtagtgggtaaagctccctcttcggagggagcatcagag

SEQ ID NO: 23054 - DNA, 89 bp, synthetic construct
  misc_feature 1..89: note = engineered ribonucleic acid scaffold (ERS) sequence
  source 1..89: mol_type = other DNA
acgggcaattctatgtgattactctgattgccctcaccagcgactatgtcgtagtgggtaaagctccctcttcggagggagcatcagag

SEQ ID NO: 23055 - DNA, 89 bp, synthetic construct
  misc_feature 1..89: note = engineered ribonucleic acid scaffold (ERS) sequence
  source 1..89: mol_type = other DNA
acgggcaattctatttgattactctgattgccctcaccagcgactatgtcgtagtgggtaaagctccctcttcggagggagcatcagag

SEQ ID NO: 23056 - DNA, 90 bp, synthetic construct
  misc_feature 1..90: note = engineered ribonucleic acid scaffold (ERS) sequence
  source 1..90: mol_type = other DNA
acgggcaattctatcttgattactctgattgccctcaccagcgactatgtcgtagtgggtaaagctccctcttcggagggagcatcagag

SEQ ID NO: 23057 - DNA, 89 bp, synthetic construct
  misc_feature 1..89: note = engineered ribonucleic acid scaffold (ERS) sequence
  source 1..89: mol_type = other DNA
acgggcaattctatcagattactctgattgccctcaccagcgactatgtcgtagtgggtaaagctccctcttcggagggagcatcagag

SEQ ID NO: 23058 - DNA, 89 bp, synthetic construct
  misc_feature 1..89: note = engineered ribonucleic acid scaffold (ERS) sequence
  source 1..89: mol_type = other DNA
acgggcaattctatcggattactctgattgccctcaccagcgactatgtcgtagtgggtaaagctccctcttcggagggagcatcagag

SEQ ID NO: 23059 - DNA, 90 bp, synthetic construct
  misc_feature 1..90: note = engineered ribonucleic acid scaffold (ERS) sequence
  source 1..90: mol_type = other DNA
acgggcaattctatctgaattactctgattgccctcaccagcgactatgtcgtagtgggtaaagctccctcttcggagggagcatcagag

SEQ ID NO: 23060 - DNA, 90 bp, synthetic construct
  misc_feature 1..90: note = engineered ribonucleic acid scaffold (ERS) sequence
  source 1..90: mol_type = other DNA
acgggcaattctatctgtattactctgattgccctcaccagcgactatgtcgtagtgggtaaagctccctcttcggagggagcatcagag

SEQ ID NO: 23061 - DNA, 89 bp, synthetic construct
  misc_feature 1..89: note = engineered ribonucleic acid scaffold (ERS) sequence
  source 1..89: mol_type = other DNA
acgggcaattctatctggttactctgattgccctcaccagcgactatgtcgtagtgggtaaagctccctcttcggagggagcatcagag

SEQ ID NO: 23062 - DNA, 89 bp, synthetic construct
  misc_feature 1..89: note = engineered ribonucleic acid scaffold (ERS) sequence
  source 1..89: mol_type = other DNA
acgggcaattctatctgtttactctgattgccctcaccagcgactatgtcgtagtgggtaaagctccctcttcggagggagcatcagag

SEQ ID NO: 23063 - DNA, 90 bp, synthetic construct
  misc_feature 1..90: note = engineered ribonucleic acid scaffold (ERS) sequence
  source 1..90: mol_type = other DNA
acgggcaattctatctgatttactctgattgccctcaccagcgactatgtcgtagtgggtaaagctccctcttcggagggagcatcagag

SEQ ID NO: 23064 - DNA, 89 bp, synthetic construct
  misc_feature 1..89: note = engineered ribonucleic acid scaffold (ERS) sequence
  source 1..89: mol_type = other DNA
acgggcaattctatctgattgctctgattgccctcaccagcgactatgtcgtagtgggtaaagctccctcttcggagggagcatcagag

SEQ ID NO: 23065 - DNA, 91 bp, synthetic construct
  misc_feature 1..91: note = engineered ribonucleic acid scaffold (ERS) sequence
  source 1..91: mol_type = other DNA
actgtgcgttctatatctgattactctgacgcacatcaccagcgactatgtcgtagtgggtaaagctccctcttcggagggagcatcagag

SEQ ID NO: 23066 - DNA, 90 bp, synthetic construct
  misc_feature 1..90: note = engineered ribonucleic acid scaffold (ERS) sequence
  source 1..90: mol_type = other DNA
actgtgcgttctaatctgattactctgacgcacatcaccagcgactatgtcgtagtgggtaaagctccctcttcggagggagcatcagag

SEQ ID NO: 23067 - DNA, 88 bp, synthetic construct
  misc_feature 1..88: note = engineered ribonucleic acid scaffold (ERS) sequence
  source 1..88: mol_type = other DNA
actgtgcgttctactgattactctgacgcacatcaccagcgactatgtcgtagtgggtaaagctccctcttcggagggagcatcagag

SEQ ID NO: 23068 - DNA, 89 bp, synthetic construct
  misc_feature 1..89: note = engineered ribonucleic acid scaffold (ERS) sequence
  source 1..89: mol_type = other DNA
actgtgcgttctaactgattactctgacgcacatcaccagcgactatgtcgtagtgggtaaagctccctcttcggagggagcatcagag

SEQ ID NO: 23069 - DNA, 89 bp, synthetic construct
  misc_feature 1..89: note = engineered ribonucleic acid scaffold (ERS) sequence
  source 1..89: mol_type = other DNA
actgtgcgttctacctgattactctgacgcacatcaccagcgactatgtcgtagtgggtaaagctccctcttcggagggagcatcagag

SEQ ID NO: 23070 - DNA, 89 bp, synthetic construct
  misc_feature 1..89: note = engineered ribonucleic acid scaffold (ERS) sequence
  source 1..89: mol_type = other DNA
actgtgcgttctagctgattactctgacgcacatcaccagcgactatgtcgtagtgggtaaagctccctcttcggagggagcatcagag

SEQ ID NO: 23071 - DNA, 91 bp, synthetic construct
  misc_feature 1..91: note = engineered ribonucleic acid scaffold (ERS) sequence
  source 1..91: mol_type = other DNA
actgtgcgttctattactgattactctgacgcacatcaccagcgactatgtcgtagtgggtaaagctccctcttcggagggagcatcagag

SEQ ID NO: 23072 - DNA, 89 bp, synthetic construct
  misc_feature 1..89: note = engineered ribonucleic acid scaffold (ERS) sequence
  source 1..89: mol_type = other DNA
actgtgcgttctatatgattactctgacgcacatcaccagcgactatgtcgtagtgggtaaagctccctcttcggagggagcatcagag

SEQ ID NO: 23073 - DNA, 89 bp, synthetic construct
  misc_feature 1..89: note = engineered ribonucleic acid scaffold (ERS) sequence
  source 1..89: mol_type = other DNA
actgtgcgttctatgtgattactctgacgcacatcaccagcgactatgtcgtagtgggtaaagctccctcttcggagggagcatcagag

SEQ ID NO: 23074 - DNA, 89 bp, synthetic construct
  misc_feature 1..89: note = engineered ribonucleic acid scaffold (ERS) sequence
  source 1..89: mol_type = other DNA
actgtgcgttctatttgattactctgacgcacatcaccagcgactatgtcgtagtgggtaaagctccctcttcggagggagcatcagag

SEQ ID NO: 23075 - DNA, 90 bp, synthetic construct
  misc_feature 1..90: note = engineered ribonucleic acid scaffold (ERS) sequence
  source 1..90: mol_type = other DNA
actgtgcgttctatcttgattactctgacgcacatcaccagcgactatgtcgtagtgggtaaagctccctcttcggagggagcatcagag

SEQ ID NO: 23076 - DNA, 89 bp, synthetic construct
  misc_feature 1..89: note = engineered ribonucleic acid scaffold (ERS) sequence
  source 1..89: mol_type = other DNA
actgtgcgttctatcagattactctgacgcacatcaccagcgactatgtcgtagtgggtaaagctccctcttcggagggagcatcagag

SEQ ID NO: 23077 - DNA, 89 bp, synthetic construct
  misc_feature 1..89: note = engineered ribonucleic acid scaffold (ERS) sequence
  source 1..89: mol_type = other DNA
actgtgcgttctatcggattactctgacgcacatcaccagcgactatgtcgtagtgggtaaagctccctcttcggagggagcatcagag

SEQ ID NO: 23078 - DNA, 90 bp, synthetic construct
  misc_feature 1..90: note = engineered ribonucleic acid scaffold (ERS) sequence
  source 1..90: mol_type = other DNA
actgtgcgttctatctgaattactctgacgcacatcaccagcgactatgtcgtagtgggtaaagctccctcttcggagggagcatcagag

SEQ ID NO: 23079 - DNA, 90 bp, synthetic construct
  misc_feature 1..90: note = engineered ribonucleic acid scaffold (ERS) sequence
  source 1..90: mol_type = other DNA
actgtgcgttctatctgtattactctgacgcacatcaccagcgactatgtcgtagtgggtaaagctccctcttcggagggagcatcagag

SEQ ID NO: 23080 - DNA, 89 bp, synthetic construct
  misc_feature 1..89: note = engineered ribonucleic acid scaffold (ERS) sequence
  source 1..89: mol_type = other DNA
actgtgcgttctatctggttactctgacgcacatcaccagcgactatgtcgtagtgggtaaagctccctcttcggagggagcatcagag

SEQ ID NO: 23081 - DNA, 89 bp, synthetic construct
  misc_feature 1..89: note = engineered ribonucleic acid scaffold (ERS) sequence
  source 1..89: mol_type = other DNA
actgtgcgttctatctgtttactctgacgcacatcaccagcgactatgtcgtagtgggtaaagctccctcttcggagggagcatcagag

SEQ ID NO: 23082 - DNA, 90 bp, synthetic construct
  misc_feature 1..90: note = engineered ribonucleic acid scaffold (ERS) sequence
  source 1..90: mol_type = other DNA
actgtgcgttctatctgatttactctgacgcacatcaccagcgactatgtcgtagtgggtaaagctccctcttcggagggagcatcagag

SEQ ID NO: 23083 - DNA, 89 bp, synthetic construct
  misc_feature 1..89: note = engineered ribonucleic acid scaffold (ERS) sequence
  source 1..89: mol_type = other DNA
actgtgcgttctatctgattgctctgacgcacatcaccagcgactatgtcgtagtgggtaaagctccctcttcggagggagcatcagag

SEQ ID NO: 23084 - DNA, 88 bp, synthetic construct
  misc_feature 1..88: note = engineered ribonucleic acid scaffold (ERS) sequence
  source 1..88: mol_type = other DNA
acacacggttctatctgattactctgaccgtgtacaccagcgactatgtcgtatgggtaaagctccctcttcggagggagcatcagag

SEQ ID NO: 23085 - DNA, 88 bp, synthetic construct
  misc_feature 1..88: note = engineered ribonucleic acid scaffold (ERS) sequence
  source 1..88: mol_type = other DNA
acactggtttctatctgattactctgaaccagtacaccagcgactatgtcgtatgggtaaagctccctcttcggagggagcatcagag

SEQ ID NO: 23086 - DNA, 88 bp, synthetic construct
  misc_feature 1..88: note = engineered ribonucleic acid scaffold (ERS) sequence
  source 1..88: mol_type = other DNA
acaggccgttctatctgattactctgacggcctacaccagcgactatgtcgtatgggtaaagctccctcttcggagggagcatcagag

SEQ ID NO: 23087 - DNA, 88 bp, synthetic construct
  misc_feature 1..88: note = engineered ribonucleic acid scaffold (ERS) sequence
  source 1..88: mol_type = other DNA
acaggtccttctatctgattactctgaggacctacaccagcgactatgtcgtatgggtaaagctccctcttcggagggagcatcagag

SEQ ID NO: 23088 - DNA, 88 bp, synthetic construct
  misc_feature 1..88: note = engineered ribonucleic acid scaffold (ERS) sequence
  source 1..88: mol_type = other DNA
accagcaattctatctgattactctgattgctgacaccagcgactatgtcgtatgggtaaagctccctcttcggagggagcatcagag

SEQ ID NO: 23089 - DNA, 88 bp, synthetic construct
  misc_feature 1..88: note = engineered ribonucleic acid scaffold (ERS) sequence
  source 1..88: mol_type = other DNA
accgagacttctatctgattactctgaggctcgacaccagcgactatgtcgtatgggtaaagctccctcttcggagggagcatcagag

SEQ ID NO: 23090 - DNA, 88 bp, synthetic construct
  misc_feature 1..88: note = engineered ribonucleic acid scaffold (ERS) sequence
  source 1..88: mol_type = other DNA
acctgtagttctatctgattactctgactacagacaccagcgactatgtcgtatgggtaaagctccctcttcggagggagcatcagag

SEQ ID NO: 23091 - DNA, 88 bp, synthetic construct
  misc_feature 1..88: note = engineered ribonucleic acid scaffold (ERS) sequence
  source 1..88: mol_type = other DNA
acgagcacttctatctgattactctgagggctcacaccagcgactatgtcgtatgggtaaagctccctcttcggagggagcatcagag

SEQ ID NO: 23092 - DNA, 88 bp, synthetic construct
  misc_feature 1..88: note = engineered ribonucleic acid scaffold (ERS) sequence
  source 1..88: mol_type = other DNA
acgaggtgttctatctgattactctgacacctcacaccagcgactatgtcgtatgggtaaagctccctcttcggagggagcatcagag

SEQ ID NO: 23093 - DNA, 88 bp, synthetic construct
  misc_feature 1..88: note = engineered ribonucleic acid scaffold (ERS) sequence
  source 1..88: mol_type = other DNA
acgggactttctatctgattactctgaagtcccacaccagcgactatgtcgtatgggtaaagctccctcttcggagggagcatcagag

SEQ ID NO: 23094 - DNA, 88 bp, synthetic construct
  misc_feature 1..88: note = engineered ribonucleic acid scaffold (ERS) sequence
  source 1..88: mol_type = other DNA
acgggcaattctatctgattactctgattgcccacaccagcgactatgtcgtatgggtaaagctccctcttcggagggagcatcagag

SEQ ID NO: 23095 - DNA, 88 bp, synthetic construct
  misc_feature 1..88: note = engineered ribonucleic acid scaffold (ERS) sequence
  source 1..88: mol_type = other DNA
actgtgcgttctatctgattactctgacgcacaacaccagcgactatgtcgtatgggtaaagctccctcttcggagggagcatcagag

SEQ ID NO: 23096 - DNA, 88 bp, synthetic construct
  misc_feature 1..88: note = engineered ribonucleic acid scaffold (ERS) sequence
  source 1..88: mol_type = other DNA
acacacggttctatctgattactctgaccgtgtgcaccagcgactatgtcgtatgggtaaagctccctcttcggagggagcatcagag

SEQ ID NO: 23097 - DNA, 88 bp, synthetic construct
  misc_feature 1..88: note = engineered ribonucleic acid scaffold (ERS) sequence
  source 1..88: mol_type = other DNA
acactggtttctatctgattactctgaaccagtgcaccagcgactatgtcgtatgggtaaagctccctcttcggagggagcatcagag

SEQ ID NO: 23098 - DNA, 88 bp, synthetic construct
  misc_feature 1..88: note = engineered ribonucleic acid scaffold (ERS) sequence
  source 1..88: mol_type = other DNA
acaggccgttctatctgattactctgacggcctgcaccagcgactatgtcgtatgggtaaagctccctcttcggagggagcatcagag

SEQ ID NO: 23099 - DNA, 88 bp, synthetic construct
  misc_feature 1..88: note = engineered ribonucleic acid scaffold (ERS) sequence
  source 1..88: mol_type = other DNA
acaggtccttctatctgattactctgaggacctgcaccagcgactatgtcgtatgggtaaagctccctcttcggagggagcatcagag

SEQ ID NO: 23100 - DNA, 88 bp, synthetic construct
  misc_feature 1..88: note = engineered ribonucleic acid scaffold (ERS) sequence
  source 1..88: mol_type = other DNA
accagcaattctatctgattactctgattgctggcaccagcgactatgtcgtatgggtaaagctccctcttcggagggagcatcagag

SEQ ID NO: 23101 - DNA, 88 bp, synthetic construct
  misc_feature 1..88: note = engineered ribonucleic acid scaffold (ERS) sequence
  source 1..88: mol_type = other DNA
accgagacttctatctgattactctgaggctcggcaccagcgactatgtcgtatgggtaaagctccctcttcggagggagcatcagag

SEQ ID NO: 23102 - DNA, 88 bp, synthetic construct
  misc_feature 1..88: note = engineered ribonucleic acid scaffold (ERS) sequence
  source 1..88: mol_type = other DNA
acctgtagttctatctgattactctgactacaggcaccagcgactatgtcgtatgggtaaagctccctcttcggagggagcatcagag

SEQ ID NO: 23103 - DNA, 88 bp, synthetic construct
  misc_feature 1..88: note = engineered ribonucleic acid scaffold (ERS) sequence
  source 1..88: mol_type = other DNA
acgagcacttctatctgattactctgagggctcgcaccagcgactatgtcgtatgggtaaagctccctcttcggagggagcatcagag

SEQ ID NO: 23104 - DNA, 88 bp, synthetic construct
  misc_feature 1..88: note = engineered ribonucleic acid scaffold (ERS) sequence
  source 1..88: mol_type = other DNA
acgaggtgttctatctgattactctgacacctcgcaccagcgactatgtcgtatgggtaaagctccctcttcggagggagcatcagag

SEQ ID NO: 23105 - DNA, 88 bp, synthetic construct
  misc_feature 1..88: note = engineered ribonucleic acid scaffold (ERS) sequence
  source 1..88: mol_type = other DNA
acgggactttctatctgattactctgaagtcccgcaccagcgactatgtcgtatgggtaaagctccctcttcggagggagcatcagag

SEQ ID NO: 23106 - DNA, 88 bp, synthetic construct
  misc_feature 1..88: note = engineered ribonucleic acid scaffold (ERS) sequence
  source 1..88: mol_type = other DNA
acgggcaattctatctgattactctgattgcccgcaccagcgactatgtcgtatgggtaaagctccctcttcggagggagcatcagag

SEQ ID NO: 23107 - DNA, 88 bp, synthetic construct
  misc_feature 1..88: note = engineered ribonucleic acid scaffold (ERS) sequence
  source 1..88: mol_type = other DNA
actgtgcgttctatctgattactctgacgcacagcaccagcgactatgtcgtatgggtaaagctccctcttcggagggagcatcagag

SEQ ID NO: 23108 - DNA, 88 bp, synthetic construct
  misc_feature 1..88: note = engineered ribonucleic acid scaffold (ERS) sequence
  source 1..88: mol_type = other DNA
acacacggttctatctgattactctgaccgtgttgaccagcgactatgtcgtatgggtaaagctccctcttcggagggagcatcagag

SEQ ID NO: 23109 - DNA, 88 bp, synthetic construct
  misc_feature 1..88: note = engineered ribonucleic acid scaffold (ERS) sequence
  source 1..88: mol_type = other DNA
acactggtttctatctgattactctgaaccagttgaccagcgactatgtcgtatgggtaaagctccctcttcggagggagcatcagag

SEQ ID NO: 23110 - DNA, 88 bp, synthetic construct
  misc_feature 1..88: note = engineered ribonucleic acid scaffold (ERS) sequence
  source 1..88: mol_type = other DNA
acaggccgttctatctgattactctgacggccttgaccagcgactatgtcgtatgggtaaagctccctcttcggagggagcatcagag

SEQ ID NO: 23111 - DNA, 88 bp, synthetic construct
  misc_feature 1..88: note = engineered ribonucleic acid scaffold (ERS) sequence
  source 1..88: mol_type = other DNA
acaggtccttctatctgattactctgaggaccttgaccagcgactatgtcgtatgggtaaagctccctcttcggagggagcatcagag

SEQ ID NO: 23112 - DNA, 88 bp, synthetic construct
  misc_feature 1..88: note = engineered ribonucleic acid scaffold (ERS) sequence
  source 1..88: mol_type = other DNA
accagcaattctatctgattactctgattgctgtgaccagcgactatgtcgtatgggtaaagctccctcttcggagggagcatcagag

SEQ ID NO: 23113 - DNA, 88 bp, synthetic construct
  misc_feature 1..88: note = engineered ribonucleic acid scaffold (ERS) sequence
  source 1..88: mol_type = other DNA
accgagacttctatctgattactctgaggctcgtgaccagcgactatgtcgtatgggtaaagctccctcttcggagggagcatcagag

SEQ ID NO: 23114 - DNA, 88 bp, synthetic construct
  misc_feature 1..88: note = engineered ribonucleic acid scaffold (ERS) sequence
  source 1..88: mol_type = other DNA
acctgtagttctatctgattactctgactacagtgaccagcgactatgtcgtatgggtaaagctccctcttcggagggagcatcagag

SEQ ID NO: 23115 - DNA, 88 bp, synthetic construct
  misc_feature 1..88: note = engineered ribonucleic acid scaffold (ERS) sequence
  source 1..88: mol_type = other DNA
acgagcacttctatctgattactctgagggctctgaccagcgactatgtcgtatgggtaaagctccctcttcggagggagcatcagag

SEQ ID NO: 23116 - DNA, 88 bp, synthetic construct
  misc_feature 1..88: note = engineered ribonucleic acid scaffold (ERS) sequence
  source 1..88: mol_type = other DNA
acgaggtgttctatctgattactctgacacctctgaccagcgactatgtcgtatgggtaaagctccctcttcggagggagcatcagag

SEQ ID NO: 23117 - DNA, 88 bp, synthetic construct
  misc_feature 1..88: note = engineered ribonucleic acid scaffold (ERS) sequence
  source 1..88: mol_type = other DNA
acgggactttctatctgattactctgaagtccctgaccagcgactatgtcgtatgggtaaagctccctcttcggagggagcatcagag

SEQ ID NO: 23118 - DNA, 88 bp, synthetic construct
  misc_feature 1..88: note = engineered ribonucleic acid scaffold (ERS) sequence
  source 1..88: mol_type = other DNA
acgggcaattctatctgattactctgattgccctgaccagcgactatgtcgtatgggtaaagctccctcttcggagggagcatcagag

SEQ ID NO: 23119 - DNA, 88 bp, synthetic construct
  misc_feature 1..88: note = engineered ribonucleic acid scaffold (ERS) sequence
  source 1..88: mol_type = other DNA
actgtgcgttctatctgattactctgacgcacatgaccagcgactatgtcgtatgggtaaagctccctcttcggagggagcatcagag

SEQ ID NO: 23120 - DNA, 88 bp, synthetic construct
  misc_feature 1..88: note = engineered ribonucleic acid scaffold (ERS) sequence
  source 1..88: mol_type = other DNA
acacacggttctatctgattactctgaccgtgttgaccagcgactatgtcgtatggctaaagctccctcttcggagggagcatcagag

SEQ ID NO: 23121 - DNA, 88 bp, synthetic construct
  misc_feature 1..88: note = engineered ribonucleic acid scaffold (ERS) sequence
  source 1..88: mol_type = other DNA
acactggtttctatctgattactctgaaccagttgaccagcgactatgtcgtatggctaaagctccctcttcggagggagcatcagag

SEQ ID NO: 23122 - DNA, 88 bp, synthetic construct
  misc_feature 1..88: note = engineered ribonucleic acid scaffold (ERS) sequence
  source 1..88: mol_type = other DNA
acaggccgttctatctgattactctgacggccttgaccagcgactatgtcgtatggctaaagctccctcttcggagggagcatcagag

SEQ ID NO: 23123 - DNA, 88 bp, synthetic construct
  misc_feature 1..88: note = engineered ribonucleic acid scaffold (ERS) sequence
  source 1..88: mol_type = other DNA
acaggtccttctatctgattactctgaggaccttgaccagcgactatgtcgtatggctaaagctccctcttcggagggagcatcagag

SEQ ID NO: 23124 - DNA, 88 bp, synthetic construct
  misc_feature 1..88: note = engineered ribonucleic acid scaffold (ERS) sequence
  source 1..88: mol_type = other DNA
accagcaattctatctgattactctgattgctgtgaccagcgactatgtcgtatggctaaagctccctcttcggagggagcatcagag

SEQ ID NO: 23125 - DNA, 88 bp, synthetic construct
  misc_feature 1..88: note = engineered ribonucleic acid scaffold (ERS) sequence
  source 1..88: mol_type = other DNA
accgagacttctatctgattactctgaggctcgtgaccagcgactatgtcgtatggctaaagctccctcttcggagggagcatcagag

SEQ ID NO: 23126 - DNA, 88 bp, synthetic construct
  misc_feature 1..88: note = engineered ribonucleic acid scaffold (ERS) sequence
  source 1..88: mol_type = other DNA
acctgtagttctatctgattactctgactacagtgaccagcgactatgtcgtatggctaaagctccctcttcggagggagcatcagag

SEQ ID NO: 23127 - DNA, 88 bp, synthetic construct
  misc_feature 1..88: note = engineered ribonucleic acid scaffold (ERS) sequence
  source 1..88: mol_type = other DNA
acgagcacttctatctgattactctgagggctctgaccagcgactatgtcgtatggctaaagctccctcttcggagggagcatcagag

SEQ ID NO: 23128 - DNA, 88 bp, synthetic construct
  misc_feature 1..88: note = engineered ribonucleic acid scaffold (ERS) sequence
  source 1..88: mol_type = other DNA
acgaggtgttctatctgattactctgacacctctgaccagcgactatgtcgtatggctaaagctccctcttcggagggagcatcagag

SEQ ID NO: 23129 - DNA, 88 bp, synthetic construct
  misc_feature 1..88: note = engineered ribonucleic acid scaffold (ERS) sequence
  source 1..88: mol_type = other DNA
acgggactttctatctgattactctgaagtccctgaccagcgactatgtcgtatggctaaagctccctcttcggagggagcatcagag

SEQ ID NO: 23130 - DNA, 88 bp, synthetic construct
  misc_feature 1..88: note = engineered ribonucleic acid scaffold (ERS) sequence
  source 1..88: mol_type = other DNA
acgggcaattctatctgattactctgattgccctgaccagcgactatgtcgtatggctaaagctccctcttcggagggagcatcagag

SEQ ID NO: 23131 - DNA, 88 bp, synthetic construct
  misc_feature 1..88: note = engineered ribonucleic acid scaffold (ERS) sequence
  source 1..88: mol_type = other DNA
actgtgcgttctatctgattactctgacgcacatgaccagcgactatgtcgtatggctaaagctccctcttcggagggagcatcagag

SEQ ID NO: 23132 - DNA, 89 bp, synthetic construct
  misc_feature 1..89: note = engineered ribonucleic acid scaffold (ERS) sequence
  source 1..89: mol_type = other DNA
acacacggttctatctgattactctgaccgtgttgaccagcgactatgtcgtatgggctaaagctccctcttcggagggagcatcagag

SEQ ID NO: 23133 - DNA, 89 bp, synthetic construct
  misc_feature 1..89: note = engineered ribonucleic acid scaffold (ERS) sequence
  source 1..89: mol_type = other DNA
acactggtttctatctgattactctgaaccagttgaccagcgactatgtcgtatgggctaaagctccctcttcggagggagcatcagag

SEQ ID NO: 23134 - DNA, 89 bp, synthetic construct
  misc_feature 1..89: note = engineered ribonucleic acid scaffold (ERS) sequence
  source 1..89: mol_type = other DNA
acaggccgttctatctgattactctgacggccttgaccagcgactatgtcgtatgggctaaagctccctcttcggagggagcatcagag

SEQ ID NO: 23135 - DNA, 89 bp, synthetic construct
  misc_feature 1..89: note = engineered ribonucleic acid scaffold (ERS) sequence
  source 1..89: mol_type = other DNA
acaggtccttctatctgattactctgaggaccttgaccagcgactatgtcgtatgggctaaagctccctcttcggagggagcatcagag

SEQ ID NO: 23136 - DNA, 89 bp, synthetic construct
  misc_feature 1..89: note = engineered ribonucleic acid scaffold (ERS) sequence
  source 1..89: mol_type = other DNA
accagcaattctatctgattactctgattgctgtgaccagcgactatgtcgtatgggctaaagctccctcttcggagggagcatcagag

SEQ ID NO: 23137 - DNA, 89 bp, synthetic construct
  misc_feature 1..89: note = engineered ribonucleic acid scaffold (ERS) sequence
  source 1..89: mol_type = other DNA
accgagacttctatctgattactctgaggctcgtgaccagcgactatgtcgtatgggctaaagctccctcttcggagggagcatcagag

SEQ ID NO: 23138 - DNA, 89 bp, synthetic construct
  misc_feature 1..89: note = engineered ribonucleic acid scaffold (ERS) sequence
  source 1..89: mol_type = other DNA
acctgtagttctatctgattactctgactacagtgaccagcgactatgtcgtatgggctaaagctccctcttcggagggagcatcagag

SEQ ID NO: 23139 - DNA, 89 bp, synthetic construct
  misc_feature 1..89: note = engineered ribonucleic acid scaffold (ERS) sequence
  source 1..89: mol_type = other DNA
acgagcacttctatctgattactctgagggctctgaccagcgactatgtcgtatgggctaaagctccctcttcggagggagcatcagag

SEQ ID NO: 23140 - DNA, 89 bp, synthetic construct
  misc_feature 1..89: note = engineered ribonucleic acid scaffold (ERS) sequence
  source 1..89: mol_type = other DNA
acgaggtgttctatctgattactctgacacctctgaccagcgactatgtcgtatgggctaaagctccctcttcggagggagcatcagag

SEQ ID NO: 23141 - DNA, 89 bp, synthetic construct
  misc_feature 1..89: note = engineered ribonucleic acid scaffold (ERS) sequence
  source 1..89: mol_type = other DNA
acgggactttctatctgattactctgaagtccctgaccagcgactatgtcgtatgggctaaagctccctcttcggagggagcatcagag

SEQ ID NO: 23142 - DNA, 89 bp, synthetic construct
  misc_feature 1..89: note = engineered ribonucleic acid scaffold (ERS) sequence
  source 1..89: mol_type = other DNA
acgggcaattctatctgattactctgattgccctgaccagcgactatgtcgtatgggctaaagctccctcttcggagggagcatcagag

SEQ ID NO: 23143 - DNA, 89 bp, synthetic construct
  misc_feature 1..89: note = engineered ribonucleic acid scaffold (ERS) sequence
  source 1..89: mol_type = other DNA
actgtgcgttctatctgattactctgacgcacatgaccagcgactatgtcgtatgggctaaagctccctcttcggagggagcatcagag

SEQ ID NO: 23144 - DNA, 88 bp, synthetic construct
  misc_feature 1..88: note = engineered ribonucleic acid scaffold (ERS) sequence
  source 1..88: mol_type = other DNA
acacacggttctatctgattactctgaccgtgttccccagcgactatgtcgtatgggtaaagctccctcttcggagggagcatcagag

SEQ ID NO: 23145 - DNA, 88 bp, synthetic construct
  misc_feature 1..88: note = engineered ribonucleic acid scaffold (ERS) sequence
  source 1..88: mol_type = other DNA
acactggtttctatctgattactctgaaccagttccccagcgactatgtcgtatgggtaaagctccctcttcggagggagcatcagag

SEQ ID NO: 23146 - DNA, 88 bp, synthetic construct
  misc_feature 1..88: note = engineered ribonucleic acid scaffold (ERS) sequence
  source 1..88: mol_type = other DNA
acaggccgttctatctgattactctgacggccttccccagcgactatgtcgtatgggtaaagctccctcttcggagggagcatcagag

SEQ ID NO: 23147 - DNA, 88 bp, synthetic construct
  misc_feature 1..88: note = engineered ribonucleic acid scaffold (ERS) sequence
  source 1..88: mol_type = other DNA
acaggtccttctatctgattactctgaggaccttccccagcgactatgtcgtatgggtaaagctccctcttcggagggagcatcagag

SEQ ID NO: 23148 - DNA, 88 bp, synthetic construct
  misc_feature 1..88: note = engineered ribonucleic acid scaffold (ERS) sequence
  source 1..88: mol_type = other DNA
accagcaattctatctgattactctgattgctgtccccagcgactatgtcgtatgggtaaagctccctcttcggagggagcatcagag

SEQ ID NO: 23149 - DNA, 88 bp, synthetic construct
  misc_feature 1..88: note = engineered ribonucleic acid scaffold (ERS) sequence
  source 1..88: mol_type = other DNA
accgagacttctatctgattactctgaggctcgtccccagcgactatgtcgtatgggtaaagctccctcttcggagggagcatcagag

SEQ ID NO: 23150 - DNA, 88 bp, synthetic construct
  misc_feature 1..88: note = engineered ribonucleic acid scaffold (ERS) sequence
  source 1..88: mol_type = other DNA
acctgtagttctatctgattactctgactacagtccccagcgactatgtcgtatgggtaaagctccctcttcggagggagcatcagag

SEQ ID NO: 23151 - DNA, 88 bp, synthetic construct
  misc_feature 1..88: note = engineered ribonucleic acid scaffold (ERS) sequence
  source 1..88: mol_type = other DNA
acgagcacttctatctgattactctgagggctctccccagcgactatgtcgtatgggtaaagctccctcttcggagggagcatcagag

SEQ ID NO: 23152 - DNA, 88 bp, synthetic construct
  misc_feature 1..88: note = engineered ribonucleic acid scaffold (ERS) sequence
  source 1..88: mol_type = other DNA
acgaggtgttctatctgattactctgacacctctccccagcgactatgtcgtatgggtaaagctccctcttcggagggagcatcagag

SEQ ID NO: 23153 - DNA, 88 bp, synthetic construct
  misc_feature 1..88: note = engineered ribonucleic acid scaffold (ERS) sequence
  source 1..88: mol_type = other DNA
acgggactttctatctgattactctgaagtccctccccagcgactatgtcgtatgggtaaagctccctcttcggagggagcatcagag

SEQ ID NO: 23154 - DNA, 88 bp, synthetic construct
  misc_feature 1..88: note = engineered ribonucleic acid scaffold (ERS) sequence
  source 1..88: mol_type = other DNA
acgggcaattctatctgattactctgattgccctccccagcgactatgtcgtatgggtaaagctccctcttcggagggagcatcagag

SEQ ID NO: 23155 - DNA, 88 bp, synthetic construct
  misc_feature 1..88: note = engineered ribonucleic acid scaffold (ERS) sequence
  source 1..88: mol_type = other DNA
actgtgcgttctatctgattactctgacgcacatccccagcgactatgtcgtatgggtaaagctccctcttcggagggagcatcagag

SEQ ID NO: 23156 - DNA, 88 bp, synthetic construct
  misc_feature 1..88: note = engineered ribonucleic acid scaffold (ERS) sequence
  source 1..88: mol_type = other DNA
acacacggttctatctgattactctgaccgtgttcgccagcgactatgtcgtatgggtaaagctccctcttcggagggagcatcagag

SEQ ID NO: 23157 - DNA, 88 bp, synthetic construct
  misc_feature 1..88: note = engineered ribonucleic acid scaffold (ERS) sequence
  source 1..88: mol_type = other DNA
acactggtttctatctgattactctgaaccagttcgccagcgactatgtcgtatgggtaaagctccctcttcggagggagcatcagag

SEQ ID NO: 23158 - DNA, 88 bp, synthetic construct
  misc_feature 1..88: note = engineered ribonucleic acid scaffold (ERS) sequence
  source 1..88: mol_type = other DNA
acaggccgttctatctgattactctgacggccttcgccagcgactatgtcgtatgggtaaagctccctcttcggagggagcatcagag

SEQ ID NO: 23159 - DNA, 88 bp, synthetic construct
  misc_feature 1..88: note = engineered ribonucleic acid scaffold (ERS) sequence
  source 1..88: mol_type = other DNA
acaggtccttctatctgattactctgaggaccttcgccagcgactatgtcgtatgggtaaagctccctcttcggagggagcatcagag

SEQ ID NO: 23160 - DNA, 88 bp, synthetic construct
  misc_feature 1..88: note = engineered ribonucleic acid scaffold (ERS) sequence
  source 1..88: mol_type = other DNA
accagcaattctatctgattactctgattgctgtcgccagcgactatgtcgtatgggtaaagctccctcttcggagggagcatcagag

SEQ ID NO: 23161 - DNA, 88 bp, synthetic construct
  misc_feature 1..88: note = engineered ribonucleic acid scaffold (ERS) sequence
  source 1..88: mol_type = other DNA
accgagacttctatctgattactctgaggctcgtcgccagcgactatgtcgtatgggtaaagctccctcttcggagggagcatcagag

SEQ ID NO: 23162 - DNA, 88 bp, synthetic construct
  misc_feature 1..88: note = engineered ribonucleic acid scaffold (ERS) sequence
  source 1..88: mol_type = other DNA
acctgtagttctatctgattactctgactacagtcgccagcgactatgtcgtatgggtaaagctccctcttcggagggagcatcagag

SEQ ID NO: 23163 - DNA, 88 bp, synthetic construct
  misc_feature 1..88: note = engineered ribonucleic acid scaffold (ERS) sequence
  source 1..88: mol_type = other DNA
acgagcacttctatctgattactctgagggctctcgccagcgactatgtcgtatgggtaaagctccctcttcggagggagcatcagag

SEQ ID NO: 23164 - DNA, 88 bp, synthetic construct
  misc_feature 1..88: note = engineered ribonucleic acid scaffold (ERS) sequence
  source 1..88: mol_type = other DNA
acgaggtgttctatctgattactctgacacctctcgccagcgactatgtcgtatgggtaaagctccctcttcggagggagcatcagag

SEQ ID NO: 23165 - DNA, 88 bp, synthetic construct
  misc_feature 1..88: note = engineered ribonucleic acid scaffold (ERS) sequence
  source 1..88: mol_type = other DNA
acgggactttctatctgattactctgaagtccctcgccagcgactatgtcgtatgggtaaagctccctcttcggagggagcatcagag

SEQ ID NO: 23166 - DNA, 88 bp, synthetic construct
  misc_feature 1..88: note = engineered ribonucleic acid scaffold (ERS) sequence
  source 1..88: mol_type = other DNA
acgggcaattctatctgattactctgattgccctcgccagcgactatgtcgtatgggtaaagctccctcttcggagggagcatcagag

SEQ ID NO: 23167 - DNA, 88 bp, synthetic construct
  misc_feature 1..88: note = engineered ribonucleic acid scaffold (ERS) sequence
  source 1..88: mol_type = other DNA
actgtgcgttctatctgattactctgacgcacatcgccagcgactatgtcgtatgggtaaagctccctcttcggagggagcatcagag

SEQ ID NO: 23168 - DNA, 89 bp, synthetic construct
  misc_feature 1..89: note = engineered ribonucleic acid scaffold (ERS) sequence
  source 1..89: mol_type = other DNA
acacacggttctatctgattactctgaccgtgttcgccagcgactatgtcgtatggcgtaaagctccctcttcggagggagcatcagag

SEQ ID NO: 23169 - DNA, 89 bp, synthetic construct
  misc_feature 1..89: note = engineered ribonucleic acid scaffold (ERS) sequence
  source 1..89: mol_type = other DNA
acactggtttctatctgattactctgaaccagttcgccagcgactatgtcgtatggcgtaaagctccctcttcggagggagcatcagag

SEQ ID NO: 23170 - DNA, 89 bp, synthetic construct
  misc_feature 1..89: note = engineered ribonucleic acid scaffold (ERS) sequence
  source 1..89: mol_type = other DNA
acaggccgttctatctgattactctgacggccttcgccagcgactatgtcgtatggcgtaaagctccctcttcggagggagcatcagag

SEQ ID NO: 23171 - DNA, 89 bp, synthetic construct
  misc_feature 1..89: note = engineered ribonucleic acid scaffold (ERS) sequence
  source 1..89: mol_type = other DNA
acaggtccttctatctgattactctgaggaccttcgccagcgactatgtcgtatggcgtaaagctccctcttcggagggagcatcagag

SEQ ID NO: 23172 - DNA, 89 bp, synthetic construct
  misc_feature 1..89: note = engineered ribonucleic acid scaffold (ERS) sequence
  source 1..89: mol_type = other DNA
accagcaattctatctgattactctgattgctgtcgccagcgactatgtcgtatggcgtaaagctccctcttcggagggagcatcagag

SEQ ID NO: 23173 - DNA, 89 bp, synthetic construct
  misc_feature 1..89: note = engineered ribonucleic acid scaffold (ERS) sequence
  source 1..89: mol_type = other DNA
accgagacttctatctgattactctgaggctcgtcgccagcgactatgtcgtatggcgtaaagctccctcttcggagggagcatcagag

SEQ ID NO: 23174 - DNA, 89 bp, synthetic construct
  misc_feature 1..89: note = engineered ribonucleic acid scaffold (ERS) sequence
  source 1..89: mol_type = other DNA
acctgtagttctatctgattactctgactacagtcgccagcgactatgtcgtatggcgtaaagctccctcttcggagggagcatcagag

SEQ ID NO: 23175 - DNA, 89 bp, synthetic construct
  misc_feature 1..89: note = engineered ribonucleic acid scaffold (ERS) sequence
  source 1..89: mol_type = other DNA
acgagcacttctatctgattactctgagggctctcgccagcgactatgtcgtatggcgtaaagctccctcttcggagggagcatcagag

SEQ ID NO: 23176 - DNA, 89 bp, synthetic construct
  misc_feature 1..89: note = engineered ribonucleic acid scaffold (ERS) sequence
  source 1..89: mol_type = other DNA
acgaggtgttctatctgattactctgacacctctcgccagcgactatgtcgtatggcgtaaagctccctcttcggagggagcatcagag

SEQ ID NO: 23177 - DNA, 89 bp, synthetic construct
  misc_feature 1..89: note = engineered ribonucleic acid scaffold (ERS) sequence
  source 1..89: mol_type = other DNA
acgggactttctatctgattactctgaagtccctcgccagcgactatgtcgtatggcgtaaagctccctcttcggagggagcatcagag

SEQ ID NO: 23178 - DNA, 89 bp, synthetic construct
  misc_feature 1..89: note = engineered ribonucleic acid scaffold (ERS) sequence
  source 1..89: mol_type = other DNA
acgggcaattctatctgattactctgattgccctcgccagcgactatgtcgtatggcgtaaagctccctcttcggagggagcatcagag

SEQ ID NO: 23179 - DNA, 89 bp, synthetic construct
  misc_feature 1..89: note = engineered ribonucleic acid scaffold (ERS) sequence
  source 1..89: mol_type = other DNA
actgtgcgttctatctgattactctgacgcacatcgccagcgactatgtcgtatggcgtaaagctccctcttcggagggagcatcagag

SEQ ID NO: 23180 - DNA, 88 bp, synthetic construct
  misc_feature 1..88: note = engineered ribonucleic acid scaffold (ERS) sequence
  source 1..88: mol_type = other DNA
acacacggttctatctgattactctgaccgtgttctccagcgactatgtcgtatgggtaaagctccctcttcggagggagcatcagag

SEQ ID NO: 23181 - DNA, 88 bp, synthetic construct
  misc_feature 1..88: note = engineered ribonucleic acid scaffold (ERS) sequence
  source 1..88: mol_type = other DNA
acactggtttctatctgattactctgaaccagttctccagcgactatgtcgtatgggtaaagctccctcttcggagggagcatcagag

SEQ ID NO: 23182 - DNA, 88 bp, synthetic construct
  misc_feature 1..88: note = engineered ribonucleic acid scaffold (ERS) sequence
  source 1..88: mol_type = other DNA
acaggccgttctatctgattactctgacggccttctccagcgactatgtcgtatgggtaaagctccctcttcggagggagcatcagag

SEQ ID NO: 23183 - DNA, 88 bp, synthetic construct
  misc_feature 1..88: note = engineered ribonucleic acid scaffold (ERS) sequence
  source 1..88: mol_type = other DNA
acaggtccttctatctgattactctgaggaccttctccagcgactatgtcgtatgggtaaagctccctcttcggagggagcatcagag

SEQ ID NO: 23184 - DNA, 88 bp, synthetic construct
  misc_feature 1..88: note = engineered ribonucleic acid scaffold (ERS) sequence
  source 1..88: mol_type = other DNA
accagcaattctatctgattactctgattgctgtctccagcgactatgtcgtatgggtaaagctccctcttcggagggagcatcagag

SEQ ID NO: 23185 - DNA, 88 bp, synthetic construct
  misc_feature 1..88: note = engineered ribonucleic acid scaffold (ERS) sequence
  source 1..88: mol_type = other DNA
accgagacttctatctgattactctgaggctcgtctccagcgactatgtcgtatgggtaaagctccctcttcggagggagcatcagag

SEQ ID NO: 23186 - DNA, 88 bp, synthetic construct
  misc_feature 1..88: note = engineered ribonucleic acid scaffold (ERS) sequence
  source 1..88: mol_type = other DNA
acctgtagttctatctgattactctgactacagtctccagcgactatgtcgtatgggtaaagctccctcttcggagggagcatcagag

SEQ ID NO: 23187 - DNA, 88 bp, synthetic construct
  misc_feature 1..88: note = engineered ribonucleic acid scaffold (ERS) sequence
  source 1..88: mol_type = other DNA
acgagcacttctatctgattactctgagggctctctccagcgactatgtcgtatgggtaaagctccctcttcggagggagcatcagag

SEQ ID NO: 23188 - DNA, 88 bp, synthetic construct
  misc_feature 1..88: note = engineered ribonucleic acid scaffold (ERS) sequence
  source 1..88: mol_type = other DNA
acgaggtgttctatctgattactctgacacctctctccagcgactatgtcgtatgggtaaagctccctcttcggagggagcatcagag

SEQ ID NO: 23189 - DNA, 88 bp, synthetic construct
  misc_feature 1..88: note = engineered ribonucleic acid scaffold (ERS) sequence
  source 1..88: mol_type = other DNA
acgggactttctatctgattactctgaagtccctctccagcgactatgtcgtatgggtaaagctccctcttcggagggagcatcagag

SEQ ID NO: 23190 - DNA, 88 bp, synthetic construct
  misc_feature 1..88: note = engineered ribonucleic acid scaffold (ERS) sequence
  source 1..88: mol_type = other DNA
acgggcaattctatctgattactctgattgccctctccagcgactatgtcgtatgggtaaagctccctcttcggagggagcatcagag

SEQ ID NO: 23191 - DNA, 88 bp, synthetic construct
  misc_feature 1..88: note = engineered ribonucleic acid scaffold (ERS) sequence
  source 1..88: mol_type = other DNA
actgtgcgttctatctgattactctgacgcacatctccagcgactatgtcgtatgggtaaagctccctcttcggagggagcatcagag

SEQ ID NO: 23192 - DNA, 88 bp, synthetic construct
  misc_feature 1..88: note = engineered ribonucleic acid scaffold (ERS) sequence
  source 1..88: mol_type = other DNA
acacacggttctatctgattactctgaccgtgttcacctgcgactatgtcgtaagggtaaagctccctcttcggagggagcatcagag

SEQ ID NO: 23193 - DNA, 88 bp, synthetic construct
  misc_feature 1..88: note = engineered ribonucleic acid scaffold (ERS) sequence
  source 1..88: mol_type = other DNA
acactggtttctatctgattactctgaaccagttcacctgcgactatgtcgtaagggtaaagctccctcttcggagggagcatcagag

SEQ ID NO: 23194 - DNA, 88 bp, synthetic construct
  misc_feature 1..88: note = engineered ribonucleic acid scaffold (ERS) sequence
  source 1..88: mol_type = other DNA
acaggccgttctatctgattactctgacggccttcacctgcgactatgtcgtaagggtaaagctccctcttcggagggagcatcagag

SEQ ID NO: 23195 - DNA, 88 bp, synthetic construct
  misc_feature 1..88: note = engineered ribonucleic acid scaffold (ERS) sequence
  source 1..88: mol_type = other DNA
acaggtccttctatctgattactctgaggaccttcacctgcgactatgtcgtaagggtaaagctccctcttcggagggagcatcagag

SEQ ID NO: 23196 - DNA, 88 bp, synthetic construct
  misc_feature 1..88: note = engineered ribonucleic acid scaffold (ERS) sequence
  source 1..88: mol_type = other DNA
accagcaattctatctgattactctgattgctgtcacctgcgactatgtcgtaagggtaaagctccctcttcggagggagcatcagag

SEQ ID NO: 23197 - DNA, 88 bp, synthetic construct
  misc_feature 1..88: note = engineered ribonucleic acid scaffold (ERS) sequence
  source 1..88: mol_type = other DNA
accgagacttctatctgattactctgaggctcgtcacctgcgactatgtcgtaagggtaaagctccctcttcggagggagcatcagag

SEQ ID NO: 23198 - DNA, 88 bp, synthetic construct
  misc_feature 1..88: note = engineered ribonucleic acid scaffold (ERS) sequence
  source 1..88: mol_type = other DNA
acctgtagttctatctgattactctgactacagtcacctgcgactatgtcgtaagggtaaagctccctcttcggagggagcatcagag

SEQ ID NO: 23199 - DNA, 88 bp, synthetic construct
  misc_feature 1..88: note = engineered ribonucleic acid scaffold (ERS) sequence
  source 1..88: mol_type = other DNA
acgagcacttctatctgattactctgagggctctcacctgcgactatgtcgtaagggtaaagctccctcttcggagggagcatcagag

SEQ ID NO: 23200 - DNA, 88 bp, synthetic construct
  misc_feature 1..88: note = engineered ribonucleic acid scaffold (ERS) sequence
  source 1..88: mol_type = other DNA
acgaggtgttctatctgattactctgacacctctcacctgcgactatgtcgtaagggtaaagctccctcttcggagggagcatcagag

SEQ ID NO: 23201 - DNA, 88 bp, synthetic construct
  misc_feature 1..88: note = engineered ribonucleic acid scaffold (ERS) sequence
  source 1..88: mol_type = other DNA
acgggactttctatctgattactctgaagtccctcacctgcgactatgtcgtaagggtaaagctccctcttcggagggagcatcagag

SEQ ID NO: 23202 - DNA, 88 bp, synthetic construct
  misc_feature 1..88: note = engineered ribonucleic acid scaffold (ERS) sequence
  source 1..88: mol_type = other DNA
acgggcaattctatctgattactctgattgccctcacctgcgactatgtcgtaagggtaaagctccctcttcggagggagcatcagag

SEQ ID NO: 23203 - DNA, 88 bp, synthetic construct
  misc_feature 1..88: note = engineered ribonucleic acid scaffold (ERS) sequence
  source 1..88: mol_type = other DNA
actgtgcgttctatctgattactctgacgcacatcacctgcgactatgtcgtaagggtaaagctccctcttcggagggagcatcagag

SEQ ID NO: 23204 - DNA, 88 bp, synthetic construct
  misc_feature 1..88: note = engineered ribonucleic acid scaffold (ERS) sequence
  source 1..88: mol_type = other DNA
acacacggttctatctgattactctgaccgtgttcaccagagactatgtcttatgggtaaagctccctcttcggagggagcatcagag

SEQ ID NO: 23205 - DNA, 88 bp, synthetic construct
  misc_feature 1..88: note = engineered ribonucleic acid scaffold (ERS) sequence
  source 1..88: mol_type = other DNA
acactggtttctatctgattactctgaaccagttcaccagagactatgtcttatgggtaaagctccctcttcggagggagcatcagag

SEQ ID NO: 23206 - DNA, 88 bp, synthetic construct
  misc_feature 1..88: note = engineered ribonucleic acid scaffold (ERS) sequence
  source 1..88: mol_type = other DNA
acaggccgttctatctgattactctgacggccttcaccagagactatgtcttatgggtaaagctccctcttcggagggagcatcagag

SEQ ID NO: 23207 - DNA, 88 bp, synthetic construct
  misc_feature 1..88: note = engineered ribonucleic acid scaffold (ERS) sequence
  source 1..88: mol_type = other DNA
acaggtccttctatctgattactctgaggaccttcaccagagactatgtcttatgggtaaagctccctcttcggagggagcatcagag

SEQ ID NO: 23208 - DNA, 88 bp, synthetic construct
  misc_feature 1..88: note = engineered ribonucleic acid scaffold (ERS) sequence
  source 1..88: mol_type = other DNA
accagcaattctatctgattactctgattgctgtcaccagagactatgtcttatgggtaaagctccctcttcggagggagcatcagag

SEQ ID NO: 23209 - DNA, 88 bp, synthetic construct
  misc_feature 1..88: note = engineered ribonucleic acid scaffold (ERS) sequence
  source 1..88: mol_type = other DNA
accgagacttctatctgattactctgaggctcgtcaccagagactatgtcttatgggtaaagctccctcttcggagggagcatcagag

SEQ ID NO: 23210 - DNA, 88 bp, synthetic construct
  misc_feature 1..88: note = engineered ribonucleic acid scaffold (ERS) sequence
  source 1..88: mol_type = other DNA
acctgtagttctatctgattactctgactacagtcaccagagactatgtcttatgggtaaagctccctcttcggagggagcatcagag

SEQ ID NO: 23211 - DNA, 88 bp, synthetic construct
  misc_feature 1..88: note = engineered ribonucleic acid scaffold (ERS) sequence
  source 1..88: mol_type = other DNA
acgagcacttctatctgattactctgagggctctcaccagagactatgtcttatgggtaaagctccctcttcggagggagcatcagag

SEQ ID NO: 23212 - DNA, 88 bp, synthetic construct
  misc_feature 1..88: note = engineered ribonucleic acid scaffold (ERS) sequence
  source 1..88: mol_type = other DNA
acgaggtgttctatctgattactctgacacctctcaccagagactatgtcttatgggtaaagctccctcttcggagggagcatcagag

SEQ ID NO: 23213 - DNA, 88 bp, synthetic construct
  misc_feature 1..88: note = engineered ribonucleic acid scaffold (ERS) sequence
  source 1..88: mol_type = other DNA
acgggactttctatctgattactctgaagtccctcaccagagactatgtcttatgggtaaagctccctcttcggagggagcatcagag

SEQ ID NO: 23214 - DNA, 88 bp, synthetic construct
  misc_feature 1..88: note = engineered ribonucleic acid scaffold (ERS) sequence
  source 1..88: mol_type = other DNA
acgggcaattctatctgattactctgattgccctcaccagagactatgtcttatgggtaaagctccctcttcggagggagcatcagag

SEQ ID NO: 23215 - DNA, 88 bp, synthetic construct
  misc_feature 1..88: note = engineered ribonucleic acid scaffold (ERS) sequence
  source 1..88: mol_type = other DNA
actgtgcgttctatctgattactctgacgcacatcaccagagactatgtcttatgggtaaagctccctcttcggagggagcatcagag

SEQ ID NO: 23216 - DNA, 88 bp, synthetic construct
  misc_feature 1..88: note = engineered ribonucleic acid scaffold (ERS) sequence
  source 1..88: mol_type = other DNA
acacacggttctatctgattactctgaccgtgttcaccagggactatgtcctatgggtaaagctccctcttcggagggagcatcagag

SEQ ID NO: 23217 - DNA, 88 bp, synthetic construct
  misc_feature 1..88: note = engineered ribonucleic acid scaffold (ERS) sequence
  source 1..88: mol_type = other DNA
acactggtttctatctgattactctgaaccagttcaccagggactatgtcctatgggtaaagctccctcttcggagggagcatcagag

SEQ ID NO: 23218 - DNA, 88 bp, synthetic construct
  misc_feature 1..88: note = engineered ribonucleic acid scaffold (ERS) sequence
  source 1..88: mol_type = other DNA
acaggccgttctatctgattactctgacggccttcaccagggactatgtcctatgggtaaagctccctcttcggagggagcatcagag

SEQ ID NO: 23219 - DNA, 88 bp, synthetic construct
  misc_feature 1..88: note = engineered ribonucleic acid scaffold (ERS) sequence
  source 1..88: mol_type = other DNA
acaggtccttctatctgattactctgaggaccttcaccagggactatgtcctatgggtaaagctccctcttcggagggagcatcagag

SEQ ID NO: 23220 - DNA, 88 bp, synthetic construct
  misc_feature 1..88: note = engineered ribonucleic acid scaffold (ERS) sequence
  source 1..88: mol_type = other DNA
accagcaattctatctgattactctgattgctgtcaccagggactatgtcctatgggtaaagctccctcttcggagggagcatcagag

SEQ ID NO: 23221 - DNA, 88 bp, synthetic construct
  misc_feature 1..88: note = engineered ribonucleic acid scaffold (ERS) sequence
  source 1..88: mol_type = other DNA
accgagacttctatctgattactctgaggctcgtcaccagggactatgtcctatgggtaaagctccctcttcggagggagcatcagag

SEQ ID NO: 23222 - DNA, 88 bp, synthetic construct
  misc_feature 1..88: note = engineered ribonucleic acid scaffold (ERS) sequence
  source 1..88: mol_type = other DNA
acctgtagttctatctgattactctgactacagtcaccagggactatgtcctatgggtaaagctccctcttcggagggagcatcagag

SEQ ID NO: 23223 - DNA, 88 bp, synthetic construct
  misc_feature 1..88: note = engineered ribonucleic acid scaffold (ERS) sequence
  source 1..88: mol_type = other DNA
acgagcacttctatctgattactctgagggctctcaccagggactatgtcctatgggtaaagctccctcttcggagggagcatcagag

SEQ ID NO: 23224 - DNA, 88 bp, synthetic construct
  misc_feature 1..88: note = engineered ribonucleic acid scaffold (ERS) sequence
  source 1..88: mol_type = other DNA
acgaggtgttctatctgattactctgacacctctcaccagggactatgtcctatgggtaaagctccctcttcggagggagcatcagag

SEQ ID NO: 23225 - DNA, 88 bp, synthetic construct
  misc_feature 1..88: note = engineered ribonucleic acid scaffold (ERS) sequence
  source 1..88: mol_type = other DNA
acgggactttctatctgattactctgaagtccctcaccagggactatgtcctatgggtaaagctccctcttcggagggagcatcagag

SEQ ID NO: 23226 - DNA, 88 bp, synthetic construct
  misc_feature 1..88: note = engineered ribonucleic acid scaffold (ERS) sequence
  source 1..88: mol_type = other DNA
acgggcaattctatctgattactctgattgccctcaccagggactatgtcctatgggtaaagctccctcttcggagggagcatcagag

SEQ ID NO: 23227 - DNA, 88 bp, synthetic construct
  misc_feature 1..88: note = engineered ribonucleic acid scaffold (ERS) sequence
  source 1..88: mol_type = other DNA
actgtgcgttctatctgattactctgacgcacatcaccagggactatgtcctatgggtaaagctccctcttcggagggagcatcagag

SEQ ID NO: 23228 - DNA, 89 bp, synthetic construct
  misc_feature 1..89: note = engineered ribonucleic acid scaffold (ERS) sequence
  source 1..89: mol_type = other DNA
acacacggttctatctgattactctgaccgtgttcaccaggcactatgtgctattgggtaaagctccctcttcggagggagcatcagag

SEQ ID NO: 23229 - DNA, 89 bp, synthetic construct
  misc_feature 1..89: note = engineered ribonucleic acid scaffold (ERS) sequence
  source 1..89: mol_type = other DNA
acactggtttctatctgattactctgaaccagttcaccaggcactatgtgctattgggtaaagctccctcttcggagggagcatcagag

SEQ ID NO: 23230 - DNA, 89 bp, synthetic construct
  misc_feature 1..89: note = engineered ribonucleic acid scaffold (ERS) sequence
  source 1..89: mol_type = other DNA
acaggccgttctatctgattactctgacggccttcaccaggcactatgtgctattgggtaaagctccctcttcggagggagcatcagag

SEQ ID NO: 23231 - DNA, 89 bp, synthetic construct
  misc_feature 1..89: note = engineered ribonucleic acid scaffold (ERS) sequence
  source 1..89: mol_type = other DNA
acaggtccttctatctgattactctgaggaccttcaccaggcactatgtgctattgggtaaagctccctcttcggagggagcatcagag

SEQ ID NO: 23232 - DNA, 89 bp, synthetic construct
  misc_feature 1..89: note = engineered ribonucleic acid scaffold (ERS) sequence
  source 1..89: mol_type = other DNA
accagcaattctatctgattactctgattgctgtcaccaggcactatgtgctattgggtaaagctccctcttcggagggagcatcagag

SEQ ID NO: 23233 - DNA, 89 bp, synthetic construct
  misc_feature 1..89: note = engineered ribonucleic acid scaffold (ERS) sequence
  source 1..89: mol_type = other DNA
accgagacttctatctgattactctgaggctcgtcaccaggcactatgtgctattgggtaaagctccctcttcggagggagcatcagag

SEQ ID NO: 23234 - DNA, 89 bp, synthetic construct
  misc_feature 1..89: note = engineered ribonucleic acid scaffold (ERS) sequence
  source 1..89: mol_type = other DNA
acctgtagttctatctgattactctgactacagtcaccaggcactatgtgctattgggtaaagctccctcttcggagggagcatcagag

SEQ ID NO: 23235 - DNA, 89 bp, synthetic construct
  misc_feature 1..89: note = engineered ribonucleic acid scaffold (ERS) sequence
  source 1..89: mol_type = other DNA
acgagcacttctatctgattactctgagggctctcaccaggcactatgtgctattgggtaaagctccctcttcggagggagcatcagag

SEQ ID NO: 23236 - DNA, 89 bp, synthetic construct
  misc_feature 1..89: note = engineered ribonucleic acid scaffold (ERS) sequence
  source 1..89: mol_type = other DNA
acgaggtgttctatctgattactctgacacctctcaccaggcactatgtgctattgggtaaagctccctcttcggagggagcatcagag

SEQ ID NO: 23237 - DNA, 89 bp, synthetic construct
  misc_feature 1..89: note = engineered ribonucleic acid scaffold (ERS) sequence
  source 1..89: mol_type = other DNA
acgggactttctatctgattactctgaagtccctcaccaggcactatgtgctattgggtaaagctccctcttcggagggagcatcagag

SEQ ID NO: 23238 - DNA, 89 bp, synthetic construct
  misc_feature 1..89: note = engineered ribonucleic acid scaffold (ERS) sequence
  source 1..89: mol_type = other DNA
acgggcaattctatctgattactctgattgccctcaccaggcactatgtgctattgggtaaagctccctcttcggagggagcatcagag

SEQ ID NO: 23239 - DNA, 89 bp, synthetic construct
  misc_feature 1..89: note = engineered ribonucleic acid scaffold (ERS) sequence
  source 1..89: mol_type = other DNA
actgtgcgttctatctgattactctgacgcacatcaccaggcactatgtgctattgggtaaagctccctcttcggagggagcatcagag

SEQ ID NO: 23240 - DNA, 88 bp, synthetic construct
  misc_feature 1..88: note = engineered ribonucleic acid scaffold (ERS) sequence
  source 1..88: mol_type = other DNA
acacacggttctatctgattactctgaccgtgttcaccagccactatgtggtatgggtaaagctccctcttcggagggagcatcagag

SEQ ID NO: 23241 - DNA, 88 bp, synthetic construct
  misc_feature 1..88: note = engineered ribonucleic acid scaffold (ERS) sequence
  source 1..88: mol_type = other DNA
acactggtttctatctgattactctgaaccagttcaccagccactatgtggtatgggtaaagctccctcttcggagggagcatcagag

SEQ ID NO: 23242 - DNA, 88 bp, synthetic construct
  misc_feature 1..88: note = engineered ribonucleic acid scaffold (ERS) sequence
  source 1..88: mol_type = other DNA
acaggccgttctatctgattactctgacggccttcaccagccactatgtggtatgggtaaagctccctcttcggagggagcatcagag

SEQ ID NO: 23243 - DNA, 88 bp, synthetic construct
  misc_feature 1..88: note = engineered ribonucleic acid scaffold (ERS) sequence
  source 1..88: mol_type = other DNA
acaggtccttctatctgattactctgaggaccttcaccagccactatgtggtatgggtaaagctccctcttcggagggagcatcagag

SEQ ID NO: 23244 - DNA, 88 bp, synthetic construct
  misc_feature 1..88: note = engineered ribonucleic acid scaffold (ERS) sequence
  source 1..88: mol_type = other DNA
accagcaattctatctgattactctgattgctgtcaccagccactatgtggtatgggtaaagctccctcttcggagggagcatcagag

SEQ ID NO: 23245 - DNA, 88 bp, synthetic construct
  misc_feature 1..88: note = engineered ribonucleic acid scaffold (ERS) sequence
  source 1..88: mol_type = other DNA
accgagacttctatctgattactctgaggctcgtcaccagccactatgtggtatgggtaaagctccctcttcggagggagcatcagag

SEQ ID NO: 23246 - DNA, 88 bp, synthetic construct
  misc_feature 1..88: note = engineered ribonucleic acid scaffold (ERS) sequence
  source 1..88: mol_type = other DNA
acctgtagttctatctgattactctgactacagtcaccagccactatgtggtatgggtaaagctccctcttcggagggagcatcagag

SEQ ID NO: 23247 - DNA, 88 bp, synthetic construct
  misc_feature 1..88: note = engineered ribonucleic acid scaffold (ERS) sequence
  source 1..88: mol_type = other DNA
acgagcacttctatctgattactctgagggctctcaccagccactatgtggtatgggtaaagctccctcttcggagggagcatcagag

SEQ ID NO: 23248 - DNA, 88 bp, synthetic construct
  misc_feature 1..88: note = engineered ribonucleic acid scaffold (ERS) sequence
  source 1..88: mol_type = other DNA
acgaggtgttctatctgattactctgacacctctcaccagccactatgtggtatgggtaaagctccctcttcggagggagcatcagag

SEQ ID NO: 23249 - DNA, 88 bp, synthetic construct
  misc_feature 1..88: note = engineered ribonucleic acid scaffold (ERS) sequence
  source 1..88: mol_type = other DNA
acgggactttctatctgattactctgaagtccctcaccagccactatgtggtatgggtaaagctccctcttcggagggagcatcagag

SEQ ID NO: 23250 - DNA, 88 bp, synthetic construct
  misc_feature 1..88: note = engineered ribonucleic acid scaffold (ERS) sequence
  source 1..88: mol_type = other DNA
acgggcaattctatctgattactctgattgccctcaccagccactatgtggtatgggtaaagctccctcttcggagggagcatcagag

SEQ ID NO: 23251 - DNA, 88 bp, synthetic construct
  misc_feature 1..88: note = engineered ribonucleic acid scaffold (ERS) sequence
  source 1..88: mol_type = other DNA
actgtgcgttctatctgattactctgacgcacatcaccagccactatgtggtatgggtaaagctccctcttcggagggagcatcagag

SEQ ID NO: 23252 - DNA, 88 bp, synthetic construct
  misc_feature 1..88: note = engineered ribonucleic acid scaffold (ERS) sequence
  source 1..88: mol_type = other DNA
acacacggttctatctgattactctgaccgtgttcaccagctactatgtagtatgggtaaagctccctcttcggagggagcatcagag

SEQ ID NO: 23253 - DNA, 88 bp, synthetic construct
  misc_feature 1..88: note = engineered ribonucleic acid scaffold (ERS) sequence
  source 1..88: mol_type = other DNA
acactggtttctatctgattactctgaaccagttcaccagctactatgtagtatgggtaaagctccctcttcggagggagcatcagag

SEQ ID NO: 23254 - DNA, 88 bp, synthetic construct
  misc_feature 1..88: note = engineered ribonucleic acid scaffold (ERS) sequence
  source 1..88: mol_type = other DNA
acaggccgttctatctgattactctgacggccttcaccagctactatgtagtatgggtaaagctccctcttcggagggagcatcagag

SEQ ID NO: 23255 - DNA, 88 bp, synthetic construct
  misc_feature 1..88: note = engineered ribonucleic acid scaffold (ERS) sequence
  source 1..88: mol_type = other DNA
acaggtccttctatctgattactctgaggaccttcaccagctactatgtagtatgggtaaagctccctcttcggagggagcatcagag

SEQ ID NO: 23256 - DNA, 88 bp, synthetic construct
  misc_feature 1..88: note = engineered ribonucleic acid scaffold (ERS) sequence
  source 1..88: mol_type = other DNA
accagcaattctatctgattactctgattgctgtcaccagctactatgtagtatgggtaaagctccctcttcggagggagcatcagag

SEQ ID NO: 23257 - DNA, 88 bp, synthetic construct
  misc_feature 1..88: note = engineered ribonucleic acid scaffold (ERS) sequence
  source 1..88: mol_type = other DNA
accgagacttctatctgattactctgaggctcgtcaccagctactatgtagtatgggtaaagctccctcttcggagggagcatcagag

SEQ ID NO: 23258 - DNA, 88 bp, synthetic construct
  misc_feature 1..88: note = engineered ribonucleic acid scaffold (ERS) sequence
  source 1..88: mol_type = other DNA
acctgtagttctatctgattactctgactacagtcaccagctactatgtagtatgggtaaagctccctcttcggagggagcatcagag

SEQ ID NO: 23259 - DNA, 88 bp, synthetic construct
  misc_feature 1..88: note = engineered ribonucleic acid scaffold (ERS) sequence
  source 1..88: mol_type = other DNA
acgagcacttctatctgattactctgagggctctcaccagctactatgtagtatgggtaaagctccctcttcggagggagcatcagag

SEQ ID NO: 23260 - DNA, 88 bp, synthetic construct
  misc_feature 1..88: note = engineered ribonucleic acid scaffold (ERS) sequence
  source 1..88: mol_type = other DNA
acgaggtgttctatctgattactctgacacctctcaccagctactatgtagtatgggtaaagctccctcttcggagggagcatcagag

SEQ ID NO: 23261 - DNA, 88 bp, synthetic construct
  misc_feature 1..88: note = engineered ribonucleic acid scaffold (ERS) sequence
  source 1..88: mol_type = other DNA
acgggactttctatctgattactctgaagtccctcaccagctactatgtagtatgggtaaagctccctcttcggagggagcatcagag

SEQ ID NO: 23262 - DNA, 88 bp, synthetic construct
  misc_feature 1..88: note = engineered ribonucleic acid scaffold (ERS) sequence
  source 1..88: mol_type = other DNA
acgggcaattctatctgattactctgattgccctcaccagctactatgtagtatgggtaaagctccctcttcggagggagcatcagag

SEQ ID NO: 23263 - DNA, 88 bp, synthetic construct
  misc_feature 1..88: note = engineered ribonucleic acid scaffold (ERS) sequence
  source 1..88: mol_type = other DNA
actgtgcgttctatctgattactctgacgcacatcaccagctactatgtagtatgggtaaagctccctcttcggagggagcatcagag

SEQ ID NO: 23264 - DNA, 88 bp, synthetic construct
  misc_feature 1..88: note = engineered ribonucleic acid scaffold (ERS) sequence
  source 1..88: mol_type = other DNA
acacacggttctatctgattactctgaccgtgttcaccagcgattatgtcgtatgggtaaagctccctcttcggagggagcatcagag

SEQ ID NO: 23265 - DNA, 88 bp, synthetic construct
  misc_feature 1..88: note = engineered ribonucleic acid scaffold (ERS) sequence
  source 1..88: mol_type = other DNA
acactggtttctatctgattactctgaaccagttcaccagcgattatgtcgtatgggtaaagctccctcttcggagggagcatcagag

SEQ ID NO: 23266 - DNA, 88 bp, synthetic construct
  misc_feature 1..88: note = engineered ribonucleic acid scaffold (ERS) sequence
  source 1..88: mol_type = other DNA
acaggccgttctatctgattactctgacggccttcaccagcgattatgtcgtatgggtaaagctccctcttcggagggagcatcagag

SEQ ID NO: 23267 - DNA, 88 bp, synthetic construct
  misc_feature 1..88: note = engineered ribonucleic acid scaffold (ERS) sequence
  source 1..88: mol_type = other DNA
acaggtccttctatctgattactctgaggaccttcaccagcgattatgtcgtatgggtaaagctccctcttcggagggagcatcagag

SEQ ID NO: 23268 - DNA, 88 bp, synthetic construct
  misc_feature 1..88: note = engineered ribonucleic acid scaffold (ERS) sequence
  source 1..88: mol_type = other DNA
accagcaattctatctgattactctgattgctgtcaccagcgattatgtcgtatgggtaaagctccctcttcggagggagcatcagag

SEQ ID NO: 23269 - DNA, 88 bp, synthetic construct
  misc_feature 1..88: note = engineered ribonucleic acid scaffold (ERS) sequence
  source 1..88: mol_type = other DNA
accgagacttctatctgattactctgaggctcgtcaccagcgattatgtcgtatgggtaaagctccctcttcggagggagcatcagag

SEQ ID NO: 23270 - DNA, 88 bp, synthetic construct
  misc_feature 1..88: note = engineered ribonucleic acid scaffold (ERS) sequence
  source 1..88: mol_type = other DNA
acctgtagttctatctgattactctgactacagtcaccagcgattatgtcgtatgggtaaagctccctcttcggagggagcatcagag

SEQ ID NO: 23271 - DNA, 88 bp, synthetic construct
  misc_feature 1..88: note = engineered ribonucleic acid scaffold (ERS) sequence
  source 1..88: mol_type = other DNA
acgagcacttctatctgattactctgagggctctcaccagcgattatgtcgtatgggtaaagctccctcttcggagggagcatcagag

SEQ ID NO: 23272 - DNA, 88 bp, synthetic construct
  misc_feature 1..88: note = engineered ribonucleic acid scaffold (ERS) sequence
  source 1..88: mol_type = other DNA
acgaggtgttctatctgattactctgacacctctcaccagcgattatgtcgtatgggtaaagctccctcttcggagggagcatcagag

SEQ ID NO: 23273 - DNA, 88 bp, synthetic construct
  misc_feature 1..88: note = engineered ribonucleic acid scaffold (ERS) sequence
  source 1..88: mol_type = other DNA
acgggactttctatctgattactctgaagtccctcaccagcgattatgtcgtatgggtaaagctccctcttcggagggagcatcagag

SEQ ID NO: 23274 - DNA, 88 bp, synthetic construct
  misc_feature 1..88: note = engineered ribonucleic acid scaffold (ERS) sequence
  source 1..88: mol_type = other DNA
acgggcaattctatctgattactctgattgccctcaccagcgattatgtcgtatgggtaaagctccctcttcggagggagcatcagag

SEQ ID NO: 23275 - DNA, 88 bp, synthetic construct
  misc_feature 1..88: note = engineered ribonucleic acid scaffold (ERS) sequence
  source 1..88: mol_type = other DNA
actgtgcgttctatctgattactctgacgcacatcaccagcgattatgtcgtatgggtaaagctccctcttcggagggagcatcagag

SEQ ID NO: 23276 - DNA, 88 bp, synthetic construct
  misc_feature 1..88: note = engineered ribonucleic acid scaffold (ERS) sequence
  source 1..88: mol_type = other DNA
acacacggttctatctgattactctgaccgtgttcaccagcgacgatgtcgtatgggtaaagctccctcttcggagggagcatcagag

SEQ ID NO: 23277 - DNA, 88 bp, synthetic construct
  misc_feature 1..88: note = engineered ribonucleic acid scaffold (ERS) sequence
  source 1..88: mol_type = other DNA
acactggtttctatctgattactctgaaccagttcaccagcgacgatgtcgtatgggtaaagctccctcttcggagggagcatcagag

SEQ ID NO: 23278 - DNA, 88 bp, synthetic construct
  misc_feature 1..88: note = engineered ribonucleic acid scaffold (ERS) sequence
  source 1..88: mol_type = other DNA
acaggccgttctatctgattactctgacggccttcaccagcgacgatgtcgtatgggtaaagctccctcttcggagggagcatcagag

SEQ ID NO: 23279 - DNA, 88 bp, synthetic construct
  misc_feature 1..88: note = engineered ribonucleic acid scaffold (ERS) sequence
  source 1..88: mol_type = other DNA
acaggtccttctatctgattactctgaggaccttcaccagcgacgatgtcgtatgggtaaagctccctcttcggagggagcatcagag

SEQ ID NO: 23280 - DNA, 88 bp, synthetic construct
  misc_feature 1..88: note = engineered ribonucleic acid scaffold (ERS) sequence
  source 1..88: mol_type = other DNA
accagcaattctatctgattactctgattgctgtcaccagcgacgatgtcgtatgggtaaagctccctcttcggagggagcatcagag

SEQ ID NO: 23281 - DNA, 88 bp, synthetic construct
  misc_feature 1..88: note = engineered ribonucleic acid scaffold (ERS) sequence
  source 1..88: mol_type = other DNA
accgagacttctatctgattactctgaggctcgtcaccagcgacgatgtcgtatgggtaaagctccctcttcggagggagcatcagag

SEQ ID NO: 23282 - DNA, 88 bp, synthetic construct
  misc_feature 1..88: note = engineered ribonucleic acid scaffold (ERS) sequence
  source 1..88: mol_type = other DNA
acctgtagttctatctgattactctgactacagtcaccagcgacgatgtcgtatgggtaaagctccctcttcggagggagcatcagag

SEQ ID NO: 23283 - DNA, 88 bp, synthetic construct
  misc_feature 1..88: note = engineered ribonucleic acid scaffold (ERS) sequence
  source 1..88: mol_type = other DNA
acgagcacttctatctgattactctgagggctctcaccagcgacgatgtcgtatgggtaaagctccctcttcggagggagcatcagag

SEQ ID NO: 23284 - DNA, 88 bp, synthetic construct
  misc_feature 1..88: note = engineered ribonucleic acid scaffold (ERS) sequence
  source 1..88: mol_type = other DNA
acgaggtgttctatctgattactctgacacctctcaccagcgacgatgtcgtatgggtaaagctccctcttcggagggagcatcagag

SEQ ID NO: 23285 - DNA, 88 bp, synthetic construct
  misc_feature 1..88: note = engineered ribonucleic acid scaffold (ERS) sequence
  source 1..88: mol_type = other DNA
acgggactttctatctgattactctgaagtccctcaccagcgacgatgtcgtatgggtaaagctccctcttcggagggagcatcagag

SEQ ID NO: 23286 - DNA, 88 bp, synthetic construct
  misc_feature 1..88: note = engineered ribonucleic acid scaffold (ERS) sequence
  source 1..88: mol_type = other DNA
acgggcaattctatctgattactctgattgccctcaccagcgacgatgtcgtatgggtaaagctccctcttcggagggagcatcagag

SEQ ID NO: 23287 - DNA, 88 bp, synthetic construct
  misc_feature 1..88: note = engineered ribonucleic acid scaffold (ERS) sequence
  source 1..88: mol_type = other DNA
actgtgcgttctatctgattactctgacgcacatcaccagcgacgatgtcgtatgggtaaagctccctcttcggagggagcatcagag

SEQ ID NO: 23288 - DNA, 88 bp, synthetic construct
  misc_feature 1..88: note = engineered ribonucleic acid scaffold (ERS) sequence
  source 1..88: mol_type = other DNA
acacacggttctatctgattactctgaccgtgttcaccagcgactctgtcgtatgggtaaagctccctcttcggagggagcatcagag

SEQ ID NO: 23289 - DNA, 88 bp, synthetic construct
  misc_feature 1..88: note = engineered ribonucleic acid scaffold (ERS) sequence
  source 1..88: mol_type = other DNA
acactggtttctatctgattactctgaaccagttcaccagcgactctgtcgtatgggtaaagctccctcttcggagggagcatcagag

SEQ ID NO: 23290 - DNA, 88 bp, synthetic construct
  misc_feature 1..88: note = engineered ribonucleic acid scaffold (ERS) sequence
  source 1..88: mol_type = other DNA
acaggccgttctatctgattactctgacggccttcaccagcgactctgtcgtatgggtaaagctccctcttcggagggagcatcagag

SEQ ID NO: 23291 - DNA, 88 bp, synthetic construct
  misc_feature 1..88: note = engineered ribonucleic acid scaffold (ERS) sequence
  source 1..88: mol_type = other DNA
acaggtccttctatctgattactctgaggaccttcaccagcgactctgtcgtatgggtaaagctccctcttcggagggagcatcagag

SEQ ID NO: 23292 - DNA, 88 bp, synthetic construct
  misc_feature 1..88: note = engineered ribonucleic acid scaffold (ERS) sequence
  source 1..88: mol_type = other DNA
accagcaattctatctgattactctgattgctgtcaccagcgactctgtcgtatgggtaaagctccctcttcggagggagcatcagag

SEQ ID NO: 23293 - DNA, 88 bp, synthetic construct
  misc_feature 1..88: note = engineered ribonucleic acid scaffold (ERS) sequence
  source 1..88: mol_type = other DNA
accgagacttctatctgattactctgaggctcgtcaccagcgactctgtcgtatgggtaaagctccctcttcggagggagcatcagag

SEQ ID NO: 23294 - DNA, 88 bp, synthetic construct
  misc_feature 1..88: note = engineered ribonucleic acid scaffold (ERS) sequence
  source 1..88: mol_type = other DNA
acctgtagttctatctgattactctgactacagtcaccagcgactctgtcgtatgggtaaagctccctcttcggagggagcatcagag

SEQ ID NO: 23295 - DNA, 88 bp, synthetic construct
  misc_feature 1..88: note = engineered ribonucleic acid scaffold (ERS) sequence
  source 1..88: mol_type = other DNA
acgagcacttctatctgattactctgagggctctcaccagcgactctgtcgtatgggtaaagctccctcttcggagggagcatcagag

SEQ ID NO: 23296 - DNA, 88 bp, synthetic construct
  misc_feature 1..88: note = engineered ribonucleic acid scaffold (ERS) sequence
  source 1..88: mol_type = other DNA
acgaggtgttctatctgattactctgacacctctcaccagcgactctgtcgtatgggtaaagctccctcttcggagggagcatcagag

SEQ ID NO: 23297 - DNA, 88 bp, synthetic construct
  misc_feature 1..88: note = engineered ribonucleic acid scaffold (ERS) sequence
  source 1..88: mol_type = other DNA
acgggactttctatctgattactctgaagtccctcaccagcgactctgtcgtatgggtaaagctccctcttcggagggagcatcagag

SEQ ID NO: 23298 - DNA, 88 bp, synthetic construct
  misc_feature 1..88: note = engineered ribonucleic acid scaffold (ERS) sequence
  source 1..88: mol_type = other DNA
acgggcaattctatctgattactctgattgccctcaccagcgactctgtcgtatgggtaaagctccctcttcggagggagcatcagag

SEQ ID NO: 23299 - DNA, 88 bp, synthetic construct
  misc_feature 1..88: note = engineered ribonucleic acid scaffold (ERS) sequence
  source 1..88: mol_type = other DNA
actgtgcgttctatctgattactctgacgcacatcaccagcgactctgtcgtatgggtaaagctccctcttcggagggagcatcagag

SEQ ID NO: 23300 - DNA, 88 bp, synthetic construct
  misc_feature 1..88: note = engineered ribonucleic acid scaffold (ERS) sequence
  source 1..88: mol_type = other DNA
acacacggttctatctgattactctgaccgtgttcaccagcgactatgtcgtgtgggtaaagctccctcttcggagggagcatcagag

SEQ ID NO: 23301 - DNA, 88 bp, synthetic construct
  misc_feature 1..88: note = engineered ribonucleic acid scaffold (ERS) sequence
  source 1..88: mol_type = other DNA
acactggtttctatctgattactctgaaccagttcaccagcgactatgtcgtgtgggtaaagctccctcttcggagggagcatcagag

SEQ ID NO: 23302 - DNA, 88 bp, synthetic construct
  misc_feature 1..88: note = engineered ribonucleic acid scaffold (ERS) sequence
  source 1..88: mol_type = other DNA
acaggccgttctatctgattactctgacggccttcaccagcgactatgtcgtgtgggtaaagctccctcttcggagggagcatcagag

SEQ ID NO: 23303 - DNA, 88 bp, synthetic construct
  misc_feature 1..88: note = engineered ribonucleic acid scaffold (ERS) sequence
  source 1..88: mol_type = other DNA
acaggtccttctatctgattactctgaggaccttcaccagcgactatgtcgtgtgggtaaagctccctcttcggagggagcatcagag

SEQ ID NO: 23304 - DNA, 88 bp, synthetic construct
  misc_feature 1..88: note = engineered ribonucleic acid scaffold (ERS) sequence
  source 1..88: mol_type = other DNA
accagcaattctatctgattactctgattgctgtcaccagcgactatgtcgtgtgggtaaagctccctcttcggagggagcatcagag

SEQ ID NO: 23305 - DNA, 88 bp, synthetic construct
  misc_feature 1..88: note = engineered ribonucleic acid scaffold (ERS) sequence
  source 1..88: mol_type = other DNA
accgagacttctatctgattactctgaggctcgtcaccagcgactatgtcgtgtgggtaaagctccctcttcggagggagcatcagag

SEQ ID NO: 23306 - DNA, 88 bp, synthetic construct
  misc_feature 1..88: note = engineered ribonucleic acid scaffold (ERS) sequence
  source 1..88: mol_type = other DNA
acctgtagttctatctgattactctgactacagtcaccagcgactatgtcgtgtgggtaaagctccctcttcggagggagcatcagag

SEQ ID NO: 23307 - DNA, 88 bp, synthetic construct
  misc_feature 1..88: note = engineered ribonucleic acid scaffold (ERS) sequence
  source 1..88: mol_type = other DNA
acgagcacttctatctgattactctgagggctctcaccagcgactatgtcgtgtgggtaaagctccctcttcggagggagcatcagag

SEQ ID NO: 23308 - DNA, 88 bp, synthetic construct
  misc_feature 1..88: note = engineered ribonucleic acid scaffold (ERS) sequence
  source 1..88: mol_type = other DNA
acgaggtgttctatctgattactctgacacctctcaccagcgactatgtcgtgtgggtaaagctccctcttcggagggagcatcagag

SEQ ID NO: 23309 - DNA, 88 bp, synthetic construct
  misc_feature 1..88: note = engineered ribonucleic acid scaffold (ERS) sequence
  source 1..88: mol_type = other DNA
acgggactttctatctgattactctgaagtccctcaccagcgactatgtcgtgtgggtaaagctccctcttcggagggagcatcagag

SEQ ID NO: 23310 - DNA, 88 bp, synthetic construct
  misc_feature 1..88: note = engineered ribonucleic acid scaffold (ERS) sequence
  source 1..88: mol_type = other DNA
acgggcaattctatctgattactctgattgccctcaccagcgactatgtcgtgtgggtaaagctccctcttcggagggagcatcagag

SEQ ID NO: 23311 - DNA, 88 bp, synthetic construct
  misc_feature 1..88: note = engineered ribonucleic acid scaffold (ERS) sequence
  source 1..88: mol_type = other DNA
actgtgcgttctatctgattactctgacgcacatcaccagcgactatgtcgtgtgggtaaagctccctcttcggagggagcatcagag

SEQ ID NO: 23312 - DNA, 89 bp, synthetic construct; identical to SEQ ID NO: 666
  misc_feature 1..89: note = engineered ribonucleic acid scaffold (ERS) sequence
  source 1..89: mol_type = other DNA

SEQ ID NO: 23313 - DNA, 89 bp, synthetic construct; identical to SEQ ID NO: 664
  misc_feature 1..89: note = engineered ribonucleic acid scaffold (ERS) sequence
  source 1..89: mol_type = other DNA

SEQ ID NO: 23314 - DNA, 89 bp, synthetic construct; identical to SEQ ID NO: 665
  misc_feature 1..89: note = engineered ribonucleic acid scaffold (ERS) sequence
  source 1..89: mol_type = other DNA

SEQ ID NO: 23315 - DNA, 89 bp, synthetic construct; identical to SEQ ID NO: 671
  misc_feature 1..89: note = engineered ribonucleic acid scaffold (ERS) sequence
  source 1..89: mol_type = other DNA

SEQ ID NO: 23316 - DNA, 89 bp, synthetic construct; identical to SEQ ID NO: 662
  misc_feature 1..89: note = engineered ribonucleic acid scaffold (ERS) sequence
  source 1..89: mol_type = other DNA

SEQ ID NO: 23317 - DNA, 89 bp, synthetic construct; identical to SEQ ID NO: 663
  misc_feature 1..89: note = engineered ribonucleic acid scaffold (ERS) sequence
  source 1..89: mol_type = other DNA

SEQ ID NO: 23318 - DNA, 89 bp, synthetic construct; identical to SEQ ID NO: 661
  misc_feature 1..89: note = engineered ribonucleic acid scaffold (ERS) sequence
  source 1..89: mol_type = other DNA

SEQ ID NO: 23319 - DNA, 89 bp, synthetic construct; identical to SEQ ID NO: 669
  misc_feature 1..89: note = engineered ribonucleic acid scaffold (ERS) sequence
  source 1..89: mol_type = other DNA

SEQ ID NO: 23320 - DNA, 89 bp, synthetic construct; identical to SEQ ID NO: 672
  misc_feature 1..89: note = engineered ribonucleic acid scaffold (ERS) sequence
  source 1..89: mol_type = other DNA

SEQ ID NO: 23321 - DNA, 89 bp, synthetic construct; identical to SEQ ID NO: 667
  misc_feature 1..89: note = engineered ribonucleic acid scaffold (ERS) sequence
  source 1..89: mol_type = other DNA

SEQ ID NO: 23322 - DNA, 89 bp, synthetic construct; identical to SEQ ID NO: 668
  misc_feature 1..89: note = engineered ribonucleic acid scaffold (ERS) sequence
  source 1..89: mol_type = other DNA

SEQ ID NO: 23323 - DNA, 89 bp, synthetic construct; identical to SEQ ID NO: 670
  misc_feature 1..89: note = engineered ribonucleic acid scaffold (ERS) sequence
  source 1..89: mol_type = other DNA

SEQ ID NO: 23324 - DNA, 89 bp, synthetic construct
  misc_feature 1..89: note = engineered ribonucleic acid scaffold (ERS) sequence
  source 1..89: mol_type = other DNA
acacacggttctatctgattactctgaccgtgttcaccagcgactatgtcgtattgggtaaagctccctcttcggagggagcatcagag

SEQ ID NO: 23325 - DNA, 89 bp, synthetic construct
  misc_feature 1..89: note = engineered ribonucleic acid scaffold (ERS) sequence
  source 1..89: mol_type = other DNA
acactggtttctatctgattactctgaaccagttcaccagcgactatgtcgtattgggtaaagctccctcttcggagggagcatcagag

SEQ ID NO: 23326 - DNA, 89 bp, synthetic construct
  misc_feature 1..89: note = engineered ribonucleic acid scaffold (ERS) sequence
  source 1..89: mol_type = other DNA
acaggccgttctatctgattactctgacggccttcaccagcgactatgtcgtattgggtaaagctccctcttcggagggagcatcagag

SEQ ID NO: 23327 - DNA, 89 bp, synthetic construct
  misc_feature 1..89: note = engineered ribonucleic acid scaffold (ERS) sequence
  source 1..89: mol_type = other DNA
acaggtccttctatctgattactctgaggaccttcaccagcgactatgtcgtattgggtaaagctccctcttcggagggagcatcagag

SEQ ID NO: 23328 - DNA, 89 bp, synthetic construct
  misc_feature 1..89: note = engineered ribonucleic acid scaffold (ERS) sequence
  source 1..89: mol_type = other DNA
accagcaattctatctgattactctgattgctgtcaccagcgactatgtcgtattgggtaaagctccctcttcggagggagcatcagag

SEQ ID NO: 23329 - DNA, 89 bp, synthetic construct
  misc_feature 1..89: note = engineered ribonucleic acid scaffold (ERS) sequence
  source 1..89: mol_type = other DNA
accgagacttctatctgattactctgaggctcgtcaccagcgactatgtcgtattgggtaaagctccctcttcggagggagcatcagag

SEQ ID NO: 23330 - DNA, 89 bp, synthetic construct
  misc_feature 1..89: note = engineered ribonucleic acid scaffold (ERS) sequence
  source 1..89: mol_type = other DNA
acctgtagttctatctgattactctgactacagtcaccagcgactatgtcgtattgggtaaagctccctcttcggagggagcatcagag

SEQ ID NO: 23331 - DNA, 89 bp, synthetic construct
  misc_feature 1..89: note = engineered ribonucleic acid scaffold (ERS) sequence
  source 1..89: mol_type = other DNA
acgagcacttctatctgattactctgagggctctcaccagcgactatgtcgtattgggtaaagctccctcttcggagggagcatcagag

SEQ ID NO: 23332 - DNA, 89 bp, synthetic construct
  misc_feature 1..89: note = engineered ribonucleic acid scaffold (ERS) sequence
  source 1..89: mol_type = other DNA
acgaggtgttctatctgattactctgacacctctcaccagcgactatgtcgtattgggtaaagctccctcttcggagggagcatcagag

SEQ ID NO: 23333 - DNA, 89 bp, synthetic construct
  misc_feature 1..89: note = engineered ribonucleic acid scaffold (ERS) sequence
  source 1..89: mol_type = other DNA
acgggactttctatctgattactctgaagtccctcaccagcgactatgtcgtattgggtaaagctccctcttcggagggagcatcagag

SEQ ID NO: 23334 - DNA, 89 bp, synthetic construct
  misc_feature 1..89: note = engineered ribonucleic acid scaffold (ERS) sequence
  source 1..89: mol_type = other DNA
acgggcaattctatctgattactctgattgccctcaccagcgactatgtcgtattgggtaaagctccctcttcggagggagcatcagag

SEQ ID NO: 23335 - DNA, 89 bp, synthetic construct
  misc_feature 1..89: note = engineered ribonucleic acid scaffold (ERS) sequence
  source 1..89: mol_type = other DNA
actgtgcgttctatctgattactctgacgcacatcaccagcgactatgtcgtattgggtaaagctccctcttcggagggagcatcagag

SEQ ID NO: 23336 - DNA, 89 bp, synthetic construct
  misc_feature 1..89: note = engineered ribonucleic acid scaffold (ERS) sequence
  source 1..89: mol_type = other DNA
acacacggttctatctgattactctgaccgtgttcaccagcgactatgtcgtatggagtaaagctccctcttcggagggagcatcagag

SEQ ID NO: 23337 - DNA, 89 bp, synthetic construct
  misc_feature 1..89: note = engineered ribonucleic acid scaffold (ERS) sequence
  source 1..89: mol_type = other DNA
acactggtttctatctgattactctgaaccagttcaccagcgactatgtcgtatggagtaaagctccctcttcggagggagcatcagag

SEQ ID NO: 23338 - DNA, 89 bp, synthetic construct
  misc_feature 1..89: note = engineered ribonucleic acid scaffold (ERS) sequence
  source 1..89: mol_type = other DNA
acaggccgttctatctgattactctgacggccttcaccagcgactatgtcgtatggagtaaagctccctcttcggagggagcatcagag

SEQ ID NO: 23339 - DNA, 89 bp, synthetic construct
  misc_feature 1..89: note = engineered ribonucleic acid scaffold (ERS) sequence
  source 1..89: mol_type = other DNA
acaggtccttctatctgattactctgaggaccttcaccagcgactatgtcgtatggagtaaagctccctcttcggagggagcatcagag

SEQ ID NO: 23340 - DNA, 89 bp, synthetic construct
  misc_feature 1..89: note = engineered ribonucleic acid scaffold (ERS) sequence
  source 1..89: mol_type = other DNA
accagcaattctatctgattactctgattgctgtcaccagcgactatgtcgtatggagtaaagctccctcttcggagggagcatcagag

SEQ ID NO: 23341 - DNA, 89 bp, synthetic construct
  misc_feature 1..89: note = engineered ribonucleic acid scaffold (ERS) sequence
  source 1..89: mol_type = other DNA
accgagacttctatctgattactctgaggctcgtcaccagcgactatgtcgtatggagtaaagctccctcttcggagggagcatcagag

SEQ ID NO: 23342 - DNA, 89 bp, synthetic construct
  misc_feature 1..89: note = engineered ribonucleic acid scaffold (ERS) sequence
  source 1..89: mol_type = other DNA
acctgtagttctatctgattactctgactacagtcaccagcgactatgtcgtatggagtaaagctccctcttcggagggagcatcagag

SEQ ID NO: 23343 - DNA, 89 bp, synthetic construct
  misc_feature 1..89: note = engineered ribonucleic acid scaffold (ERS) sequence
  source 1..89: mol_type = other DNA
acgagcacttctatctgattactctgagggctctcaccagcgactatgtcgtatggagtaaagctccctcttcggagggagcatcagag

SEQ ID NO: 23344 - DNA, 89 bp, synthetic construct
  misc_feature 1..89: note = engineered ribonucleic acid scaffold (ERS) sequence
  source 1..89: mol_type = other DNA
acgaggtgttctatctgattactctgacacctctcaccagcgactatgtcgtatggagtaaagctccctcttcggagggagcatcagag

SEQ ID NO: 23345 - DNA, 89 bp, synthetic construct
  misc_feature 1..89: note = engineered ribonucleic acid scaffold (ERS) sequence
  source 1..89: mol_type = other DNA
acgggactttctatctgattactctgaagtccctcaccagcgactatgtcgtatggagtaaagctccctcttcggagggagcatcagag

SEQ ID NO: 23346 - DNA, 89 bp, synthetic construct
  misc_feature 1..89: note = engineered ribonucleic acid scaffold (ERS) sequence
  source 1..89: mol_type = other DNA
acgggcaattctatctgattactctgattgccctcaccagcgactatgtcgtatggagtaaagctccctcttcggagggagcatcagag

SEQ ID NO: 23347 - DNA, 89 bp, synthetic construct
  misc_feature 1..89: note = engineered ribonucleic acid scaffold (ERS) sequence
  source 1..89: mol_type = other DNA
actgtgcgttctatctgattactctgacgcacatcaccagcgactatgtcgtatggagtaaagctccctcttcggagggagcatcagag

SEQ ID NO: 23348 - DNA, 89 bp, synthetic construct
  misc_feature 1..89: note = engineered ribonucleic acid scaffold (ERS) sequence
  source 1..89: mol_type = other DNA
acacacggttctatctgattactctgaccgtgttcaccagcgactatgtcgtatggcgtaaagctccctcttcggagggagcatcagag

SEQ ID NO: 23349 - DNA, 89 bp, synthetic construct
  misc_feature 1..89: note = engineered ribonucleic acid scaffold (ERS) sequence
  source 1..89: mol_type = other DNA
acactggtttctatctgattactctgaaccagttcaccagcgactatgtcgtatggcgtaaagctccctcttcggagggagcatcagag

SEQ ID NO: 23350 - DNA, 89 bp, synthetic construct
  misc_feature 1..89: note = engineered ribonucleic acid scaffold (ERS) sequence
  source 1..89: mol_type = other DNA
acaggccgttctatctgattactctgacggccttcaccagcgactatgtcgtatggcgtaaagctccctcttcggagggagcatcagag

SEQ ID NO: 23351 - DNA, 89 bp, synthetic construct
  misc_feature 1..89: note = engineered ribonucleic acid scaffold (ERS) sequence
  source 1..89: mol_type = other DNA
acaggtccttctatctgattactctgaggaccttcaccagcgactatgtcgtatggcgtaaagctccctcttcggagggagcatcagag

SEQ ID NO: 23352 - DNA, 89 bp, synthetic construct
  misc_feature 1..89: note = engineered ribonucleic acid scaffold (ERS) sequence
  source 1..89: mol_type = other DNA
accagcaattctatctgattactctgattgctgtcaccagcgactatgtcgtatggcgtaaagctccctcttcggagggagcatcagag

SEQ ID NO: 23353 - DNA, 89 bp, synthetic construct
  misc_feature 1..89: note = engineered ribonucleic acid scaffold (ERS) sequence
  source 1..89: mol_type = other DNA
accgagacttctatctgattactctgaggctcgtcaccagcgactatgtcgtatggcgtaaagctccctcttcggagggagcatcagag

SEQ ID NO: 23354 - DNA, 89 bp, synthetic construct
  misc_feature 1..89: note = engineered ribonucleic acid scaffold (ERS) sequence
  source 1..89: mol_type = other DNA
acctgtagttctatctgattactctgactacagtcaccagcgactatgtcgtatggcgtaaagctccctcttcggagggagcatcagag

SEQ ID NO: 23355 - DNA, 89 bp, synthetic construct
  misc_feature 1..89: note = engineered ribonucleic acid scaffold (ERS) sequence
  source 1..89: mol_type = other DNA
acgagcacttctatctgattactctgagggctctcaccagcgactatgtcgtatggcgtaaagctccctcttcggagggagcatcagag

SEQ ID NO: 23356 - DNA, 89 bp, synthetic construct
  misc_feature 1..89: note = engineered ribonucleic acid scaffold (ERS) sequence
  source 1..89: mol_type = other DNA
acgaggtgttctatctgattactctgacacctctcaccagcgactatgtcgtatggcgtaaagctccctcttcggagggagcatcagag

SEQ ID NO: 23357 - DNA, 89 bp, synthetic construct
  misc_feature 1..89: note = engineered ribonucleic acid scaffold (ERS) sequence
  source 1..89: mol_type = other DNA
acgggactttctatctgattactctgaagtccctcaccagcgactatgtcgtatggcgtaaagctccctcttcggagggagcatcagag

SEQ ID NO: 23358 - DNA, 89 bp, synthetic construct
  misc_feature 1..89: note = engineered ribonucleic acid scaffold (ERS) sequence
  source 1..89: mol_type = other DNA
acgggcaattctatctgattactctgattgccctcaccagcgactatgtcgtatggcgtaaagctccctcttcggagggagcatcagag

SEQ ID NO: 23359 - DNA, 89 bp, synthetic construct
  misc_feature 1..89: note = engineered ribonucleic acid scaffold (ERS) sequence
  source 1..89: mol_type = other DNA
actgtgcgttctatctgattactctgacgcacatcaccagcgactatgtcgtatggcgtaaagctccctcttcggagggagcatcagag

SEQ ID NO: 23360 - DNA, 89 bp, synthetic construct
  misc_feature 1..89: note = engineered ribonucleic acid scaffold (ERS) sequence
  source 1..89: mol_type = other DNA
acacacggttctatctgattactctgaccgtgttcaccagcgactatgtcgtatggtgtaaagctccctcttcggagggagcatcagag

SEQ ID NO: 23361 - DNA, 89 bp, synthetic construct
  misc_feature 1..89: note = engineered ribonucleic acid scaffold (ERS) sequence
  source 1..89: mol_type = other DNA
acactggtttctatctgattactctgaaccagttcaccagcgactatgtcgtatggtgtaaagctccctcttcggagggagcatcagag

SEQ ID NO: 23362 - DNA, 89 bp, synthetic construct
  misc_feature 1..89: note = engineered ribonucleic acid scaffold (ERS) sequence
  source 1..89: mol_type = other DNA
acaggccgttctatctgattactctgacggccttcaccagcgactatgtcgtatggtgtaaagctccctcttcggagggagcatcagag

SEQ ID NO: 23363 - DNA, 89 bp, synthetic construct
  misc_feature 1..89: note = engineered ribonucleic acid scaffold (ERS) sequence
  source 1..89: mol_type = other DNA
acaggtccttctatctgattactctgaggaccttcaccagcgactatgtcgtatggtgtaaagctccctcttcggagggagcatcagag

SEQ ID NO: 23364 - DNA, 89 bp, synthetic construct
  misc_feature 1..89: note = engineered ribonucleic acid scaffold (ERS) sequence
  source 1..89: mol_type = other DNA
accagcaattctatctgattactctgattgctgtcaccagcgactatgtcgtatggtgtaaagctccctcttcggagggagcatcagag

SEQ ID NO: 23365 - DNA, 89 bp, synthetic construct
  misc_feature 1..89: note = engineered ribonucleic acid scaffold (ERS) sequence
  source 1..89: mol_type = other DNA
accgagacttctatctgattactctgaggctcgtcaccagcgactatgtcgtatggtgtaaagctccctcttcggagggagcatcagag

SEQ ID NO: 23366 - DNA, 89 bp, synthetic construct
  misc_feature 1..89: note = engineered ribonucleic acid scaffold (ERS) sequence
  source 1..89: mol_type = other DNA
acctgtagttctatctgattactctgactacagtcaccagcgactatgtcgtatggtgtaaagctccctcttcggagggagcatcagag

SEQ ID NO: 23367 - DNA, 89 bp, synthetic construct
  misc_feature 1..89: note = engineered ribonucleic acid scaffold (ERS) sequence
  source 1..89: mol_type = other DNA
acgagcacttctatctgattactctgagggctctcaccagcgactatgtcgtatggtgtaaagctccctcttcggagggagcatcagag

SEQ ID NO: 23368 - DNA, 89 bp, synthetic construct
  misc_feature 1..89: note = engineered ribonucleic acid scaffold (ERS) sequence
  source 1..89: mol_type = other DNA
acgaggtgttctatctgattactctgacacctctcaccagcgactatgtcgtatggtgtaaagctccctcttcggagggagcatcagag

SEQ ID NO: 23369 - DNA, 89 bp, synthetic construct
  misc_feature 1..89: note = engineered ribonucleic acid scaffold (ERS) sequence
  source 1..89: mol_type = other DNA
acgggactttctatctgattactctgaagtccctcaccagcgactatgtcgtatggtgtaaagctccctcttcggagggagcatcagag

SEQ ID NO: 23370 - DNA, 89 bp, synthetic construct
  misc_feature 1..89: note = engineered ribonucleic acid scaffold (ERS) sequence
  source 1..89: mol_type = other DNA
acgggcaattctatctgattactctgattgccctcaccagcgactatgtcgtatggtgtaaagctccctcttcggagggagcatcagag

SEQ ID NO: 23371 - DNA, 89 bp, synthetic construct
  misc_feature 1..89: note = engineered ribonucleic acid scaffold (ERS) sequence
  source 1..89: mol_type = other DNA
actgtgcgttctatctgattactctgacgcacatcaccagcgactatgtcgtatggtgtaaagctccctcttcggagggagcatcagag

SEQ ID NO: 23372 - DNA, 89 bp, synthetic construct
  misc_feature 1..89: note = engineered ribonucleic acid scaffold (ERS) sequence
  source 1..89: mol_type = other DNA
acacacggttctatctgattactctgaccgtgttcaccagcgactatgtcgtatgggctaaagctccctcttcggagggagcatcagag

SEQ ID NO: 23373 - DNA, 89 bp, synthetic construct
  misc_feature 1..89: note = engineered ribonucleic acid scaffold (ERS) sequence
  source 1..89: mol_type = other DNA
acactggtttctatctgattactctgaaccagttcaccagcgactatgtcgtatgggctaaagctccctcttcggagggagcatcagag

SEQ ID NO: 23374 - DNA, 89 bp, synthetic construct
  misc_feature 1..89: note = engineered ribonucleic acid scaffold (ERS) sequence
  source 1..89: mol_type = other DNA
acaggccgttctatctgattactctgacggccttcaccagcgactatgtcgtatgggctaaagctccctcttcggagggagcatcagag

SEQ ID NO: 23375 - DNA, 89 bp, synthetic construct
  misc_feature 1..89: note = engineered ribonucleic acid scaffold (ERS) sequence
  source 1..89: mol_type = other DNA
acaggtccttctatctgattactctgaggaccttcaccagcgactatgtcgtatgggctaaagctccctcttcggagggagcatcagag

SEQ ID NO: 23376 - DNA, 89 bp, synthetic construct
  misc_feature 1..89: note = engineered ribonucleic acid scaffold (ERS) sequence
  source 1..89: mol_type = other DNA
accagcaattctatctgattactctgattgctgtcaccagcgactatgtcgtatgggctaaagctccctcttcggagggagcatcagag

SEQ ID NO: 23377 - DNA, 89 bp, synthetic construct
  misc_feature 1..89: note = engineered ribonucleic acid scaffold (ERS) sequence
  source 1..89: mol_type = other DNA
accgagacttctatctgattactctgaggctcgtcaccagcgactatgtcgtatgggctaaagctccctcttcggagggagcatcagag

SEQ ID NO: 23378 - DNA, 89 bp, synthetic construct
  misc_feature 1..89: note = engineered ribonucleic acid scaffold (ERS) sequence
  source 1..89: mol_type = other DNA
acctgtagttctatctgattactctgactacagtcaccagcgactatgtcgtatgggctaaagctccctcttcggagggagcatcagag

SEQ ID NO: 23379 - DNA, 89 bp, synthetic construct
  misc_feature 1..89: note = engineered ribonucleic acid scaffold (ERS) sequence
  source 1..89: mol_type = other DNA
acgagcacttctatctgattactctgagggctctcaccagcgactatgtcgtatgggctaaagctccctcttcggagggagcatcagag

SEQ ID NO: 23380 - DNA, 89 bp, synthetic construct
  misc_feature 1..89: note = engineered ribonucleic acid scaffold (ERS) sequence
  source 1..89: mol_type = other DNA
acgaggtgttctatctgattactctgacacctctcaccagcgactatgtcgtatgggctaaagctccctcttcggagggagcatcagag

SEQ ID NO: 23381 - DNA, 89 bp, synthetic construct
  misc_feature 1..89: note = engineered ribonucleic acid scaffold (ERS) sequence
  source 1..89: mol_type = other DNA
acgggactttctatctgattactctgaagtccctcaccagcgactatgtcgtatgggctaaagctccctcttcggagggagcatcagag

SEQ ID NO: 23382 - DNA, 89 bp, synthetic construct
  misc_feature 1..89: note = engineered ribonucleic acid scaffold (ERS) sequence
  source 1..89: mol_type = other DNA
acgggcaattctatctgattactctgattgccctcaccagcgactatgtcgtatgggctaaagctccctcttcggagggagcatcagag

SEQ ID NO: 23383 - DNA, 89 bp, synthetic construct
  misc_feature 1..89: note = engineered ribonucleic acid scaffold (ERS) sequence
  source 1..89: mol_type = other DNA
actgtgcgttctatctgattactctgacgcacatcaccagcgactatgtcgtatgggctaaagctccctcttcggagggagcatcagag

SEQ ID NO: 23384 - DNA, 86 bp, synthetic construct
  misc_feature 1..86: note = engineered ribonucleic acid scaffold (ERS) sequence
  source 1..86: mol_type = other DNA
acacacggttctatctgattactctgaccgtgttcaccagcgactatgtcgtatgggtagctccctcttcggagggagcatcagag

SEQ ID NO: 23385 - DNA, 86 bp, synthetic construct
  misc_feature 1..86: note = engineered ribonucleic acid scaffold (ERS) sequence
  source 1..86: mol_type = other DNA
acactggtttctatctgattactctgaaccagttcaccagcgactatgtcgtatgggtagctccctcttcggagggagcatcagag

SEQ ID NO: 23386 - DNA, 86 bp, synthetic construct
  misc_feature 1..86: note = engineered ribonucleic acid scaffold (ERS) sequence
  source 1..86: mol_type = other DNA
acaggccgttctatctgattactctgacggccttcaccagcgactatgtcgtatgggtagctccctcttcggagggagcatcagag

SEQ ID NO: 23387 - DNA, 86 bp, synthetic construct
  misc_feature 1..86: note = engineered ribonucleic acid scaffold (ERS) sequence
  source 1..86: mol_type = other DNA
acaggtccttctatctgattactctgaggaccttcaccagcgactatgtcgtatgggtagctccctcttcggagggagcatcagag

SEQ ID NO: 23388 - DNA, 86 bp, synthetic construct
  misc_feature 1..86: note = engineered ribonucleic acid scaffold (ERS) sequence
  source 1..86: mol_type = other DNA
accagcaattctatctgattactctgattgctgtcaccagcgactatgtcgtatgggtagctccctcttcggagggagcatcagag

SEQ ID NO: 23389 - DNA, 86 bp, synthetic construct
  misc_feature 1..86: note = engineered ribonucleic acid scaffold (ERS) sequence
  source 1..86: mol_type = other DNA
accgagacttctatctgattactctgaggctcgtcaccagcgactatgtcgtatgggtagctccctcttcggagggagcatcagag

SEQ ID NO: 23390 - DNA, 86 bp, synthetic construct
  misc_feature 1..86: note = engineered ribonucleic acid scaffold (ERS) sequence
  source 1..86: mol_type = other DNA
acctgtagttctatctgattactctgactacagtcaccagcgactatgtcgtatgggtagctccctcttcggagggagcatcagag

SEQ ID NO: 23391 - DNA, 86 bp, synthetic construct
  misc_feature 1..86: note = engineered ribonucleic acid scaffold (ERS) sequence
  source 1..86: mol_type = other DNA
acgagcacttctatctgattactctgagggctctcaccagcgactatgtcgtatgggtagctccctcttcggagggagcatcagag

SEQ ID NO: 23392 - DNA, 86 bp, synthetic construct
  misc_feature 1..86: note = engineered ribonucleic acid scaffold (ERS) sequence
  source 1..86: mol_type = other DNA
acgaggtgttctatctgattactctgacacctctcaccagcgactatgtcgtatgggtagctccctcttcggagggagcatcagag

SEQ ID NO: 23393 - DNA, 86 bp, synthetic construct
  misc_feature 1..86: note = engineered ribonucleic acid scaffold (ERS) sequence
  source 1..86: mol_type = other DNA
acgggactttctatctgattactctgaagtccctcaccagcgactatgtcgtatgggtagctccctcttcggagggagcatcagag

SEQ ID NO: 23394 - DNA, 86 bp, synthetic construct
  misc_feature 1..86: note = engineered ribonucleic acid scaffold (ERS) sequence
  source 1..86: mol_type = other DNA
acgggcaattctatctgattactctgattgccctcaccagcgactatgtcgtatgggtagctccctcttcggagggagcatcagag

SEQ ID NO: 23395 - DNA, 86 bp, synthetic construct
  misc_feature 1..86: note = engineered ribonucleic acid scaffold (ERS) sequence
  source 1..86: mol_type = other DNA
actgtgcgttctatctgattactctgacgcacatcaccagcgactatgtcgtatgggtagctccctcttcggagggagcatcagag

SEQ ID NO: 23396 - DNA, 88 bp, synthetic construct
  misc_feature 1..88: note = engineered ribonucleic acid scaffold (ERS) sequence
  source 1..88: mol_type = other DNA
acacacggttctatctgattactctgaccgtgttcaccagcgactatgtcgtatgggtgaagctccctcttcggagggagcatcagag

SEQ ID NO: 23397 - DNA, 88 bp, synthetic construct
  misc_feature 1..88: note = engineered ribonucleic acid scaffold (ERS) sequence
  source 1..88: mol_type = other DNA
acactggtttctatctgattactctgaaccagttcaccagcgactatgtcgtatgggtgaagctccctcttcggagggagcatcagag

SEQ ID NO: 23398 - DNA, 88 bp, synthetic construct
  misc_feature 1..88: note = engineered ribonucleic acid scaffold (ERS) sequence
  source 1..88: mol_type = other DNA
acaggccgttctatctgattactctgacggccttcaccagcgactatgtcgtatgggtgaagctccctcttcggagggagcatcagag

SEQ ID NO: 23399 - DNA, 88 bp, synthetic construct
  misc_feature 1..88: note = engineered ribonucleic acid scaffold (ERS) sequence
  source 1..88: mol_type = other DNA
acaggtccttctatctgattactctgaggaccttcaccagcgactatgtcgtatgggtgaagctccctcttcggagggagcatcagag

SEQ ID NO: 23400 - DNA, 88 bp, synthetic construct
  misc_feature 1..88: note = engineered ribonucleic acid scaffold (ERS) sequence
  source 1..88: mol_type = other DNA
accagcaattctatctgattactctgattgctgtcaccagcgactatgtcgtatgggtgaagctccctcttcggagggagcatcagag

SEQ ID NO: 23401 - DNA, 88 bp, synthetic construct
  misc_feature 1..88: note = engineered ribonucleic acid scaffold (ERS) sequence
  source 1..88: mol_type = other DNA
accgagacttctatctgattactctgaggctcgtcaccagcgactatgtcgtatgggtgaagctccctcttcggagggagcatcagag

SEQ ID NO: 23402 - DNA, 88 bp, synthetic construct
  misc_feature 1..88: note = engineered ribonucleic acid scaffold (ERS) sequence
  source 1..88: mol_type = other DNA
acctgtagttctatctgattactctgactacagtcaccagcgactatgtcgtatgggtgaagctccctcttcggagggagcatcagag

SEQ ID NO: 23403 - DNA, 88 bp, synthetic construct
  misc_feature 1..88: note = engineered ribonucleic acid scaffold (ERS) sequence
  source 1..88: mol_type = other DNA
acgagcacttctatctgattactctgagggctctcaccagcgactatgtcgtatgggtgaagctccctcttcggagggagcatcagag

SEQ ID NO: 23404 - DNA, 88 bp, synthetic construct
  misc_feature 1..88: note = engineered ribonucleic acid scaffold (ERS) sequence
  source 1..88: mol_type = other DNA
acgaggtgttctatctgattactctgacacctctcaccagcgactatgtcgtatgggtgaagctccctcttcggagggagcatcagag

SEQ ID NO: 23405 - DNA, 88 bp, synthetic construct
  misc_feature 1..88: note = engineered ribonucleic acid scaffold (ERS) sequence
  source 1..88: mol_type = other DNA
acgggactttctatctgattactctgaagtccctcaccagcgactatgtcgtatgggtgaagctccctcttcggagggagcatcagag

SEQ ID NO: 23406 - DNA, 88 bp, synthetic construct
  misc_feature 1..88: note = engineered ribonucleic acid scaffold (ERS) sequence
  source 1..88: mol_type = other DNA
acgggcaattctatctgattactctgattgccctcaccagcgactatgtcgtatgggtgaagctccctcttcggagggagcatcagag

SEQ ID NO: 23407 - DNA, 88 bp, synthetic construct
  misc_feature 1..88: note = engineered ribonucleic acid scaffold (ERS) sequence
  source 1..88: mol_type = other DNA
actgtgcgttctatctgattactctgacgcacatcaccagcgactatgtcgtatgggtgaagctccctcttcggagggagcatcagag

SEQ ID NO: 23408 - DNA, 88 bp, synthetic construct
  misc_feature 1..88: note = engineered ribonucleic acid scaffold (ERS) sequence
  source 1..88: mol_type = other DNA
acacacggttctatctgattactctgaccgtgttcaccagcgactatgtcgtatgggtagagctccctcttcggagggagcatcagag

SEQ ID NO: 23409 - DNA, 88 bp, synthetic construct
  misc_feature 1..88: note = engineered ribonucleic acid scaffold (ERS) sequence
  source 1..88: mol_type = other DNA
acactggtttctatctgattactctgaaccagttcaccagcgactatgtcgtatgggtagagctccctcttcggagggagcatcagag

SEQ ID NO: 23410 - DNA, 88 bp, synthetic construct
  misc_feature 1..88: note = engineered ribonucleic acid scaffold (ERS) sequence
  source 1..88: mol_type = other DNA
acaggccgttctatctgattactctgacggccttcaccagcgactatgtcgtatgggtagagctccctcttcggagggagcatcagag

SEQ ID NO: 23411 - DNA, 88 bp, synthetic construct
  misc_feature 1..88: note = engineered ribonucleic acid scaffold (ERS) sequence
  source 1..88: mol_type = other DNA
acaggtccttctatctgattactctgaggaccttcaccagcgactatgtcgtatgggtagagctccctcttcggagggagcatcagag

SEQ ID NO: 23412 - DNA, 88 bp, synthetic construct
  misc_feature 1..88: note = engineered ribonucleic acid scaffold (ERS) sequence
  source 1..88: mol_type = other DNA
accagcaattctatctgattactctgattgctgtcaccagcgactatgtcgtatgggtagagctccctcttcggagggagcatcagag

SEQ ID NO: 23413 - DNA, 88 bp, synthetic construct
  misc_feature 1..88: note = engineered ribonucleic acid scaffold (ERS) sequence
  source 1..88: mol_type = other DNA
accgagacttctatctgattactctgaggctcgtcaccagcgactatgtcgtatgggtagagctccctcttcggagggagcatcagag

SEQ ID NO: 23414 - DNA, 88 bp, synthetic construct
  misc_feature 1..88: note = engineered ribonucleic acid scaffold (ERS) sequence
  source 1..88: mol_type = other DNA
acctgtagttctatctgattactctgactacagtcaccagcgactatgtcgtatgggtagagctccctcttcggagggagcatcagag

SEQ ID NO: 23415 - DNA, 88 bp, synthetic construct
  misc_feature 1..88: note = engineered ribonucleic acid scaffold (ERS) sequence
  source 1..88: mol_type = other DNA
acgagcacttctatctgattactctgagggctctcaccagcgactatgtcgtatgggtagagctccctcttcggagggagcatcagag

SEQ ID NO: 23416 - DNA, 88 bp, synthetic construct
  misc_feature 1..88: note = engineered ribonucleic acid scaffold (ERS) sequence
  source 1..88: mol_type = other DNA
acgaggtgttctatctgattactctgacacctctcaccagcgactatgtcgtatgggtagagctccctcttcggagggagcatcagag

SEQ ID NO: 23417 - DNA, 88 bp, synthetic construct
  misc_feature 1..88: note = engineered ribonucleic acid scaffold (ERS) sequence
  source 1..88: mol_type = other DNA
acgggactttctatctgattactctgaagtccctcaccagcgactatgtcgtatgggtagagctccctcttcggagggagcatcagag

SEQ ID NO: 23418 - DNA, 88 bp, synthetic construct
  misc_feature 1..88: note = engineered ribonucleic acid scaffold (ERS) sequence
  source 1..88: mol_type = other DNA
acgggcaattctatctgattactctgattgccctcaccagcgactatgtcgtatgggtagagctccctcttcggagggagcatcagag

SEQ ID NO: 23419 - DNA, 88 bp, synthetic construct
  misc_feature 1..88: note = engineered ribonucleic acid scaffold (ERS) sequence
  source 1..88: mol_type = other DNA
actgtgcgttctatctgattactctgacgcacatcaccagcgactatgtcgtatgggtagagctccctcttcggagggagcatcagag

SEQ ID NO: 23420 - DNA, 89 bp, synthetic construct
  misc_feature 1..89: note = engineered ribonucleic acid scaffold (ERS) sequence
  source 1..89: mol_type = other DNA
acacacggttctatctgattactctcaccgtgttcaccagcgactatgtcgtagtgggtaaagctccctcttcggagggagcatcagac

SEQ ID NO: 23421 - DNA, 89 bp, synthetic construct
  misc_feature 1..89: note = engineered ribonucleic acid scaffold (ERS) sequence
  source 1..89: mol_type = other DNA
acactggtttctatctgattactctcaaccagttcaccagcgactatgtcgtagtgggtaaagctccctcttcggagggagcatcagac

SEQ ID NO: 23422 - DNA, 89 bp, synthetic construct
  misc_feature 1..89: note = engineered ribonucleic acid scaffold (ERS) sequence
  source 1..89: mol_type = other DNA
acaggccgttctatctgattactctcacggccttcaccagcgactatgtcgtagtgggtaaagctccctcttcggagggagcatcagac

SEQ ID NO: 23423 - DNA, 89 bp, synthetic construct
  misc_feature 1..89: note = engineered ribonucleic acid scaffold (ERS) sequence
  source 1..89: mol_type = other DNA
acaggtccttctatctgattactctcaggaccttcaccagcgactatgtcgtagtgggtaaagctccctcttcggagggagcatcagac

SEQ ID NO: 23424 - DNA, 89 bp, synthetic construct
  misc_feature 1..89: note = engineered ribonucleic acid scaffold (ERS) sequence
  source 1..89: mol_type = other DNA
accagcaattctatctgattactctcattgctgtcaccagcgactatgtcgtagtgggtaaagctccctcttcggagggagcatcagac

SEQ ID NO: 23425 - DNA, 89 bp, synthetic construct
  misc_feature 1..89: note = engineered ribonucleic acid scaffold (ERS) sequence
  source 1..89: mol_type = other DNA
accgagacttctatctgattactctcaggctcgtcaccagcgactatgtcgtagtgggtaaagctccctcttcggagggagcatcagac

SEQ ID NO: 23426 - DNA, 89 bp, synthetic construct
  misc_feature 1..89: note = engineered ribonucleic acid scaffold (ERS) sequence
  source 1..89: mol_type = other DNA
acctgtagttctatctgattactctcactacagtcaccagcgactatgtcgtagtgggtaaagctccctcttcggagggagcatcagac

SEQ ID NO: 23427 - DNA, 89 bp, synthetic construct
  misc_feature 1..89: note = engineered ribonucleic acid scaffold (ERS) sequence
  source 1..89: mol_type = other DNA
acgagcacttctatctgattactctcagggctctcaccagcgactatgtcgtagtgggtaaagctccctcttcggagggagcatcagac

SEQ ID NO: 23428 - DNA, 89 bp, synthetic construct
  misc_feature 1..89: note = engineered ribonucleic acid scaffold (ERS) sequence
  source 1..89: mol_type = other DNA
acgaggtgttctatctgattactctcacacctctcaccagcgactatgtcgtagtgggtaaagctccctcttcggagggagcatcagac

SEQ ID NO: 23429 - DNA, 89 bp, synthetic construct
  misc_feature 1..89: note = engineered ribonucleic acid scaffold (ERS) sequence
  source 1..89: mol_type = other DNA
acacacggttctatctgattactttgaccgtgttcaccagcgactatgtcgtagtgggtaaagctccctcttcggagggagcatcagag

SEQ ID NO: 23430 - DNA, 89 bp, synthetic construct
  misc_feature 1..89: note = engineered ribonucleic acid scaffold (ERS) sequence
  source 1..89: mol_type = other DNA
acactggtttctatctgattactttgaaccagttcaccagcgactatgtcgtagtgggtaaagctccctcttcggagggagcatcagag

SEQ ID NO: 23431 - DNA, 89 bp, synthetic construct
  misc_feature 1..89: note = engineered ribonucleic acid scaffold (ERS) sequence
  source 1..89: mol_type = other DNA
acaggccgttctatctgattactttgacggccttcaccagcgactatgtcgtagtgggtaaagctccctcttcggagggagcatcagag

SEQ ID NO: 23432 - DNA, 89 bp, synthetic construct
  misc_feature 1..89: note = engineered ribonucleic acid scaffold (ERS) sequence
  source 1..89: mol_type = other DNA
acaggtccttctatctgattactttgaggaccttcaccagcgactatgtcgtagtgggtaaagctccctcttcggagggagcatcagag

SEQ ID NO: 23433 - DNA, 89 bp, synthetic construct
  misc_feature 1..89: note = engineered ribonucleic acid scaffold (ERS) sequence
  source 1..89: mol_type = other DNA
accagcaattctatctgattactttgattgctgtcaccagcgactatgtcgtagtgggtaaagctccctcttcggagggagcatcagag

SEQ ID NO: 23434 - DNA, 89 bp, synthetic construct
  misc_feature 1..89: note = engineered ribonucleic acid scaffold (ERS) sequence
  source 1..89: mol_type = other DNA
accgagacttctatctgattactttgaggctcgtcaccagcgactatgtcgtagtgggtaaagctccctcttcggagggagcatcagag

SEQ ID NO: 23435 - DNA, 89 bp, synthetic construct
  misc_feature 1..89: note = engineered ribonucleic acid scaffold (ERS) sequence
  source 1..89: mol_type = other DNA
acctgtagttctatctgattactttgactacagtcaccagcgactatgtcgtagtgggtaaagctccctcttcggagggagcatcagag

SEQ ID NO: 23436 - DNA, 89 bp, synthetic construct
  misc_feature 1..89: note = engineered ribonucleic acid scaffold (ERS) sequence
  source 1..89: mol_type = other DNA
acgagcacttctatctgattactttgagggctctcaccagcgactatgtcgtagtgggtaaagctccctcttcggagggagcatcagag

SEQ ID NO: 23437 - DNA, 89 bp, synthetic construct
  misc_feature 1..89: note = engineered ribonucleic acid scaffold (ERS) sequence
  source 1..89: mol_type = other DNA
acacacggttctatctgattactttgaccgtgttcaccagcgactatgtcgtagtgggtaaagctccctcttcggagggagcatcaaag

SEQ ID NO: 23438 - DNA, 89 bp, synthetic construct
  misc_feature 1..89: note = engineered ribonucleic acid scaffold (ERS) sequence
  source 1..89: mol_type = other DNA
acactggtttctatctgattactttgaaccagttcaccagcgactatgtcgtagtgggtaaagctccctcttcggagggagcatcaaag

SEQ ID NO: 23439 - DNA, 89 bp, synthetic construct
  misc_feature 1..89: note = engineered ribonucleic acid scaffold (ERS) sequence
  source 1..89: mol_type = other DNA
acaggccgttctatctgattactttgacggccttcaccagcgactatgtcgtagtgggtaaagctccctcttcggagggagcatcaaag

SEQ ID NO: 23440 - DNA, 89 bp, synthetic construct
  misc_feature 1..89: note = engineered ribonucleic acid scaffold (ERS) sequence
  source 1..89: mol_type = other DNA
acaggtccttctatctgattactttgaggaccttcaccagcgactatgtcgtagtgggtaaagctccctcttcggagggagcatcaaag

SEQ ID NO: 23441 - DNA, 89 bp, synthetic construct
  misc_feature 1..89: note = engineered ribonucleic acid scaffold (ERS) sequence
  source 1..89: mol_type = other DNA
accagcaattctatctgattactttgattgctgtcaccagcgactatgtcgtagtgggtaaagctccctcttcggagggagcatcaaag

SEQ ID NO: 23442 - DNA, 89 bp, synthetic construct
  misc_feature 1..89: note = engineered ribonucleic acid scaffold (ERS) sequence
  source 1..89: mol_type = other DNA
accgagacttctatctgattactttgaggctcgtcaccagcgactatgtcgtagtgggtaaagctccctcttcggagggagcatcaaag

SEQ ID NO: 23443 - DNA, 89 bp, synthetic construct
  misc_feature 1..89: note = engineered ribonucleic acid scaffold (ERS) sequence
  source 1..89: mol_type = other DNA
acctgtagttctatctgattactttgactacagtcaccagcgactatgtcgtagtgggtaaagctccctcttcggagggagcatcaaag

SEQ ID NO: 23444 - DNA, 89 bp, synthetic construct
  misc_feature 1..89: note = engineered ribonucleic acid scaffold (ERS) sequence
  source 1..89: mol_type = other DNA
acgagcacttctatctgattactttgagggctctcaccagcgactatgtcgtagtgggtaaagctccctcttcggagggagcatcaaag

SEQ ID NO: 23445 - DNA, 89 bp, synthetic construct
  misc_feature 1..89: note = engineered ribonucleic acid scaffold (ERS) sequence
  source 1..89: mol_type = other DNA
acacacggttctatctgattagtctcaccgtgttcaccagcgactatgtcgtagtgggtaaagctccctcttcggagggagcatgagac

SEQ ID NO: 23446 - DNA, 89 bp, synthetic construct
  misc_feature 1..89: note = engineered ribonucleic acid scaffold (ERS) sequence
  source 1..89: mol_type = other DNA
acactggtttctatctgattagtctcaaccagttcaccagcgactatgtcgtagtgggtaaagctccctcttcggagggagcatgagac

SEQ ID NO: 23447 - DNA, 89 bp, synthetic construct
  misc_feature 1..89: note = engineered ribonucleic acid scaffold (ERS) sequence
  source 1..89: mol_type = other DNA
acaggccgttctatctgattagtctcacggccttcaccagcgactatgtcgtagtgggtaaagctccctcttcggagggagcatgagac

SEQ ID NO: 23448 - DNA, 89 bp, synthetic construct
  misc_feature 1..89: note = engineered ribonucleic acid scaffold (ERS) sequence
  source 1..89: mol_type = other DNA
acaggtccttctatctgattagtctcaggaccttcaccagcgactatgtcgtagtgggtaaagctccctcttcggagggagcatgagac

SEQ ID NO: 23449 - DNA, 89 bp, synthetic construct
  misc_feature 1..89: note = engineered ribonucleic acid scaffold (ERS) sequence
  source 1..89: mol_type = other DNA
accagcaattctatctgattagtctcattgctgtcaccagcgactatgtcgtagtgggtaaagctccctcttcggagggagcatgagac

SEQ ID NO: 23450 - DNA, 89 bp, synthetic construct
  misc_feature 1..89: note = engineered ribonucleic acid scaffold (ERS) sequence
  source 1..89: mol_type = other DNA
accgagacttctatctgattagtctcaggctcgtcaccagcgactatgtcgtagtgggtaaagctccctcttcggagggagcatgagac

SEQ ID NO: 23451 - DNA, 89 bp, synthetic construct
  misc_feature 1..89: note = engineered ribonucleic acid scaffold (ERS) sequence
  source 1..89: mol_type = other DNA
acctgtagttctatctgattagtctcactacagtcaccagcgactatgtcgtagtgggtaaagctccctcttcggagggagcatgagac

SEQ ID NO: 23452 - DNA, 89 bp, synthetic construct
  misc_feature 1..89: note = engineered ribonucleic acid scaffold (ERS) sequence
  source 1..89: mol_type = other DNA
acgagcacttctatctgattagtctcagggctctcaccagcgactatgtcgtagtgggtaaagctccctcttcggagggagcatgagac

SEQ ID NO: 23453 - DNA, 89 bp, synthetic construct
  misc_feature 1..89: note = engineered ribonucleic acid scaffold (ERS) sequence
  source 1..89: mol_type = other DNA
acacacggttctatctgattagtctgaccgtgttcaccagcgactatgtcgtagtgggtaaagctccctcttcggagggagcatcagac

SEQ ID NO: 23454 - DNA, 89 bp, synthetic construct
  misc_feature 1..89: note = engineered ribonucleic acid scaffold (ERS) sequence
  source 1..89: mol_type = other DNA
acactggtttctatctgattagtctgaaccagttcaccagcgactatgtcgtagtgggtaaagctccctcttcggagggagcatcagac

SEQ ID NO: 23455 - DNA, 89 bp, synthetic construct
  misc_feature 1..89: note = engineered ribonucleic acid scaffold (ERS) sequence
  source 1..89: mol_type = other DNA
acaggccgttctatctgattagtctgacggccttcaccagcgactatgtcgtagtgggtaaagctccctcttcggagggagcatcagac

SEQ ID NO: 23456 - DNA, 89 bp, synthetic construct
  misc_feature 1..89: note = engineered ribonucleic acid scaffold (ERS) sequence
  source 1..89: mol_type = other DNA
acaggtccttctatctgattagtctgaggaccttcaccagcgactatgtcgtagtgggtaaagctccctcttcggagggagcatcagac

SEQ ID NO: 23457 - DNA, 89 bp, synthetic construct
  misc_feature 1..89: note = engineered ribonucleic acid scaffold (ERS) sequence
  source 1..89: mol_type = other DNA
accagcaattctatctgattagtctgattgctgtcaccagcgactatgtcgtagtgggtaaagctccctcttcggagggagcatcagac

SEQ ID NO: 23458 - DNA, 89 bp, synthetic construct
  misc_feature 1..89: note = engineered ribonucleic acid scaffold (ERS) sequence
  source 1..89: mol_type = other DNA
accgagacttctatctgattagtctgaggctcgtcaccagcgactatgtcgtagtgggtaaagctccctcttcggagggagcatcagac

SEQ ID NO: 23459 - DNA, 89 bp, synthetic construct
  misc_feature 1..89: note = engineered ribonucleic acid scaffold (ERS) sequence
  source 1..89: mol_type = other DNA
acctgtagttctatctgattagtctgactacagtcaccagcgactatgtcgtagtgggtaaagctccctcttcggagggagcatcagac

SEQ ID NO: 23460 - DNA, 89 bp, synthetic construct
  misc_feature 1..89: note = engineered ribonucleic acid scaffold (ERS) sequence
  source 1..89: mol_type = other DNA
acgagcacttctatctgattagtctgagggctctcaccagcgactatgtcgtagtgggtaaagctccctcttcggagggagcatcagac

SEQ ID NO: 23461 - DNA, 89 bp, synthetic construct
  misc_feature 1..89: note = engineered ribonucleic acid scaffold (ERS) sequence
  source 1..89: mol_type = other DNA
acacacggttctatctgattactctcaccgtgttcaccagcgactatgtcgtagtgggtaaagctccctcttcggagggagcatgagag

SEQ ID NO: 23462 - DNA, 89 bp, synthetic construct
  misc_feature 1..89: note = engineered ribonucleic acid scaffold (ERS) sequence
  source 1..89: mol_type = other DNA
acactggtttctatctgattactctcaaccagttcaccagcgactatgtcgtagtgggtaaagctccctcttcggagggagcatgagag

SEQ ID NO: 23463 - DNA, 89 bp, synthetic construct
  misc_feature 1..89: note = engineered ribonucleic acid scaffold (ERS) sequence
  source 1..89: mol_type = other DNA
acaggccgttctatctgattactctcacggccttcaccagcgactatgtcgtagtgggtaaagctccctcttcggagggagcatgagag

SEQ ID NO: 23464 - DNA, 89 bp, synthetic construct
  misc_feature 1..89: note = engineered ribonucleic acid scaffold (ERS) sequence
  source 1..89: mol_type = other DNA
acaggtccttctatctgattactctcaggaccttcaccagcgactatgtcgtagtgggtaaagctccctcttcggagggagcatgagag

SEQ ID NO: 23465 - DNA, 89 bp, synthetic construct
  misc_feature 1..89: note = engineered ribonucleic acid scaffold (ERS) sequence
  source 1..89: mol_type = other DNA
accagcaattctatctgattactctcattgctgtcaccagcgactatgtcgtagtgggtaaagctccctcttcggagggagcatgagag

SEQ ID NO: 23466 - DNA, 89 bp, synthetic construct
  misc_feature 1..89: note = engineered ribonucleic acid scaffold (ERS) sequence
  source 1..89: mol_type = other DNA
accgagacttctatctgattactctcaggctcgtcaccagcgactatgtcgtagtgggtaaagctccctcttcggagggagcatgagag

SEQ ID NO: 23467 - DNA, 89 bp, synthetic construct
  misc_feature 1..89: note = engineered ribonucleic acid scaffold (ERS) sequence
  source 1..89: mol_type = other DNA
acctgtagttctatctgattactctcactacagtcaccagcgactatgtcgtagtgggtaaagctccctcttcggagggagcatgagag

SEQ ID NO: 23468 - DNA, 89 bp, synthetic construct
  misc_feature 1..89: note = engineered ribonucleic acid scaffold (ERS) sequence
  source 1..89: mol_type = other DNA
acgagcacttctatctgattactctcagggctctcaccagcgactatgtcgtagtgggtaaagctccctcttcggagggagcatgagag

SEQ ID NO: 23469 - DNA, 89 bp, synthetic construct
  misc_feature 1..89: note = engineered ribonucleic acid scaffold (ERS) sequence
  source 1..89: mol_type = other DNA
acacacggtcccatctgattaccccgaccgtgttcaccagcgactatgtcgtagtgggtaaagctccctcttcggagggagcatcgggg

SEQ ID NO: 23470 - DNA, 89 bp, synthetic construct
  misc_feature 1..89: note = engineered ribonucleic acid scaffold (ERS) sequence
  source 1..89: mol_type = other DNA
acactggttcccatctgattaccccgaaccagttcaccagcgactatgtcgtagtgggtaaagctccctcttcggagggagcatcgggg

SEQ ID NO: 23471 - DNA, 89 bp, synthetic construct
  misc_feature 1..89: note = engineered ribonucleic acid scaffold (ERS) sequence
  source 1..89: mol_type = other DNA
acaggccgtcccatctgattaccccgacggccttcaccagcgactatgtcgtagtgggtaaagctccctcttcggagggagcatcgggg

SEQ ID NO: 23472 - DNA, 89 bp, synthetic construct
  misc_feature 1..89: note = engineered ribonucleic acid scaffold (ERS) sequence
  source 1..89: mol_type = other DNA
acaggtcctcccatctgattaccccgaggaccttcaccagcgactatgtcgtagtgggtaaagctccctcttcggagggagcatcgggg

SEQ ID NO: 23473 - DNA, 89 bp, synthetic construct
  misc_feature 1..89: note = engineered ribonucleic acid scaffold (ERS) sequence
  source 1..89: mol_type = other DNA
accagcaatcccatctgattaccccgattgctgtcaccagcgactatgtcgtagtgggtaaagctccctcttcggagggagcatcgggg

SEQ ID NO: 23474 - DNA, 89 bp, synthetic construct
  misc_feature 1..89: note = engineered ribonucleic acid scaffold (ERS) sequence
  source 1..89: mol_type = other DNA
accgagactcccatctgattaccccgaggctcgtcaccagcgactatgtcgtagtgggtaaagctccctcttcggagggagcatcgggg

SEQ ID NO: 23475 - DNA, 89 bp, synthetic construct
  misc_feature 1..89: note = engineered ribonucleic acid scaffold (ERS) sequence
  source 1..89: mol_type = other DNA
acctgtagtcccatctgattaccccgactacagtcaccagcgactatgtcgtagtgggtaaagctccctcttcggagggagcatcgggg

SEQ ID NO: 23476 - DNA, 89 bp, synthetic construct
  misc_feature 1..89: note = engineered ribonucleic acid scaffold (ERS) sequence
  source 1..89: mol_type = other DNA
acgagcactcccatctgattaccccgagggctctcaccagcgactatgtcgtagtgggtaaagctccctcttcggagggagcatcgggg

SEQ ID NO: 23477 - DNA, 89 bp, synthetic construct
  misc_feature 1..89: note = engineered ribonucleic acid scaffold (ERS) sequence
  source 1..89: mol_type = other DNA
acacacggtcctatctgattactccgaccgtgttcaccagcgactatgtcgtagtgggtaaagctccctcttcggagggagcatcggag

SEQ ID NO: 23478 - DNA, 89 bp, synthetic construct
  misc_feature 1..89: note = engineered ribonucleic acid scaffold (ERS) sequence
  source 1..89: mol_type = other DNA
acactggttcctatctgattactccgaaccagttcaccagcgactatgtcgtagtgggtaaagctccctcttcggagggagcatcggag

SEQ ID NO: 23479 - DNA, 89 bp, synthetic construct
  misc_feature 1..89: note = engineered ribonucleic acid scaffold (ERS) sequence
  source 1..89: mol_type = other DNA
acaggccgtcctatctgattactccgacggccttcaccagcgactatgtcgtagtgggtaaagctccctcttcggagggagcatcggag

SEQ ID NO: 23480 - DNA, 89 bp, synthetic construct
  misc_feature 1..89: note = engineered ribonucleic acid scaffold (ERS) sequence
  source 1..89: mol_type = other DNA
acaggtcctcctatctgattactccgaggaccttcaccagcgactatgtcgtagtgggtaaagctccctcttcggagggagcatcggag

SEQ ID NO: 23481 - DNA, 89 bp, synthetic construct
  misc_feature 1..89: note = engineered ribonucleic acid scaffold (ERS) sequence
  source 1..89: mol_type = other DNA
accagcaatcctatctgattactccgattgctgtcaccagcgactatgtcgtagtgggtaaagctccctcttcggagggagcatcggag

SEQ ID NO: 23482 - DNA, 89 bp, synthetic construct
  misc_feature 1..89: note = engineered ribonucleic acid scaffold (ERS) sequence
  source 1..89: mol_type = other DNA
accgagactcctatctgattactccgaggctcgtcaccagcgactatgtcgtagtgggtaaagctccctcttcggagggagcatcggag

SEQ ID NO: 23483 - DNA, 89 bp, synthetic construct
  misc_feature 1..89: note = engineered ribonucleic acid scaffold (ERS) sequence
  source 1..89: mol_type = other DNA
acctgtagtcctatctgattactccgactacagtcaccagcgactatgtcgtagtgggtaaagctccctcttcggagggagcatcggag

SEQ ID NO: 23484 - DNA, 89 bp, synthetic construct
  misc_feature 1..89: note = engineered ribonucleic acid scaffold (ERS) sequence
  source 1..89: mol_type = other DNA
acgagcactcctatctgattactccgagggctctcaccagcgactatgtcgtagtgggtaaagctccctcttcggagggagcatcggag

SEQ ID NO: 23485 - DNA, 89 bp, synthetic construct
  misc_feature 1..89: note = engineered ribonucleic acid scaffold (ERS) sequence
  source 1..89: mol_type = other DNA
acacacggtgggatctgattaccccgaccgtgttcaccagcgactatgtcgtagtgggtaaagctccctcttcggagggagcatcgggg

SEQ ID NO: 23486 - DNA, 89 bp, synthetic construct
  misc_feature 1..89: note = engineered ribonucleic acid scaffold (ERS) sequence
  source 1..89: mol_type = other DNA
acactggttgggatctgattaccccgaaccagttcaccagcgactatgtcgtagtgggtaaagctccctcttcggagggagcatcgggg

SEQ ID NO: 23487 - DNA, 89 bp, synthetic construct
  misc_feature 1..89: note = engineered ribonucleic acid scaffold (ERS) sequence
  source 1..89: mol_type = other DNA
acaggccgtgggatctgattaccccgacggccttcaccagcgactatgtcgtagtgggtaaagctccctcttcggagggagcatcgggg

SEQ ID NO: 23488 - DNA, 89 bp, synthetic construct
  misc_feature 1..89: note = engineered ribonucleic acid scaffold (ERS) sequence
  source 1..89: mol_type = other DNA
acaggtcctgggatctgattaccccgaggaccttcaccagcgactatgtcgtagtgggtaaagctccctcttcggagggagcatcgggg

SEQ ID NO: 23489 - DNA, 89 bp, synthetic construct
  misc_feature 1..89: note = engineered ribonucleic acid scaffold (ERS) sequence
  source 1..89: mol_type = other DNA
accagcaatgggatctgattaccccgattgctgtcaccagcgactatgtcgtagtgggtaaagctccctcttcggagggagcatcgggg

SEQ ID NO: 23490 - DNA, 89 bp, synthetic construct
  misc_feature 1..89: note = engineered ribonucleic acid scaffold (ERS) sequence
  source 1..89: mol_type = other DNA
accgagactgggatctgattaccccgaggctcgtcaccagcgactatgtcgtagtgggtaaagctccctcttcggagggagcatcgggg

SEQ ID NO: 23491 - DNA, 89 bp, synthetic construct
  misc_feature 1..89: note = engineered ribonucleic acid scaffold (ERS) sequence
  source 1..89: mol_type = other DNA
acctgtagtgggatctgattaccccgactacagtcaccagcgactatgtcgtagtgggtaaagctccctcttcggagggagcatcgggg

SEQ ID NO: 23492 - DNA, 89 bp, synthetic construct
  misc_feature 1..89: note = engineered ribonucleic acid scaffold (ERS) sequence
  source 1..89: mol_type = other DNA
acgagcactgggatctgattaccccgagggctctcaccagcgactatgtcgtagtgggtaaagctccctcttcggagggagcatcgggg

SEQ ID NO: 23493 - DNA, 89 bp, synthetic construct
  misc_feature 1..89: note = engineered ribonucleic acid scaffold (ERS) sequence
  source 1..89: mol_type = other DNA
acacacggtggtatctgattactccgaccgtgttcaccagcgactatgtcgtagtgggtaaagctccctcttcggagggagcatcggag

SEQ ID NO: 23494 - DNA, 89 bp, synthetic construct
  misc_feature 1..89: note = engineered ribonucleic acid scaffold (ERS) sequence
  source 1..89: mol_type = other DNA
acactggttggtatctgattactccgaaccagttcaccagcgactatgtcgtagtgggtaaagctccctcttcggagggagcatcggag

SEQ ID NO: 23495 - DNA, 89 bp, synthetic construct
  misc_feature 1..89: note = engineered ribonucleic acid scaffold (ERS) sequence
  source 1..89: mol_type = other DNA
acaggccgtggtatctgattactccgacggccttcaccagcgactatgtcgtagtgggtaaagctccctcttcggagggagcatcggag

SEQ ID NO: 23496 - DNA, 89 bp, synthetic construct
  misc_feature 1..89: note = engineered ribonucleic acid scaffold (ERS) sequence
  source 1..89: mol_type = other DNA
acaggtcctggtatctgattactccgaggaccttcaccagcgactatgtcgtagtgggtaaagctccctcttcggagggagcatcggag

SEQ ID NO: 23497 - DNA, 89 bp, synthetic construct
  misc_feature 1..89: note = engineered ribonucleic acid scaffold (ERS) sequence
  source 1..89: mol_type = other DNA
accagcaatggtatctgattactccgattgctgtcaccagcgactatgtcgtagtgggtaaagctccctcttcggagggagcatcggag

SEQ ID NO: 23498 - DNA, 89 bp, synthetic construct
  misc_feature 1..89: note = engineered ribonucleic acid scaffold (ERS) sequence
  source 1..89: mol_type = other DNA
accgagactggtatctgattactccgaggctcgtcaccagcgactatgtcgtagtgggtaaagctccctcttcggagggagcatcggag

SEQ ID NO: 23499 - DNA, 89 bp, synthetic construct
  misc_feature 1..89: note = engineered ribonucleic acid scaffold (ERS) sequence
  source 1..89: mol_type = other DNA
acctgtagtggtatctgattactccgactacagtcaccagcgactatgtcgtagtgggtaaagctccctcttcggagggagcatcggag

SEQ ID NO: 23500 - DNA, 89 bp, synthetic construct
  misc_feature 1..89: note = engineered ribonucleic acid scaffold (ERS) sequence
  source 1..89: mol_type = other DNA
acgagcactggtatctgattactccgagggctctcaccagcgactatgtcgtagtgggtaaagctccctcttcggagggagcatcggag

SEQ ID NO: 23501 - DNA, 89 bp, synthetic construct
  misc_feature 1..89: note = engineered ribonucleic acid scaffold (ERS) sequence
  source 1..89: mol_type = other DNA
acacacggttccatctgattaccctgaccgtgttcaccagcgactatgtcgtagtgggtaaagctccctcttcggagggagcatcaggg

SEQ ID NO: 23502 - DNA, 89 bp, synthetic construct
  misc_feature 1..89: note = engineered ribonucleic acid scaffold (ERS) sequence
  source 1..89: mol_type = other DNA
acactggtttccatctgattaccctgaaccagttcaccagcgactatgtcgtagtgggtaaagctccctcttcggagggagcatcaggg

SEQ ID NO: 23503 - DNA, 89 bp, synthetic construct
  misc_feature 1..89: note = engineered ribonucleic acid scaffold (ERS) sequence
  source 1..89: mol_type = other DNA
acaggccgttccatctgattaccctgacggccttcaccagcgactatgtcgtagtgggtaaagctccctcttcggagggagcatcaggg

SEQ ID NO: 23504 - DNA, 89 bp, synthetic construct
  misc_feature 1..89: note = engineered ribonucleic acid scaffold (ERS) sequence
  source 1..89: mol_type = other DNA
acaggtccttccatctgattaccctgaggaccttcaccagcgactatgtcgtagtgggtaaagctccctcttcggagggagcatcaggg

SEQ ID NO: 23505 - DNA, 89 bp, synthetic construct
  misc_feature 1..89: note = engineered ribonucleic acid scaffold (ERS) sequence
  source 1..89: mol_type = other DNA
accagcaattccatctgattaccctgattgctgtcaccagcgactatgtcgtagtgggtaaagctccctcttcggagggagcatcaggg

SEQ ID NO: 23506 - DNA, 89 bp, synthetic construct
  misc_feature 1..89: note = engineered ribonucleic acid scaffold (ERS) sequence
  source 1..89: mol_type = other DNA
accgagacttccatctgattaccctgaggctcgtcaccagcgactatgtcgtagtgggtaaagctccctcttcggagggagcatcaggg

SEQ ID NO: 23507 - DNA, 89 bp, synthetic construct
  misc_feature 1..89: note = engineered ribonucleic acid scaffold (ERS) sequence
  source 1..89: mol_type = other DNA
acctgtagttccatctgattaccctgactacagtcaccagcgactatgtcgtagtgggtaaagctccctcttcggagggagcatcaggg

SEQ ID NO: 23508 - DNA, 89 bp, synthetic construct
  misc_feature 1..89: note = engineered ribonucleic acid scaffold (ERS) sequence
  source 1..89: mol_type = other DNA
acgagcacttccatctgattaccctgagggctctcaccagcgactatgtcgtagtgggtaaagctccctcttcggagggagcatcaggg

SEQ ID NO: 23509 - DNA, 89 bp, synthetic construct
  misc_feature 1..89: note = engineered ribonucleic acid scaffold (ERS) sequence
  source 1..89: mol_type = other DNA
acacacggttggatctgattaccctgaccgtgttcaccagcgactatgtcgtagtgggtaaagctccctcttcggagggagcatcaggg

SEQ ID NO: 23510 - DNA, 89 bp, synthetic construct
  misc_feature 1..89: note = engineered ribonucleic acid scaffold (ERS) sequence
  source 1..89: mol_type = other DNA
acactggtttggatctgattaccctgaaccagttcaccagcgactatgtcgtagtgggtaaagctccctcttcggagggagcatcaggg

SEQ ID NO: 23511 - DNA, 89 bp, synthetic construct
  misc_feature 1..89: note = engineered ribonucleic acid scaffold (ERS) sequence
  source 1..89: mol_type = other DNA
acaggccgttggatctgattaccctgacggccttcaccagcgactatgtcgtagtgggtaaagctccctcttcggagggagcatcaggg

SEQ ID NO: 23512 - DNA, 89 bp, synthetic construct
  misc_feature 1..89: note = engineered ribonucleic acid scaffold (ERS) sequence
  source 1..89: mol_type = other DNA
acaggtccttggatctgattaccctgaggaccttcaccagcgactatgtcgtagtgggtaaagctccctcttcggagggagcatcaggg

SEQ ID NO: 23513 - DNA, 89 bp, synthetic construct
  misc_feature 1..89: note = engineered ribonucleic acid scaffold (ERS) sequence
  source 1..89: mol_type = other DNA
accagcaattggatctgattaccctgattgctgtcaccagcgactatgtcgtagtgggtaaagctccctcttcggagggagcatcaggg

SEQ ID NO: 23514 - DNA, 89 bp, synthetic construct
  misc_feature 1..89: note = engineered ribonucleic acid scaffold (ERS) sequence
  source 1..89: mol_type = other DNA
accgagacttggatctgattaccctgaggctcgtcaccagcgactatgtcgtagtgggtaaagctccctcttcggagggagcatcaggg

SEQ ID NO: 23515 - DNA, 89 bp, synthetic construct
  misc_feature 1..89: note = engineered ribonucleic acid scaffold (ERS) sequence
  source 1..89: mol_type = other DNA
acctgtagttggatctgattaccctgactacagtcaccagcgactatgtcgtagtgggtaaagctccctcttcggagggagcatcaggg

SEQ ID NO: 23516 - DNA, 89 bp, synthetic construct
  misc_feature 1..89: note = engineered ribonucleic acid scaffold (ERS) sequence
  source 1..89: mol_type = other DNA
acgagcacttggatctgattaccctgagggctctcaccagcgactatgtcgtagtgggtaaagctccctcttcggagggagcatcaggg

SEQ ID NO: 23517 - DNA, 89 bp, synthetic construct
  misc_feature 1..89: note = engineered ribonucleic acid scaffold (ERS) sequence
  source 1..89: mol_type = other DNA
acacacggttgtatctgattactctgaccgtgttcaccagcgactatgtcgtagtgggtaaagctccctcttcggagggagcatcagag

SEQ ID NO: 23518 - DNA, 89 bp, synthetic construct
  misc_feature 1..89: note = engineered ribonucleic acid scaffold (ERS) sequence
  source 1..89: mol_type = other DNA
acactggtttgtatctgattactctgaaccagttcaccagcgactatgtcgtagtgggtaaagctccctcttcggagggagcatcagag

SEQ ID NO: 23519 - DNA, 89 bp, synthetic construct
  misc_feature 1..89: note = engineered ribonucleic acid scaffold (ERS) sequence
  source 1..89: mol_type = other DNA
acaggccgttgtatctgattactctgacggccttcaccagcgactatgtcgtagtgggtaaagctccctcttcggagggagcatcagag

SEQ ID NO: 23520 - DNA, 89 bp, synthetic construct
  misc_feature 1..89: note = engineered ribonucleic acid scaffold (ERS) sequence
  source 1..89: mol_type = other DNA
acaggtccttgtatctgattactctgaggaccttcaccagcgactatgtcgtagtgggtaaagctccctcttcggagggagcatcagag

SEQ ID NO: 23521 - DNA, 89 bp, synthetic construct
  misc_feature 1..89: note = engineered ribonucleic acid scaffold (ERS) sequence
  source 1..89: mol_type = other DNA
accagcaattgtatctgattactctgattgctgtcaccagcgactatgtcgtagtgggtaaagctccctcttcggagggagcatcagag

SEQ ID NO: 23522 - DNA, 89 bp, synthetic construct
  misc_feature 1..89: note = engineered ribonucleic acid scaffold (ERS) sequence
  source 1..89: mol_type = other DNA
accgagacttgtatctgattactctgaggctcgtcaccagcgactatgtcgtagtgggtaaagctccctcttcggagggagcatcagag

SEQ ID NO: 23523 - DNA, 89 bp, synthetic construct
  misc_feature 1..89: note = engineered ribonucleic acid scaffold (ERS) sequence
  source 1..89: mol_type = other DNA
acctgtagttgtatctgattactctgactacagtcaccagcgactatgtcgtagtgggtaaagctccctcttcggagggagcatcagag

SEQ ID NO: 23524 - DNA, 89 bp, synthetic construct
  misc_feature 1..89: note = engineered ribonucleic acid scaffold (ERS) sequence
  source 1..89: mol_type = other DNA
acgagcacttgtatctgattactctgagggctctcaccagcgactatgtcgtagtgggtaaagctccctcttcggagggagcatcagag

SEQ ID NO: 23525 - DNA, 89 bp, synthetic construct
  misc_feature 1..89: note = engineered ribonucleic acid scaffold (ERS) sequence
  source 1..89: mol_type = other DNA
acacacggttttatctgattactctgaccgtgttcaccagcgactatgtcgtagtgggtaaagctccctcttcggagggagcatcagag

SEQ ID NO: 23526 - DNA, 89 bp, synthetic construct
  misc_feature 1..89: note = engineered ribonucleic acid scaffold (ERS) sequence
  source 1..89: mol_type = other DNA
acactggtttttatctgattactctgaaccagttcaccagcgactatgtcgtagtgggtaaagctccctcttcggagggagcatcagag

SEQ ID NO: 23527 - DNA, 89 bp, synthetic construct
  misc_feature 1..89: note = engineered ribonucleic acid scaffold (ERS) sequence
  source 1..89: mol_type = other DNA
acaggccgttttatctgattactctgacggccttcaccagcgactatgtcgtagtgggtaaagctccctcttcggagggagcatcagag

SEQ ID NO: 23528 - DNA, 89 bp, synthetic construct
  misc_feature 1..89: note = engineered ribonucleic acid scaffold (ERS) sequence
  source 1..89: mol_type = other DNA
acaggtccttttatctgattactctgaggaccttcaccagcgactatgtcgtagtgggtaaagctccctcttcggagggagcatcagag

SEQ ID NO: 23529 - DNA, 89 bp, synthetic construct
  misc_feature 1..89: note = engineered ribonucleic acid scaffold (ERS) sequence
  source 1..89: mol_type = other DNA
accagcaattttatctgattactctgattgctgtcaccagcgactatgtcgtagtgggtaaagctccctcttcggagggagcatcagag

SEQ ID NO: 23530 - DNA, 89 bp, synthetic construct
  misc_feature 1..89: note = engineered ribonucleic acid scaffold (ERS) sequence
  source 1..89: mol_type = other DNA
accgagacttttatctgattactctgaggctcgtcaccagcgactatgtcgtagtgggtaaagctccctcttcggagggagcatcagag

SEQ ID NO: 23531 - DNA, 89 bp, synthetic construct
  misc_feature 1..89: note = engineered ribonucleic acid scaffold (ERS) sequence
  source 1..89: mol_type = other DNA
acctgtagttttatctgattactctgactacagtcaccagcgactatgtcgtagtgggtaaagctccctcttcggagggagcatcagag

SEQ ID NO: 23532 - DNA, 89 bp, synthetic construct
  misc_feature 1..89: note = engineered ribonucleic acid scaffold (ERS) sequence
  source 1..89: mol_type = other DNA
acgagcacttttatctgattactctgagggctctcaccagcgactatgtcgtagtgggtaaagctccctcttcggagggagcatcagag

SEQ ID NO: 23533 - DNA, 89 bp, synthetic construct
  misc_feature 1..89: note = engineered ribonucleic acid scaffold (ERS) sequence
  source 1..89: mol_type = other DNA
acacacggttttatctgattactttgaccgtgttcaccagcgactatgtcgtagtgggtaaagctccctcttcggagggagcatcagag

SEQ ID NO: 23534 - DNA, 89 bp, synthetic construct
  misc_feature 1..89: note = engineered ribonucleic acid scaffold (ERS) sequence
  source 1..89: mol_type = other DNA
acactggtttttatctgattactttgaaccagttcaccagcgactatgtcgtagtgggtaaagctccctcttcggagggagcatcagag

SEQ ID NO: 23535 - DNA, 89 bp, synthetic construct
  misc_feature 1..89: note = engineered ribonucleic acid scaffold (ERS) sequence
  source 1..89: mol_type = other DNA
acaggccgttttatctgattactttgacggccttcaccagcgactatgtcgtagtgggtaaagctccctcttcggagggagcatcagag

SEQ ID NO: 23536 - DNA, 89 bp, synthetic construct
  misc_feature 1..89: note = engineered ribonucleic acid scaffold (ERS) sequence
  source 1..89: mol_type = other DNA
acaggtccttttatctgattactttgaggaccttcaccagcgactatgtcgtagtgggtaaagctccctcttcggagggagcatcagag

SEQ ID NO: 23537 - DNA, 89 bp, synthetic construct
  misc_feature 1..89: note = engineered ribonucleic acid scaffold (ERS) sequence
  source 1..89: mol_type = other DNA
accagcaattttatctgattactttgattgctgtcaccagcgactatgtcgtagtgggtaaagctccctcttcggagggagcatcagag

SEQ ID NO: 23538 - DNA, 89 bp, synthetic construct
  misc_feature 1..89: note = engineered ribonucleic acid scaffold (ERS) sequence
  source 1..89: mol_type = other DNA
accgagacttttatctgattactttgaggctcgtcaccagcgactatgtcgtagtgggtaaagctccctcttcggagggagcatcagag

SEQ ID NO: 23539 - DNA, 89 bp, synthetic construct
  misc_feature 1..89: note = engineered ribonucleic acid scaffold (ERS) sequence
  source 1..89: mol_type = other DNA
acctgtagttttatctgattactttgactacagtcaccagcgactatgtcgtagtgggtaaagctccctcttcggagggagcatcagag

SEQ ID NO: 23540 - DNA, 89 bp, synthetic construct
  misc_feature 1..89: note = engineered ribonucleic acid scaffold (ERS) sequence
  source 1..89: mol_type = other DNA
acgagcacttttatctgattactttgagggctctcaccagcgactatgtcgtagtgggtaaagctccctcttcggagggagcatcagag

SEQ ID NO: 23541 - DNA, 89 bp, synthetic construct
  misc_feature 1..89: note = engineered ribonucleic acid scaffold (ERS) sequence
  source 1..89: mol_type = other DNA
acacacggttttatctgattactctgaccgtgttcaccagcgactatgtcgtagtgggtaaagctccctcttcggagggagcatcaaag

SEQ ID NO: 23542 - DNA, 89 bp, synthetic construct
  misc_feature 1..89: note = engineered ribonucleic acid scaffold (ERS) sequence
  source 1..89: mol_type = other DNA
acactggtttttatctgattactctgaaccagttcaccagcgactatgtcgtagtgggtaaagctccctcttcggagggagcatcaaag

SEQ ID NO: 23543 - DNA, 89 bp, synthetic construct
  misc_feature 1..89: note = engineered ribonucleic acid scaffold (ERS) sequence
  source 1..89: mol_type = other DNA
acaggccgttttatctgattactctgacggccttcaccagcgactatgtcgtagtgggtaaagctccctcttcggagggagcatcaaag

SEQ ID NO: 23544 - DNA, 89 bp, synthetic construct
  misc_feature 1..89: note = engineered ribonucleic acid scaffold (ERS) sequence
  source 1..89: mol_type = other DNA
acaggtccttttatctgattactctgaggaccttcaccagcgactatgtcgtagtgggtaaagctccctcttcggagggagcatcaaag

SEQ ID NO: 23545 - DNA, 89 bp, synthetic construct
  misc_feature 1..89: note = engineered ribonucleic acid scaffold (ERS) sequence
  source 1..89: mol_type = other DNA
accagcaattttatctgattactctgattgctgtcaccagcgactatgtcgtagtgggtaaagctccctcttcggagggagcatcaaag

SEQ ID NO: 23546 - DNA, 89 bp, synthetic construct
  misc_feature 1..89: note = engineered ribonucleic acid scaffold (ERS) sequence
  source 1..89: mol_type = other DNA
accgagacttttatctgattactctgaggctcgtcaccagcgactatgtcgtagtgggtaaagctccctcttcggagggagcatcaaag

SEQ ID NO: 23547 - DNA, 89 bp, synthetic construct
  misc_feature 1..89: note = engineered ribonucleic acid scaffold (ERS) sequence
  source 1..89: mol_type = other DNA
acctgtagttttatctgattactctgactacagtcaccagcgactatgtcgtagtgggtaaagctccctcttcggagggagcatcaaag

SEQ ID NO: 23548 - DNA, 89 bp, synthetic construct
  misc_feature 1..89: note = engineered ribonucleic acid scaffold (ERS) sequence
  source 1..89: mol_type = other DNA
acgagcacttttatctgattactctgagggctctcaccagcgactatgtcgtagtgggtaaagctccctcttcggagggagcatcaaag

SEQ ID NO: 23549 - DNA, 89 bp, synthetic construct
  misc_feature 1..89: note = engineered ribonucleic acid scaffold (ERS) sequence
  source 1..89: mol_type = other DNA
acacacggttctatctgattactctgaccgtgttcaccagcgactatgtcgtagtgggtaaagctccctcttcggagggagcctcagag

SEQ ID NO: 23550 - DNA, 89 bp, synthetic construct
  misc_feature 1..89: note = engineered ribonucleic acid scaffold (ERS) sequence
  source 1..89: mol_type = other DNA
acactggtttctatctgattactctgaaccagttcaccagcgactatgtcgtagtgggtaaagctccctcttcggagggagcctcagag

SEQ ID NO: 23551 - DNA, 89 bp, synthetic construct
  misc_feature 1..89: note = engineered ribonucleic acid scaffold (ERS) sequence
  source 1..89: mol_type = other DNA
acaggccgttctatctgattactctgacggccttcaccagcgactatgtcgtagtgggtaaagctccctcttcggagggagcctcagag

SEQ ID NO: 23552 - DNA, 89 bp, synthetic construct
  misc_feature 1..89: note = engineered ribonucleic acid scaffold (ERS) sequence
  source 1..89: mol_type = other DNA
acaggtccttctatctgattactctgaggaccttcaccagcgactatgtcgtagtgggtaaagctccctcttcggagggagcctcagag

SEQ ID NO: 23553 - DNA, 89 bp, synthetic construct
  misc_feature 1..89: note = engineered ribonucleic acid scaffold (ERS) sequence
  source 1..89: mol_type = other DNA
accagcaattctatctgattactctgattgctgtcaccagcgactatgtcgtagtgggtaaagctccctcttcggagggagcctcagag

SEQ ID NO: 23554 - DNA, 89 bp, synthetic construct
  misc_feature 1..89: note = engineered ribonucleic acid scaffold (ERS) sequence
  source 1..89: mol_type = other DNA
accgagacttctatctgattactctgaggctcgtcaccagcgactatgtcgtagtgggtaaagctccctcttcggagggagcctcagag

SEQ ID NO: 23555 - DNA, 89 bp, synthetic construct
  misc_feature 1..89: note = engineered ribonucleic acid scaffold (ERS) sequence
  source 1..89: mol_type = other DNA
acctgtagttctatctgattactctgactacagtcaccagcgactatgtcgtagtgggtaaagctccctcttcggagggagcctcagag

SEQ ID NO: 23556 - DNA, 89 bp, synthetic construct
  misc_feature 1..89: note = engineered ribonucleic acid scaffold (ERS) sequence
  source 1..89: mol_type = other DNA
acgagcacttctatctgattactctgagggctctcaccagcgactatgtcgtagtgggtaaagctccctcttcggagggagcctcagag

SEQ ID NO: 23557 - DNA, 89 bp, synthetic construct
  misc_feature 1..89: note = engineered ribonucleic acid scaffold (ERS) sequence
  source 1..89: mol_type = other DNA
acacacggttctatctgattactctgaccgtgttcaccagcgactatgtcgtagtgggtaaagctccctcttcggagggagcgtcagag

SEQ ID NO: 23558 - DNA, 89 bp, synthetic construct
  misc_feature 1..89: note = engineered ribonucleic acid scaffold (ERS) sequence
  source 1..89: mol_type = other DNA
acactggtttctatctgattactctgaaccagttcaccagcgactatgtcgtagtgggtaaagctccctcttcggagggagcgtcagag

SEQ ID NO: 23559 - DNA, 89 bp, synthetic construct
  misc_feature 1..89: note = engineered ribonucleic acid scaffold (ERS) sequence
  source 1..89: mol_type = other DNA
acaggccgttctatctgattactctgacggccttcaccagcgactatgtcgtagtgggtaaagctccctcttcggagggagcgtcagag

SEQ ID NO: 23560 - DNA, 89 bp, synthetic construct
  misc_feature 1..89: note = engineered ribonucleic acid scaffold (ERS) sequence
  source 1..89: mol_type = other DNA
acaggtccttctatctgattactctgaggaccttcaccagcgactatgtcgtagtgggtaaagctccctcttcggagggagcgtcagag

SEQ ID NO: 23561 - DNA, 89 bp, synthetic construct
  misc_feature 1..89: note = engineered ribonucleic acid scaffold (ERS) sequence
  source 1..89: mol_type = other DNA
accagcaattctatctgattactctgattgctgtcaccagcgactatgtcgtagtgggtaaagctccctcttcggagggagcgtcagag

SEQ ID NO: 23562 - DNA, 89 bp, synthetic construct
  misc_feature 1..89: note = engineered ribonucleic acid scaffold (ERS) sequence
  source 1..89: mol_type = other DNA
accgagacttctatctgattactctgaggctcgtcaccagcgactatgtcgtagtgggtaaagctccctcttcggagggagcgtcagag

SEQ ID NO: 23563 - DNA, 89 bp, synthetic construct
  misc_feature 1..89: note = engineered ribonucleic acid scaffold (ERS) sequence
  source 1..89: mol_type = other DNA
acctgtagttctatctgattactctgactacagtcaccagcgactatgtcgtagtgggtaaagctccctcttcggagggagcgtcagag

SEQ ID NO: 23564 - DNA, 89 bp, synthetic construct
  misc_feature 1..89: note = engineered ribonucleic acid scaffold (ERS) sequence
  source 1..89: mol_type = other DNA
acgagcacttctatctgattactctgagggctctcaccagcgactatgtcgtagtgggtaaagctccctcttcggagggagcgtcagag

SEQ ID NO: 23565 - DNA, 89 bp, synthetic construct
  misc_feature 1..89: note = engineered ribonucleic acid scaffold (ERS) sequence
  source 1..89: mol_type = other DNA
acacacggttctatctgattactctgaccgtgttcaccagcgactatgtcgtagtgggtaaagctccctcttcggagggagcatcaaag

SEQ ID NO: 23566 - DNA, 89 bp, synthetic construct
  misc_feature 1..89: note = engineered ribonucleic acid scaffold (ERS) sequence
  source 1..89: mol_type = other DNA
acactggtttctatctgattactctgaaccagttcaccagcgactatgtcgtagtgggtaaagctccctcttcggagggagcatcaaag

SEQ ID NO: 23567 - DNA, 89 bp, synthetic construct
  misc_feature 1..89: note = engineered ribonucleic acid scaffold (ERS) sequence
  source 1..89: mol_type = other DNA
acaggccgttctatctgattactctgacggccttcaccagcgactatgtcgtagtgggtaaagctccctcttcggagggagcatcaaag

SEQ ID NO: 23568 - DNA, 89 bp, synthetic construct
  misc_feature 1..89: note = engineered ribonucleic acid scaffold (ERS) sequence
  source 1..89: mol_type = other DNA
acaggtccttctatctgattactctgaggaccttcaccagcgactatgtcgtagtgggtaaagctccctcttcggagggagcatcaaag

SEQ ID NO: 23569 - DNA, 89 bp, synthetic construct
  misc_feature 1..89: note = engineered ribonucleic acid scaffold (ERS) sequence
  source 1..89: mol_type = other DNA
accagcaattctatctgattactctgattgctgtcaccagcgactatgtcgtagtgggtaaagctccctcttcggagggagcatcaaag

SEQ ID NO: 23570 - DNA, 89 bp, synthetic construct
  misc_feature 1..89: note = engineered ribonucleic acid scaffold (ERS) sequence
  source 1..89: mol_type = other DNA
accgagacttctatctgattactctgaggctcgtcaccagcgactatgtcgtagtgggtaaagctccctcttcggagggagcatcaaag

SEQ ID NO: 23571 - DNA, 89 bp, synthetic construct
  misc_feature 1..89: note = engineered ribonucleic acid scaffold (ERS) sequence
  source 1..89: mol_type = other DNA
acctgtagttctatctgattactctgactacagtcaccagcgactatgtcgtagtgggtaaagctccctcttcggagggagcatcaaag

SEQ ID NO: 23572 - RNA, 90 nt, synthetic construct
  misc_feature 1..90: note = engineered ribonucleic acid scaffold (ERS) sequence
  source 1..90: mol_type = other RNA
aacacacggttctatctgattactctgaccgtgttcaccagcgactatgtcgtagtgggtaaagctccctcttcggagggagcatcagag

SEQ ID NO: 23573 - RNA, 90 nt, synthetic construct
  misc_feature 1..90: note = engineered ribonucleic acid scaffold (ERS) sequence
  source 1..90: mol_type = other RNA
aacactggtttctatctgattactctgaaccagttcaccagcgactatgtcgtagtgggtaaagctccctcttcggagggagcatcagag

SEQ ID NO: 23574 - RNA, 90 nt, synthetic construct
  misc_feature 1..90: note = engineered ribonucleic acid scaffold (ERS) sequence
  source 1..90: mol_type = other RNA
aacaggccgttctatctgattactctgacggccttcaccagcgactatgtcgtagtgggtaaagctccctcttcggagggagcatcagag

SEQ ID NO: 23575 - RNA, 90 nt, synthetic construct
  misc_feature 1..90: note = engineered ribonucleic acid scaffold (ERS) sequence
  source 1..90: mol_type = other RNA
aacaggtccttctatctgattactctgaggaccttcaccagcgactatgtcgtagtgggtaaagctccctcttcggagggagcatcagag

SEQ ID NO: 23576 - RNA, 90 nt, synthetic construct
  misc_feature 1..90: note = engineered ribonucleic acid scaffold (ERS) sequence
  source 1..90: mol_type = other RNA
aaccagcaattctatctgattactctgattgctgtcaccagcgactatgtcgtagtgggtaaagctccctcttcggagggagcatcagag

SEQ ID NO: 23577 - RNA, 90 nt, synthetic construct
  misc_feature 1..90: note = engineered ribonucleic acid scaffold (ERS) sequence
  source 1..90: mol_type = other RNA
aaccgagacttctatctgattactctgaggctcgtcaccagcgactatgtcgtagtgggtaaagctccctcttcggagggagcatcagag

SEQ ID NO: 23578 - RNA, 90 nt, synthetic construct
  misc_feature 1..90: note = engineered ribonucleic acid scaffold (ERS) sequence
  source 1..90: mol_type = other RNA
aacctgtagttctatctgattactctgactacagtcaccagcgactatgtcgtagtgggtaaagctccctcttcggagggagcatcagag

SEQ ID NO: 23579 - RNA, 90 nt, synthetic construct
  misc_feature 1..90: note = engineered ribonucleic acid scaffold (ERS) sequence
  source 1..90: mol_type = other RNA
aacgagcacttctatctgattactctgagggctctcaccagcgactatgtcgtagtgggtaaagctccctcttcggagggagcatcagag

SEQ ID NO: 23580 - RNA, 90 nt, synthetic construct
  misc_feature 1..90: note = engineered ribonucleic acid scaffold (ERS) sequence
  source 1..90: mol_type = other RNA
aacgaggtgttctatctgattactctgacacctctcaccagcgactatgtcgtagtgggtaaagctccctcttcggagggagcatcagag

SEQ ID NO: 23581 - RNA, 90 nt, synthetic construct
  misc_feature 1..90: note = engineered ribonucleic acid scaffold (ERS) sequence
  source 1..90: mol_type = other RNA
aacgggactttctatctgattactctgaagtccctcaccagcgactatgtcgtagtgggtaaagctccctcttcggagggagcatcagag

SEQ ID NO: 23582 - RNA, 90 nt, synthetic construct
  misc_feature 1..90: note = engineered ribonucleic acid scaffold (ERS) sequence
  source 1..90: mol_type = other RNA
aacgggcaattctatctgattactctgattgccctcaccagcgactatgtcgtagtgggtaaagctccctcttcggagggagcatcagag

SEQ ID NO: 23583 - RNA, 90 nt, synthetic construct
  misc_feature 1..90: note = engineered ribonucleic acid scaffold (ERS) sequence
  source 1..90: mol_type = other RNA
aactgtgcgttctatctgattactctgacgcacatcaccagcgactatgtcgtagtgggtaaagctccctcttcggagggagcatcagag

SEQ ID NO: 23584 - RNA, 89 nt, synthetic construct
  misc_feature 1..89: note = engineered ribonucleic acid scaffold (ERS) sequence
  source 1..89: mol_type = other RNA
gcacacggttctatctgattactctgaccgtgttcaccagcgactatgtcgtagtgggtaaagctccctcttcggagggagcatcagag

SEQ ID NO: 23585 - RNA, 89 nt, synthetic construct
  misc_feature 1..89: note = engineered ribonucleic acid scaffold (ERS) sequence
  source 1..89: mol_type = other RNA
gcactggtttctatctgattactctgaaccagttcaccagcgactatgtcgtagtgggtaaagctccctcttcggagggagcatcagag

SEQ ID NO: 23586 - RNA, 89 nt, synthetic construct
  misc_feature 1..89: note = engineered ribonucleic acid scaffold (ERS) sequence
  source 1..89: mol_type = other RNA
gcaggccgttctatctgattactctgacggccttcaccagcgactatgtcgtagtgggtaaagctccctcttcggagggagcatcagag

SEQ ID NO: 23587 - RNA, 89 nt, synthetic construct
  misc_feature 1..89: note = engineered ribonucleic acid scaffold (ERS) sequence
  source 1..89: mol_type = other RNA
gcaggtccttctatctgattactctgaggaccttcaccagcgactatgtcgtagtgggtaaagctccctcttcggagggagcatcagag

SEQ ID NO: 23588 - RNA, 89 nt, synthetic construct
  misc_feature 1..89: note = engineered ribonucleic acid scaffold (ERS) sequence
  source 1..89: mol_type = other RNA
gccagcaattctatctgattactctgattgctgtcaccagcgactatgtcgtagtgggtaaagctccctcttcggagggagcatcagag

SEQ ID NO: 23589 - RNA, 89 nt, synthetic construct
  misc_feature 1..89: note = engineered ribonucleic acid scaffold (ERS) sequence
  source 1..89: mol_type = other RNA
gccgagacttctatctgattactctgaggctcgtcaccagcgactatgtcgtagtgggtaaagctccctcttcggagggagcatcagag

SEQ ID NO: 23590 - RNA, 89 nt, synthetic construct
  misc_feature 1..89: note = engineered ribonucleic acid scaffold (ERS) sequence
  source 1..89: mol_type = other RNA
gcctgtagttctatctgattactctgactacagtcaccagcgactatgtcgtagtgggtaaagctccctcttcggagggagcatcagag

SEQ ID NO: 23591 - RNA, 89 nt, synthetic construct
  misc_feature 1..89: note = engineered ribonucleic acid scaffold (ERS) sequence
  source 1..89: mol_type = other RNA
gcgagcacttctatctgattactctgagggctctcaccagcgactatgtcgtagtgggtaaagctccctcttcggagggagcatcagag

SEQ ID NO: 23592 - RNA, 89 nt, synthetic construct
  misc_feature 1..89: note = engineered ribonucleic acid scaffold (ERS) sequence
  source 1..89: mol_type = other RNA
gcgaggtgttctatctgattactctgacacctctcaccagcgactatgtcgtagtgggtaaagctccctcttcggagggagcatcagag

SEQ ID NO: 23593 - RNA, 89 nt, synthetic construct
  misc_feature 1..89: note = engineered ribonucleic acid scaffold (ERS) sequence
  source 1..89: mol_type = other RNA
gcgggactttctatctgattactctgaagtccctcaccagcgactatgtcgtagtgggtaaagctccctcttcggagggagcatcagag

SEQ ID NO: 23594 - RNA, 89 nt, synthetic construct
  misc_feature 1..89: note = engineered ribonucleic acid scaffold (ERS) sequence
  source 1..89: mol_type = other RNA
gcgggcaattctatctgattactctgattgccctcaccagcgactatgtcgtagtgggtaaagctccctcttcggagggagcatcagag

SEQ ID NO: 23595 - RNA, 89 nt, synthetic construct
  misc_feature 1..89: note = engineered ribonucleic acid scaffold (ERS) sequence
  source 1..89: mol_type = other RNA
gctgtgcgttctatctgattactctgacgcacatcaccagcgactatgtcgtagtgggtaaagctccctcttcggagggagcatcagag

SEQ ID NO: 23596 - RNA, 89 nt, synthetic construct
  misc_feature 1..89: note = engineered ribonucleic acid scaffold (ERS) sequence
  source 1..89: mol_type = other RNA
taacacggttctatctgattactctgaccgtgttcaccagcgactatgtcgtagtgggtaaagctccctcttcggagggagcatcagag

SEQ ID NO: 23597 - RNA, 89 nt, synthetic construct
  misc_feature 1..89: note = engineered ribonucleic acid scaffold (ERS) sequence
  source 1..89: mol_type = other RNA
taactggtttctatctgattactctgaaccagttcaccagcgactatgtcgtagtgggtaaagctccctcttcggagggagcatcagag

SEQ ID NO: 23598 - RNA, 89 nt, synthetic construct
  misc_feature 1..89: note = engineered ribonucleic acid scaffold (ERS) sequence
  source 1..89: mol_type = other RNA
taaggccgttctatctgattactctgacggccttcaccagcgactatgtcgtagtgggtaaagctccctcttcggagggagcatcagag

SEQ ID NO: 23599 - RNA, 89 nt, synthetic construct
  misc_feature 1..89: note = engineered ribonucleic acid scaffold (ERS) sequence
  source 1..89: mol_type = other RNA
taaggtccttctatctgattactctgaggaccttcaccagcgactatgtcgtagtgggtaaagctccctcttcggagggagcatcagag

SEQ ID NO: 23600 - RNA, 89 nt, synthetic construct
  misc_feature 1..89: note = engineered ribonucleic acid scaffold (ERS) sequence
  source 1..89: mol_type = other RNA
tacagcaattctatctgattactctgattgctgtcaccagcgactatgtcgtagtgggtaaagctccctcttcggagggagcatcagag

SEQ ID NO: 23601 - RNA, 89 nt, synthetic construct
  misc_feature 1..89: note = engineered ribonucleic acid scaffold (ERS) sequence
  source 1..89: mol_type = other RNA
tacgagacttctatctgattactctgaggctcgtcaccagcgactatgtcgtagtgggtaaagctccctcttcggagggagcatcagag

SEQ ID NO: 23602 - RNA, 89 nt, synthetic construct
  misc_feature 1..89: note = engineered ribonucleic acid scaffold (ERS) sequence
  source 1..89: mol_type = other RNA
tactgtagttctatctgattactctgactacagtcaccagcgactatgtcgtagtgggtaaagctccctcttcggagggagcatcagag

SEQ ID NO: 23603 - RNA, 89 nt, synthetic construct
  misc_feature 1..89: note = engineered ribonucleic acid scaffold (ERS) sequence
  source 1..89: mol_type = other RNA
tagagcacttctatctgattactctgagggctctcaccagcgactatgtcgtagtgggtaaagctccctcttcggagggagcatcagag

SEQ ID NO: 23604 - RNA, 89 nt, synthetic construct
  misc_feature 1..89: note = engineered ribonucleic acid scaffold (ERS) sequence
  source 1..89: mol_type = other RNA
tagaggtgttctatctgattactctgacacctctcaccagcgactatgtcgtagtgggtaaagctccctcttcggagggagcatcagag

SEQ ID NO: 23605 - RNA, 89 nt, synthetic construct
  misc_feature 1..89: note = engineered ribonucleic acid scaffold (ERS) sequence
  source 1..89: mol_type = other RNA
tagggactttctatctgattactctgaagtccctcaccagcgactatgtcgtagtgggtaaagctccctcttcggagggagcatcagag

SEQ ID NO: 23606 - RNA, 89 nt, synthetic construct
  misc_feature 1..89: note = engineered ribonucleic acid scaffold (ERS) sequence
  source 1..89: mol_type = other RNA
tagggcaattctatctgattactctgattgccctcaccagcgactatgtcgtagtgggtaaagctccctcttcggagggagcatcagag

SEQ ID NO: 23607 - RNA, 89 nt, synthetic construct
  misc_feature 1..89: note = engineered ribonucleic acid scaffold (ERS) sequence
  source 1..89: mol_type = other RNA
tatgtgcgttctatctgattactctgacgcacatcaccagcgactatgtcgtagtgggtaaagctccctcttcggagggagcatcagag

SEQ ID NO: 23608 - RNA, 89 nt, synthetic construct
  misc_feature 1..89: note = engineered ribonucleic acid scaffold (ERS) sequence
  source 1..89: mol_type = other RNA
tcacacggttctatctgattactctgaccgtgttcaccagcgactatgtcgtagtgggtaaagctccctcttcggagggagcatcagag

SEQ ID NO: 23609 - RNA, 89 nt, synthetic construct
  misc_feature 1..89: note = engineered ribonucleic acid scaffold (ERS) sequence
  source 1..89: mol_type = other RNA
tcactggtttctatctgattactctgaaccagttcaccagcgactatgtcgtagtgggtaaagctccctcttcggagggagcatcagag

SEQ ID NO: 23610 - RNA, 89 nt, synthetic construct
  misc_feature 1..89: note = engineered ribonucleic acid scaffold (ERS) sequence
  source 1..89: mol_type = other RNA
tcaggccgttctatctgattactctgacggccttcaccagcgactatgtcgtagtgggtaaagctccctcttcggagggagcatcagag

SEQ ID NO: 23611 - RNA, 89 nt, synthetic construct
  misc_feature 1..89: note = engineered ribonucleic acid scaffold (ERS) sequence
  source 1..89: mol_type = other RNA
tcaggtccttctatctgattactctgaggaccttcaccagcgactatgtcgtagtgggtaaagctccctcttcggagggagcatcagag

SEQ ID NO: 23612 - RNA, 89 nt, synthetic construct
  misc_feature 1..89: note = engineered ribonucleic acid scaffold (ERS) sequence
  source 1..89: mol_type = other RNA
tccagcaattctatctgattactctgattgctgtcaccagcgactatgtcgtagtgggtaaagctccctcttcggagggagcatcagag

SEQ ID NO: 23613 - RNA, 89 nt, synthetic construct
  misc_feature 1..89: note = engineered ribonucleic acid scaffold (ERS) sequence
  source 1..89: mol_type = other RNA
tccgagacttctatctgattactctgaggctcgtcaccagcgactatgtcgtagtgggtaaagctccctcttcggagggagcatcagag

SEQ ID NO: 23614 - RNA, 89 nt, synthetic construct
  misc_feature 1..89: note = engineered ribonucleic acid scaffold (ERS) sequence
  source 1..89: mol_type = other RNA
tcctgtagttctatctgattactctgactacagtcaccagcgactatgtcgtagtgggtaaagctccctcttcggagggagcatcagag

SEQ ID NO: 23615 - RNA, 89 nt, synthetic construct
  misc_feature 1..89: note = engineered ribonucleic acid scaffold (ERS) sequence
  source 1..89: mol_type = other RNA
tcgagcacttctatctgattactctgagggctctcaccagcgactatgtcgtagtgggtaaagctccctcttcggagggagcatcagag

SEQ ID NO: 23616 - RNA, 89 nt, synthetic construct
  misc_feature 1..89: note = engineered ribonucleic acid scaffold (ERS) sequence
  source 1..89: mol_type = other RNA
tcgaggtgttctatctgattactctgacacctctcaccagcgactatgtcgtagtgggtaaagctccctcttcggagggagcatcagag

SEQ ID NO: 23617 - RNA, 89 nt, synthetic construct
  misc_feature 1..89: note = engineered ribonucleic acid scaffold (ERS) sequence
  source 1..89: mol_type = other RNA
tcgggactttctatctgattactctgaagtccctcaccagcgactatgtcgtagtgggtaaagctccctcttcggagggagcatcagag

SEQ ID NO: 23618 - RNA, 89 nt, synthetic construct
  misc_feature 1..89: note = engineered ribonucleic acid scaffold (ERS) sequence
  source 1..89: mol_type = other RNA
tcgggcaattctatctgattactctgattgccctcaccagcgactatgtcgtagtgggtaaagctccctcttcggagggagcatcagag

SEQ ID NO: 23619 - RNA, 89 nt, synthetic construct
  misc_feature 1..89: note = engineered ribonucleic acid scaffold (ERS) sequence
  source 1..89: mol_type = other RNA
tctgtgcgttctatctgattactctgacgcacatcaccagcgactatgtcgtagtgggtaaagctccctcttcggagggagcatcagag

SEQ ID NO: 23620 - RNA, 90 nt, synthetic construct
  misc_feature 1..90: note = engineered ribonucleic acid scaffold (ERS) sequence
  source 1..90: mol_type = other RNA
atcacacggttctatctgattactctgaccgtgttcaccagcgactatgtcgtagtgggtaaagctccctcttcggagggagcatcagag

SEQ ID NO: 23621 - RNA, 90 nt, synthetic construct
  misc_feature 1..90: note = engineered ribonucleic acid scaffold (ERS) sequence
  source 1..90: mol_type = other RNA
atcactggtttctatctgattactctgaaccagttcaccagcgactatgtcgtagtgggtaaagctccctcttcggagggagcatcagag

SEQ ID NO: 23622 - RNA, 90 nt, synthetic construct
  misc_feature 1..90: note = engineered ribonucleic acid scaffold (ERS) sequence
  source 1..90: mol_type = other RNA
atcaggccgttctatctgattactctgacggccttcaccagcgactatgtcgtagtgggtaaagctccctcttcggagggagcatcagag

SEQ ID NO: 23623 - RNA, 90 nt, synthetic construct
  misc_feature 1..90: note = engineered ribonucleic acid scaffold (ERS) sequence
  source 1..90: mol_type = other RNA
atcaggtccttctatctgattactctgaggaccttcaccagcgactatgtcgtagtgggtaaagctccctcttcggagggagcatcagag

SEQ ID NO: 23624 - RNA, 90 nt, synthetic construct
  misc_feature 1..90: note = engineered ribonucleic acid scaffold (ERS) sequence
  source 1..90: mol_type = other RNA
atccagcaattctatctgattactctgattgctgtcaccagcgactatgtcgtagtgggtaaagctccctcttcggagggagcatcagag

SEQ ID NO: 23625 - RNA, 90 nt, synthetic construct
  misc_feature 1..90: note = engineered ribonucleic acid scaffold (ERS) sequence
  source 1..90: mol_type = other RNA
atccgagacttctatctgattactctgaggctcgtcaccagcgactatgtcgtagtgggtaaagctccctcttcggagggagcatcagag

SEQ ID NO: 23626 - RNA, 90 nt, synthetic construct
  misc_feature 1..90: note = engineered ribonucleic acid scaffold (ERS) sequence
  source 1..90: mol_type = other RNA
atcctgtagttctatctgattactctgactacagtcaccagcgactatgtcgtagtgggtaaagctccctcttcggagggagcatcagag

SEQ ID NO: 23627 - RNA, 90 nt, synthetic construct
  misc_feature 1..90: note = engineered ribonucleic acid scaffold (ERS) sequence
  source 1..90: mol_type = other RNA
atcgagcacttctatctgattactctgagggctctcaccagcgactatgtcgtagtgggtaaagctccctcttcggagggagcatcagag

SEQ ID NO: 23628 - RNA, 90 nt, synthetic construct
  misc_feature 1..90: note = engineered ribonucleic acid scaffold (ERS) sequence
  source 1..90: mol_type = other RNA
atcgaggtgttctatctgattactctgacacctctcaccagcgactatgtcgtagtgggtaaagctccctcttcggagggagcatcagag

SEQ ID NO: 23629 - RNA, 90 nt, synthetic construct
  misc_feature 1..90: note = engineered ribonucleic acid scaffold (ERS) sequence
  source 1..90: mol_type = other RNA
atcgggactttctatctgattactctgaagtccctcaccagcgactatgtcgtagtgggtaaagctccctcttcggagggagcatcagag

SEQ ID NO: 23630 - RNA, 90 nt, synthetic construct
  misc_feature 1..90: note = engineered ribonucleic acid scaffold (ERS) sequence
  source 1..90: mol_type = other RNA
atcgggcaattctatctgattactctgattgccctcaccagcgactatgtcgtagtgggtaaagctccctcttcggagggagcatcagag

SEQ ID NO: 23631 - RNA, 90 nt, synthetic construct
  misc_feature 1..90: note = engineered ribonucleic acid scaffold (ERS) sequence
  source 1..90: mol_type = other RNA
atctgtgcgttctatctgattactctgacgcacatcaccagcgactatgtcgtagtgggtaaagctccctcttcggagggagcatcagag

SEQ ID NO: 23632 - RNA, 88 nt, synthetic construct
  misc_feature 1..88: note = engineered ribonucleic acid scaffold (ERS) sequence
  source 1..88: mol_type = other RNA
aacacggttctatctgattactctgaccgtgttcaccagcgactatgtcgtagtgggtaaagctccctcttcggagggagcatcagag

SEQ ID NO: 23633 - RNA, 88 nt, synthetic construct
  misc_feature 1..88: note = engineered ribonucleic acid scaffold (ERS) sequence
  source 1..88: mol_type = other RNA
aactggtttctatctgattactctgaaccagttcaccagcgactatgtcgtagtgggtaaagctccctcttcggagggagcatcagag

SEQ ID NO: 23634 - RNA, 88 nt, synthetic construct
  misc_feature 1..88: note = engineered ribonucleic acid scaffold (ERS) sequence
  source 1..88: mol_type = other RNA
aaggccgttctatctgattactctgacggccttcaccagcgactatgtcgtagtgggtaaagctccctcttcggagggagcatcagag

SEQ ID NO: 23635 - RNA, 88 nt, synthetic construct
  misc_feature 1..88: note = engineered ribonucleic acid scaffold (ERS) sequence
  source 1..88: mol_type = other RNA
aaggtccttctatctgattactctgaggaccttcaccagcgactatgtcgtagtgggtaaagctccctcttcggagggagcatcagag

SEQ ID NO: 23636 - RNA, 88 nt, synthetic construct
  misc_feature 1..88: note = engineered ribonucleic acid scaffold (ERS) sequence
  source 1..88: mol_type = other RNA
acagcaattctatctgattactctgattgctgtcaccagcgactatgtcgtagtgggtaaagctccctcttcggagggagcatcagag

SEQ ID NO: 23637 - RNA, 88 nt, synthetic construct
  misc_feature 1..88: note = engineered ribonucleic acid scaffold (ERS) sequence
  source 1..88: mol_type = other RNA
acgagacttctatctgattactctgaggctcgtcaccagcgactatgtcgtagtgggtaaagctccctcttcggagggagcatcagag

SEQ ID NO: 23638 - RNA, 88 nt, synthetic construct
  misc_feature 1..88: note = engineered ribonucleic acid scaffold (ERS) sequence
  source 1..88: mol_type = other RNA
actgtagttctatctgattactctgactacagtcaccagcgactatgtcgtagtgggtaaagctccctcttcggagggagcatcagag

SEQ ID NO: 23639 - RNA, 88 nt, synthetic construct
  misc_feature 1..88: note = engineered ribonucleic acid scaffold (ERS) sequence
  source 1..88: mol_type = other RNA
agagcacttctatctgattactctgagggctctcaccagcgactatgtcgtagtgggtaaagctccctcttcggagggagcatcagag

SEQ ID NO: 23640 - RNA, 88 nt, synthetic construct
  misc_feature 1..88: note = engineered ribonucleic acid scaffold (ERS) sequence
  source 1..88: mol_type = other RNA
agaggtgttctatctgattactctgacacctctcaccagcgactatgtcgtagtgggtaaagctccctcttcggagggagcatcagag

SEQ ID NO: 23641 - RNA, 88 nt, synthetic construct
  misc_feature 1..88: note = engineered ribonucleic acid scaffold (ERS) sequence
  source 1..88: mol_type = other RNA
agggactttctatctgattactctgaagtccctcaccagcgactatgtcgtagtgggtaaagctccctcttcggagggagcatcagag

SEQ ID NO: 23642 - RNA, 88 nt, synthetic construct
  misc_feature 1..88: note = engineered ribonucleic acid scaffold (ERS) sequence
  source 1..88: mol_type = other RNA
agggcaattctatctgattactctgattgccctcaccagcgactatgtcgtagtgggtaaagctccctcttcggagggagcatcagag

SEQ ID NO: 23643 - RNA, 88 nt, synthetic construct
  misc_feature 1..88: note = engineered ribonucleic acid scaffold (ERS) sequence
  source 1..88: mol_type = other RNA
atgtgcgttctatctgattactctgacgcacatcaccagcgactatgtcgtagtgggtaaagctccctcttcggagggagcatcagag

SEQ ID NO: 23644 - RNA, 89 nt, synthetic construct
  misc_feature 1..89: note = engineered ribonucleic acid scaffold (ERS) sequence
  source 1..89: mol_type = other RNA
aaacacggttctatctgattactctgaccgtgttcaccagcgactatgtcgtagtgggtaaagctccctcttcggagggagcatcagag

SEQ ID NO: 23645 - RNA, 89 nt, synthetic construct
  misc_feature 1..89: note = engineered ribonucleic acid scaffold (ERS) sequence
  source 1..89: mol_type = other RNA
aaactggtttctatctgattactctgaaccagttcaccagcgactatgtcgtagtgggtaaagctccctcttcggagggagcatcagag

SEQ ID NO: 23646 - RNA, 89 nt, synthetic construct
  misc_feature 1..89: note = engineered ribonucleic acid scaffold (ERS) sequence
  source 1..89: mol_type = other RNA
aaaggccgttctatctgattactctgacggccttcaccagcgactatgtcgtagtgggtaaagctccctcttcggagggagcatcagag

SEQ ID NO: 23647 - RNA, 89 nt, synthetic construct
  misc_feature 1..89: note = engineered ribonucleic acid scaffold (ERS) sequence
  source 1..89: mol_type = other RNA
aaaggtccttctatctgattactctgaggaccttcaccagcgactatgtcgtagtgggtaaagctccctcttcggagggagcatcagag

SEQ ID NO: 23648 - RNA, 89 nt, synthetic construct
  misc_feature 1..89: note = engineered ribonucleic acid scaffold (ERS) sequence
  source 1..89: mol_type = other RNA
aacagcaattctatctgattactctgattgctgtcaccagcgactatgtcgtagtgggtaaagctccctcttcggagggagcatcagag

SEQ ID NO: 23649 - RNA, 89 nt, synthetic construct
  misc_feature 1..89: note = engineered ribonucleic acid scaffold (ERS) sequence
  source 1..89: mol_type = other RNA
aacgagacttctatctgattactctgaggctcgtcaccagcgactatgtcgtagtgggtaaagctccctcttcggagggagcatcagag

SEQ ID NO: 23650 - RNA, 89 nt, synthetic construct
  misc_feature 1..89: note = engineered ribonucleic acid scaffold (ERS) sequence
  source 1..89: mol_type = other RNA
aactgtagttctatctgattactctgactacagtcaccagcgactatgtcgtagtgggtaaagctccctcttcggagggagcatcagag

SEQ ID NO: 23651 - RNA, 89 nt, synthetic construct
  misc_feature 1..89: note = engineered ribonucleic acid scaffold (ERS) sequence
  source 1..89: mol_type = other RNA
aagagcacttctatctgattactctgagggctctcaccagcgactatgtcgtagtgggtaaagctccctcttcggagggagcatcagag

SEQ ID NO: 23652 - RNA, 89 nt, synthetic construct
  misc_feature 1..89: note = engineered ribonucleic acid scaffold (ERS) sequence
  source 1..89: mol_type = other RNA
aagaggtgttctatctgattactctgacacctctcaccagcgactatgtcgtagtgggtaaagctccctcttcggagggagcatcagag

SEQ ID NO: 23653 - RNA, 89 nt, synthetic construct
  misc_feature 1..89: note = engineered ribonucleic acid scaffold (ERS) sequence
  source 1..89: mol_type = other RNA
aagggactttctatctgattactctgaagtccctcaccagcgactatgtcgtagtgggtaaagctccctcttcggagggagcatcagag

SEQ ID NO: 23654 - RNA, 89 nt, synthetic construct
  misc_feature 1..89: note = engineered ribonucleic acid scaffold (ERS) sequence
  source 1..89: mol_type = other RNA
aagggcaattctatctgattactctgattgccctcaccagcgactatgtcgtagtgggtaaagctccctcttcggagggagcatcagag

SEQ ID NO: 23655 - RNA, 89 nt, synthetic construct
  misc_feature 1..89: note = engineered ribonucleic acid scaffold (ERS) sequence
  source 1..89: mol_type = other RNA
aatgtgcgttctatctgattactctgacgcacatcaccagcgactatgtcgtagtgggtaaagctccctcttcggagggagcatcagag

SEQ ID NO: 23656 - RNA, 89 nt, synthetic construct
  misc_feature 1..89: note = engineered ribonucleic acid scaffold (ERS) sequence
  source 1..89: mol_type = other RNA
agacacggttctatctgattactctgaccgtgttcaccagcgactatgtcgtagtgggtaaagctccctcttcggagggagcatcagag

SEQ ID NO: 23657 - RNA, 89 nt, synthetic construct
  misc_feature 1..89: note = engineered ribonucleic acid scaffold (ERS) sequence
  source 1..89: mol_type = other RNA
agactggtttctatctgattactctgaaccagttcaccagcgactatgtcgtagtgggtaaagctccctcttcggagggagcatcagag

SEQ ID NO: 23658 - RNA, 89 nt, synthetic construct
  misc_feature 1..89: note = engineered ribonucleic acid scaffold (ERS) sequence
  source 1..89: mol_type = other RNA
agaggccgttctatctgattactctgacggccttcaccagcgactatgtcgtagtgggtaaagctccctcttcggagggagcatcagag

SEQ ID NO: 23659 - RNA, 89 nt, synthetic construct
  misc_feature 1..89: note = engineered ribonucleic acid scaffold (ERS) sequence
  source 1..89: mol_type = other RNA
agaggtccttctatctgattactctgaggaccttcaccagcgactatgtcgtagtgggtaaagctccctcttcggagggagcatcagag

SEQ ID NO: 23660 - RNA, 89 nt, synthetic construct
  misc_feature 1..89: note = engineered ribonucleic acid scaffold (ERS) sequence
  source 1..89: mol_type = other RNA
agcagcaattctatctgattactctgattgctgtcaccagcgactatgtcgtagtgggtaaagctccctcttcggagggagcatcagag

SEQ ID NO: 23661 - RNA, 89 nt, synthetic construct
  misc_feature 1..89: note = engineered ribonucleic acid scaffold (ERS) sequence
  source 1..89: mol_type = other RNA
agcgagacttctatctgattactctgaggctcgtcaccagcgactatgtcgtagtgggtaaagctccctcttcggagggagcatcagag

SEQ ID NO: 23662 - RNA, 89 nt, synthetic construct
  misc_feature 1..89: note = engineered ribonucleic acid scaffold (ERS) sequence
  source 1..89: mol_type = other RNA
agctgtagttctatctgattactctgactacagtcaccagcgactatgtcgtagtgggtaaagctccctcttcggagggagcatcagag

SEQ ID NO: 23663 - RNA, 89 nt, synthetic construct
  misc_feature 1..89: note = engineered ribonucleic acid scaffold (ERS) sequence
  source 1..89: mol_type = other RNA
aggagcacttctatctgattactctgagggctctcaccagcgactatgtcgtagtgggtaaagctccctcttcggagggagcatcagag

SEQ ID NO: 23664 - RNA, 89 nt, synthetic construct
  misc_feature 1..89: note = engineered ribonucleic acid scaffold (ERS) sequence
  source 1..89: mol_type = other RNA
aggaggtgttctatctgattactctgacacctctcaccagcgactatgtcgtagtgggtaaagctccctcttcggagggagcatcagag

SEQ ID NO: 23665 - RNA, 89 nt, synthetic construct
  misc_feature 1..89: note = engineered ribonucleic acid scaffold (ERS) sequence
  source 1..89: mol_type = other RNA
aggggactttctatctgattactctgaagtccctcaccagcgactatgtcgtagtgggtaaagctccctcttcggagggagcatcagag

SEQ ID NO: 23666 - RNA, 89 nt, synthetic construct
  misc_feature 1..89: note = engineered ribonucleic acid scaffold (ERS) sequence
  source 1..89: mol_type = other RNA
aggggcaattctatctgattactctgattgccctcaccagcgactatgtcgtagtgggtaaagctccctcttcggagggagcatcagag

SEQ ID NO: 23667 - RNA, 89 nt, synthetic construct
  misc_feature 1..89: note = engineered ribonucleic acid scaffold (ERS) sequence
  source 1..89: mol_type = other RNA
agtgtgcgttctatctgattactctgacgcacatcaccagcgactatgtcgtagtgggtaaagctccctcttcggagggagcatcagag

SEQ ID NO: 23668 - RNA, 95 nt, synthetic construct
  misc_feature 1..95: note = engineered ribonucleic acid scaffold (ERS) sequence
  source 1..95: mol_type = other RNA
acacacggaggcacttctatctgattactctgaccgtgttcaccagcgactatgtcgtagtgggtaaagctccctcttcggagggagcatcagag

SEQ ID NO: 23669 - RNA, 95 nt, synthetic construct
  misc_feature 1..95: note = engineered ribonucleic acid scaffold (ERS) sequence
  source 1..95: mol_type = other RNA
acactggtaggcacttctatctgattactctgaaccagttcaccagcgactatgtcgtagtgggtaaagctccctcttcggagggagcatcagag

SEQ ID NO: 23670 - RNA, 95 nt, synthetic construct
  misc_feature 1..95: note = engineered ribonucleic acid scaffold (ERS) sequence
  source 1..95: mol_type = other RNA
acaggccgaggcacttctatctgattactctgacggccttcaccagcgactatgtcgtagtgggtaaagctccctcttcggagggagcatcagag

SEQ ID NO: 23671 - RNA, 95 nt, synthetic construct
  misc_feature 1..95: note = engineered ribonucleic acid scaffold (ERS) sequence
  source 1..95: mol_type = other RNA
acaggtccaggcacttctatctgattactctgaggaccttcaccagcgactatgtcgtagtgggtaaagctccctcttcggagggagcatcagag

SEQ ID NO: 23672 - RNA, 95 nt, synthetic construct
  misc_feature 1..95: note = engineered ribonucleic acid scaffold (ERS) sequence
  source 1..95: mol_type = other RNA
accagcaaaggcacttctatctgattactctgattgctgtcaccagcgactatgtcgtagtgggtaaagctccctcttcggagggagcatcagag

SEQ ID NO: 23673 - RNA, 95 nt, synthetic construct
  misc_feature 1..95: note = engineered ribonucleic acid scaffold (ERS) sequence
  source 1..95: mol_type = other RNA
accgagacaggcacttctatctgattactctgaggctcgtcaccagcgactatgtcgtagtgggtaaagctccctcttcggagggagcatcagag

SEQ ID NO: 23674 - RNA, 95 nt, synthetic construct
  misc_feature 1..95: note = engineered ribonucleic acid scaffold (ERS) sequence
  source 1..95: mol_type = other RNA
acctgtagaggcacttctatctgattactctgactacagtcaccagcgactatgtcgtagtgggtaaagctccctcttcggagggagcatcagag

SEQ ID NO: 23675 - RNA, 95 nt, synthetic construct
  misc_feature 1..95: note = engineered ribonucleic acid scaffold (ERS) sequence
  source 1..95: mol_type = other RNA
acgagcacaggcacttctatctgattactctgagggctctcaccagcgactatgtcgtagtgggtaaagctccctcttcggagggagcatcagag

SEQ ID NO: 23676 - RNA, 95 nt, synthetic construct
  misc_feature 1..95: note = engineered ribonucleic acid scaffold (ERS) sequence
  source 1..95: mol_type = other RNA
acgaggtgaggcacttctatctgattactctgacacctctcaccagcgactatgtcgtagtgggtaaagctccctcttcggagggagcatcagag

SEQ ID NO: 23677 - RNA, 95 nt, synthetic construct
  misc_feature 1..95: note = engineered ribonucleic acid scaffold (ERS) sequence
  source 1..95: mol_type = other RNA
acgggactaggcacttctatctgattactctgaagtccctcaccagcgactatgtcgtagtgggtaaagctccctcttcggagggagcatcagag

SEQ ID NO: 23678 - RNA, 95 nt, synthetic construct
  misc_feature 1..95: note = engineered ribonucleic acid scaffold (ERS) sequence
  source 1..95: mol_type = other RNA
acgggcaaaggcacttctatctgattactctgattgccctcaccagcgactatgtcgtagtgggtaaagctccctcttcggagggagcatcagag

SEQ ID NO: 23679 - RNA, 95 nt, synthetic construct
  misc_feature 1..95: note = engineered ribonucleic acid scaffold (ERS) sequence
  source 1..95: mol_type = other RNA
actgtgcgaggcacttctatctgattactctgacgcacatcaccagcgactatgtcgtagtgggtaaagctccctcttcggagggagcatcagag

SEQ ID NO: 23680 - RNA, 87 nt, synthetic construct
  misc_feature 1..87: note = engineered ribonucleic acid scaffold (ERS) sequence
  source 1..87: mol_type = other RNA
acacacggttctatctgattactctgaccgtgttcaccagcgactatgtcgtagtgggtaaactccctcttcggagggagatcagag

SEQ ID NO: 23681 - RNA, 87 nt, synthetic construct
  misc_feature 1..87: note = engineered ribonucleic acid scaffold (ERS) sequence
  source 1..87: mol_type = other RNA
acactggtttctatctgattactctgaaccagttcaccagcgactatgtcgtagtgggtaaactccctcttcggagggagatcagag

SEQ ID NO: 23682 - RNA, 87 nt, synthetic construct
  misc_feature 1..87: note = engineered ribonucleic acid scaffold (ERS) sequence
  source 1..87: mol_type = other RNA
acaggccgttctatctgattactctgacggccttcaccagcgactatgtcgtagtgggtaaactccctcttcggagggagatcagag

SEQ ID NO: 23683 - RNA, 87 nt, synthetic construct
  misc_feature 1..87: note = engineered ribonucleic acid scaffold (ERS) sequence
  source 1..87: mol_type = other RNA
acaggtccttctatctgattactctgaggaccttcaccagcgactatgtcgtagtgggtaaactccctcttcggagggagatcagag

SEQ ID NO: 23684 - RNA, 87 nt, synthetic construct
  misc_feature 1..87: note = engineered ribonucleic acid scaffold (ERS) sequence
  source 1..87: mol_type = other RNA
accagcaattctatctgattactctgattgctgtcaccagcgactatgtcgtagtgggtaaactccctcttcggagggagatcagag

SEQ ID NO: 23685 - RNA, 87 nt, synthetic construct
  misc_feature 1..87: note = engineered ribonucleic acid scaffold (ERS) sequence
  source 1..87: mol_type = other RNA
accgagacttctatctgattactctgaggctcgtcaccagcgactatgtcgtagtgggtaaactccctcttcggagggagatcagag

SEQ ID NO: 23686 - RNA, 87 nt, synthetic construct
  misc_feature 1..87: note = engineered ribonucleic acid scaffold (ERS) sequence
  source 1..87: mol_type = other RNA
acctgtagttctatctgattactctgactacagtcaccagcgactatgtcgtagtgggtaaactccctcttcggagggagatcagag

SEQ ID NO: 23687 - RNA, 87 nt, synthetic construct
  misc_feature 1..87: note = engineered ribonucleic acid scaffold (ERS) sequence
  source 1..87: mol_type = other RNA
acgagcacttctatctgattactctgagggctctcaccagcgactatgtcgtagtgggtaaactccctcttcggagggagatcagag

SEQ ID NO: 23688 - RNA, 87 nt, synthetic construct
  misc_feature 1..87: note = engineered ribonucleic acid scaffold (ERS) sequence
  source 1..87: mol_type = other RNA
acgaggtgttctatctgattactctgacacctctcaccagcgactatgtcgtagtgggtaaactccctcttcggagggagatcagag

SEQ ID NO: 23689 - RNA, 87 nt, synthetic construct
  misc_feature 1..87: note = engineered ribonucleic acid scaffold (ERS) sequence
  source 1..87: mol_type = other RNA
acgggactttctatctgattactctgaagtccctcaccagcgactatgtcgtagtgggtaaactccctcttcggagggagatcagag

SEQ ID NO: 23690 - RNA, 87 nt, synthetic construct
  misc_feature 1..87: note = engineered ribonucleic acid scaffold (ERS) sequence
  source 1..87: mol_type = other RNA
acgggcaattctatctgattactctgattgccctcaccagcgactatgtcgtagtgggtaaactccctcttcggagggagatcagag

SEQ ID NO: 23691 - RNA, 87 nt, synthetic construct
  misc_feature 1..87: note = engineered ribonucleic acid scaffold (ERS) sequence
  source 1..87: mol_type = other RNA
actgtgcgttctatctgattactctgacgcacatcaccagcgactatgtcgtagtgggtaaactccctcttcggagggagatcagag

SEQ ID NO: 23692 - RNA, 89 nt, synthetic construct
  misc_feature 1..89: note = engineered ribonucleic acid scaffold (ERS) sequence
  source 1..89: mol_type = other RNA
acacacggttctatctgattactctgaccgtgttcaccagcgactatgtcgtagtgggtaaagcgccctcttcggagggagcatcagag

SEQ ID NO: 23693 - RNA, 89 nt, synthetic construct
  misc_feature 1..89: note = engineered ribonucleic acid scaffold (ERS) sequence
  source 1..89: mol_type = other RNA
acactggtttctatctgattactctgaaccagttcaccagcgactatgtcgtagtgggtaaagcgccctcttcggagggagcatcagag

SEQ ID NO: 23694 - RNA, 89 nt, synthetic construct
  misc_feature 1..89: note = engineered ribonucleic acid scaffold (ERS) sequence
  source 1..89: mol_type = other RNA
acaggccgttctatctgattactctgacggccttcaccagcgactatgtcgtagtgggtaaagcgccctcttcggagggagcatcagag

SEQ ID NO: 23695 - RNA, 89 nt, synthetic construct
  misc_feature 1..89: note = engineered ribonucleic acid scaffold (ERS) sequence
  source 1..89: mol_type = other RNA
acaggtccttctatctgattactctgaggaccttcaccagcgactatgtcgtagtgggtaaagcgccctcttcggagggagcatcagag

SEQ ID NO: 23696 - RNA, 89 nt, synthetic construct
  misc_feature 1..89: note = engineered ribonucleic acid scaffold (ERS) sequence
  source 1..89: mol_type = other RNA
accagcaattctatctgattactctgattgctgtcaccagcgactatgtcgtagtgggtaaagcgccctcttcggagggagcatcagag

SEQ ID NO: 23697 - RNA, 89 nt, synthetic construct
  misc_feature 1..89: note = engineered ribonucleic acid scaffold (ERS) sequence
  source 1..89: mol_type = other RNA
accgagacttctatctgattactctgaggctcgtcaccagcgactatgtcgtagtgggtaaagcgccctcttcggagggagcatcagag

SEQ ID NO: 23698 - RNA, 89 nt, synthetic construct
  misc_feature 1..89: note = engineered ribonucleic acid scaffold (ERS) sequence
  source 1..89: mol_type = other RNA
acctgtagttctatctgattactctgactacagtcaccagcgactatgtcgtagtgggtaaagcgccctcttcggagggagcatcagag

SEQ ID NO: 23699 - RNA, 89 nt, synthetic construct
  misc_feature 1..89: note = engineered ribonucleic acid scaffold (ERS) sequence
  source 1..89: mol_type = other RNA
acgagcacttctatctgattactctgagggctctcaccagcgactatgtcgtagtgggtaaagcgccctcttcggagggagcatcagag

SEQ ID NO: 23700 - RNA, 89 nt, synthetic construct
  misc_feature 1..89: note = engineered ribonucleic acid scaffold (ERS) sequence
  source 1..89: mol_type = other RNA
acgaggtgttctatctgattactctgacacctctcaccagcgactatgtcgtagtgggtaaagcgccctcttcggagggagcatcagag

SEQ ID NO: 23701 - RNA, 89 nt, synthetic construct
  misc_feature 1..89: note = engineered ribonucleic acid scaffold (ERS) sequence
  source 1..89: mol_type = other RNA
acgggactttctatctgattactctgaagtccctcaccagcgactatgtcgtagtgggtaaagcgccctcttcggagggagcatcagag

SEQ ID NO: 23702 - RNA, 89 nt, synthetic construct
  misc_feature 1..89: note = engineered ribonucleic acid scaffold (ERS) sequence
  source 1..89: mol_type = other RNA
acgggcaattctatctgattactctgattgccctcaccagcgactatgtcgtagtgggtaaagcgccctcttcggagggagcatcagag

SEQ ID NO: 23703 - RNA, 89 nt, synthetic construct
  misc_feature 1..89: note = engineered ribonucleic acid scaffold (ERS) sequence
  source 1..89: mol_type = other RNA
actgtgcgttctatctgattactctgacgcacatcaccagcgactatgtcgtagtgggtaaagcgccctcttcggagggagcatcagag

SEQ ID NO: 23704 - RNA, 99 nt, synthetic construct
  misc_feature 1..99: note = engineered ribonucleic acid scaffold (ERS) sequence
  source 1..99: mol_type = other RNA
acacacggttctatctgattactctgaccgtgttcaccagcgactatgtcgtagtgggtaaagcgccttacggacttcggtccgtaaggagcatcagag

SEQ ID NO: 23705 - RNA, 99 nt, synthetic construct
  misc_feature 1..99: note = engineered ribonucleic acid scaffold (ERS) sequence
  source 1..99: mol_type = other RNA
acactggtttctatctgattactctgaaccagttcaccagcgactatgtcgtagtgggtaaagcgccttacggacttcggtccgtaaggagcatcagag

SEQ ID NO: 23706 - RNA, 99 nt, synthetic construct
  misc_feature 1..99: note = engineered ribonucleic acid scaffold (ERS) sequence
  source 1..99: mol_type = other RNA
acaggccgttctatctgattactctgacggccttcaccagcgactatgtcgtagtgggtaaagcgccttacggacttcggtccgtaaggagcatcagag

SEQ ID NO: 23707 - RNA, 99 nt, synthetic construct
  misc_feature 1..99: note = engineered ribonucleic acid scaffold (ERS) sequence
  source 1..99: mol_type = other RNA
acaggtccttctatctgattactctgaggaccttcaccagcgactatgtcgtagtgggtaaagcgccttacggacttcggtccgtaaggagcatcagag

SEQ ID NO: 23708 - RNA, 99 nt, synthetic construct
  misc_feature 1..99: note = engineered ribonucleic acid scaffold (ERS) sequence
  source 1..99: mol_type = other RNA
accagcaattctatctgattactctgattgctgtcaccagcgactatgtcgtagtgggtaaagcgccttacggacttcggtccgtaaggagcatcagag

SEQ ID NO: 23709 - RNA, 99 nt, synthetic construct
  misc_feature 1..99: note = engineered ribonucleic acid scaffold (ERS) sequence
  source 1..99: mol_type = other RNA
accgagacttctatctgattactctgaggctcgtcaccagcgactatgtcgtagtgggtaaagcgccttacggacttcggtccgtaaggagcatcagag

SEQ ID NO: 23710 - RNA, 99 nt, synthetic construct
  misc_feature 1..99: note = engineered ribonucleic acid scaffold (ERS) sequence
  source 1..99: mol_type = other RNA
acctgtagttctatctgattactctgactacagtcaccagcgactatgtcgtagtgggtaaagcgccttacggacttcggtccgtaaggagcatcagag

SEQ ID NO: 23711 - RNA, 99 nt, synthetic construct
  misc_feature 1..99: note = engineered ribonucleic acid scaffold (ERS) sequence
  source 1..99: mol_type = other RNA
acgagcacttctatctgattactctgagggctctcaccagcgactatgtcgtagtgggtaaagcgccttacggacttcggtccgtaaggagcatcagag

SEQ ID NO: 23712 - RNA, 99 nt, synthetic construct
  misc_feature 1..99: note = engineered ribonucleic acid scaffold (ERS) sequence
  source 1..99: mol_type = other RNA
acgaggtgttctatctgattactctgacacctctcaccagcgactatgtcgtagtgggtaaagcgccttacggacttcggtccgtaaggagcatcagag

SEQ ID NO: 23713 - RNA, 99 nt, synthetic construct
  misc_feature 1..99: note = engineered ribonucleic acid scaffold (ERS) sequence
  source 1..99: mol_type = other RNA
acgggactttctatctgattactctgaagtccctcaccagcgactatgtcgtagtgggtaaagcgccttacggacttcggtccgtaaggagcatcagag

SEQ ID NO: 23714 - RNA, 99 nt, synthetic construct
  misc_feature 1..99: note = engineered ribonucleic acid scaffold (ERS) sequence
  source 1..99: mol_type = other RNA
acgggcaattctatctgattactctgattgccctcaccagcgactatgtcgtagtgggtaaagcgccttacggacttcggtccgtaaggagcatcagag

SEQ ID NO: 23715 - RNA, 99 nt, synthetic construct
  misc_feature 1..99: note = engineered ribonucleic acid scaffold (ERS) sequence
  source 1..99: mol_type = other RNA
actgtgcgttctatctgattactctgacgcacatcaccagcgactatgtcgtagtgggtaaagcgccttacggacttcggtccgtaaggagcatcagag

SEQ ID NO: 23716 - RNA, 99 nt, synthetic construct
  misc_feature 1..99: note = engineered ribonucleic acid scaffold (ERS) sequence
  source 1..99: mol_type = other RNA
acacacggttctatctgattactctgaccgtgttcaccagcgactatgtcgtagtgggtaaagcgcttacggaattcgtgtccgtaagaagcatcagag

SEQ ID NO: 23717 - RNA, 99 nt, synthetic construct
  misc_feature 1..99: note = engineered ribonucleic acid scaffold (ERS) sequence
  source 1..99: mol_type = other RNA
acactggtttctatctgattactctgaaccagttcaccagcgactatgtcgtagtgggtaaagcgcttacggaattcgtgtccgtaagaagcatcagag

SEQ ID NO: 23718 - RNA, 99 nt, synthetic construct
  misc_feature 1..99: note = engineered ribonucleic acid scaffold (ERS) sequence
  source 1..99: mol_type = other RNA
acaggccgttctatctgattactctgacggccttcaccagcgactatgtcgtagtgggtaaagcgcttacggaattcgtgtccgtaagaagcatcagag

SEQ ID NO: 23719 - RNA, 99 nt, synthetic construct
  misc_feature 1..99: note = engineered ribonucleic acid scaffold (ERS) sequence
  source 1..99: mol_type = other RNA
acaggtccttctatctgattactctgaggaccttcaccagcgactatgtcgtagtgggtaaagcgcttacggaattcgtgtccgtaagaagcatcagag

SEQ ID NO: 23720 - RNA, 99 nt, synthetic construct
  misc_feature 1..99: note = engineered ribonucleic acid scaffold (ERS) sequence
  source 1..99: mol_type = other RNA
accagcaattctatctgattactctgattgctgtcaccagcgactatgtcgtagtgggtaaagcgcttacggaattcgtgtccgtaagaagcatcagag

SEQ ID NO: 23721 - RNA, 99 nt, synthetic construct
  misc_feature 1..99: note = engineered ribonucleic acid scaffold (ERS) sequence
  source 1..99: mol_type = other RNA
accgagacttctatctgattactctgaggctcgtcaccagcgactatgtcgtagtgggtaaagcgcttacggaattcgtgtccgtaagaagcatcagag

SEQ ID NO: 23722 - RNA, 99 nt, synthetic construct
  misc_feature 1..99: note = engineered ribonucleic acid scaffold (ERS) sequence
  source 1..99: mol_type = other RNA
acctgtagttctatctgattactctgactacagtcaccagcgactatgtcgtagtgggtaaagcgcttacggaattcgtgtccgtaagaagcatcagag

SEQ ID NO: 23723 - RNA, 99 nt, synthetic construct
  misc_feature 1..99: note = engineered ribonucleic acid scaffold (ERS) sequence
  source 1..99: mol_type = other RNA
acgagcacttctatctgattactctgagggctctcaccagcgactatgtcgtagtgggtaaagcgcttacggaattcgtgtccgtaagaagcatcagag

SEQ ID NO: 23724 - RNA, 99 nt, synthetic construct
  misc_feature 1..99: note = engineered ribonucleic acid scaffold (ERS) sequence
  source 1..99: mol_type = other RNA
acgaggtgttctatctgattactctgacacctctcaccagcgactatgtcgtagtgggtaaagcgcttacggaattcgtgtccgtaagaagcatcagag

SEQ ID NO: 23725 - RNA, 99 nt, synthetic construct
  misc_feature 1..99: note = engineered ribonucleic acid scaffold (ERS) sequence
  source 1..99: mol_type = other RNA
acgggactttctatctgattactctgaagtccctcaccagcgactatgtcgtagtgggtaaagcgcttacggaattcgtgtccgtaagaagcatcagag

SEQ ID NO: 23726 - RNA, 99 nt, synthetic construct
  misc_feature 1..99: note = engineered ribonucleic acid scaffold (ERS) sequence
  source 1..99: mol_type = other RNA
acgggcaattctatctgattactctgattgccctcaccagcgactatgtcgtagtgggtaaagcgcttacggaattcgtgtccgtaagaagcatcagag

SEQ ID NO: 23727 - RNA, 99 nt, synthetic construct
  misc_feature 1..99: note = engineered ribonucleic acid scaffold (ERS) sequence
  source 1..99: mol_type = other RNA
actgtgcgttctatctgattactctgacgcacatcaccagcgactatgtcgtagtgggtaaagcgcttacggaattcgtgtccgtaagaagcatcagag

SEQ ID NO: 23728 - RNA, 100 nt, synthetic construct
  misc_feature 1..100: note = engineered ribonucleic acid scaffold (ERS) sequence
  source 1..100: mol_type = other RNA
acacacggttctatctgattactctgaccgtgttcaccagcgactatgtcgtagtgggtaaagcgcttacggacttcgcggtccgtaagaagcatcagag

SEQ ID NO: 23729 - RNA, 100 nt, synthetic construct
  misc_feature 1..100: note = engineered ribonucleic acid scaffold (ERS) sequence
  source 1..100: mol_type = other RNA
acactggtttctatctgattactctgaaccagttcaccagcgactatgtcgtagtgggtaaagcgcttacggacttcgcggtccgtaagaagcatcagag

SEQ ID NO: 23730 - RNA, 100 nt, synthetic construct
  misc_feature 1..100: note = engineered ribonucleic acid scaffold (ERS) sequence
  source 1..100: mol_type = other RNA
acaggccgttctatctgattactctgacggccttcaccagcgactatgtcgtagtgggtaaagcgcttacggacttcgcggtccgtaagaagcatcagag

SEQ ID NO: 23731 - RNA, 100 nt, synthetic construct
  misc_feature 1..100: note = engineered ribonucleic acid scaffold (ERS) sequence
  source 1..100: mol_type = other RNA
acaggtccttctatctgattactctgaggaccttcaccagcgactatgtcgtagtgggtaaagcgcttacggacttcgcggtccgtaagaagcatcagag

SEQ ID NO: 23732 - RNA, 100 nt, synthetic construct
  misc_feature 1..100: note = engineered ribonucleic acid scaffold (ERS) sequence
  source 1..100: mol_type = other RNA
accagcaattctatctgattactctgattgctgtcaccagcgactatgtcgtagtgggtaaagcgcttacggacttcgcggtccgtaagaagcatcagag

SEQ ID NO: 23733 - RNA, 100 nt, synthetic construct
  misc_feature 1..100: note = engineered ribonucleic acid scaffold (ERS) sequence
  source 1..100: mol_type = other RNA
accgagacttctatctgattactctgaggctcgtcaccagcgactatgtcgtagtgggtaaagcgcttacggacttcgcggtccgtaagaagcatcagag

SEQ ID NO: 23734 - RNA, 100 nt, synthetic construct
  misc_feature 1..100: note = engineered ribonucleic acid scaffold (ERS) sequence
  source 1..100: mol_type = other RNA
acctgtagttctatctgattactctgactacagtcaccagcgactatgtcgtagtgggtaaagcgcttacggacttcgcggtccgtaagaagcatcagag

SEQ ID NO: 23735 - RNA, 100 nt, synthetic construct
  misc_feature 1..100: note = engineered ribonucleic acid scaffold (ERS) sequence
  source 1..100: mol_type = other RNA
acgagcacttctatctgattactctgagggctctcaccagcgactatgtcgtagtgggtaaagcgcttacggacttcgcggtccgtaagaagcatcagag

SEQ ID NO: 23736 - RNA, 100 nt, synthetic construct
  misc_feature 1..100: note = engineered ribonucleic acid scaffold (ERS) sequence
  source 1..100: mol_type = other RNA
acgaggtgttctatctgattactctgacacctctcaccagcgactatgtcgtagtgggtaaagcgcttacggacttcgcggtccgtaagaagcatcagag

SEQ ID NO: 23737 - RNA, 100 nt, synthetic construct
  misc_feature 1..100: note = engineered ribonucleic acid scaffold (ERS) sequence
  source 1..100: mol_type = other RNA
acgggactttctatctgattactctgaagtccctcaccagcgactatgtcgtagtgggtaaagcgcttacggacttcgcggtccgtaagaagcatcagag

SEQ ID NO: 23738 - RNA, 100 nt, synthetic construct
  misc_feature 1..100: note = engineered ribonucleic acid scaffold (ERS) sequence
  source 1..100: mol_type = other RNA
acgggcaattctatctgattactctgattgccctcaccagcgactatgtcgtagtgggtaaagcgcttacggacttcgcggtccgtaagaagcatcagag

SEQ ID NO: 23739 - RNA, 100 nt, synthetic construct
  misc_feature 1..100: note = engineered ribonucleic acid scaffold (ERS) sequence
  source 1..100: mol_type = other RNA
actgtgcgttctatctgattactctgacgcacatcaccagcgactatgtcgtagtgggtaaagcgcttacggacttcgcggtccgtaagaagcatcagag

SEQ ID NO: 23740 - RNA, 98 nt, synthetic construct
  misc_feature 1..98: note = engineered ribonucleic acid scaffold (ERS) sequence
  source 1..98: mol_type = other RNA
acacacggttctatctgattactctgaccgtgttcaccagcgactatgtcgtagtgggtaaagcgcttacggacttcggtccgtaagaagcatcagag

SEQ ID NO: 23741 - RNA, 98 nt, synthetic construct
  misc_feature 1..98: note = engineered ribonucleic acid scaffold (ERS) sequence
  source 1..98: mol_type = other RNA
acactggtttctatctgattactctgaaccagttcaccagcgactatgtcgtagtgggtaaagcgcttacggacttcggtccgtaagaagcatcagag

SEQ ID NO: 23742 - RNA, 98 nt, synthetic construct
  misc_feature 1..98: note = engineered ribonucleic acid scaffold (ERS) sequence
  source 1..98: mol_type = other RNA
acaggccgttctatctgattactctgacggccttcaccagcgactatgtcgtagtgggtaaagcgcttacggacttcggtccgtaagaagcatcagag

SEQ ID NO: 23743 - RNA, 98 nt, synthetic construct
  misc_feature 1..98: note = engineered ribonucleic acid scaffold (ERS) sequence
  source 1..98: mol_type = other RNA
acaggtccttctatctgattactctgaggaccttcaccagcgactatgtcgtagtgggtaaagcgcttacggacttcggtccgtaagaagcatcagag

SEQ ID NO: 23744 - RNA, 98 nt, synthetic construct
  misc_feature 1..98: note = engineered ribonucleic acid scaffold (ERS) sequence
  source 1..98: mol_type = other RNA
accagcaattctatctgattactctgattgctgtcaccagcgactatgtcgtagtgggtaaagcgcttacggacttcggtccgtaagaagcatcagag

SEQ ID NO: 23745 - RNA, 98 nt, synthetic construct
  misc_feature 1..98: note = engineered ribonucleic acid scaffold (ERS) sequence
  source 1..98: mol_type = other RNA
accgagacttctatctgattactctgaggctcgtcaccagcgactatgtcgtagtgggtaaagcgcttacggacttcggtccgtaagaagcatcagag

SEQ ID NO: 23746 - RNA, 98 nt, synthetic construct
  misc_feature 1..98: note = engineered ribonucleic acid scaffold (ERS) sequence
  source 1..98: mol_type = other RNA
acctgtagttctatctgattactctgactacagtcaccagcgactatgtcgtagtgggtaaagcgcttacggacttcggtccgtaagaagcatcagag

SEQ ID NO: 23747 - RNA, 98 nt, synthetic construct
  misc_feature 1..98: note = engineered ribonucleic acid scaffold (ERS) sequence
  source 1..98: mol_type = other RNA
acgagcacttctatctgattactctgagggctctcaccagcgactatgtcgtagtgggtaaagcgcttacggacttcggtccgtaagaagcatcagag

SEQ ID NO: 23748 - RNA, 98 nt, synthetic construct
  misc_feature 1..98: note = engineered ribonucleic acid scaffold (ERS) sequence
  source 1..98: mol_type = other RNA
acgaggtgttctatctgattactctgacacctctcaccagcgactatgtcgtagtgggtaaagcgcttacggacttcggtccgtaagaagcatcagag

SEQ ID NO: 23749 - RNA, 98 nt, synthetic construct
  misc_feature 1..98: note = engineered ribonucleic acid scaffold (ERS) sequence
  source 1..98: mol_type = other RNA
acgggactttctatctgattactctgaagtccctcaccagcgactatgtcgtagtgggtaaagcgcttacggacttcggtccgtaagaagcatcagag

SEQ ID NO: 23750 - RNA, 98 nt, synthetic construct
  misc_feature 1..98: note = engineered ribonucleic acid scaffold (ERS) sequence
  source 1..98: mol_type = other RNA
acgggcaattctatctgattactctgattgccctcaccagcgactatgtcgtagtgggtaaagcgcttacggacttcggtccgtaagaagcatcagag

SEQ ID NO: 23751 - RNA, 98 nt, synthetic construct
  misc_feature 1..98: note = engineered ribonucleic acid scaffold (ERS) sequence
  source 1..98: mol_type = other RNA
actgtgcgttctatctgattactctgacgcacatcaccagcgactatgtcgtagtgggtaaagcgcttacggacttcggtccgtaagaagcatcagag

SEQ ID NO: 23752 - RNA, 98 nt, synthetic construct
  misc_feature 1..98: note = engineered ribonucleic acid scaffold (ERS) sequence
  source 1..98: mol_type = other RNA
acacacggttctatctgattactctgaccgtgttcaccagcgactatgtcgtagtgggtaaagcgcttacggacttcggtccgtaagtcgcatcagag

SEQ ID NO: 23753 - RNA, 98 nt, synthetic construct
  misc_feature 1..98: note = engineered ribonucleic acid scaffold (ERS) sequence
  source 1..98: mol_type = other RNA
acactggtttctatctgattactctgaaccagttcaccagcgactatgtcgtagtgggtaaagcgcttacggacttcggtccgtaagtcgcatcagag

SEQ ID NO: 23754 - RNA, 98 nt, synthetic construct
  misc_feature 1..98: note = engineered ribonucleic acid scaffold (ERS) sequence
  source 1..98: mol_type = other RNA
acaggccgttctatctgattactctgacggccttcaccagcgactatgtcgtagtgggtaaagcgcttacggacttcggtccgtaagtcgcatcagag

SEQ ID NO: 23755 - RNA, 98 nt, synthetic construct
  misc_feature 1..98: note = engineered ribonucleic acid scaffold (ERS) sequence
  source 1..98: mol_type = other RNA
acaggtccttctatctgattactctgaggaccttcaccagcgactatgtcgtagtgggtaaagcgcttacggacttcggtccgtaagtcgcatcagag

SEQ ID NO: 23756 - RNA, 98 nt, synthetic construct
  misc_feature 1..98: note = engineered ribonucleic acid scaffold (ERS) sequence
  source 1..98: mol_type = other RNA
accagcaattctatctgattactctgattgctgtcaccagcgactatgtcgtagtgggtaaagcgcttacggacttcggtccgtaagtcgcatcagag

SEQ ID NO: 23757 - RNA, 98 nt, synthetic construct
  misc_feature 1..98: note = engineered ribonucleic acid scaffold (ERS) sequence
  source 1..98: mol_type = other RNA
accgagacttctatctgattactctgaggctcgtcaccagcgactatgtcgtagtgggtaaagcgcttacggacttcggtccgtaagtcgcatcagag

SEQ ID NO: 23758 - RNA, 98 nt, synthetic construct
  misc_feature 1..98: note = engineered ribonucleic acid scaffold (ERS) sequence
  source 1..98: mol_type = other RNA
acctgtagttctatctgattactctgactacagtcaccagcgactatgtcgtagtgggtaaagcgcttacggacttcggtccgtaagtcgcatcagag

SEQ ID NO: 23759 - RNA, 98 nt, synthetic construct
  misc_feature 1..98: note = engineered ribonucleic acid scaffold (ERS) sequence
  source 1..98: mol_type = other RNA
acgagcacttctatctgattactctgagggctctcaccagcgactatgtcgtagtgggtaaagcgcttacggacttcggtccgtaagtcgcatcagag

SEQ ID NO: 23760 - RNA, 98 nt, synthetic construct
  misc_feature 1..98: note = engineered ribonucleic acid scaffold (ERS) sequence
  source 1..98: mol_type = other RNA
acgaggtgttctatctgattactctgacacctctcaccagcgactatgtcgtagtgggtaaagcgcttacggacttcggtccgtaagtcgcatcagag

SEQ ID NO: 23761 - RNA, 98 nt, synthetic construct
  misc_feature 1..98: note = engineered ribonucleic acid scaffold (ERS) sequence
  source 1..98: mol_type = other RNA
acgggactttctatctgattactctgaagtccctcaccagcgactatgtcgtagtgggtaaagcgcttacggacttcggtccgtaagtcgcatcagag

SEQ ID NO: 23762 - RNA, 98 nt, synthetic construct
  misc_feature 1..98: note = engineered ribonucleic acid scaffold (ERS) sequence
  source 1..98: mol_type = other RNA
acgggcaattctatctgattactctgattgccctcaccagcgactatgtcgtagtgggtaaagcgcttacggacttcggtccgtaagtcgcatcagag

SEQ ID NO: 23763 - RNA, 98 nt, synthetic construct
  misc_feature 1..98: note = engineered ribonucleic acid scaffold (ERS) sequence
  source 1..98: mol_type = other RNA
actgtgcgttctatctgattactctgacgcacatcaccagcgactatgtcgtagtgggtaaagcgcttacggacttcggtccgtaagtcgcatcagag

SEQ ID NO: 23764 - RNA, 98 nt, synthetic construct
  misc_feature 1..98: note = engineered ribonucleic acid scaffold (ERS) sequence
  source 1..98: mol_type = other RNA
acacacggttctatctgattactctgaccgtgttcaccagcgactatgtcgtagtgggtaaagcgcttacggagttcgatccgtaagaagcatcagag

SEQ ID NO: 23765 - RNA, 98 nt, synthetic construct
  misc_feature 1..98: note = engineered ribonucleic acid scaffold (ERS) sequence
  source 1..98: mol_type = other RNA
acactggtttctatctgattactctgaaccagttcaccagcgactatgtcgtagtgggtaaagcgcttacggagttcgatccgtaagaagcatcagag

SEQ ID NO: 23766 - RNA, 98 nt, synthetic construct
  misc_feature 1..98: note = engineered ribonucleic acid scaffold (ERS) sequence
  source 1..98: mol_type = other RNA
acaggccgttctatctgattactctgacggccttcaccagcgactatgtcgtagtgggtaaagcgcttacggagttcgatccgtaagaagcatcagag

SEQ ID NO: 23767 - RNA, 98 nt, synthetic construct
  misc_feature 1..98: note = engineered ribonucleic acid scaffold (ERS) sequence
  source 1..98: mol_type = other RNA
acaggtccttctatctgattactctgaggaccttcaccagcgactatgtcgtagtgggtaaagcgcttacggagttcgatccgtaagaagcatcagag

SEQ ID NO: 23768 - RNA, 98 nt, synthetic construct
  misc_feature 1..98: note = engineered ribonucleic acid scaffold (ERS) sequence
  source 1..98: mol_type = other RNA
accagcaattctatctgattactctgattgctgtcaccagcgactatgtcgtagtgggtaaagcgcttacggagttcgatccgtaagaagcatcagag

SEQ ID NO: 23769 - RNA, 98 nt, synthetic construct
  misc_feature 1..98: note = engineered ribonucleic acid scaffold (ERS) sequence
  source 1..98: mol_type = other RNA
accgagacttctatctgattactctgaggctcgtcaccagcgactatgtcgtagtgggtaaagcgcttacggagttcgatccgtaagaagcatcagag

SEQ ID NO: 23770 - RNA, 98 nt, synthetic construct
  misc_feature 1..98: note = engineered ribonucleic acid scaffold (ERS) sequence
  source 1..98: mol_type = other RNA
acctgtagttctatctgattactctgactacagtcaccagcgactatgtcgtagtgggtaaagcgcttacggagttcgatccgtaagaagcatcagag

SEQ ID NO: 23771 - RNA, 98 nt, synthetic construct
  misc_feature 1..98: note = engineered ribonucleic acid scaffold (ERS) sequence
  source 1..98: mol_type = other RNA
acgagcacttctatctgattactctgagggctctcaccagcgactatgtcgtagtgggtaaagcgcttacggagttcgatccgtaagaagcatcagag

SEQ ID NO: 23772 - RNA, 98 nt, synthetic construct
  misc_feature 1..98: note = engineered ribonucleic acid scaffold (ERS) sequence
  source 1..98: mol_type = other RNA
acgaggtgttctatctgattactctgacacctctcaccagcgactatgtcgtagtgggtaaagcgcttacggagttcgatccgtaagaagcatcagag

SEQ ID NO: 23773 - RNA, 98 nt, synthetic construct
  misc_feature 1..98: note = engineered ribonucleic acid scaffold (ERS) sequence
  source 1..98: mol_type = other RNA
acgggactttctatctgattactctgaagtccctcaccagcgactatgtcgtagtgggtaaagcgcttacggagttcgatccgtaagaagcatcagag

SEQ ID NO: 23774 - RNA, 98 nt, synthetic construct
  misc_feature 1..98: note = engineered ribonucleic acid scaffold (ERS) sequence
  source 1..98: mol_type = other RNA
acgggcaattctatctgattactctgattgccctcaccagcgactatgtcgtagtgggtaaagcgcttacggagttcgatccgtaagaagcatcagag

SEQ ID NO: 23775 - RNA, 98 nt, synthetic construct
  misc_feature 1..98: note = engineered ribonucleic acid scaffold (ERS) sequence
  source 1..98: mol_type = other RNA
actgtgcgttctatctgattactctgacgcacatcaccagcgactatgtcgtagtgggtaaagcgcttacggagttcgatccgtaagaagcatcagag

SEQ ID NO: 23776 - RNA, 98 nt, synthetic construct
  misc_feature 1..98: note = engineered ribonucleic acid scaffold (ERS) sequence
  source 1..98: mol_type = other RNA
acacacggttctatctgattactctgaccgtgttcaccagcgactatgtcgtagtgggtaaagcgctttcggacttcggtccggaagaagcatcagag

SEQ ID NO: 23777 - RNA, 98 nt, synthetic construct
  misc_feature 1..98: note = engineered ribonucleic acid scaffold (ERS) sequence
  source 1..98: mol_type = other RNA
acactggtttctatctgattactctgaaccagttcaccagcgactatgtcgtagtgggtaaagcgctttcggacttcggtccggaagaagcatcagag

SEQ ID NO: 23778 - RNA, 98 nt, synthetic construct
  misc_feature 1..98: note = engineered ribonucleic acid scaffold (ERS) sequence
  source 1..98: mol_type = other RNA
acaggccgttctatctgattactctgacggccttcaccagcgactatgtcgtagtgggtaaagcgctttcggacttcggtccggaagaagcatcagag

SEQ ID NO: 23779 - RNA, 98 nt, synthetic construct
  misc_feature 1..98: note = engineered ribonucleic acid scaffold (ERS) sequence
  source 1..98: mol_type = other RNA
acaggtccttctatctgattactctgaggaccttcaccagcgactatgtcgtagtgggtaaagcgctttcggacttcggtccggaagaagcatcagag

SEQ ID NO: 23780 - RNA, 98 nt, synthetic construct
  misc_feature 1..98: note = engineered ribonucleic acid scaffold (ERS) sequence
  source 1..98: mol_type = other RNA
accagcaattctatctgattactctgattgctgtcaccagcgactatgtcgtagtgggtaaagcgctttcggacttcggtccggaagaagcatcagag

SEQ ID NO: 23781 - RNA, 98 nt, synthetic construct
  misc_feature 1..98: note = engineered ribonucleic acid scaffold (ERS) sequence
  source 1..98: mol_type = other RNA
accgagacttctatctgattactctgaggctcgtcaccagcgactatgtcgtagtgggtaaagcgctttcggacttcggtccggaagaagcatcagag

SEQ ID NO: 23782 - RNA, 98 nt, synthetic construct
  misc_feature 1..98: note = engineered ribonucleic acid scaffold (ERS) sequence
  source 1..98: mol_type = other RNA
acctgtagttctatctgattactctgactacagtcaccagcgactatgtcgtagtgggtaaagcgctttcggacttcggtccggaagaagcatcagag

SEQ ID NO: 23783 - RNA, 98 nt, synthetic construct
  misc_feature 1..98: note = engineered ribonucleic acid scaffold (ERS) sequence
  source 1..98: mol_type = other RNA
acgagcacttctatctgattactctgagggctctcaccagcgactatgtcgtagtgggtaaagcgctttcggacttcggtccggaagaagcatcagag

SEQ ID NO: 23784 - RNA, 98 nt, synthetic construct
  misc_feature 1..98: note = engineered ribonucleic acid scaffold (ERS) sequence
  source 1..98: mol_type = other RNA
acgaggtgttctatctgattactctgacacctctcaccagcgactatgtcgtagtgggtaaagcgctttcggacttcggtccggaagaagcatcagag

SEQ ID NO: 23785 - RNA, 98 nt, synthetic construct
  misc_feature 1..98: note = engineered ribonucleic acid scaffold (ERS) sequence
  source 1..98: mol_type = other RNA
acgggactttctatctgattactctgaagtccctcaccagcgactatgtcgtagtgggtaaagcgctttcggacttcggtccggaagaagcatcagag

SEQ ID NO: 23786 - RNA, 98 nt, synthetic construct
  misc_feature 1..98: note = engineered ribonucleic acid scaffold (ERS) sequence
  source 1..98: mol_type = other RNA
acgggcaattctatctgattactctgattgccctcaccagcgactatgtcgtagtgggtaaagcgctttcggacttcggtccggaagaagcatcagag

SEQ ID NO: 23787 - RNA, 98 nt, synthetic construct
  misc_feature 1..98: note = engineered ribonucleic acid scaffold (ERS) sequence
  source 1..98: mol_type = other RNA
actgtgcgttctatctgattactctgacgcacatcaccagcgactatgtcgtagtgggtaaagcgctttcggacttcggtccggaagaagcatcagag

SEQ ID NO: 23788 - RNA, 102 nt, synthetic construct
  misc_feature 1..102: note = engineered ribonucleic acid scaffold (ERS) sequence
  source 1..102: mol_type = other RNA
acacacggttctatctgattactctgaccgtgttcaccagcgactatgtcgtagtgggtaaagcggcagatctgagcctccgagctctctgccgcatcagag

SEQ ID NO: 23789 - RNA, 102 nt, synthetic construct
  misc_feature 1..102: note = engineered ribonucleic acid scaffold (ERS) sequence
  source 1..102: mol_type = other RNA
acactggtttctatctgattactctgaaccagttcaccagcgactatgtcgtagtgggtaaagcggcagatctgagcctccgagctctctgccgcatcagag

SEQ ID NO: 23790 - RNA, 102 nt, synthetic construct
  misc_feature 1..102: note = engineered ribonucleic acid scaffold (ERS) sequence
  source 1..102: mol_type = other RNA
acaggccgttctatctgattactctgacggccttcaccagcgactatgtcgtagtgggtaaagcggcagatctgagcctccgagctctctgccgcatcagag

SEQ ID NO: 23791 - RNA, 102 nt, synthetic construct
  misc_feature 1..102: note = engineered ribonucleic acid scaffold (ERS) sequence
  source 1..102: mol_type = other RNA
acaggtccttctatctgattactctgaggaccttcaccagcgactatgtcgtagtgggtaaagcggcagatctgagcctccgagctctctgccgcatcagag

SEQ ID NO: 23792 - RNA, 102 nt, synthetic construct
  misc_feature 1..102: note = engineered ribonucleic acid scaffold (ERS) sequence
  source 1..102: mol_type = other RNA
accagcaattctatctgattactctgattgctgtcaccagcgactatgtcgtagtgggtaaagcggcagatctgagcctccgagctctctgccgcatcagag

SEQ ID NO: 23793 - RNA, 102 nt, synthetic construct
  misc_feature 1..102: note = engineered ribonucleic acid scaffold (ERS) sequence
  source 1..102: mol_type = other RNA
accgagacttctatctgattactctgaggctcgtcaccagcgactatgtcgtagtgggtaaagcggcagatctgagcctccgagctctctgccgcatcagag

SEQ ID NO: 23794 - RNA, 102 nt, synthetic construct
  misc_feature 1..102: note = engineered ribonucleic acid scaffold (ERS) sequence
  source 1..102: mol_type = other RNA
acctgtagttctatctgattactctgactacagtcaccagcgactatgtcgtagtgggtaaagcggcagatctgagcctccgagctctctgccgcatcagag

SEQ ID NO: 23795 - RNA, 102 nt, synthetic construct
  misc_feature 1..102: note = engineered ribonucleic acid scaffold (ERS) sequence
  source 1..102: mol_type = other RNA
acgagcacttctatctgattactctgagggctctcaccagcgactatgtcgtagtgggtaaagcggcagatctgagcctccgagctctctgccgcatcagag

SEQ ID NO: 23796 - RNA, 102 nt, synthetic construct
  misc_feature 1..102: note = engineered ribonucleic acid scaffold (ERS) sequence
  source 1..102: mol_type = other RNA
acgaggtgttctatctgattactctgacacctctcaccagcgactatgtcgtagtgggtaaagcggcagatctgagcctccgagctctctgccgcatcagag

SEQ ID NO: 23797 - RNA, 102 nt, synthetic construct
  misc_feature 1..102: note = engineered ribonucleic acid scaffold (ERS) sequence
  source 1..102: mol_type = other RNA
acgggactttctatctgattactctgaagtccctcaccagcgactatgtcgtagtgggtaaagcggcagatctgagcctccgagctctctgccgcatcagag

SEQ ID NO: 23798 - RNA, 102 nt, synthetic construct
  misc_feature 1..102: note = engineered ribonucleic acid scaffold (ERS) sequence
  source 1..102: mol_type = other RNA
acgggcaattctatctgattactctgattgccctcaccagcgactatgtcgtagtgggtaaagcggcagatctgagcctccgagctctctgccgcatcagag

SEQ ID NO: 23799 - RNA, 102 nt, synthetic construct
  misc_feature 1..102: note = engineered ribonucleic acid scaffold (ERS) sequence
  source 1..102: mol_type = other RNA
actgtgcgttctatctgattactctgacgcacatcaccagcgactatgtcgtagtgggtaaagcggcagatctgagcctccgagctctctgccgcatcagag

SEQ ID NO: 23800 - RNA, 98 nt, synthetic construct
  misc_feature 1..98: note = engineered ribonucleic acid scaffold (ERS) sequence
  source 1..98: mol_type = other RNA
acacacggttctatctgattactctgaccgtgttcaccagcgactatgtcgtagtgggtaaagcggttacggacttcggtccgtaagacgcatcagag

SEQ ID NO: 23801 - RNA, 98 nt, synthetic construct
  misc_feature 1..98: note = engineered ribonucleic acid scaffold (ERS) sequence
  source 1..98: mol_type = other RNA
acactggtttctatctgattactctgaaccagttcaccagcgactatgtcgtagtgggtaaagcggttacggacttcggtccgtaagacgcatcagag

SEQ ID NO: 23802 - RNA, 98 nt, synthetic construct
  misc_feature 1..98: note = engineered ribonucleic acid scaffold (ERS) sequence
  source 1..98: mol_type = other RNA
acaggccgttctatctgattactctgacggccttcaccagcgactatgtcgtagtgggtaaagcggttacggacttcggtccgtaagacgcatcagag

SEQ ID NO: 23803 - RNA, 98 nt, synthetic construct
  misc_feature 1..98: note = engineered ribonucleic acid scaffold (ERS) sequence
  source 1..98: mol_type = other RNA
acaggtccttctatctgattactctgaggaccttcaccagcgactatgtcgtagtgggtaaagcggttacggacttcggtccgtaagacgcatcagag

SEQ ID NO: 23804 - RNA, 98 nt, synthetic construct
  misc_feature 1..98: note = engineered ribonucleic acid scaffold (ERS) sequence
  source 1..98: mol_type = other RNA
accagcaattctatctgattactctgattgctgtcaccagcgactatgtcgtagtgggtaaagcggttacggacttcggtccgtaagacgcatcagag

SEQ ID NO: 23805 - RNA, 98 nt, synthetic construct
  misc_feature 1..98: note = engineered ribonucleic acid scaffold (ERS) sequence
  source 1..98: mol_type = other RNA
accgagacttctatctgattactctgaggctcgtcaccagcgactatgtcgtagtgggtaaagcggttacggacttcggtccgtaagacgcatcagag

SEQ ID NO: 23806 - RNA, 98 nt, synthetic construct
  misc_feature 1..98: note = engineered ribonucleic acid scaffold (ERS) sequence
  source 1..98: mol_type = other RNA
acctgtagttctatctgattactctgactacagtcaccagcgactatgtcgtagtgggtaaagcggttacggacttcggtccgtaagacgcatcagag

SEQ ID NO: 23807 - RNA, 98 nt, synthetic construct
  misc_feature 1..98: note = engineered ribonucleic acid scaffold (ERS) sequence
  source 1..98: mol_type = other RNA
acgagcacttctatctgattactctgagggctctcaccagcgactatgtcgtagtgggtaaagcggttacggacttcggtccgtaagacgcatcagag

SEQ ID NO: 23808 - RNA, 98 nt, synthetic construct
  misc_feature 1..98: note = engineered ribonucleic acid scaffold (ERS) sequence
  source 1..98: mol_type = other RNA
acgaggtgttctatctgattactctgacacctctcaccagcgactatgtcgtagtgggtaaagcggttacggacttcggtccgtaagacgcatcagag

SEQ ID NO: 23809 - RNA, 98 nt, synthetic construct
  misc_feature 1..98: note = engineered ribonucleic acid scaffold (ERS) sequence
  source 1..98: mol_type = other RNA
acgggactttctatctgattactctgaagtccctcaccagcgactatgtcgtagtgggtaaagcggttacggacttcggtccgtaagacgcatcagag

SEQ ID NO: 23810 - RNA, 98 nt, synthetic construct
  misc_feature 1..98: note = engineered ribonucleic acid scaffold (ERS) sequence
  source 1..98: mol_type = other RNA
acgggcaattctatctgattactctgattgccctcaccagcgactatgtcgtagtgggtaaagcggttacggacttcggtccgtaagacgcatcagag

SEQ ID NO: 23811 - RNA, 98 nt, synthetic construct
  misc_feature 1..98: note = engineered ribonucleic acid scaffold (ERS) sequence
  source 1..98: mol_type = other RNA
actgtgcgttctatctgattactctgacgcacatcaccagcgactatgtcgtagtgggtaaagcggttacggacttcggtccgtaagacgcatcagag

SEQ ID NO: 23812 - RNA, 75 nt, synthetic construct
  misc_feature 1..75: note = engineered ribonucleic acid scaffold (ERS) sequence
  source 1..75: mol_type = other RNA
acacacggttctatctgattactctgaccgtgttcaccagcgactatgtcgtagtgggtaaagctagcatcagag

SEQ ID NO: 23813 - RNA, 75 nt, synthetic construct
  misc_feature 1..75: note = engineered ribonucleic acid scaffold (ERS) sequence
  source 1..75: mol_type = other RNA
acactggtttctatctgattactctgaaccagttcaccagcgactatgtcgtagtgggtaaagctagcatcagag

SEQ ID NO: 23814 - RNA, 75 nt, synthetic construct
  misc_feature 1..75: note = engineered ribonucleic acid scaffold (ERS) sequence
  source 1..75: mol_type = other RNA
acaggccgttctatctgattactctgacggccttcaccagcgactatgtcgtagtgggtaaagctagcatcagag

SEQ ID NO: 23815 - RNA, 75 nt, synthetic construct
  misc_feature 1..75: note = engineered ribonucleic acid scaffold (ERS) sequence
  source 1..75: mol_type = other RNA
acaggtccttctatctgattactctgaggaccttcaccagcgactatgtcgtagtgggtaaagctagcatcagag

SEQ ID NO: 23816 - RNA, 75 nt, synthetic construct
  misc_feature 1..75: note = engineered ribonucleic acid scaffold (ERS) sequence
  source 1..75: mol_type = other RNA
accagcaattctatctgattactctgattgctgtcaccagcgactatgtcgtagtgggtaaagctagcatcagag

SEQ ID NO: 23817 - RNA, 75 nt, synthetic construct
  misc_feature 1..75: note = engineered ribonucleic acid scaffold (ERS) sequence
  source 1..75: mol_type = other RNA
accgagacttctatctgattactctgaggctcgtcaccagcgactatgtcgtagtgggtaaagctagcatcagag

SEQ ID NO: 23818 - RNA, 75 nt, synthetic construct
  misc_feature 1..75: note = engineered ribonucleic acid scaffold (ERS) sequence
  source 1..75: mol_type = other RNA
acctgtagttctatctgattactctgactacagtcaccagcgactatgtcgtagtgggtaaagctagcatcagag

SEQ ID NO: 23819 - RNA, 75 nt, synthetic construct
  misc_feature 1..75: note = engineered ribonucleic acid scaffold (ERS) sequence
  source 1..75: mol_type = other RNA
acgagcacttctatctgattactctgagggctctcaccagcgactatgtcgtagtgggtaaagctagcatcagag

SEQ ID NO: 23820 - RNA, 75 nt, synthetic construct
  misc_feature 1..75: note = engineered ribonucleic acid scaffold (ERS) sequence
  source 1..75: mol_type = other RNA
acgaggtgttctatctgattactctgacacctctcaccagcgactatgtcgtagtgggtaaagctagcatcagag

SEQ ID NO: 23821 - RNA, 75 nt, synthetic construct
  misc_feature 1..75: note = engineered ribonucleic acid scaffold (ERS) sequence
  source 1..75: mol_type = other RNA
acgggactttctatctgattactctgaagtccctcaccagcgactatgtcgtagtgggtaaagctagcatcagag

SEQ ID NO: 23822 - RNA, 75 nt, synthetic construct
  misc_feature 1..75: note = engineered ribonucleic acid scaffold (ERS) sequence
  source 1..75: mol_type = other RNA
acgggcaattctatctgattactctgattgccctcaccagcgactatgtcgtagtgggtaaagctagcatcagag

SEQ ID NO: 23823 - RNA, 75 nt, synthetic construct
  misc_feature 1..75: note = engineered ribonucleic acid scaffold (ERS) sequence
  source 1..75: mol_type = other RNA
actgtgcgttctatctgattactctgacgcacatcaccagcgactatgtcgtagtgggtaaagctagcatcagag

SEQ ID NO: 23824 - RNA, 89 nt, synthetic construct
  misc_feature 1..89: note = engineered ribonucleic acid scaffold (ERS) sequence
  source 1..89: mol_type = other RNA
acacacggttctatctgattactctgaccgtgttcaccagcgactatgtcgtagtgggtaaagctccctattcggatggagcatcagag

SEQ ID NO: 23825 - RNA, 89 nt, synthetic construct
  misc_feature 1..89: note = engineered ribonucleic acid scaffold (ERS) sequence
  source 1..89: mol_type = other RNA
acactggtttctatctgattactctgaaccagttcaccagcgactatgtcgtagtgggtaaagctccctattcggatggagcatcagag

SEQ ID NO: 23826 - RNA, 89 nt, synthetic construct
  misc_feature 1..89: note = engineered ribonucleic acid scaffold (ERS) sequence
  source 1..89: mol_type = other RNA
acaggccgttctatctgattactctgacggccttcaccagcgactatgtcgtagtgggtaaagctccctattcggatggagcatcagag

SEQ ID NO: 23827 - RNA, 89 nt, synthetic construct
  misc_feature 1..89: note = engineered ribonucleic acid scaffold (ERS) sequence
  source 1..89: mol_type = other RNA
acaggtccttctatctgattactctgaggaccttcaccagcgactatgtcgtagtgggtaaagctccctattcggatggagcatcagag

SEQ ID NO: 23828 - RNA, 89 nt, synthetic construct
  misc_feature 1..89: note = engineered ribonucleic acid scaffold (ERS) sequence
  source 1..89: mol_type = other RNA
accagcaattctatctgattactctgattgctgtcaccagcgactatgtcgtagtgggtaaagctccctattcggatggagcatcagag

SEQ ID NO: 23829 - RNA, 89 nt, synthetic construct
  misc_feature 1..89: note = engineered ribonucleic acid scaffold (ERS) sequence
  source 1..89: mol_type = other RNA
accgagacttctatctgattactctgaggctcgtcaccagcgactatgtcgtagtgggtaaagctccctattcggatggagcatcagag

SEQ ID NO: 23830 - RNA, 89 nt, synthetic construct
  misc_feature 1..89: note = engineered ribonucleic acid scaffold (ERS) sequence
  source 1..89: mol_type = other RNA
acctgtagttctatctgattactctgactacagtcaccagcgactatgtcgtagtgggtaaagctccctattcggatggagcatcagag

SEQ ID NO: 23831 - RNA, 89 nt, synthetic construct
  misc_feature 1..89: note = engineered ribonucleic acid scaffold (ERS) sequence
  source 1..89: mol_type = other RNA
acgagcacttctatctgattactctgagggctctcaccagcgactatgtcgtagtgggtaaagctccctattcggatggagcatcagag

SEQ ID NO: 23832 - RNA, 89 nt, synthetic construct
  misc_feature 1..89: note = engineered ribonucleic acid scaffold (ERS) sequence
  source 1..89: mol_type = other RNA
acgaggtgttctatctgattactctgacacctctcaccagcgactatgtcgtagtgggtaaagctccctattcggatggagcatcagag

SEQ ID NO: 23833 - RNA, 89 nt, synthetic construct
  misc_feature 1..89: note = engineered ribonucleic acid scaffold (ERS) sequence
  source 1..89: mol_type = other RNA
acgggactttctatctgattactctgaagtccctcaccagcgactatgtcgtagtgggtaaagctccctattcggatggagcatcagag

SEQ ID NO: 23834 - RNA, 89 nt, synthetic construct
  misc_feature 1..89: note = engineered ribonucleic acid scaffold (ERS) sequence
  source 1..89: mol_type = other RNA
acgggcaattctatctgattactctgattgccctcaccagcgactatgtcgtagtgggtaaagctccctattcggatggagcatcagag

SEQ ID NO: 23835 - RNA, 89 nt, synthetic construct
  misc_feature 1..89: note = engineered ribonucleic acid scaffold (ERS) sequence
  source 1..89: mol_type = other RNA
actgtgcgttctatctgattactctgacgcacatcaccagcgactatgtcgtagtgggtaaagctccctattcggatggagcatcagag

SEQ ID NO: 23836 - RNA, 95 nt, synthetic construct
  misc_feature 1..95: note = engineered ribonucleic acid scaffold (ERS) sequence
  source 1..95: mol_type = other RNA
acacacggttctatctgattactctgaccgtgttcaccagcgactatgtcgtagtgggtaaagctccctcacagggatgtgagggagcatcagag

SEQ ID NO: 23837 - RNA, 95 nt, synthetic construct
  misc_feature 1..95: note = engineered ribonucleic acid scaffold (ERS) sequence
  source 1..95: mol_type = other RNA
acactggtttctatctgattactctgaaccagttcaccagcgactatgtcgtagtgggtaaagctccctcacagggatgtgagggagcatcagag

SEQ ID NO: 23838 - RNA, 95 nt, synthetic construct
  misc_feature 1..95: note = engineered ribonucleic acid scaffold (ERS) sequence
  source 1..95: mol_type = other RNA
acaggccgttctatctgattactctgacggccttcaccagcgactatgtcgtagtgggtaaagctccctcacagggatgtgagggagcatcagag

SEQ ID NO: 23839 - RNA, 95 nt, synthetic construct
  misc_feature 1..95: note = engineered ribonucleic acid scaffold (ERS) sequence
  source 1..95: mol_type = other RNA
acaggtccttctatctgattactctgaggaccttcaccagcgactatgtcgtagtgggtaaagctccctcacagggatgtgagggagcatcagag

SEQ ID NO: 23840 - RNA, 95 nt, synthetic construct
  misc_feature 1..95: note = engineered ribonucleic acid scaffold (ERS) sequence
  source 1..95: mol_type = other RNA
accagcaattctatctgattactctgattgctgtcaccagcgactatgtcgtagtgggtaaagctccctcacagggatgtgagggagcatcagag

SEQ ID NO: 23841 - RNA, 95 nt, synthetic construct
  misc_feature 1..95: note = engineered ribonucleic acid scaffold (ERS) sequence
  source 1..95: mol_type = other RNA
accgagacttctatctgattactctgaggctcgtcaccagcgactatgtcgtagtgggtaaagctccctcacagggatgtgagggagcatcagag

SEQ ID NO: 23842 - RNA, 95 nt, synthetic construct
  misc_feature 1..95: note = engineered ribonucleic acid scaffold (ERS) sequence
  source 1..95: mol_type = other RNA
acctgtagttctatctgattactctgactacagtcaccagcgactatgtcgtagtgggtaaagctccctcacagggatgtgagggagcatcagag

SEQ ID NO: 23843 - RNA, 95 nt, synthetic construct
  misc_feature 1..95: note = engineered ribonucleic acid scaffold (ERS) sequence
  source 1..95: mol_type = other RNA
acgagcacttctatctgattactctgagggctctcaccagcgactatgtcgtagtgggtaaagctccctcacagggatgtgagggagcatcagag

SEQ ID NO: 23844 - RNA, 95 nt, synthetic construct
  misc_feature 1..95: note = engineered ribonucleic acid scaffold (ERS) sequence
  source 1..95: mol_type = other RNA
acgaggtgttctatctgattactctgacacctctcaccagcgactatgtcgtagtgggtaaagctccctcacagggatgtgagggagcatcagag

SEQ ID NO: 23845 - RNA, 95 nt, synthetic construct
  misc_feature 1..95: note = engineered ribonucleic acid scaffold (ERS) sequence
  source 1..95: mol_type = other RNA
acgggactttctatctgattactctgaagtccctcaccagcgactatgtcgtagtgggtaaagctccctcacagggatgtgagggagcatcagag

SEQ ID NO: 23846 - RNA, 95 nt, synthetic construct
  misc_feature 1..95: note = engineered ribonucleic acid scaffold (ERS) sequence
  source 1..95: mol_type = other RNA
acgggcaattctatctgattactctgattgccctcaccagcgactatgtcgtagtgggtaaagctccctcacagggatgtgagggagcatcagag

SEQ ID NO: 23847 - RNA, 95 nt, synthetic construct
  misc_feature 1..95: note = engineered ribonucleic acid scaffold (ERS) sequence
  source 1..95: mol_type = other RNA
actgtgcgttctatctgattactctgacgcacatcaccagcgactatgtcgtagtgggtaaagctccctcacagggatgtgagggagcatcagag

SEQ ID NO: 23848 - RNA, 94 nt, synthetic construct
  misc_feature 1..94: note = engineered ribonucleic acid scaffold (ERS) sequence
  source 1..94: mol_type = other RNA
acacacggttctatctgattactctgaccgtgttcaccagcgactatgtcgtagtgggtaaagctccctcagctgcagtgagggagcatcagag

SEQ ID NO: 23849 - RNA, 94 nt, synthetic construct
  misc_feature 1..94: note = engineered ribonucleic acid scaffold (ERS) sequence
  source 1..94: mol_type = other RNA
acactggtttctatctgattactctgaaccagttcaccagcgactatgtcgtagtgggtaaagctccctcagctgcagtgagggagcatcagag

SEQ ID NO: 23850 - RNA, 94 nt, synthetic construct
  misc_feature 1..94: note = engineered ribonucleic acid scaffold (ERS) sequence
  source 1..94: mol_type = other RNA
acaggccgttctatctgattactctgacggccttcaccagcgactatgtcgtagtgggtaaagctccctcagctgcagtgagggagcatcagag

SEQ ID NO: 23851 - RNA, 94 nt, synthetic construct
  misc_feature 1..94: note = engineered ribonucleic acid scaffold (ERS) sequence
  source 1..94: mol_type = other RNA
acaggtccttctatctgattactctgaggaccttcaccagcgactatgtcgtagtgggtaaagctccctcagctgcagtgagggagcatcagag

SEQ ID NO: 23852 - RNA, 94 nt, synthetic construct
  misc_feature 1..94: note = engineered ribonucleic acid scaffold (ERS) sequence
  source 1..94: mol_type = other RNA
accagcaattctatctgattactctgattgctgtcaccagcgactatgtcgtagtgggtaaagctccctcagctgcagtgagggagcatcagag

SEQ ID NO: 23853 - RNA, 94 nt, synthetic construct
  misc_feature 1..94: note = engineered ribonucleic acid scaffold (ERS) sequence
  source 1..94: mol_type = other RNA
accgagacttctatctgattactctgaggctcgtcaccagcgactatgtcgtagtgggtaaagctccctcagctgcagtgagggagcatcagag

SEQ ID NO: 23854 - RNA, 94 nt, synthetic construct
  misc_feature 1..94: note = engineered ribonucleic acid scaffold (ERS) sequence
  source 1..94: mol_type = other RNA
acctgtagttctatctgattactctgactacagtcaccagcgactatgtcgtagtgggtaaagctccctcagctgcagtgagggagcatcagag

SEQ ID NO: 23855 - RNA, 94 nt, synthetic construct
  misc_feature 1..94: note = engineered ribonucleic acid scaffold (ERS) sequence
  source 1..94: mol_type = other RNA
acgagcacttctatctgattactctgagggctctcaccagcgactatgtcgtagtgggtaaagctccctcagctgcagtgagggagcatcagag

SEQ ID NO: 23856 - RNA, 94 nt, synthetic construct
  misc_feature 1..94: note = engineered ribonucleic acid scaffold (ERS) sequence
  source 1..94: mol_type = other RNA
acgaggtgttctatctgattactctgacacctctcaccagcgactatgtcgtagtgggtaaagctccctcagctgcagtgagggagcatcagag

SEQ ID NO: 23857 - RNA, 94 nt, synthetic construct
  misc_feature 1..94: note = engineered ribonucleic acid scaffold (ERS) sequence
  source 1..94: mol_type = other RNA
acgggactttctatctgattactctgaagtccctcaccagcgactatgtcgtagtgggtaaagctccctcagctgcagtgagggagcatcagag

SEQ ID NO: 23858 - RNA, 94 nt, synthetic construct
  misc_feature 1..94: note = engineered ribonucleic acid scaffold (ERS) sequence
  source 1..94: mol_type = other RNA
acgggcaattctatctgattactctgattgccctcaccagcgactatgtcgtagtgggtaaagctccctcagctgcagtgagggagcatcagag

SEQ ID NO: 23859 - RNA, 94 nt, synthetic construct
  misc_feature 1..94: note = engineered ribonucleic acid scaffold (ERS) sequence
  source 1..94: mol_type = other RNA
actgtgcgttctatctgattactctgacgcacatcaccagcgactatgtcgtagtgggtaaagctccctcagctgcagtgagggagcatcagag

SEQ ID NO: 23860 - RNA, 89 nt, synthetic construct
  misc_feature 1..89: note = engineered ribonucleic acid scaffold (ERS) sequence
  source 1..89: mol_type = other RNA
acacacggttctatctgattactctgaccgtgttcaccagcgactatgtcgtagtgggtaaagctccctcataggagggagcatcagag

SEQ ID NO: 23861 - RNA, 89 nt, synthetic construct
  misc_feature 1..89: note = engineered ribonucleic acid scaffold (ERS) sequence
  source 1..89: mol_type = other RNA
acactggtttctatctgattactctgaaccagttcaccagcgactatgtcgtagtgggtaaagctccctcataggagggagcatcagag

SEQ ID NO: 23862 - RNA, 89 nt, synthetic construct
  misc_feature 1..89: note = engineered ribonucleic acid scaffold (ERS) sequence
  source 1..89: mol_type = other RNA
acaggccgttctatctgattactctgacggccttcaccagcgactatgtcgtagtgggtaaagctccctcataggagggagcatcagag

SEQ ID NO: 23863 - RNA, 89 nt, synthetic construct
  misc_feature 1..89: note = engineered ribonucleic acid scaffold (ERS) sequence
  source 1..89: mol_type = other RNA
acaggtccttctatctgattactctgaggaccttcaccagcgactatgtcgtagtgggtaaagctccctcataggagggagcatcagag

SEQ ID NO: 23864 - RNA, 89 nt, synthetic construct
  misc_feature 1..89: note = engineered ribonucleic acid scaffold (ERS) sequence
  source 1..89: mol_type = other RNA
accagcaattctatctgattactctgattgctgtcaccagcgactatgtcgtagtgggtaaagctccctcataggagggagcatcagag

SEQ ID NO: 23865 - RNA, 89 nt, synthetic construct
  misc_feature 1..89: note = engineered ribonucleic acid scaffold (ERS) sequence
  source 1..89: mol_type = other RNA
accgagacttctatctgattactctgaggctcgtcaccagcgactatgtcgtagtgggtaaagctccctcataggagggagcatcagag

SEQ ID NO: 23866 - RNA, 89 nt, synthetic construct
  misc_feature 1..89: note = engineered ribonucleic acid scaffold (ERS) sequence
  source 1..89: mol_type = other RNA
acctgtagttctatctgattactctgactacagtcaccagcgactatgtcgtagtgggtaaagctccctcataggagggagcatcagag

SEQ ID NO: 23867 - RNA, 89 nt, synthetic construct
  misc_feature 1..89: note = engineered ribonucleic acid scaffold (ERS) sequence
  source 1..89: mol_type = other RNA
acgagcacttctatctgattactctgagggctctcaccagcgactatgtcgtagtgggtaaagctccctcataggagggagcatcagag

SEQ ID NO: 23868 - RNA, 89 nt, synthetic construct
  misc_feature 1..89: note = engineered ribonucleic acid scaffold (ERS) sequence
  source 1..89: mol_type = other RNA
acgaggtgttctatctgattactctgacacctctcaccagcgactatgtcgtagtgggtaaagctccctcataggagggagcatcagag

SEQ ID NO: 23869 - RNA, 89 nt, synthetic construct
  misc_feature 1..89: note = engineered ribonucleic acid scaffold (ERS) sequence
  source 1..89: mol_type = other RNA
acgggactttctatctgattactctgaagtccctcaccagcgactatgtcgtagtgggtaaagctccctcataggagggagcatcagag

SEQ ID NO: 23870 - RNA, 89 nt, synthetic construct
  misc_feature 1..89: note = engineered ribonucleic acid scaffold (ERS) sequence
  source 1..89: mol_type = other RNA
acgggcaattctatctgattactctgattgccctcaccagcgactatgtcgtagtgggtaaagctccctcataggagggagcatcagag

SEQ ID NO: 23871 - RNA, 89 nt, synthetic construct
  misc_feature 1..89: note = engineered ribonucleic acid scaffold (ERS) sequence
  source 1..89: mol_type = other RNA
actgtgcgttctatctgattactctgacgcacatcaccagcgactatgtcgtagtgggtaaagctccctcataggagggagcatcagag

SEQ ID NO: 23872 - RNA, 90 nt, synthetic construct
  misc_feature 1..90: note = engineered ribonucleic acid scaffold (ERS) sequence
  source 1..90: mol_type = other RNA
acacacggttctatctgattactctgaccgtgttcaccagcgactatgtcgtagtgggtaaagctccctcttcaggagggagcatcagag

SEQ ID NO: 23873 - RNA, 90 nt, synthetic construct
  misc_feature 1..90: note = engineered ribonucleic acid scaffold (ERS) sequence
  source 1..90: mol_type = other RNA
acactggtttctatctgattactctgaaccagttcaccagcgactatgtcgtagtgggtaaagctccctcttcaggagggagcatcagag

SEQ ID NO: 23874 - RNA, 90 nt, synthetic construct
  misc_feature 1..90: note = engineered ribonucleic acid scaffold (ERS) sequence
  source 1..90: mol_type = other RNA
acaggccgttctatctgattactctgacggccttcaccagcgactatgtcgtagtgggtaaagctccctcttcaggagggagcatcagag

SEQ ID NO: 23875 - RNA, 90 nt, synthetic construct
  misc_feature 1..90: note = engineered ribonucleic acid scaffold (ERS) sequence
  source 1..90: mol_type = other RNA
acaggtccttctatctgattactctgaggaccttcaccagcgactatgtcgtagtgggtaaagctccctcttcaggagggagcatcagag

SEQ ID NO: 23876 - RNA, 90 nt, synthetic construct
  misc_feature 1..90: note = engineered ribonucleic acid scaffold (ERS) sequence
  source 1..90: mol_type = other RNA
accagcaattctatctgattactctgattgctgtcaccagcgactatgtcgtagtgggtaaagctccctcttcaggagggagcatcagag

SEQ ID NO: 23877 - RNA, 90 nt, synthetic construct
  misc_feature 1..90: note = engineered ribonucleic acid scaffold (ERS) sequence
  source 1..90: mol_type = other RNA
accgagacttctatctgattactctgaggctcgtcaccagcgactatgtcgtagtgggtaaagctccctcttcaggagggagcatcagag

SEQ ID NO: 23878 - RNA, 90 nt, synthetic construct
  misc_feature 1..90: note = engineered ribonucleic acid scaffold (ERS) sequence
  source 1..90: mol_type = other RNA
acctgtagttctatctgattactctgactacagtcaccagcgactatgtcgtagtgggtaaagctccctcttcaggagggagcatcagag

SEQ ID NO: 23879 - RNA, 90 nt, synthetic construct
  misc_feature 1..90: note = engineered ribonucleic acid scaffold (ERS) sequence
  source 1..90: mol_type = other RNA
acgagcacttctatctgattactctgagggctctcaccagcgactatgtcgtagtgggtaaagctccctcttcaggagggagcatcagag

SEQ ID NO: 23880 - RNA, 90 nt, synthetic construct
  misc_feature 1..90: note = engineered ribonucleic acid scaffold (ERS) sequence
  source 1..90: mol_type = other RNA
acgaggtgttctatctgattactctgacacctctcaccagcgactatgtcgtagtgggtaaagctccctcttcaggagggagcatcagag

SEQ ID NO: 23881 - RNA, 90 nt, synthetic construct
  misc_feature 1..90: note = engineered ribonucleic acid scaffold (ERS) sequence
  source 1..90: mol_type = other RNA
acgggactttctatctgattactctgaagtccctcaccagcgactatgtcgtagtgggtaaagctccctcttcaggagggagcatcagag

SEQ ID NO: 23882 - RNA, 90 nt, synthetic construct
  misc_feature 1..90: note = engineered ribonucleic acid scaffold (ERS) sequence
  source 1..90: mol_type = other RNA
acgggcaattctatctgattactctgattgccctcaccagcgactatgtcgtagtgggtaaagctccctcttcaggagggagcatcagag

SEQ ID NO: 23883 - RNA, 90 nt, synthetic construct
  misc_feature 1..90: note = engineered ribonucleic acid scaffold (ERS) sequence
  source 1..90: mol_type = other RNA
actgtgcgttctatctgattactctgacgcacatcaccagcgactatgtcgtagtgggtaaagctccctcttcaggagggagcatcagag

SEQ ID NO: 23884 - RNA, 89 nt, synthetic construct
  misc_feature 1..89: note = engineered ribonucleic acid scaffold (ERS) sequence
  source 1..89: mol_type = other RNA
acacacggttctatctgattactctgaccgtgttcaccagcgactatgtcgtagtgggtaaagctccctcttcggagagtgcatcagag

SEQ ID NO: 23885 - RNA, 89 nt, synthetic construct
  misc_feature 1..89: note = engineered ribonucleic acid scaffold (ERS) sequence
  source 1..89: mol_type = other RNA
acactggtttctatctgattactctgaaccagttcaccagcgactatgtcgtagtgggtaaagctccctcttcggagagtgcatcagag

SEQ ID NO: 23886 - RNA, 89 nt, synthetic construct
  misc_feature 1..89: note = engineered ribonucleic acid scaffold (ERS) sequence
  source 1..89: mol_type = other RNA
acaggccgttctatctgattactctgacggccttcaccagcgactatgtcgtagtgggtaaagctccctcttcggagagtgcatcagag

SEQ ID NO: 23887 - RNA, 89 nt, synthetic construct
  misc_feature 1..89: note = engineered ribonucleic acid scaffold (ERS) sequence
  source 1..89: mol_type = other RNA
acaggtccttctatctgattactctgaggaccttcaccagcgactatgtcgtagtgggtaaagctccctcttcggagagtgcatcagag

SEQ ID NO: 23888 - RNA, 89 nt, synthetic construct
  misc_feature 1..89: note = engineered ribonucleic acid scaffold (ERS) sequence
  source 1..89: mol_type = other RNA
accagcaattctatctgattactctgattgctgtcaccagcgactatgtcgtagtgggtaaagctccctcttcggagagtgcatcagag

SEQ ID NO: 23889 - RNA, 89 nt, synthetic construct
  misc_feature 1..89: note = engineered ribonucleic acid scaffold (ERS) sequence
  source 1..89: mol_type = other RNA
accgagacttctatctgattactctgaggctcgtcaccagcgactatgtcgtagtgggtaaagctccctcttcggagagtgcatcagag

SEQ ID NO: 23890 - RNA, 89 nt, synthetic construct
  misc_feature 1..89: note = engineered ribonucleic acid scaffold (ERS) sequence
  source 1..89: mol_type = other RNA
acctgtagttctatctgattactctgactacagtcaccagcgactatgtcgtagtgggtaaagctccctcttcggagagtgcatcagag

SEQ ID NO: 23891 - RNA, 89 nt, synthetic construct
  misc_feature 1..89: note = engineered ribonucleic acid scaffold (ERS) sequence
  source 1..89: mol_type = other RNA
acgagcacttctatctgattactctgagggctctcaccagcgactatgtcgtagtgggtaaagctccctcttcggagagtgcatcagag

SEQ ID NO: 23892 - RNA, 89 nt, synthetic construct
  misc_feature 1..89: note = engineered ribonucleic acid scaffold (ERS) sequence
  source 1..89: mol_type = other RNA
acgaggtgttctatctgattactctgacacctctcaccagcgactatgtcgtagtgggtaaagctccctcttcggagagtgcatcagag

SEQ ID NO: 23893 - RNA, 89 nt, synthetic construct
  misc_feature 1..89: note = engineered ribonucleic acid scaffold (ERS) sequence
  source 1..89: mol_type = other RNA
acgggactttctatctgattactctgaagtccctcaccagcgactatgtcgtagtgggtaaagctccctcttcggagagtgcatcagag

SEQ ID NO: 23894 - RNA, 89 nt, synthetic construct
  misc_feature 1..89: note = engineered ribonucleic acid scaffold (ERS) sequence
  source 1..89: mol_type = other RNA
acgggcaattctatctgattactctgattgccctcaccagcgactatgtcgtagtgggtaaagctccctcttcggagagtgcatcagag

SEQ ID NO: 23895 - RNA, 89 nt, synthetic construct
  misc_feature 1..89: note = engineered ribonucleic acid scaffold (ERS) sequence
  source 1..89: mol_type = other RNA
actgtgcgttctatctgattactctgacgcacatcaccagcgactatgtcgtagtgggtaaagctccctcttcggagagtgcatcagag

SEQ ID NO: 23896 - RNA, 89 nt, synthetic construct
  misc_feature 1..89: note = engineered ribonucleic acid scaffold (ERS) sequence
  source 1..89: mol_type = other RNA
acacacggttctatctgattactctgaccgtgttcaccagcgactatgtcgtagtgggtaaagctccctcttcggaggaggcatcagag

SEQ ID NO: 23897 - RNA, 89 nt, synthetic construct
  misc_feature 1..89: note = engineered ribonucleic acid scaffold (ERS) sequence
  source 1..89: mol_type = other RNA
acactggtttctatctgattactctgaaccagttcaccagcgactatgtcgtagtgggtaaagctccctcttcggaggaggcatcagag

SEQ ID NO: 23898 - RNA, 89 nt, synthetic construct
  misc_feature 1..89: note = engineered ribonucleic acid scaffold (ERS) sequence
  source 1..89: mol_type = other RNA
acaggccgttctatctgattactctgacggccttcaccagcgactatgtcgtagtgggtaaagctccctcttcggaggaggcatcagag

SEQ ID NO: 23899 - RNA, 89 nt, synthetic construct
  misc_feature 1..89: note = engineered ribonucleic acid scaffold (ERS) sequence
  source 1..89: mol_type = other RNA
acaggtccttctatctgattactctgaggaccttcaccagcgactatgtcgtagtgggtaaagctccctcttcggaggaggcatcagag

SEQ ID NO: 23900 - RNA, 89 nt, synthetic construct
  misc_feature 1..89: note = engineered ribonucleic acid scaffold (ERS) sequence
  source 1..89: mol_type = other RNA
accagcaattctatctgattactctgattgctgtcaccagcgactatgtcgtagtgggtaaagctccctcttcggaggaggcatcagag

SEQ ID NO: 23901 - RNA, 89 nt, synthetic construct
  misc_feature 1..89: note = engineered ribonucleic acid scaffold (ERS) sequence
  source 1..89: mol_type = other RNA
accgagacttctatctgattactctgaggctcgtcaccagcgactatgtcgtagtgggtaaagctccctcttcggaggaggcatcagag

SEQ ID NO: 23902 - RNA, 89 nt, synthetic construct
  misc_feature 1..89: note = engineered ribonucleic acid scaffold (ERS) sequence
  source 1..89: mol_type = other RNA
acctgtagttctatctgattactctgactacagtcaccagcgactatgtcgtagtgggtaaagctccctcttcggaggaggcatcagag

SEQ ID NO: 23903 - RNA, 89 nt, synthetic construct
  misc_feature 1..89: note = engineered ribonucleic acid scaffold (ERS) sequence
  source 1..89: mol_type = other RNA
acgagcacttctatctgattactctgagggctctcaccagcgactatgtcgtagtgggtaaagctccctcttcggaggaggcatcagag

SEQ ID NO: 23904 - RNA, 89 nt, synthetic construct
  misc_feature 1..89: note = engineered ribonucleic acid scaffold (ERS) sequence
  source 1..89: mol_type = other RNA
acgaggtgttctatctgattactctgacacctctcaccagcgactatgtcgtagtgggtaaagctccctcttcggaggaggcatcagag

SEQ ID NO: 23905 - RNA, 89 nt, synthetic construct
  misc_feature 1..89: note = engineered ribonucleic acid scaffold (ERS) sequence
  source 1..89: mol_type = other RNA
acgggactttctatctgattactctgaagtccctcaccagcgactatgtcgtagtgggtaaagctccctcttcggaggaggcatcagag

SEQ ID NO: 23906 - RNA, 89 nt, synthetic construct
  misc_feature 1..89: note = engineered ribonucleic acid scaffold (ERS) sequence
  source 1..89: mol_type = other RNA
acgggcaattctatctgattactctgattgccctcaccagcgactatgtcgtagtgggtaaagctccctcttcggaggaggcatcagag

SEQ ID NO: 23907 - RNA, 89 nt, synthetic construct
  misc_feature 1..89: note = engineered ribonucleic acid scaffold (ERS) sequence
  source 1..89: mol_type = other RNA
actgtgcgttctatctgattactctgacgcacatcaccagcgactatgtcgtagtgggtaaagctccctcttcggaggaggcatcagag

SEQ ID NO: 23908 - RNA, 91 nt, synthetic construct
  misc_feature 1..91: note = engineered ribonucleic acid scaffold (ERS) sequence
  source 1..91: mol_type = other RNA
acacacggttctatctgattactctgaccgtgttcaccagcgactatgtcgtagtgggtaaagctccctcttcggagggaacgcatcagag

SEQ ID NO: 23909 - RNA, 91 nt, synthetic construct
  misc_feature 1..91: note = engineered ribonucleic acid scaffold (ERS) sequence
  source 1..91: mol_type = other RNA
acactggtttctatctgattactctgaaccagttcaccagcgactatgtcgtagtgggtaaagctccctcttcggagggaacgcatcagag

SEQ ID NO: 23910 - RNA, 91 nt, synthetic construct
  misc_feature 1..91: note = engineered ribonucleic acid scaffold (ERS) sequence
  source 1..91: mol_type = other RNA
acaggccgttctatctgattactctgacggccttcaccagcgactatgtcgtagtgggtaaagctccctcttcggagggaacgcatcagag

SEQ ID NO: 23911 - RNA, 91 nt, synthetic construct
  misc_feature 1..91: note = engineered ribonucleic acid scaffold (ERS) sequence
  source 1..91: mol_type = other RNA
acaggtccttctatctgattactctgaggaccttcaccagcgactatgtcgtagtgggtaaagctccctcttcggagggaacgcatcagag

SEQ ID NO: 23912 - RNA, 91 nt, synthetic construct
  misc_feature 1..91: note = engineered ribonucleic acid scaffold (ERS) sequence
  source 1..91: mol_type = other RNA
accagcaattctatctgattactctgattgctgtcaccagcgactatgtcgtagtgggtaaagctccctcttcggagggaacgcatcagag

SEQ ID NO: 23913 - RNA, 91 nt, synthetic construct
  misc_feature 1..91: note = engineered ribonucleic acid scaffold (ERS) sequence
  source 1..91: mol_type = other RNA
accgagacttctatctgattactctgaggctcgtcaccagcgactatgtcgtagtgggtaaagctccctcttcggagggaacgcatcagag

SEQ ID NO: 23914 - RNA, 91 nt, synthetic construct
  misc_feature 1..91: note = engineered ribonucleic acid scaffold (ERS) sequence
  source 1..91: mol_type = other RNA
acctgtagttctatctgattactctgactacagtcaccagcgactatgtcgtagtgggtaaagctccctcttcggagggaacgcatcagag

SEQ ID NO: 23915 - RNA, 91 nt, synthetic construct
  misc_feature 1..91: note = engineered ribonucleic acid scaffold (ERS) sequence
  source 1..91: mol_type = other RNA
acgagcacttctatctgattactctgagggctctcaccagcgactatgtcgtagtgggtaaagctccctcttcggagggaacgcatcagag

SEQ ID NO: 23916 - RNA, 91 nt, synthetic construct
  misc_feature 1..91: note = engineered ribonucleic acid scaffold (ERS) sequence
  source 1..91: mol_type = other RNA
acgaggtgttctatctgattactctgacacctctcaccagcgactatgtcgtagtgggtaaagctccctcttcggagggaacgcatcagag

SEQ ID NO: 23917 - RNA, 91 nt, synthetic construct
  misc_feature 1..91: note = engineered ribonucleic acid scaffold (ERS) sequence
  source 1..91: mol_type = other RNA
acgggactttctatctgattactctgaagtccctcaccagcgactatgtcgtagtgggtaaagctccctcttcggagggaacgcatcagag

SEQ ID NO: 23918 - RNA, 91 nt, synthetic construct
  misc_feature 1..91: note = engineered ribonucleic acid scaffold (ERS) sequence
  source 1..91: mol_type = other RNA
acgggcaattctatctgattactctgattgccctcaccagcgactatgtcgtagtgggtaaagctccctcttcggagggaacgcatcagag

SEQ ID NO: 23919 - RNA, 91 nt, synthetic construct
  misc_feature 1..91: note = engineered ribonucleic acid scaffold (ERS) sequence
  source 1..91: mol_type = other RNA
actgtgcgttctatctgattactctgacgcacatcaccagcgactatgtcgtagtgggtaaagctccctcttcggagggaacgcatcagag

SEQ ID NO: 23920 - RNA, 89 nt, synthetic construct
  misc_feature 1..89: note = engineered ribonucleic acid scaffold (ERS) sequence
  source 1..89: mol_type = other RNA
acacacggttctatctgattactctgaccgtgttcaccagcgactatgtcgtagtgggtaaagctccctggaaacagggagcatcagag

SEQ ID NO: 23921 - RNA, 89 nt, synthetic construct
  misc_feature 1..89: note = engineered ribonucleic acid scaffold (ERS) sequence
  source 1..89: mol_type = other RNA
acactggtttctatctgattactctgaaccagttcaccagcgactatgtcgtagtgggtaaagctccctggaaacagggagcatcagag

SEQ ID NO: 23922 - RNA, 89 nt, synthetic construct
  misc_feature 1..89: note = engineered ribonucleic acid scaffold (ERS) sequence
  source 1..89: mol_type = other RNA
acaggccgttctatctgattactctgacggccttcaccagcgactatgtcgtagtgggtaaagctccctggaaacagggagcatcagag

SEQ ID NO: 23923 - RNA, 89 nt, synthetic construct
  misc_feature 1..89: note = engineered ribonucleic acid scaffold (ERS) sequence
  source 1..89: mol_type = other RNA
acaggtccttctatctgattactctgaggaccttcaccagcgactatgtcgtagtgggtaaagctccctggaaacagggagcatcagag

SEQ ID NO: 23924 - RNA, 89 nt, synthetic construct
  misc_feature 1..89: note = engineered ribonucleic acid scaffold (ERS) sequence
  source 1..89: mol_type = other RNA
accagcaattctatctgattactctgattgctgtcaccagcgactatgtcgtagtgggtaaagctccctggaaacagggagcatcagag

SEQ ID NO: 23925 - RNA, 89 nt, synthetic construct
  misc_feature 1..89: note = engineered ribonucleic acid scaffold (ERS) sequence
  source 1..89: mol_type = other RNA
accgagacttctatctgattactctgaggctcgtcaccagcgactatgtcgtagtgggtaaagctccctggaaacagggagcatcagag

SEQ ID NO: 23926 - RNA, 89 nt, synthetic construct
  misc_feature 1..89: note = engineered ribonucleic acid scaffold (ERS) sequence
  source 1..89: mol_type = other RNA
acctgtagttctatctgattactctgactacagtcaccagcgactatgtcgtagtgggtaaagctccctggaaacagggagcatcagag

SEQ ID NO: 23927 - RNA, 89 nt, synthetic construct
  misc_feature 1..89: note = engineered ribonucleic acid scaffold (ERS) sequence
  source 1..89: mol_type = other RNA
acgagcacttctatctgattactctgagggctctcaccagcgactatgtcgtagtgggtaaagctccctggaaacagggagcatcagag

SEQ ID NO: 23928 - RNA, 89 nt, synthetic construct
  misc_feature 1..89: note = engineered ribonucleic acid scaffold (ERS) sequence
  source 1..89: mol_type = other RNA
acgaggtgttctatctgattactctgacacctctcaccagcgactatgtcgtagtgggtaaagctccctggaaacagggagcatcagag

SEQ ID NO: 23929 - RNA, 89 nt, synthetic construct
  misc_feature 1..89: note = engineered ribonucleic acid scaffold (ERS) sequence
  source 1..89: mol_type = other RNA
acgggactttctatctgattactctgaagtccctcaccagcgactatgtcgtagtgggtaaagctccctggaaacagggagcatcagag

SEQ ID NO: 23930 - RNA, 89 nt, synthetic construct
  misc_feature 1..89: note = engineered ribonucleic acid scaffold (ERS) sequence
  source 1..89: mol_type = other RNA
acgggcaattctatctgattactctgattgccctcaccagcgactatgtcgtagtgggtaaagctccctggaaacagggagcatcagag

SEQ ID NO: 23931 - RNA, 89 nt, synthetic construct
  misc_feature 1..89: note = engineered ribonucleic acid scaffold (ERS) sequence
  source 1..89: mol_type = other RNA
actgtgcgttctatctgattactctgacgcacatcaccagcgactatgtcgtagtgggtaaagctccctggaaacagggagcatcagag

SEQ ID NO: 23932 - RNA, 85 nt, synthetic construct
  misc_feature 1..85: note = engineered ribonucleic acid scaffold (ERS) sequence
  source 1..85: mol_type = other RNA
acacacggttctatctgattactctgaccgtgttcaccagcgactatgtcgtagtgggtaaagctcccttcggggagcatcagag

SEQ ID NO: 23933 - RNA, 85 nt, synthetic construct
  misc_feature 1..85: note = engineered ribonucleic acid scaffold (ERS) sequence
  source 1..85: mol_type = other RNA
acactggtttctatctgattactctgaaccagttcaccagcgactatgtcgtagtgggtaaagctcccttcggggagcatcagag

SEQ ID NO: 23934 - RNA, 85 nt, synthetic construct
  misc_feature 1..85: note = engineered ribonucleic acid scaffold (ERS) sequence
  source 1..85: mol_type = other RNA
acaggccgttctatctgattactctgacggccttcaccagcgactatgtcgtagtgggtaaagctcccttcggggagcatcagag

SEQ ID NO: 23935 - RNA, 85 nt, synthetic construct
  misc_feature 1..85: note = engineered ribonucleic acid scaffold (ERS) sequence
  source 1..85: mol_type = other RNA
acaggtccttctatctgattactctgaggaccttcaccagcgactatgtcgtagtgggtaaagctcccttcggggagcatcagag

SEQ ID NO: 23936 - RNA, 85 nt, synthetic construct
  misc_feature 1..85: note = engineered ribonucleic acid scaffold (ERS) sequence
  source 1..85: mol_type = other RNA
accagcaattctatctgattactctgattgctgtcaccagcgactatgtcgtagtgggtaaagctcccttcggggagcatcagag

SEQ ID NO: 23937 - RNA, 85 nt, synthetic construct
  misc_feature 1..85: note = engineered ribonucleic acid scaffold (ERS) sequence
  source 1..85: mol_type = other RNA
accgagacttctatctgattactctgaggctcgtcaccagcgactatgtcgtagtgggtaaagctcccttcggggagcatcagag

SEQ ID NO: 23938 - RNA, 85 nt, synthetic construct
  misc_feature 1..85: note = engineered ribonucleic acid scaffold (ERS) sequence
  source 1..85: mol_type = other RNA
acctgtagttctatctgattactctgactacagtcaccagcgactatgtcgtagtgggtaaagctcccttcggggagcatcagag

SEQ ID NO: 23939 - RNA, 85 nt, synthetic construct
  misc_feature 1..85: note = engineered ribonucleic acid scaffold (ERS) sequence
  source 1..85: mol_type = other RNA
acgagcacttctatctgattactctgagggctctcaccagcgactatgtcgtagtgggtaaagctcccttcggggagcatcagag

SEQ ID NO: 23940 - RNA, 85 nt, synthetic construct
  misc_feature 1..85: note = engineered ribonucleic acid scaffold (ERS) sequence
  source 1..85: mol_type = other RNA
acgaggtgttctatctgattactctgacacctctcaccagcgactatgtcgtagtgggtaaagctcccttcggggagcatcagag

SEQ ID NO: 23941 - RNA, 85 nt, synthetic construct
  misc_feature 1..85: note = engineered ribonucleic acid scaffold (ERS) sequence
  source 1..85: mol_type = other RNA
acgggactttctatctgattactctgaagtccctcaccagcgactatgtcgtagtgggtaaagctcccttcggggagcatcagag

SEQ ID NO: 23942 - RNA, 85 nt, synthetic construct
  misc_feature 1..85: note = engineered ribonucleic acid scaffold (ERS) sequence
  source 1..85: mol_type = other RNA
acgggcaattctatctgattactctgattgccctcaccagcgactatgtcgtagtgggtaaagctcccttcggggagcatcagag

SEQ ID NO: 23943 - RNA, 85 nt, synthetic construct
  misc_feature 1..85: note = engineered ribonucleic acid scaffold (ERS) sequence
  source 1..85: mol_type = other RNA
actgtgcgttctatctgattactctgacgcacatcaccagcgactatgtcgtagtgggtaaagctcccttcggggagcatcagag

SEQ ID NO: 23944 - RNA, 85 nt, synthetic construct
  misc_feature 1..85: note = engineered ribonucleic acid scaffold (ERS) sequence
  source 1..85: mol_type = other RNA
acacacggttctatctgattactctgaccgtgttcaccagcgactatgtcgtagtgggtaaagctccgttcgcggagcatcagag

SEQ ID NO: 23945 - RNA, 85 nt, synthetic construct
  misc_feature 1..85: note = engineered ribonucleic acid scaffold (ERS) sequence
  source 1..85: mol_type = other RNA
acactggtttctatctgattactctgaaccagttcaccagcgactatgtcgtagtgggtaaagctccgttcgcggagcatcagag

SEQ ID NO: 23946 - RNA, 85 nt, synthetic construct
  misc_feature 1..85: note = engineered ribonucleic acid scaffold (ERS) sequence
  source 1..85: mol_type = other RNA
acaggccgttctatctgattactctgacggccttcaccagcgactatgtcgtagtgggtaaagctccgttcgcggagcatcagag

SEQ ID NO: 23947 - RNA, 85 nt, synthetic construct
  misc_feature 1..85: note = engineered ribonucleic acid scaffold (ERS) sequence
  source 1..85: mol_type = other RNA
acaggtccttctatctgattactctgaggaccttcaccagcgactatgtcgtagtgggtaaagctccgttcgcggagcatcagag

SEQ ID NO: 23948 - RNA, 85 nt, synthetic construct
  misc_feature 1..85: note = engineered ribonucleic acid scaffold (ERS) sequence
  source 1..85: mol_type = other RNA
accagcaattctatctgattactctgattgctgtcaccagcgactatgtcgtagtgggtaaagctccgttcgcggagcatcagag

SEQ ID NO: 23949 - RNA, 85 nt, synthetic construct
  misc_feature 1..85: note = engineered ribonucleic acid scaffold (ERS) sequence
  source 1..85: mol_type = other RNA
accgagacttctatctgattactctgaggctcgtcaccagcgactatgtcgtagtgggtaaagctccgttcgcggagcatcagag

SEQ ID NO: 23950 - RNA, 85 nt, synthetic construct
  misc_feature 1..85: note = engineered ribonucleic acid scaffold (ERS) sequence
  source 1..85: mol_type = other RNA
acctgtagttctatctgattactctgactacagtcaccagcgactatgtcgtagtgggtaaagctccgttcgcggagcatcagag

SEQ ID NO: 23951 - RNA, 85 nt, synthetic construct
  misc_feature 1..85: note = engineered ribonucleic acid scaffold (ERS) sequence
  source 1..85: mol_type = other RNA
acgagcacttctatctgattactctgagggctctcaccagcgactatgtcgtagtgggtaaagctccgttcgcggagcatcagag

SEQ ID NO: 23952 - RNA, 85 nt, synthetic construct
  misc_feature 1..85: note = engineered ribonucleic acid scaffold (ERS) sequence
  source 1..85: mol_type = other RNA
acgaggtgttctatctgattactctgacacctctcaccagcgactatgtcgtagtgggtaaagctccgttcgcggagcatcagag

SEQ ID NO: 23953 - RNA, 85 nt, synthetic construct
  misc_feature 1..85: note = engineered ribonucleic acid scaffold (ERS) sequence
  source 1..85: mol_type = other RNA
acgggactttctatctgattactctgaagtccctcaccagcgactatgtcgtagtgggtaaagctccgttcgcggagcatcagag

SEQ ID NO: 23954 - RNA, 85 nt, synthetic construct
  misc_feature 1..85: note = engineered ribonucleic acid scaffold (ERS) sequence
  source 1..85: mol_type = other RNA
acgggcaattctatctgattactctgattgccctcaccagcgactatgtcgtagtgggtaaagctccgttcgcggagcatcagag

SEQ ID NO: 23955 - RNA, 85 nt, synthetic construct
  misc_feature 1..85: note = engineered ribonucleic acid scaffold (ERS) sequence
  source 1..85: mol_type = other RNA
actgtgcgttctatctgattactctgacgcacatcaccagcgactatgtcgtagtgggtaaagctccgttcgcggagcatcagag

SEQ ID NO: 23956 - RNA, 87 nt, synthetic construct
  misc_feature 1..87: note = engineered ribonucleic acid scaffold (ERS) sequence
  source 1..87: mol_type = other RNA
acacacggttctatctgattactctgaccgtgttcaccagcgactatgtcgtagtgggtaaagctcctcttcggaggagcatcagag

SEQ ID NO: 23957 - RNA, 87 nt, synthetic construct
  misc_feature 1..87: note = engineered ribonucleic acid scaffold (ERS) sequence
  source 1..87: mol_type = other RNA
acactggtttctatctgattactctgaaccagttcaccagcgactatgtcgtagtgggtaaagctcctcttcggaggagcatcagag

SEQ ID NO: 23958 - RNA, 87 nt, synthetic construct
  misc_feature 1..87: note = engineered ribonucleic acid scaffold (ERS) sequence
  source 1..87: mol_type = other RNA
acaggccgttctatctgattactctgacggccttcaccagcgactatgtcgtagtgggtaaagctcctcttcggaggagcatcagag

SEQ ID NO: 23959 - RNA, 87 nt, synthetic construct
  misc_feature 1..87: note = engineered ribonucleic acid scaffold (ERS) sequence
  source 1..87: mol_type = other RNA
acaggtccttctatctgattactctgaggaccttcaccagcgactatgtcgtagtgggtaaagctcctcttcggaggagcatcagag

SEQ ID NO: 23960 - RNA, 87 nt, synthetic construct
  misc_feature 1..87: note = engineered ribonucleic acid scaffold (ERS) sequence
  source 1..87: mol_type = other RNA
accagcaattctatctgattactctgattgctgtcaccagcgactatgtcgtagtgggtaaagctcctcttcggaggagcatcagag

SEQ ID NO: 23961 - RNA, 87 nt, synthetic construct
  misc_feature 1..87: note = engineered ribonucleic acid scaffold (ERS) sequence
  source 1..87: mol_type = other RNA
accgagacttctatctgattactctgaggctcgtcaccagcgactatgtcgtagtgggtaaagctcctcttcggaggagcatcagag

SEQ ID NO: 23962 - RNA, 87 nt, synthetic construct
  misc_feature 1..87: note = engineered ribonucleic acid scaffold (ERS) sequence
  source 1..87: mol_type = other RNA
acctgtagttctatctgattactctgactacagtcaccagcgactatgtcgtagtgggtaaagctcctcttcggaggagcatcagag

SEQ ID NO: 23963 - RNA, 87 nt, synthetic construct
  misc_feature 1..87: note = engineered ribonucleic acid scaffold (ERS) sequence
  source 1..87: mol_type = other RNA
acgagcacttctatctgattactctgagggctctcaccagcgactatgtcgtagtgggtaaagctcctcttcggaggagcatcagag

SEQ ID NO: 23964 - RNA, 87 nt, synthetic construct
  misc_feature 1..87: note = engineered ribonucleic acid scaffold (ERS) sequence
  source 1..87: mol_type = other RNA
acgaggtgttctatctgattactctgacacctctcaccagcgactatgtcgtagtgggtaaagctcctcttcggaggagcatcagag

SEQ ID NO: 23965 - RNA, 87 nt, synthetic construct
  misc_feature 1..87: note = engineered ribonucleic acid scaffold (ERS) sequence
  source 1..87: mol_type = other RNA
acgggactttctatctgattactctgaagtccctcaccagcgactatgtcgtagtgggtaaagctcctcttcggaggagcatcagag

SEQ ID NO: 23966 - RNA, 87 nt, synthetic construct
  misc_feature 1..87: note = engineered ribonucleic acid scaffold (ERS) sequence
  source 1..87: mol_type = other RNA
acgggcaattctatctgattactctgattgccctcaccagcgactatgtcgtagtgggtaaagctcctcttcggaggagcatcagag

SEQ ID NO: 23967 - RNA, 87 nt, synthetic construct
  misc_feature 1..87: note = engineered ribonucleic acid scaffold (ERS) sequence
  source 1..87: mol_type = other RNA
actgtgcgttctatctgattactctgacgcacatcaccagcgactatgtcgtagtgggtaaagctcctcttcggaggagcatcagag

SEQ ID NO: 23968 - RNA, 85 nt, synthetic construct
  misc_feature 1..85: note = engineered ribonucleic acid scaffold (ERS) sequence
  source 1..85: mol_type = other RNA
acacacggttctatctgattactctgaccgtgttcaccagcgactatgtcgtagtgggtaaagctctcttcggagagcatcagag

SEQ ID NO: 23969 - RNA, 85 nt, synthetic construct
  misc_feature 1..85: note = engineered ribonucleic acid scaffold (ERS) sequence
  source 1..85: mol_type = other RNA
acactggtttctatctgattactctgaaccagttcaccagcgactatgtcgtagtgggtaaagctctcttcggagagcatcagag

SEQ ID NO: 23970 - RNA, 85 nt, synthetic construct
  misc_feature 1..85: note = engineered ribonucleic acid scaffold (ERS) sequence
  source 1..85: mol_type = other RNA
acaggccgttctatctgattactctgacggccttcaccagcgactatgtcgtagtgggtaaagctctcttcggagagcatcagag

SEQ ID NO: 23971 - RNA, 85 nt, synthetic construct
  misc_feature 1..85: note = engineered ribonucleic acid scaffold (ERS) sequence
  source 1..85: mol_type = other RNA
acaggtccttctatctgattactctgaggaccttcaccagcgactatgtcgtagtgggtaaagctctcttcggagagcatcagag

SEQ ID NO: 23972 - RNA, 85 nt, synthetic construct
  misc_feature 1..85: note = engineered ribonucleic acid scaffold (ERS) sequence
  source 1..85: mol_type = other RNA
accagcaattctatctgattactctgattgctgtcaccagcgactatgtcgtagtgggtaaagctctcttcggagagcatcagag

SEQ ID NO: 23973 - RNA, 85 nt, synthetic construct
  misc_feature 1..85: note = engineered ribonucleic acid scaffold (ERS) sequence
  source 1..85: mol_type = other RNA
accgagacttctatctgattactctgaggctcgtcaccagcgactatgtcgtagtgggtaaagctctcttcggagagcatcagag

SEQ ID NO: 23974 - RNA, 85 nt, synthetic construct
  misc_feature 1..85: note = engineered ribonucleic acid scaffold (ERS) sequence
  source 1..85: mol_type = other RNA
acctgtagttctatctgattactctgactacagtcaccagcgactatgtcgtagtgggtaaagctctcttcggagagcatcagag

SEQ ID NO: 23975 - RNA, 85 nt, synthetic construct
  misc_feature 1..85: note = engineered ribonucleic acid scaffold (ERS) sequence
  source 1..85: mol_type = other RNA
acgagcacttctatctgattactctgagggctctcaccagcgactatgtcgtagtgggtaaagctctcttcggagagcatcagag

SEQ ID NO: 23976 - RNA, 85 nt, synthetic construct
  misc_feature 1..85: note = engineered ribonucleic acid scaffold (ERS) sequence
  source 1..85: mol_type = other RNA
acgaggtgttctatctgattactctgacacctctcaccagcgactatgtcgtagtgggtaaagctctcttcggagagcatcagag

SEQ ID NO: 23977 - RNA, 85 nt, synthetic construct
  misc_feature 1..85: note = engineered ribonucleic acid scaffold (ERS) sequence
  source 1..85: mol_type = other RNA
acgggactttctatctgattactctgaagtccctcaccagcgactatgtcgtagtgggtaaagctctcttcggagagcatcagag

SEQ ID NO: 23978 - RNA, 85 nt, synthetic construct
  misc_feature 1..85: note = engineered ribonucleic acid scaffold (ERS) sequence
  source 1..85: mol_type = other RNA
acgggcaattctatctgattactctgattgccctcaccagcgactatgtcgtagtgggtaaagctctcttcggagagcatcagag

SEQ ID NO: 23979 - RNA, 85 nt, synthetic construct
  misc_feature 1..85: note = engineered ribonucleic acid scaffold (ERS) sequence
  source 1..85: mol_type = other RNA
actgtgcgttctatctgattactctgacgcacatcaccagcgactatgtcgtagtgggtaaagctctcttcggagagcatcagag

SEQ ID NO: 23980 - RNA, 77 nt, synthetic construct
  misc_feature 1..77: note = engineered ribonucleic acid scaffold (ERS) sequence
  source 1..77: mol_type = other RNA
acacacggttctatctgattactctgaccgtgttcaccagcgactatgtcgtagtgggtaaagctgcagcatcagag

SEQ ID NO: 23981 - RNA, 77 nt, synthetic construct
  misc_feature 1..77: note = engineered ribonucleic acid scaffold (ERS) sequence
  source 1..77: mol_type = other RNA
acactggtttctatctgattactctgaaccagttcaccagcgactatgtcgtagtgggtaaagctgcagcatcagag

SEQ ID NO: 23982 - RNA, 77 nt, synthetic construct
  misc_feature 1..77: note = engineered ribonucleic acid scaffold (ERS) sequence
  source 1..77: mol_type = other RNA
acaggccgttctatctgattactctgacggccttcaccagcgactatgtcgtagtgggtaaagctgcagcatcagag

SEQ ID NO: 23983 - RNA, 77 nt, synthetic construct
  misc_feature 1..77: note = engineered ribonucleic acid scaffold (ERS) sequence
  source 1..77: mol_type = other RNA
acaggtccttctatctgattactctgaggaccttcaccagcgactatgtcgtagtgggtaaagctgcagcatcagag

SEQ ID NO: 23984 - RNA, 77 nt, synthetic construct
  misc_feature 1..77: note = engineered ribonucleic acid scaffold (ERS) sequence
  source 1..77: mol_type = other RNA
accagcaattctatctgattactctgattgctgtcaccagcgactatgtcgtagtgggtaaagctgcagcatcagag

SEQ ID NO: 23985 - RNA, 77 nt, synthetic construct
  misc_feature 1..77: note = engineered ribonucleic acid scaffold (ERS) sequence
  source 1..77: mol_type = other RNA
accgagacttctatctgattactctgaggctcgtcaccagcgactatgtcgtagtgggtaaagctgcagcatcagag

SEQ ID NO: 23986 - RNA, 77 nt, synthetic construct
  misc_feature 1..77: note = engineered ribonucleic acid scaffold (ERS) sequence
  source 1..77: mol_type = other RNA
acctgtagttctatctgattactctgactacagtcaccagcgactatgtcgtagtgggtaaagctgcagcatcagag

SEQ ID NO: 23987 - RNA, 77 nt, synthetic construct
  misc_feature 1..77: note = engineered ribonucleic acid scaffold (ERS) sequence
  source 1..77: mol_type = other RNA
acgagcacttctatctgattactctgagggctctcaccagcgactatgtcgtagtgggtaaagctgcagcatcagag

SEQ ID NO: 23988 - RNA, 77 nt, synthetic construct
  misc_feature 1..77: note = engineered ribonucleic acid scaffold (ERS) sequence
  source 1..77: mol_type = other RNA
acgaggtgttctatctgattactctgacacctctcaccagcgactatgtcgtagtgggtaaagctgcagcatcagag

SEQ ID NO: 23989 - RNA, 77 nt, synthetic construct
  misc_feature 1..77: note = engineered ribonucleic acid scaffold (ERS) sequence
  source 1..77: mol_type = other RNA
acgggactttctatctgattactctgaagtccctcaccagcgactatgtcgtagtgggtaaagctgcagcatcagag

SEQ ID NO: 23990 - RNA, 77 nt, synthetic construct
  misc_feature 1..77: note = engineered ribonucleic acid scaffold (ERS) sequence
  source 1..77: mol_type = other RNA
acgggcaattctatctgattactctgattgccctcaccagcgactatgtcgtagtgggtaaagctgcagcatcagag

SEQ ID NO: 23991 - RNA, 77 nt, synthetic construct
  misc_feature 1..77: note = engineered ribonucleic acid scaffold (ERS) sequence
  source 1..77: mol_type = other RNA
actgtgcgttctatctgattactctgacgcacatcaccagcgactatgtcgtagtgggtaaagctgcagcatcagag

SEQ ID NO: 23992 - RNA, 83 nt, synthetic construct
  misc_feature 1..83: note = engineered ribonucleic acid scaffold (ERS) sequence
  source 1..83: mol_type = other RNA
acacacggttctatctgattactctgaccgtgttcaccagcgactatgtcgtagtgggtaaagctgcttcggcagcatcagag

SEQ ID NO: 23993 - RNA, 83 nt, synthetic construct
  misc_feature 1..83: note = engineered ribonucleic acid scaffold (ERS) sequence
  source 1..83: mol_type = other RNA
acactggtttctatctgattactctgaaccagttcaccagcgactatgtcgtagtgggtaaagctgcttcggcagcatcagag

SEQ ID NO: 23994 - RNA, 83 nt, synthetic construct
  misc_feature 1..83: note = engineered ribonucleic acid scaffold (ERS) sequence
  source 1..83: mol_type = other RNA
acaggccgttctatctgattactctgacggccttcaccagcgactatgtcgtagtgggtaaagctgcttcggcagcatcagag

SEQ ID NO: 23995 - RNA, 83 nt, synthetic construct
  misc_feature 1..83: note = engineered ribonucleic acid scaffold (ERS) sequence
  source 1..83: mol_type = other RNA
acaggtccttctatctgattactctgaggaccttcaccagcgactatgtcgtagtgggtaaagctgcttcggcagcatcagag

SEQ ID NO: 23996 - RNA, 83 nt, synthetic construct
  misc_feature 1..83: note = engineered ribonucleic acid scaffold (ERS) sequence
  source 1..83: mol_type = other RNA
accagcaattctatctgattactctgattgctgtcaccagcgactatgtcgtagtgggtaaagctgcttcggcagcatcagag

SEQ ID NO: 23997 - RNA, 83 nt, synthetic construct
  misc_feature 1..83: note = engineered ribonucleic acid scaffold (ERS) sequence
  source 1..83: mol_type = other RNA
accgagacttctatctgattactctgaggctcgtcaccagcgactatgtcgtagtgggtaaagctgcttcggcagcatcagag

SEQ ID NO: 23998 - RNA, 83 nt, synthetic construct
  misc_feature 1..83: note = engineered ribonucleic acid scaffold (ERS) sequence
  source 1..83: mol_type = other RNA
acctgtagttctatctgattactctgactacagtcaccagcgactatgtcgtagtgggtaaagctgcttcggcagcatcagag

SEQ ID NO: 23999 - RNA, 83 nt, synthetic construct
  misc_feature 1..83: note = engineered ribonucleic acid scaffold (ERS) sequence
  source 1..83: mol_type = other RNA
acgagcacttctatctgattactctgagggctctcaccagcgactatgtcgtagtgggtaaagctgcttcggcagcatcagag

SEQ ID NO: 24000 - RNA, 83 nt, synthetic construct
  misc_feature 1..83: note = engineered ribonucleic acid scaffold (ERS) sequence
  source 1..83: mol_type = other RNA
acgaggtgttctatctgattactctgacacctctcaccagcgactatgtcgtagtgggtaaagctgcttcggcagcatcagag

SEQ ID NO: 24001 - RNA, 83 nt, synthetic construct
  misc_feature 1..83: note = engineered ribonucleic acid scaffold (ERS) sequence
  source 1..83: mol_type = other RNA
acgggactttctatctgattactctgaagtccctcaccagcgactatgtcgtagtgggtaaagctgcttcggcagcatcagag

SEQ ID NO: 24002 - RNA, 83 nt, synthetic construct
  misc_feature 1..83: note = engineered ribonucleic acid scaffold (ERS) sequence
  source 1..83: mol_type = other RNA
acgggcaattctatctgattactctgattgccctcaccagcgactatgtcgtagtgggtaaagctgcttcggcagcatcagag

SEQ ID NO: 24003 - RNA, 83 nt, synthetic construct
  misc_feature 1..83: note = engineered ribonucleic acid scaffold (ERS) sequence
  source 1..83: mol_type = other RNA
actgtgcgttctatctgattactctgacgcacatcaccagcgactatgtcgtagtgggtaaagctgcttcggcagcatcagag

SEQ ID NO: 24004 - RNA, 89 nt, synthetic construct
  misc_feature 1..89: note = engineered ribonucleic acid scaffold (ERS) sequence
  source 1..89: mol_type = other RNA
acacacggttctatctgattactctgaccgtgttcaccagcgactatgtcgtagtgggtaaaggtccctcttcggagggaacatcagag

SEQ ID NO: 24005 - RNA, 89 nt, synthetic construct
  misc_feature 1..89: note = engineered ribonucleic acid scaffold (ERS) sequence
  source 1..89: mol_type = other RNA
acactggtttctatctgattactctgaaccagttcaccagcgactatgtcgtagtgggtaaaggtccctcttcggagggaacatcagag

SEQ ID NO: 24006 - RNA, 89 nt, synthetic construct
  misc_feature 1..89: note = engineered ribonucleic acid scaffold (ERS) sequence
  source 1..89: mol_type = other RNA
acaggccgttctatctgattactctgacggccttcaccagcgactatgtcgtagtgggtaaaggtccctcttcggagggaacatcagag

SEQ ID NO: 24007 - RNA, 89 nt, synthetic construct
  misc_feature 1..89: note = engineered ribonucleic acid scaffold (ERS) sequence
  source 1..89: mol_type = other RNA
acaggtccttctatctgattactctgaggaccttcaccagcgactatgtcgtagtgggtaaaggtccctcttcggagggaacatcagag

SEQ ID NO: 24008 - RNA, 89 nt, synthetic construct
  misc_feature 1..89: note = engineered ribonucleic acid scaffold (ERS) sequence
  source 1..89: mol_type = other RNA
accagcaattctatctgattactctgattgctgtcaccagcgactatgtcgtagtgggtaaaggtccctcttcggagggaacatcagag

SEQ ID NO: 24009 - RNA, 89 nt, synthetic construct
  misc_feature 1..89: note = engineered ribonucleic acid scaffold (ERS) sequence
  source 1..89: mol_type = other RNA
accgagacttctatctgattactctgaggctcgtcaccagcgactatgtcgtagtgggtaaaggtccctcttcggagggaacatcagag

SEQ ID NO: 24010 - RNA, 89 nt, synthetic construct
  misc_feature 1..89: note = engineered ribonucleic acid scaffold (ERS) sequence
  source 1..89: mol_type = other RNA
acctgtagttctatctgattactctgactacagtcaccagcgactatgtcgtagtgggtaaaggtccctcttcggagggaacatcagag

SEQ ID NO: 24011 - RNA, 89 nt, synthetic construct
  misc_feature 1..89: note = engineered ribonucleic acid scaffold (ERS) sequence
  source 1..89: mol_type = other RNA
acgagcacttctatctgattactctgagggctctcaccagcgactatgtcgtagtgggtaaaggtccctcttcggagggaacatcagag

SEQ ID NO: 24012 - RNA, 89 nt, synthetic construct
  misc_feature 1..89: note = engineered ribonucleic acid scaffold (ERS) sequence
  source 1..89: mol_type = other RNA
acgaggtgttctatctgattactctgacacctctcaccagcgactatgtcgtagtgggtaaaggtccctcttcggagggaacatcagag

SEQ ID NO: 24013 - RNA, 89 nt, synthetic construct
  misc_feature 1..89: note = engineered ribonucleic acid scaffold (ERS) sequence
  source 1..89: mol_type = other RNA
acgggactttctatctgattactctgaagtccctcaccagcgactatgtcgtagtgggtaaaggtccctcttcggagggaacatcagag

SEQ ID NO: 24014 - RNA, 89 nt, synthetic construct
  misc_feature 1..89: note = engineered ribonucleic acid scaffold (ERS) sequence
  source 1..89: mol_type = other RNA
acgggcaattctatctgattactctgattgccctcaccagcgactatgtcgtagtgggtaaaggtccctcttcggagggaacatcagag

SEQ ID NO: 24015 - RNA, 89 nt, synthetic construct
  misc_feature 1..89: note = engineered ribonucleic acid scaffold (ERS) sequence
  source 1..89: mol_type = other RNA
actgtgcgttctatctgattactctgacgcacatcaccagcgactatgtcgtagtgggtaaaggtccctcttcggagggaacatcagag

SEQ ID NO: 24016 - RNA, 93 nt, synthetic construct
  misc_feature 1..93: note = engineered ribonucleic acid scaffold (ERS) sequence
  source 1..93: mol_type = other RNA
acacacggttctatctgattactctgaccgtgttcaccagcgactatgtcgtagtgggtaaaggtgacggtcttcggaccgtcaccatcagag

SEQ ID NO: 24017 - RNA, 93 nt, synthetic construct
  misc_feature 1..93: note = engineered ribonucleic acid scaffold (ERS) sequence
  source 1..93: mol_type = other RNA
acactggtttctatctgattactctgaaccagttcaccagcgactatgtcgtagtgggtaaaggtgacggtcttcggaccgtcaccatcagag

SEQ ID NO: 24018 - RNA, 93 nt, synthetic construct
  misc_feature 1..93: note = engineered ribonucleic acid scaffold (ERS) sequence
  source 1..93: mol_type = other RNA
acaggccgttctatctgattactctgacggccttcaccagcgactatgtcgtagtgggtaaaggtgacggtcttcggaccgtcaccatcagag

SEQ ID NO: 24019 - RNA, 93 nt, synthetic construct
  misc_feature 1..93: note = engineered ribonucleic acid scaffold (ERS) sequence
  source 1..93: mol_type = other RNA
acaggtccttctatctgattactctgaggaccttcaccagcgactatgtcgtagtgggtaaaggtgacggtcttcggaccgtcaccatcagag

SEQ ID NO: 24020 - RNA, 93 nt, synthetic construct
  misc_feature 1..93: note = engineered ribonucleic acid scaffold (ERS) sequence
  source 1..93: mol_type = other RNA
accagcaattctatctgattactctgattgctgtcaccagcgactatgtcgtagtgggtaaaggtgacggtcttcggaccgtcaccatcagag

SEQ ID NO: 24021 - RNA, 93 nt, synthetic construct
  misc_feature 1..93: note = engineered ribonucleic acid scaffold (ERS) sequence
  source 1..93: mol_type = other RNA
accgagacttctatctgattactctgaggctcgtcaccagcgactatgtcgtagtgggtaaaggtgacggtcttcggaccgtcaccatcagag

SEQ ID NO: 24022 - RNA, 93 nt, synthetic construct
  misc_feature 1..93: note = engineered ribonucleic acid scaffold (ERS) sequence
  source 1..93: mol_type = other RNA
acctgtagttctatctgattactctgactacagtcaccagcgactatgtcgtagtgggtaaaggtgacggtcttcggaccgtcaccatcagag

SEQ ID NO: 24023 - RNA, 93 nt, synthetic construct
  misc_feature 1..93: note = engineered ribonucleic acid scaffold (ERS) sequence
  source 1..93: mol_type = other RNA
acgagcacttctatctgattactctgagggctctcaccagcgactatgtcgtagtgggtaaaggtgacggtcttcggaccgtcaccatcagag

SEQ ID NO: 24024 - RNA, 93 nt, synthetic construct
  misc_feature 1..93: note = engineered ribonucleic acid scaffold (ERS) sequence
  source 1..93: mol_type = other RNA
acgaggtgttctatctgattactctgacacctctcaccagcgactatgtcgtagtgggtaaaggtgacggtcttcggaccgtcaccatcagag

SEQ ID NO: 24025 - RNA, 93 nt, synthetic construct
  misc_feature 1..93: note = engineered ribonucleic acid scaffold (ERS) sequence
  source 1..93: mol_type = other RNA
acgggactttctatctgattactctgaagtccctcaccagcgactatgtcgtagtgggtaaaggtgacggtcttcggaccgtcaccatcagag

SEQ ID NO: 24026 - RNA, 93 nt, synthetic construct
  misc_feature 1..93: note = engineered ribonucleic acid scaffold (ERS) sequence
  source 1..93: mol_type = other RNA
acgggcaattctatctgattactctgattgccctcaccagcgactatgtcgtagtgggtaaaggtgacggtcttcggaccgtcaccatcagag

SEQ ID NO: 24027 - RNA, 93 nt, synthetic construct
  misc_feature 1..93: note = engineered ribonucleic acid scaffold (ERS) sequence
  source 1..93: mol_type = other RNA
actgtgcgttctatctgattactctgacgcacatcaccagcgactatgtcgtagtgggtaaaggtgacggtcttcggaccgtcaccatcagag

SEQ ID NO: 24028 - RNA, 91 nt, synthetic construct
  misc_feature 1..91: note = engineered ribonucleic acid scaffold (ERS) sequence
  source 1..91: mol_type = other RNA
acacacggttctatctgattactctgaccgtgttcaccagcgactatgtcgtagtgggtaaagtctccctcttcggagggaggcatcagag

SEQ ID NO: 24029 - RNA, 91 nt, synthetic construct
  misc_feature 1..91: note = engineered ribonucleic acid scaffold (ERS) sequence
  source 1..91: mol_type = other RNA
acactggtttctatctgattactctgaaccagttcaccagcgactatgtcgtagtgggtaaagtctccctcttcggagggaggcatcagag

SEQ ID NO: 24030 - RNA, 91 nt, synthetic construct
  misc_feature 1..91: note = engineered ribonucleic acid scaffold (ERS) sequence
  source 1..91: mol_type = other RNA
acaggccgttctatctgattactctgacggccttcaccagcgactatgtcgtagtgggtaaagtctccctcttcggagggaggcatcagag

SEQ ID NO: 24031 - RNA, 91 nt, synthetic construct
  misc_feature 1..91: note = engineered ribonucleic acid scaffold (ERS) sequence
  source 1..91: mol_type = other RNA
acaggtccttctatctgattactctgaggaccttcaccagcgactatgtcgtagtgggtaaagtctccctcttcggagggaggcatcagag

SEQ ID NO: 24032 - RNA, 91 nt, synthetic construct
  misc_feature 1..91: note = engineered ribonucleic acid scaffold (ERS) sequence
  source 1..91: mol_type = other RNA
accagcaattctatctgattactctgattgctgtcaccagcgactatgtcgtagtgggtaaagtctccctcttcggagggaggcatcagag

SEQ ID NO: 24033 - RNA, 91 nt, synthetic construct
  misc_feature 1..91: note = engineered ribonucleic acid scaffold (ERS) sequence
  source 1..91: mol_type = other RNA
accgagacttctatctgattactctgaggctcgtcaccagcgactatgtcgtagtgggtaaagtctccctcttcggagggaggcatcagag

SEQ ID NO: 24034 - RNA, 91 nt, synthetic construct
  misc_feature 1..91: note = engineered ribonucleic acid scaffold (ERS) sequence
  source 1..91: mol_type = other RNA
acctgtagttctatctgattactctgactacagtcaccagcgactatgtcgtagtgggtaaagtctccctcttcggagggaggcatcagag

SEQ ID NO: 24035 - RNA, 91 nt, synthetic construct
  misc_feature 1..91: note = engineered ribonucleic acid scaffold (ERS) sequence
  source 1..91: mol_type = other RNA
acgagcacttctatctgattactctgagggctctcaccagcgactatgtcgtagtgggtaaagtctccctcttcggagggaggcatcagag

SEQ ID NO: 24036 - RNA, 91 nt, synthetic construct
  misc_feature 1..91: note = engineered ribonucleic acid scaffold (ERS) sequence
  source 1..91: mol_type = other RNA
acgaggtgttctatctgattactctgacacctctcaccagcgactatgtcgtagtgggtaaagtctccctcttcggagggaggcatcagag

SEQ ID NO: 24037 - RNA, 91 nt, synthetic construct
  misc_feature 1..91: note = engineered ribonucleic acid scaffold (ERS) sequence
  source 1..91: mol_type = other RNA
acgggactttctatctgattactctgaagtccctcaccagcgactatgtcgtagtgggtaaagtctccctcttcggagggaggcatcagag

SEQ ID NO: 24038 - RNA, 91 nt, synthetic construct
  misc_feature 1..91: note = engineered ribonucleic acid scaffold (ERS) sequence
  source 1..91: mol_type = other RNA
acgggcaattctatctgattactctgattgccctcaccagcgactatgtcgtagtgggtaaagtctccctcttcggagggaggcatcagag

SEQ ID NO: 24039 - RNA, 91 nt, synthetic construct
  misc_feature 1..91: note = engineered ribonucleic acid scaffold (ERS) sequence
  source 1..91: mol_type = other RNA
actgtgcgttctatctgattactctgacgcacatcaccagcgactatgtcgtagtgggtaaagtctccctcttcggagggaggcatcagag

SEQ ID NO: 24040 - RNA, 93 nt, synthetic construct
  misc_feature 1..93: note = engineered ribonucleic acid scaffold (ERS) sequence
  source 1..93: mol_type = other RNA
acacacggttctatctgattactctgaccgtgttcaccagcgactatgtcgtagtgggtaaagtgcgcccgcttcggcgggcgcacatcagag

SEQ ID NO: 24041 - RNA, 93 nt, synthetic construct
  misc_feature 1..93: note = engineered ribonucleic acid scaffold (ERS) sequence
  source 1..93: mol_type = other RNA
acactggtttctatctgattactctgaaccagttcaccagcgactatgtcgtagtgggtaaagtgcgcccgcttcggcgggcgcacatcagag

SEQ ID NO: 24042 - RNA, 93 nt, synthetic construct
  misc_feature 1..93: note = engineered ribonucleic acid scaffold (ERS) sequence
  source 1..93: mol_type = other RNA
acaggccgttctatctgattactctgacggccttcaccagcgactatgtcgtagtgggtaaagtgcgcccgcttcggcgggcgcacatcagag

SEQ ID NO: 24043 - RNA, 93 nt, synthetic construct
  misc_feature 1..93: note = engineered ribonucleic acid scaffold (ERS) sequence
  source 1..93: mol_type = other RNA
acaggtccttctatctgattactctgaggaccttcaccagcgactatgtcgtagtgggtaaagtgcgcccgcttcggcgggcgcacatcagag

SEQ ID NO: 24044 - RNA, 93 nt, synthetic construct
  misc_feature 1..93: note = engineered ribonucleic acid scaffold (ERS) sequence
  source 1..93: mol_type = other RNA
accagcaattctatctgattactctgattgctgtcaccagcgactatgtcgtagtgggtaaagtgcgcccgcttcggcgggcgcacatcagag

SEQ ID NO: 24045 - RNA, 93 nt, synthetic construct
  misc_feature 1..93: note = engineered ribonucleic acid scaffold (ERS) sequence
  source 1..93: mol_type = other RNA
accgagacttctatctgattactctgaggctcgtcaccagcgactatgtcgtagtgggtaaagtgcgcccgcttcggcgggcgcacatcagag

SEQ ID NO: 24046 - RNA, 93 nt, synthetic construct
  misc_feature 1..93: note = engineered ribonucleic acid scaffold (ERS) sequence
  source 1..93: mol_type = other RNA
acctgtagttctatctgattactctgactacagtcaccagcgactatgtcgtagtgggtaaagtgcgcccgcttcggcgggcgcacatcagag

SEQ ID NO: 24047 - RNA, 93 nt, synthetic construct
  misc_feature 1..93: note = engineered ribonucleic acid scaffold (ERS) sequence
  source 1..93: mol_type = other RNA
acgagcacttctatctgattactctgagggctctcaccagcgactatgtcgtagtgggtaaagtgcgcccgcttcggcgggcgcacatcagag

SEQ ID NO: 24048 - RNA, 93 nt, synthetic construct
  misc_feature 1..93: note = engineered ribonucleic acid scaffold (ERS) sequence
  source 1..93: mol_type = other RNA
acgaggtgttctatctgattactctgacacctctcaccagcgactatgtcgtagtgggtaaagtgcgcccgcttcggcgggcgcacatcagag

SEQ ID NO: 24049 - RNA, 93 nt, synthetic construct
  misc_feature 1..93: note = engineered ribonucleic acid scaffold (ERS) sequence
  source 1..93: mol_type = other RNA
acgggactttctatctgattactctgaagtccctcaccagcgactatgtcgtagtgggtaaagtgcgcccgcttcggcgggcgcacatcagag

SEQ ID NO: 24050 - RNA, 93 nt, synthetic construct
  misc_feature 1..93: note = engineered ribonucleic acid scaffold (ERS) sequence
  source 1..93: mol_type = other RNA
acgggcaattctatctgattactctgattgccctcaccagcgactatgtcgtagtgggtaaagtgcgcccgcttcggcgggcgcacatcagag

SEQ ID NO: 24051 - RNA, 93 nt, synthetic construct
  misc_feature 1..93: note = engineered ribonucleic acid scaffold (ERS) sequence
  source 1..93: mol_type = other RNA
actgtgcgttctatctgattactctgacgcacatcaccagcgactatgtcgtagtgggtaaagtgcgcccgcttcggcgggcgcacatcagag

SEQ ID NO: 24052 - RNA, 93 nt, synthetic construct
  misc_feature 1..93: note = engineered ribonucleic acid scaffold (ERS) sequence
  source 1..93: mol_type = other RNA
acacacggttctatctgattactctgaccgtgttcaccagcgactatgtcgtagtgggtaaataatgaaaacttcggttttcattaatcagag

SEQ ID NO: 24053 - RNA, 93 nt, synthetic construct
  misc_feature 1..93: note = engineered ribonucleic acid scaffold (ERS) sequence
  source 1..93: mol_type = other RNA
acactggtttctatctgattactctgaaccagttcaccagcgactatgtcgtagtgggtaaataatgaaaacttcggttttcattaatcagag

SEQ ID NO: 24054 - RNA, 93 nt, synthetic construct
  misc_feature 1..93: note = engineered ribonucleic acid scaffold (ERS) sequence
  source 1..93: mol_type = other RNA
acaggccgttctatctgattactctgacggccttcaccagcgactatgtcgtagtgggtaaataatgaaaacttcggttttcattaatcagag

SEQ ID NO: 24055 - RNA, 93 nt, synthetic construct
  misc_feature 1..93: note = engineered ribonucleic acid scaffold (ERS) sequence
  source 1..93: mol_type = other RNA
acaggtccttctatctgattactctgaggaccttcaccagcgactatgtcgtagtgggtaaataatgaaaacttcggttttcattaatcagag

SEQ ID NO: 24056 - RNA, 93 nt, synthetic construct
  misc_feature 1..93: note = engineered ribonucleic acid scaffold (ERS) sequence
  source 1..93: mol_type = other RNA
accagcaattctatctgattactctgattgctgtcaccagcgactatgtcgtagtgggtaaataatgaaaacttcggttttcattaatcagag

SEQ ID NO: 24057 - RNA, 93 nt, synthetic construct
  misc_feature 1..93: note = engineered ribonucleic acid scaffold (ERS) sequence
  source 1..93: mol_type = other RNA
accgagacttctatctgattactctgaggctcgtcaccagcgactatgtcgtagtgggtaaataatgaaaacttcggttttcattaatcagag

SEQ ID NO: 24058 - RNA, 93 nt, synthetic construct
  misc_feature 1..93: note = engineered ribonucleic acid scaffold (ERS) sequence
  source 1..93: mol_type = other RNA
acctgtagttctatctgattactctgactacagtcaccagcgactatgtcgtagtgggtaaataatgaaaacttcggttttcattaatcagag

SEQ ID NO: 24059 - RNA, 93 nt, synthetic construct
  misc_feature 1..93: note = engineered ribonucleic acid scaffold (ERS) sequence
  source 1..93: mol_type = other RNA
acgagcacttctatctgattactctgagggctctcaccagcgactatgtcgtagtgggtaaataatgaaaacttcggttttcattaatcagag

SEQ ID NO: 24060 - RNA, 93 nt, synthetic construct
  misc_feature 1..93: note = engineered ribonucleic acid scaffold (ERS) sequence
  source 1..93: mol_type = other RNA
acgaggtgttctatctgattactctgacacctctcaccagcgactatgtcgtagtgggtaaataatgaaaacttcggttttcattaatcagag

SEQ ID NO: 24061 - RNA, 93 nt, synthetic construct
  misc_feature 1..93: note = engineered ribonucleic acid scaffold (ERS) sequence
  source 1..93: mol_type = other RNA
acgggactttctatctgattactctgaagtccctcaccagcgactatgtcgtagtgggtaaataatgaaaacttcggttttcattaatcagag

SEQ ID NO: 24062 - RNA, 93 nt, synthetic construct
  misc_feature 1..93: note = engineered ribonucleic acid scaffold (ERS) sequence
  source 1..93: mol_type = other RNA
acgggcaattctatctgattactctgattgccctcaccagcgactatgtcgtagtgggtaaataatgaaaacttcggttttcattaatcagag

SEQ ID NO: 24063 - RNA, 93 nt, synthetic construct
  misc_feature 1..93: note = engineered ribonucleic acid scaffold (ERS) sequence
  source 1..93: mol_type = other RNA
actgtgcgttctatctgattactctgacgcacatcaccagcgactatgtcgtagtgggtaaataatgaaaacttcggttttcattaatcagag

SEQ ID NO: 24064 - RNA, 93 nt, synthetic construct
  misc_feature 1..93: note = engineered ribonucleic acid scaffold (ERS) sequence
  source 1..93: mol_type = other RNA
acacacggttctatctgattactctgaccgtgttcaccagcgactatgtcgtagtgggtaaatcgtaagaacttcggttcttacgaatcagag

SEQ ID NO: 24065 - RNA, 93 nt, synthetic construct
  misc_feature 1..93: note = engineered ribonucleic acid scaffold (ERS) sequence
  source 1..93: mol_type = other RNA
acactggtttctatctgattactctgaaccagttcaccagcgactatgtcgtagtgggtaaatcgtaagaacttcggttcttacgaatcagag

SEQ ID NO: 24066 - RNA, 93 nt, synthetic construct
  misc_feature 1..93: note = engineered ribonucleic acid scaffold (ERS) sequence
  source 1..93: mol_type = other RNA
acaggccgttctatctgattactctgacggccttcaccagcgactatgtcgtagtgggtaaatcgtaagaacttcggttcttacgaatcagag

SEQ ID NO: 24067 - RNA, 93 nt, synthetic construct
  misc_feature 1..93: note = engineered ribonucleic acid scaffold (ERS) sequence
  source 1..93: mol_type = other RNA
acaggtccttctatctgattactctgaggaccttcaccagcgactatgtcgtagtgggtaaatcgtaagaacttcggttcttacgaatcagag

SEQ ID NO: 24068 - RNA, 93 nt, synthetic construct
  misc_feature 1..93: note = engineered ribonucleic acid scaffold (ERS) sequence
  source 1..93: mol_type = other RNA
accagcaattctatctgattactctgattgctgtcaccagcgactatgtcgtagtgggtaaatcgtaagaacttcggttcttacgaatcagag

SEQ ID NO: 24069 - RNA, 93 nt, synthetic construct
  misc_feature 1..93: note = engineered ribonucleic acid scaffold (ERS) sequence
  source 1..93: mol_type = other RNA
accgagacttctatctgattactctgaggctcgtcaccagcgactatgtcgtagtgggtaaatcgtaagaacttcggttcttacgaatcagag

SEQ ID NO: 24070 - RNA, 93 nt, synthetic construct
  misc_feature 1..93: note = engineered ribonucleic acid scaffold (ERS) sequence
  source 1..93: mol_type = other RNA
acctgtagttctatctgattactctgactacagtcaccagcgactatgtcgtagtgggtaaatcgtaagaacttcggttcttacgaatcagag

SEQ ID NO: 24071 - RNA, 93 nt, synthetic construct
  misc_feature 1..93: note = engineered ribonucleic acid scaffold (ERS) sequence
  source 1..93: mol_type = other RNA
acgagcacttctatctgattactctgagggctctcaccagcgactatgtcgtagtgggtaaatcgtaagaacttcggttcttacgaatcagag

SEQ ID NO: 24072 - RNA, 93 nt, synthetic construct
  misc_feature 1..93: note = engineered ribonucleic acid scaffold (ERS) sequence
  source 1..93: mol_type = other RNA
acgaggtgttctatctgattactctgacacctctcaccagcgactatgtcgtagtgggtaaatcgtaagaacttcggttcttacgaatcagag

SEQ ID NO: 24073 - RNA, 93 nt, synthetic construct
  misc_feature 1..93: note = engineered ribonucleic acid scaffold (ERS) sequence
  source 1..93: mol_type = other RNA
acgggactttctatctgattactctgaagtccctcaccagcgactatgtcgtagtgggtaaatcgtaagaacttcggttcttacgaatcagag

SEQ ID NO: 24074 - RNA, 93 nt, synthetic construct
  misc_feature 1..93: note = engineered ribonucleic acid scaffold (ERS) sequence
  source 1..93: mol_type = other RNA
acgggcaattctatctgattactctgattgccctcaccagcgactatgtcgtagtgggtaaatcgtaagaacttcggttcttacgaatcagag

SEQ ID NO: 24075 - RNA, 93 nt, synthetic construct
  misc_feature 1..93: note = engineered ribonucleic acid scaffold (ERS) sequence
  source 1..93: mol_type = other RNA
actgtgcgttctatctgattactctgacgcacatcaccagcgactatgtcgtagtgggtaaatcgtaagaacttcggttcttacgaatcagag

SEQ ID NO: 24076 - RNA, 93 nt, synthetic construct
  misc_feature 1..93: note = engineered ribonucleic acid scaffold (ERS) sequence
  source 1..93: mol_type = other RNA
acacacggttctatctgattactctgaccgtgttcaccagcgactatgtcgtagtgggtaaatggaagatgcttcggcatcttccaatcagag

SEQ ID NO: 24077 - RNA, 93 nt, synthetic construct
  misc_feature 1..93: note = engineered ribonucleic acid scaffold (ERS) sequence
  source 1..93: mol_type = other RNA
acactggtttctatctgattactctgaaccagttcaccagcgactatgtcgtagtgggtaaatggaagatgcttcggcatcttccaatcagag

SEQ ID NO: 24078 - RNA, 93 nt, synthetic construct
  misc_feature 1..93: note = engineered ribonucleic acid scaffold (ERS) sequence
  source 1..93: mol_type = other RNA
acaggccgttctatctgattactctgacggccttcaccagcgactatgtcgtagtgggtaaatggaagatgcttcggcatcttccaatcagag

SEQ ID NO: 24079 - RNA, 93 nt, synthetic construct
  misc_feature 1..93: note = engineered ribonucleic acid scaffold (ERS) sequence
  source 1..93: mol_type = other RNA
acaggtccttctatctgattactctgaggaccttcaccagcgactatgtcgtagtgggtaaatggaagatgcttcggcatcttccaatcagag

SEQ ID NO: 24080 - RNA, 93 nt, synthetic construct
  misc_feature 1..93: note = engineered ribonucleic acid scaffold (ERS) sequence
  source 1..93: mol_type = other RNA
accagcaattctatctgattactctgattgctgtcaccagcgactatgtcgtagtgggtaaatggaagatgcttcggcatcttccaatcagag

SEQ ID NO: 24081 - RNA, 93 nt, synthetic construct
  misc_feature 1..93: note = engineered ribonucleic acid scaffold (ERS) sequence
  source 1..93: mol_type = other RNA
accgagacttctatctgattactctgaggctcgtcaccagcgactatgtcgtagtgggtaaatggaagatgcttcggcatcttccaatcagag

SEQ ID NO: 24082 - RNA, 93 nt, synthetic construct
  misc_feature 1..93: note = engineered ribonucleic acid scaffold (ERS) sequence
  source 1..93: mol_type = other RNA
acctgtagttctatctgattactctgactacagtcaccagcgactatgtcgtagtgggtaaatggaagatgcttcggcatcttccaatcagag

SEQ ID NO: 24083 - RNA, 93 nt, synthetic construct
  misc_feature 1..93: note = engineered ribonucleic acid scaffold (ERS) sequence
  source 1..93: mol_type = other RNA
acgagcacttctatctgattactctgagggctctcaccagcgactatgtcgtagtgggtaaatggaagatgcttcggcatcttccaatcagag

SEQ ID NO: 24084 - RNA, 93 nt, synthetic construct
  misc_feature 1..93: note = engineered ribonucleic acid scaffold (ERS) sequence
  source 1..93: mol_type = other RNA
acgaggtgttctatctgattactctgacacctctcaccagcgactatgtcgtagtgggtaaatggaagatgcttcggcatcttccaatcagag

SEQ ID NO: 24085 - RNA, 93 nt, synthetic construct
  misc_feature 1..93: note = engineered ribonucleic acid scaffold (ERS) sequence
  source 1..93: mol_type = other RNA
acgggactttctatctgattactctgaagtccctcaccagcgactatgtcgtagtgggtaaatggaagatgcttcggcatcttccaatcagag

SEQ ID NO: 24086 - RNA, 93 nt, synthetic construct
  misc_feature 1..93: note = engineered ribonucleic acid scaffold (ERS) sequence
  source 1..93: mol_type = other RNA
acgggcaattctatctgattactctgattgccctcaccagcgactatgtcgtagtgggtaaatggaagatgcttcggcatcttccaatcagag

SEQ ID NO: 24087 - RNA, 93 nt, synthetic construct
  misc_feature 1..93: note = engineered ribonucleic acid scaffold (ERS) sequence
  source 1..93: mol_type = other RNA
actgtgcgttctatctgattactctgacgcacatcaccagcgactatgtcgtagtgggtaaatggaagatgcttcggcatcttccaatcagag

SEQ ID NO: 24088 - RNA, 97 nt, synthetic construct
  misc_feature 1..97: note = engineered ribonucleic acid scaffold (ERS) sequence
  source 1..97: mol_type = other RNA
acacacggttctatctgattactctgaccgtgttcaccagcgactatgtcgtagtgggtaaagcccttacggacttcggtccgtaagggcatcagag

SEQ ID NO: 24089 - RNA, 97 nt, synthetic construct
  misc_feature 1..97: note = engineered ribonucleic acid scaffold (ERS) sequence
  source 1..97: mol_type = other RNA
acactggtttctatctgattactctgaaccagttcaccagcgactatgtcgtagtgggtaaagcccttacggacttcggtccgtaagggcatcagag

SEQ ID NO: 24090 - RNA, 97 nt, synthetic construct
  misc_feature 1..97: note = engineered ribonucleic acid scaffold (ERS) sequence
  source 1..97: mol_type = other RNA
acaggccgttctatctgattactctgacggccttcaccagcgactatgtcgtagtgggtaaagcccttacggacttcggtccgtaagggcatcagag

SEQ ID NO: 24091 - RNA, 97 nt, synthetic construct
  misc_feature 1..97: note = engineered ribonucleic acid scaffold (ERS) sequence
  source 1..97: mol_type = other RNA
acaggtccttctatctgattactctgaggaccttcaccagcgactatgtcgtagtgggtaaagcccttacggacttcggtccgtaagggcatcagag

SEQ ID NO: 24092 - RNA, 97 nt, synthetic construct
  misc_feature 1..97: note = engineered ribonucleic acid scaffold (ERS) sequence
  source 1..97: mol_type = other RNA
accagcaattctatctgattactctgattgctgtcaccagcgactatgtcgtagtgggtaaagcccttacggacttcggtccgtaagggcatcagag

SEQ ID NO: 24093 - RNA, 97 nt, synthetic construct
  misc_feature 1..97: note = engineered ribonucleic acid scaffold (ERS) sequence
  source 1..97: mol_type = other RNA
accgagacttctatctgattactctgaggctcgtcaccagcgactatgtcgtagtgggtaaagcccttacggacttcggtccgtaagggcatcagag

SEQ ID NO: 24094 - RNA, 97 nt, synthetic construct
  misc_feature 1..97: note = engineered ribonucleic acid scaffold (ERS) sequence
  source 1..97: mol_type = other RNA
acctgtagttctatctgattactctgactacagtcaccagcgactatgtcgtagtgggtaaagcccttacggacttcggtccgtaagggcatcagag

SEQ ID NO: 24095 - RNA, 97 nt, synthetic construct
  misc_feature 1..97: note = engineered ribonucleic acid scaffold (ERS) sequence
  source 1..97: mol_type = other RNA
acgagcacttctatctgattactctgagggctctcaccagcgactatgtcgtagtgggtaaagcccttacggacttcggtccgtaagggcatcagag

SEQ ID NO: 24096 - RNA, 97 nt, synthetic construct
  misc_feature 1..97: note = engineered ribonucleic acid scaffold (ERS) sequence
  source 1..97: mol_type = other RNA
acgaggtgttctatctgattactctgacacctctcaccagcgactatgtcgtagtgggtaaagcccttacggacttcggtccgtaagggcatcagag

SEQ ID NO: 24097 - RNA, 97 nt, synthetic construct
  misc_feature 1..97: note = engineered ribonucleic acid scaffold (ERS) sequence
  source 1..97: mol_type = other RNA
acgggactttctatctgattactctgaagtccctcaccagcgactatgtcgtagtgggtaaagcccttacggacttcggtccgtaagggcatcagag

SEQ ID NO: 24098 - RNA, 97 nt, synthetic construct
  misc_feature 1..97: note = engineered ribonucleic acid scaffold (ERS) sequence
  source 1..97: mol_type = other RNA
acgggcaattctatctgattactctgattgccctcaccagcgactatgtcgtagtgggtaaagcccttacggacttcggtccgtaagggcatcagag

SEQ ID NO: 24099 - RNA, 97 nt, synthetic construct
  misc_feature 1..97: note = engineered ribonucleic acid scaffold (ERS) sequence
  source 1..97: mol_type = other RNA
actgtgcgttctatctgattactctgacgcacatcaccagcgactatgtcgtagtgggtaaagcccttacggacttcggtccgtaagggcatcagag

SEQ ID NO: 24100 - RNA, 99 nt, synthetic construct
  misc_feature 1..99: note = engineered ribonucleic acid scaffold (ERS) sequence
  source 1..99: mol_type = other RNA
acacacggttctatctgattactctgaccgtgttcaccagcgactatgtcgtagtgggtaaagcctcttacggacttcggtccgtaagaggcatcagag

SEQ ID NO: 24101 - RNA, 99 nt, synthetic construct
  misc_feature 1..99: note = engineered ribonucleic acid scaffold (ERS) sequence
  source 1..99: mol_type = other RNA
acactggtttctatctgattactctgaaccagttcaccagcgactatgtcgtagtgggtaaagcctcttacggacttcggtccgtaagaggcatcagag

SEQ ID NO: 24102 - RNA, 99 nt, synthetic construct
  misc_feature 1..99: note = engineered ribonucleic acid scaffold (ERS) sequence
  source 1..99: mol_type = other RNA
acaggccgttctatctgattactctgacggccttcaccagcgactatgtcgtagtgggtaaagcctcttacggacttcggtccgtaagaggcatcagag

SEQ ID NO: 24103 - RNA, 99 nt, synthetic construct
  misc_feature 1..99: note = engineered ribonucleic acid scaffold (ERS) sequence
  source 1..99: mol_type = other RNA
acaggtccttctatctgattactctgaggaccttcaccagcgactatgtcgtagtgggtaaagcctcttacggacttcggtccgtaagaggcatcagag

SEQ ID NO: 24104 - RNA, 99 nt, synthetic construct
  misc_feature 1..99: note = engineered ribonucleic acid scaffold (ERS) sequence
  source 1..99: mol_type = other RNA
accagcaattctatctgattactctgattgctgtcaccagcgactatgtcgtagtgggtaaagcctcttacggacttcggtccgtaagaggcatcagag

SEQ ID NO: 24105 - RNA, 99 nt, synthetic construct
  misc_feature 1..99: note = engineered ribonucleic acid scaffold (ERS) sequence
  source 1..99: mol_type = other RNA
accgagacttctatctgattactctgaggctcgtcaccagcgactatgtcgtagtgggtaaagcctcttacggacttcggtccgtaagaggcatcagag

SEQ ID NO: 24106 - RNA, 99 nt, synthetic construct
  misc_feature 1..99: note = engineered ribonucleic acid scaffold (ERS) sequence
  source 1..99: mol_type = other RNA
acctgtagttctatctgattactctgactacagtcaccagcgactatgtcgtagtgggtaaagcctcttacggacttcggtccgtaagaggcatcagag

SEQ ID NO: 24107 - RNA, 99 nt, synthetic construct
  misc_feature 1..99: note = engineered ribonucleic acid scaffold (ERS) sequence
  source 1..99: mol_type = other RNA
acgagcacttctatctgattactctgagggctctcaccagcgactatgtcgtagtgggtaaagcctcttacggacttcggtccgtaagaggcatcagag

SEQ ID NO: 24108 - RNA, 99 nt, synthetic construct
  misc_feature 1..99: note = engineered ribonucleic acid scaffold (ERS) sequence
  source 1..99: mol_type = other RNA
acgaggtgttctatctgattactctgacacctctcaccagcgactatgtcgtagtgggtaaagcctcttacggacttcggtccgtaagaggcatcagag

SEQ ID NO: 24109 - RNA, 99 nt, synthetic construct
  misc_feature 1..99: note = engineered ribonucleic acid scaffold (ERS) sequence
  source 1..99: mol_type = other RNA
acgggactttctatctgattactctgaagtccctcaccagcgactatgtcgtagtgggtaaagcctcttacggacttcggtccgtaagaggcatcagag

SEQ ID NO: 24110 - RNA, 99 nt, synthetic construct
  misc_feature 1..99: note = engineered ribonucleic acid scaffold (ERS) sequence
  source 1..99: mol_type = other RNA
acgggcaattctatctgattactctgattgccctcaccagcgactatgtcgtagtgggtaaagcctcttacggacttcggtccgtaagaggcatcagag

SEQ ID NO: 24111 - RNA, 99 nt, synthetic construct
  misc_feature 1..99: note = engineered ribonucleic acid scaffold (ERS) sequence
  source 1..99: mol_type = other RNA
actgtgcgttctatctgattactctgacgcacatcaccagcgactatgtcgtagtgggtaaagcctcttacggacttcggtccgtaagaggcatcagag

SEQ ID NO: 24112 - RNA, 99 nt, synthetic construct
  misc_feature 1..99: note = engineered ribonucleic acid scaffold (ERS) sequence
  source 1..99: mol_type = other RNA
acacacggttctatctgattactctgaccgtgttcaccagcgactatgtcgtagtgggtaaagccgcttagggacttcggtccctaagaggcatcagag

SEQ ID NO: 24113 - RNA, 99 nt, synthetic construct
  misc_feature 1..99: note = engineered ribonucleic acid scaffold (ERS) sequence
  source 1..99: mol_type = other RNA
acactggtttctatctgattactctgaaccagttcaccagcgactatgtcgtagtgggtaaagccgcttagggacttcggtccctaagaggcatcagag

SEQ ID NO: 24114 - RNA, 99 nt, synthetic construct
  misc_feature 1..99: note = engineered ribonucleic acid scaffold (ERS) sequence
  source 1..99: mol_type = other RNA
acaggccgttctatctgattactctgacggccttcaccagcgactatgtcgtagtgggtaaagccgcttagggacttcggtccctaagaggcatcagag

SEQ ID NO: 24115 - RNA, 99 nt, synthetic construct
  misc_feature 1..99: note = engineered ribonucleic acid scaffold (ERS) sequence
  source 1..99: mol_type = other RNA
acaggtccttctatctgattactctgaggaccttcaccagcgactatgtcgtagtgggtaaagccgcttagggacttcggtccctaagaggcatcagag

SEQ ID NO: 24116 - RNA, 99 nt, synthetic construct
  misc_feature 1..99: note = engineered ribonucleic acid scaffold (ERS) sequence
  source 1..99: mol_type = other RNA
accagcaattctatctgattactctgattgctgtcaccagcgactatgtcgtagtgggtaaagccgcttagggacttcggtccctaagaggcatcagag

SEQ ID NO: 24117 - RNA, 99 nt, synthetic construct
  misc_feature 1..99: note = engineered ribonucleic acid scaffold (ERS) sequence
  source 1..99: mol_type = other RNA
accgagacttctatctgattactctgaggctcgtcaccagcgactatgtcgtagtgggtaaagccgcttagggacttcggtccctaagaggcatcagag

SEQ ID NO: 24118 - RNA, 99 nt, synthetic construct
  misc_feature 1..99: note = engineered ribonucleic acid scaffold (ERS) sequence
  source 1..99: mol_type = other RNA
acctgtagttctatctgattactctgactacagtcaccagcgactatgtcgtagtgggtaaagccgcttagggacttcggtccctaagaggcatcagag

SEQ ID NO: 24119 - RNA, 99 nt, synthetic construct
  misc_feature 1..99: note = engineered ribonucleic acid scaffold (ERS) sequence
  source 1..99: mol_type = other RNA
acgagcacttctatctgattactctgagggctctcaccagcgactatgtcgtagtgggtaaagccgcttagggacttcggtccctaagaggcatcagag

SEQ ID NO: 24120 - RNA, 99 nt, synthetic construct
  misc_feature 1..99: note = engineered ribonucleic acid scaffold (ERS) sequence
  source 1..99: mol_type = other RNA
acgaggtgttctatctgattactctgacacctctcaccagcgactatgtcgtagtgggtaaagccgcttagggacttcggtccctaagaggcatcagag

SEQ ID NO: 24121 - RNA, 99 nt, synthetic construct
  misc_feature 1..99: note = engineered ribonucleic acid scaffold (ERS) sequence
  source 1..99: mol_type = other RNA
acgggactttctatctgattactctgaagtccctcaccagcgactatgtcgtagtgggtaaagccgcttagggacttcggtccctaagaggcatcagag

SEQ ID NO: 24122 - RNA, 99 nt, synthetic construct
  misc_feature 1..99: note = engineered ribonucleic acid scaffold (ERS) sequence
  source 1..99: mol_type = other RNA
acgggcaattctatctgattactctgattgccctcaccagcgactatgtcgtagtgggtaaagccgcttagggacttcggtccctaagaggcatcagag

SEQ ID NO: 24123 - RNA, 99 nt, synthetic construct
  misc_feature 1..99: note = engineered ribonucleic acid scaffold (ERS) sequence
  source 1..99: mol_type = other RNA
actgtgcgttctatctgattactctgacgcacatcaccagcgactatgtcgtagtgggtaaagccgcttagggacttcggtccctaagaggcatcagag

SEQ ID NO: 24124 - RNA, 89 nt, synthetic construct
  misc_feature 1..89: note = engineered ribonucleic acid scaffold (ERS) sequence
  source 1..89: mol_type = other RNA
acgagcacttctatctgattactctgagggctctcaccagcgactatgtcgtagtgggtaaagctccctcttcggagggagcatcaaag

SEQ ID NO: 24125 - RNA, 89 nt, synthetic construct
  misc_feature 1..89: note = engineered ribonucleic acid scaffold (ERS) sequence
  source 1..89: mol_type = other RNA
acgaggtgttctatctgattactttgacacctctcaccagcgactatgtcgtagtgggtaaagctccctcttcggagggagcatcagag

SEQ ID NO: 24126 - RNA, 89 nt, synthetic construct
  misc_feature 1..89: note = engineered ribonucleic acid scaffold (ERS) sequence
  source 1..89: mol_type = other RNA
acgaggtgttctatctgattactttgacacctctcaccagcgactatgtcgtagtgggtaaagctccctcttcggagggagcatcaaag

SEQ ID NO: 24127 - RNA, 89 nt, synthetic construct
  misc_feature 1..89: note = engineered ribonucleic acid scaffold (ERS) sequence
  source 1..89: mol_type = other RNA
acgaggtgttctatctgattagtctcacacctctcaccagcgactatgtcgtagtgggtaaagctccctcttcggagggagcatgagac

SEQ ID NO: 24128 - RNA, 89 nt, synthetic construct
  misc_feature 1..89: note = engineered ribonucleic acid scaffold (ERS) sequence
  source 1..89: mol_type = other RNA
acgaggtgttctatctgattagtctgacacctctcaccagcgactatgtcgtagtgggtaaagctccctcttcggagggagcatcagac

SEQ ID NO: 24129 - RNA, 89 nt, synthetic construct
  misc_feature 1..89: note = engineered ribonucleic acid scaffold (ERS) sequence
  source 1..89: mol_type = other RNA
acgaggtgttctatctgattactctcacacctctcaccagcgactatgtcgtagtgggtaaagctccctcttcggagggagcatgagag

SEQ ID NO: 24130 - RNA, 89 nt, synthetic construct
  misc_feature 1..89: note = engineered ribonucleic acid scaffold (ERS) sequence
  source 1..89: mol_type = other RNA
acgaggtgtcccatctgattaccccgacacctctcaccagcgactatgtcgtagtgggtaaagctccctcttcggagggagcatcgggg

SEQ ID NO: 24131 - RNA, 89 nt, synthetic construct
  misc_feature 1..89: note = engineered ribonucleic acid scaffold (ERS) sequence
  source 1..89: mol_type = other RNA
acgaggtgtcctatctgattactccgacacctctcaccagcgactatgtcgtagtgggtaaagctccctcttcggagggagcatcggag

SEQ ID NO: 24132 - RNA, 89 nt, synthetic construct
  misc_feature 1..89: note = engineered ribonucleic acid scaffold (ERS) sequence
  source 1..89: mol_type = other RNA
acgaggtgtgggatctgattaccccgacacctctcaccagcgactatgtcgtagtgggtaaagctccctcttcggagggagcatcgggg

SEQ ID NO: 24133 - RNA, 89 nt, synthetic construct
  misc_feature 1..89: note = engineered ribonucleic acid scaffold (ERS) sequence
  source 1..89: mol_type = other RNA
acgaggtgtggtatctgattactccgacacctctcaccagcgactatgtcgtagtgggtaaagctccctcttcggagggagcatcggag

SEQ ID NO: 24134 - RNA, 89 nt, synthetic construct
  misc_feature 1..89: note = engineered ribonucleic acid scaffold (ERS) sequence
  source 1..89: mol_type = other RNA
acgaggtgttccatctgattaccctgacacctctcaccagcgactatgtcgtagtgggtaaagctccctcttcggagggagcatcaggg

SEQ ID NO: 24135 - RNA, 89 nt, synthetic construct
  misc_feature 1..89: note = engineered ribonucleic acid scaffold (ERS) sequence
  source 1..89: mol_type = other RNA
acgaggtgttggatctgattaccctgacacctctcaccagcgactatgtcgtagtgggtaaagctccctcttcggagggagcatcaggg

SEQ ID NO: 24136 - RNA, 89 nt, synthetic construct
  misc_feature 1..89: note = engineered ribonucleic acid scaffold (ERS) sequence
  source 1..89: mol_type = other RNA
acgaggtgttgtatctgattactctgacacctctcaccagcgactatgtcgtagtgggtaaagctccctcttcggagggagcatcagag

SEQ ID NO: 24137 - RNA, 89 nt, synthetic construct
  misc_feature 1..89: note = engineered ribonucleic acid scaffold (ERS) sequence
  source 1..89: mol_type = other RNA
acgaggtgttttatctgattactttgacacctctcaccagcgactatgtcgtagtgggtaaagctccctcttcggagggagcatcagag

SEQ ID NO: 24138 - RNA, 89 nt, synthetic construct
  misc_feature 1..89: note = engineered ribonucleic acid scaffold (ERS) sequence
  source 1..89: mol_type = other RNA
acgaggtgttttatctgattactctgacacctctcaccagcgactatgtcgtagtgggtaaagctccctcttcggagggagcatcagag

SEQ ID NO: 24139 - RNA, 89 nt, synthetic construct
  misc_feature 1..89: note = engineered ribonucleic acid scaffold (ERS) sequence
  source 1..89: mol_type = other RNA
acgaggtgttttatctgattactctgacacctctcaccagcgactatgtcgtagtgggtaaagctccctcttcggagggagcatcaaag

SEQ ID NO: 24140 - RNA, 89 nt, synthetic construct
  misc_feature 1..89: note = engineered ribonucleic acid scaffold (ERS) sequence
  source 1..89: mol_type = other RNA
acgaggtgttctatctgattactctgacacctctcaccagcgactatgtcgtagtgggtaaagctccctcttcggagggagcctcagag

SEQ ID NO: 24141 - RNA, 89 nt, synthetic construct
  misc_feature 1..89: note = engineered ribonucleic acid scaffold (ERS) sequence
  source 1..89: mol_type = other RNA
acgaggtgttctatctgattactctgacacctctcaccagcgactatgtcgtagtgggtaaagctccctcttcggagggagcgtcagag

SEQ ID NO: 24142 - RNA, 89 nt, synthetic construct
  misc_feature 1..89: note = engineered ribonucleic acid scaffold (ERS) sequence
  source 1..89: mol_type = other RNA
acgaggtgttctatctgattactctgacacctctcaccagcgactatgtcgtagtgggtaaagctccctcttcggagggagcatcaaag

SEQ ID NO: 24143 - RNA, 89 nt, synthetic construct
  misc_feature 1..89: note = engineered ribonucleic acid scaffold (ERS) sequence
  source 1..89: mol_type = other RNA
acgggactttctatctgattactctcaagtccctcaccagcgactatgtcgtagtgggtaaagctccctcttcggagggagcatcagac

SEQ ID NO: 24144 - RNA, 89 nt, synthetic construct
  misc_feature 1..89: note = engineered ribonucleic acid scaffold (ERS) sequence
  source 1..89: mol_type = other RNA
acgggactttctatctgattactttgaagtccctcaccagcgactatgtcgtagtgggtaaagctccctcttcggagggagcatcagag

SEQ ID NO: 24145 - RNA, 89 nt, synthetic construct
  misc_feature 1..89: note = engineered ribonucleic acid scaffold (ERS) sequence
  source 1..89: mol_type = other RNA
acgggactttctatctgattactttgaagtccctcaccagcgactatgtcgtagtgggtaaagctccctcttcggagggagcatcaaag

SEQ ID NO: 24146 - RNA, 89 nt, synthetic construct
  misc_feature 1..89: note = engineered ribonucleic acid scaffold (ERS) sequence
  source 1..89: mol_type = other RNA
acgggactttctatctgattagtctcaagtccctcaccagcgactatgtcgtagtgggtaaagctccctcttcggagggagcatgagac

SEQ ID NO: 24147 - RNA, 89 nt, synthetic construct
  misc_feature 1..89: note = engineered ribonucleic acid scaffold (ERS) sequence
  source 1..89: mol_type = other RNA
acgggactttctatctgattagtctgaagtccctcaccagcgactatgtcgtagtgggtaaagctccctcttcggagggagcatcagac

SEQ ID NO: 24148 - RNA, 89 nt, synthetic construct
  misc_feature 1..89: note = engineered ribonucleic acid scaffold (ERS) sequence
  source 1..89: mol_type = other RNA
acgggactttctatctgattactctcaagtccctcaccagcgactatgtcgtagtgggtaaagctccctcttcggagggagcatgagag

SEQ ID NO: 24149 - RNA, 89 nt, synthetic construct
  misc_feature 1..89: note = engineered ribonucleic acid scaffold (ERS) sequence
  source 1..89: mol_type = other RNA
acgggacttcccatctgattaccccgaagtccctcaccagcgactatgtcgtagtgggtaaagctccctcttcggagggagcatcgggg

SEQ ID NO: 24150 - RNA, 89 nt, synthetic construct
  misc_feature 1..89: note = engineered ribonucleic acid scaffold (ERS) sequence
  source 1..89: mol_type = other RNA
acgggacttcctatctgattactccgaagtccctcaccagcgactatgtcgtagtgggtaaagctccctcttcggagggagcatcggag

SEQ ID NO: 24151 - RNA, 89 nt, synthetic construct
  misc_feature 1..89: note = engineered ribonucleic acid scaffold (ERS) sequence
  source 1..89: mol_type = other RNA
acgggacttgggatctgattaccccgaagtccctcaccagcgactatgtcgtagtgggtaaagctccctcttcggagggagcatcgggg

SEQ ID NO: 24152 - RNA, 89 nt, synthetic construct
  misc_feature 1..89: note = engineered ribonucleic acid scaffold (ERS) sequence
  source 1..89: mol_type = other RNA
acgggacttggtatctgattactccgaagtccctcaccagcgactatgtcgtagtgggtaaagctccctcttcggagggagcatcggag

SEQ ID NO: 24153 - RNA, 89 nt, synthetic construct
  misc_feature 1..89: note = engineered ribonucleic acid scaffold (ERS) sequence
  source 1..89: mol_type = other RNA
acgggactttccatctgattaccctgaagtccctcaccagcgactatgtcgtagtgggtaaagctccctcttcggagggagcatcaggg

SEQ ID NO: 24154 - RNA, 89 nt, synthetic construct
  misc_feature 1..89: note = engineered ribonucleic acid scaffold (ERS) sequence
  source 1..89: mol_type = other RNA
acgggactttggatctgattaccctgaagtccctcaccagcgactatgtcgtagtgggtaaagctccctcttcggagggagcatcaggg

SEQ ID NO: 24155 - RNA, 89 nt, synthetic construct
  misc_feature 1..89: note = engineered ribonucleic acid scaffold (ERS) sequence
  source 1..89: mol_type = other RNA
acgggactttgtatctgattactctgaagtccctcaccagcgactatgtcgtagtgggtaaagctccctcttcggagggagcatcagag

SEQ ID NO: 24156 - RNA, 89 nt, synthetic construct
  misc_feature 1..89: note = engineered ribonucleic acid scaffold (ERS) sequence
  source 1..89: mol_type = other RNA
acgggactttttatctgattactttgaagtccctcaccagcgactatgtcgtagtgggtaaagctccctcttcggagggagcatcagag

SEQ ID NO: 24157 - RNA, 89 nt, synthetic construct
  misc_feature 1..89: note = engineered ribonucleic acid scaffold (ERS) sequence
  source 1..89: mol_type = other RNA
acgggactttttatctgattactctgaagtccctcaccagcgactatgtcgtagtgggtaaagctccctcttcggagggagcatcagag

SEQ ID NO: 24158 - RNA, 89 nt, synthetic construct
  misc_feature 1..89: note = engineered ribonucleic acid scaffold (ERS) sequence
  source 1..89: mol_type = other RNA
acgggactttttatctgattactctgaagtccctcaccagcgactatgtcgtagtgggtaaagctccctcttcggagggagcatcaaag

SEQ ID NO: 24159 - RNA, 89 nt, synthetic construct
  misc_feature 1..89: note = engineered ribonucleic acid scaffold (ERS) sequence
  source 1..89: mol_type = other RNA
acgggactttctatctgattactctgaagtccctcaccagcgactatgtcgtagtgggtaaagctccctcttcggagggagcctcagag

SEQ ID NO: 24160 - RNA, 89 nt, synthetic construct
  misc_feature 1..89: note = engineered ribonucleic acid scaffold (ERS) sequence
  source 1..89: mol_type = other RNA
acgggactttctatctgattactctgaagtccctcaccagcgactatgtcgtagtgggtaaagctccctcttcggagggagcgtcagag

SEQ ID NO: 24161 - RNA, 89 nt, synthetic construct
  misc_feature 1..89: note = engineered ribonucleic acid scaffold (ERS) sequence
  source 1..89: mol_type = other RNA
acgggactttctatctgattactctgaagtccctcaccagcgactatgtcgtagtgggtaaagctccctcttcggagggagcatcaaag

SEQ ID NO: 24162 - RNA, 89 nt, synthetic construct
  misc_feature 1..89: note = engineered ribonucleic acid scaffold (ERS) sequence
  source 1..89: mol_type = other RNA
acgggcaattctatctgattactctcattgccctcaccagcgactatgtcgtagtgggtaaagctccctcttcggagggagcatcagac

SEQ ID NO: 24163 - RNA, 89 nt, synthetic construct
  misc_feature 1..89: note = engineered ribonucleic acid scaffold (ERS) sequence
  source 1..89: mol_type = other RNA
acgggcaattctatctgattactttgattgccctcaccagcgactatgtcgtagtgggtaaagctccctcttcggagggagcatcagag

SEQ ID NO: 24164 - RNA, 89 nt, synthetic construct
  misc_feature 1..89: note = engineered ribonucleic acid scaffold (ERS) sequence
  source 1..89: mol_type = other RNA
acgggcaattctatctgattactttgattgccctcaccagcgactatgtcgtagtgggtaaagctccctcttcggagggagcatcaaag

SEQ ID NO: 24165 - RNA, 89 nt, synthetic construct
  misc_feature 1..89: note = engineered ribonucleic acid scaffold (ERS) sequence
  source 1..89: mol_type = other RNA
acgggcaattctatctgattagtctcattgccctcaccagcgactatgtcgtagtgggtaaagctccctcttcggagggagcatgagac

SEQ ID NO: 24166 - RNA, 89 nt, synthetic construct
  misc_feature 1..89: note = engineered ribonucleic acid scaffold (ERS) sequence
  source 1..89: mol_type = other RNA
acgggcaattctatctgattagtctgattgccctcaccagcgactatgtcgtagtgggtaaagctccctcttcggagggagcatcagac

SEQ ID NO: 24167 - RNA, 89 nt, synthetic construct
  misc_feature 1..89: note = engineered ribonucleic acid scaffold (ERS) sequence
  source 1..89: mol_type = other RNA
acgggcaattctatctgattactctcattgccctcaccagcgactatgtcgtagtgggtaaagctccctcttcggagggagcatgagag

SEQ ID NO: 24168 - RNA, 89 nt, synthetic construct
  misc_feature 1..89: note = engineered ribonucleic acid scaffold (ERS) sequence
  source 1..89: mol_type = other RNA
acgggcaatcccatctgattaccccgattgccctcaccagcgactatgtcgtagtgggtaaagctccctcttcggagggagcatcgggg

SEQ ID NO: 24169 - RNA, 89 nt, synthetic construct
  misc_feature 1..89: note = engineered ribonucleic acid scaffold (ERS) sequence
  source 1..89: mol_type = other RNA
acgggcaatcctatctgattactccgattgccctcaccagcgactatgtcgtagtgggtaaagctccctcttcggagggagcatcggag

SEQ ID NO: 24170 - RNA, 89 nt, synthetic construct
  misc_feature 1..89: note = engineered ribonucleic acid scaffold (ERS) sequence
  source 1..89: mol_type = other RNA
acgggcaatgggatctgattaccccgattgccctcaccagcgactatgtcgtagtgggtaaagctccctcttcggagggagcatcgggg

SEQ ID NO: 24171 - RNA, 89 nt, synthetic construct
  misc_feature 1..89: note = engineered ribonucleic acid scaffold (ERS) sequence
  source 1..89: mol_type = other RNA
acgggcaatggtatctgattactccgattgccctcaccagcgactatgtcgtagtgggtaaagctccctcttcggagggagcatcggag

SEQ ID NO: 24172 - RNA, 89 nt, synthetic construct
  misc_feature 1..89: note = engineered ribonucleic acid scaffold (ERS) sequence
  source 1..89: mol_type = other RNA
acgggcaattccatctgattaccctgattgccctcaccagcgactatgtcgtagtgggtaaagctccctcttcggagggagcatcaggg

SEQ ID NO: 24173 - RNA, 89 nt, synthetic construct
  misc_feature 1..89: note = engineered ribonucleic acid scaffold (ERS) sequence
  source 1..89: mol_type = other RNA
acgggcaattggatctgattaccctgattgccctcaccagcgactatgtcgtagtgggtaaagctccctcttcggagggagcatcaggg

SEQ ID NO: 24174 - RNA, 89 nt, synthetic construct
  misc_feature 1..89: note = engineered ribonucleic acid scaffold (ERS) sequence
  source 1..89: mol_type = other RNA
acgggcaattgtatctgattactctgattgccctcaccagcgactatgtcgtagtgggtaaagctccctcttcggagggagcatcagag

SEQ ID NO: 24175 - RNA, 89 nt, synthetic construct
  misc_feature 1..89: note = engineered ribonucleic acid scaffold (ERS) sequence
  source 1..89: mol_type = other RNA
acgggcaattttatctgattactttgattgccctcaccagcgactatgtcgtagtgggtaaagctccctcttcggagggagcatcagag

SEQ ID NO: 24176 - RNA, 89 nt, synthetic construct
  misc_feature 1..89: note = engineered ribonucleic acid scaffold (ERS) sequence
  source 1..89: mol_type = other RNA
acgggcaattttatctgattactctgattgccctcaccagcgactatgtcgtagtgggtaaagctccctcttcggagggagcatcagag

SEQ ID NO: 24177 - RNA, 89 nt, synthetic construct
  misc_feature 1..89: note = engineered ribonucleic acid scaffold (ERS) sequence
  source 1..89: mol_type = other RNA
acgggcaattttatctgattactctgattgccctcaccagcgactatgtcgtagtgggtaaagctccctcttcggagggagcatcaaag

SEQ ID NO: 24178 - RNA, 89 nt, synthetic construct
  misc_feature 1..89: note = engineered ribonucleic acid scaffold (ERS) sequence
  source 1..89: mol_type = other RNA
acgggcaattctatctgattactctgattgccctcaccagcgactatgtcgtagtgggtaaagctccctcttcggagggagcctcagag

SEQ ID NO: 24179 - RNA, 89 nt, synthetic construct
  misc_feature 1..89: note = engineered ribonucleic acid scaffold (ERS) sequence
  source 1..89: mol_type = other RNA
acgggcaattctatctgattactctgattgccctcaccagcgactatgtcgtagtgggtaaagctccctcttcggagggagcgtcagag

SEQ ID NO: 24180 - RNA, 89 nt, synthetic construct
  misc_feature 1..89: note = engineered ribonucleic acid scaffold (ERS) sequence
  source 1..89: mol_type = other RNA
acgggcaattctatctgattactctgattgccctcaccagcgactatgtcgtagtgggtaaagctccctcttcggagggagcatcaaag

SEQ ID NO: 24181 - RNA, 89 nt, synthetic construct
  misc_feature 1..89: note = engineered ribonucleic acid scaffold (ERS) sequence
  source 1..89: mol_type = other RNA
actgtgcgttctatctgattactctcacgcacatcaccagcgactatgtcgtagtgggtaaagctccctcttcggagggagcatcagac

SEQ ID NO: 24182 - RNA, 89 nt, synthetic construct
  misc_feature 1..89: note = engineered ribonucleic acid scaffold (ERS) sequence
  source 1..89: mol_type = other RNA
actgtgcgttctatctgattactttgacgcacatcaccagcgactatgtcgtagtgggtaaagctccctcttcggagggagcatcagag

SEQ ID NO: 24183 - RNA, 89 nt, synthetic construct
  misc_feature 1..89: note = engineered ribonucleic acid scaffold (ERS) sequence
  source 1..89: mol_type = other RNA
actgtgcgttctatctgattactttgacgcacatcaccagcgactatgtcgtagtgggtaaagctccctcttcggagggagcatcaaag

SEQ ID NO: 24184 - RNA, 89 nt, synthetic construct
  misc_feature 1..89: note = engineered ribonucleic acid scaffold (ERS) sequence
  source 1..89: mol_type = other RNA
actgtgcgttctatctgattagtctcacgcacatcaccagcgactatgtcgtagtgggtaaagctccctcttcggagggagcatgagac

SEQ ID NO: 24185 - RNA, 89 nt, synthetic construct
  misc_feature 1..89: note = engineered ribonucleic acid scaffold (ERS) sequence
  source 1..89: mol_type = other RNA
actgtgcgttctatctgattagtctgacgcacatcaccagcgactatgtcgtagtgggtaaagctccctcttcggagggagcatcagac

SEQ ID NO: 24186 - RNA, 89 nt, synthetic construct
  misc_feature 1..89: note = engineered ribonucleic acid scaffold (ERS) sequence
  source 1..89: mol_type = other RNA
actgtgcgttctatctgattactctcacgcacatcaccagcgactatgtcgtagtgggtaaagctccctcttcggagggagcatgagag

SEQ ID NO: 24187 - RNA, 89 nt, synthetic construct
  misc_feature 1..89: note = engineered ribonucleic acid scaffold (ERS) sequence
  source 1..89: mol_type = other RNA
actgtgcgtcccatctgattaccccgacgcacatcaccagcgactatgtcgtagtgggtaaagctccctcttcggagggagcatcgggg

SEQ ID NO: 24188 - RNA, 89 nt, synthetic construct
  misc_feature 1..89: note = engineered ribonucleic acid scaffold (ERS) sequence
  source 1..89: mol_type = other RNA
actgtgcgtcctatctgattactccgacgcacatcaccagcgactatgtcgtagtgggtaaagctccctcttcggagggagcatcggag

SEQ ID NO: 24189 - RNA, 89 nt, synthetic construct
  misc_feature 1..89: note = engineered ribonucleic acid scaffold (ERS) sequence
  source 1..89: mol_type = other RNA
actgtgcgtgggatctgattaccccgacgcacatcaccagcgactatgtcgtagtgggtaaagctccctcttcggagggagcatcgggg

SEQ ID NO: 24190 - RNA, 89 nt, synthetic construct
  misc_feature 1..89: note = engineered ribonucleic acid scaffold (ERS) sequence
  source 1..89: mol_type = other RNA
actgtgcgtggtatctgattactccgacgcacatcaccagcgactatgtcgtagtgggtaaagctccctcttcggagggagcatcggag

SEQ ID NO: 24191 - RNA, 89 nt, synthetic construct
  misc_feature 1..89: note = engineered ribonucleic acid scaffold (ERS) sequence
  source 1..89: mol_type = other RNA
actgtgcgttccatctgattaccctgacgcacatcaccagcgactatgtcgtagtgggtaaagctccctcttcggagggagcatcaggg

SEQ ID NO: 24192 - RNA, 89 nt, synthetic construct
  misc_feature 1..89: note = engineered ribonucleic acid scaffold (ERS) sequence
  source 1..89: mol_type = other RNA
actgtgcgttggatctgattaccctgacgcacatcaccagcgactatgtcgtagtgggtaaagctccctcttcggagggagcatcaggg

SEQ ID NO: 24193 - RNA, 89 nt, synthetic construct
  misc_feature 1..89: note = engineered ribonucleic acid scaffold (ERS) sequence
  source 1..89: mol_type = other RNA
actgtgcgttgtatctgattactctgacgcacatcaccagcgactatgtcgtagtgggtaaagctccctcttcggagggagcatcagag

SEQ ID NO: 24194 - RNA, 89 nt, synthetic construct
  misc_feature 1..89: note = engineered ribonucleic acid scaffold (ERS) sequence
  source 1..89: mol_type = other RNA
actgtgcgttttatctgattactttgacgcacatcaccagcgactatgtcgtagtgggtaaagctccctcttcggagggagcatcagag

SEQ ID NO: 24195 - RNA, 89 nt, synthetic construct
  misc_feature 1..89: note = engineered ribonucleic acid scaffold (ERS) sequence
  source 1..89: mol_type = other RNA
actgtgcgttttatctgattactctgacgcacatcaccagcgactatgtcgtagtgggtaaagctccctcttcggagggagcatcagag

SEQ ID NO: 24196 - RNA, 89 nt, synthetic construct
  misc_feature 1..89: note = engineered ribonucleic acid scaffold (ERS) sequence
  source 1..89: mol_type = other RNA
actgtgcgttttatctgattactctgacgcacatcaccagcgactatgtcgtagtgggtaaagctccctcttcggagggagcatcaaag

SEQ ID NO: 24197 - RNA, 89 nt, synthetic construct
  misc_feature 1..89: note = engineered ribonucleic acid scaffold (ERS) sequence
  source 1..89: mol_type = other RNA
actgtgcgttctatctgattactctgacgcacatcaccagcgactatgtcgtagtgggtaaagctccctcttcggagggagcctcagag

SEQ ID NO: 24198 - RNA, 89 nt, synthetic construct
  misc_feature 1..89: note = engineered ribonucleic acid scaffold (ERS) sequence
  source 1..89: mol_type = other RNA
actgtgcgttctatctgattactctgacgcacatcaccagcgactatgtcgtagtgggtaaagctccctcttcggagggagcgtcagag

SEQ ID NO: 24199 - RNA, 89 nt, synthetic construct
  misc_feature 1..89: note = engineered ribonucleic acid scaffold (ERS) sequence
  source 1..89: mol_type = other RNA
actgtgcgttctatctgattactctgacgcacatcaccagcgactatgtcgtagtgggtaaagctccctcttcggagggagcatcaaag

SEQ ID NO: 24200 - RNA, 91 nt, synthetic construct
  misc_feature 1..91: note = engineered ribonucleic acid scaffold (ERS) sequence
  source 1..91: mol_type = other RNA
acacacggttctatatctgattactctgaccgtgttcaccagcgactatgtcgtagtgggtaaagctccctcttcggagggagcatcagag

SEQ ID NO: 24201 - RNA, 90 nt, synthetic construct
  misc_feature 1..90: note = engineered ribonucleic acid scaffold (ERS) sequence
  source 1..90: mol_type = other RNA
acacacggttctaatctgattactctgaccgtgttcaccagcgactatgtcgtagtgggtaaagctccctcttcggagggagcatcagag

SEQ ID NO: 24202 - RNA, 88 nt, synthetic construct
  misc_feature 1..88: note = engineered ribonucleic acid scaffold (ERS) sequence
  source 1..88: mol_type = other RNA
acacacggttctactgattactctgaccgtgttcaccagcgactatgtcgtagtgggtaaagctccctcttcggagggagcatcagag

SEQ ID NO: 24203 - RNA, 89 nt, synthetic construct
  misc_feature 1..89: note = engineered ribonucleic acid scaffold (ERS) sequence
  source 1..89: mol_type = other RNA
acacacggttctaactgattactctgaccgtgttcaccagcgactatgtcgtagtgggtaaagctccctcttcggagggagcatcagag

SEQ ID NO: 24204 - RNA, 89 nt, synthetic construct
  misc_feature 1..89: note = engineered ribonucleic acid scaffold (ERS) sequence
  source 1..89: mol_type = other RNA
acacacggttctacctgattactctgaccgtgttcaccagcgactatgtcgtagtgggtaaagctccctcttcggagggagcatcagag

SEQ ID NO: 24205 - RNA, 89 nt, synthetic construct
  misc_feature 1..89: note = engineered ribonucleic acid scaffold (ERS) sequence
  source 1..89: mol_type = other RNA
acacacggttctagctgattactctgaccgtgttcaccagcgactatgtcgtagtgggtaaagctccctcttcggagggagcatcagag

SEQ ID NO: 24206 - RNA, 91 nt, synthetic construct
  misc_feature 1..91: note = engineered ribonucleic acid scaffold (ERS) sequence
  source 1..91: mol_type = other RNA
acacacggttctattactgattactctgaccgtgttcaccagcgactatgtcgtagtgggtaaagctccctcttcggagggagcatcagag

SEQ ID NO: 24207 - RNA, 89 nt, synthetic construct
  misc_feature 1..89: note = engineered ribonucleic acid scaffold (ERS) sequence
  source 1..89: mol_type = other RNA
acacacggttctatatgattactctgaccgtgttcaccagcgactatgtcgtagtgggtaaagctccctcttcggagggagcatcagag

SEQ ID NO: 24208 - RNA, 89 nt, synthetic construct
  misc_feature 1..89: note = engineered ribonucleic acid scaffold (ERS) sequence
  source 1..89: mol_type = other RNA
acacacggttctatgtgattactctgaccgtgttcaccagcgactatgtcgtagtgggtaaagctccctcttcggagggagcatcagag

SEQ ID NO: 24209 - RNA, 89 nt, synthetic construct
  misc_feature 1..89: note = engineered ribonucleic acid scaffold (ERS) sequence
  source 1..89: mol_type = other RNA
acacacggttctatttgattactctgaccgtgttcaccagcgactatgtcgtagtgggtaaagctccctcttcggagggagcatcagag

SEQ ID NO: 24210 - RNA, 90 nt, synthetic construct
  misc_feature 1..90: note = engineered ribonucleic acid scaffold (ERS) sequence
  source 1..90: mol_type = other RNA
acacacggttctatcttgattactctgaccgtgttcaccagcgactatgtcgtagtgggtaaagctccctcttcggagggagcatcagag

SEQ ID NO: 24211 - RNA, 89 nt, synthetic construct
  misc_feature 1..89: note = engineered ribonucleic acid scaffold (ERS) sequence
  source 1..89: mol_type = other RNA
acacacggttctatcagattactctgaccgtgttcaccagcgactatgtcgtagtgggtaaagctccctcttcggagggagcatcagag

SEQ ID NO: 24212 - RNA, 89 nt, synthetic construct
  misc_feature 1..89: note = engineered ribonucleic acid scaffold (ERS) sequence
  source 1..89: mol_type = other RNA
acacacggttctatcggattactctgaccgtgttcaccagcgactatgtcgtagtgggtaaagctccctcttcggagggagcatcagag

SEQ ID NO: 24213 - RNA, 90 nt, synthetic construct
  misc_feature 1..90: note = engineered ribonucleic acid scaffold (ERS) sequence
  source 1..90: mol_type = other RNA
acacacggttctatctgaattactctgaccgtgttcaccagcgactatgtcgtagtgggtaaagctccctcttcggagggagcatcagag

SEQ ID NO: 24214 - RNA, 90 nt, synthetic construct
  misc_feature 1..90: note = engineered ribonucleic acid scaffold (ERS) sequence
  source 1..90: mol_type = other RNA
acacacggttctatctgtattactctgaccgtgttcaccagcgactatgtcgtagtgggtaaagctccctcttcggagggagcatcagag

SEQ ID NO: 24215 - RNA, 89 nt, synthetic construct
  misc_feature 1..89: note = engineered ribonucleic acid scaffold (ERS) sequence
  source 1..89: mol_type = other RNA
acacacggttctatctggttactctgaccgtgttcaccagcgactatgtcgtagtgggtaaagctccctcttcggagggagcatcagag

SEQ ID NO: 24216 - RNA, 89 nt, synthetic construct
  misc_feature 1..89: note = engineered ribonucleic acid scaffold (ERS) sequence
  source 1..89: mol_type = other RNA
acacacggttctatctgtttactctgaccgtgttcaccagcgactatgtcgtagtgggtaaagctccctcttcggagggagcatcagag

SEQ ID NO: 24217 - RNA, 90 nt, synthetic construct
  misc_feature 1..90: note = engineered ribonucleic acid scaffold (ERS) sequence
  source 1..90: mol_type = other RNA
acacacggttctatctgatttactctgaccgtgttcaccagcgactatgtcgtagtgggtaaagctccctcttcggagggagcatcagag

SEQ ID NO: 24218 - RNA, 89 nt, synthetic construct
  misc_feature 1..89: note = engineered ribonucleic acid scaffold (ERS) sequence
  source 1..89: mol_type = other RNA
acacacggttctatctgattgctctgaccgtgttcaccagcgactatgtcgtagtgggtaaagctccctcttcggagggagcatcagag

SEQ ID NO: 24219 - RNA, 91 nt, synthetic construct
  misc_feature 1..91: note = engineered ribonucleic acid scaffold (ERS) sequence
  source 1..91: mol_type = other RNA
acactggtttctatatctgattactctgaaccagttcaccagcgactatgtcgtagtgggtaaagctccctcttcggagggagcatcagag

SEQ ID NO: 24220 - RNA, 90 nt, synthetic construct
  misc_feature 1..90: note = engineered ribonucleic acid scaffold (ERS) sequence
  source 1..90: mol_type = other RNA
acactggtttctaatctgattactctgaaccagttcaccagcgactatgtcgtagtgggtaaagctccctcttcggagggagcatcagag

SEQ ID NO: 24221 - RNA, 88 nt, synthetic construct
  misc_feature 1..88: note = engineered ribonucleic acid scaffold (ERS) sequence
  source 1..88: mol_type = other RNA
acactggtttctactgattactctgaaccagttcaccagcgactatgtcgtagtgggtaaagctccctcttcggagggagcatcagag

SEQ ID NO: 24222 - RNA, 89 nt, synthetic construct
  misc_feature 1..89: note = engineered ribonucleic acid scaffold (ERS) sequence
  source 1..89: mol_type = other RNA
acactggtttctaactgattactctgaaccagttcaccagcgactatgtcgtagtgggtaaagctccctcttcggagggagcatcagag

SEQ ID NO: 24223 - RNA, 89 nt, synthetic construct
  misc_feature 1..89: note = engineered ribonucleic acid scaffold (ERS) sequence
  source 1..89: mol_type = other RNA
acactggtttctacctgattactctgaaccagttcaccagcgactatgtcgtagtgggtaaagctccctcttcggagggagcatcagag

SEQ ID NO: 24224 - RNA, 89 nt, synthetic construct
  misc_feature 1..89: note = engineered ribonucleic acid scaffold (ERS) sequence
  source 1..89: mol_type = other RNA
acactggtttctagctgattactctgaaccagttcaccagcgactatgtcgtagtgggtaaagctccctcttcggagggagcatcagag

SEQ ID NO: 24225 - RNA, 91 nt, synthetic construct
  misc_feature 1..91: note = engineered ribonucleic acid scaffold (ERS) sequence
  source 1..91: mol_type = other RNA
acactggtttctattactgattactctgaaccagttcaccagcgactatgtcgtagtgggtaaagctccctcttcggagggagcatcagag

SEQ ID NO: 24226 - RNA, 89 nt, synthetic construct
  misc_feature 1..89: note = engineered ribonucleic acid scaffold (ERS) sequence
  source 1..89: mol_type = other RNA
acactggtttctatatgattactctgaaccagttcaccagcgactatgtcgtagtgggtaaagctccctcttcggagggagcatcagag

SEQ ID NO: 24227 - RNA, 89 nt, synthetic construct
  misc_feature 1..89: note = engineered ribonucleic acid scaffold (ERS) sequence
  source 1..89: mol_type = other RNA
acactggtttctatgtgattactctgaaccagttcaccagcgactatgtcgtagtgggtaaagctccctcttcggagggagcatcagag

SEQ ID NO: 24228 - RNA, 89 nt, synthetic construct
  misc_feature 1..89: note = engineered ribonucleic acid scaffold (ERS) sequence
  source 1..89: mol_type = other RNA
acactggtttctatttgattactctgaaccagttcaccagcgactatgtcgtagtgggtaaagctccctcttcggagggagcatcagag

SEQ ID NO: 24229 - RNA, 90 nt, synthetic construct
  misc_feature 1..90: note = engineered ribonucleic acid scaffold (ERS) sequence
  source 1..90: mol_type = other RNA
acactggtttctatcttgattactctgaaccagttcaccagcgactatgtcgtagtgggtaaagctccctcttcggagggagcatcagag

SEQ ID NO: 24230 - RNA, 89 nt, synthetic construct
  misc_feature 1..89: note = engineered ribonucleic acid scaffold (ERS) sequence
  source 1..89: mol_type = other RNA
acactggtttctatcagattactctgaaccagttcaccagcgactatgtcgtagtgggtaaagctccctcttcggagggagcatcagag

SEQ ID NO: 24231 - RNA, 89 nt, synthetic construct
  misc_feature 1..89: note = engineered ribonucleic acid scaffold (ERS) sequence
  source 1..89: mol_type = other RNA
acactggtttctatcggattactctgaaccagttcaccagcgactatgtcgtagtgggtaaagctccctcttcggagggagcatcagag

SEQ ID NO: 24232 - RNA, 90 nt, synthetic construct
  misc_feature 1..90: note = engineered ribonucleic acid scaffold (ERS) sequence
  source 1..90: mol_type = other RNA
acactggtttctatctgaattactctgaaccagttcaccagcgactatgtcgtagtgggtaaagctccctcttcggagggagcatcagag

SEQ ID NO: 24233 - RNA, 90 nt, synthetic construct
  misc_feature 1..90: note = engineered ribonucleic acid scaffold (ERS) sequence
  source 1..90: mol_type = other RNA
acactggtttctatctgtattactctgaaccagttcaccagcgactatgtcgtagtgggtaaagctccctcttcggagggagcatcagag

SEQ ID NO: 24234 - RNA, 89 nt, synthetic construct
  misc_feature 1..89: note = engineered ribonucleic acid scaffold (ERS) sequence
  source 1..89: mol_type = other RNA
acactggtttctatctggttactctgaaccagttcaccagcgactatgtcgtagtgggtaaagctccctcttcggagggagcatcagag

SEQ ID NO: 24235 - RNA, 89 nt, synthetic construct
  misc_feature 1..89: note = engineered ribonucleic acid scaffold (ERS) sequence
  source 1..89: mol_type = other RNA
acactggtttctatctgtttactctgaaccagttcaccagcgactatgtcgtagtgggtaaagctccctcttcggagggagcatcagag

SEQ ID NO: 24236 - RNA, 90 nt, synthetic construct
  misc_feature 1..90: note = engineered ribonucleic acid scaffold (ERS) sequence
  source 1..90: mol_type = other RNA
acactggtttctatctgatttactctgaaccagttcaccagcgactatgtcgtagtgggtaaagctccctcttcggagggagcatcagag

SEQ ID NO: 24237 - RNA, 89 nt, synthetic construct
  misc_feature 1..89: note = engineered ribonucleic acid scaffold (ERS) sequence
  source 1..89: mol_type = other RNA
acactggtttctatctgattgctctgaaccagttcaccagcgactatgtcgtagtgggtaaagctccctcttcggagggagcatcagag

SEQ ID NO: 24238 - RNA, 91 nt, synthetic construct
  misc_feature 1..91: note = engineered ribonucleic acid scaffold (ERS) sequence
  source 1..91: mol_type = other RNA
acaggccgttctatatctgattactctgacggccttcaccagcgactatgtcgtagtgggtaaagctccctcttcggagggagcatcagag

SEQ ID NO: 24239 - RNA, 90 nt, synthetic construct
  misc_feature 1..90: note = engineered ribonucleic acid scaffold (ERS) sequence
  source 1..90: mol_type = other RNA
acaggccgttctaatctgattactctgacggccttcaccagcgactatgtcgtagtgggtaaagctccctcttcggagggagcatcagag

SEQ ID NO: 24240 - RNA, 88 nt, synthetic construct
  misc_feature 1..88: note = engineered ribonucleic acid scaffold (ERS) sequence
  source 1..88: mol_type = other RNA
acaggccgttctactgattactctgacggccttcaccagcgactatgtcgtagtgggtaaagctccctcttcggagggagcatcagag

SEQ ID NO: 24241 - RNA, 89 nt, synthetic construct
  misc_feature 1..89: note = engineered ribonucleic acid scaffold (ERS) sequence
  source 1..89: mol_type = other RNA
acaggccgttctaactgattactctgacggccttcaccagcgactatgtcgtagtgggtaaagctccctcttcggagggagcatcagag

SEQ ID NO: 24242 - RNA, 89 nt, synthetic construct
  misc_feature 1..89: note = engineered ribonucleic acid scaffold (ERS) sequence
  source 1..89: mol_type = other RNA
acaggccgttctacctgattactctgacggccttcaccagcgactatgtcgtagtgggtaaagctccctcttcggagggagcatcagag

SEQ ID NO: 24243 - RNA, 89 nt, synthetic construct
  misc_feature 1..89: note = engineered ribonucleic acid scaffold (ERS) sequence
  source 1..89: mol_type = other RNA
acaggccgttctagctgattactctgacggccttcaccagcgactatgtcgtagtgggtaaagctccctcttcggagggagcatcagag

SEQ ID NO: 24244 - RNA, 91 nt, synthetic construct
  misc_feature 1..91: note = engineered ribonucleic acid scaffold (ERS) sequence
  source 1..91: mol_type = other RNA
acaggccgttctattactgattactctgacggccttcaccagcgactatgtcgtagtgggtaaagctccctcttcggagggagcatcagag

SEQ ID NO: 24245 - RNA, 89 nt, synthetic construct
  misc_feature 1..89: note = engineered ribonucleic acid scaffold (ERS) sequence
  source 1..89: mol_type = other RNA
acaggccgttctatatgattactctgacggccttcaccagcgactatgtcgtagtgggtaaagctccctcttcggagggagcatcagag

SEQ ID NO: 24246 - RNA, 89 nt, synthetic construct
  misc_feature 1..89: note = engineered ribonucleic acid scaffold (ERS) sequence
  source 1..89: mol_type = other RNA
acaggccgttctatgtgattactctgacggccttcaccagcgactatgtcgtagtgggtaaagctccctcttcggagggagcatcagag

SEQ ID NO: 24247 - RNA, 89 nt, synthetic construct
  misc_feature 1..89: note = engineered ribonucleic acid scaffold (ERS) sequence
  source 1..89: mol_type = other RNA
acaggccgttctatttgattactctgacggccttcaccagcgactatgtcgtagtgggtaaagctccctcttcggagggagcatcagag

SEQ ID NO: 24248 - RNA, 90 nt, synthetic construct
  misc_feature 1..90: note = engineered ribonucleic acid scaffold (ERS) sequence
  source 1..90: mol_type = other RNA
acaggccgttctatcttgattactctgacggccttcaccagcgactatgtcgtagtgggtaaagctccctcttcggagggagcatcagag

SEQ ID NO: 24249 - RNA, 89 nt, synthetic construct
  misc_feature 1..89: note = engineered ribonucleic acid scaffold (ERS) sequence
  source 1..89: mol_type = other RNA
acaggccgttctatcagattactctgacggccttcaccagcgactatgtcgtagtgggtaaagctccctcttcggagggagcatcagag

SEQ ID NO: 24250 - RNA, 89 nt, synthetic construct
  misc_feature 1..89: note = engineered ribonucleic acid scaffold (ERS) sequence
  source 1..89: mol_type = other RNA
acaggccgttctatcggattactctgacggccttcaccagcgactatgtcgtagtgggtaaagctccctcttcggagggagcatcagag

SEQ ID NO: 24251 - RNA, 90 nt, synthetic construct
  misc_feature 1..90: note = engineered ribonucleic acid scaffold (ERS) sequence
  source 1..90: mol_type = other RNA
acaggccgttctatctgaattactctgacggccttcaccagcgactatgtcgtagtgggtaaagctccctcttcggagggagcatcagag

SEQ ID NO: 24252 - RNA, 90 nt, synthetic construct
  misc_feature 1..90: note = engineered ribonucleic acid scaffold (ERS) sequence
  source 1..90: mol_type = other RNA
acaggccgttctatctgtattactctgacggccttcaccagcgactatgtcgtagtgggtaaagctccctcttcggagggagcatcagag

SEQ ID NO: 24253 - RNA, 89 nt, synthetic construct
  misc_feature 1..89: note = engineered ribonucleic acid scaffold (ERS) sequence
  source 1..89: mol_type = other RNA
acaggccgttctatctggttactctgacggccttcaccagcgactatgtcgtagtgggtaaagctccctcttcggagggagcatcagag

SEQ ID NO: 24254 - RNA, 89 nt, synthetic construct
  misc_feature 1..89: note = engineered ribonucleic acid scaffold (ERS) sequence
  source 1..89: mol_type = other RNA
acaggccgttctatctgtttactctgacggccttcaccagcgactatgtcgtagtgggtaaagctccctcttcggagggagcatcagag

SEQ ID NO: 24255 - RNA, 90 nt, synthetic construct
  misc_feature 1..90: note = engineered ribonucleic acid scaffold (ERS) sequence
  source 1..90: mol_type = other RNA
acaggccgttctatctgatttactctgacggccttcaccagcgactatgtcgtagtgggtaaagctccctcttcggagggagcatcagag

SEQ ID NO: 24256 - RNA, 89 nt, synthetic construct
  misc_feature 1..89: note = engineered ribonucleic acid scaffold (ERS) sequence
  source 1..89: mol_type = other RNA
acaggccgttctatctgattgctctgacggccttcaccagcgactatgtcgtagtgggtaaagctccctcttcggagggagcatcagag

SEQ ID NO: 24257 - RNA, 91 nt, synthetic construct
  misc_feature 1..91: note = engineered ribonucleic acid scaffold (ERS) sequence
  source 1..91: mol_type = other RNA
acaggtccttctatatctgattactctgaggaccttcaccagcgactatgtcgtagtgggtaaagctccctcttcggagggagcatcagag

SEQ ID NO: 24258 - RNA, 90 nt, synthetic construct
  misc_feature 1..90: note = engineered ribonucleic acid scaffold (ERS) sequence
  source 1..90: mol_type = other RNA
acaggtccttctaatctgattactctgaggaccttcaccagcgactatgtcgtagtgggtaaagctccctcttcggagggagcatcagag

SEQ ID NO: 24259 - RNA, 88 nt, synthetic construct
  misc_feature 1..88: note = engineered ribonucleic acid scaffold (ERS) sequence
  source 1..88: mol_type = other RNA
acaggtccttctactgattactctgaggaccttcaccagcgactatgtcgtagtgggtaaagctccctcttcggagggagcatcagag

SEQ ID NO: 24260 - RNA, 89 nt, synthetic construct
  misc_feature 1..89: note = engineered ribonucleic acid scaffold (ERS) sequence
  source 1..89: mol_type = other RNA
acaggtccttctaactgattactctgaggaccttcaccagcgactatgtcgtagtgggtaaagctccctcttcggagggagcatcagag

SEQ ID NO: 24261 - RNA, 89 nt, synthetic construct
  misc_feature 1..89: note = engineered ribonucleic acid scaffold (ERS) sequence
  source 1..89: mol_type = other RNA
acaggtccttctacctgattactctgaggaccttcaccagcgactatgtcgtagtgggtaaagctccctcttcggagggagcatcagag

SEQ ID NO: 24262 - RNA, 89 nt, synthetic construct
  misc_feature 1..89: note = engineered ribonucleic acid scaffold (ERS) sequence
  source 1..89: mol_type = other RNA
acaggtccttctagctgattactctgaggaccttcaccagcgactatgtcgtagtgggtaaagctccctcttcggagggagcatcagag

SEQ ID NO: 24263 - RNA, 91 nt, synthetic construct
  misc_feature 1..91: note = engineered ribonucleic acid scaffold (ERS) sequence
  source 1..91: mol_type = other RNA
acaggtccttctattactgattactctgaggaccttcaccagcgactatgtcgtagtgggtaaagctccctcttcggagggagcatcagag

SEQ ID NO: 24264 - RNA, 89 nt, synthetic construct
  misc_feature 1..89: note = engineered ribonucleic acid scaffold (ERS) sequence
  source 1..89: mol_type = other RNA
acaggtccttctatatgattactctgaggaccttcaccagcgactatgtcgtagtgggtaaagctccctcttcggagggagcatcagag

SEQ ID NO: 24265 - RNA, 89 nt, synthetic construct
  misc_feature 1..89: note = engineered ribonucleic acid scaffold (ERS) sequence
  source 1..89: mol_type = other RNA
acaggtccttctatgtgattactctgaggaccttcaccagcgactatgtcgtagtgggtaaagctccctcttcggagggagcatcagag

SEQ ID NO: 24266 - RNA, 89 nt, synthetic construct
  misc_feature 1..89: note = engineered ribonucleic acid scaffold (ERS) sequence
  source 1..89: mol_type = other RNA
acaggtccttctatttgattactctgaggaccttcaccagcgactatgtcgtagtgggtaaagctccctcttcggagggagcatcagag

SEQ ID NO: 24267 - RNA, 90 nt, synthetic construct
  misc_feature 1..90: note = engineered ribonucleic acid scaffold (ERS) sequence
  source 1..90: mol_type = other RNA
acaggtccttctatcttgattactctgaggaccttcaccagcgactatgtcgtagtgggtaaagctccctcttcggagggagcatcagag

SEQ ID NO: 24268 - RNA, 89 nt, synthetic construct
  misc_feature 1..89: note = engineered ribonucleic acid scaffold (ERS) sequence
  source 1..89: mol_type = other RNA
acaggtccttctatcagattactctgaggaccttcaccagcgactatgtcgtagtgggtaaagctccctcttcggagggagcatcagag

SEQ ID NO: 24269 - RNA, 89 nt, synthetic construct
  misc_feature 1..89: note = engineered ribonucleic acid scaffold (ERS) sequence
  source 1..89: mol_type = other RNA
acaggtccttctatcggattactctgaggaccttcaccagcgactatgtcgtagtgggtaaagctccctcttcggagggagcatcagag

SEQ ID NO: 24270 - RNA, 90 nt, synthetic construct
  misc_feature 1..90: note = engineered ribonucleic acid scaffold (ERS) sequence
  source 1..90: mol_type = other RNA
acaggtccttctatctgaattactctgaggaccttcaccagcgactatgtcgtagtgggtaaagctccctcttcggagggagcatcagag

SEQ ID NO: 24271 - RNA, 90 nt, synthetic construct
  misc_feature 1..90: note = engineered ribonucleic acid scaffold (ERS) sequence
  source 1..90: mol_type = other RNA
acaggtccttctatctgtattactctgaggaccttcaccagcgactatgtcgtagtgggtaaagctccctcttcggagggagcatcagag

SEQ ID NO: 24272 - RNA, 89 nt, synthetic construct
  misc_feature 1..89: note = engineered ribonucleic acid scaffold (ERS) sequence
  source 1..89: mol_type = other RNA
acaggtccttctatctggttactctgaggaccttcaccagcgactatgtcgtagtgggtaaagctccctcttcggagggagcatcagag

SEQ ID NO: 24273 - RNA, 89 nt, synthetic construct
  misc_feature 1..89: note = engineered ribonucleic acid scaffold (ERS) sequence
  source 1..89: mol_type = other RNA
acaggtccttctatctgtttactctgaggaccttcaccagcgactatgtcgtagtgggtaaagctccctcttcggagggagcatcagag

SEQ ID NO: 24274 - RNA, 90 nt, synthetic construct
  misc_feature 1..90: note = engineered ribonucleic acid scaffold (ERS) sequence
  source 1..90: mol_type = other RNA
acaggtccttctatctgatttactctgaggaccttcaccagcgactatgtcgtagtgggtaaagctccctcttcggagggagcatcagag

SEQ ID NO: 24275 - RNA, 89 nt, synthetic construct
  misc_feature 1..89: note = engineered ribonucleic acid scaffold (ERS) sequence
  source 1..89: mol_type = other RNA
acaggtccttctatctgattgctctgaggaccttcaccagcgactatgtcgtagtgggtaaagctccctcttcggagggagcatcagag

SEQ ID NO: 24276 - RNA, 91 nt, synthetic construct
  misc_feature 1..91: note = engineered ribonucleic acid scaffold (ERS) sequence
  source 1..91: mol_type = other RNA
accagcaattctatatctgattactctgattgctgtcaccagcgactatgtcgtagtgggtaaagctccctcttcggagggagcatcagag

SEQ ID NO: 24277 - RNA, 90 nt, synthetic construct
  misc_feature 1..90: note = engineered ribonucleic acid scaffold (ERS) sequence
  source 1..90: mol_type = other RNA
accagcaattctaatctgattactctgattgctgtcaccagcgactatgtcgtagtgggtaaagctccctcttcggagggagcatcagag

SEQ ID NO: 24278 - RNA, 88 nt, synthetic construct
  misc_feature 1..88: note = engineered ribonucleic acid scaffold (ERS) sequence
  source 1..88: mol_type = other RNA
accagcaattctactgattactctgattgctgtcaccagcgactatgtcgtagtgggtaaagctccctcttcggagggagcatcagag

SEQ ID NO: 24279 - RNA, 89 nt, synthetic construct
  misc_feature 1..89: note = engineered ribonucleic acid scaffold (ERS) sequence
  source 1..89: mol_type = other RNA
accagcaattctaactgattactctgattgctgtcaccagcgactatgtcgtagtgggtaaagctccctcttcggagggagcatcagag

SEQ ID NO: 24280 - RNA, 89 nt, synthetic construct
  misc_feature 1..89: note = engineered ribonucleic acid scaffold (ERS) sequence
  source 1..89: mol_type = other RNA
accagcaattctacctgattactctgattgctgtcaccagcgactatgtcgtagtgggtaaagctccctcttcggagggagcatcagag

SEQ ID NO: 24281 - RNA, 89 nt, synthetic construct
  misc_feature 1..89: note = engineered ribonucleic acid scaffold (ERS) sequence
  source 1..89: mol_type = other RNA
accagcaattctagctgattactctgattgctgtcaccagcgactatgtcgtagtgggtaaagctccctcttcggagggagcatcagag

SEQ ID NO: 24282 - RNA, 91 nt, synthetic construct
  misc_feature 1..91: note = engineered ribonucleic acid scaffold (ERS) sequence
  source 1..91: mol_type = other RNA
accagcaattctattactgattactctgattgctgtcaccagcgactatgtcgtagtgggtaaagctccctcttcggagggagcatcagag

SEQ ID NO: 24283 - RNA, 89 nt, synthetic construct
  misc_feature 1..89: note = engineered ribonucleic acid scaffold (ERS) sequence
  source 1..89: mol_type = other RNA
accagcaattctatatgattactctgattgctgtcaccagcgactatgtcgtagtgggtaaagctccctcttcggagggagcatcagag

SEQ ID NO: 24284 - RNA, 89 nt, synthetic construct
  misc_feature 1..89: note = engineered ribonucleic acid scaffold (ERS) sequence
  source 1..89: mol_type = other RNA
accagcaattctatgtgattactctgattgctgtcaccagcgactatgtcgtagtgggtaaagctccctcttcggagggagcatcagag

SEQ ID NO: 24285 - RNA, 89 nt, synthetic construct
  misc_feature 1..89: note = engineered ribonucleic acid scaffold (ERS) sequence
  source 1..89: mol_type = other RNA
accagcaattctatttgattactctgattgctgtcaccagcgactatgtcgtagtgggtaaagctccctcttcggagggagcatcagag

SEQ ID NO: 24286 - RNA, 90 nt, synthetic construct
  misc_feature 1..90: note = engineered ribonucleic acid scaffold (ERS) sequence
  source 1..90: mol_type = other RNA
accagcaattctatcttgattactctgattgctgtcaccagcgactatgtcgtagtgggtaaagctccctcttcggagggagcatcagag

SEQ ID NO: 24287 - RNA, 89 nt, synthetic construct
  misc_feature 1..89: note = engineered ribonucleic acid scaffold (ERS) sequence
  source 1..89: mol_type = other RNA
accagcaattctatcagattactctgattgctgtcaccagcgactatgtcgtagtgggtaaagctccctcttcggagggagcatcagag

SEQ ID NO: 24288 - RNA, 89 nt, synthetic construct
  misc_feature 1..89: note = engineered ribonucleic acid scaffold (ERS) sequence
  source 1..89: mol_type = other RNA
accagcaattctatcggattactctgattgctgtcaccagcgactatgtcgtagtgggtaaagctccctcttcggagggagcatcagag

SEQ ID NO: 24289 - RNA, 90 nt, synthetic construct
  misc_feature 1..90: note = engineered ribonucleic acid scaffold (ERS) sequence
  source 1..90: mol_type = other RNA
accagcaattctatctgaattactctgattgctgtcaccagcgactatgtcgtagtgggtaaagctccctcttcggagggagcatcagag

SEQ ID NO: 24290 - RNA, 90 nt, synthetic construct
  misc_feature 1..90: note = engineered ribonucleic acid scaffold (ERS) sequence
  source 1..90: mol_type = other RNA
accagcaattctatctgtattactctgattgctgtcaccagcgactatgtcgtagtgggtaaagctccctcttcggagggagcatcagag

SEQ ID NO: 24291 - RNA, 89 nt, synthetic construct
  misc_feature 1..89: note = engineered ribonucleic acid scaffold (ERS) sequence
  source 1..89: mol_type = other RNA
accagcaattctatctggttactctgattgctgtcaccagcgactatgtcgtagtgggtaaagctccctcttcggagggagcatcagag

SEQ ID NO: 24292 - RNA, 89 nt, synthetic construct
  misc_feature 1..89: note = engineered ribonucleic acid scaffold (ERS) sequence
  source 1..89: mol_type = other RNA
accagcaattctatctgtttactctgattgctgtcaccagcgactatgtcgtagtgggtaaagctccctcttcggagggagcatcagag

SEQ ID NO: 24293 - RNA, 90 nt, synthetic construct
  misc_feature 1..90: note = engineered ribonucleic acid scaffold (ERS) sequence
  source 1..90: mol_type = other RNA
accagcaattctatctgatttactctgattgctgtcaccagcgactatgtcgtagtgggtaaagctccctcttcggagggagcatcagag

SEQ ID NO: 24294 - RNA, 89 nt, synthetic construct
  misc_feature 1..89: note = engineered ribonucleic acid scaffold (ERS) sequence
  source 1..89: mol_type = other RNA
accagcaattctatctgattgctctgattgctgtcaccagcgactatgtcgtagtgggtaaagctccctcttcggagggagcatcagag

SEQ ID NO: 24295 - RNA, 91 nt, synthetic construct
  misc_feature 1..91: note = engineered ribonucleic acid scaffold (ERS) sequence
  source 1..91: mol_type = other RNA
accgagacttctatatctgattactctgaggctcgtcaccagcgactatgtcgtagtgggtaaagctccctcttcggagggagcatcagag

SEQ ID NO: 24296 - RNA, 90 nt, synthetic construct
  misc_feature 1..90: note = engineered ribonucleic acid scaffold (ERS) sequence
  source 1..90: mol_type = other RNA
accgagacttctaatctgattactctgaggctcgtcaccagcgactatgtcgtagtgggtaaagctccctcttcggagggagcatcagag

SEQ ID NO: 24297 - RNA, 88 nt, synthetic construct
  misc_feature 1..88: note = engineered ribonucleic acid scaffold (ERS) sequence
  source 1..88: mol_type = other RNA
accgagacttctactgattactctgaggctcgtcaccagcgactatgtcgtagtgggtaaagctccctcttcggagggagcatcagag

SEQ ID NO: 24298 - RNA, 89 nt, synthetic construct
  misc_feature 1..89: note = engineered ribonucleic acid scaffold (ERS) sequence
  source 1..89: mol_type = other RNA
accgagacttctaactgattactctgaggctcgtcaccagcgactatgtcgtagtgggtaaagctccctcttcggagggagcatcagag

SEQ ID NO: 24299 - RNA, 89 nt, synthetic construct
  misc_feature 1..89: note = engineered ribonucleic acid scaffold (ERS) sequence
  source 1..89: mol_type = other RNA
accgagacttctacctgattactctgaggctcgtcaccagcgactatgtcgtagtgggtaaagctccctcttcggagggagcatcagag

SEQ ID NO: 24300 - RNA, 89 nt, synthetic construct
  misc_feature 1..89: note = engineered ribonucleic acid scaffold (ERS) sequence
  source 1..89: mol_type = other RNA
accgagacttctagctgattactctgaggctcgtcaccagcgactatgtcgtagtgggtaaagctccctcttcggagggagcatcagag

SEQ ID NO: 24301 - RNA, 91 nt, synthetic construct
  misc_feature 1..91: note = engineered ribonucleic acid scaffold (ERS) sequence
  source 1..91: mol_type = other RNA
accgagacttctattactgattactctgaggctcgtcaccagcgactatgtcgtagtgggtaaagctccctcttcggagggagcatcagag

SEQ ID NO: 24302 - RNA, 89 nt, synthetic construct
  misc_feature 1..89: note = engineered ribonucleic acid scaffold (ERS) sequence
  source 1..89: mol_type = other RNA
accgagacttctatatgattactctgaggctcgtcaccagcgactatgtcgtagtgggtaaagctccctcttcggagggagcatcagag

SEQ ID NO: 24303 - RNA, 89 nt, synthetic construct
  misc_feature 1..89: note = engineered ribonucleic acid scaffold (ERS) sequence
  source 1..89: mol_type = other RNA
accgagacttctatgtgattactctgaggctcgtcaccagcgactatgtcgtagtgggtaaagctccctcttcggagggagcatcagag

SEQ ID NO: 24304 - RNA, 89 nt, synthetic construct
  misc_feature 1..89: note = engineered ribonucleic acid scaffold (ERS) sequence
  source 1..89: mol_type = other RNA
accgagacttctatttgattactctgaggctcgtcaccagcgactatgtcgtagtgggtaaagctccctcttcggagggagcatcagag

SEQ ID NO: 24305 - RNA, 90 nt, synthetic construct
  misc_feature 1..90: note = engineered ribonucleic acid scaffold (ERS) sequence
  source 1..90: mol_type = other RNA
accgagacttctatcttgattactctgaggctcgtcaccagcgactatgtcgtagtgggtaaagctccctcttcggagggagcatcagag

SEQ ID NO: 24306 - RNA, 89 nt, synthetic construct
  misc_feature 1..89: note = engineered ribonucleic acid scaffold (ERS) sequence
  source 1..89: mol_type = other RNA
accgagacttctatcagattactctgaggctcgtcaccagcgactatgtcgtagtgggtaaagctccctcttcggagggagcatcagag

SEQ ID NO: 24307 - RNA, 89 nt, synthetic construct
  misc_feature 1..89: note = engineered ribonucleic acid scaffold (ERS) sequence
  source 1..89: mol_type = other RNA
accgagacttctatcggattactctgaggctcgtcaccagcgactatgtcgtagtgggtaaagctccctcttcggagggagcatcagag

SEQ ID NO: 24308 - RNA, 90 nt, synthetic construct
  misc_feature 1..90: note = engineered ribonucleic acid scaffold (ERS) sequence
  source 1..90: mol_type = other RNA
accgagacttctatctgaattactctgaggctcgtcaccagcgactatgtcgtagtgggtaaagctccctcttcggagggagcatcagag

SEQ ID NO: 24309 - RNA, 90 nt, synthetic construct
  misc_feature 1..90: note = engineered ribonucleic acid scaffold (ERS) sequence
  source 1..90: mol_type = other RNA
accgagacttctatctgtattactctgaggctcgtcaccagcgactatgtcgtagtgggtaaagctccctcttcggagggagcatcagag

SEQ ID NO: 24310 - RNA, 89 nt, synthetic construct
  misc_feature 1..89: note = engineered ribonucleic acid scaffold (ERS) sequence
  source 1..89: mol_type = other RNA
accgagacttctatctggttactctgaggctcgtcaccagcgactatgtcgtagtgggtaaagctccctcttcggagggagcatcagag

SEQ ID NO: 24311 - RNA, 89 nt, synthetic construct
  misc_feature 1..89: note = engineered ribonucleic acid scaffold (ERS) sequence
  source 1..89: mol_type = other RNA
accgagacttctatctgtttactctgaggctcgtcaccagcgactatgtcgtagtgggtaaagctccctcttcggagggagcatcagag

SEQ ID NO: 24312 - RNA, 90 nt, synthetic construct
  misc_feature 1..90: note = engineered ribonucleic acid scaffold (ERS) sequence
  source 1..90: mol_type = other RNA
accgagacttctatctgatttactctgaggctcgtcaccagcgactatgtcgtagtgggtaaagctccctcttcggagggagcatcagag

SEQ ID NO: 24313 - RNA, 89 nt, synthetic construct
  misc_feature 1..89: note = engineered ribonucleic acid scaffold (ERS) sequence
  source 1..89: mol_type = other RNA
accgagacttctatctgattgctctgaggctcgtcaccagcgactatgtcgtagtgggtaaagctccctcttcggagggagcatcagag

SEQ ID NO: 24314 - RNA, 91 nt, synthetic construct
  misc_feature 1..91: note = engineered ribonucleic acid scaffold (ERS) sequence
  source 1..91: mol_type = other RNA
acctgtagttctatatctgattactctgactacagtcaccagcgactatgtcgtagtgggtaaagctccctcttcggagggagcatcagag

SEQ ID NO: 24315 - RNA, 90 nt, synthetic construct
  misc_feature 1..90: note = engineered ribonucleic acid scaffold (ERS) sequence
  source 1..90: mol_type = other RNA
acctgtagttctaatctgattactctgactacagtcaccagcgactatgtcgtagtgggtaaagctccctcttcggagggagcatcagag

SEQ ID NO: 24316 - RNA, 88 nt, synthetic construct
  misc_feature 1..88: note = engineered ribonucleic acid scaffold (ERS) sequence
  source 1..88: mol_type = other RNA
acctgtagttctactgattactctgactacagtcaccagcgactatgtcgtagtgggtaaagctccctcttcggagggagcatcagag

SEQ ID NO: 24317 - RNA, 89 nt, synthetic construct
  misc_feature 1..89: note = engineered ribonucleic acid scaffold (ERS) sequence
  source 1..89: mol_type = other RNA
acctgtagttctaactgattactctgactacagtcaccagcgactatgtcgtagtgggtaaagctccctcttcggagggagcatcagag

SEQ ID NO: 24318 - RNA, 89 nt, synthetic construct
  misc_feature 1..89: note = engineered ribonucleic acid scaffold (ERS) sequence
  source 1..89: mol_type = other RNA
acctgtagttctacctgattactctgactacagtcaccagcgactatgtcgtagtgggtaaagctccctcttcggagggagcatcagag

SEQ ID NO: 24319 - RNA, 89 nt, synthetic construct
  misc_feature 1..89: note = engineered ribonucleic acid scaffold (ERS) sequence
  source 1..89: mol_type = other RNA
acctgtagttctagctgattactctgactacagtcaccagcgactatgtcgtagtgggtaaagctccctcttcggagggagcatcagag

SEQ ID NO: 24320 - RNA, 91 nt, synthetic construct
  misc_feature 1..91: note = engineered ribonucleic acid scaffold (ERS) sequence
  source 1..91: mol_type = other RNA
acctgtagttctattactgattactctgactacagtcaccagcgactatgtcgtagtgggtaaagctccctcttcggagggagcatcagag

SEQ ID NO: 24321 - RNA, 89 nt, synthetic construct
  misc_feature 1..89: note = engineered ribonucleic acid scaffold (ERS) sequence
  source 1..89: mol_type = other RNA
acctgtagttctatatgattactctgactacagtcaccagcgactatgtcgtagtgggtaaagctccctcttcggagggagcatcagag

SEQ ID NO: 24322 - RNA, 89 nt, synthetic construct
  misc_feature 1..89: note = engineered ribonucleic acid scaffold (ERS) sequence
  source 1..89: mol_type = other RNA
acctgtagttctatgtgattactctgactacagtcaccagcgactatgtcgtagtgggtaaagctccctcttcggagggagcatcagag

SEQ ID NO: 24323 - RNA, 89 nt, synthetic construct
  misc_feature 1..89: note = engineered ribonucleic acid scaffold (ERS) sequence
  source 1..89: mol_type = other RNA
acctgtagttctatttgattactctgactacagtcaccagcgactatgtcgtagtgggtaaagctccctcttcggagggagcatcagag

SEQ ID NO: 24324 - RNA, 90 nt, synthetic construct
  misc_feature 1..90: note = engineered ribonucleic acid scaffold (ERS) sequence
  source 1..90: mol_type = other RNA
acctgtagttctatcttgattactctgactacagtcaccagcgactatgtcgtagtgggtaaagctccctcttcggagggagcatcagag

SEQ ID NO: 24325 - RNA, 89 nt, synthetic construct
  misc_feature 1..89: note = engineered ribonucleic acid scaffold (ERS) sequence
  source 1..89: mol_type = other RNA
acctgtagttctatcagattactctgactacagtcaccagcgactatgtcgtagtgggtaaagctccctcttcggagggagcatcagag

SEQ ID NO: 24326 - RNA, 89 nt, synthetic construct
  misc_feature 1..89: note = engineered ribonucleic acid scaffold (ERS) sequence
  source 1..89: mol_type = other RNA
acctgtagttctatcggattactctgactacagtcaccagcgactatgtcgtagtgggtaaagctccctcttcggagggagcatcagag

SEQ ID NO: 24327 - RNA, 90 nt, synthetic construct
  misc_feature 1..90: note = engineered ribonucleic acid scaffold (ERS) sequence
  source 1..90: mol_type = other RNA
acctgtagttctatctgaattactctgactacagtcaccagcgactatgtcgtagtgggtaaagctccctcttcggagggagcatcagag

SEQ ID NO: 24328 - RNA, 90 nt, synthetic construct
  misc_feature 1..90: note = engineered ribonucleic acid scaffold (ERS) sequence
  source 1..90: mol_type = other RNA
acctgtagttctatctgtattactctgactacagtcaccagcgactatgtcgtagtgggtaaagctccctcttcggagggagcatcagag

SEQ ID NO: 24329 - RNA, 89 nt, synthetic construct
  misc_feature 1..89: note = engineered ribonucleic acid scaffold (ERS) sequence
  source 1..89: mol_type = other RNA
acctgtagttctatctggttactctgactacagtcaccagcgactatgtcgtagtgggtaaagctccctcttcggagggagcatcagag

SEQ ID NO: 24330 - RNA, 89 nt, synthetic construct
  misc_feature 1..89: note = engineered ribonucleic acid scaffold (ERS) sequence
  source 1..89: mol_type = other RNA
acctgtagttctatctgtttactctgactacagtcaccagcgactatgtcgtagtgggtaaagctccctcttcggagggagcatcagag

SEQ ID NO: 24331 - RNA, 90 nt, synthetic construct
  misc_feature 1..90: note = engineered ribonucleic acid scaffold (ERS) sequence
  source 1..90: mol_type = other RNA
acctgtagttctatctgatttactctgactacagtcaccagcgactatgtcgtagtgggtaaagctccctcttcggagggagcatcagag

SEQ ID NO: 24332 - RNA, 89 nt, synthetic construct
  misc_feature 1..89: note = engineered ribonucleic acid scaffold (ERS) sequence
  source 1..89: mol_type = other RNA
acctgtagttctatctgattgctctgactacagtcaccagcgactatgtcgtagtgggtaaagctccctcttcggagggagcatcagag

SEQ ID NO: 24333 - RNA, 91 nt, synthetic construct
  misc_feature 1..91: note = engineered ribonucleic acid scaffold (ERS) sequence
  source 1..91: mol_type = other RNA
acgagcacttctatatctgattactctgagggctctcaccagcgactatgtcgtagtgggtaaagctccctcttcggagggagcatcagag

SEQ ID NO: 24334 - RNA, 90 nt, synthetic construct
  misc_feature 1..90: note = engineered ribonucleic acid scaffold (ERS) sequence
  source 1..90: mol_type = other RNA
acgagcacttctaatctgattactctgagggctctcaccagcgactatgtcgtagtgggtaaagctccctcttcggagggagcatcagag

SEQ ID NO: 24335 - RNA, 88 nt, synthetic construct
  misc_feature 1..88: note = engineered ribonucleic acid scaffold (ERS) sequence
  source 1..88: mol_type = other RNA
acgagcacttctactgattactctgagggctctcaccagcgactatgtcgtagtgggtaaagctccctcttcggagggagcatcagag

SEQ ID NO: 24336 - RNA, 89 nt, synthetic construct
  misc_feature 1..89: note = engineered ribonucleic acid scaffold (ERS) sequence
  source 1..89: mol_type = other RNA
acgagcacttctaactgattactctgagggctctcaccagcgactatgtcgtagtgggtaaagctccctcttcggagggagcatcagag

SEQ ID NO: 24337 - RNA, 89 nt, synthetic construct
  misc_feature 1..89: note = engineered ribonucleic acid scaffold (ERS) sequence
  source 1..89: mol_type = other RNA
acgagcacttctacctgattactctgagggctctcaccagcgactatgtcgtagtgggtaaagctccctcttcggagggagcatcagag

SEQ ID NO: 24338 - RNA, 89 nt, synthetic construct
  misc_feature 1..89: note = engineered ribonucleic acid scaffold (ERS) sequence
  source 1..89: mol_type = other RNA
acgagcacttctagctgattactctgagggctctcaccagcgactatgtcgtagtgggtaaagctccctcttcggagggagcatcagag

SEQ ID NO: 24339 - RNA, 91 nt, synthetic construct
  misc_feature 1..91: note = engineered ribonucleic acid scaffold (ERS) sequence
  source 1..91: mol_type = other RNA
acgagcacttctattactgattactctgagggctctcaccagcgactatgtcgtagtgggtaaagctccctcttcggagggagcatcagag

SEQ ID NO: 24340 - RNA, 89 nt, synthetic construct
  misc_feature 1..89: note = engineered ribonucleic acid scaffold (ERS) sequence
  source 1..89: mol_type = other RNA
acgagcacttctatatgattactctgagggctctcaccagcgactatgtcgtagtgggtaaagctccctcttcggagggagcatcagag

SEQ ID NO: 24341 - RNA, 89 nt, synthetic construct
  misc_feature 1..89: note = engineered ribonucleic acid scaffold (ERS) sequence
  source 1..89: mol_type = other RNA
acgagcacttctatgtgattactctgagggctctcaccagcgactatgtcgtagtgggtaaagctccctcttcggagggagcatcagag

SEQ ID NO: 24342 - RNA, 89 nt, synthetic construct
  misc_feature 1..89: note = engineered ribonucleic acid scaffold (ERS) sequence
  source 1..89: mol_type = other RNA
acgagcacttctatttgattactctgagggctctcaccagcgactatgtcgtagtgggtaaagctccctcttcggagggagcatcagag

SEQ ID NO: 24343 - RNA, 90 nt, synthetic construct
  misc_feature 1..90: note = engineered ribonucleic acid scaffold (ERS) sequence
  source 1..90: mol_type = other RNA
acgagcacttctatcttgattactctgagggctctcaccagcgactatgtcgtagtgggtaaagctccctcttcggagggagcatcagag

SEQ ID NO: 24344 - RNA, 89 nt, synthetic construct
  misc_feature 1..89: note = engineered ribonucleic acid scaffold (ERS) sequence
  source 1..89: mol_type = other RNA
acgagcacttctatcagattactctgagggctctcaccagcgactatgtcgtagtgggtaaagctccctcttcggagggagcatcagag

SEQ ID NO: 24345 - RNA, 89 nt, synthetic construct
  misc_feature 1..89: note = engineered ribonucleic acid scaffold (ERS) sequence
  source 1..89: mol_type = other RNA
acgagcacttctatcggattactctgagggctctcaccagcgactatgtcgtagtgggtaaagctccctcttcggagggagcatcagag

SEQ ID NO: 24346 - RNA, 90 nt, synthetic construct
  misc_feature 1..90: note = engineered ribonucleic acid scaffold (ERS) sequence
  source 1..90: mol_type = other RNA
acgagcacttctatctgaattactctgagggctctcaccagcgactatgtcgtagtgggtaaagctccctcttcggagggagcatcagag

SEQ ID NO: 24347 - RNA, 90 nt, synthetic construct
  misc_feature 1..90: note = engineered ribonucleic acid scaffold (ERS) sequence
  source 1..90: mol_type = other RNA
acgagcacttctatctgtattactctgagggctctcaccagcgactatgtcgtagtgggtaaagctccctcttcggagggagcatcagag

SEQ ID NO: 24348 - RNA, 89 nt, synthetic construct
  misc_feature 1..89: note = engineered ribonucleic acid scaffold (ERS) sequence
  source 1..89: mol_type = other RNA
acgagcacttctatctggttactctgagggctctcaccagcgactatgtcgtagtgggtaaagctccctcttcggagggagcatcagag

SEQ ID NO: 24349 - RNA, 89 nt, synthetic construct
  misc_feature 1..89: note = engineered ribonucleic acid scaffold (ERS) sequence
  source 1..89: mol_type = other RNA
acgagcacttctatctgtttactctgagggctctcaccagcgactatgtcgtagtgggtaaagctccctcttcggagggagcatcagag

SEQ ID NO: 24350 - RNA, 90 nt, synthetic construct
  misc_feature 1..90: note = engineered ribonucleic acid scaffold (ERS) sequence
  source 1..90: mol_type = other RNA
acgagcacttctatctgatttactctgagggctctcaccagcgactatgtcgtagtgggtaaagctccctcttcggagggagcatcagag

SEQ ID NO: 24351 - RNA, 89 nt, synthetic construct
  misc_feature 1..89: note = engineered ribonucleic acid scaffold (ERS) sequence
  source 1..89: mol_type = other RNA
acgagcacttctatctgattgctctgagggctctcaccagcgactatgtcgtagtgggtaaagctccctcttcggagggagcatcagag

SEQ ID NO: 24352 - RNA, 91 nt, synthetic construct
  misc_feature 1..91: note = engineered ribonucleic acid scaffold (ERS) sequence
  source 1..91: mol_type = other RNA
acgaggtgttctatatctgattactctgacacctctcaccagcgactatgtcgtagtgggtaaagctccctcttcggagggagcatcagag

SEQ ID NO: 24353 - RNA, 90 nt, synthetic construct
  misc_feature 1..90: note = engineered ribonucleic acid scaffold (ERS) sequence
  source 1..90: mol_type = other RNA
acgaggtgttctaatctgattactctgacacctctcaccagcgactatgtcgtagtgggtaaagctccctcttcggagggagcatcagag

SEQ ID NO: 24354 - RNA, 88 nt, synthetic construct
  misc_feature 1..88: note = engineered ribonucleic acid scaffold (ERS) sequence
  source 1..88: mol_type = other RNA
acgaggtgttctactgattactctgacacctctcaccagcgactatgtcgtagtgggtaaagctccctcttcggagggagcatcagag

SEQ ID NO: 24355 - RNA, 89 nt, synthetic construct
  misc_feature 1..89: note = engineered ribonucleic acid scaffold (ERS) sequence
  source 1..89: mol_type = other RNA
acgaggtgttctaactgattactctgacacctctcaccagcgactatgtcgtagtgggtaaagctccctcttcggagggagcatcagag

SEQ ID NO: 24356 - RNA, 89 nt, synthetic construct
  misc_feature 1..89: note = engineered ribonucleic acid scaffold (ERS) sequence
  source 1..89: mol_type = other RNA
acgaggtgttctacctgattactctgacacctctcaccagcgactatgtcgtagtgggtaaagctccctcttcggagggagcatcagag

SEQ ID NO: 24357 - RNA, 89 nt, synthetic construct
  misc_feature 1..89: note = engineered ribonucleic acid scaffold (ERS) sequence
  source 1..89: mol_type = other RNA
acgaggtgttctagctgattactctgacacctctcaccagcgactatgtcgtagtgggtaaagctccctcttcggagggagcatcagag

SEQ ID NO: 24358 - RNA, 91 nt, synthetic construct
  misc_feature 1..91: note = engineered ribonucleic acid scaffold (ERS) sequence
  source 1..91: mol_type = other RNA
acgaggtgttctattactgattactctgacacctctcaccagcgactatgtcgtagtgggtaaagctccctcttcggagggagcatcagag

SEQ ID NO: 24359 - RNA, 89 nt, synthetic construct
  misc_feature 1..89: note = engineered ribonucleic acid scaffold (ERS) sequence
  source 1..89: mol_type = other RNA
acgaggtgttctatatgattactctgacacctctcaccagcgactatgtcgtagtgggtaaagctccctcttcggagggagcatcagag

SEQ ID NO: 24360 - RNA, 89 nt, synthetic construct
  misc_feature 1..89: note = engineered ribonucleic acid scaffold (ERS) sequence
  source 1..89: mol_type = other RNA
acgaggtgttctatgtgattactctgacacctctcaccagcgactatgtcgtagtgggtaaagctccctcttcggagggagcatcagag

SEQ ID NO: 24361 - RNA, 89 nt, synthetic construct
  misc_feature 1..89: note = engineered ribonucleic acid scaffold (ERS) sequence
  source 1..89: mol_type = other RNA
acgaggtgttctatttgattactctgacacctctcaccagcgactatgtcgtagtgggtaaagctccctcttcggagggagcatcagag

SEQ ID NO: 24362 - RNA, 90 nt, synthetic construct
  misc_feature 1..90: note = engineered ribonucleic acid scaffold (ERS) sequence
  source 1..90: mol_type = other RNA
acgaggtgttctatcttgattactctgacacctctcaccagcgactatgtcgtagtgggtaaagctccctcttcggagggagcatcagag

SEQ ID NO: 24363 - RNA, 89 nt, synthetic construct
  misc_feature 1..89: note = engineered ribonucleic acid scaffold (ERS) sequence
  source 1..89: mol_type = other RNA
acgaggtgttctatcagattactctgacacctctcaccagcgactatgtcgtagtgggtaaagctccctcttcggagggagcatcagag

SEQ ID NO: 24364 - RNA, 89 nt, synthetic construct
  misc_feature 1..89: note = engineered ribonucleic acid scaffold (ERS) sequence
  source 1..89: mol_type = other RNA
acgaggtgttctatcggattactctgacacctctcaccagcgactatgtcgtagtgggtaaagctccctcttcggagggagcatcagag

SEQ ID NO: 24365 - RNA, 90 nt, synthetic construct
  misc_feature 1..90: note = engineered ribonucleic acid scaffold (ERS) sequence
  source 1..90: mol_type = other RNA
acgaggtgttctatctgaattactctgacacctctcaccagcgactatgtcgtagtgggtaaagctccctcttcggagggagcatcagag

SEQ ID NO: 24366 - RNA, 90 nt, synthetic construct
  misc_feature 1..90: note = engineered ribonucleic acid scaffold (ERS) sequence
  source 1..90: mol_type = other RNA
acgaggtgttctatctgtattactctgacacctctcaccagcgactatgtcgtagtgggtaaagctccctcttcggagggagcatcagag

SEQ ID NO: 24367 - RNA, 89 nt, synthetic construct
  misc_feature 1..89: note = engineered ribonucleic acid scaffold (ERS) sequence
  source 1..89: mol_type = other RNA
acgaggtgttctatctggttactctgacacctctcaccagcgactatgtcgtagtgggtaaagctccctcttcggagggagcatcagag

SEQ ID NO: 24368 - RNA, 89 nt, synthetic construct
  misc_feature 1..89: note = engineered ribonucleic acid scaffold (ERS) sequence
  source 1..89: mol_type = other RNA
acgaggtgttctatctgtttactctgacacctctcaccagcgactatgtcgtagtgggtaaagctccctcttcggagggagcatcagag

SEQ ID NO: 24369 - RNA, 90 nt, synthetic construct
  misc_feature 1..90: note = engineered ribonucleic acid scaffold (ERS) sequence
  source 1..90: mol_type = other RNA
acgaggtgttctatctgatttactctgacacctctcaccagcgactatgtcgtagtgggtaaagctccctcttcggagggagcatcagag

SEQ ID NO: 24370 - RNA, 89 nt, synthetic construct
  misc_feature 1..89: note = engineered ribonucleic acid scaffold (ERS) sequence
  source 1..89: mol_type = other RNA
acgaggtgttctatctgattgctctgacacctctcaccagcgactatgtcgtagtgggtaaagctccctcttcggagggagcatcagag

SEQ ID NO: 24371 - RNA, 91 nt, synthetic construct
  misc_feature 1..91: note = engineered ribonucleic acid scaffold (ERS) sequence
  source 1..91: mol_type = other RNA
acgggactttctatatctgattactctgaagtccctcaccagcgactatgtcgtagtgggtaaagctccctcttcggagggagcatcagag

SEQ ID NO: 24372 - RNA, 90 nt, synthetic construct
  misc_feature 1..90: note = engineered ribonucleic acid scaffold (ERS) sequence
  source 1..90: mol_type = other RNA
acgggactttctaatctgattactctgaagtccctcaccagcgactatgtcgtagtgggtaaagctccctcttcggagggagcatcagag

SEQ ID NO: 24373 - RNA, 88 nt, synthetic construct
  misc_feature 1..88: note = engineered ribonucleic acid scaffold (ERS) sequence
  source 1..88: mol_type = other RNA
acgggactttctactgattactctgaagtccctcaccagcgactatgtcgtagtgggtaaagctccctcttcggagggagcatcagag

SEQ ID NO: 24374 - RNA, 89 nt, synthetic construct
  misc_feature 1..89: note = engineered ribonucleic acid scaffold (ERS) sequence
  source 1..89: mol_type = other RNA
acgggactttctaactgattactctgaagtccctcaccagcgactatgtcgtagtgggtaaagctccctcttcggagggagcatcagag

SEQ ID NO: 24375 - RNA, 89 nt, synthetic construct
  misc_feature 1..89: note = engineered ribonucleic acid scaffold (ERS) sequence
  source 1..89: mol_type = other RNA
acgggactttctacctgattactctgaagtccctcaccagcgactatgtcgtagtgggtaaagctccctcttcggagggagcatcagag

SEQ ID NO: 24376 - RNA, 89 nt, synthetic construct
  misc_feature 1..89: note = engineered ribonucleic acid scaffold (ERS) sequence
  source 1..89: mol_type = other RNA
acgggactttctagctgattactctgaagtccctcaccagcgactatgtcgtagtgggtaaagctccctcttcggagggagcatcagag

SEQ ID NO: 24377 - RNA, 91 nt, synthetic construct
  misc_feature 1..91: note = engineered ribonucleic acid scaffold (ERS) sequence
  source 1..91: mol_type = other RNA
acgggactttctattactgattactctgaagtccctcaccagcgactatgtcgtagtgggtaaagctccctcttcggagggagcatcagag

SEQ ID NO: 24378 - RNA, 89 nt, synthetic construct
  misc_feature 1..89: note = engineered ribonucleic acid scaffold (ERS) sequence
  source 1..89: mol_type = other RNA
acgggactttctatatgattactctgaagtccctcaccagcgactatgtcgtagtgggtaaagctccctcttcggagggagcatcagag

SEQ ID NO: 24379 - RNA, 89 nt, synthetic construct
  misc_feature 1..89: note = engineered ribonucleic acid scaffold (ERS) sequence
  source 1..89: mol_type = other RNA
acgggactttctatgtgattactctgaagtccctcaccagcgactatgtcgtagtgggtaaagctccctcttcggagggagcatcagag

SEQ ID NO: 24380 - RNA, 89 nt, synthetic construct
  misc_feature 1..89: note = engineered ribonucleic acid scaffold (ERS) sequence
  source 1..89: mol_type = other RNA
acgggactttctatttgattactctgaagtccctcaccagcgactatgtcgtagtgggtaaagctccctcttcggagggagcatcagag

SEQ ID NO: 24381 - RNA, 90 nt, synthetic construct
  misc_feature 1..90: note = engineered ribonucleic acid scaffold (ERS) sequence
  source 1..90: mol_type = other RNA
acgggactttctatcttgattactctgaagtccctcaccagcgactatgtcgtagtgggtaaagctccctcttcggagggagcatcagag

SEQ ID NO: 24382 - RNA, 89 nt, synthetic construct
  misc_feature 1..89: note = engineered ribonucleic acid scaffold (ERS) sequence
  source 1..89: mol_type = other RNA
acgggactttctatcagattactctgaagtccctcaccagcgactatgtcgtagtgggtaaagctccctcttcggagggagcatcagag

SEQ ID NO: 24383 - RNA, 89 nt, synthetic construct
  misc_feature 1..89: note = engineered ribonucleic acid scaffold (ERS) sequence
  source 1..89: mol_type = other RNA
acgggactttctatcggattactctgaagtccctcaccagcgactatgtcgtagtgggtaaagctccctcttcggagggagcatcagag

SEQ ID NO: 24384 - RNA, 90 nt, synthetic construct
  misc_feature 1..90: note = engineered ribonucleic acid scaffold (ERS) sequence
  source 1..90: mol_type = other RNA
acgggactttctatctgaattactctgaagtccctcaccagcgactatgtcgtagtgggtaaagctccctcttcggagggagcatcagag

SEQ ID NO: 24385 - RNA, 90 nt, synthetic construct
  misc_feature 1..90: note = engineered ribonucleic acid scaffold (ERS) sequence
  source 1..90: mol_type = other RNA
acgggactttctatctgtattactctgaagtccctcaccagcgactatgtcgtagtgggtaaagctccctcttcggagggagcatcagag

SEQ ID NO: 24386 - RNA, 89 nt, synthetic construct
  misc_feature 1..89: note = engineered ribonucleic acid scaffold (ERS) sequence
  source 1..89: mol_type = other RNA
acgggactttctatctggttactctgaagtccctcaccagcgactatgtcgtagtgggtaaagctccctcttcggagggagcatcagag

SEQ ID NO: 24387 - RNA, 89 nt, synthetic construct
  misc_feature 1..89: note = engineered ribonucleic acid scaffold (ERS) sequence
  source 1..89: mol_type = other RNA
acgggactttctatctgtttactctgaagtccctcaccagcgactatgtcgtagtgggtaaagctccctcttcggagggagcatcagag

SEQ ID NO: 24388 - RNA, 90 nt, synthetic construct
  misc_feature 1..90: note = engineered ribonucleic acid scaffold (ERS) sequence
  source 1..90: mol_type = other RNA
acgggactttctatctgatttactctgaagtccctcaccagcgactatgtcgtagtgggtaaagctccctcttcggagggagcatcagag

SEQ ID NO: 24389 - RNA, 89 nt, synthetic construct
  misc_feature 1..89: note = engineered ribonucleic acid scaffold (ERS) sequence
  source 1..89: mol_type = other RNA
acgggactttctatctgattgctctgaagtccctcaccagcgactatgtcgtagtgggtaaagctccctcttcggagggagcatcagag

SEQ ID NO: 24390 - RNA, 91 nt, synthetic construct
  misc_feature 1..91: note = engineered ribonucleic acid scaffold (ERS) sequence
  source 1..91: mol_type = other RNA
acgggcaattctatatctgattactctgattgccctcaccagcgactatgtcgtagtgggtaaagctccctcttcggagggagcatcagag

SEQ ID NO: 24391 - RNA, 90 nt, synthetic construct
  misc_feature 1..90: note = engineered ribonucleic acid scaffold (ERS) sequence
  source 1..90: mol_type = other RNA
acgggcaattctaatctgattactctgattgccctcaccagcgactatgtcgtagtgggtaaagctccctcttcggagggagcatcagag

SEQ ID NO: 24392 - RNA, 88 nt, synthetic construct
  misc_feature 1..88: note = engineered ribonucleic acid scaffold (ERS) sequence
  source 1..88: mol_type = other RNA
acgggcaattctactgattactctgattgccctcaccagcgactatgtcgtagtgggtaaagctccctcttcggagggagcatcagag

SEQ ID NO: 24393 - RNA, 89 nt, synthetic construct
  misc_feature 1..89: note = engineered ribonucleic acid scaffold (ERS) sequence
  source 1..89: mol_type = other RNA
acgggcaattctaactgattactctgattgccctcaccagcgactatgtcgtagtgggtaaagctccctcttcggagggagcatcagag

SEQ ID NO: 24394 - RNA, 89 nt, synthetic construct
  misc_feature 1..89: note = engineered ribonucleic acid scaffold (ERS) sequence
  source 1..89: mol_type = other RNA
acgggcaattctacctgattactctgattgccctcaccagcgactatgtcgtagtgggtaaagctccctcttcggagggagcatcagag

SEQ ID NO: 24395 - RNA, 89 nt, synthetic construct
  misc_feature 1..89: note = engineered ribonucleic acid scaffold (ERS) sequence
  source 1..89: mol_type = other RNA
acgggcaattctagctgattactctgattgccctcaccagcgactatgtcgtagtgggtaaagctccctcttcggagggagcatcagag

SEQ ID NO: 24396 - RNA, 91 nt, synthetic construct
  misc_feature 1..91: note = engineered ribonucleic acid scaffold (ERS) sequence
  source 1..91: mol_type = other RNA
acgggcaattctattactgattactctgattgccctcaccagcgactatgtcgtagtgggtaaagctccctcttcggagggagcatcagag

SEQ ID NO: 24397 - RNA, 89 nt, synthetic construct
  misc_feature 1..89: note = engineered ribonucleic acid scaffold (ERS) sequence
  source 1..89: mol_type = other RNA
acgggcaattctatatgattactctgattgccctcaccagcgactatgtcgtagtgggtaaagctccctcttcggagggagcatcagag

SEQ ID NO: 24398 - RNA, 89 nt, synthetic construct
  misc_feature 1..89: note = engineered ribonucleic acid scaffold (ERS) sequence
  source 1..89: mol_type = other RNA
acgggcaattctatgtgattactctgattgccctcaccagcgactatgtcgtagtgggtaaagctccctcttcggagggagcatcagag

SEQ ID NO: 24399 - RNA, 89 nt, synthetic construct
  misc_feature 1..89: note = engineered ribonucleic acid scaffold (ERS) sequence
  source 1..89: mol_type = other RNA
acgggcaattctatttgattactctgattgccctcaccagcgactatgtcgtagtgggtaaagctccctcttcggagggagcatcagag

SEQ ID NO: 24400 - RNA, 90 nt, synthetic construct
  misc_feature 1..90: note = engineered ribonucleic acid scaffold (ERS) sequence
  source 1..90: mol_type = other RNA
acgggcaattctatcttgattactctgattgccctcaccagcgactatgtcgtagtgggtaaagctccctcttcggagggagcatcagag

SEQ ID NO: 24401 - RNA, 89 nt, synthetic construct
  misc_feature 1..89: note = engineered ribonucleic acid scaffold (ERS) sequence
  source 1..89: mol_type = other RNA
acgggcaattctatcagattactctgattgccctcaccagcgactatgtcgtagtgggtaaagctccctcttcggagggagcatcagag

SEQ ID NO: 24402 - RNA, 89 nt, synthetic construct
  misc_feature 1..89: note = engineered ribonucleic acid scaffold (ERS) sequence
  source 1..89: mol_type = other RNA
acgggcaattctatcggattactctgattgccctcaccagcgactatgtcgtagtgggtaaagctccctcttcggagggagcatcagag

SEQ ID NO: 24403 - RNA, 90 nt, synthetic construct
  misc_feature 1..90: note = engineered ribonucleic acid scaffold (ERS) sequence
  source 1..90: mol_type = other RNA
acgggcaattctatctgaattactctgattgccctcaccagcgactatgtcgtagtgggtaaagctccctcttcggagggagcatcagag

SEQ ID NO: 24404 - RNA, 90 nt, synthetic construct
  misc_feature 1..90: note = engineered ribonucleic acid scaffold (ERS) sequence
  source 1..90: mol_type = other RNA
acgggcaattctatctgtattactctgattgccctcaccagcgactatgtcgtagtgggtaaagctccctcttcggagggagcatcagag

SEQ ID NO: 24405 - RNA, 89 nt, synthetic construct
  misc_feature 1..89: note = engineered ribonucleic acid scaffold (ERS) sequence
  source 1..89: mol_type = other RNA
acgggcaattctatctggttactctgattgccctcaccagcgactatgtcgtagtgggtaaagctccctcttcggagggagcatcagag

SEQ ID NO: 24406 - RNA, 89 nt, synthetic construct
  misc_feature 1..89: note = engineered ribonucleic acid scaffold (ERS) sequence
  source 1..89: mol_type = other RNA
acgggcaattctatctgtttactctgattgccctcaccagcgactatgtcgtagtgggtaaagctccctcttcggagggagcatcagag

SEQ ID NO: 24407 - RNA, 90 nt, synthetic construct
  misc_feature 1..90: note = engineered ribonucleic acid scaffold (ERS) sequence
  source 1..90: mol_type = other RNA
acgggcaattctatctgatttactctgattgccctcaccagcgactatgtcgtagtgggtaaagctccctcttcggagggagcatcagag

SEQ ID NO: 24408 - RNA, 89 nt, synthetic construct
  misc_feature 1..89: note = engineered ribonucleic acid scaffold (ERS) sequence
  source 1..89: mol_type = other RNA
acgggcaattctatctgattgctctgattgccctcaccagcgactatgtcgtagtgggtaaagctccctcttcggagggagcatcagag

SEQ ID NO: 24409 - RNA, 91 nt, synthetic construct
  misc_feature 1..91: note = engineered ribonucleic acid scaffold (ERS) sequence
  source 1..91: mol_type = other RNA
actgtgcgttctatatctgattactctgacgcacatcaccagcgactatgtcgtagtgggtaaagctccctcttcggagggagcatcagag

SEQ ID NO: 24410 - RNA, 90 nt, synthetic construct
  misc_feature 1..90: note = engineered ribonucleic acid scaffold (ERS) sequence
  source 1..90: mol_type = other RNA
actgtgcgttctaatctgattactctgacgcacatcaccagcgactatgtcgtagtgggtaaagctccctcttcggagggagcatcagag

SEQ ID NO: 24411 - RNA, 88 nt, synthetic construct
  misc_feature 1..88: note = engineered ribonucleic acid scaffold (ERS) sequence
  source 1..88: mol_type = other RNA
actgtgcgttctactgattactctgacgcacatcaccagcgactatgtcgtagtgggtaaagctccctcttcggagggagcatcagag

SEQ ID NO: 24412 - RNA, 89 nt, synthetic construct
  misc_feature 1..89: note = engineered ribonucleic acid scaffold (ERS) sequence
  source 1..89: mol_type = other RNA
actgtgcgttctaactgattactctgacgcacatcaccagcgactatgtcgtagtgggtaaagctccctcttcggagggagcatcagag

SEQ ID NO: 24413 - RNA, 89 nt, synthetic construct
  misc_feature 1..89: note = engineered ribonucleic acid scaffold (ERS) sequence
  source 1..89: mol_type = other RNA
actgtgcgttctacctgattactctgacgcacatcaccagcgactatgtcgtagtgggtaaagctccctcttcggagggagcatcagag

SEQ ID NO: 24414 - RNA, 89 nt, synthetic construct
  misc_feature 1..89: note = engineered ribonucleic acid scaffold (ERS) sequence
  source 1..89: mol_type = other RNA
actgtgcgttctagctgattactctgacgcacatcaccagcgactatgtcgtagtgggtaaagctccctcttcggagggagcatcagag

SEQ ID NO: 24415 - RNA, 91 nt, synthetic construct
  misc_feature 1..91: note = engineered ribonucleic acid scaffold (ERS) sequence
  source 1..91: mol_type = other RNA
actgtgcgttctattactgattactctgacgcacatcaccagcgactatgtcgtagtgggtaaagctccctcttcggagggagcatcagag

SEQ ID NO: 24416 - RNA, 89 nt, synthetic construct
  misc_feature 1..89: note = engineered ribonucleic acid scaffold (ERS) sequence
  source 1..89: mol_type = other RNA
actgtgcgttctatatgattactctgacgcacatcaccagcgactatgtcgtagtgggtaaagctccctcttcggagggagcatcagag

SEQ ID NO: 24417 - RNA, 89 nt, synthetic construct
  misc_feature 1..89: note = engineered ribonucleic acid scaffold (ERS) sequence
  source 1..89: mol_type = other RNA
actgtgcgttctatgtgattactctgacgcacatcaccagcgactatgtcgtagtgggtaaagctccctcttcggagggagcatcagag

SEQ ID NO: 24418 - RNA, 89 nt, synthetic construct
  misc_feature 1..89: note = engineered ribonucleic acid scaffold (ERS) sequence
  source 1..89: mol_type = other RNA
actgtgcgttctatttgattactctgacgcacatcaccagcgactatgtcgtagtgggtaaagctccctcttcggagggagcatcagag

SEQ ID NO: 24419 - RNA, 90 nt, synthetic construct
  misc_feature 1..90: note = engineered ribonucleic acid scaffold (ERS) sequence
  source 1..90: mol_type = other RNA
actgtgcgttctatcttgattactctgacgcacatcaccagcgactatgtcgtagtgggtaaagctccctcttcggagggagcatcagag

SEQ ID NO: 24420 - RNA, 89 nt, synthetic construct
  misc_feature 1..89: note = engineered ribonucleic acid scaffold (ERS) sequence
  source 1..89: mol_type = other RNA
actgtgcgttctatcagattactctgacgcacatcaccagcgactatgtcgtagtgggtaaagctccctcttcggagggagcatcagag

SEQ ID NO: 24421 - RNA, 89 nt, synthetic construct
  misc_feature 1..89: note = engineered ribonucleic acid scaffold (ERS) sequence
  source 1..89: mol_type = other RNA
actgtgcgttctatcggattactctgacgcacatcaccagcgactatgtcgtagtgggtaaagctccctcttcggagggagcatcagag

SEQ ID NO: 24422 - RNA, 90 nt, synthetic construct
  misc_feature 1..90: note = engineered ribonucleic acid scaffold (ERS) sequence
  source 1..90: mol_type = other RNA
actgtgcgttctatctgaattactctgacgcacatcaccagcgactatgtcgtagtgggtaaagctccctcttcggagggagcatcagag

SEQ ID NO: 24423 - RNA, 90 nt, synthetic construct
  misc_feature 1..90: note = engineered ribonucleic acid scaffold (ERS) sequence
  source 1..90: mol_type = other RNA
actgtgcgttctatctgtattactctgacgcacatcaccagcgactatgtcgtagtgggtaaagctccctcttcggagggagcatcagag

SEQ ID NO: 24424 - RNA, 89 nt, synthetic construct
  misc_feature 1..89: note = engineered ribonucleic acid scaffold (ERS) sequence
  source 1..89: mol_type = other RNA
actgtgcgttctatctggttactctgacgcacatcaccagcgactatgtcgtagtgggtaaagctccctcttcggagggagcatcagag

SEQ ID NO: 24425 - RNA, 89 nt, synthetic construct
  misc_feature 1..89: note = engineered ribonucleic acid scaffold (ERS) sequence
  source 1..89: mol_type = other RNA
actgtgcgttctatctgtttactctgacgcacatcaccagcgactatgtcgtagtgggtaaagctccctcttcggagggagcatcagag

SEQ ID NO: 24426 - RNA, 90 nt, synthetic construct
  misc_feature 1..90: note = engineered ribonucleic acid scaffold (ERS) sequence
  source 1..90: mol_type = other RNA
actgtgcgttctatctgatttactctgacgcacatcaccagcgactatgtcgtagtgggtaaagctccctcttcggagggagcatcagag

SEQ ID NO: 24427 - RNA, 89 nt, synthetic construct
  misc_feature 1..89: note = engineered ribonucleic acid scaffold (ERS) sequence
  source 1..89: mol_type = other RNA
actgtgcgttctatctgattgctctgacgcacatcaccagcgactatgtcgtagtgggtaaagctccctcttcggagggagcatcagag

SEQ ID NO: 24428 - RNA, 88 nt, synthetic construct
  misc_feature 1..88: note = engineered ribonucleic acid scaffold (ERS) sequence
  source 1..88: mol_type = other RNA
acacacggttctatctgattactctgaccgtgtacaccagcgactatgtcgtatgggtaaagctccctcttcggagggagcatcagag

SEQ ID NO: 24429 - RNA, 88 nt, synthetic construct
  misc_feature 1..88: note = engineered ribonucleic acid scaffold (ERS) sequence
  source 1..88: mol_type = other RNA
acactggtttctatctgattactctgaaccagtacaccagcgactatgtcgtatgggtaaagctccctcttcggagggagcatcagag

SEQ ID NO: 24430 - RNA, 88 nt, synthetic construct
  misc_feature 1..88: note = engineered ribonucleic acid scaffold (ERS) sequence
  source 1..88: mol_type = other RNA
acaggccgttctatctgattactctgacggcctacaccagcgactatgtcgtatgggtaaagctccctcttcggagggagcatcagag

SEQ ID NO: 24431 - RNA, 88 nt, synthetic construct
  misc_feature 1..88: note = engineered ribonucleic acid scaffold (ERS) sequence
  source 1..88: mol_type = other RNA
acaggtccttctatctgattactctgaggacctacaccagcgactatgtcgtatgggtaaagctccctcttcggagggagcatcagag

SEQ ID NO: 24432 - RNA, 88 nt, synthetic construct
  misc_feature 1..88: note = engineered ribonucleic acid scaffold (ERS) sequence
  source 1..88: mol_type = other RNA
accagcaattctatctgattactctgattgctgacaccagcgactatgtcgtatgggtaaagctccctcttcggagggagcatcagag

SEQ ID NO: 24433 - RNA, 88 nt, synthetic construct
  misc_feature 1..88: note = engineered ribonucleic acid scaffold (ERS) sequence
  source 1..88: mol_type = other RNA
accgagacttctatctgattactctgaggctcgacaccagcgactatgtcgtatgggtaaagctccctcttcggagggagcatcagag

SEQ ID NO: 24434 - RNA, 88 nt, synthetic construct
  misc_feature 1..88: note = engineered ribonucleic acid scaffold (ERS) sequence
  source 1..88: mol_type = other RNA
acctgtagttctatctgattactctgactacagacaccagcgactatgtcgtatgggtaaagctccctcttcggagggagcatcagag

SEQ ID NO: 24435 - RNA, 88 nt, synthetic construct
  misc_feature 1..88: note = engineered ribonucleic acid scaffold (ERS) sequence
  source 1..88: mol_type = other RNA
acgagcacttctatctgattactctgagggctcacaccagcgactatgtcgtatgggtaaagctccctcttcggagggagcatcagag

SEQ ID NO: 24436 - RNA, 88 nt, synthetic construct
  misc_feature 1..88: note = engineered ribonucleic acid scaffold (ERS) sequence
  source 1..88: mol_type = other RNA
acgaggtgttctatctgattactctgacacctcacaccagcgactatgtcgtatgggtaaagctccctcttcggagggagcatcagag

SEQ ID NO: 24437 - RNA, 88 nt, synthetic construct
  misc_feature 1..88: note = engineered ribonucleic acid scaffold (ERS) sequence
  source 1..88: mol_type = other RNA
acgggactttctatctgattactctgaagtcccacaccagcgactatgtcgtatgggtaaagctccctcttcggagggagcatcagag

SEQ ID NO: 24438 - RNA, 88 nt, synthetic construct
  misc_feature 1..88: note = engineered ribonucleic acid scaffold (ERS) sequence
  source 1..88: mol_type = other RNA
acgggcaattctatctgattactctgattgcccacaccagcgactatgtcgtatgggtaaagctccctcttcggagggagcatcagag

SEQ ID NO: 24439 - RNA, 88 nt, synthetic construct
  misc_feature 1..88: note = engineered ribonucleic acid scaffold (ERS) sequence
  source 1..88: mol_type = other RNA
actgtgcgttctatctgattactctgacgcacaacaccagcgactatgtcgtatgggtaaagctccctcttcggagggagcatcagag

SEQ ID NO: 24440 - RNA, 88 nt, synthetic construct
  misc_feature 1..88: note = engineered ribonucleic acid scaffold (ERS) sequence
  source 1..88: mol_type = other RNA
acacacggttctatctgattactctgaccgtgtgcaccagcgactatgtcgtatgggtaaagctccctcttcggagggagcatcagag

SEQ ID NO: 24441 - RNA, 88 nt, synthetic construct
  misc_feature 1..88: note = engineered ribonucleic acid scaffold (ERS) sequence
  source 1..88: mol_type = other RNA
acactggtttctatctgattactctgaaccagtgcaccagcgactatgtcgtatgggtaaagctccctcttcggagggagcatcagag

SEQ ID NO: 24442 - RNA, 88 nt, synthetic construct
  misc_feature 1..88: note = engineered ribonucleic acid scaffold (ERS) sequence
  source 1..88: mol_type = other RNA
acaggccgttctatctgattactctgacggcctgcaccagcgactatgtcgtatgggtaaagctccctcttcggagggagcatcagag

SEQ ID NO: 24443 - RNA, 88 nt, synthetic construct
  misc_feature 1..88: note = engineered ribonucleic acid scaffold (ERS) sequence
  source 1..88: mol_type = other RNA
acaggtccttctatctgattactctgaggacctgcaccagcgactatgtcgtatgggtaaagctccctcttcggagggagcatcagag

SEQ ID NO: 24444 - RNA, 88 nt, synthetic construct
  misc_feature 1..88: note = engineered ribonucleic acid scaffold (ERS) sequence
  source 1..88: mol_type = other RNA
accagcaattctatctgattactctgattgctggcaccagcgactatgtcgtatgggtaaagctccctcttcggagggagcatcagag

SEQ ID NO: 24445 - RNA, 88 nt, synthetic construct
  misc_feature 1..88: note = engineered ribonucleic acid scaffold (ERS) sequence
  source 1..88: mol_type = other RNA
accgagacttctatctgattactctgaggctcggcaccagcgactatgtcgtatgggtaaagctccctcttcggagggagcatcagag

SEQ ID NO: 24446 - RNA, 88 nt, synthetic construct
  misc_feature 1..88: note = engineered ribonucleic acid scaffold (ERS) sequence
  source 1..88: mol_type = other RNA
acctgtagttctatctgattactctgactacaggcaccagcgactatgtcgtatgggtaaagctccctcttcggagggagcatcagag

SEQ ID NO: 24447 - RNA, 88 nt, synthetic construct
  misc_feature 1..88: note = engineered ribonucleic acid scaffold (ERS) sequence
  source 1..88: mol_type = other RNA
acgagcacttctatctgattactctgagggctcgcaccagcgactatgtcgtatgggtaaagctccctcttcggagggagcatcagag

SEQ ID NO: 24448 - RNA, 88 nt, synthetic construct
  misc_feature 1..88: note = engineered ribonucleic acid scaffold (ERS) sequence
  source 1..88: mol_type = other RNA
acgaggtgttctatctgattactctgacacctcgcaccagcgactatgtcgtatgggtaaagctccctcttcggagggagcatcagag

SEQ ID NO: 24449 - RNA, 88 nt, synthetic construct
  misc_feature 1..88: note = engineered ribonucleic acid scaffold (ERS) sequence
  source 1..88: mol_type = other RNA
acgggactttctatctgattactctgaagtcccgcaccagcgactatgtcgtatgggtaaagctccctcttcggagggagcatcagag

SEQ ID NO: 24450 - RNA, 88 nt, synthetic construct
  misc_feature 1..88: note = engineered ribonucleic acid scaffold (ERS) sequence
  source 1..88: mol_type = other RNA
acgggcaattctatctgattactctgattgcccgcaccagcgactatgtcgtatgggtaaagctccctcttcggagggagcatcagag

SEQ ID NO: 24451 - RNA, 88 nt, synthetic construct
  misc_feature 1..88: note = engineered ribonucleic acid scaffold (ERS) sequence
  source 1..88: mol_type = other RNA
actgtgcgttctatctgattactctgacgcacagcaccagcgactatgtcgtatgggtaaagctccctcttcggagggagcatcagag

SEQ ID NO: 24452 - RNA, 88 nt, synthetic construct
  misc_feature 1..88: note = engineered ribonucleic acid scaffold (ERS) sequence
  source 1..88: mol_type = other RNA
acacacggttctatctgattactctgaccgtgttgaccagcgactatgtcgtatgggtaaagctccctcttcggagggagcatcagag

SEQ ID NO: 24453 - RNA, 88 nt, synthetic construct
  misc_feature 1..88: note = engineered ribonucleic acid scaffold (ERS) sequence
  source 1..88: mol_type = other RNA
acactggtttctatctgattactctgaaccagttgaccagcgactatgtcgtatgggtaaagctccctcttcggagggagcatcagag

SEQ ID NO: 24454 - RNA, 88 nt, synthetic construct
  misc_feature 1..88: note = engineered ribonucleic acid scaffold (ERS) sequence
  source 1..88: mol_type = other RNA
acaggccgttctatctgattactctgacggccttgaccagcgactatgtcgtatgggtaaagctccctcttcggagggagcatcagag

SEQ ID NO: 24455 - RNA, 88 nt, synthetic construct
  misc_feature 1..88: note = engineered ribonucleic acid scaffold (ERS) sequence
  source 1..88: mol_type = other RNA
acaggtccttctatctgattactctgaggaccttgaccagcgactatgtcgtatgggtaaagctccctcttcggagggagcatcagag

SEQ ID NO: 24456 - RNA, 88 nt, synthetic construct
  misc_feature 1..88: note = engineered ribonucleic acid scaffold (ERS) sequence
  source 1..88: mol_type = other RNA
accagcaattctatctgattactctgattgctgtgaccagcgactatgtcgtatgggtaaagctccctcttcggagggagcatcagag

SEQ ID NO: 24457 - RNA, 88 nt, synthetic construct
  misc_feature 1..88: note = engineered ribonucleic acid scaffold (ERS) sequence
  source 1..88: mol_type = other RNA
accgagacttctatctgattactctgaggctcgtgaccagcgactatgtcgtatgggtaaagctccctcttcggagggagcatcagag

SEQ ID NO: 24458 - RNA, 88 nt, synthetic construct
  misc_feature 1..88: note = engineered ribonucleic acid scaffold (ERS) sequence
  source 1..88: mol_type = other RNA
acctgtagttctatctgattactctgactacagtgaccagcgactatgtcgtatgggtaaagctccctcttcggagggagcatcagag

SEQ ID NO: 24459 - RNA, 88 nt, synthetic construct
  misc_feature 1..88: note = engineered ribonucleic acid scaffold (ERS) sequence
  source 1..88: mol_type = other RNA
acgagcacttctatctgattactctgagggctctgaccagcgactatgtcgtatgggtaaagctccctcttcggagggagcatcagag

SEQ ID NO: 24460 - RNA, 88 nt, synthetic construct
  misc_feature 1..88: note = engineered ribonucleic acid scaffold (ERS) sequence
  source 1..88: mol_type = other RNA
acgaggtgttctatctgattactctgacacctctgaccagcgactatgtcgtatgggtaaagctccctcttcggagggagcatcagag

SEQ ID NO: 24461 - RNA, 88 nt, synthetic construct
  misc_feature 1..88: note = engineered ribonucleic acid scaffold (ERS) sequence
  source 1..88: mol_type = other RNA
acgggactttctatctgattactctgaagtccctgaccagcgactatgtcgtatgggtaaagctccctcttcggagggagcatcagag

SEQ ID NO: 24462 - RNA, 88 nt, synthetic construct
  misc_feature 1..88: note = engineered ribonucleic acid scaffold (ERS) sequence
  source 1..88: mol_type = other RNA
acgggcaattctatctgattactctgattgccctgaccagcgactatgtcgtatgggtaaagctccctcttcggagggagcatcagag

SEQ ID NO: 24463 - RNA, 88 nt, synthetic construct
  misc_feature 1..88: note = engineered ribonucleic acid scaffold (ERS) sequence
  source 1..88: mol_type = other RNA
actgtgcgttctatctgattactctgacgcacatgaccagcgactatgtcgtatgggtaaagctccctcttcggagggagcatcagag

SEQ ID NO: 24464 - RNA, 88 nt, synthetic construct
  misc_feature 1..88: note = engineered ribonucleic acid scaffold (ERS) sequence
  source 1..88: mol_type = other RNA
acacacggttctatctgattactctgaccgtgttgaccagcgactatgtcgtatggctaaagctccctcttcggagggagcatcagag

SEQ ID NO: 24465 - RNA, 88 nt, synthetic construct
  misc_feature 1..88: note = engineered ribonucleic acid scaffold (ERS) sequence
  source 1..88: mol_type = other RNA
acactggtttctatctgattactctgaaccagttgaccagcgactatgtcgtatggctaaagctccctcttcggagggagcatcagag

SEQ ID NO: 24466 - RNA, 88 nt, synthetic construct
  misc_feature 1..88: note = engineered ribonucleic acid scaffold (ERS) sequence
  source 1..88: mol_type = other RNA
acaggccgttctatctgattactctgacggccttgaccagcgactatgtcgtatggctaaagctccctcttcggagggagcatcagag

SEQ ID NO: 24467 - RNA, 88 nt, synthetic construct
  misc_feature 1..88: note = engineered ribonucleic acid scaffold (ERS) sequence
  source 1..88: mol_type = other RNA
acaggtccttctatctgattactctgaggaccttgaccagcgactatgtcgtatggctaaagctccctcttcggagggagcatcagag

SEQ ID NO: 24468 - RNA, 88 nt, synthetic construct
  misc_feature 1..88: note = engineered ribonucleic acid scaffold (ERS) sequence
  source 1..88: mol_type = other RNA
accagcaattctatctgattactctgattgctgtgaccagcgactatgtcgtatggctaaagctccctcttcggagggagcatcagag

SEQ ID NO: 24469 - RNA, 88 nt, synthetic construct
  misc_feature 1..88: note = engineered ribonucleic acid scaffold (ERS) sequence
  source 1..88: mol_type = other RNA
accgagacttctatctgattactctgaggctcgtgaccagcgactatgtcgtatggctaaagctccctcttcggagggagcatcagag

SEQ ID NO: 24470 - RNA, 88 nt, synthetic construct
  misc_feature 1..88: note = engineered ribonucleic acid scaffold (ERS) sequence
  source 1..88: mol_type = other RNA
acctgtagttctatctgattactctgactacagtgaccagcgactatgtcgtatggctaaagctccctcttcggagggagcatcagag

SEQ ID NO: 24471 - RNA, 88 nt, synthetic construct
  misc_feature 1..88: note = engineered ribonucleic acid scaffold (ERS) sequence
  source 1..88: mol_type = other RNA
acgagcacttctatctgattactctgagggctctgaccagcgactatgtcgtatggctaaagctccctcttcggagggagcatcagag

SEQ ID NO: 24472 - RNA, 88 nt, synthetic construct
  misc_feature 1..88: note = engineered ribonucleic acid scaffold (ERS) sequence
  source 1..88: mol_type = other RNA
acgaggtgttctatctgattactctgacacctctgaccagcgactatgtcgtatggctaaagctccctcttcggagggagcatcagag

SEQ ID NO: 24473 - RNA, 88 nt, synthetic construct
  misc_feature 1..88: note = engineered ribonucleic acid scaffold (ERS) sequence
  source 1..88: mol_type = other RNA
acgggactttctatctgattactctgaagtccctgaccagcgactatgtcgtatggctaaagctccctcttcggagggagcatcagag

SEQ ID NO: 24474 - RNA, 88 nt, synthetic construct
  misc_feature 1..88: note = engineered ribonucleic acid scaffold (ERS) sequence
  source 1..88: mol_type = other RNA
acgggcaattctatctgattactctgattgccctgaccagcgactatgtcgtatggctaaagctccctcttcggagggagcatcagag

SEQ ID NO: 24475 - RNA, 88 nt, synthetic construct
  misc_feature 1..88: note = engineered ribonucleic acid scaffold (ERS) sequence
  source 1..88: mol_type = other RNA
actgtgcgttctatctgattactctgacgcacatgaccagcgactatgtcgtatggctaaagctccctcttcggagggagcatcagag

SEQ ID NO: 24476 - RNA, 89 nt, synthetic construct
  misc_feature 1..89: note = engineered ribonucleic acid scaffold (ERS) sequence
  source 1..89: mol_type = other RNA
acacacggttctatctgattactctgaccgtgttgaccagcgactatgtcgtatgggctaaagctccctcttcggagggagcatcagag

SEQ ID NO: 24477 - RNA, 89 nt, synthetic construct
  misc_feature 1..89: note = engineered ribonucleic acid scaffold (ERS) sequence
  source 1..89: mol_type = other RNA
acactggtttctatctgattactctgaaccagttgaccagcgactatgtcgtatgggctaaagctccctcttcggagggagcatcagag

SEQ ID NO: 24478 - RNA, 89 nt, synthetic construct
  misc_feature 1..89: note = engineered ribonucleic acid scaffold (ERS) sequence
  source 1..89: mol_type = other RNA
acaggccgttctatctgattactctgacggccttgaccagcgactatgtcgtatgggctaaagctccctcttcggagggagcatcagag

SEQ ID NO: 24479 - RNA, 89 nt, synthetic construct
  misc_feature 1..89: note = engineered ribonucleic acid scaffold (ERS) sequence
  source 1..89: mol_type = other RNA
acaggtccttctatctgattactctgaggaccttgaccagcgactatgtcgtatgggctaaagctccctcttcggagggagcatcagag

SEQ ID NO: 24480 - RNA, 89 nt, synthetic construct
  misc_feature 1..89: note = engineered ribonucleic acid scaffold (ERS) sequence
  source 1..89: mol_type = other RNA
accagcaattctatctgattactctgattgctgtgaccagcgactatgtcgtatgggctaaagctccctcttcggagggagcatcagag

SEQ ID NO: 24481 - RNA, 89 nt, synthetic construct
  misc_feature 1..89: note = engineered ribonucleic acid scaffold (ERS) sequence
  source 1..89: mol_type = other RNA
accgagacttctatctgattactctgaggctcgtgaccagcgactatgtcgtatgggctaaagctccctcttcggagggagcatcagag

SEQ ID NO: 24482 - RNA, 89 nt, synthetic construct
  misc_feature 1..89: note = engineered ribonucleic acid scaffold (ERS) sequence
  source 1..89: mol_type = other RNA
acctgtagttctatctgattactctgactacagtgaccagcgactatgtcgtatgggctaaagctccctcttcggagggagcatcagag

SEQ ID NO: 24483 - RNA, 89 nt, synthetic construct
  misc_feature 1..89: note = engineered ribonucleic acid scaffold (ERS) sequence
  source 1..89: mol_type = other RNA
acgagcacttctatctgattactctgagggctctgaccagcgactatgtcgtatgggctaaagctccctcttcggagggagcatcagag

SEQ ID NO: 24484 - RNA, 89 nt, synthetic construct
  misc_feature 1..89: note = engineered ribonucleic acid scaffold (ERS) sequence
  source 1..89: mol_type = other RNA
acgaggtgttctatctgattactctgacacctctgaccagcgactatgtcgtatgggctaaagctccctcttcggagggagcatcagag

SEQ ID NO: 24485 - RNA, 89 nt, synthetic construct
  misc_feature 1..89: note = engineered ribonucleic acid scaffold (ERS) sequence
  source 1..89: mol_type = other RNA
acgggactttctatctgattactctgaagtccctgaccagcgactatgtcgtatgggctaaagctccctcttcggagggagcatcagag

SEQ ID NO: 24486 - RNA, 89 nt, synthetic construct
  misc_feature 1..89: note = engineered ribonucleic acid scaffold (ERS) sequence
  source 1..89: mol_type = other RNA
acgggcaattctatctgattactctgattgccctgaccagcgactatgtcgtatgggctaaagctccctcttcggagggagcatcagag

SEQ ID NO: 24487 - RNA, 89 nt, synthetic construct
  misc_feature 1..89: note = engineered ribonucleic acid scaffold (ERS) sequence
  source 1..89: mol_type = other RNA
actgtgcgttctatctgattactctgacgcacatgaccagcgactatgtcgtatgggctaaagctccctcttcggagggagcatcagag

SEQ ID NO: 24488 - RNA, 88 nt, synthetic construct
  misc_feature 1..88: note = engineered ribonucleic acid scaffold (ERS) sequence
  source 1..88: mol_type = other RNA
acacacggttctatctgattactctgaccgtgttccccagcgactatgtcgtatgggtaaagctccctcttcggagggagcatcagag

SEQ ID NO: 24489 - RNA, 88 nt, synthetic construct
  misc_feature 1..88: note = engineered ribonucleic acid scaffold (ERS) sequence
  source 1..88: mol_type = other RNA
acactggtttctatctgattactctgaaccagttccccagcgactatgtcgtatgggtaaagctccctcttcggagggagcatcagag

SEQ ID NO: 24490 - RNA, 88 nt, synthetic construct
  misc_feature 1..88: note = engineered ribonucleic acid scaffold (ERS) sequence
  source 1..88: mol_type = other RNA
acaggccgttctatctgattactctgacggccttccccagcgactatgtcgtatgggtaaagctccctcttcggagggagcatcagag

SEQ ID NO: 24491 - RNA, 88 nt, synthetic construct
  misc_feature 1..88: note = engineered ribonucleic acid scaffold (ERS) sequence
  source 1..88: mol_type = other RNA
acaggtccttctatctgattactctgaggaccttccccagcgactatgtcgtatgggtaaagctccctcttcggagggagcatcagag

SEQ ID NO: 24492 - RNA, 88 nt, synthetic construct
  misc_feature 1..88: note = engineered ribonucleic acid scaffold (ERS) sequence
  source 1..88: mol_type = other RNA
accagcaattctatctgattactctgattgctgtccccagcgactatgtcgtatgggtaaagctccctcttcggagggagcatcagag

SEQ ID NO: 24493 - RNA, 88 nt, synthetic construct
  misc_feature 1..88: note = engineered ribonucleic acid scaffold (ERS) sequence
  source 1..88: mol_type = other RNA
accgagacttctatctgattactctgaggctcgtccccagcgactatgtcgtatgggtaaagctccctcttcggagggagcatcagag

SEQ ID NO: 24494 - RNA, 88 nt, synthetic construct
  misc_feature 1..88: note = engineered ribonucleic acid scaffold (ERS) sequence
  source 1..88: mol_type = other RNA
acctgtagttctatctgattactctgactacagtccccagcgactatgtcgtatgggtaaagctccctcttcggagggagcatcagag

SEQ ID NO: 24495 - RNA, 88 nt, synthetic construct
  misc_feature 1..88: note = engineered ribonucleic acid scaffold (ERS) sequence
  source 1..88: mol_type = other RNA
acgagcacttctatctgattactctgagggctctccccagcgactatgtcgtatgggtaaagctccctcttcggagggagcatcagag

SEQ ID NO: 24496 - RNA, 88 nt, synthetic construct
  misc_feature 1..88: note = engineered ribonucleic acid scaffold (ERS) sequence
  source 1..88: mol_type = other RNA
acgaggtgttctatctgattactctgacacctctccccagcgactatgtcgtatgggtaaagctccctcttcggagggagcatcagag

SEQ ID NO: 24497 - RNA, 88 nt, synthetic construct
  misc_feature 1..88: note = engineered ribonucleic acid scaffold (ERS) sequence
  source 1..88: mol_type = other RNA
acgggactttctatctgattactctgaagtccctccccagcgactatgtcgtatgggtaaagctccctcttcggagggagcatcagag

SEQ ID NO: 24498 - RNA, 88 nt, synthetic construct
  misc_feature 1..88: note = engineered ribonucleic acid scaffold (ERS) sequence
  source 1..88: mol_type = other RNA
acgggcaattctatctgattactctgattgccctccccagcgactatgtcgtatgggtaaagctccctcttcggagggagcatcagag

SEQ ID NO: 24499 - RNA, 88 nt, synthetic construct
  misc_feature 1..88: note = engineered ribonucleic acid scaffold (ERS) sequence
  source 1..88: mol_type = other RNA
actgtgcgttctatctgattactctgacgcacatccccagcgactatgtcgtatgggtaaagctccctcttcggagggagcatcagag

SEQ ID NO: 24500 - RNA, 88 nt, synthetic construct
  misc_feature 1..88: note = engineered ribonucleic acid scaffold (ERS) sequence
  source 1..88: mol_type = other RNA
acacacggttctatctgattactctgaccgtgttcgccagcgactatgtcgtatgggtaaagctccctcttcggagggagcatcagag

SEQ ID NO: 24501 - RNA, 88 nt, synthetic construct
  misc_feature 1..88: note = engineered ribonucleic acid scaffold (ERS) sequence
  source 1..88: mol_type = other RNA
acactggtttctatctgattactctgaaccagttcgccagcgactatgtcgtatgggtaaagctccctcttcggagggagcatcagag

SEQ ID NO: 24502 - RNA, 88 nt, synthetic construct
  misc_feature 1..88: note = engineered ribonucleic acid scaffold (ERS) sequence
  source 1..88: mol_type = other RNA
acaggccgttctatctgattactctgacggccttcgccagcgactatgtcgtatgggtaaagctccctcttcggagggagcatcagag

SEQ ID NO: 24503 - RNA, 88 nt, synthetic construct
  misc_feature 1..88: note = engineered ribonucleic acid scaffold (ERS) sequence
  source 1..88: mol_type = other RNA
acaggtccttctatctgattactctgaggaccttcgccagcgactatgtcgtatgggtaaagctccctcttcggagggagcatcagag

SEQ ID NO: 24504 - RNA, 88 nt, synthetic construct
  misc_feature 1..88: note = engineered ribonucleic acid scaffold (ERS) sequence
  source 1..88: mol_type = other RNA
accagcaattctatctgattactctgattgctgtcgccagcgactatgtcgtatgggtaaagctccctcttcggagggagcatcagag

SEQ ID NO: 24505 - RNA, 88 nt, synthetic construct
  misc_feature 1..88: note = engineered ribonucleic acid scaffold (ERS) sequence
  source 1..88: mol_type = other RNA
accgagacttctatctgattactctgaggctcgtcgccagcgactatgtcgtatgggtaaagctccctcttcggagggagcatcagag

SEQ ID NO: 24506 - RNA, 88 nt, synthetic construct
  misc_feature 1..88: note = engineered ribonucleic acid scaffold (ERS) sequence
  source 1..88: mol_type = other RNA
acctgtagttctatctgattactctgactacagtcgccagcgactatgtcgtatgggtaaagctccctcttcggagggagcatcagag

SEQ ID NO: 24507 - RNA, 88 nt, synthetic construct
  misc_feature 1..88: note = engineered ribonucleic acid scaffold (ERS) sequence
  source 1..88: mol_type = other RNA
acgagcacttctatctgattactctgagggctctcgccagcgactatgtcgtatgggtaaagctccctcttcggagggagcatcagag

SEQ ID NO: 24508 - RNA, 88 nt, synthetic construct
  misc_feature 1..88: note = engineered ribonucleic acid scaffold (ERS) sequence
  source 1..88: mol_type = other RNA
acgaggtgttctatctgattactctgacacctctcgccagcgactatgtcgtatgggtaaagctccctcttcggagggagcatcagag

SEQ ID NO: 24509 - RNA, 88 nt, synthetic construct
  misc_feature 1..88: note = engineered ribonucleic acid scaffold (ERS) sequence
  source 1..88: mol_type = other RNA
acgggactttctatctgattactctgaagtccctcgccagcgactatgtcgtatgggtaaagctccctcttcggagggagcatcagag

SEQ ID NO: 24510 - RNA, 88 nt, synthetic construct
  misc_feature 1..88: note = engineered ribonucleic acid scaffold (ERS) sequence
  source 1..88: mol_type = other RNA
acgggcaattctatctgattactctgattgccctcgccagcgactatgtcgtatgggtaaagctccctcttcggagggagcatcagag

SEQ ID NO: 24511 - RNA, 88 nt, synthetic construct
  misc_feature 1..88: note = engineered ribonucleic acid scaffold (ERS) sequence
  source 1..88: mol_type = other RNA
actgtgcgttctatctgattactctgacgcacatcgccagcgactatgtcgtatgggtaaagctccctcttcggagggagcatcagag

SEQ ID NO: 24512 - RNA, 89 nt, synthetic construct
  misc_feature 1..89: note = engineered ribonucleic acid scaffold (ERS) sequence
  source 1..89: mol_type = other RNA
acacacggttctatctgattactctgaccgtgttcgccagcgactatgtcgtatggcgtaaagctccctcttcggagggagcatcagag

SEQ ID NO: 24513 - RNA, 89 nt, synthetic construct
  misc_feature 1..89: note = engineered ribonucleic acid scaffold (ERS) sequence
  source 1..89: mol_type = other RNA
acactggtttctatctgattactctgaaccagttcgccagcgactatgtcgtatggcgtaaagctccctcttcggagggagcatcagag

SEQ ID NO: 24514 - RNA, 89 nt, synthetic construct
  misc_feature 1..89: note = engineered ribonucleic acid scaffold (ERS) sequence
  source 1..89: mol_type = other RNA
acaggccgttctatctgattactctgacggccttcgccagcgactatgtcgtatggcgtaaagctccctcttcggagggagcatcagag

SEQ ID NO: 24515 - RNA, 89 nt, synthetic construct
  misc_feature 1..89: note = engineered ribonucleic acid scaffold (ERS) sequence
  source 1..89: mol_type = other RNA
acaggtccttctatctgattactctgaggaccttcgccagcgactatgtcgtatggcgtaaagctccctcttcggagggagcatcagag

SEQ ID NO: 24516 - RNA, 89 nt, synthetic construct
  misc_feature 1..89: note = engineered ribonucleic acid scaffold (ERS) sequence
  source 1..89: mol_type = other RNA
accagcaattctatctgattactctgattgctgtcgccagcgactatgtcgtatggcgtaaagctccctcttcggagggagcatcagag

SEQ ID NO: 24517 - RNA, 89 nt, synthetic construct
  misc_feature 1..89: note = engineered ribonucleic acid scaffold (ERS) sequence
  source 1..89: mol_type = other RNA
accgagacttctatctgattactctgaggctcgtcgccagcgactatgtcgtatggcgtaaagctccctcttcggagggagcatcagag

SEQ ID NO: 24518 - RNA, 89 nt, synthetic construct
  misc_feature 1..89: note = engineered ribonucleic acid scaffold (ERS) sequence
  source 1..89: mol_type = other RNA
acctgtagttctatctgattactctgactacagtcgccagcgactatgtcgtatggcgtaaagctccctcttcggagggagcatcagag

SEQ ID NO: 24519 - RNA, 89 nt, synthetic construct
  misc_feature 1..89: note = engineered ribonucleic acid scaffold (ERS) sequence
  source 1..89: mol_type = other RNA
acgagcacttctatctgattactctgagggctctcgccagcgactatgtcgtatggcgtaaagctccctcttcggagggagcatcagag

SEQ ID NO: 24520 - RNA, 89 nt, synthetic construct
  misc_feature 1..89: note = engineered ribonucleic acid scaffold (ERS) sequence
  source 1..89: mol_type = other RNA
acgaggtgttctatctgattactctgacacctctcgccagcgactatgtcgtatggcgtaaagctccctcttcggagggagcatcagag

SEQ ID NO: 24521 - RNA, 89 nt, synthetic construct
  misc_feature 1..89: note = engineered ribonucleic acid scaffold (ERS) sequence
  source 1..89: mol_type = other RNA
acgggactttctatctgattactctgaagtccctcgccagcgactatgtcgtatggcgtaaagctccctcttcggagggagcatcagag

SEQ ID NO: 24522 - RNA, 89 nt, synthetic construct
  misc_feature 1..89: note = engineered ribonucleic acid scaffold (ERS) sequence
  source 1..89: mol_type = other RNA
acgggcaattctatctgattactctgattgccctcgccagcgactatgtcgtatggcgtaaagctccctcttcggagggagcatcagag

SEQ ID NO: 24523 - RNA, 89 nt, synthetic construct
  misc_feature 1..89: note = engineered ribonucleic acid scaffold (ERS) sequence
  source 1..89: mol_type = other RNA
actgtgcgttctatctgattactctgacgcacatcgccagcgactatgtcgtatggcgtaaagctccctcttcggagggagcatcagag

SEQ ID NO: 24524 - RNA, 88 nt, synthetic construct
  misc_feature 1..88: note = engineered ribonucleic acid scaffold (ERS) sequence
  source 1..88: mol_type = other RNA
acacacggttctatctgattactctgaccgtgttctccagcgactatgtcgtatgggtaaagctccctcttcggagggagcatcagag

SEQ ID NO: 24525 - RNA, 88 nt, synthetic construct
  misc_feature 1..88: note = engineered ribonucleic acid scaffold (ERS) sequence
  source 1..88: mol_type = other RNA
acactggtttctatctgattactctgaaccagttctccagcgactatgtcgtatgggtaaagctccctcttcggagggagcatcagag

SEQ ID NO: 24526 - RNA, 88 nt, synthetic construct
  misc_feature 1..88: note = engineered ribonucleic acid scaffold (ERS) sequence
  source 1..88: mol_type = other RNA
acaggccgttctatctgattactctgacggccttctccagcgactatgtcgtatgggtaaagctccctcttcggagggagcatcagag

SEQ ID NO: 24527 - RNA, 88 nt, synthetic construct
  misc_feature 1..88: note = engineered ribonucleic acid scaffold (ERS) sequence
  source 1..88: mol_type = other RNA
acaggtccttctatctgattactctgaggaccttctccagcgactatgtcgtatgggtaaagctccctcttcggagggagcatcagag

SEQ ID NO: 24528 - RNA, 88 nt, synthetic construct
  misc_feature 1..88: note = engineered ribonucleic acid scaffold (ERS) sequence
  source 1..88: mol_type = other RNA
accagcaattctatctgattactctgattgctgtctccagcgactatgtcgtatgggtaaagctccctcttcggagggagcatcagag

SEQ ID NO: 24529 - RNA, 88 nt, synthetic construct
  misc_feature 1..88: note = engineered ribonucleic acid scaffold (ERS) sequence
  source 1..88: mol_type = other RNA
accgagacttctatctgattactctgaggctcgtctccagcgactatgtcgtatgggtaaagctccctcttcggagggagcatcagag

SEQ ID NO: 24530 - RNA, 88 nt, synthetic construct
  misc_feature 1..88: note = engineered ribonucleic acid scaffold (ERS) sequence
  source 1..88: mol_type = other RNA
acctgtagttctatctgattactctgactacagtctccagcgactatgtcgtatgggtaaagctccctcttcggagggagcatcagag

SEQ ID NO: 24531 - RNA, 88 nt, synthetic construct
  misc_feature 1..88: note = engineered ribonucleic acid scaffold (ERS) sequence
  source 1..88: mol_type = other RNA
acgagcacttctatctgattactctgagggctctctccagcgactatgtcgtatgggtaaagctccctcttcggagggagcatcagag

SEQ ID NO: 24532 - RNA, 88 nt, synthetic construct
  misc_feature 1..88: note = engineered ribonucleic acid scaffold (ERS) sequence
  source 1..88: mol_type = other RNA
acgaggtgttctatctgattactctgacacctctctccagcgactatgtcgtatgggtaaagctccctcttcggagggagcatcagag

SEQ ID NO: 24533 - RNA, 88 nt, synthetic construct
  misc_feature 1..88: note = engineered ribonucleic acid scaffold (ERS) sequence
  source 1..88: mol_type = other RNA
acgggactttctatctgattactctgaagtccctctccagcgactatgtcgtatgggtaaagctccctcttcggagggagcatcagag

SEQ ID NO: 24534 - RNA, 88 nt, synthetic construct
  misc_feature 1..88: note = engineered ribonucleic acid scaffold (ERS) sequence
  source 1..88: mol_type = other RNA
acgggcaattctatctgattactctgattgccctctccagcgactatgtcgtatgggtaaagctccctcttcggagggagcatcagag

SEQ ID NO: 24535 - RNA, 88 nt, synthetic construct
  misc_feature 1..88: note = engineered ribonucleic acid scaffold (ERS) sequence
  source 1..88: mol_type = other RNA
actgtgcgttctatctgattactctgacgcacatctccagcgactatgtcgtatgggtaaagctccctcttcggagggagcatcagag

SEQ ID NO: 24536 - RNA, 88 nt, synthetic construct
  misc_feature 1..88: note = engineered ribonucleic acid scaffold (ERS) sequence
  source 1..88: mol_type = other RNA
acacacggttctatctgattactctgaccgtgttcacctgcgactatgtcgtaagggtaaagctccctcttcggagggagcatcagag

SEQ ID NO: 24537 - RNA, 88 nt, synthetic construct
  misc_feature 1..88: note = engineered ribonucleic acid scaffold (ERS) sequence
  source 1..88: mol_type = other RNA
acactggtttctatctgattactctgaaccagttcacctgcgactatgtcgtaagggtaaagctccctcttcggagggagcatcagag

SEQ ID NO: 24538 - RNA, 88 nt, synthetic construct
  misc_feature 1..88: note = engineered ribonucleic acid scaffold (ERS) sequence
  source 1..88: mol_type = other RNA
acaggccgttctatctgattactctgacggccttcacctgcgactatgtcgtaagggtaaagctccctcttcggagggagcatcagag

SEQ ID NO: 24539 - RNA, 88 nt, synthetic construct
  misc_feature 1..88: note = engineered ribonucleic acid scaffold (ERS) sequence
  source 1..88: mol_type = other RNA
acaggtccttctatctgattactctgaggaccttcacctgcgactatgtcgtaagggtaaagctccctcttcggagggagcatcagag

SEQ ID NO: 24540 - RNA, 88 nt, synthetic construct
  misc_feature 1..88: note = engineered ribonucleic acid scaffold (ERS) sequence
  source 1..88: mol_type = other RNA
accagcaattctatctgattactctgattgctgtcacctgcgactatgtcgtaagggtaaagctccctcttcggagggagcatcagag

SEQ ID NO: 24541 - RNA, 88 nt, synthetic construct
  misc_feature 1..88: note = engineered ribonucleic acid scaffold (ERS) sequence
  source 1..88: mol_type = other RNA
accgagacttctatctgattactctgaggctcgtcacctgcgactatgtcgtaagggtaaagctccctcttcggagggagcatcagag

SEQ ID NO: 24542 - RNA, 88 nt, synthetic construct
  misc_feature 1..88: note = engineered ribonucleic acid scaffold (ERS) sequence
  source 1..88: mol_type = other RNA
acctgtagttctatctgattactctgactacagtcacctgcgactatgtcgtaagggtaaagctccctcttcggagggagcatcagag

SEQ ID NO: 24543 - RNA, 88 nt, synthetic construct
  misc_feature 1..88: note = engineered ribonucleic acid scaffold (ERS) sequence
  source 1..88: mol_type = other RNA
acgagcacttctatctgattactctgagggctctcacctgcgactatgtcgtaagggtaaagctccctcttcggagggagcatcagag

SEQ ID NO: 24544 - RNA, 88 nt, synthetic construct
  misc_feature 1..88: note = engineered ribonucleic acid scaffold (ERS) sequence
  source 1..88: mol_type = other RNA
acgaggtgttctatctgattactctgacacctctcacctgcgactatgtcgtaagggtaaagctccctcttcggagggagcatcagag

SEQ ID NO: 24545 - RNA, 88 nt, synthetic construct
  misc_feature 1..88: note = engineered ribonucleic acid scaffold (ERS) sequence
  source 1..88: mol_type = other RNA
acgggactttctatctgattactctgaagtccctcacctgcgactatgtcgtaagggtaaagctccctcttcggagggagcatcagag

SEQ ID NO: 24546 - RNA, 88 nt, synthetic construct
  misc_feature 1..88: note = engineered ribonucleic acid scaffold (ERS) sequence
  source 1..88: mol_type = other RNA
acgggcaattctatctgattactctgattgccctcacctgcgactatgtcgtaagggtaaagctccctcttcggagggagcatcagag

SEQ ID NO: 24547 - RNA, 88 nt, synthetic construct
  misc_feature 1..88: note = engineered ribonucleic acid scaffold (ERS) sequence
  source 1..88: mol_type = other RNA
actgtgcgttctatctgattactctgacgcacatcacctgcgactatgtcgtaagggtaaagctccctcttcggagggagcatcagag

SEQ ID NO: 24548 - RNA, 88 nt, synthetic construct
  misc_feature 1..88: note = engineered ribonucleic acid scaffold (ERS) sequence
  source 1..88: mol_type = other RNA
acacacggttctatctgattactctgaccgtgttcaccagagactatgtcttatgggtaaagctccctcttcggagggagcatcagag

SEQ ID NO: 24549 - RNA, 88 nt, synthetic construct
  misc_feature 1..88: note = engineered ribonucleic acid scaffold (ERS) sequence
  source 1..88: mol_type = other RNA
acactggtttctatctgattactctgaaccagttcaccagagactatgtcttatgggtaaagctccctcttcggagggagcatcagag

SEQ ID NO: 24550 - RNA, 88 nt, synthetic construct
  misc_feature 1..88: note = engineered ribonucleic acid scaffold (ERS) sequence
  source 1..88: mol_type = other RNA
acaggccgttctatctgattactctgacggccttcaccagagactatgtcttatgggtaaagctccctcttcggagggagcatcagag

SEQ ID NO: 24551 - RNA, 88 nt, synthetic construct
  misc_feature 1..88: note = engineered ribonucleic acid scaffold (ERS) sequence
  source 1..88: mol_type = other RNA
acaggtccttctatctgattactctgaggaccttcaccagagactatgtcttatgggtaaagctccctcttcggagggagcatcagag

SEQ ID NO: 24552 - RNA, 88 nt, synthetic construct
  misc_feature 1..88: note = engineered ribonucleic acid scaffold (ERS) sequence
  source 1..88: mol_type = other RNA
accagcaattctatctgattactctgattgctgtcaccagagactatgtcttatgggtaaagctccctcttcggagggagcatcagag

SEQ ID NO: 24553 - RNA, 88 nt, synthetic construct
  misc_feature 1..88: note = engineered ribonucleic acid scaffold (ERS) sequence
  source 1..88: mol_type = other RNA
accgagacttctatctgattactctgaggctcgtcaccagagactatgtcttatgggtaaagctccctcttcggagggagcatcagag

SEQ ID NO: 24554 - RNA, 88 nt, synthetic construct
  misc_feature 1..88: note = engineered ribonucleic acid scaffold (ERS) sequence
  source 1..88: mol_type = other RNA
acctgtagttctatctgattactctgactacagtcaccagagactatgtcttatgggtaaagctccctcttcggagggagcatcagag

SEQ ID NO: 24555 - RNA, 88 nt, synthetic construct
  misc_feature 1..88: note = engineered ribonucleic acid scaffold (ERS) sequence
  source 1..88: mol_type = other RNA
acgagcacttctatctgattactctgagggctctcaccagagactatgtcttatgggtaaagctccctcttcggagggagcatcagag

SEQ ID NO: 24556 - RNA, 88 nt, synthetic construct
  misc_feature 1..88: note = engineered ribonucleic acid scaffold (ERS) sequence
  source 1..88: mol_type = other RNA
acgaggtgttctatctgattactctgacacctctcaccagagactatgtcttatgggtaaagctccctcttcggagggagcatcagag

SEQ ID NO: 24557 - RNA, 88 nt, synthetic construct
  misc_feature 1..88: note = engineered ribonucleic acid scaffold (ERS) sequence
  source 1..88: mol_type = other RNA
acgggactttctatctgattactctgaagtccctcaccagagactatgtcttatgggtaaagctccctcttcggagggagcatcagag

SEQ ID NO: 24558 - RNA, 88 nt, synthetic construct
  misc_feature 1..88: note = engineered ribonucleic acid scaffold (ERS) sequence
  source 1..88: mol_type = other RNA
acgggcaattctatctgattactctgattgccctcaccagagactatgtcttatgggtaaagctccctcttcggagggagcatcagag

SEQ ID NO: 24559 - RNA, 88 nt, synthetic construct
  misc_feature 1..88: note = engineered ribonucleic acid scaffold (ERS) sequence
  source 1..88: mol_type = other RNA
actgtgcgttctatctgattactctgacgcacatcaccagagactatgtcttatgggtaaagctccctcttcggagggagcatcagag

SEQ ID NO: 24560 - RNA, 88 nt, synthetic construct
  misc_feature 1..88: note = engineered ribonucleic acid scaffold (ERS) sequence
  source 1..88: mol_type = other RNA
acacacggttctatctgattactctgaccgtgttcaccagggactatgtcctatgggtaaagctccctcttcggagggagcatcagag

SEQ ID NO: 24561 - RNA, 88 nt, synthetic construct
  misc_feature 1..88: note = engineered ribonucleic acid scaffold (ERS) sequence
  source 1..88: mol_type = other RNA
acactggtttctatctgattactctgaaccagttcaccagggactatgtcctatgggtaaagctccctcttcggagggagcatcagag

SEQ ID NO: 24562 - RNA, 88 nt, synthetic construct
  misc_feature 1..88: note = engineered ribonucleic acid scaffold (ERS) sequence
  source 1..88: mol_type = other RNA
acaggccgttctatctgattactctgacggccttcaccagggactatgtcctatgggtaaagctccctcttcggagggagcatcagag

SEQ ID NO: 24563 - RNA, 88 nt, synthetic construct
  misc_feature 1..88: note = engineered ribonucleic acid scaffold (ERS) sequence
  source 1..88: mol_type = other RNA
acaggtccttctatctgattactctgaggaccttcaccagggactatgtcctatgggtaaagctccctcttcggagggagcatcagag

SEQ ID NO: 24564 - RNA, 88 nt, synthetic construct
  misc_feature 1..88: note = engineered ribonucleic acid scaffold (ERS) sequence
  source 1..88: mol_type = other RNA
accagcaattctatctgattactctgattgctgtcaccagggactatgtcctatgggtaaagctccctcttcggagggagcatcagag

SEQ ID NO: 24565 - RNA, 88 nt, synthetic construct
  misc_feature 1..88: note = engineered ribonucleic acid scaffold (ERS) sequence
  source 1..88: mol_type = other RNA
accgagacttctatctgattactctgaggctcgtcaccagggactatgtcctatgggtaaagctccctcttcggagggagcatcagag

SEQ ID NO: 24566 - RNA, 88 nt, synthetic construct
  misc_feature 1..88: note = engineered ribonucleic acid scaffold (ERS) sequence
  source 1..88: mol_type = other RNA
acctgtagttctatctgattactctgactacagtcaccagggactatgtcctatgggtaaagctccctcttcggagggagcatcagag

SEQ ID NO: 24567 - RNA, 88 nt, synthetic construct
  misc_feature 1..88: note = engineered ribonucleic acid scaffold (ERS) sequence
  source 1..88: mol_type = other RNA
acgagcacttctatctgattactctgagggctctcaccagggactatgtcctatgggtaaagctccctcttcggagggagcatcagag

SEQ ID NO: 24568 - RNA, 88 nt, synthetic construct
  misc_feature 1..88: note = engineered ribonucleic acid scaffold (ERS) sequence
  source 1..88: mol_type = other RNA
acgaggtgttctatctgattactctgacacctctcaccagggactatgtcctatgggtaaagctccctcttcggagggagcatcagag

SEQ ID NO: 24569 - RNA, 88 nt, synthetic construct
  misc_feature 1..88: note = engineered ribonucleic acid scaffold (ERS) sequence
  source 1..88: mol_type = other RNA
acgggactttctatctgattactctgaagtccctcaccagggactatgtcctatgggtaaagctccctcttcggagggagcatcagag

SEQ ID NO: 24570 - RNA, 88 nt, synthetic construct
  misc_feature 1..88: note = engineered ribonucleic acid scaffold (ERS) sequence
  source 1..88: mol_type = other RNA
acgggcaattctatctgattactctgattgccctcaccagggactatgtcctatgggtaaagctccctcttcggagggagcatcagag

SEQ ID NO: 24571 - RNA, 88 nt, synthetic construct
  misc_feature 1..88: note = engineered ribonucleic acid scaffold (ERS) sequence
  source 1..88: mol_type = other RNA
actgtgcgttctatctgattactctgacgcacatcaccagggactatgtcctatgggtaaagctccctcttcggagggagcatcagag

SEQ ID NO: 24572 - RNA, 89 nt, synthetic construct
  misc_feature 1..89: note = engineered ribonucleic acid scaffold (ERS) sequence
  source 1..89: mol_type = other RNA
acacacggttctatctgattactctgaccgtgttcaccaggcactatgtgctattgggtaaagctccctcttcggagggagcatcagag

SEQ ID NO: 24573 - RNA, 89 nt, synthetic construct
  misc_feature 1..89: note = engineered ribonucleic acid scaffold (ERS) sequence
  source 1..89: mol_type = other RNA
acactggtttctatctgattactctgaaccagttcaccaggcactatgtgctattgggtaaagctccctcttcggagggagcatcagag

SEQ ID NO: 24574 - RNA, 89 nt, synthetic construct
  misc_feature 1..89: note = engineered ribonucleic acid scaffold (ERS) sequence
  source 1..89: mol_type = other RNA
acaggccgttctatctgattactctgacggccttcaccaggcactatgtgctattgggtaaagctccctcttcggagggagcatcagag
